United States Patent Application Publication US 2006/0134663 A1 - sequence listing, part 133

SEQ ID NO: 443947 - DNA, 1063 bp, Homo Sapiens
  misc_feature (116)..(135): n is a, c, g, or t
  misc_feature (272)..(280): n is a, c, g, or t
  misc_feature (467)..(557): n is a, c, g, or t
  misc_feature (1038)..(1038): n is a, c, g, or t
agttatgggtcccggaacccgcctttgggggacgaggggggcctcaaaataaaccccccgggctggggattttaaaaatccgcccccaccaattggggacccctgctccccggggnnnnnnnnnnnnnnnnnnnnccattctccgggaagcaaaattttccaaggccgccagcttatgccggtttgttttacccccatttttccctttaaaaaatttaatatttcccttaagggcgttaaaattctggtaggtaggtgttccaaattatttnnnnnnnnnagaaggtaggttcctttcccaaaagatccccaggttagcagtttttcccagtccccgacggtgtataaaaggacgggccagtgcctaagttttaaatcggctcccctttagggcccccttttttcaaaaaaaatgggttcgcgtaaacttgggcccccccggggggtactttagagcgcgccccccnnnnnnnnnnnnnnnnnnnnnnnnnnnnnnnnnnnnnnnnnnnnnnnnnnnnnnnnnnnnnnnnnnnnnnnnnnnnnnnnnnnnnnnnnnnaactcttgaatctgaatagttcctgccgtggggagaggtattgttcagggaaaatgtgatcgggattttagtgtggctgtaaacacagtcttcccgaaaggcttactgacgtttgaatgtgcaaatggtatgacgaaagatgtagggctctttcgttgaacttctctacggcgggcgggcggacacgtgttccaggtggacttgcctgccggccaggctttgagtctgaacttcctctatctgctgcttggctcctggcacacgcggtgccctggcatgatggtcctccctggccaggagcgagtcctaaggaaattcattccattgaccggactcctcccatgataggcccatggcttctctgctggccttagttcttggcccttcagattccctggggatataaggcccaagcggatctccctgcagccagccagcagacagcccagggtttccgcccagaagagccctcatgttgcangtccacatcccggaaattccggacc

SEQ ID NO: 443948 - DNA, 533 bp, Homo Sapiens
ttttccacagggtttctcaagagtaagagttcttattatgataagttgtctatacacacacacaaaatattcttttacaactttcaatcataaggtttcatcagtatcaattttctcatttgagtaagttgtccacagaaaggcttccccacattcgttatatttgtagggtttatcattactatgagttctctcatgaacaagttttgagccacgagtaaaggtcttcccgaattccttacgttgataaagcttctcaccagtatgaaatctctgatgaacactaagttgatagccactaccaaaggccttcccacagtctttacattcataagacttctcattagtatggactctctcatgcttaactaggcttgaaccccaactgaaggccttcccacattccttacatttgaaaggtttctcaccggtatgaattttctgatgttgagtaaggtgatagccacgactaaaagccttcccacattctttacattcatagggtttctcccctgtggaaagtaggtaccggc

SEQ ID NO: 443949 - DNA, 477 bp, Homo Sapiens
  misc_feature (155)..(360): n is a, c, g, or t
  misc_feature (362)..(362): n is a, c, g, or t
  misc_feature (382)..(382): n is a, c, g, or t
  misc_feature (400)..(400): n is a, c, g, or t
  misc_feature (429)..(429): n is a, c, g, or t
  misc_feature (435)..(435): n is a, c, g, or t
  misc_feature (441)..(441): n is a, c, g, or t
tttttaggaaatacgcaagttagcaatttattatgataactctgcaatcttttcagccactctttaaggttcctggtcatccattctgggcacagtgtgacatttacctgaacagagaggagaatggcactagaagatgagggagatttggtgcnnnnnnnnnnnnnnnnnnnnnnnnnnnnnnnnnnnnnnnnnnnnnnnnnnnnnnnnnnnnnnnnnnnnnnnnnnnnnnnnnnnnnnnnnnnnnnnnnnnnnnnnnnnnnnnnnnnnnnnnnnnnnnnnnnnnnnnnnnnnnnnnnnnnnnnnnnnnnnnnnnnnnnnnnnnnnnnnnnnnnnnnnnnnnnnnnnnnnnnnnnnnnntnagctgcttcttgggcacctntccctcctggcatttggngttcgtgggcctaaccacttttttccaantagggngatganaccagggttttggaaaattggaaatcccaaggggga

SEQ ID NO: 443950 - DNA, 744 bp, Homo Sapiens
  misc_feature (66)..(66): n is a, c, g, or t
  misc_feature (103)..(103): n is a, c, g, or t
  misc_feature (629)..(629): n is a, c, g, or t
  misc_feature (695)..(695): n is a, c, g, or t
cctcaactcttttctcccttcaacaatgaccaaaatctccctccgtaaaggaaaactctgtcccgnaaatgtggaacgccgccgcctgccctgtggggtcccngcggccccaggcccctggactgcggtaggaacggtcaggaggactgcatcaggcccgtgaagcgcttgcccgccagcgactttcccttcttcttggccagcagcaaatcctggtaagcatttgaccggaggaagcgggcatagctgtcactcttcatcagcttgtagatgtgctcctgggcgtcttcaaatgtatatctccctccatctttgacattttgactggttatctcatagctgtgagaatccaggttgattgcacttggagcccctggagccagaaactcttgccagatttcttctaccctcttggccacatcctgtaggggttgtttcttaagatcttggacagccagccagaacctgaggttttctgaactgaattcggactccaggaatcgtagaaactggtcccgccccacctggtccttcaatatctcatcgaaagagaagccccatctttttactcgctgttggctgggctctttgctcatctctatgtcccacaaagcaacgtcatcgctganccaagggttggatggctcagctggtgttatcaaagggtcatattccacatattgttccgtgtaggnaattaaactttcagccactttggacattttcaaacaatgtctgtcgatc

SEQ ID NO: 443951 - DNA, 478 bp, Homo Sapiens
  misc_feature (278)..(314): n is a, c, g, or t
  misc_feature (354)..(354): n is a, c, g, or t
  misc_feature (372)..(372): n is a, c, g, or t
  misc_feature (385)..(385): n is a, c, g, or t
  misc_feature (400)..(400): n is a, c, g, or t
  misc_feature (447)..(447): n is a, c, g, or t
gtttctgttttgtttttccttttgcactgatatataccataccaacattgcaagatgcaagtgtggaaactggagtttaaataaaattacaggcaaaactaccccatcccagtgcggttgctgtacatatctacagtacaatttttggaatgtattgccatttaagaacatagaaactttctacagacaatttcacatacagaatacgtacaccttttagaaaaaaaggcaaatatttatcttacagagagcattgtattttacatttgcctgcacgnnnnnnnnnnnnnnnnnnnnnnnnnnnnnnnnnnnnnacatactaggatttattaaagtgaccataaggtgcccgangcgggttttctaatgggnaagcagactgggnttcaccaacacaggngcaggattgggtgggacaggctttcggggacctttcttcccctgggncacacgggcagatccggtccccaagggcagg

SEQ ID NO: 443952 - DNA, 1559 bp, Homo Sapiens
  misc_feature (86)..(86): n is a, c, g, or t
  misc_feature (260)..(260): n is a, c, g, or t
  misc_feature (406)..(406): n is a, c, g, or t
agtacaatcaaaggcacaggagaggagtcagtgggggcaggggaagaaggcagaaaaaaaataccaattaagtgtgaaatccagcnagctattgggccacatagggtgagggactggacagacagattgtgcatggagtgtaaacattttcccccgctgttccctgctctgagagcatgaggaggctcaagagaactctggtcaagccttctgcccctcttatgtctgtctacaagggtgtcttctgctcaaagcccccnaaaacatttgtaagagggggcttcaagtgggaggcgggggcttggcctgggtgctgagttaacgggccagtgacttggcacttctgaccctccctgtgcactctgcagctgtgccaggccctgccccacacccagcccaggcaccnaagccctccctccggccttctctgctggggcttcacacacccagtacagagcagggaatgttctgcaagtgcagcctggctggcttctctcccagccacgtttacagggagcatcaggaccagggctttcaagagccacaaactcaaaagaatgtgagagctgaaattaccttcaaccttagagatcactcatctaacttctacttttttaatgtgagaaaacaggccccgggaaataaaaatatgtcactcaaagccaatgagtgacagaatcagaactagaatccacatcttctggtaactcgtctagagtttgttacactacataaaacttcccaaacgtaagaagggagaaggggaaacaaaaattcttcaagtttcacccccaccacatcctgttgagggtggagggaagtgagtatttcctggccttgttagctgctgtcctcctgcacccttaaaatatgtaaaaatacttatcctgcctcaaagactgcaagagtgacattccacaccgactgtaagtgcacagtccccggatgtctcttgtcatcaccctcaatgagaggaagagggaaagttctgcagcctgccttggccctagtgagactcttaaccagaccagaggtgggaggtcaccacctcactttctgatctacacttcctagaggaaggacagttggggaatggggcttcctactcccttgggcccatgggaggcccaacttcacatccatccaggaaacccaccaaagctattactctaagcccagatccgacccagtcggcaccaaaccacaggaaggataagagttctaggtgcagagggaggaacagagagaggccaagccaatggctgatactccgcagaccctgtaataacactggcaccaaaccccagctggagccagtggccatggcaaatgcaacttctgagtattttgtcttcattttttgcaagcagcatcagtgcatgatgcaacaaaagttgaaagcacggaggtagaaatgctcactcacccaagaaagggtgcagtttggtccttagagaatggatcccctcctctccctgagctgagaagagaggagcagtattgaggaagatcctgggtgagattctcccttcaaggggagtacctgggcagctcccagc

SEQ ID NO: 443953 - DNA, 1754 bp, Homo Sapiens
cgggtaggtaaagtatttgcggaggggagacgatgaaagtaggagcgtggcgccccgaatcccgaagatctatgcggtgtgtagtcagcggtaattctgcggtgttatgggaggtattgacataagttcggggaaagtttataggccttttggcgaagggggcaggggtttgaagctgtgagcttacataagatggggcgcggatttgataaaagaaatgaggaggcaccgggtaaaggtgggccctcggtggagggattctttgtggcggggccccgccgtgtagggtggaattaaaaagggtattgtgtggataggggggcagattttgttgcagggggagatagtttattgtcgccagtagacccaaacaataagacaaattgcaaaagaaactcagtctgctcccaaaagcagatacatcccagcagtcgagtcacagagggccatctcagtttctctccccttccaaccaccccttccaacctctctatagcacacacaaccaagaaagtgcatatgtagttgggttttcccctccaagtgcacaaagcgcaagaacattccaaaatttgcctttggtgaatcaactcaaaacactgagaagttattacacctccccacacacacacagtgtaacttttggggtgggtgtggtgagatgtttgatatttgtatatataatatatctatacctagagagagagactatgtacagtgcatcagcaagcttcaataaaggaagacgccagcaagaggcacagcaagagacacaggctgtccatctttaagacataagtaggaaggaagatttcttgcttcatcacccgttaactgcaccaagccattcctatggcctggaactatccttttggacctgcccagtattttcaattgtctgtctgcttaacctgaccttgcaaatatttaccagcccaacctccccaaggagactcgcagagagaaacatggatccgatcagcttttcctttttataaactggaaataactgtgaagagtccatagctagggggcagatagctatttccaaagccagttccaaggcacctcaaagcagttcagtcctgaataattgtgctttgttcttataaggtaaatcccatgggttagccagccggtctctctttgcagtggccgttaattaggaggaagagacagatgggggttgggggcagagggaggttctgagagagcaggagaggctggggcagttgagaaagtcagccgactaaaaccagcagagcgtggtggtgggaacatgcaaccagaagtggggctcgaaccccacggtaggaagaggaagaacttgtcagcataagttaggaagcagggtagggaaatggctgctgtggaagcatctctctggttttccacctgtgcttacagaagccccattttgctcccaacttcaccatcctgggggaggcagctctatgagtcctctggaggagattctaagaggctccagaagaaaatgcatatgagggctgagcacctgggacagagatggttcctgacccagccccatctgctggggccctgaggcccgtgaagagacattgcttttcctgggccccagttgatcagggcagaggaaaaaaagactccaggaatcttgggcttcttgatggagagatagaacttcttagaatacacatcccgaaaattccggaccggtaccggccgtgagggcgtggcagtgaagcgagggaccgggagcgcgaggagcgcgg

SEQ ID NO: 443954 - DNA, 823 bp, Homo Sapiens
  misc_feature (701)..(701): n is a, c, g, or t
  misc_feature (762)..(762): n is a, c, g, or t
  misc_feature (773)..(773): n is a, c, g, or t
  misc_feature (780)..(780): n is a, c, g, or t
  misc_feature (789)..(789): n is a, c, g, or t
tcaagggtgcagaggccaggcagagtgggtgcagagtgggggatgggcaaccagcctggtaacacctgggtgaggtgagcgagtcaagcccatctggaaatgctaaactcatcagctcagtacctaactgccaatcaacacactgccaatgcgggtgggctaagccgccaggatgcctgcagcagatggacgctgcccatccttgagccagccagctgggggcagagaggtgggtggcgggcacctcatgccagctgagaccaagagtggttgtatacatttctgcagcttgcagatttcatttttttggtcaccctttaagtgtccttctctcccaggatgagtgaggagctgtgctgatgttgggaacttatctttttccagggtccataacatttaggggaattatttgcgggctttcctagtgtattctaagaagttctaactctccatcaagaagcccaagattcctggagtctttttttcctctgccctgatcaactggggcccaggaaaagcaatgtctcttcacgggcctcagggccccagcagatggggctgggtcaggaaccatctctgtcccaggtgctcagccctcatatgcattttcttctggagcctcttagaatctcctccagaggacttcatagagctgcctcccccagggatgggtgaagttggggagcaaaatgggggctttntgttaagtaggaggtgggaaaaccagagagatgttttccacagcagccattttccctaccntttttcctaanttattgntgacaattntttccttttcctaccgtggggtttcgaggcccca

SEQ ID NO: 443955 - DNA, 392 bp, Homo Sapiens
ctgacacatggccaggctgtggtgccagcttaatggagtaggctgtccttggcacttgcatgtgtgaaaggagggttttgcctcttcttgagcatggcttgagttggtaaggaaagctgtaactcacgaagccctgagacctgctacccctaagatcgagcttgttttcagtgactggcttgagtcataggaggaggagtctggtacagctgcaggagagcagggccatctgaagcggtagcattgccaccatctccctctcatctagagcagttttcttatgccttggtttgagctgaatttgatgtgaattcttttgctgcttaataaagtgacctctaggtgcattagaatgcgaaggcaaatagttgcaataaatcacctgcacaagc

SEQ ID NO: 443956 - DNA, 1146 bp, Homo Sapiens
  misc_feature (128)..(136): n is a, c, g, or t
  misc_feature (951)..(951): n is a, c, g, or t
  misc_feature (954)..(954): n is a, c, g, or t
  misc_feature (963)..(963): n is a, c, g, or t
  misc_feature (967)..(967): n is a, c, g, or t
  misc_feature (1009)..(1009): n is a, c, g, or t
  misc_feature (1024)..(1024): n is a, c, g, or t
gggccctttttttccccccagcccaaattagaaaagccaaagacccggttttccggtttaccccccccatgggaggtttcgaaggcccattttggcccaaccctccctgggggtccagggacccgggnnnnnnnnnaagggcaggcctttgttccgggttttgccccgggggaaggttttccccttaatttttcttccacctggcccccctggtttttaaagagatggggggggaaaactttccaaatggtttataaagaaaggtctgtccccacagtggtctggctgtgtttccttacaactggtgctctgagctctgttctccagcccctagcagaggtcgggccagggagggaatcagatgagatttcccccagggtgacccacgctcactcctttctcccctggggcccagcagaggttcagcacggccaggcagagggtgtgccagggtggctgtgcccgttgcctggtaagaagtggctctaggcccaaggagcccaagggctccatctgccatccccgccctggaagaatccacagcccccatgtctgcccatgctgagctgctgcccaagtgtttgggatggcacagctggggcatgggagcggggtctccaaccttgagggcgtagagaagtgggaggacaggagggcaggccctgggctgagagagtggcctggcgcagcctcttggcactgacagtgtggggctgtgccagtttcttggcccaggaggtagtacaggggccctcccaaagttcagccctggaggagccccctggctggaggctgctcagagccttcaggccccagctctgcctccttcctcagctggactacagttctaggctctaggctggggtggtggacaatgtggccttggtagctgggcctctggtgggagggccagaaggtggggggctgcagggccacctcagatgcccatcntcnacgagcttntgcntttcctgaaaatccctgtggaaggaagaactgaggccaagtntcggggccctgagcntcgggttcctcacctgtgaaatgggctggcccagcaggtacatggagaaaagggggtctgggttggggtccaacgagggtcagaggaaggggcccaaggagaagaccaggggcctcctcagg

SEQ ID NO: 443957 - DNA, 1552 bp, Homo Sapiens
  misc_feature (900)..(900): n is a, c, g, or t
  misc_feature (908)..(908): n is a, c, g, or t
gagacaagagcccagcctgcttgttgctagccaaagtgttctttccttccagcttggcctgctcttaaaagcaaagctcctgcacgtgtacatcctggcattgtgtggctacctgggttttaaaccagaatcagaagtcccggatcagagggcactgctgaggttcagcctcttctcttcttggccaggaggcagcagctctgaatgggcccctgaggctgcacaggggcctttgtcactggggcgcatgcttacaaacagtgcagttcctgggaccgaggtaagcagggctgggtctcatggcagaaaggccaggatctggggctctaggaatttgggaattgggcagagtggccaagaaagctggcaggcatatcctatgggacatcacacctggcaccattgtcattgttggtgcctgtgtcccaagtagctagtgataagctgaggctgcagcaagaaacacccttcccaggtgggggagtttggaccagaggtgccctctgcccaccacacctgcaacccagaagcccagatggaacgcagctgacgaaggtgatgcttgaggctcacttttggggccccacagctggagccggtataatgactgggacaacatcaaggggtggatgaggggcctctcctcccgcaacactgccttcccatgctgttcccctgccagctccttaacactgccgaccaaggccagccctggcattcagggaaattggagggcagcacccgtagggtggccagcctcaggccccaccccagctgtgtcctctagtctctggggacccctggggggaagaagtctaccctgcttgtgagtcccgtctcagtgtggaggaactggctgcacatgggacctgaaggtgccctctgtgtttatgttggggngtgggggnggcagtgctggctgcctctgtcctgtgtgtgaccctaccctcgaagggtcctgtcctgtcagtcccgagggagccacaaccaaagctgcggagagaaggtggggaagggtgcggaatggccgtgcggcacagcgtggcagactgttcagtctctgctgggtctttcctagggacctggaacggccatgctgcttccccctcatcccttttcctgcaggccagcctctctgcttcccccatgcctttaagcctgggcaaactggcccataatatccaacatgtgttgggctgactttgcccttcacgacgatatccccaaccccaggtagacccccgcaattccaaaagcaaaaggccagcctacaagtaattcctcgagcttctttcctggcctaaactggtcttttccccctcattaacgccggccccctaaaattgcccacccctccgacaataatcgtcctccatgtccccacacgttcccctgaccgtactccctcatcttttttactctccactttaaatgactcatacacttccacgtgtttacctcccctatacaatcctttcatctgctctccctcccttacactagctacttcttttcgctgcatctgtgtttccttccccgccttccccatccc

SEQ ID NO: 443958 - DNA, 559 bp, Homo Sapiens
  misc_feature (537)..(537): n is a, c, g, or t
ttttttttaatggcaccaccgtttattgctgccagtctatctgaaattccgtgagtctttctgggtttttggagataagtgcaccagagttaaattaaatcatttaatttccaggagtgataggcatagggacacattactcaaatggatctggaatcccatttttttccaagaaatctttcttgattcattggatgagtggctataatggacatatcttcctattaattgccaacagcacccccagctcccaaattcattcttttgtctatgtgtagaggtaacagcccttatcagatgttacatttgtttaattggtgactgtgtggctgtgatttaatctaagtttccagggagctatgggttagatgccaagctcactaccttgagcagacagggactgctggagaggagggtggggtgagctccctgagacccaacgagagcctgggaactggctgccattattgtgttggctgtcccagggctctgggagtctgccacaggctgtcctggcatctgtgtggtgtctgtgtnactcccccacatgctggaaagg

SEQ ID NO: 443959 - DNA, 500 bp, Homo Sapiens
  misc_feature (13)..(13): n is a, c, g, or t
  misc_feature (27)..(27): n is a, c, g, or t
  misc_feature (34)..(34): n is a, c, g, or t
  misc_feature (57)..(57): n is a, c, g, or t
  misc_feature (100)..(100): n is a, c, g, or t
aagccctccaaangaaggaacatcaancaaattngggaaattaccaaataacaacgntctcaacccggacccccactgccaataccctggtaaatgttgnaagttgatcagctttgggtgcttccttcctcctctctggggttcttgaacagggattaggcacacaaggaccatggcctccccaggaaaccaggacccacttgattgatggctgatacagtgcttgctactcccaacacagggcctttctggtcaagctgagttagaaccggcacctaggccaggcaagcataacttcctatttccagttctctctctgtgggtctggggcagaccagcatcagcctgatttacccgtccaggccctagtggagaaatgggctcacaaactgcatcagctctcagtgcagtgcccctcttactaggaaaacatggctccgtgaatatctgaccttgaggctgggagctaagcagtgaggcctccgtgggcaagaggatgc

SEQ ID NO: 443960 - DNA, 742 bp, Homo Sapiens
caccaatgtgcacaacttcatgcacacaattgtattcctctttagggagagacagtgaccatgccaggctcttcaaatacacactcctgtattttcatttctgaactccctgaagcttcacccacatcttcatgggcactgaatcacttttctgcccgggttggagttaggaggaccatgggtttaaggccttgggagaagaggtggtaaggagctacctggttctttgggcttctcaggaacctcccgtgaagactatatatatgagcaatatatgagcaattaagatagaactaggtcattgaaggactcagaaggaaactggcaaggggctaagtagctgtgagctgctcttcctgttaactgtcctcaggagagaaaagttgtcttgatttattccagagactcctgagaattttgttactggagctataggaactaggactccctcctcagactcatcaggaaatctgggaaaatctcatctccatgctgcagtctccccgcttggcaccatctagggctctgaagatctttaaagtgagcgttaaatgaagcaggccttctggggcatcgtgatggagctcctgaggactgggagggccgttttcttcataattcctacccagtttagggaatgagaaaaggccctgtggctcttaagtctcctgactatatccactagtttggccttgagttttgagacacctgggtaggatgttacctgggctggcccttacca

SEQ ID NO: 443961 - DNA, 497 bp, Homo Sapiens
ggactcaacatcttccccttgtctggtcctgggaactcaagactgctgtccatcctttattagtaacctagttttgttgagagagaggtgcagcatttccctcaagtacctgcatgctcataggtatgcatgcttataggtatgcatgcacaccagcaccttgacttccaccaggacagtgaatctgtagtccccattaatgatactctcagaatggtctccaccaatgtgcacaacttcatgcacacaattgtattcctctttaggagagacagtgaccatgccaggctcttcaaatacacactcctgtattttcatttctgaactccctgaagcttcacccacatctccatggcactgaatcacttttctgcccaggctggagttagaagaaccatgggttggaaggccttggggaggaaggaggtgggttaagggagcttacctgggtttctttgggactcctccaggaaaccttcccgtggaaggactatatt

SEQ ID NO: 443962 - DNA, 501 bp, Homo Sapiens
  misc_feature (18)..(18): n is a, c, g, or t
  misc_feature (27)..(27): n is a, c, g, or t
  misc_feature (34)..(34): n is a, c, g, or t
  misc_feature (69)..(69): n is a, c, g, or t
accccttggaattgtggncagcccccnactaggncagctaagaccccagataaagagttgcaatttcancagtaagtctgggactttcagggatttctactcctaaagggaagaagaagtacatgacatcaagggagcactcccatgaaacaaaaaacacaagatggcaggccttaagtcccagaacttcccatttctgggaagtttcttttagcagaggcacagttgcaatgcttggctcagcagaaaacgtctgtggctctaccccaacagccagtcagccctggtgcccatgaagggtcttggagaaggtgatttcttctcctcttcatccactatcgacatagctgaggcttcccccatgggagctcagcatggatgcacctgtagacagcctttctggaatacttcagggtaactgcatccacagagaatgcatgtcccctaggttcaagcttggatgaggggtacagtcacaatccctttctatgttgaacatcc

SEQ ID NO: 443963 - DNA, 1140 bp, Homo Sapiens
  misc_feature (1077)..(1077): n is a, c, g, or t
  misc_feature (1099)..(1099): n is a, c, g, or t
  misc_feature (1113)..(1113): n is a, c, g, or t
  misc_feature (1128)..(1128): n is a, c, g, or t
tgattgtaatgctcagggaccctgtggagaggttgtactcagactatctctactttgcaagttcgaataaatccgcggacgacttccatgagaaagtgacagaagcactgcagctgtttgaaaattgcatgcttgattattcactgcgcgcctgcgtctacaacaacaccctcaacaacgccatgcctgtgaggctccaggttgggctctatgctgtgtaccttctggactggctcagcgtttttgacaagcaacagtttctcattcttcgcctggaagatcatgcatccaacgtcaagtacaccatgcacaaggtcttccagtttctgaacctagggcccttaagtgagaagcaggaggctttgatgaccaagagccccgcatccaatgcacggcgtcccgaggaccggaacctggggcccatgtggcctctcacacagaagattctgcgggatttctacaggcccttcaacgctaggctggcgcaggtcctcgcggatgaggcgtttgcgtggaagacgacgtgagagctgaattgttgctgcacgtgctgggcccgccaatgccgtcatcatcaggattttacaaatctctttgcggggaactgtttcactcatggtatggaaaaccccaggactctgccactctaggcacacatgaattataaccattttggaatttccttcgtgatgttcgagagctcagcaatggacccctcacagagctcctctatccgaggccattggagaccccagtttctcaagaattcagctctgctctgagcgtcctggagcttggggatgcagccagctggcctgcactgggtgtggagagaacacctagggaaggcagcctggccctgcccgcctccgccttctggagagcctctgggttctgagtcagcaagccagaggtcatgccacaggcctggctggaacttacacttcacgttccctttttttccccctagagatggggtctcgccgtgttgcacagactgtctgtattcaatggctatcttcacaggtgtgatcataccacattcacttctgaaacaatctttgtttgcgatcgttnaacctcattggggacagagaanccgcagtcttttcngagaatgggaaggtntttcattttttt

SEQ ID NO: 443964 - DNA, 510 bp, Homo Sapiens
  misc_feature (381)..(400): n is a, c, g, or t
tttttgaaaatcattgatgggtagttttttaaaccaacaaaacaatccaccgctcaagagaatgctcttaagacaatttgagagttgggtgtcctcgtgtctgccgattctaattgccgggtgtcttgctaaatggtaatcttcctaaaggcaccctcatcctcctgctgagggaggagggggaggtggcaggtgaccagcagggaggaaggcaggagccagaccaagagcccatcagttttcagcttttacatccatgaataatggggaacagcatttgcacattaaaacgcttctctctgttcctatgctgaaacgcaaacccacaatgccgcttgcataataacaacaaaccagctccttctgccaggggccagctcnnnnnnnnnnnnnnnnnnnntacacacaggcatggcgttgttgagggtgttgttgtagacgcaggcgcgcagtgaataatcaagcatgcaattttcaaacagctgcagtgcttctgtcactttctcatgg

SEQ ID NO: 443965 - DNA, 411 bp, Homo Sapiens
  misc_feature (290)..(290): n is a, c, g, or t
  misc_feature (332)..(332): n is a, c, g, or t
aaaagctccaaaatttaatactgtatttatctggttttcataacttttatgaaatatttctgtaccagtgttaaccttctttgttatagtacctgctcttaaaaacaacattaaaaaccttttatatcattattatccttggttatataaacttattggaaaaaatgttttgatcattaggtactgcaccagagggcttaattcaatccttaactgcagagatttgacattaactatgagtgaatatccaccttatctaatcaacaacaacaagatttttcatacaatangagaggggagtgtgaatgtgattataggattctcactatagntttttactttaaaaactacataatgcggcatcctttacggcggtaggtgtgtaatcacattggatttgataagagattc

SEQ ID NO: 443966 - DNA, 434 bp, Homo Sapiens
  misc_feature (387)..(387): n is a, c, g, or t
  misc_feature (390)..(391): n is a, c, g, or t
aataaactagcagctttattgcccttcaggggccatgtcttcacttgagatgtcgaattgcttgagggaggaaaacctgtaagaaatgatggagatcagggaacaggccttggggatcctggagcggggtcacagtgagcattcggtcagccggggagacagacgccacaaagctcagcaggggctcagtttctggcctctcttcgccaccactcagtcctttcagctcctgggtgacctgagcctcagtcgccagccaccctgctcttgtgccagcgccacctccagctccctccttggtttgctgctgcaagcgtctacgggctcgccgccgcccttgccacacttcggtgccacaaggcacagcgccagctcctgagaaggcgnggnngatgcccccttccctgcctcaccctgagaccattcttgggctg

SEQ ID NO: 443967 - DNA, 389 bp, Homo Sapiens
  misc_feature (241)..(269): n is a, c, g, or t
  misc_feature (298)..(298): n is a, c, g, or t
  misc_feature (341)..(341): n is a, c, g, or t
  misc_feature (375)..(375): n is a, c, g, or t
gccaaggaatcagtttaacaaacatcctactcttgctgaaaataatttcttttcccaactcttctaggaataaaacacttttaatgtatttgtcaggaatcgacacttcatttaataggatttaaaaagtgacaatttaaagagcaattgagaagagtcccacatccatcatggcttgtgcttctaactaaaatcaaaggaatgaaagcagaaaaagcactgaggaaaatggtaaaacggnnnnnnnnnnnnnnnnnnnnnnnnnnnnnagagggagagacggtgggggcggggggtngttcatagctgcttcaagtccaaagtgctcacaacgggctccngtgagactgccctgctgggtgctggctgcacggncacagctgctgccc

SEQ ID NO: 443968 - DNA, 792 bp, Homo Sapiens
  misc_feature (151)..(183): n is a, c, g, or t
  misc_feature (457)..(457): n is a, c, g, or t
tttttttattgcaaaaacaaattattttattaagtgcaaaacaagccataggcaataaatatattagctctggtacatgtccatagacttgggtgagcacgctctccagaacacattaaggcagtgaaattattctgaacatacagatttnnnnnnnnnnnnnnnnnnnnnnnnnnnnnnnnnctataacatgtcccctttacacatgcttgaaaacatctgagagctttacatgaatttcagtttgggttcaaagagaatgtctgctccgtttgagagtttacaacagatagagtctcttacttcgagttctagcactctgaattctaacagctcgttctgatccttggcgtcttgcatttcattcttcagctggttctcttccatttccagtctgtaaatcttttccagcaagtcttggtttgttctgatgagcagctgcttctcttcaaacccnacttggaatcctgtcccttctcaaccagtaacttctccaaatcttcgattttggcctgacacctcagcagatcagcttgtagctgctcccgagtccgggcctccctctcagcgtccagcgtgcctcccacctgctcctggagcagggcgtaggcgcgttgcagggcctggtactcccgggtcagctggcagaagcgcaggtcagcctcctctcgggctgtggcatcgtccaagtcttcttcgggcgtggctggggtcctgtctgtcctgtctgtgttgtaggatgtttcggacaacgtttctgagtccacagactcctcatcaaatccaaaaaat

SEQ ID NO: 443969 - DNA, 1086 bp, Homo Sapiens
tttcaaggacagagtgaatttattccaagaatgccagtcctgagaacccacttcccacaggcaccaggtcacttggcacgctccgtagttttgctagttaaggcctgggatggcagtgaatcactgggtcactgctaccaacttggcaagggaccgccaccctcactcccacgctcacatgagggttgagtgtaagtctacaactctaagccatagggaatgcctcaaagggcctcttcagggttggccttgctaagggactcccagccatatgccaaggctggctgtcaaccctttccagggcccttgtggaatgagaaggccagccataggatttgtaaaggccacgtgggatactaagcttgggaccttcctatgtccaggaggaacagaggctacatctaggcccctgtccaccagtcacagtcctgtcccaggcactctctgcttgcccagatcttgctctggtcagcttcctttgggagcagattcgtagaggtgggtggggagtatgaggtggaggttcccatggggcaaggaaggtgggggacactgtagctccaggttttctcctgttgcagagagaagccagcttcatgggaaagggcaacaggttgaggcctcggtccccagcagcttcaggctcaggccctgagtgtccacttcaaccaggtggatgctgtaattcccaaggccctcggtcttggccagcaccgcctccaagcctcctttcgctgtggctccttgggtccaccagatagaggaagcctccaccgcttggcccccagccaggctctggccatggcacgttgggggggccgggacttccttcatacgccgcaccggtcgggtgctcacagctggagcctgagccttcttctgctccccgtcgaaggtcggcctcggcccgcaaggcggtttcctggcggagcttcagaatcctcgttgcgcgcccgctgtggcttccggccccgcggcgtggctccatctctgcttccggtttcgcgcgggtcgccgtccagacgggttggttgacccgcggctctccctggggccgccttgcactttgcgcttctagggggccca

SEQ ID NO: 443970 - DNA, 373 bp, Homo Sapiens
  misc_feature (230)..(230): n is a, c, g, or t
  misc_feature (269)..(269): n is a, c, g, or t
  misc_feature (277)..(330): n is a, c, g, or t
  misc_feature (332)..(332): n is a, c, g, or t
gagaaaagcttacaattttttttgagtattttgtacatgtccatgggagctttcacaagcaaattgaaggctcaagaagccgttagggccgaaagcttttatccttagttggacagagagtagtgatttgtgagaccgtgacaagacaaagaggtttgggctaaggcagttcatcgtggagaagtgacaaggcagatgagcgttagtttaacaaggtttgttcacacagnttccccttggcccggactccctccctctgatgataagantggcttcnnnnnnnnnnnnnnnnnnnnnnnnnnnnnnnnnnnnnnnnnnnnnnnnnnnnnntntaagccactgctcccggcctttaagtatctttaacttcaaa

SEQ ID NO: 443971 - DNA, 964 bp, Homo Sapiens
ggcccacctctttccccaccctggctccatgacccaccccactctggatgccagggtcactggggttgggctggggagaggaacaggccttgggaatcaggagctggagccaggatgcgaaccagctgtaatggtttaacggatttattgacaatgaataaagggcacgaaggccaggccagggcctgggcctcttgtgctaagagggcagggggcctacggtgctatttgctttaggggcccaccacgggcaggggcctgctcccagctgccacgctctatcatatggagcgaggtgttggggaaggcggggcaggcagcctgttgcaggcaggggaaggagaagagactgaggggctgtgacctctcctgaggcccccagcctgagactgtgcaactccaggtggaagtagagctggtccctcagctggggggcagtgctgtccagtggaggggagggctttcacgcccacccaccccctggccctgccagctggtagtccatcagcacaatgaaggagactcacatactccctgctccctgtggtagagacacctggtgatcagaagtgtctggtttgcttggctgcccatttgcctcttgagtgggcagctctgggcttgggcccctccctccggccctcagtgttggctctgcagaagctctggggttcccttcaagtgcacgaggggttaggctgctgtccctgagtcctccattctgtactggggggctggctaggacctggggctgtggcctctcagggggcagcctctccatggcaggcatccctgcacttgggctgccctcccccagacccctgaccacccctgggtcctgtcccccaccagagccccagctcctgtctgtgggggagccatcacggtgttcgtgcagtccatagcgcttctcaatgtgtgtcacccggaacctgcccacagagaacacagtgtctccctgtcc

SEQ ID NO: 443972 - DNA, 781 bp, Homo Sapiens
ttgtagatcctagacttcttatttagactaggtatggtgcgagtgaaaaccatccctccatcaagggcattttttattttaaaaaattccagaaagaccaaagaactaaaagaattttaataaaatgagcaagtttacatttgtacattttgtgtatctgggacccaatcgggacaaaggataaagttgcaaggccaaaggtttctgtggggagagcaagcaaaaagcaagggctgccccagttgcatcatgggcatccattcagagctggggccccgcagccacctgcctgtgctccggaagtgagaagcacatgtaagcacgcgtcagttagagcgtcgcagttgaactcagcccagtgcaacgcagcctgagtgacatccctacattaatacttgatagggaacagcagataaacagttccaaaaaccaaatggtattgcccatagaatatgaatgtaaactgagttcagttcatgctgttttaaccagaatggttccactgaacctaatgaggggaaaaaggtctgatggatctaattgctctattcgatggcacagttacaaatcagcaggcctgtgagaaagaaccatacatttctctcagaaatatgatttgagaaaagggccttgtaggagtgagagaaaggttagagaaaagtacagttttaacatatgagacaattcttcatactgtaatagaatgctgcttgtggtgaaggatttggtagagatggaaaactgctcaactttaattcccattattctaaaggatgacacc

SEQ ID NO: 443973 - DNA, 587 bp, Homo Sapiens
  misc_feature (513)..(513): n is a, c, g, or t
  misc_feature (529)..(529): n is a, c, g, or t
gacaggcttttgctttctttattcagtcacgactacacgctcctatgtgactgtcctatggtacttggggaccgggcggtccacctgcagcctgggggaggacatccctataatgaacatgctgcctgggcttcagggggccactttggtggccaagatggcatccaggacaccccccaagtgcaccacctgcacctggtggaagccgtgcagctccagcaagcactgatactcgcccaggctccgctccttgccttcagtctgcaccagcatgttcagtgactgcatcagggcgcgctgcgccaccctcttctcctcatccaggagcgtctccaccagcagcaggccggcccctggcttgcagctctcggcgaccttgctgagtaacttgtggactttgtcgtctggccagtcatgcaggatccggcacaggacgtacagctcagcgctggggagggggtccctgaaaaagtcacctgctgcgaagtggatctgcactgcctgcggtccggngggttggaagtgggcngccagctcgataatgtctgggaggtcaaacacagtcacctgcatacgagggtactcac

SEQ ID NO: 443974 - DNA, 480 bp, Homo Sapiens
  misc_feature (268)..(276): n is a, c, g, or t
  misc_feature (300)..(356): n is a, c, g, or t
ttttttttaaaacaaacaggtttattgataagcaggaatgccgtccagcatacagtgcaaactttcattgtcttgggatcaacacacacacacaagggaaccaaggccccacagagtctccaaattcatcgcttcccggctctgccctgtgatgccaaggaagcctgaggttctcccaggactgtccaccagggggcaggtgcgctccatcatgtcctcatgtgggtccaatgtgggcagaaacctggccagtcccagcagtctgacnnnnnnnnnctttaagagacagggtctcactcnnnnnnnnnnnnnnnnnnnnnnnnnnnnnnnnnnnnnnnnnnnnnnnnnnnnnnnnntgggctccagtgatcctcccctcagcctcctgagtacaggtgcacgtcactgcagccagccagtctgacatcttgattccagggtggaaaacccttcttgtctccatggtaatggctgggctct

SEQ ID NO: 443975 - DNA, 496 bp, Homo Sapiens
  misc_feature (454)..(454): n is a, c, g, or t
  misc_feature (480)..(480): n is a, c, g, or t
ttttttttccaaataatgagaattaatagatgaaaaatgaaccttaatcaggcctacaaggcctacagaaatctttggacccactttctcaaaaaccagtgggtcttgctcgctgggcaaggcaaatgttaccattaccagtaagcttgtgatatgtataaaacacacacacacaaagaaactagagggggatgtcaaacacatatcatagagagcttccctggattgtgtttgagccatttcccacccaggcaatgccgaccttgggagcacagtatctgctactggacagagcgtatatgtgtgtttaatcgatagtgtgagccagagacaacaatctttcttaatctttctttatagatgcaatttgtaataataggtttagtaggcttcctgattccctgatttgctctccgacctaaggccaactgcaacttttaaggttttagagggncaaaatccctgcaaaaggtcacaggncagtgggagcgagcca

SEQ ID NO: 443976 - DNA, 550 bp, Homo Sapiens
ctcagtttgacattagtcttttattataaccatattgaatggggtcgctttgccaaaaggagaaatcatttcttaaatcagtatgagttatagcataaagatggatgagaaaaaagcgatagggcatacatggcgtcactgaatattccatcaatcaaatgaattgtgccactgtgagaaaaactactatgacagcttttacatcaaagtggtctcaagcctgtttatacgaactttatatatctttttaacagtataaaaagagagctttagtaagtaacactgagaaagcagtctggcctttgagaaggaagcctggcttgccaggtgccatcctcaatgtatccggcctcttctctctgctccacagcctccccagtgcccctcctccagacacacagggcaggggccggggccgggtgtgtgtccgcaggaaaggagggatggaattggttggagccgccacagaacggccactctatgtggggacctaagtcctccgtacacactcctgttctataatgaacccttggagcagttccttaaaaaa

SEQ ID NO: 443977 - DNA, 1012 bp, Homo Sapiens
  misc_feature (60)..(60): n is a, c, g, or t
  misc_feature (104)..(201): n is a, c, g, or t
  misc_feature (314)..(328): n is a, c, g, or t
  misc_feature (755)..(755): n is a, c, g, or t
  misc_feature (792)..(792): n is a, c, g, or t
  misc_feature (809)..(810): n is a, c, g, or t
  misc_feature (856)..(856): n is a, c, g, or t
  misc_feature (888)..(888): n is a, c, g, or t
  misc_feature (911)..(911): n is a, c, g, or t
cgcggcccccgcaagagggatagaaattttttttaatatcccgcgcggggcgagggcccnaaccgtttttttgctgtgttccttaaaaaagggtgtttaagaannnnnnnnnnnnnnnnnnnnnnnnnnnnnnnnnnnnnnnnnnnnnnnnnnnnnnnnnnnnnnnnnnnnnnnnnnnnnnnnnnnnnnnnnnnnnnnnnnactgtttcaatgctttattaacagttggaaacaaaaccaacaaactggaggtgatgacatcccagaagcctatgaggcaagggaaataggtttgcattttgtccctcacaccnnnnnnnnnnnnnnnttttttttattaaatgcatcttagcaaaagtagattaaaaaagaaagggtcaaagccccagatgtcagcgagcagggaggaggtgacccaggggagcaacagacgccctgcatcagagtcctcccaggaatagtccaaaggagctgctcttgcccctttatacacaagcgccagcaaccaaaaccctccctcctggcaataaggcctcactatagttgccctcatgcttcctaagctctctcttgctctaataactctaattctgggccaagcccaagagtgccattctttcttcctagctggggatggaaagctgagaggggcacaaggagggcaaaagtatcaccctaagccagagaattgcagcttcctgtgttggggccaccaaaacagtcatgtgcccacccacttctcttttagaagagangctgggtacaggtatgaaggcacttctgggtgccagntcccccagaatgtcagnntagcatctgcacatttggcttgatacatttatacatttataaaaanacttctgtgtcctagagtcctgctactcttangccctggccagctcaaccacganaaagggtcctcctgtgcggatcccctggagaagagactgcctgaccttcaggtccaaagtcagggcacattcagattgggctgtgagagatccaaactcga

SEQ ID NO: 443978 - DNA, 433 bp, Homo Sapiens
atgttaacatgtagcgggtttattacatttaagaaatctattagttttaatttcaaatacagtaaatattgataaatacagcctacataagcaaaagttctttggagtcctcaatgatttttttaagagtgtaaaagggtccctagaccaaaacgttgctgtggaaataaagtaagttataatgccacctgctggcaaagcctgaaatcattgctgctcctgaaagcagcagctaccaaactgtttcctcacgtatatccagatagggctcaaagaatgctcttctttgagactcagccaggggaaggcagctggggtgagtgggggagattttgagacagagttctcttactgagtagtagtaataatcctccccagtagcctgtcttaacttaaaccacaggttactgaaggttggcacctgtggtataag

SEQ ID NO: 443979 - DNA, 458 bp, Homo Sapiens
  misc_feature (375)..(375): n is a, c, g, or t
  misc_feature (406)..(406): n is a, c, g, or t
  misc_feature (409)..(409): n is a, c, g, or t
  misc_feature (417)..(417): n is a, c, g, or t
  misc_feature (422)..(422): n is a, c, g, or t
  misc_feature (433)..(433): n is a, c, g, or t
  misc_feature (437)..(437): n is a, c, g, or t
actgtaaattttagaaatgtttattttagaaacacacaaagctaaaatgcatatttcagtccaacaacctagagagaagaaatagggagctacatgtttttgtttagtcttgttttttcctcaaaatccatccctaagagtcaggagctacaagtttataggtacgcatttgtatgaatatgcttgccatggattctaaggacctaggaacatctaggaatacaggacattacatttttatttgaaaaaatatttaaattaattttacatgtacaatataatatcactttcaggaacaaaaaaacattaatggaaagtaggaatatactaaaacaaaattatttttacttttgaggtcaaattctacaccctggnaaaagtcagaggcccatactagagttttgtngangttttttnaaaantgcttttaaantttngcaaggctgcaaagtctgtca

SEQ ID NO: 443980 - DNA, 903 bp, Homo Sapiens
  misc_feature (320)..(320): n is a, c, g, or t
caattcggccagttccgaatgctttcgccttggggatccttgagcttccggaagttccacttggccctagcccttgtcctttgtggtaacactcctggcacctcacagctaaaagggaataagaatcttccttaacgcggtcaatttctatcttccctttgggtaacaggagattcgatatagctggtaaaaacctcctctcccggcttgatttcctgtacagctctgacttctgccagggtccctttgtaggtcacaatgacattggggcaacagctatgattcatcaatgcaacatcaggaaatatcgctgatcccanatgagaaagttcttcatcttcaattgtgaagccattacagttaacctggtgcaaagaggtactacgaggctatcattgtcagggaatgtcgagatgcttggagtaaaagtgatggagagcagctatgtcactctgaatcaaatccttcttctcattgtctaacttatccagatgtgatgtcaaactccttcacagctaacgatttttccgaaggtgttctctctgggtggattttctgtttggccagaatccttgctgttagtcttacagtctccgagggattccagttttccccaaaaacaaccatgggagaacattccagcttgtgcatgggccaatcttctttctgacactccacattgcagtaaaatgcctgcttgcatcttccacatttggacaatccttctttcctggtgaagcagtactcgcagtggttgccccgctcgttgaccgtgagcacgtaggcataggccgggcaggagaacagcaagtcccccacctggaagggctgcagagcccgcagcccccggcctttgcccgggctgcagaagcgctccaggccgccgaggccctcggccctcat

SEQ ID NO: 443981 - DNA, 1770 bp, Homo Sapiens
aggctgccccgacccccagtccccatgggagaagacttgagcttgctgaattaatgggacagcaggtgtcactttcactcccaagactgggctccccaccaccactgagaaatcctccccagagacagaagaaaatacaaacctcaaatactgatatctctttaatactttcatcattcaagtttgttcagaacattacaagaggcatgaaagaaaaaataattccatttttaaaactctgtccaaagtataacatatgaaaccatgccattatctcttaggaaacaaaagcattcaaaattaatttggtattaaagttcaagattcagactaacctcaaagtacggcatgtgcagtgtttaagtgcaagaagtattttcattccaattattttacagagatgctggagtgacgtgtgcaatttgaaatattcaaatcctttaaggtttctgaactaagtgtttaaatgaaaactgaaatgctgcatagtttcagtggctttcaatttcctgtttgatctcagaaatatatggatgatctttgccgtgagctacttccatgattgcaatggccttcttcagggctttctcccctgcggctttgtgttccaggcccatgtagagtctccctagcttcaaccacatggaggccacgttgagggagtacaaaggatagtgcttactgtagggcttaatgattttctgtccatattgcagggctccttcccagtcctgcatgtacaagcagacacccatggcctggtacatcatgtgcaacatgtacacgttactgtcctcaaacacagagctcatcttctcctggctgagctcgcagatctccagcagctcactaggggatttatagtgcttggccctccggaactcttcaatgacgttgcgtgcatatctgaccatgtctcggatggcttctgcctttgggggatcgctgagcttccggatttccaccttggccttatccttgtccttggtggtacactcctggcactcacaggtaaagaaataagaatctcttaaccggtcatttctatcttccgttgggtacaggagatcaatatagctggtaaaaacctcctctcccggcttgatttcctgtacagctctgacttctgccagggtccctttgtaggtcacaatgacattggggcaacagctatgattcatcaatgcaacatcaggaaatatcgctgatcccaaatgagaaagttcttcatcttcaattgtgaagccattacagttaacctgtgcaaagagtactacgaggctatcattgtcagggaattcgagatgcttggagtaaaagtgatggagagcagctatgtcactctgaatcaaatccttcttctcattgtctaacttatccagatgtgattcaaactccttcacagctaacaatttttccgaaggtgttctctctgggtggattttctgtttggccagaatccttgctgttagtcttacagtctccgagggattccagttttccccaaaaacaaccatgggagaacattccagcttgtgcatgggccaatcttctttctggtgaagcagtactcgcagtggttgccccgctcgttgaccgtgagcacgtaggcataggccgggcaggagaacagcaagtcccccacctggaagggctgcagagcccgcagcccccggcctttgcccgggctgcagaagcgctccaggccagccgaggcccatcggcccatcatggtggcggcggggcgcggccgccggctgtgcccccgct

SEQ ID NO: 443982 - DNA, 483 bp, Homo Sapiens
tcctctcccaaatcaaatcaaacagaggacggaacattctgctgccagaagaggcagaggaagcccagcaagctggggtgactcttgattccttgggacatcgacccctgcagtcacacacacacccatgtcctccccagcagcaaaccctctccatcccaggagcatcccacaccaccaagttgccagcactgtaaaaattgatctaaaaatcgatctgcctggcttttctcagtggagcaggttcatggtaaagctgcatttatttctaaaatctgatagcagcggcctattgtgatcgtttaaacacagaattctttgagctttagaaatcctgtctataggatggccgtggagaagccagctaatctcagagtcggctgctcactgctccactgagctggagaaagcctgtttacgctagcctgagccctcgatgtgagagctttttaaggaccttgtaatttttctggaattaaacct

SEQ ID NO: 443983 - DNA, 605 bp, Homo Sapiens
ccttgaataataggaatcattttacacattaatggttgctctttaaaagttagaatctcaagagataccaaaagcacttaagagttaccaccacattttgcccaagttctaaggaaagttctgaaacttagtggtggtgtgtttgtactcagcaagctccagacagtctgagttgctcattccatgaacagaagcttgaaaatgcccttacagttgagatataaacgagggaagaggtgaagctttcaggaagccagagagcctctgccggtcaggtttcctgaggaaggcaggggtgctctatgctcatcagtcattcaagcttctcaggaaatgtgcccatcatgggaacagcagctatcttccaagcttaaaaattatgaatcccaggaagttaaagcccaaccagccaaccaccttcacatccttctcatactagtagagtcattcaaaacagcaagtggtgcttctgaggcagcctcaggaaggtctttgggtggctattctagaggtgaacatactggaaaggtttttacctaaagcattttcagttggaatgaaaaaagaaggaagctcccaaagtcagttcaaatccttcagtgctg

SEQ ID NO: 443984 - DNA, 475 bp, Homo Sapiens
  misc_feature (46)..(54): n is a, c, g, or t
  misc_feature (374)..(374): n is a, c, g, or t
  misc_feature (461)..(461): n is a, c, g, or t
catagtgaaaccattttctagaaaatcaaatattttattttcattnnnnnnnnnccttgaataataggaatcattttacacattaatggttgctctttaaaagttagaatctcaagagataccaaaagcacttaagagttaccaccacattttgcccaagttctaaggaaagttctgaaacttagtggtggtgtgtttgtactcagcaagctccagacagtctgagttgctcattccatgaacagaagcttgaaaatgcccttacagttgaggatataaacgagggaagaggtgaagctttcagggaagccagagagcctctgccggtcaggtttcctgaggaagggcaggggtgctctatgcttcatccagtncatttcaagctttcttcagggaaatgtggcccttcctggggaacaggcaggttttcttcccaaggtttaaaaatttttgaattcccngggggagtttaaag

SEQ ID NO: 443985 - DNA, 697 bp, Homo Sapiens
ttttttttaacagtttacacagactttatttttcacccattgaggtgagcacacaaaaatctgggcaggcagagttctatgagatgcagtgtcacaattacctgccctggttcacagacacagaccacgagactcggtggtgagggaaaggggtcttgttcttaccataaattgctatgggattatcacaatgacacatttattcctggttctatttacatcatggagtgtggagagggtacatttcttacactaaaaatatatactttggaatctctaaaacaaaaaaatatctctatctctacatgagacccactagaaagaagaacatagaaaacaagggaaatgtaccagcacctcgaattgtctccttccgagggaaggttgctctgttctccacctgacaccattagcttggaaggggagccaaatctaaccaatcagacagacagacacagataaacaagagggaggctttatgatcctggaggagtgaatataggagaaaggaaggaggaggaggattttggcctcttctacaaaaggagtaattgcacaatcagtttggtgcttctgtttccagcattattgcacatgtgaaaagcctgcatgttgaagtcaattgcaaacctgctaagcgaagcccaagctccgctgatttctgctgggctcagaaaagtgccatgggcctcgtgcc

SEQ ID NO: 443986 - DNA, 923 bp, Homo Sapiens
  misc_feature (181)..(274): n is a, c, g, or t
  misc_feature (448)..(473): n is a, c, g, or t
ctggtctgtgccgtgtcgtcgtttgtttgttctcctgctcctcctctcctggtttgtttttgctgctctctctttggtgccccccttgttctccctctaatacgcgtggtttctcggtgtgtggcgcgcccctcctgcgtgtgtttctgtctgtgcgtcgccctgcccgtttgttgttggnnnnnnnnnnnnnnnnnnnnnnnnnnnnnnnnnnnnnnnnnnnnnnnnnnnnnnnnnnnnnnnnnnnnnnnnnnnnnnnnnnnnnnnnnnnnnngacaaaactattctgtttaatagtgcacttcatttatgctacaggatgagcagggttgggaaaacacaatggaaggtcatcccgtcggttgggaaaactcggggagtgccatcctcacccagcaacgagctctgctaccaggctcaggcacagcctgccttctctgggcttcgnnnnnnnnnnnnnnnnnnnnnnnnnnctcccttttgggctttgctctttctctgcattaatcttcagctgctgaagagtcagaggtggaggcaggagtggtctggctcctggggctgggtgtcagaggtgagagggcagggcaagcaggccaagtgagctccttgaaagcatccttacccaggcatttagagaaaatcattttcatcattggagtgggaagaggacaagagaggacagcaatcagaggccaacgctaagtgcttctgaccctctccctcacagccggttactagctgtttggacagatttgcccattcagccccaggacaactgggggggatggcagggggtctgctggcaatatcaccaggtttctcttggaaacatggtctggctgctccaagagccctaaaggacaccatcatcacagatgatgattctggaatctcttctaccctcaataaaataatccctc

SEQ ID NO: 443987 - DNA, 1345 bp, Homo Sapiens
  misc_feature (655)..(655): n is a, c, g, or t
  misc_feature (700)..(700): n is a, c, g, or t
  misc_feature (932)..(932): n is a, c, g, or t
  misc_feature (934)..(934): n is a, c, g, or t
  misc_feature (981)..(1252): n is a, c, g, or t
  misc_feature (1261)..(1275): n is a, c, g, or t
gctcatttacatttaattatcattgtaattactaataaatcaatagaaattgaataacaaaggaaaaagctcaagataaataatttcttccttgtgaattcaaacacatgcatacacacacatcctcctctgtgtgtgttacttcctcctcacattctgtcctacggtacaaatagttacacaaaaagtctacaaaacgcgagtggcagaccccagctgtgttaagctcaggctgattctcagtctagatcaccagcttctccacgctaagtgtacttgtggtttcatcctcttcatttgacccaaaatatcctgggaggtccagcatcctctgctcagcctcagtgaggccaaacgacgtattgtcatagaaggcaaactcagggtgagtggggaagctttgacacttgtcttttctacactgagaagggctcagagaactgaccctctggtagttatctttgggggatgtgggagaagactacttccttgagatacttcttgtgactgggggacgttccccgaaggagctctgtggggcttctgttctctcaaattcctgccactaatccctgcctggcgatccccaaggtctggtttcctcaaaggctgccccatgggccttaataaaaattttaaatatactctcacacancacactatattctagagaagaactattgtatcaaaatcctagatntgaataacttattattttaaataatcagtaactaaaaccaagcaatccatcacacaaagaggggaaagggtaatattctgagttataaattttttaccctgtctgataaaaatagaagcctgaaagtttaaatttttcctggatttaaatttaaagataaatttgtttttcagtgaaatatcctcaatagcaattttaccaaagaggccttcttctgaaggccacctctganantaattagaggataaatgtcaatggcatgatattaagatattacttgnnnnnnnnnnnnnnnnnnnnnnnnnnnnnnnnnnnnnnnnnnnnnnnnnnnnnnnnnnnnnnnnnnnnnnnnnnnnnnnnnnnnnnnnnnnnnnnnnnnnnnnnnnnnnnnnnnnnnnnnnnnnnnnnnnnnnnnnnnnnnnnnnnnnnnnnnnnnnnnnnnnnnnnnnnnnnnnnnnnnnnnnnnnnnnnnnnnnnnnnnnnnnnnnnnnnnnnnnnnnnnnnnnnnnnnnnnnnnnnnnnnnnnnnnnnnnnnnnnnnnnnnnnnnnnnntccacctcnnnnnnnnnnnnnnngaaagatattattcaagaaaagaacttaggagccaggtgcagtggctcatgtctattatgccagtacttt

SEQ ID NO: 443988 - DNA, 506 bp, Homo Sapiens
  misc_feature (51)..(51): n is a, c, g, or t
ccagagattggcccctagcttttctgcctttgtagggacagcaaaaggggnaaaatttgttgcagaaaattccaaaagattgctgtagctctcacagggaagtggtaaagatcagctaaacctgggttggggtgctttctgcccagtgggtcttggcataagtagattaatcctgctcttttaagaaaaggcaacttattcaggcagtctggaaagggggttctcagaaaactcagtttctttattccttcttttctcccaactactgttaatggttatagaggtctttggactctaaagaccaatgtttggccactaactggactaatatgtatctttctgtgatttcatcatagaggtctgttttgtgagggtttggggtgcagaaaactttgattaaatcttaatgggaggctgggtgacctggattatctacagtgagcagacttaaatggaacagaagtttatgtgtccaaatgatggaatcattaaacctgagtgacttg

SEQ ID NO: 443989 - DNA, 315 bp, Homo Sapiens
  misc_feature (193)..(193): n is a, c, g, or t
  misc_feature (269)..(269): n is a, c, g, or t
  misc_feature (288)..(288): n is a, c, g, or t
cacagcagggaacatttattgagcactctctgtgtaccgtgcactgcaccagccaactcaggagcatcatctcatttcatcctcacgcaatctgtgaggcagggctgctgctaatcccatggcactggaggaaactgaagctcaaggtggtggatccactcccacctatgggaaaaatccagagtcacacagntacaagaagagcccaaacctgcctgggtttcaaaacaggtgggtgagctccccattgctggaggtatccaagagtntgccgagggacttcaagtnttcaggtagggggagaccccaagttca

SEQ ID NO: 443990 - DNA, 490 bp, Homo Sapiens
  misc_feature (457)..(457): n is a, c, g, or t
  misc_feature (469)..(469): n is a, c, g, or t
aagaagaaatggccattacaggtctgggccagttgtaaagggttggcttaatcctgcagccagcacttttaaaatagctactggcttcacagcaggccagctggaactcttgaagcatgacaggtagagaacagaggatgtgctaagaacctggccttgttgtggtgcctcgaggcctccatgcatgcttacacaccaacataagtatactttccccttcctcctcctaagcaattgttctccattgcactttagagcctgtaacactcaaacttttcaatgttatctagagatggacaaacgcttaattctaactatgcaagatagcatcttatttctaacaacataggccaaaagtaacagagaggcactctggttatacagattatcaatttttacaaaggttcaaaacattaccaacaagccctgtaacagttcctaaaggcgggtaccactntgggcctcaacntcgggtttccctggggtttcc

SEQ ID NO: 443991 - DNA, 478 bp, Homo Sapiens
  misc_feature (374)..(382): n is a, c, g, or t
  misc_feature (388)..(388): n is a, c, g, or t
  misc_feature (396)..(396): n is a, c, g, or t
  misc_feature (409)..(409): n is a, c, g, or t
  misc_feature (421)..(421): n is a, c, g, or t
  misc_feature (444)..(444): n is a, c, g, or t
  misc_feature (467)..(467): n is a, c, g, or t
aagaagaaatggccattacggtctgggccagttgtaaagggttggcttaatcctgcagccagcacttttaaaatagctactggcttcacagcaggccagctggaactcttgaagcatgacaggtagagaacagaggatgtgctaagaacctgggccttgttgtggtgcctcgaggcctccatggcatgcttacacaccaacataagtatactttccccttcctcctcctaagcaattgttctccattgcactttaggagcctgtaacactcaaacttttcaatgttatctaggagatgggacaaacggcttaattctaactatggcaagataggcatcttattttcttaaccacctaggggcccaaagtaacannnnnnnnncacttntggttttntacagggattttnccattttttttnccaagggttttcaaaactttttncccaccagggccctttaacaggnttttttaggcg

SEQ ID NO: 443992 - DNA, 444 bp, Homo Sapiens
ttttttttaagaagaaatggccattacggtctgggccagttgtaaagggttggcttaatcctgcagccagcacttttaaaatagctactggcttcacagcaggccagctggaactcttgaagcatgacaggtagagaacagaggatgtgctaagaacctggccttgttgtggtgcctcgaggcctccatgcatgcttacacaccaacataagtatactttccccttcctcctcctaagcaattgttctccattgcactttagagcctgtaacactcaaacttttcaatgttatctaggagatgggacaaacgcttaattctaactatggcaaggataggcatctttattttcttaaccaacataggggccaaaaggtaacagggggggcactctttttattacagggattttccattttttacaaaggttttcaaaactttacc

SEQ ID NO: 443993 - DNA, 347 bp, Homo Sapiens
  misc_feature (220)..(220): n is a, c, g, or t
ctgtgtttattattaaaaaggcattttattataaatacattttagttgtagcagtaaaatacattttgttaccatgaatctttgaaaacaaaagaacttcactgagacaatgagcacactgtaggaactgtagaccccaagttgaaaacttgttctatggaaccaaagtagctaacgtaattccaaaactaagttagaaaagataaagccaaaggaaagnaggaaaataaaaaccctaggagagtgggctttgggcgttattttatgggtacaaagtcacttttacttttaaggataaactctttaggtattagagcctcttagatgaggtatcgtttactgcaaag

SEQ ID NO: 443994 - DNA, 330 bp, Homo Sapiens
  misc_feature (174)..(220): n is a, c, g, or t
attaaaaaggcattttattataaatacattttagttgtagcagtaaaatacattttgttaccatgaatctttgaaaacaaaagaacttcactgagacaatgagcacactgtaggaactgtagaccccaagttgaaaacttgttctatggaaccaaagtagctaacgtaattccnnnnnnnnnnnnnnnnnnnnnnnnnnnnnnnnnnnnnnnnnnnnnnnccctagagagtggctttggggttattttatggtacaaagtcacttttacttttaaggataaactctttaggtattagagcctcttagatgaggtatcatttactgcaaag

SEQ ID NO: 443995 - DNA, 230 bp, Homo Sapiens
  misc_feature (139)..(139): n is a, c, g, or t
ccctacagaaaatgatgacggggttaaagggaaaaataagttacattacagtttccaaaatggttctcgctctccgctgaagatgggccaccgttggggctgcaatgtgctcgcggtcccagcttgtgctttgcaagangagggaatataactagactgttattttaggttaaaatagccaagagacagacgccttcgcctcaaaaatattctggggcacataaaagtag

SEQ ID NO: 443996 - DNA, 1501 bp, Homo Sapiens
aaacgctgattgaaaatgatttattaaagtccaattagtatgcttttcatttcaaataatccatatagcctccagaaaaatatgcacatgtgtaaaagtccacgttcatttctttcacttccaatataaagtattctgtattttgtataaagtatgtgcaaacacctttctgctaatcgggtccccacattcttttcactacaggtactttacaagtctgccctctgctcaaacactaaccgtgcactgacatcctccttcctagacagccattcatctcccggacttctttctctcagacatcctcctgacctcccctgacctgcttcaccactgtgttacctcactggttacttgttacagcaaactgatgcaactactagtctacctggacaacatattaaacaggtatcacctaatagggtggcagcctatcggggtgattcctggcgaatacacagtaaccaaccacatactgacacactcaacccatttgctacagatggacccacactaattgatatgacaatcctttattcactcggcacatttggtttctttgcattttcttccattttacattgcaggtgtggctaccaagagctggataacgagtccctcaaaccaagtttggaattgcgagatatattggggtaccttgattcttgagacagttgaattcttctagttgatcttgttgtattaaaaagtcactctcaactgaagtgaccactgcatttcttttgtaaaaaggtcatttgactggcttttcctcacaactgccacccatgcagtacaaaagcaggaaatcccttttcatgaaaggtgtaagtacaagatgacatttcacatttttttaaaaaaagaatccttcatgggaatatatcctaataatcaattatatggagacagttttatgtacaccaaatttctgcaactttataataatgaaaattagaaacaacctaaatagttaacaacatgggaatggttaaataaactgagttgcatccattaaatggaatataatatagccattaaaattatgtttttgtaaaatttttaatgccataagaaaatgtggcaattttgcaatgaaaaagatctacttataaaactgtttacagtatgactccaattatgtaaaaaaagtatacaatacacatataggcatacatgggggttgctttttaaaggtggttacttctgggttgtgatattatcagtaatcatttttgcttttttatacatttctgtatttttcaagttttctatgatgagtatattattttacaaagactacgaaaattttcctctgatatactggtaattagaatgtacttgggtattttaaatatatgggaacaatattatagtgcttcatcttctatgacttttttggaatacatatcactttggtaataaacttacattccctgttttatacttgttacaacattttaattaaacagttaatattgtgattagagcattgtttgct

SEQ ID NO: 443997 - DNA, 435 bp, Homo Sapiens
  misc_feature (237)..(328): n is a, c, g, or t
  misc_feature (372)..(372): n is a, c, g, or t
gagaagctttatttgattttaatttattttttgtcttccagtttctatttttaactttgtcggtatatagtaggtatatatatttatcgggtacatgagatattttggtacagacatgcaatttgtaataatcacatcagggtaaacaggatatccatcaccttaagcattcatcctcttttgtgttacaacatttagttattagtttatttatttatttatttgagacggagtctnnnnnnnnnnnnnnnnnnnnnnnnnnnnnnnnnnnnnnnnnnnnnnnnnnnnnnnnnnnnnnnnnnnnnnnnnnnnnnnnnnnnnnnnnnnnaatatatggagtggaaagcctagatttatctactgggttctttncctgtcagcagttcaacatgtgtaggagcttcagtctctgctgtttgtgccaaattataagga

SEQ ID NO: 443998 - DNA, 522 bp, Homo Sapiens
  misc_feature (15)..(15): n is a, c, g, or t
  misc_feature (49)..(49): n is a, c, g, or t
  misc_feature (79)..(79): n is a, c, g, or t
  misc_feature (108)..(108): n is a, c, g, or t
  misc_feature (115)..(115): n is a, c, g, or t
  misc_feature (126)..(126): n is a, c, g, or t
  misc_feature (184)..(294): n is a, c, g, or t
aaaaggggggggaanaaaaaattaaccgggggtaccatggagaaaattnggggtaacagaacaggccaaattggtaaanaaacccacatccgggggtaaaacgggaanaccccanccacccttaanccattccatcccccttttgtgttaacaacatttaagttattaagtttatttaatttannnnnnnnnnnnnnnnnnnnnnnnnnnnnnnnnnnnnnnnnnnnnnnnnnnnnnnnnnnnnnnnnnnnnnnnnnnnnnnnnnnnnnnnnnnnnnnnnnnnnnnnnnnnnnntaatatatggagtggaaagcctagatttatctactgggttcttttcctgtcagcagttcaacatgtgtagtagctttcagtctctgctgtttgtgccaaatatataagaaataaaatcagataacttttttgtaattggatcatacacagttgggctcttctgtttaagttttccttctgtaaaagttatttttgagaataccttaagtttaagacctcgtgccgcaa

SEQ ID NO: 443999 - DNA, 269 bp, Homo Sapiens
  misc_feature (159)..(161): n is a, c, g, or t
  misc_feature (163)..(165): n is a, c, g, or t
  misc_feature (167)..(167): n is a, c, g, or t
aaaggagggaaggcaagattctttccccctccctggtgaagcatgtggtacagaggcaagagcagagcctgagaagcgtcaggtcccacttctgccatgcagctactatgagccctcggggcctcctcctgggcctcagcttgcccagatacatccccnnncnnntntatatatatatgagggagaacgcctcacccagattttatcatgctggaaagagtgtatgtatgtgaagatgcttggtcaacttgtacccagtgaacacacac

SEQ ID NO: 444000 - DNA, 418 bp, Homo Sapiens
  misc_feature (50)..(50): n is a, c, g, or t
  misc_feature (193)..(193): n is a, c, g, or t
  misc_feature (251)..(251): n is a, c, g, or t
  misc_feature (260)..(260): n is a, c, g, or t
ttttttttacataagttgatttattacttataaagggatcgaagatgagnaagtctaaaattcagtgtgatgtggtccccctgaggttcagagaagttgcctggaaggatggaattttgattgcatgtgccccacttgcaacacagttaagagactcccgaaaatagcccagcccaggttttttagcccaggnatcacctgactcactgaccaaaagtgttgagagattgtatttcttgtgaagactgttnaagtctggngctgttctaccattctcttctgatatcagggatattccattcccaggcacattctacacttattcttggaaaactgcaagtaaggaaagagggtaggaaccgggaccagtccaattaaaacttgggagggacagtttctggaatccttaaacagtgag

SEQ ID NO: 444001 - DNA, 253 bp, Homo Sapiens
aatataaaattgtttaatgtttttctttgttgcagtacactcaatccagatgtagtggatgaggtggccagattttttcaagattcttagtccaccaggagctgattccatttgtgtcatccctactctggtcacagaacattcacatttttaattccaaatactgagcgtgatgtaaatgatgtaatcagtatctaacacgagtatatactttcttggtggccactgcatgacatatcaacagtgcagcctc

SEQ ID NO: 444002 - DNA, 752 bp, Homo Sapiens
  misc_feature (44)..(61): n is a, c, g, or t
  misc_feature (68)..(233): n is a, c, g, or t
cgggggggcccccccccccaaaaaaggttttaaaaaattttttnnnnnnnnnnnnnnnnnncacaaannnnnnnnnnnnnnnnnnnnnnnnnnnnnnnnnnnnnnnnnnnnnnnnnnnnnnnnnnnnnnnnnnnnnnnnnnnnnnnnnnnnnnnnnnnnnnnnnnnnnnnnnnnnnnnnnnnnnnnnnnnnnnnnnnnnnnnnnnnnnnnnnnnnnnnnnnnnnnnnnnnnnngacaatttactctttattgattaaaaatgaagaaaacatgcagtaaaatacaaagtccaaaaaaaggaggaaaaagttgaatattttacatcttccataacctagcatacatcataaggaggaatctccacttattggtacatcattattctctcctctagattattaaatattatcagctggctctaggatttggttcaaaacttaagcaaaaacccaacaaatcctttagtcgtttagaaagaccaaacatttcacaaatagcattggcacatattactttgtgctatagttagtccctactccagggacaaggggatcctgggacctagtcaaagaggtgcactctgaatcagcattcctagaaaggagtacagtcactcactaggttacgtgctgttccacctgggcagtttctgttcatgtattttctcagtatcactgcacaagccaaccgtggactagtagccaaccgtggactagtagccaccgtggacttagtagccaaccgtgactagt

SEQ ID NO: 444003 - DNA, 457 bp, Homo Sapiens
  misc_feature (413)..(413): n is a, c, g, or t
  misc_feature (425)..(425): n is a, c, g, or t
  misc_feature (438)..(438): n is a, c, g, or t
cataaattctgcctttgtagctcctaagaaaactaatggtgtgtctgtgatccaataaaactttgtttccaaaaacaggcagtgagccaaagcaggcccttgagccatagtttgctccctgctttacacaaatcccacatgtcccatccctgctgaaaactcttcaagaaccctcttctctactacattttggataaaccccaaactccccaaaagcccttgcaccatctcccttaggatcccttgccttctctccgtctgttcctagagaaggccaaactttctcccctgaggaacagttgggacatgcagctccctgtgcctggggatgctttttcaccctctcatccttctcatctcttaggggtttaccctaattcatcaccccttcagagggaggtttttttctcttnttccttcccatnccatggttctggntcggtttcaatccattttg

SEQ ID NO: 444004 - DNA, 795 bp, Homo Sapiens
  misc_feature (149)..(149): n is a, c, g, or t
ttctttcaagacacggtgctttcaagagaatggattgtctaatttttaggagccaacaaatgactcattaatcaatgccccacggaagaacatgagaagacagtgttggcatttgaaacaataactgtggccattaccaggccccaggntggacagataggggcaaggacagggataccccgcatttctctgagagctggtgcaagaggattaatcctgaagggctcatttctgattctcctctgctggacaaagaatgactgagttggaacctcagagggtgcaagtcaaggtgccatgagtaagatgccagtttcggtctgtaagcaagtgtttctgggggtgagggaaggtcaggggaaacctgaccactggacaggagtgaggcaggtacagtgcattgctccaggtgtcatgcaaagctagaaagtcagcatttcctctgttgttttgatcctccttatacaacccaaagccaacagaggatttcaacttccccaaatttctgccctgagcattaaacaactttttcctatgctaaatttggttttagttttgaagtgcctgagatgcacaattcaaaggggtcaagttcctggcctcttatgttgatgaaaccatccccaatcctcagcttacatggcttgcccctatgcctaccacctcttatagctcttccatccatcattcaagaggttccatgaagaaagctcagggttaatgtttggggtagtactatctaaccacatcacagctattgtggcataataacagtcgtccagcgatccatcagct

SEQ ID NO: 444005 - DNA, 1254 bp, Homo Sapiens
gctgggtggcgaattcggcacgaggcgggagtcccgggacctggcggggccggcatgacgggcttctcgggggcccgccgcacgcccggcagcctccggagacgcgcgccgagcccggctcccacggcctctgaggctcggcggggctgcggctgcctggcgggcgggctccggagctttcctgagcggcattagcccacggcttggcccggacgcgaccaaaggctcttctggagaagcccagagcactgggcaatcgttacgacctgtaacttgagggccaccgaactgctactcccgttcgcctttggcgatcatcttttaaccctccggagcacgtcagcatccagccaccgcggcgctctcccagcagcggaggacccaggactatcccttcggcgagacggatggaaaccgagccccctggaggacctgcccctgcagttctgcctcacacggctcaagtcaccaccgtgaacaagggaccctaaagaatggccgagccttgggggaacgagttggcgtccgcagctgccaggggggacctagagcaacttactagtttgttgcaaaataatgtaaacgtcaatgcacaaaatggatttggaaggactgcgctgcaggttatgaaacttggaaatcccgagattgccaggagactgctacttagaggtgctaatcccgatttgaaagaccgaactggtttcgctgtcattcatgatgcggccagagcaggtttcctggacactttacagactttgctggagtttcaagctgatgttaacatcgaggataatgaagggaacctgcccttgcacttggctgccaaagaaggccacctccgggtggtggagttcctggtgaagcacacggccagcaatgtggggcatcggaaccataagggggacaccgcctgtgatttggccaggctctatgggaggaatgaggttgttagcctgatgcaggcaaacggggctgggggagccacaaatcttcaataaacgtggggagggctcccccacgttgcctctactttatcaattatactgagtagctctcctgacttttaatgtcattttttaaaatacagttctgtcatatgttaagcagctaaattttctgaaactgcataagtgaaaatcttacaacagggcttatgaatatatttaagcaacatcttttttaacctgcaaaatctggttctaacatggtaattgcaggataactttgacttttcctcgtgaatattttata

SEQ ID NO: 444006 - DNA, 1001 bp, Homo Sapiens
ttttcctgttttgaaagtgttttaattagacaaaagcatcaggacaaaccattttaaaaacaaagtcttcaacttgggtgttgagattggcaaaaggggaagcaagggaaaagccaaggaaagataaaatattcagaagaaagtcaaagttatctgcaattacatgttagaacagattttgcaggttaaaaagatgttgcttaaatatattcataagcctgttgtaagattttcacttatgcagtttcagaaaatttagctgcttaacatatgacagaactgtattttaacaaatgacattaaaagtcaggagagctactcagttaattgataaagtagaggcaacgtgggggagccctccccacgtttattgaagatttgtggctcccccagccccgtttgcctgcatcaggctaacaacctcattcctcccatagagcctggccaaatcacaggcggtgtcccccttatggttccgatgccccacattgctggccgtgtgcttcaccaggaactccaccacccggaggtggccttctttggcagccaagtgcaagggcaggttcccttcattatcctcgatgttaacatcagcttgaaactccagcaaagtctgtaaagtgtccaggaaacctgctctggccgcatcatgaatgacagcgaaaccagttcggtctttcaaatcgggattagcacctctaagtagcagtctcctggcaatctcgggatttccaagtttcataacctgcagcgcagtccttccaaatccattttgtgcattgacgtttacattattttgcaacaaactagtaagttgctctaggtcccccctggcagctgcggacgccaactcgttcccccaaggctcggccattctttagggtcctgacgatcaggaaaagatgaattagtcgtttttctttttcccctttcctttgctcctaaccaggctgcatgatggcatcggagactgacagaaggactgggatggttaatctccc

SEQ ID NO: 444007 - DNA, 715 bp, Homo Sapiens
  misc_feature (153)..(173): n is a, c, g, or t
  misc_feature (288)..(304): n is a, c, g, or t
aaaaagtacagtgaacttttatttccaaaataaaaacaaatttgaattacggcagtgccatataatacaaggcatttgttggcatatgtcatctttaaactgcattccacagtctatagttcttttgtaacatacaatagagtaacaaactcnnnnnnnnnnnnnnnnnnnnnaaataaggggcaagtttccaaagatcagtgtggagtgctacagaaataattataggagaggaaatcataatcacagaaggtataatgcttgtttgaggctccggaataagaactnnnnnnnnnnnnnnnnncactggtttcatgcttacggggtacacactttggtgcatcccgtgaacacaaattttaataccaaacaatccttgatgcttcacctggggctgccaagcagtttgtaaaacagaggaaaacatttagtgcagtctgtattatccttttccaacttttctgtttgtgcaagtttttgaagattcattggccaaacaatgaacaacaaaggttttctgagagaagacaaggtggacttttcattttgttagtaaataccagtggcactgttgaacgaaacaaatacttttatctcagtctttcaaatcagtatttaatgtctgtgtttccttccactgacagctccttcttctagtttcactgaaaaaaagggtggtagatttttattcttggacactctctccaaatcttca

SEQ ID NO: 444008 - DNA, 356 bp, Homo Sapiens
ttttggctcctgtaagtcattttactttgaatatataggaaacaaaatccacaaacaggaagctatgttctatggttatgtcttttaaacaatgttctgtatttacaaattgtttttttccctaagtaaaagcaccagctgaaaagttataggctgctaaaaccgttacaaatattacaaacccattaaaagacattatgccaaacgtacttattaaaaaccttaacaaaacgaagagacaactgacaacgcaaccaaccaattgagccaccatgctgggctgggtggcagttccaatttccttgcctgtgtttctgataaacggggctgggagtgcttatcccagggagaggatc

SEQ ID NO: 444009 - DNA, 882 bp, Homo Sapiens
gtattctaatgctatttattatcacaataaataattcactgcaaatgactgcatgaaaaatgtgggttccagagcaccatgtataaaatgatcccatttatgtagaactgtaaacatacatccacacactgacggacaggtacatatgcatgtttggggaggggtctggaatgatcacccaagtggacagggtgaggggtggtttcctgtattttttacaataagcatttatgacttttacaaaatcaccaaagctatcactttttccatttagaaaacacaaaattatttttaaatagagacttgacgtcatttgacacaccttggttttctctcggagagcacagatgccgcagacaagaggagcggacccgcctcccagactcctgcctgccccgtccctcccccgcaggtggcactggtgagccgggaaggtgctgccagccccaggatgcctcgcacagcccgggctggaaacccctgcccctgcttcctcgcacagtctgtcattctagaaggctctctccaaatccacttcttccaaagagcggtcaatgccagggaacagcgagcgaggtccattttccaggtcatccgcacaagaagccagtgagccccactcccaatgccgctggacctccagcgcctggcttccgttctcttccctgggttacctgctcagtgggtttctcatccagcgccagcatgtctatcaggcggcctccagcatccaatcacaggtgactagaaccgttccggaactacccttgctaactgtggatgcccactgcgtggccccattatgcccttgagcacgggctaagcttttggtccatcaatggagtcttctctgatgttgctagggctgggtccctggctcct

SEQ ID NO: 444010 - DNA, 399 bp, Homo Sapiens
  misc_feature (145)..(208): n is a, c, g, or t
  misc_feature (368)..(368): n is a, c, g, or t
atcatcagagtcagttccagttacatttccattagtatggatagatctgccgccgctgcctctgggcaccgctcaccggcgccgcactcgtccgcgaccgtggcggcggcgccgccccggcctccgccgctcctcgggcccggcnnnnnnnnnnnnnnnnnnnnnnnnnnnnnnnnnnnnnnnnnnnnnnnnnnnnnnnnnnnnnnnnggagcaggggtccccccgcagggggatgcagagggaacctgacgcaggctccgctcgagggagcagcagcgaacaggcggcggaggccctcaaggccgcgaggcagccgtcggaggacagagctcagcaaatcgcgtcagactcccgctcgcccggcctnaaggacaggcatttcagcgctctccgcggac

SEQ ID NO: 444011 - DNA, 723 bp, Homo Sapiens
  misc_feature (164)..(164): n is a, c, g, or t
acacacatagttatatacaacttttaaaatagctgcacaattttatatctcacttttagagaagtgcagtccaggcagaccatgcttctcaatatattaaaaatattaaataaaacccaaccagtttcatacttttctaatagtcaagctggctggaaaaaaanggactggagaacgaacaggcagttgtaaaatggggatcagtcttcacaaacacactacttaaaaatcttgctatttccttatccctttgacagcatctctacaatctcacctttaaagctggaaataacacattgctaacttagagacaacatcgggtgcaacatgcatatgtcaactgcccactcaaccaactgcaaccctgaggatttttctggcccagtagaaagaggaaacacgaagataatctctgctgtagagctgcttctccagtttacgacttcatgtgttttcaggatgtttcttggacatgcatgtgtgacagtcacttcatggttctacttcccataagcagatctctcctccattctgtctgtcatcacaagaaagccactgtcatccgtccaaaggttttccaaggtaaaccaaagtcacttctgtgttgccatatacagcagaaactgctgggtataagcagacctttggaagtcctctaaaagcaacccccaggaactcatatccacgttcaaaagctaaagtcttatcttccatgtccaagcc

SEQ ID NO: 444012 - DNA, 1224 bp, Homo Sapiens
  misc_feature (301)..(537): n is a, c, g, or t
  misc_feature (553)..(563): n is a, c, g, or t
ttcagacgccagcaccccaggtccccttcgggggcctgggataaacaaaaggtcgccggccaacgtaccacaatgggcgacggcaatccgccagaagaccccggaacaggaccccttccttaaacccaaaataccagctatgcgccccgtagtccactaactcaagagctgagcagaaatgggtgacccggagcagactcatggaccgagatgcgccacccacctcagccaaagtgacagaacgagactctggtctcaaataaaactaaataaaatggggccgggcacaagtgggctcatnnnnnnnnnnnnnnnnnnnnnnnnnnnnnnnnnnnnnnnnnnnnnnnnnnnnnnnnnnnnnnnnnnnnnnnnnnnnnnnnnnnnnnnnnnnnnnnnnnnnnnnnnnnnnnnnnnnnnnnnnnnnnnnnnnnnnnnnnnnnnnnnnnnnnnnnnnnnnnnnnnnnnnnnnnnnnnnnnnnnnnnnnnnnnnnnnnnnnnnnnnnnnnnnnnnnnnnnnnnnnnnnnnnnnnnnnnnnntgacagagtgtctcgnnnnnnnnnnntaataaaatgggacctccacactgtggaggcccttgccagtctagagtggtgcttctttgcagggacttggaaacaaccccccaacacagcatcccctcacacctgccacccacttccttaccggctgctgtgggagcctctatcctgaactatggaggggcggggtggaaattttatataaggaccttgttaaggccaagaaagtcagtttaatcttacaatataaatatatcatttagtcacctcagcttatccccagaggtgtttacacaattcccaatgaccagtgcagcttggaagggactgaggctcgcaagtgggtggcacagtcggctcttcagtggctccaaagtgagcccctcacaacaggagacacttcagagaggtctgtccccagccacgcactcatgattgctttttagcagaagtcatggtcgctgaggccctgggtttggcaaaagcacagctgccagcagagcacagttctggtaggtggggccacggcttgacctggggcccatagctacaggaacaggcaggggccagcttggcttgcaacaccatgaaacaagcctgtggggcccttagtgtcttctcccgcagagcccaccagaaacacttctgtgagtaacagaacctggaaggaaaaggggcaggggt

SEQ ID NO: 444013 - DNA, 341 bp, Homo Sapiens
  misc_feature (63)..(76): n is a, c, g, or t
  misc_feature (176)..(188): n is a, c, g, or t
ttctgaggtctgtttgtgtttaatcagacaatatgcaaagtatttacaaccaattctggatannnnnnnnnnnnnngcaagtctgggccttggaatttcggagccccaggcccggcccagagccaggggtcccccaggcctctgcatagtcatctgaaatctacaaaacactgttnnnnnnnnnnnnnggacagtattaagacaccttacacaaagggccttaggcagttggagagggatttgagagctcgctggggtgagtgagcccagatttgactggaatggacgggagaagacttgggtaataaagacgtatgaaaggaaaagttgaaatttcatcc

SEQ ID NO: 444014 - DNA, 1323 bp, Homo Sapiens
  misc_feature (259)..(260): n is a, c, g, or t
  misc_feature (272)..(272): n is a, c, g, or t
gtggaaaaggtggaaaccttttgttgtttaagccacccagggaggcccggccccaccagctgggggcttcgggcaaccaggggcaggcaccatggcccctggttgccttccacccctaaaaaaattggggaggggctggtggcagaagggctcccctgcaggagggtcaccctgaatgactctcagatttcaacagacccccttctgccccccacaacccctgtaaacatgagaatgggctcgtgacaccctcaacacnntcaggacaagantgagggtccgagatgtgtggctgggcttcaggcggcccaggagctgccgggctttctcctgcatgaaaagctggtccctggtccccccgcaggccaccgtcttccaggcactggacataggggcaggtgtcgtgaagtggcttcggggcttctgggccactgctgccttctcgggcttggcctgcaagaagccctggttgagcaagctgttgtcttctttgatacctgacagggtgaggctggaagagtttgaaggggcagttgtcggcaaggatagagacttgggcagtgtggacatcatcagcttcacatcctcatccacaatgtcaagagccagagacttccggactttcttgatggggctccgccgcagcccaggcttcctcttctgcttctcgggcctgatgtcgtcctcgatgatgagttcgatgccagcctcagaacgcagcacctccttcaagtcctcctccaggtgcggggtctgtggcaggggcttcaggggtccgtacttctccagggcgttcttgaacggggttggcgtgtggggagtgttgtccatggagtacttctgatctggggttacaaacgcagcatgtttctggtgcaggggtgtcttgtcccggtgcagtggtgtggtgaccaccaccttctggctgcacactggggtggatgtcagcgaggggctctccagctccaatgtgtcctgtttgttccagaagttcagaaactgggagggcgagaagggcagggtcttaacaggtgtgctcttgggcgtgaggctgttacaggaatccaggaaggacagactggtgctattctcagtgacaggggacagagccacacgcctcttcctctgccgcttgagcacagagggcggtgtgccaatgccagagcccccgacttcagtgctgggggagatggggatcagctcgccccggctgctccggctcaggtctgagatggtgtggccatccaggcggtactcgtcacactggcaccaggcctcgtgccgaattaacacccagcctcgacctagcctatgttcgtaccc

SEQ ID NO: 444015 - DNA, 2933 bp, Homo Sapiens
  misc_feature (458)..(501): n is a, c, g, or t
  misc_feature (537)..(601): n is a, c, g, or t
cgggatatgggttgtccgtgggtgatgtaagccccccgcggtgggggcgccgaccactttctgtgcttggctggccccgcgggcaacaagatatggcgggggagttgggggttgacccccccgcgcggtcgagatcccgtcgtgtgctagaggggttggtgtgatagtgttcgccgcccgcggaggggggccgtgtgagatatatatttccttcggtagagggggaggtggttgtgtgtccccacccatgtggtgggttccctcccccccctccgcgtgtttatggggtgttctttcctcacatgggtggttcccagctttcggccgctgtttgtcgcccccctgtcacggcgcgtgtgtgttaaactggcggctccgcacctccgtctgtctgctcgtatttagtgagaggcgcgtctcccttttagtggggcccccctcttgtgctcgcaaatatnnnnnnnnnnnnnnnnnnnnnnnnnnnnnnnnnnnnnnnnnnnnggagatatcttcttgtgcgcgcggccccccctctcnnnnnnnnnnnnnnnnnnnnnnnnnnnnnnnnnnnnnnnnnnnnnnnnnnnnnnnnnnnnnnnnnccaaagagagaggcaattttattcttccaaaaaaatgcaccaagagagggtgagcacaggagcacccctggccacatcccccatcctaagcagggtctgagatgaggccaggcctgacgtgggcttgggagaagctgacggagctccctgtggccttggggagggaaccaggcagacctggaagtggaactttgttgttagcaccaggagccgcccacagctgggctcggcaacagggcagcacatggccctgttgcctccacctgagagtctggggaggggctggtggcagaaggctccctgcaggaggtcacctgaatgactctcagattcacagaccccctctgcccccacaacccctgtaaacatgagaatgggctcgtgacaccctcaacacctcaggacaagatgagggtccgagatgtgtggctgggcttcaggcggcccaggagctgccgggctttctcctgcatgaaaagctggtccctggtccccccgcaggccaccgtcttccaggcactggacataggggcaggtgtcgtgaagtggcttcggggcttctgggccactgctgccttctcgggcttggcctgcaagaagccctggttgagcaagctgttgtcttctttgatacctgacagggtgaggctggaagagtttgaaggggcagttgtcggcaaggatagagacttgggcagtgtggacatcatcagcttcacatcctcatccacaatgtcaagagccagagacttccggactttcttgatggggctccgccgcagcccaggcttcctcttctgcttctcgggcctgatgtcgtcctcgatgatgagttcgatgccagcctcagaacgcagcacctccttcaagtcctcctccaggtgcggggtctgtggcaggggcttcaggggtccgtacttctccagggcgttcttgaacggggttggcgtgtggggagtgttgtccatggagtacttctgatctggggttacaaacgcagcatgtttctggtgcaggggtgtcttgtcccggtgcagtggtgtggtgaccaccaccttctggctgcacactggggtggatgtcagcgaggggctctccagctccaatgtgtcctgtttgttccagaagttcagaaactgggagggcgagaagggcagggtcttaacaggtgtgctcttgggcgtgaggctgttacaggaatccaggaaggacagactggtgctattctcagtgacaggggacagagccacacgcctcttcctctgccgcttgagcacagagggcggtgtgccaatgccagagcccccgacttcagtgctgggggagatggggatcagctcgccccggctgctccggctcaggtctgagatggtgtggccatccaggcggtactcggtcacactgggcaccagggcggaaggctggcggggtggcaggacttgctgctgatgtgacgcttgcagctgcactaggctgttgttgatactgtcctctgcagatggttcctcagggaggtcaaatttactcaggtcacaccaagcatcagggtccgactcgatcaagtccagggcttcagagaggctagaacccacagcggggatgaggaggttagctgcctccaccacccacttgtaaggcaggctcgtttctggtggggagccttcctggtcctcacgcttcgggaattcctccaagggctctggtgttcgcactgcgtccagatctgtaccgatgggctcctgttccttcgatgtggtggctgctgcaagttcctcctcactgttttcctcctcctttatggtaggagggacggagggccagttggtcagaagacttccctggccttccgtgggctgggcactctggaggccgtccttgtcctcgagctccagcagcaagtacactgggggcttgcagtctttggactcgctcaagaagcctcctgtgtccaccttccttttgatggtagagttccagtgattcttcacagcattgtctgtcctccctggcaacatcttggcgatctcggcccagcggttgcccagcaccttgtgggcctcgcagatgatgcggtcctcctcctcggtccagcaagacttcttcacctcagggttgaggtggttgtgccagcgttcacggcactgcttccccagccggcccttcaggtgcttggcaatcagtgtccactgctttgtgccatacttcttaaccagctcgatgactttttggtcttcctctttggtccatggccccttgacaaggtctggattcaaaactctcagccacctgtactggcattcctcgtgccgaattcgccacccaggcctcgctc

SEQ ID NO: 444016 - DNA, 1069 bp, Homo Sapiens
  misc_feature (952)..(979): n is a, c, g, or t
  misc_feature (997)..(1006): n is a, c, g, or t
ggcctgggtggcgaattcggcacgaggcttcaacccgcgccggcggcgactgcagttcctgcgagcgaggagcgcgggacctgctgacacgctgacgccttcgagcgcggcccggggcccggagcggccggagcagcccgggtcctgaccccggcccggctcccgctccgggctctgccggcgggcgggcgagcgcggcgcggtccgggccggggggatgtctcggcggacgcgctgcgaggatctggatgagctgcactaccaggacacagattcagatgtgccggagcagagggatagcaagtgcaaggtcaaatggacccatgaggaggatgagcagctgagggccctggtgaggcagtttggacagcaggactggaagttcctggccagccacttccctaaccgcactgaccagcaatgccagtacaggtggctgagagttttgaatccagaccttgtcaaggggccatggaccaaagaggaagaccaaaaagtcatcgagctggttaagaagtatggcacaaagcagtggacactgattgccaagcacctgaagggccggctggggaagcagtgccgtgaacgctggcacaaccacctcaaccctgaggtgaagaagtcttgctggaccgaggaggaggaccgcatcatctgcgaggcccacaaggtgctgggcaaccgctggggccgagatcgcccaagatgttgccagggaggacagacaatgctgtgaagaatccctggaactcttcccatcaaaaggaagggtggacccagggaggcttctttgagcgagtcccaagactgcaagccccccagtgtactttgctgctgggggctccaaggacaagggccgggccttccagagtggcccagccccccgggaagggccccggggaaatccttcttgaccaacttgggcccttccggtcccttccttacccttaannnnnnnnnnnnnnnnnnnnnnnnnnnnagggaatttgtcgggcannnnnnnnnnatttcaaagggaaccggggggcccccttcgggtcaccagaattttggggacccccaggggcct

SEQ ID NO: 444017 - DNA, 460 bp, Homo Sapiens
  misc_feature (450)..(450): n is a, c, g, or t
ttttttttcacttgtagagcctgtttattgcataactagcaggcacaaattccaaaacgattttacaacacttaaagggcacaataattacaggaatagaatgtacaataaaaagtacagaataatgagtgacagggatcaaacacgttggaataaaaggcatctcagttttcctatgcagcattttcttttctaggaacacgttaccttcaaccaggacaaggaaagaaagaaaactatactattggaaagctcatgggtgccattgaggacaaaaacaggcgagttttgctcttggttctgcaactgaatcacttgagaagccgtgcacagctcccgagttgtgcgtttagaattctgattacagctgtttccttctgttcagtcaagtgccagtttcataaagtgcacctctgccctatcagctttgggggaagggtggcatatggngaggaaggga

SEQ ID NO: 444018 - DNA, 510 bp, Homo Sapiens
  misc_feature (402)..(402): n is a, c, g, or t
  misc_feature (433)..(433): n is a, c, g, or t
cacttgtagagcctgtttattgcataactagcaggcacaaattccaaaacgattttacaacacttaaagggcacaataattacaggaatagaatgtacaataaaaagtacagaataatgagtgacagggatcaaacacgttggaataaaaggcatctcagttttcctatgcagcattttcttttctagggaacacgttaccttcaaccagggacaaggaaagaaagaaaactatactattgggaaagctcatggggtgccattgagggacaaaaacagggcgagttttgctcttgggttctgcaacttgaatcacttgaggaagccgtgcacagcttcccgaggttgtggcgtttaggaattcctggatttacatggaaatgctgtgtttgatctttggggncccattcactgttctttgggccaaatagggncctattttggcattcccgggcaggtgacggtttctgttgaaggggcttgggggggaccgcttgtttccctctggttc

SEQ ID NO: 444019 - DNA, 512 bp, Homo Sapiens
  misc_feature (462)..(462): n is a, c, g, or t
  misc_feature (471)..(471): n is a, c, g, or t
  misc_feature (500)..(500): n is a, c, g, or t
gatatgacagagtttaattggcagtattttttcttaatgatacataaaataatggttcatataataatcaaaggaatcacagatttgatgaaatatggtagatgctaccagaacactttgggaaaactggtaactaaacatcccagggaatgaatatgagattgatccttatccatctgaacacttcattcaacaccaacccatgtgccaggtaaaaaaatccactggtcttataatttcacaattgcgttctagttcccaaaacagacttgctctccgacagagacagctgtgcagggaagtgagcctgcttctctgtggggctcatctttgctgtcaccaaaccactggggatgaatctttccctacccaagttgttgcgggttagggggcctttggggggtttgacatacaggttggggcattcttcatttgacagcacaggacccaaagggctgcctntgggatttnttccgggggcattctctaccttgggattnagctggctgggg

SEQ ID NO: 444020 - DNA, 176 bp, Homo Sapiens
ccccttctggagtttatttgggagcagctgggatgatggggaccccacatccatagggctgggaggtcagggcaagggcaaggggaagaggaaagaagggtgcctggagaggagcagaactggggttgccggccaggccagcagagcgacaccctagaccgggccttagaagcgcc

SEQ ID NO: 444021 - DNA, 1042 bp, Homo Sapiens
tttttggaattaatcatttatcacaaaatgaacaatttcaattcttaaacatacaatcactttttttcatactaactcaaaatgagtaaacagaattttattcaaactttacaaatatcatttacatttagcctgagattaaacatgagaaagttcaacctgaagttagacttcattgcccagttaagcatctgaaaataaagctgagaatgaacatacatcatcaaacaaagcattccaatgaagtctggcaatgaattgtgacacaaactgaactttaatttgctctggtccacatggatcttcagggcctaaaagttcctgttttttaataatgatgggaaaatatctgcaaatggtaaatgcatgagggtttgacccggtgcaaaattttggttcaacctttctttagcggctgctttaggtgaccattaaaaaacaactccccaatccttactgttcaacatgtacttgaaaacatgcagcagcatggtacagtttattaaatttataaatatcagtacctgtaataaaatataaaatactgactattcctttttcaaatattaagtctctgaatgctatcattcatcctttggttccaaaccccatacaataagcactcataattacattgtagatttcgaatggagacagaacactgtacatactagtaggggaaggtggggttgctggtaggaataccaaagcactacaatcgaagaaagtaaacgtgaagcaaaaatacttgctgatatgtactgtacatttgtaaacacacataccgaagtagagtcaccgagcaaatatagttactaggaacagaatctacatcattggaataccgactggagatgcatagtagaaagataagttgaccggtatgcttgtgccacaatgatggacgagaagatacataagagcaaagagacccgctaaggggtgtgacagcaagacatcacagaaaagaagagagataaacgggtgtggaggaaagtagaaagacaagaggagaaggataaggaaaaaggtaagcaagcat

SEQ ID NO: 444022 - DNA, 536 bp, Homo Sapiens
gaaaggagattacttcctttaccaaaaatttaaacaataatcccaataatggccagttggcaaaattagggcaattcagtttctgcttacatcgttgaacaagacatgaaattgactaccttaaaagttacagcttccacagatgtgattaaaactcaaatgtattttcagaaaagaaaaatcagtaatctaataatacaacaatcatcacgcctcacaggtgtggctacagaaagccatcctgtttcttcccttttcagactgcatgacagaactcttacaatgcagctgtctgaacgtgcatgccatgcatgcctgtgcattttcttcccacgccagaaacaccaacgttagcagtgagaaacagcctcttgtagaggaatcgtcgttttgttatagatgttatagccacgtgtattctctctgatggacagctatagcagatcagcttatacttgtcctataattcattatatatcaaatggtgagcaaatcactagacagaacattccctgaaatagattttagtacagagg

SEQ ID NO: 444023 - DNA, 1132 bp, Homo Sapiens
  misc_feature (95)..(95): n is a, c, g, or t
  misc_feature (110)..(110): n is a, c, g, or t
  misc_feature (118)..(129): n is a, c, g, or t
  misc_feature (255)..(255): n is a, c, g, or t
gtggtatgcattccaaaacaaatttatttgcctgtggaggtgggggtgtaatttaaaaggccatgaaaactctcgaaagagaaaatattactttncagcaacggcaagtnctggtagnnnnnnnnnnnnctcaagatactttcgctccatttatattgcctctcaatatgaaaatacgcattgggttgaacaaaaaactgcaccaaaacatacttcgtgctcatttccctaacctcctaagaggaaattcctttnatgttcttctagaatatttccatccgtgtacaagcactttcttttttagcccaaagtgcccttgaatgtcgctgacgctcattaccttttagacaattgagacaaattctggaggttcccatctcgaagatttacgtaaaggccacgcccactgttcttaaacggcaccctaaaggggctcgaaggtgcgggcgagggttgggccattcctccgcttcgaagggggacccacggccgcccaagggaccgggggtgggagttgaacatcccgcctctccaggggagttatctgcgctcgcgcaccactggccggctccgcccttgccggaagtggccgagcgaggccggtctccgccgggcttcttccggtctgggacgcgggggagtcatcgtctccggaagtagaagctactcaccggaagtggttctcaggtgccggggtaagacccaaggtccggtctgtgttgtgaggacgccactgaggtcgggtcgtgctgactgatgaacgcggccgatggagccaccaggtgggcgcctgcaacagcttccgcccgcgcttcccgacttgcagtcccgtccgtgggctgtctgctcttgggctagttagccgctaagtagggtttagtagtacatttattttgattgaaagctcgcctgatttagctgcccttgacgaagcactgcttgtgcaaattatgtggcagccatttgtcataaaatcaagttgcacctgcagctcccacgtttgaacgcaactatatttaaggcatatatacattagaccagaaattagatcttttgcaattcaagctttagccagccactagagatcgccagtatgagcctccatgaacacagcaggctattcaaagcttgg

SEQ ID NO: 444024 - DNA, 667 bp, Homo Sapiens
  misc_feature (54)..(54): n is a, c, g, or t
  misc_feature (440)..(440): n is a, c, g, or t
  misc_feature (451)..(451): n is a, c, g, or t
ttttttttagcaataaggtcttatcatgcctaggctggtctcgaactcctgggnctcatgcaatcctaatgccttggccttccagtgctgggattacaggcgtgacacttgcacccagcttgaagatggcagttttcttgtatgctcacacagcacaaagtgacctcgctctagttccttccttttcttataaggactcgatctcatcggcgagccccaccctcacgatctcacctaagcctagtcacctcccaaaggccccacctcctaataccaccctcctgggggtcagggtttcaacatataaactttggggggggacacaaacatgcagtccttaacaccatcgtcatggaaatggaggccacagacctaccaacacccataacctcaagggcactgggtggggacagaggggtcttacccagcactggcatgtnggcagaagttnttccaacattatgtctctgtagaggcctccaggcagcacttaggaattgccaactcctctggtgaggtcactaccacatcctcaaggcccacagtctcctgaaacaacagaactttgctgcttcatggaggagcgtcagtatgtccacacacataggggtgtagtcacttccctctgccagggagaatggtggaggaagaatggattccattgggg

SEQ ID NO: 444025 - DNA, 1098 bp, Homo Sapiens
agcagtggaaaacaggtatccgtttatttttattttttattacccagaataagatgctgatggactaagccacgttgcttagctcttccgccgccaccttttaatactgggacagccccgtcaccccgccatgctggtaagcccgctctccctggtacgtggagtcctgtgagagcgccacgtcgatttgtgatttaaactcgtcaccaaggtaactgtcctgggacagctccggctgggagaggccgggctggctcatctgggaaggctggctcatggagatgtagccctgcgtcagggcgccctgagagaagggctgtgacgccacatcctggctggcttggctgttggggaggttagtctggctgggtccaggaagcccaaagcggttcttctggcgtcccccacgaccagtcttgcctttcggggtgcctcgccctgcagcaggcccgttggcttgtccaaaatagccaggcggtggcatgggtggcatgaccaggttgaaggggatgggaatgttcatggcagccacgtggctagggccggcactgatcatgccaatctggtcatgggtctggaagtacatgctggaaggccggccctggctgctccgatcatagacggagcctgggatgatggcctcccgggcatcatacatggctgtggtcatgaagcgggctcccgggttgatagtgttgaccagcttccgtggcttgctgaactgcatgaggctctcacgcaggttgttgagcggcccctccaccagcaccttctgctccttatagtagttcagcaggtggttccagagcggctgctttgatagtgccttcgggttgcccacaatgatgacgccataccttgctctggtcagggccacgttcagacgcctggggtcatttaaaaagccaatgccttggtgctcgttggcccgcacacaggacaggatgatgaagtccttctcgcgtccctgaaaggcgtccacactggcgatctccacctcctggatagagcttggtgtgcaggtagccgctgaactgcatgtactgcagcaggtaggagcgctggccctcgtagggcgtgatgatgccaatctggtcg

SEQ ID NO: 444026 - DNA, 558 bp, Homo Sapiens
  misc_feature (421)..(421): n is a, c, g, or t
ggaaaaaagctaaagttgccattttttccctttaccttcatttatctgtttgtctaatagtcactgaagaacatatctttttaaagaagtacgtgtgtgacttacattatacttctatctgcagtgctggttcagaacaccatgacatttgaccaaaggactcagcagagggaaggctgcccaggccccaagctcaccatgaaggatacagccacacccttggttcattctcgcacgaatttcagacctcccacctatgttgaagactctggctactggccacatgctcaccgacaccgttccacggcaaaagcccagcacatctcaggggtttcctgggaggccggatgaatgtgtgaggcctcctgggggcagccctcagcaggcaagggctttggcctgttggggtccacaactaagngtccacagtagaccagccctgctcaggcttggattctctcaacattaggcaaagggtctccccatacccatttgacagatgcaaaaactgaggctcaggaagctcaagtttgggaattctttgaattttatgtttcc

SEQ ID NO: 444027 - DNA, 366 bp, Homo Sapiens
agaaataaaaggaagccaaagtagtgtatttttttaaaagtttaaaacagaagcctgatgctgacattcacctgccccaactctcccctgacctgtgagcccagctgggtcaggcagggtgcagtatcatgccctgtgcaacctcttggcctgatcagaccacggctcgatttctccaggatttcctgctttgggaagccgtgctcgccccagcaggtgctgacttcatctcccacctagcagcaccgttctgtgcacaaaacccagacctgttagcagacaggccccgtgaggcaatgggagctgaggccacactcagcacaaggccatctgggctcctccagggtgtgtgctcgccctgcggta

SEQ ID NO: 444028 - DNA, 427 bp, Homo Sapiens
tttttctccagcaacttttattggccaaaggatgcagaaggatatatggtgtctgtggtttaattaacaggatcgtttataaaacaactttacatttatcttatttttaaaattcttgcttttgaataagctgatgtgttagaatagacatgctcctatcccatgcaaaaagctgttcaaaaatgagcagcttgcaaatctatcataaatgagacattgaataaaatattcttacagtgaggtctaagaagtagttcagtctgagaatttgcttcagatactttttgaaataaaatattcaaggcataaaaaaagcaaaactccaaaatatctaaaacagatacatactgatatttttatcctagtcatttcccagagtttttatgtgtctctgtgctctgctgattaaaataaacacaaaagcagt

SEQ ID NO: 444029 - DNA, 847 bp, Homo Sapiens
tataatttggggggttcaataggatccggaaaaaaaattcatttaatttaaattttcatatgtaaaggaatattacatctttccaggtttcccatagaaggaaatccattttggtatgtatgggtatatccccagagagggagaaaggccaaagtagcgcataaataaaaatacatacattttattacctattacagtatttattcttctacacacttctcagttcatgtatatacgggagctttcttacatcctgcacggatgcctgaggttccaccactaaggagtcttgtctctaagtgaagaagtcattaaagctgtttatgtaaagcctgtgtcttggagacagggtgttatctctttatcagtcacatgcattgggtatgaaattgccgattggattggctggcgtgcctgtcactcagcaccgccctgggaccagacagctttggtgaccgagctggagaggggctccagagctggactgaccctgagaaggctccacctcagagcagcacagggaggagatgaggccccactggtttccctggggccaggcctcatgtcaaattgcagaaacagcctgaggacagagccatggagagctgaggagagggcaggcttgtccattccaacttccatctctgcctctgacccacatctgtggaatcagggcggtgaaccagaagcctctggagtttctcagtgctctgatcccgtgaattcctcctctgtccccgtgatttccctatgacatggatgcttcccattctcaccaagtgcctgttgaaactttcctctgcctgacagctttcttctgttactttcaggtgatgacaggctccca

SEQ ID NO: 444030 - DNA, 334 bp, Homo Sapiens
caccgtttgtcaataattatattttgaatacattataaaatatgtcacattggaggacaatatttgtaaccatcaaaactttggggcctggtgagaagtgtaggctggagtcatattggatctctgcatatggagttgtcatctctcaaatgcttgcttcttcctcttcttcctccagaaaatcctgaggcgagcagctctggtactttgtttctgggcgtgtgcatcgggctgggtgctgaccctgggctgctctggttgataagggatctcttgccacacagactgcagggcgggcgtcccggggaaggaagttcctgcaggacagagagag

SEQ ID NO: 444031 - DNA, 378 bp, Homo Sapiens
  misc_feature (335)..(335): n is a, c, g, or t
  misc_feature (348)..(348): n is a, c, g, or t
caaagtagcaatgtgcttcaagatacagactaacaattttgtttcaaatgaaattcaagactacacaaatgcatcttcagttacacagcattttcaatcatgtgccattctgatttattcacacttctattctttgatcattgtaaataagctaatggattacagacacatatagataacagaatgtatgttcacatacataattttttataaacaccaaattaaatttgattgtttacaatttaaataagcacttaatggacccgttataggcccagtagaatattctattgtctataccatttttctctccatatatttgtgattttaagggnctggacataaaanctgcatgtaaatccaatgtcagcaggggct

SEQ ID NO: 444032 - DNA, 433 bp, Homo Sapiens
  misc_feature (103)..(213): n is a, c, g, or t
  misc_feature (312)..(312): n is a, c, g, or t
  misc_feature (341)..(341): n is a, c, g, or t
  misc_feature (397)..(397): n is a, c, g, or t
  misc_feature (399)..(399): n is a, c, g, or t
  misc_feature (402)..(402): n is a, c, g, or t
cataacatgaaaacagtttatttctaagttcagccagtttatatactgcatgttttaggtacagcacttagctcttctttttttagagatggagcctttctcnnnnnnnnnnnnnnnnnnnnnnnnnnnnnnnnnnnnnnnnnnnnnnnnnnnnnnnnnnnnnnnnnnnnnnnnnnnnnnnnnnnnnnnnnnnnnnnnnnnnnnnnnnnnnnntgagcactgcacctgcaccaggtccatgctcacgaaccacaggaagttccgatggcgtgccagctgccggagataccggcccaaggtgatgctgtccgnctcctcactgcctacaagcagctcctttncacacagggcgctattcacaaccagggctgagcaccctgggtccttttgggccgcntnaanccgccggcttaagagcttgtgttggccccag

SEQ ID NO: 444033 - DNA, 786 bp, Homo Sapiens
  misc_feature (429)..(448): n is a, c, g, or t
atataaaggaaaattctatgtaagttgaaggttcagaaatgcatatattttttacttacaaatattcatctgaccaaaattcaacataacctttatggaacacttaacaattgttttgtttttaaaataacatttcattcaaactgtatataattcagtaaagttttttatacagcaagcaatgcttaaaccctggaaaatctgtagaaaagagattttcacacaaaataagaaaagaaaaatctgaggtatccctcacacacacacatccattcattctggcccatgtacgtgcacatacacacgcatgcctgtgtgttcacacagacatattcattctcactcacaaagtggctgcagcataggcaaaaattgtaggtccaaaggaaaatgattgattgttctaataaagagtccgagtagctcagnnnnnnnnnnnnnnnnnnnncacaagagtcttctgaggaaattactacctcaaaaaaatgttctcaagatgaatttgagatctaagcctactaaactgcttttgcaaaacagctccctgcagtccaaggtgacttgtgcaaatagaaggaatcaaatgaggctggttcctgtacttccttaaacaaggaggtgggatgctcgcaggtgcccaggggcactcccatcatgccaggtactgctgcagtgccatctttgccttgtcacaaaggtttgaatctggtgactgactcagtttgtgtagaatatctacgatgcccaatcccgaaattccggaccggaccatctcttttggcggcg

SEQ ID NO: 444034 - DNA, 627 bp, Homo Sapiens
  misc_feature (605)..(605): n is a, c, g, or t
  misc_feature (609)..(609): n is a, c, g, or t
tatggcacgagtcagaatttatctatttagagataacttaaatacaacacagaagctaagcaggttcttaaaattactggtgtctacaaactgcctgaatttttgtctttgctagttagtttcaccctgcactgctagaaagaagcaacaacagtcagtatgtcattcttcaacatttaatggtgccacagggttaaataatggccttacttttttggcctgaattttgccaaaattagcttcaaactctttttttgatccatttagatttgctagatgtccatcctttattctgtagcctgaggaattcagtttccttatcctgtactgtactatctgtggtgttaattcaagaaccattggcgtctctccttatctgagctatggaaattccttctctcaataatccttgcattctctcttctaaaactggaacagaataatataaaagggcaggacatttcaaaactaattgcttcaggtcatgatctgtgcatttaaaagcatttttagagaaggaaatactattctgtatacttcttgggcaaagttgaaaagggaatccttggggttggatagaagctggggaatttcaaggctggtgnaccntgctctgggggaatttag

SEQ ID NO: 444035 - DNA, 1687 bp, Homo Sapiens
ctcagccagctgcgtaaactccgctggagcgcggcggcggagcaggcatttccagcagtgaggagacagccagaagcaagcttttggagctgaaggaacctgagacagaagctagtcccccctctgaattttactgatgaagaaactgaggccacagagctaaagtgacttttcccaaggtcgcccagcgaggacgtgggacttctcagacgtcaggagagtgatgtgagggagctgtgtgaccatagaaagtgacgtgttaaaaaccagcgctgccctctttgaaagccagggagcatcattcatttagcctgctgagaagaagaaaccaagtgtccgggattcagacctctctgcggccccaagtgttcgtggtgcttccagaggcagggctatgctcacattcatggcctctgacagcgaggaagaagtgtgtgatgagcggacgtccctaatgtcggccgagagccccacgccgcgctcctgccaggagggcaggcagggcccagaggatggagagaacactgcccagtggagaagccaggagaacgaggaggacggtgaggaggaccctgaccgctatgtctgtagtggggttcccgggcggccgccaggcctggaggaatgagctgaccctcaaatacggagcgaagcacgtgatcatgctgtttgtgcctgtcactctgtgcatgatcgtggtggtagccaccatcaagtctgtgcgcttctacacagagaagaatggacagctcatctacacgccattcactgaggacacaccctcggtgggccagcgcctcctcaactccgtgctgaacaccctcatcatgatcagcgtcatcgtggttatgaccatcttcttggtggtgctctacaagtaccgctgctacaagttcatccatggctggttgatcatgtcttcactgatgctgctgttcctcttcacctatatctaccttggggaagtgctcaagacctacaatgtggccatggactaccccaccctcttgctgactgtctgggaacttcggggcagtgggcatggtgtgcatccactggaagggccctctggtgctgcagcaggcctacctcatcatgatcagtgcgctcatggtcctattgttcatcaagttcctcccagagtggtccgcgtgggtcatcctgggcgccatctctgtgtatgatctcgtggctttgctgtgtcccaaatggcctgtgtgaatgctggtagaaactgcccaggagagaaatgagcccatattccctgccctgatatactcatctgccatggtgtggacggttggcatggcgaagctggacccctcctctcagggtgccctcagctcccctacgaccccggagatggaagaagactcccatgacagttttgggggacctccatacccccgaagtctttgagccctccttggactggctacccaggggaggagctggaggaaaaaagaagaagggggcgtgaaactttggcctcgggggacttcatccttcaaaggggggctggtgggccagggcggctgtcccggggcaacgggggaactggaaatacaaccttgggcctccttccggggccatcctccattgggttggggcctgaaccccctgctgcctgggtgggttcaaaaaaggggtggtccggccctcccccattttcaattcaggtttgggg

SEQ ID NO: 444036 - DNA, 354 bp, Homo Sapiens
  misc_feature (43)..(43): n is a, c, g, or t
  misc_feature (47)..(47): n is a, c, g, or t
  misc_feature (72)..(72): n is a, c, g, or t
ccccaaacctagagtactaaccctcttcacactaagaggcagnaagnggtttcacacacccttttatttaantcagctaaagtgggtgcggtgacacacacctgtaaactcaaccactaaggagactgaggcgggaggattacttgagcccaggagttcgagatcagcctgggcaacataacaagaccctgtctcaaataatacttagctattacccatattgcttttagcctgctgccaggaggggagaaatgttattgtttgaacagatgtcagatgtgagtaatgctcagctgtgttcaatgtagaaaattaataaaagttccaggagtcatcctggctagatcaagaagc

SEQ ID NO: 444037 - DNA, 1050 bp, Homo Sapiens
  misc_feature (621)..(646): n is a, c, g, or t
  misc_feature (682)..(682): n is a, c, g, or t
ccctgggccggcccattcttcacacgcctgccagaagctggaggggtgctggagacccatagagctgatgggagcagctggtgcctggccttcggctcctgcgtccccagaacccaagggaacgtcatggaggccacatggggccacccggctccctcgggatggctccgcctgcacttttgaaaccccggtttccttcaacgtccacattccaggtgaccacacgtgtctcctcctcctcatcttagcttccaggttcaccctaaccctgtactaacctgcttggtggacttggaaaagacttggctctgtcgggaaaggagagacggggcctccatcacgcctgttaccagaggatccccgagagccacaccagctctggacatcaccgcccctggaactggggccaccagccctgggcacgagatttgctctgactttatttatatggcatgaaatctctggtttattttgggattcttttgttgttggtgttgtcaaagtttgttttttctaaagttgtgtgattatatatttgacattttacatttcaaagaaaggtatgttgtctaacaggggaccaacagaaggtagtattgacaactgttcctgcttctactnnnnnnnnnnnnnnnnnnnnnnnnnnctaaattattgaacaattaaccacaatgtcatggtntcctgtttgttaatatcagggttgtaaggtgtcgctgaggtattgactgtgattcctttccccgcacctccaattctccagcggttggcccggtgtgagaactcgcgtctctttgagtgactggctaccagggcctgagaggtggccagcccagtgttgcatgcttggtgggggatgggaggcccccacctggaggctgcccgtgtcacaacgggcttaaaggggtccctgtggaacaccccgtggcgggggcgttcctgtgattcatttcctgacgggtaactctcaaagccggcgattggtaccattcccgcttagccatgtagcccctgctgttggggggggcccccatccccctggtttcctcc

SEQ ID NO: 444038 - DNA, 758 bp, Homo Sapiens
  misc_feature (89)..(117): n is a, c, g, or t
ctctatcaaatgtggtttttttattcaacaactgacaagcacttttctacagctgcacttgtagaacatcacatggcaaaaacaggagnnnnnnnnnnnnnnnnnnnnnnnnnnnnnaaccttattaaaaatgagattggtcctaaaaatatagaaagaaataaatttaaattcacaaaaaactgtacattatcaaaaagtcactaaaacaccacatttggttatataaaaagtcccttttgctgtaaaaggaacacagaaacttgttggtgttgatggtgtggtttcttcctgtcaaccagactgatggggagggaagcaaaagggcagggggtgggttgtctttttattttaaacctgctttccctaccaaatactcttgtcatgaagagaaaatccacctagctcaagggggcagtgagagatgaggaaagaaaaagcaagaaatggcccctttgatcatgccctatccctaccacccccaaccgacgctccagcccccacttcttcaaactgaggctaggaccccaccccgccatatgagtgcctggtccctagggaaagagatggagctgggagaggaacacaaagcaggaaccatggagatttcactcccccatccacctcacaatttcactcccccatccacctcacaatgaaattaatctagcacatcttataccaggggaaaattgccagggggaaaaagcagagcccccaactctaacagtttcaactgtctaacacaagtttgttac

SEQ ID NO: 444039 - DNA, 444 bp, Homo Sapiens
  misc_feature (373)..(373): n is a, c, g, or t
  misc_feature (401)..(401): n is a, c, g, or t
  misc_feature (412)..(412): n is a, c, g, or t
  misc_feature (421)..(421): n is a, c, g, or t
tttgcagtcagcaagtttactatgtttattaaagtcacataaatggtttgacaaaagtgcacaatagaatgacatcaccggtttgttataaatcacagtgaattactagaatacaacagtgtagttcctctgcacggaggattgcaggatggggtgaaaaggacagggtcttttccatcgattaggccagtcagattttactccccaactgtgtacctttgaaaagactgtgaggaaagctgagtttctttcctcatcttttctcctctaccagttactaagcaacaacaacaaaaagccatgcacaaattttacaacacctggataaaaaataggtacaaaatcttgtttcattttcatcatttggggcagnttgcattcttcggctccttcacttttcnggttagggccnttcatcacntggacttcaccccggattaaagg

SEQ ID NO: 444040 - DNA, 540 bp, Homo Sapiens
ttttttttagtttgttttggttcccaatatataatgtccactagatgctgggaggaaaatgtaattttattagggagaaacaagcaaaacaatcactaccttagagagcaaagtaaagaaattggggctgtaacttacaagccccagagaattaaaagcaagacaccccgacaagctaagaaaggtacagataccatttggcatactatctgccagaaggatcctaaaaatggggtgaatctagggacctacaactaacccatccagaatactgcaacctcctcccaccctccggggcagggggcgacacagagcagttcatcaggacccctgagccgcttcatcagatgctgagaacaaaacccagagacaaaaggcagaatgacgctgaaagtaggatttggaatcagagatgcgaggttgagtttccagctgtgtaatatgagggaccagctgtgttctctagaaccctgggttccttgaaggtgccctggagctacggggtgggaggagtggcagaagagcaggcaggaactggcc

SEQ ID NO: 444041 - DNA, 450 bp, Homo Sapiens
gcaaagttaacatttttattgaactgaaattggtgtagaacaggggcaaccacagctgctgagctctgtaacaactgaaaagcccctgtgacattttacctttgagagtcctaacacggtttgagtggaacagctgagaaacagcatatatatattttaacacctcaaaatagtttgaaatgagcctcacagccttgttcaatcttcagattacaaataacattgatagcatctcctgtggccttcagttagtagtgccagttaatattgtttctgaaaactttcctctcaaagtgctggctataattttttctccatccagtacacataagaaaaggatttagtaacacttgggcaagtaataaactgtagaactttaaaagtagtaaaggcatataccaagcatacgtgactccacacattgtcagaagggcagtggactggctaacg

SEQ ID NO: 444042 - DNA, 494 bp, Homo Sapiens
agagatgggggtctcactttcttgtctaggctgtaaattttcagtttaacaagtttcttatgtgatttgtggccacactgaagactcaccagaacagggtggggtggggaatacttaatcaatatttgtggaatttacccgatgaaatccagttattcctgctgaatttctctctcctccgggggggacataggcaaacgagctgagggaagggtgaatgctgcaaccctctctcctcagccctgcaggccgatccctggacataaactccttgaagttcagtgggcctctttccatgcacctaccacctacacctgctgcttttcaaggaaaccacaacctggaccgggaacagaactggacgtgccaaaatgcctgaggacacttcatcgaatgtggctggcttgatgggaagctggcatgactagaaatgtcaggagtcttccctctcgaggtttcaagctttgtgtttctgactcaatggtccggattga

SEQ ID NO: 444043 - DNA, 467 bp, Homo Sapiens
cactcttatgggtccatctttaattatgttaaatattaataaaagtacagcgtaactgcgattcacttaacataccttacaggactaagggagtacaatttaacacggtcacaacttttgagaacaaaaaggaacttcaataccatgttgtgagaaatgctccaatttgctttggttttgaatggcaggctcgagaaccaccgcccagaacggaacctattctgtcagcaagagccgggcctcgaatgagaggaagcagaggcagccgaagtgccctctggagagaaaggcccctggagggaaaaaccatgtctggatggcattgagtggcacagaagggatgggactgcatatataaaaaagatccgcataataaaccaaataatattggaaataataccttcagtaatacttctgtaagaagcagaattacaccacatgttattcacatgcataggagtgcataa

SEQ ID NO: 444044 - DNA, 433 bp, Homo Sapiens
  misc_feature (64)..(64): n is a, c, g, or t
  misc_feature (135)..(135): n is a, c, g, or t
  misc_feature (164)..(164): n is a, c, g, or t
  misc_feature (166)..(166): n is a, c, g, or t
cgtttggagagccagtcagattgaaagatctgggacgcggagtgcttcaccctggtcccctttnaagccgctggatgttttcccggaggaagaggaggcgctccacctggcgcaggaagtcatccagcccggatntccgcggccgtcactgcctcctgctgggncntctggctgagcacggccgccggggacaccggtcaggttcagggtcaaagccagagcgagcagcaaccaagggccgggcatcgcggcgtctgccaggagtgggctccacaggatgggtccgggatccggggactcgggatccgcagtcggcaggtcaggagtctgcagcgctgaggaccccgggcgcctgccgagccctcttcagatgggccgccgcttatatctgcccaggcggcggctcgagtgaggtcagcggggaggggtcttg

SEQ ID NO: 444045 - DNA, 947 bp, Homo Sapiens
  misc_feature (370)..(419): n is a, c, g, or t
aaatcttaaccgaagaaatatcttctttatctatgtccatttcctccaaaaaggaaaaatggcagtgtcagttgtacattacatatatctctctttctttttagtgtttaatcttagcacctgcacagcagagatctttacaattcattgcatatgctttctcccttctcccccaatacagcacctgaggcctaagaagcaactccctcaatgctccacaaaaggctgagacccttcttcatgacagagtgagtatagaaataacaaacatgcccaacgcttttatacagttgctagaacgttttcatttccaacaaatgaagattttcctccttttctttggaatattaatttacattttacaaatttnnnnnnnnnnnnnnnnnnnnnnnnnnnnnnnnnnnnnnnnnnnnnnnnnnacaacaacaggaaaagtccatggcaaggagtcccgggttagcagagtttggctgtcatctggtccgactgtttgaggatctccgtgttgtacaggtccaaggcgtggttcaccctgatgatctcgctgttggtcagtttcaggcggtgtttcagcatacaggagaacaagtccagctggggtttccccggggccacaggaggggccaggcgattaattcggtcccgaatatccaacaagaggagcatcaccgacgaagaggaatagaactggccgccctgtgtgtaggactggttgacctgctgcactacactgcgcaggaggtcggcgttgaacctcaggctatacccaaacacctgcacgtctgagatcttgatgtagaactgcctcttggagggatccgacaggtccacggggaccctggccagtctcatttcgccagtatggtaggtagccgagtcgacgtacgtaggtagattgtggccgtctcgacaagtgtatgcagcgattggccaggaaaagagtcggg

SEQ ID NO: 444046 - DNA, 381 bp, Homo Sapiens
  misc_feature (371)..(371): n is a, c, g, or t
agtgtaataattttattaataaaacgaacccatagggttcaaacaagcatacaaagtaattttttttcctgtgggttaaattgttacatttttaataataaaaataagaaagctttcatagttaacttaccaaaaacataacgcttgcctattgtttcttactgtgcaaaacaaaaacaaagttttgcccacagaaggattttgtgcaccaaaacatggcacattttcaatttcaaaatttctggcatcaaaatgaaaattccagggccacgtttttgttttttcaaactaaagaagaggcaagaggggggattcaccaggcaaataacagcggctacattttttaatctttcattcccggggggattttnctggttttct

SEQ ID NO: 444047 - DNA, 404 bp, Homo Sapiens
caccgagctctggggtctcgacacacacacagtacctttgaatcaacactttctccagctcagagtcacctggggcacatgtgtcacggccactcagctttcggccgcctgtgctgtgggccagggaatccagcggcgtctggcctcctgggcactgcttgcctggcctcgtgcttggattgtcccgggggctcctctccgtgtgtccttctgtggccgcaccgtgtggctccgcctcctggcccccagccagttctcagaaacgtggctggggcccagcacagcagcctgcaagggcccctgtttgttgatgcagcttttgttgaacaaaaatcgtgctctttcctggtttgaaagtagcatggatgtttccagtcttgttgattgtaatttgacgtgaagag

SEQ ID NO: 444048 - DNA, 482 bp, Homo Sapiens
  misc_feature (454)..(454): n is a, c, g, or t
ttttttttgtcatggtaaataatcttcaaaagcttataatgaaatactgcagtttcctattcaacgcttctcaccactagtcctactccatggaagcaaaataattttaactctcttagctgttttctctgatatttaccctcatgtttttaacatgtttatactgctactccatcagttatcaattttatacactgtctattgtgacagatgttaatttccccatttccactatctattccccccctccccatctttatgatatagctaaagcaaaatctgccagtattttgtttacaacaagactctttgctgctaagccaaggtgtgggtaatgactataggcaggttcacaaatatcccagttctcctgggggtgggcagggaatggtatttcccctattgccggtccctcactccacaacgggtcaggggtatggacttgctttggggnccaataaacaggaggtacttgtggtcac

SEQ ID NO: 444049 - DNA, 380 bp, Homo Sapiens
  misc_feature (325)..(325): n is a, c, g, or t
gcatttccacgtgtgcatttattgttattgctcagtatagtgttgaaaaggcagacaaatcccattaattacaaagagcacaagccaaagatacagagaaataaagagtgtacaataagagcacagtcacttcccagccccgattgtcccagagccccccagagcccgggcagcttacggaagctggaggcggcaccattccctcgctactctattataaaatatgtgcacacaagagttagcaaagtgtggtgacccccgagagggaaaggtccgggaggggagaggcaccacagggcatttacaaaacagactttaggggggntgagaaggggcagttcccaaagcagcctccatttttgtttttcagttgggagggg

SEQ ID NO: 444050 - DNA, 549 bp, Homo Sapiens
  misc_feature (529)..(529): n is a, c, g, or t
ttttttttaactattaaatctgtttagtaaagacaatttcgctcatacaaaacaacagtttacaacaatcgagtgctggacacaccatctgagacaagggaggcgctgcaggcacccagcgccttcccccatacacaaagacgaccctgggcgcccctccaccacctgcccctgagggagaggaaaggtgaagtattcctgccacctctccctccaagggaagggggagtggggggccatggcacagacagcctaccccagctgctcctcatctgtgctgggggaggcccctcccctcaccggccccgaagctgagttgtttggggtgatggcaaatggctgatgggcaagggggcaaagtcaggacatctttggtgcaaagactccccctgacccaccaggccacacaatggaaatctgagggaagacttcaaaagtggccctgcctttgcccacaaggggtagctggctgatgccccagaacccaggacaaacacaggaaattgcaaaagctcttgccaacagaagntgcccaggcttacctacatg

SEQ ID NO: 444051 - DNA, 481 bp, Homo Sapiens
ttttctttctgggaaacctggtatagtttaaaaacaacaagcatcctttattctccttccagtctcagtgtccagaggctacggttaacaggttttcaaagtgcaaatcatttcattcctcaaaagccagaggggaataaaaactgtacatcatctccaatccatattcatcaggagcgccctggggcttgtcatcctgctggcacggggccaggtttcagggcctggcggaaagaggtctgtaggctttgggacttggtgtctggccccttgagatgagattagttctccaataacctgaatgcctcttggggaggcggcagcacgcaggcgtagaatccctctagacagccagatcgggcgtgggtggagtttaaaccccaggatgttgctaacagccacaatgaaagctgggggtcagaggtaagagcctgctgagcaggagtggggatctgcaaagggactaagggggtagaataat

SEQ ID NO: 444052 - DNA, 539 bp, Homo Sapiens
tttttcttctcttggttttattgtttggtagaaaaacaggctctttaacactgaataaacatctcacgaactgtcgctcctagattacaaaaagtcaaaaccaatttcctttgacgccgggcccttgaatctgacattcaagtcaccgtaatagaaaccagagctgctgaaccttacattctggaaggtgcttgaacaaaggcatgttaaggaccgtttaaaacttctagcatgtaagaagatccatctttccttccaacgcctttggataataacagcagaatcccggagatctgctgctgagtttgagaaggccaagtttaaggattccaaactccagccttcaatatttctgcagaaacttagagaagtaacctccccgtcctctccgctggcttccccaagtacagatgcaggatgcaggtctttcttcctgctacccaggcaccgaggactcaaaccatctcaccgtctcatcactgggcttcttcaatgggctcttggaggaagaagcttttcgtttttgccaatcttcagtc

SEQ ID NO: 444053 - DNA, 882 bp, Homo Sapiens
  misc_feature (86)..(110): n is a, c, g, or t
  misc_feature (135)..(292): n is a, c, g, or t
ggggggaaaccaccccttttctttcccccgggttttttgggaaaaataataccccctttcccttttctctgggggggcggcccccnnnnnnnnnnnnnnnnnnnnnnnnngggggcggggggggcgccaaagaannnnnnnnnnnnnnnnnnnnnnnnnnnnnnnnnnnnnnnnnnnnnnnnnnnnnnnnnnnnnnnnnnnnnnnnnnnnnnnnnnnnnnnnnnnnnnnnnnnnnnnnnnnnnnnnnnnnnnnnnnnnnnnnnnnnnnnnnnnnnnnnnnnnnnnnnnnnnngactgtggcatcattctgctaactttattctttatacacagtttgggtaaagtaagaaccaaacactgcttccactccccctatcctcactccactttggggactttaaaaagtgactaatagttggtactcgtaaggattcccaagactgcagaatttagttgtacagcataactgtgcatttgatctctgaaagaaaataagagaccctctaagaggtggtgaccttagaagaatgaggaggggtcagggggtcttttaccccagttcagcctcacaccagcctgggagattttcccacctgcaacgcaaagcagcctgtaaattacatatagccacaatacacttaaattgagtcaatcaccgtggaaaatgggaactaaatacatcatccggtcttccttgaaaggacttgagtggtcacctgtgattagctcttctcctgaactaaggctgctgtgacccctaagctggcttttaaaatgtaatccacatacctcttagaaaacttaggctgaaatattttttaaatgactgatgccaaccatttcaccatacgcataccatgtttgataccctgtggcatcgat

SEQ ID NO: 444054 - DNA, 505 bp, Homo Sapiens
gtatatgctgttttccaaagcaggacatacttcccaaatacagtttcaattcctccactatctaaagagaggcgcctattagagcgcttcataataccccgaagtcctcgtgaacacactccaggtggaaaattctgctgtgatgatgtgctaaaaaataccctataactcaaatattacacaataatcaacactaattaataaggtaattctacgcctatgatcacaaaacaggtgaaaggaaaacccagatgactttattcccagtttagagctcaatcattatcccaaccaaactctctccagaagaaaatttccacacagcctataaggggcactaaaatactttcccatccttcacagtcaggcagcaaagcaagcccacctgtaaattttttcaaaagctgttgaatgtggaattttagctcaaattgtatgctggcacatcagctcctgtttccaagtcccgatttggtcaattttgttactaaggaagcaataaagc

SEQ ID NO: 444055 - DNA, 528 bp, Homo Sapiens
  misc_feature (492)..(492): n is a, c, g, or t
aacaattaaaaggtttaaaattactcttttacttttattacaataaataattatcaataatagaattaaacaattttcaattaaaacctactgcattactttggggtttcacagcagcagaaacaaacataaatccagttgaaagggcaaggcttccagaatccagtgacaagaaacagtctggtcttgattattcgggctagcaatgggaaatactgatacagataatgcaaaaccaatgaaatgcatcggcatactctctttgtacatcacattatctgacactttaaaatattccagctaagtaatttaagcaagccatgaggctctgtttctgcaacagttagagttctcccccagcaagcccgcagcacaactgctcccagagccaccctctggccaggaaacgggccccatcatcatgcagacctggaaggctccaccctggtggaagcagccatctttctcaaaggtctttctgggtcacacaanacatggttaaaggaaaatgggaaagtgacatattta

SEQ ID NO: 444056 - DNA, 452 bp, Homo Sapiens
  misc_feature (182)..(182): n is a, c, g, or t
  misc_feature (214)..(214): n is a, c, g, or t
  misc_feature (405)..(405): n is a, c, g, or t
  misc_feature (422)..(422): n is a, c, g, or t
  misc_feature (430)..(430): n is a, c, g, or t
ttttttaacaattaaaaggatttaaaaattactcttttacttttattacaataaataattatcaataatagaattaaacaattttcaattaaaacctactgcattactttggggtttcacagcagcagaaacaaacataaatccagttgaaagggcaaggcttccagaatccagtgacaagnaaacagtctggtcttgattattcgggactagncaatggggaaatactggatacagataatggcaaaaacaatgaaatgcatcggcatactctctttggtacatcacattatctggacactttaaaatattccagctaaggtaatttaaggcaggccatggaggctctgttttctggcaacagttggggtttctccccccggcaggcccggcggcacaactggntcccggggccacccttnggcccggnaacggggccccttcttctggcg

SEQ ID NO: 444057 - DNA, 434 bp, Homo Sapiens
  misc_feature (370)..(370): n is a, c, g, or t
aaggggaaaaaagctttataaataggaaaacaaagatcaacatcattaagttacaggatttgcctagttttacattaatttctgtctcaaactgattacaacctcaaaggcccatcatccctcatttgaattcgaatgcattctttcttcccaagaaggaactaaaatggagctgttcgcagttcaaacacggaagggaccacagtggctcaaggattggggacggcctgggcagtcacatcagtcagtgcaaaatctggcattttattaaaggccatttggggaaggatccattcaaaaattacattgtggctcaggtaaaaatttaacccttttcatggctggattaatggaagggttattcacgggnattggatattttgtggtaattattttacaggcaacaattggaatttttacataagttttaggat

SEQ ID NO: 444058 - DNA, 734 bp, Homo Sapiens
  misc_feature (652)..(652): n is a, c, g, or t
  misc_feature (692)..(692): n is a, c, g, or t
  misc_feature (716)..(716): n is a, c, g, or t
aaggggaaaaaagctttataaataggaaaacaaagatcaacatcattaagttacaggatttgcctagttttacattaatttctgtctcaaactgattacaacctcaaaggcccatcatccctcatttgaattcgaatgcattctttcttcccaagaaggaactaaaatggagctgttcgcagttcaaacacgaaggaccacagtgctcaagattgggacggcctggcagtcacatcagtcagtgcaaaatctgcattttattaaagacatttgggaagatccattcaaaaatacattgtgctcagtaaaaattaaccatttcatgctgataatgaaggttatcacggaatagatatttgtgtaatatttacagcaacaatagaaattttacataagtttagaatggaattacatgccagaaaaaacttgataagatgtaccaacacatgatacaaagagttatagaaacactttacaaatggttcataattcacttgtgaggatttaagtattcaacactttaaattcagtttgggattcaaaaattaaaaggattaacaatcacatcacacccttgccacaggtaaaaaggtatgggaatttacactttattataatggggtttattaaaggtctggtggcaattaagganttttccccctggattcttccatcctacccccatacttggntggtcaccatccttctggggcttntcccccattttttagggg

SEQ ID NO: 444059 - DNA, 363 bp, Homo Sapiens
ttttaggggtaaagaggtagtacactttattgaccgggttctctcaacatgttgcaacctctggcaaagccagatcctgggctttgcaccatcccatccaccaaagacagaagagaatgcatctcatgaacatccacgtggcctccagacagcagagcacaggggcgggtgtggggagggcggctgccagccaggggtgggtggacgaggggcgaaagctctgggtgccgggctgggggcacccctgaggcccctccagacctggccagcccctcactcccccagttgaggtttcgtgtggttcacagtgagactggcttagattggcagcgggcgatggtagacagatgccctccacgctcc

SEQ ID NO: 444060 - DNA, 525 bp, Homo Sapiens
  misc_feature (463)..(463): n is a, c, g, or t
  misc_feature (470)..(470): n is a, c, g, or t
ttttttttggaattttgtaagatttattgagaatagaacaggcttcctgtcccctaaccctgtggtggatcctgagaagagggaagcctaggtctgggtggtgtgggctggaggctaacccacctgcaaatggggactcccaggcccccgcgggtgcatacagtgaacaaagtaattgctctcccctatcacccctgatccttacctgcctggcccccaaggtctcctggggaccagagatccctgcatagccaggagccagcctgggcccacctcaaggggcaggaagcaagggtagcactttgggaacctgtttttgttcagggggtgggcaggcatgccctgggccccgaggtttgaagcccacaggttttgccactttggtcctgggtgttgcccttttattcccaggggacaatggcttagcaaagttcctatggtgttaagccttaaggtgcaaagnttggttnaatttaacccctatttaaggggccttgatttgaaatagacattcgggaagtgggg

SEQ ID NO: 444061 - DNA, 464 bp, Homo Sapiens
ttttggaattttgtaagatttattgagaatagaacaggcttcctgtcccctaaccctgtggtggatcctgagaagagggaagcctaggtctgggtggtgtgggctggaggccctacccacctgcaaatggggactcccaggcccccgcgggtgcatacagtgaacaaagtaattgctctcccctatcacccctgatccttacctgcctggcccccaaggtctcctggggaccagagatccctgcatagccaggagccagcctggcccacctcaaggggcaggaagcaagggtagcactgtggaacctgtttttgtcagggggtggcaggcatgccccggccccgaggctgaagcccacaggtctgccacttggtcctggtgtgcccctgtatcccaggggacatggctgagcaaagtcctatgtgttagcctgaggtgcaagctggctcacttcaccccctact

SEQ ID NO: 444062 - DNA, 618 bp, Homo Sapiens
cttttgcaaacatctttattaatctcatataaaaataaggtccatggacggtcctcggggctggggcttgcgggggcgaggtgcactttataagttacaggccaggctcctgctgaggctaagtatggctatttggagggggctttagggtgggtgctgcaacagcattttgggggaaggggcgggcgatgctgccctctgtggccaagaggaggatgcaccagcccgtttgaggcgggccacagcggaggaggggctgcccggccagccgagctgaggaccaccttccttgagcctcagcctgtccacggccccacacccctgcagaatccaccttgcagaaatagcggctacagcgagaggtcggaggttgaccttgcagtggggggcccgggggacgccgacgggcacttgcggcggcctgtgtctgcgcggatgtagggctggttccgcagatctgaggggctagaggggcatctcttctcccaggctggcctcacagaggagccgggatgtccgcttgccggtgcgggccgtgaagggcaccgtcttgatcactgtgatgatgtcttcaatggccccatcacggtcgctctcataaatgagtggctccttcta

SEQ ID NO: 444063 - DNA, 869 bp, Homo Sapiens
tttcgaagggccggaaggcggcccgcacaaggacaccgctcggtggtcgcgaaaagtaaatggggccacgcacagccccctttattggcttggggctagttatgcaggagccacgcgccagggccgctggagtgcccagctccggcccggggcagctgcccgaggaacatggcctacacaaggccctcggcccaggcccgaagcaggagggcagctgggagcaccagggcaccgggcactgccctctcccactgcttgacgcagggtttcagagaaggccattcactgccctttggggctgggcccatggcggtgatgatttgggaagagaggagcaaggcagacggtgaggcaggagcttggaggtcagggcccacagcagcccctccacaggggtgccccgtctgcaaatcagcatgagaaggtcactccttgtgcagacaccacaccagcgtctggcccacccccgtcatgctcagcacacggaagcccctgcgttccagcttgtccaggactatgcggggagggtcatcgacgtagtattcataaaagttgtttcccaaggctcttctctttgaagcccccagatgctgcatcagctctggatccgactgttcatcgcccaccatagtggggcccacctccatgcggatctgggtgctgatgagcaggtagggcatggtgcacgcgtcccggcctggctcccaccgggggctctaggctggacgccgactccagcccttctcgcgtcgggactgcgacgcgcagctgggagtcccgttactccggctctggccacaggcggccctcgtgccgaattcgccacccaggcctcgctaccttatttcgtgctgcggttctttatcgag

SEQ ID NO: 444064 - DNA, 384 bp, Homo Sapiens
  misc_feature (320)..(320): n is a, c, g, or t
  misc_feature (358)..(358): n is a, c, g, or t
ggatggttaattctgcagaatggcattttatttaacagacagcatggacttcatacatatccattatcagtgccttgaaaaccaaacaactttaaaagttagcagcagtttctgcaagtacaaaaatacacatttattacataacatatggtagtaaaatttgtcaagatatattatacaaactcaaagcattttaggataaagcatcagtctaatatattatagattgatggagtataataaaatgacatatagtctgtcttcaaatcatacaatataatactttacaggcaatattaacaaactattcacattagganttacaggggtatctagggggaacacggatagtaggggntgggttatttaaaaaacctccggcca

SEQ ID NO: 444065 - DNA, 1930 bp, Homo Sapiens
  misc_feature (709)..(709): n is a, c, g, or t
actgaacataggaagcctgctgctcagggcccaggtgctgtgggtcaaaggaaacacagacacgtttcataaatctttcttttattccaagtttcaagtatgtgtaagtgtctgtgatgacacatggtgctcagtgagcgccctgtcacccaggaccctggttatagcaccgttgaatcaaaaacccacagaattggaacaacaggaagatgagtcacttacacagtgggttggtttttccttagatttgtacttccaagggcccagatgtccaatattaaatgccaataaatttgtgcttcaaaagtctgtgaaaatataataatagtatcttgaaaaacaaggggtgggggttgtggatagggaagcaccaagtctgagctcaccaaatcagaaaacacgtggcaccattatctatgtgactataatagactggagggtttcattggaagagaggtctagatattcaagtttgctgaaaatgacctaagaggaggagaaatggggttcggcctgaccctctctgggggggctgatgagcccgcatttgtccacgtgtcactggagaagagcgcggctccactgtgtctgtggtgagctcggtggcttgaatgggacaagctgatgacaacctgtctgtgggcctcatcccggtcaagactggctcttggtgctgctccagcagctctgtggacaaaccccacccccngcaaggccttctcaggccccaagggtcaggtagcagccccccatgaatgatgggagggtccctttcctcctgagcttagacacagctgtaggggtctggacagggtgggggccgggctgggtgagggcacgtggcattcgttcagactcagttgttggggggaagtcccatggaagatgtggtgtggcctgaagacaggagttgaccacgcaggcttttttactgcggggacagctggttgtttaagagcccgctgaagtgctcaaactttttttccgtctcttcgctgaaggaaccacctatgtggcagttgtacatccagatgcggtggccgtcatagcggctcctgcatttcatgatgttgttggagtaatcggattctgcaacctcgaagttggggttaataacaacctggaacaggtagtctccagggggcacgtcagtgatgtcaacccactggcagtcgatgtcatggcggtacatgtcccagcagcccatggtgatgccctgatcgccgaagttggcacactcgtaattcttctggatgtctccttcacattctgtgtcctccaagcagaagctggccttgtggccctctgccaccttggtgccattgaggttcagcaggtcatagtgggtgaacacctccatgctgtggtagtgcctgtgacagtcgtgccagatccacgcgtggcggccgttcttgggccggaagtcggactggccattgttgtggatctgggaggagaagcgcaggagccggcggtagcccgtggtggggtcggtctgcgcggctgaggccgagaggcagttctcctccatggcacactgcagcaggaacatgggccggtcctccaggtaggtggtctgctgcaccatctccgcattgaggaccaggtcaggggcggtttctgagcaggcaactccggccccgtactgcactctgccctgggggcaggccacgtcctccccgtcgtggcggcagtgcgccagggacagctccgttcccgagcacttcactccactcatgaccactttgttgctgttgacatctccgtgccaataccaggtctcctggaaggcgttgctggcgaattccaggcccagctggcggcagaccaccatggcctccacgatgccccagttttggccacacaccatcccccacacaagggacccgtttctctccaccagcacctccactcggccctcgtagggatt

SEQ ID NO: 444066 - DNA, 484 bp, Homo Sapiens
  misc_feature (405)..(405): n is a, c, g, or t
  misc_feature (414)..(414): n is a, c, g, or t
  misc_feature (419)..(419): n is a, c, g, or t
  misc_feature (453)..(453): n is a, c, g, or t
attggtgtattacaattactttattcagatctattacacaaagagatggtattaagcaacactggcttgagtgatatcttgcaacacagaacaggttcacgatgtcggaaaaccaagaatgctcagggcctcagaaagctgagctctaaagaccctgcacagtcatgctgtcccaataggtttcatgttgtcatgaatgatgtcaaagaaaaaaatttttcaatgctacctattaaagcacagtaagactttatttagggaccatcatgacaggtacggggaccacagcaatggggacttttagtaggggagagagactggcctcagctctgaatccaccatgggaaactggggttttatagacagggaacaggggtcaggggcagtgggatgggaagattaccncgagggaantttcnggggagcttcctctaaaccgacctaacaggtttntagctgaaggtagggccattgacccagactc

SEQ ID NO: 444067 - DNA, 450 bp, Homo Sapiens
  misc_feature (222)..(222): n is a, c, g, or t
  misc_feature (272)..(272): n is a, c, g, or t
  misc_feature (351)..(351): n is a, c, g, or t
  misc_feature (395)..(395): n is a, c, g, or t
  misc_feature (410)..(410): n is a, c, g, or t
gatgtggaaaggaacaacatttattgagctcttatcgggtgctagacccagttctaaggtcttaaccctcagtaatccctgtggccaccctgttaggtggatgggggctgagctcactggacagatggggtaacgggaggcacacagaggttacgacactaaccagatagaggctccagatcctggagctgaaaaaacccttgtttggggtcttaagaccangaatgggacccagatcatcccgctgagtcaaccctgggtggaggaaaccngtctactccacactgactgtacaagtcaggcatcaggggatgggagaccctgacattttagagccttaaaaagaccttntacacttcttttagtatggtcagtttggggtcatataagggganttcagggattccccntcaaggccccgtcctttttttctttgaacccataggtttt

SEQ ID NO: 444068 - DNA, 2561 bp, Homo Sapiens
ggggagggcacccactagtcacagtaccatctgtggtaccctccatgttacaggatgggactgtgtgccccgcatgggggccccctcacacatcaaccccacacgcctccgctgcaccactgcccttcagctggggaacaatgaccttggctccagggaagtccatagcagctcgcggcgcttccccagtgtccaactgaggctgccctccacaggtgtagtgtgttcatcaatgtcattcccatacaggcagaggcctgcgtccaggcgcaggctgtcctggctgcccagccctgccagcttcacctctggttttttcagaatagctgttgcccaggtgaactgccccccgctaccggcaccgagatctccacaccatcctctcctgtgtagccacagcgggtcacgcggcagccagacacgccaacacctccatcacagcactggtcatgaagggcagtttcctcaggtcatctgccacgccggcctgtagtacctgggctgcagtggggccttgcagagctagcagggcattatccaacacctccaggcccacatctctgccctggttctgaagctccctgaccttgtcctgcatgagggccaaatctttctcccagcagccagcgttggacaccacatacaggtggccctcagaagtattggttacaatcaagtcatctaagatgcctccagcctcgttggtaaacagcgacagtgtcccctggtttggtcttagctctgcaatgtctccaaccactagactctccatcagcttcacccggtcactaccaagtatcttggtctgcagcatatgagacacgtcaaagagcgagcagtgctggcgtgtgtgcaggtgcgagtcagtgtgactgtcccggtactgcactggcagactccaacccgcaaacgccaccattttcccgccgtgggccaggtggaagtcatagagcggtgtcctgcggagcacctcctgtgcgcaactaagtggacgacacaaggccggggggaatgcctgcaggcgaaagcccagacgggccaccacacttacagccctctgcatcgtcgcctgcaacgagtgcagacggcgcacagaggccaccacactgccaggcacgccgggagatgtagtccaggcctctgctcggacaggtctctctccggagcaaaggatctgaagggggcgtgggcagccccaagggcaggctgggatttagagcagagaatgcaggaacccgcaaccacagggaagaagcctccagctctttcggctgactcttcagggcagctcgggcaatccagagctgattgggctgcccagaacaaagctaggggctagaccgccccctgcagaaccgccctgtctccagagggtcaaagttctggaaagggctgaaaggtctgaatcatacctttaggacctcaagagagtaaggtcaagtgggggtggggaaggtgggccagcctggcaggtaggcagcaccacagtagtctgtcctcatgtggacccctagttccacagctctcccgccaggcagacacaggcagccagcagtcatgcattccacaagtatttattgatcttactgcataccaggccctcagatggggacacagccacgaatgaagcatggtccctgctaccacaaggtcctcttcacttacacacacactgaggactactgcttcgtcacgctttccgaagcagctgagtggggctatgtaagtgaccttgcagatgaagtcgccacctgcaagaactcacaggtgagaacagagggtggccaccaaaaggtcactgaactcccccgagaaaactgttgagccacacacatgtccaactttccaggtccaagacatactgcagtactgctttgtaatagccaccaggtgcaaagccaggaagaaccagagggaaacaggtttttctcacatgagggaagagcagcctgcatcacttaatggttggactgagttaatgcaggacttaggcctcttaaaaggcaacaatgagaacccttacttggacccactccccaccacggttgatctctcattatgctgagcatatctcttggaaaggggcaggccgggcgcggtggctcatgcctgcaatcccagttcttatgctcaggccctggttttgctagagacacgtgcccaggccctatgggcacacccacttgaacatatattcaggagccagctcagaaaccaagagactcaggctgcccaaatcttcagagtttccttcctaggcacggcagcacggaagagttccagactgggaccatttctctctgtggcatagcaccacatggaaacgaaaaccactagggggacacacaggaagaaacctactgtttctgtttcttcctccagtgtcccaagtgccatggcagccatggccttccatgtccatacatggggcaggttttagtaggtcagcccagcccaactgcactgacatgagggagcaggcagaagacaggaatgtgcatgttgccagaaggggcagagggcactcagggattctcagtaagtacaactgactggagtcc

SEQ ID NO: 444069 - DNA, 1302 bp, Homo Sapiens
  misc_feature (141)..(161): n is a, c, g, or t
aattgaacaaatatttattaagcacctactttgtgccagacattgtgctaggcaccctcactgtgtgctgttcccacagcacaatcatctgctcagaaattaaaaccaagaaaaggaacactgttgcaaccgtacaaactnnnnnnnnnnnnnnnnnnnnncagtagcgtggatgcaggcaactccgggccagaaaatgcacccaccagaagcttgttttccatctctcagaaagtttccactaaacagttgttttaaagcctctcgatgttgacagagaggaatgttgttctctctgtgccccccggggctggtgtctggtggacattcaaatactctgaatgctatttgataaaaggagcctgatggctttgtgttaaagaatatcaatatttgggttttccaaaatgcgtgttttttcagattcatatggttgcaacagcccttatgaaagatataaacatccctgccctgactgcataaatgttgaaggtagacctagttctggtttcctgagtcagaatcttcccagttgtccacaaccctcacaaggccagagaagcgagaggagatttctattctggaaaggagtgagtggatggcacaactggtttggaaacacgacacactgcgcctgcatttacagaagcaatgcacacagaggaacgtcctagcgctatctggtctcgcacacatgcttgggactcacggtgggggtcctgggcctctgccagccctagttgttggtgcccagcctgggaggcctgggcggaagttatgcaggcctggatcttccggtccagcgccaccaggaagcgcctccaggtggcgctgtcgggatttgctctcctcagggcctatctttagggaacgcactttatcttccaagttttgatcctctctctgccgcctccatcttctcagagacacagtcgcactctgactcacggcctcttcctctgctccgcactggccgtcgactcctgcagccccgtgggcagccggaagtcggtctcccgccgggtctgcagctccatctcccacctcttcccgtgggcagctctgcgtcgaggccgccttcagcttgtggttcccagactgcaggtgcgtgtcggctgcagcggcctgagaggcctttcatcgtccgtcccgttgacactggatgccggagtagaagatggggctccacgccctgattctcaggatgattactcgagggctccatgttctcctgggtcttgtctttggctgtcttggccgcttcttccacctcctggaatttctctgcaaactttgtcagct

SEQ ID NO: 444070 - DNA, 482 bp, Homo Sapiens
  misc_feature (354)..(427): n is a, c, g, or t
  misc_feature (434)..(434): n is a, c, g, or t
  misc_feature (458)..(458): n is a, c, g, or t
tattaaatcacaatgatttttattaaccatgtctaactacgtatctgtgccacagcttgcagtgaggcaggccactcgtggcagatacaaggggctcctgagaggcagtgggtaggatggtcacactctgcccattgccctcctggaggccccatttcctcatcataaaatgagggacttttaaataaagtgctatgccgggggataattattttgatgtgtttacctagggtttttcatacaaggggccaggttggaaacccacagccatgtgttaatggccacgtggggtgagcagcaatccatcatgaatggcctacaggaaggcctcggcttttggagataaagagtagnnnnnnnnnnnnnnnnnnnnnnnnnnnnnnnnnnnnnnnnnnnnnnnnnnnnnnnnnnnnnnnnnnnnnnnnnngccagcngggcaaacacagcaaaaccctgtntgtctctattaaaagtttaaaaaa

SEQ ID NO: 444071 - DNA, 1087 bp, Homo Sapiens
ttttaggccttagaaccttagcactttaatagaattagagactttggaatttcaggtccttagaaccaaagactcacagcatctttgaaacctagaacctttgaatctagactctttaaaccttggactctagagtcttggaatgttaacacctgggagggcttcagatattgcaatccaaccccttccttttacagatggtgatgctactgctttcaaggtgatgctactgcacagagaaggggagggacctgtctgggatggaggtgggataggtaggaagacagggctgcaagtggggataaggcgtggggtgggaaagtgggaaggttgggagttttccccagtgggcagtgctttagcttgggatccttagagggagtaccaggtggagggttgtctcaggcaccatcctcctgccctggggctgctggggagcccctatcagcaggctgagcggggctaggggttgtggaagggcagaggacatagcgtccagcaggatggacctcagccgcaagtgaaggcagctaacaggaatccttagggtctggctgggttggggggtcagctcctcctgcagctccagggggttcaggataacctccaccctcatccatgttgacatagaggatttcgtcaggctcctgggcaggaggcaaggccttcagtgtgttctccaaatcttcccgcagctctgtaaaacttggccggtcctggggatttagctcccagcaccgcgacatcaaggcatacagtccatccagacagtccgcaggctgcttcaggcgatttccctggcgcagatagtcataaatctcgctgttctccacgcccggatatggggtttggcctcttgtggcaatctcccacattgtcaccccgaaggaccacacatcgctcttgctggtgtagacacggtcagctagactctcaatggcaatccacttgactggcatcttggcgatacgtccctggcggtagtagtccccattgtagatcttcttggagagcccgaagtccgccacacacacggacatgttctcattcagcatgcagttcctggccgccaggtcccggtgtatga

SEQ ID NO: 444072 - DNA, 434 bp, Homo Sapiens
  misc_feature (11)..(11): n is a, c, g, or t
  misc_feature (22)..(22): n is a, c, g, or t
  misc_feature (101)..(101): n is a, c, g, or t
ggacctaatcncccattttgangtccagtaaaagtgtgttaccgcaaattggccttcaaaaattaaaccctgtaacaaactttgagtcttgaaatgcatgnctatgtatgatcttaaaaacatgtaggtaggcttattagttcatagaggttcatagtatttcatatgtttttcagactatatgtagggaattgctgacaaatcttggtatcactaaatccattatcatgttctgaaatgtcaccaaattgagcctacatattgtgaagagtgagtgtatggccatatagtgtatggcctcaagattttgtcttataatttaagtttcaatgtccacacctcatctaaattagggtaccatttggactatcatgtttaataaatttaccactaagtaattacattaaaaacaaatttatcttaaagaaaaaaaa

SEQ ID NO: 444073 - DNA, 468 bp, Homo Sapiens
aatatatagaaaagtttcatttattcgaattaaattatggtatgagtttcatatacaaataaattctgtgtaaataatacaaaatgctacaaatttcaatcttgtaaaaatgcaaaaatacttgtaatactatacatatataattcctttcacatgaccaacatgtacagtagttgacacgatgcacacgcgcttcccccccacagctgaggctgctgaggcagcatcaagccttcgcttctgtgacgtcagcgctccctcccgcggctgcctcacggtgaggccagcaggccctccccctgacacccccagctcaagatgcttcagattatgagccatcatcaggagggacgctacctattctctggctagttagagggcactgtcatgggggaaactggggtcctcctaaagccttaacaccagcctgctaaactggagaacacgcctctaccgtggagaagcgcg

SEQ ID NO: 444074 - DNA, 531 bp, Homo Sapiens
aagctaacatttattgaatatggccaactttgttctaaacatatttcaagtattatcacatttgatctttttatgaagtgggtagtacatttatctcaatttcacagataagggaacagtcaaggaggttacaaaacatgcccaaggccactcagctagtgcgcggctcagccagtgtcagatgcgtgagcctgtgtctcaggccaggctgttactcaccactttatcctgcctcccactctgtgacaattgtttgtgtgtgtagttgtgtgtccagggctccatcctgttctggaagaagtccctgagccttagacggtgagggaacacaggacattctcccagatgtttgaagacagctctcgtattccccacctaagccttcttttttcctgttcctcttgtgatagagcgcctaaatcctttagcacccagcttgccctggcgtgggatcactctgccctgcatcatttgaagtataagacccagaactaaaacccacatccaagttgtctgacctaccccatgcaa

SEQ ID NO: 444075 - DNA, 1045 bp, Homo Sapiens
  misc_feature (469)..(504): n is a, c, g, or t
gacaccatagaatgtatatccagctggctgcagtggcatgacaggtatcattctattcacaaatatttacaagatctattcagactggtaaattgtaatgataataaataagtgtgaatatattggctcaagtaaggaaaccaagctactgatttctaaacggacactcgagtccatagctagatattggtggccccctctgagatcgggggtataaggtgtgctgaaacttttttaaattattccaacccgctttaacggttttgtaatataaaatgtgctcctttttggatatagataaaatatttatgcttctatgttcatctgctcatgtagggtttaccatattcccaagtatattcccatgtggatggtactgaattctgatcatacccgtttcccatcaggatttatcaggatctgaaacatcctgccagataagctggttgaccatccccccgccagttcnnnnnnnnnnnnnnnnnnnnnnnnnnnnnnnnnnnnaaacagagaacaaagggattcactcagagatcagaatacgaagcttcctctcagcatcatgggaggagataaaataattcattctatggtctttgttccattaagacttggtgctttcttcagtaacagtatgtgaaatgtggctgactttgagtcccccactgtgtaagtggaattatttttcactgcagcatttctgagtctttttcttgttccttactctgaactgtaaaattaagttcataaaggcatttggcaagggtggaggaagcttccatgttactaatggctagcactgataagttattttcatgtctctttaacaatctgcaaaaaaacatatagaagattgtcagtctccaaggtcacagcgatgactctttatcatgaattttgcaagtttaaaaactaaaatagaaacaatacatagctccacaccccgtaaatgttaatatagtattgcaggaagagagggaagcatctgggaaacaactagaaggataaactgaggctgactattactgtttgccttttctgcata

SEQ ID NO: 444076 - DNA, 1530 bp, Homo Sapiens
  misc_feature (1262)..(1262): n is a, c, g, or t
gtaatttagcaagggtgtcgttgttttcccaatataaggggggtgggtgcgtttcgttccaagtaaccgggttaggggaaaggtggggctggctgtttgaagtcccctccccgtgtgaaagggggggattaatttttccccttaccagccatgtcgggatttattttttcctgttgcctttgttgtgaggcggtgaaaatgaagtttcataaaggcgcctttgtccaagggttggaggaaggcttccaggtgaactaatgggctaggccactgataaggttatttccagtttcttctttaaacaaatctgggggcccacattttgaaattgttttcccaatatttttttaatattaagggcaggctgttagtcggagtgtgtttagttattggtccctctttttcatctgtaaaatctcgaaagacaaggttttcttgatccctctcctcagagccataagtgcagcactgggatgattcacaatggccttttgtgctctaggagttgagcttgtgccccgtacagttggctgcttggtagaagacttctgacttcctgcttgtcctggttcatcttgttttaatcctgcaagtagggcatcctttgaacagtgcttatcctgcaagtgggtaataaaagaaaaccgctgtcgctgaaaaggctcacaaccttcccaaagacactgccctggatatacatcttttcctccatgttcagttgctgcatggtagaaaacctgtgagggtgtctgaaaccactttttacaagactgccacagacacatgaagttctgtccaggttttctcattggatctccaggctgactggatccactgaatggagaaggctgagaactgttaggctggccctgcacttgtacagctggtgaaggtggcataggagtgttctgcgggaccacattctgtacatatgttggtggatgctgttgcttttgctgaacagcactttctattgctactttagctacagtgcttggatctgctcctgctggcacagcaaccattgttgcgctgcagccagcattgttggggtcactgattgtaacaattctaactcctactttatttggaattcctgcgactgtttccctatcagtatcctctgctggcctctttacagttttgcattctgctgtgccatttgtagaccgaacgtcagatgatagggcaggagaatgggatacttttggatcctgaagtcgggaactgcctatgatttgatgtccctgtataacagaggnttgtagaatgtggtgagacaactacacttgggcgttgctgaggcacatctgaattcaaacttgaagctagaggtccattaagcaaatcagtaccactaaattgctgtgttgccgcatttgaagcctcctgtatactgctcacagatgaacccaccccaaagttaatacaggtccattagaaattctttctagttgatcacctttggcagtatcttgctgagtgatatctaaagtccctgtggttccatggagatcccggaattcgacc

SEQ ID NO: 444077 - DNA, 737 bp, Homo Sapiens
cggtggttggataaaaagtggtggatcttgaaaaagccaaccgcctgactggaaaggtaaaataaaagccaaacggtttcccagccccatttttgggcatgaaccatggacctacaagcgtttaatgcagaccccaaagcccacacatttttggggagtaggttttacttgcagtacagattcttttcattacagatcacaaaaatacaatacaatgtgacaagcccagtttaagaattacatgcagtagctcatattaacacaaacagctccccacgaaggccgacaagagctaaatccggtgtcaacagggttcattgcaggagtagaataatccggtacaaggaacgagaacagattgaaactagaaacaaagccatgcctgacagtcaatcaaggtcaatctgatcatttccatgaccaattacccatgtgaacaattcaaaatgacggtggaagagctgagcaccctgtactcacacacgatgcccacagcttggcaaaaggtacacaaacacttgtttgaaaagaatgactgaaacgtctactttcaaaggacaatgggcacttttaaagggaatgctgacatttaactttacaaaatggaatttaaaatgtaagtagtactctggggaagaatatgcctgaagcgtaaccatgatttcccagtggtataattaaacagagctctaatttaaaaactcttcctgggctgggcgccgtggctcacacccgtt

SEQ ID NO: 444078 - DNA, 845 bp, Homo Sapiens
  misc_feature (762)..(798): n is a, c, g, or t
gcacaccaagtcgccgacagagtccgcttctcatgcttgggggccagggttttctcagccacttccactacgggcctgggtttgcgctcgactgccaaacctgaagtggcagagttcacagtagctggtgtttgaggatgacagccagtgctccaggcagctccgatgaattgtccccaaggtccctgtacattcacatggagagagcaagtcctcttggctgctgccctcgtggcagatcctgcacatcggccggtcattgaaggggctctgggtggcaagagtccgcactactgttgacagcagctgcccgtccttggctgaaacttgcatgacatactgcggctgcccattcactaggctgccacaatcctccaccgtcttcaccacgggtgcagctgagctggtgcagtctggcaggacttcgggcaggtgactgcagcggctggttgtcatggtaacagacagcaattactctgctaatggcttccacattcatacaggatttccatcgtcctcgccgagtcccgatagcaaaccgacgtccctgctgcggttctaagtgccaagttgcccccagtcggtggctgctcacggcccagtggaccagggcacattggttccggcgggcacctcagggggagtgcggcaagcctggcggccgccgcggccacacagtcgcccacagcgcgctgacaattcacggacctgctcaacaactccgctctcgacgaattcgagctcggccgatttggcctgatnnnnnnnnnnnnnnnnnnnnnnnnnnnnnnnnnnnnncgccgccaccgcgataactccgattccccatagtgagtcgtatacag

SEQ ID NO: 444079 - DNA, 179 bp, Homo Sapiens
gtattgtgatgctttatttgtacatttttttcctttctggatgtaattttaatctcttgccattcattagtgttatttcattgtaaacgttattgtgccaaatgtactgtattcaaaaggatgtgaatgtgtattgtttcagaacctaataaatacaatgacgttaagtcttaaaaaaa

SEQ ID NO: 444080 - DNA, 358 bp, Homo Sapiens
  misc_feature (212)..(212): n is a, c, g, or t
  misc_feature (218)..(218): n is a, c, g, or t
  misc_feature (335)..(335): n is a, c, g, or t
gacgtgaaaactgtttattcatacagaggaggttccaagccacgaggcgcccgtcgaaaagcacatcacctctgtaacaacacacgagacacggccatggcttcacagctgcagcaaatcccaactcgccccacgacacattcgtctgccctgtgaccatcattcaatgtccctccaacttcattcaagtcttctcctaaaaactgtttccnaatctncatgctatgaatggtattttcttaacacataattttgtagataaagtaaaccatttaaagtgtcattaggttggggcttttttatatgaggtgaaagacccgacattattttccccncaaggccaggaaaataatagggg

SEQ ID NO: 444081 - DNA, 155 bp, Homo Sapiens
tggcctgagcgaccatgcccagcttataaacattattaattgctgtatttacttccggaaatttctttcccctattcagcaaatgttaagggacttactataggtcagcacctgtgcgtggcactgggcatgttgcagtgaacaaggacactttt

SEQ ID NO: 444082 - DNA, 499 bp, Homo Sapiens
ttttttttgaagaaccttggcaccgtttctttttattatagctagacacaagatgcccaaagatatacaaaacaaacaatacaaattttaaacacttttacaaaggtgacaatataaagaaatgaagactatggatttatgtttgcaaacattaatttcctttgaatactgtctggtgttaaaacctaacagtttaccagaatttgtatttgacacaactatttttaaaattatagtggacaaaactaatgaaattctaatcatcaatagcctatgacaaataactattataattaaaattaatacaatcttcaactattctcctaagtactgttgctataattttctggtttattaaacctttttattttagggaaaaaaactgaccttactgctattcctggaaaaagaattaataaactttcattaaatattcaatctcaacttttaaaacttaaagctctttatttctgctaatctgaaactacttttggttcac

SEQ ID NO: 444083 - DNA, 413 bp, Homo Sapiens
  misc_feature (288)..(314): n is a, c, g, or t
gaaaactttcagtgttttatttttgactgcagctgtttacagaaatatagttgcgagtatacaaatgttccaatagaagcaaaatatctttttaatatttaacaagttatcacagatagctaaaaacatagatgcaaatgaaattctcccagagaacaaactgaaaatatctggtatcagtgctctgaaatcccaactatgaaagccatatacacaaaaatgtaacccttatatcattgcagggcaatggaagaaggcagttcagtggttgatcagtgtgctcaagcnnnnnnnnnnnnnnnnnnnnnnnnnnnggcagaatggtagctaaaccacttgagaacaggttaatgaaattattggtactatacttaaaacattaagtaaaagaagtgaatgacactcatttaaag

SEQ ID NO: 444084 - DNA, 379 bp, Homo Sapiens
  misc_feature (306)..(331): n is a, c, g, or t
aaatctcagctgttgaagagtgggcttggaatcagacttctgtgtccagtaagaaactcctgcactgaagtcattgtgacttgagtagttacagcctgattccagtgaacttgatctcatttcatctttgatctaatgaatgtgtctgcttaccttgtttccttttaattgataagctccaagtagttgctaattttttgacaactttaaatgagtttcattcacttcttttacttaatgttttaagtatagtaccaatcaatttcattaacctgttctcaagtggtttagctaccattctgccannnnnnnnnnnnnnnnnnnnnnnnnngcttgagcacactgatcaaccactgaactgccttcttccattgtccgt

SEQ ID NO: 444085 - DNA, 510 bp, Homo Sapiens
  misc_feature (321)..(321): n is a, c, g, or t
  misc_feature (328)..(328): n is a, c, g, or t
  misc_feature (338)..(338): n is a, c, g, or t
  misc_feature (422)..(422): n is a, c, g, or t
  misc_feature (473)..(473): n is a, c, g, or t
ttttttttgcaaaatgaaaactttcagtgttttatttttgactgcagctgtttacagaaatatagttgcgagtatacaaatgttccaatagaagcaaaatatctttttaatatttaacaagttatcacagatagctaaaaacatagatgcaaatgaaattcccccagagaacaaactgaaaatatctggtatcagtgctctgaaatcccaactatgaaagccatatacacaaaaatgtaacccttatatcattgcaggacaatggaagaaggcagttcagtggttgatcagtgtgctcaagcaaataaaattaaataaaanttaaaantgggcaggantgggtagctaaaccacttgaggaacagggttaatgaaattattgggtactatacttaaaacattaaggtaaaaggaaggtggantggaaactcattttaaaggttggtccaaaaatttaggccaactacttgggnggctttatccaatttaaaggggaacagggtaggccgg

SEQ ID NO: 444086 - DNA, 932 bp, Homo Sapiens
  misc_feature (106)..(106): n is a, c, g, or t
  misc_feature (108)..(133): n is a, c, g, or t
  misc_feature (832)..(832): n is a, c, g, or t
  misc_feature (845)..(845): n is a, c, g, or t
  misc_feature (887)..(887): n is a, c, g, or t
  misc_feature (901)..(901): n is a, c, g, or t
aggagccgcgcttggagatcccgggttgatgtaagccacgggtaagtgcctccgagaaacccctcttttggaattttgttttaaaaacactctcggttttgccccncnnnnnnnnnnnnnnnnnnnnnnnnnnatcccgagcccctagtccagggtcccggagtttttttgggaagcacacttgtggcccaggtttccgttaccataatgggcgccgcgggccccaaaagaaaatggttttgaaaaagtttttggaggggccgggaggggcccaccaaatttatttgggcttggtcgcgcgttgtgtgcttgtgtggggcgggctcgcggtgggcggcttttgtgggggaagtaaaattacttttattttcataaataaaaagacaacccattatacacttttagttgaagtaacatgttagttgtcactgcctagtatgaaatccatgtaatagttaacaaacagttacacctctctataaccttcatgcaacttctatacatttgataattccccaaaatttccaacatttcaaaaaacattatatataatgggatactttagtcacaaagtgtcacctttgctgagtcaacaaaatatttatatgctcatgtcaaagatgcctactgatgtaaagtaataccagtattgctgcattttacagaagcactgagcatattacattttccatttcgtatatggtagtatcatccccaaaaatgtcaatgtgaaaatttagtaagtagattaataagcacaagtacctaaaagaaacaggtcccacagccacgagtagagagctggcatccagtaccgtttaaagttttgtcngtaagtggccccnacaaacggaccagtgattcggtaataaggccacctaaatacngggggtttaaaagnggttttccccggatatgggaataaattaatg

SEQ ID NO: 444087 - DNA, 721 bp, Homo Sapiens
ttggagtcatgtgttcacggtgcgcagggtggccctgtccccgaggctgcggtagatgacagcatcaatggctaggaagtcggttacagtagctgtgaagagcatcccgtcagagaagagggcaacattggcgtgcttggggtcgtacgggcagcgggccataccgctgatgttgtctccgacgggctgcagggtagtctatgctgtagttggcgcacaccgggttgaaggcgttggaaccgcacacaaagagcgtggactcgtcccgaaggagcagcacctttacgaagtttcgacactcgccctcctgtttgcccttcatccgacacacgtttatgtcgctggggttagatctccaggtcagcttccctctggtaccgcagctcccgtggacgtggggggctccagctctacgcggtagaggttgtccctgtccccaatgaacagcgtcctgttgacccgcaggactcgcatggatagttgaggtcgtcagcaccttctgcgggggtcaggcgtccgggcccgctgcccacaaacacgggatagtggttcaggtagtccctgggggccacgctaagcggcgtcggctcctcaggaaagaggccgtgggcgccccccagtagcagcagcagaagcagcagggccgggcggggaggggacgctcgcggggtctgcatggcgagggccaggcgacaggaggaggtgacgcctcggagccgcg

SEQ ID NO: 444088 - DNA, 452 bp, Homo Sapiens
  misc_feature (320)..(320): n is a, c, g, or t
  misc_feature (386)..(386): n is a, c, g, or t
ttttttttgctttataatttctaagcatttaggcagaaaagaaagaggcattaaaaatacaactcagaaatatttaaattttgatgaaataagagtcttgttagttgcagtctcttttgaatactttccttgggagaaaatatgctgtgaaacagtgatctgccactacaaagtggttggggacattaggtcatttctagaaagcaattatatacacctaatggcttattccctacaaaatgaactattatgggtgtcagaaaaggctaggatactttatcatctgaaagacaggttgctcaggatgtatacacatggantttattctcttgacctctagttcagatgtcagaaatatttttgtactaaaacagaggtagggtccnatattggggtatgttcaatatttcctacccggctcttctattctctatccctaaactctgcccgtt

SEQ ID NO: 444089 - DNA, 1176 bp, Homo Sapiens
  misc_feature (49)..(58): n is a, c, g, or t
  misc_feature (118)..(152): n is a, c, g, or t
  misc_feature (258)..(277): n is a, c, g, or t
  misc_feature (362)..(371): n is a, c, g, or t
  misc_feature (425)..(438): n is a, c, g, or t
  misc_feature (538)..(626): n is a, c, g, or t
  misc_feature (1023)..(1080): n is a, c, g, or t
ttcttgtccatgaaagaatccgcccccttttagagaatgatcccccgcnnnnnnnnnntttgtcggccgtccttgtagtcagaagccacgttctcttgtgtgccttggaaaaaccccnnnnnnnnnnnnnnnnnnnnnnnnnnnnnnnnnnncccccgcgcttgtggggcggcctggtagatcgtgttgccggatgaacccccctgccaagtggcccccgctgtggacgtttttgcacgaggccatattgctttttgnnnnnnnnnnnnnnnnnnnngggggtgtaggggtgttcgcggtttgcggggaaccccaaccctttttcgggggggaattccccaaagtttttgtgcccccttttnnnnnnnnnnccttacgggggcggcgcccaatttgtttccccccaaaggcgcttttgtctcccnnnnnnnnnnnnnncgcccaaggggtgtagcaccggccccattttggcattacgggtcccgggtttcccgggatcttgtcatcccatccctcgggatcccggggaaccggggcnnnnnnnnnnnnnnnnnnnnnnnnnnnnnnnnnnnnnnnnnnnnnnnnnnnnnnnnnnnnnnnnnnnnnnnnnnnnnnnnnnnnnnnnntctagggttcggagcggggctttaaagttgcggccttttcgcgggggtcccctccttccggcgccggccgccttcactcctcctccgccgctgccgccagccccgccgactcgctcccggctgcgcgtgtgtggtggttatttatttattttctgagcacgcctcccggttcttcttttattcttgggggaagggggatggggaggagaagcgcacacacgagcacccaccccggcacggagacccagcaccgcggaatggagccccacgcgcgcacacacggccaggattaagaccgatcacatggggaaggccgggggcgagggaggagaggcagggccgccgatgtcagtgccaccagccgcaccttggcgtccccggcggcggagaggcggcnnnnnnnnnnnnnnnnnnnnnnnnnnnnnnnnnnnnnnnnnnnnnnnnnnnnnnnnnntctccacacagagcgccgccgctggtgccgcggccgccggagacgtcccgccgccgcgatcgcccgcgctcgcctctgcctccccgcgccgctccc

SEQ ID NO: 444090 - DNA, 668 bp, Homo Sapiens
cattttcataggtagctttatttggtttttagaaaaatatatacaataatcggaacatcagttcttaaatagttttaagttaaaagaatgcaagtgagaggatgtttccacagtcagatcaatactgcttaataaagtagataggaatttctgcaacaagtcaaaacatttacaggaatggtaagaactctgcaagagcagcttgtggctggcaagtcagccagctcagaaaacaggtaggaagggaaggggtttgatctttcccctttagtttgaatttgagaaagtgataaaagatttacatattcacctatcctaaaggctagagctttgagtaaaaacattagaatacagggatggaggccctctagggcatatgctaacaagctaacttatatcaaacaaaaatttgccatctcaatttggtattcagttggatttggatatattaggattacctgtcagtcacagttcaactagttcagatataacaaaactcaaggacttggagtattggttaatgacatttcttttggattagacccctgctttctctcgaacattcttcgtcatgaattcacagtattcaaacagtggttgcaaagatattcgagtttgacagccttctgactttcatcgtttttgagaagtgcgcaaggaagccatag

SEQ ID NO: 444091 - DNA, 467 bp, Homo Sapiens
ggatccccttgtccacaggggttcctgaaaaggaccagtggagggaagagctatacttctggagaagtaggcctggagttactacagtatgggggaaaagggtcgagttagaacaaagctaaggcaattcctattgcttccttgcgcaacttctcaaaacgatgaaagtcagaaggctgtcaaactcaaatatctttgcaaacactgtttgaatactgtgaattcattacgaagaatgttcgagagaaagcaggggtctaatccaaaagaaatgtcattaaccaatactccaagtccttgagttttgttatatctgaactagttgaactgtgactgacaggtaatcctaatatatccaaatccaactgagtaccaaattgagatggcaaatttttgtttgatataagttagcttgttagcatatgccctagagggcctccatcctgtggaaagtaggtaccggccac

SEQ ID NO: 444092 - DNA, 205 bp, Homo Sapiens
catgtgaaacctgtaacattttatttgttaaaaatgaacagcttcagaatagatctaaatgtaacttttccaaaaaacaccaaaaagtacagtgtaaagcacctcctcgttaaatacaaactttcatttggtgatgcacggcaccaatgttttgcatataccttgatgcaaagaaaagtttaagttgcatcctgtttttaaaaaa

SEQ ID NO: 444093 - DNA, 403 bp, Homo Sapiens
  misc_feature (197)..(197): n is a, c, g, or t
  misc_feature (318)..(318): n is a, c, g, or t
ccaataaaaatatcaaatatttaccactaagacttctgactccaatttaaaccaggaaagggatggggtggataccccattttgccctcccccatcaacaccccgtcccagatccaaagcctcagtcttcaagtatggagttcaatgcccgcctccgcttggccaccgcaccctgctgctgttcccaagcctctcgncgctttaggaaggtagtcaaggccacatttcgagccacatggtggccgaaagggggctcttatcagctcctggttctgctccccaagctcagcagcaattttccttccggggcctcaaggntgtttccactccagatggcattttagcacacggggttgtcatggggacttacaggccagagccacaatatttgtcccctttaggt

SEQ ID NO: 444094 - DNA, 399 bp, Homo Sapiens
caagtccaagttttcacatgcgaaatatgccacagtttttaactccccgttgttacactagcctgccaatgagacccagacacaggcagacctggcgctcttgacccctgattccagtgaggactggccctgaggagtccttgcagacctgctgcctcccccacgacaggcccaaagatggaccccccctggccttgtgacagctccccaagcgttctccggtggagaaactgcagaggactggtgggcggggctccccagccatcaccatcctgtgtacaatggctgtagacttgtatatggctcctttaatattgtaaagatgctgatgtacaattgtcgtgcatttgtgtgaacacattgcgttcccagtccatgccataaatgatgctctcaagc

SEQ ID NO: 444095 - DNA, 434 bp, Homo Sapiens
ttttctttatatttttctgaactttcaaaattttctaaataattaagatttgcattttccttcagagctattaatctaaatgtttaagaattgcaaacctgccacaatagtgctagtttacctgttgcaatagtaaactgcattattgggatccaattctattgcctgtgtgtaacaatccactgcagcagcataattttcttctttcatgtggttattgcctaaaataaagtaaccagtatgtacagtaagtataatatacattaaaaacatacactcttatagacacattttaatcgtggaaactataattatatgaaagtcggcctcatgatttttcagtcacactggaaaaaattttacattgtactatagagttgatattatttagctttcagtgtgtttgaatcattttaacaatgcaaagaatcgtg

SEQ ID NO: 444096 - DNA, 374 bp, Homo Sapiens
atcctaaattatttattttgttacaatgactccaaaattttaaagaagcaacaatctgttataaccgttaacaaagtttgctaaaaagcagattagtgcattacgagtaccttgttgtgcttttatttcaattttttatttacagaaaaaccatgtagtacctttttgaatttagtcaatataacgacacatggaattttttgcacgatttttacaatccttccaccatttgtttgaacttttaggtctattttgtctaattcaaaactaccttttattctctcaggttcagatagaaacattgtcacttgcctataaactgaatttcgaactgactcacgcttccaactctggccggacgctccatatatgac

SEQ ID NO: 444097 - DNA, 573 bp, Homo Sapiens
gggatttcaaaagtttatctcaatctcctcattcccagacttccaggtgggaggcaggccgggcagtaatgtgagcatctcaaggacaccacagtcactgcgaccaagccagtctgtgtcctcatttacacaatgaaggcgatggaccacatagtctctgacgtcccactgcaccctgacagctgacaaatctgtttgtcctcaaagacaggtctgagagggaggaaaactgatggggatgatgagttagagctccgggctccctggggctggaggctcatccatcagctgctggaggtgagaggctgccttgtccagttttgacaattccagctggagggaagaaagcttttgttgcctctgagtccctgcctccccttctgatggggtcctggctgtgaggctatcaagctgcttctgcaacttgtaccttcgggcggctaacagaggtagctggatctgcgggtccaccaggccctgcagctccatgtagacttgagccgtgtcactgagtggagcctgggcccatccggagggagctgctgcgcctgggggtaacaggcccacagcccc

SEQ ID NO: 444098 - DNA, 420 bp, Homo Sapiens
  misc_feature (353)..(353): n is a, c, g, or t
  misc_feature (363)..(363): n is a, c, g, or t
  misc_feature (375)..(375): n is a, c, g, or t
  misc_feature (380)..(380): n is a, c, g, or t
  misc_feature (390)..(390): n is a, c, g, or t
tattttttgtacttttattgaaaaggtacatttaaaaaaatacacagacattttaccatttacaggttgcagatatagatgctctaaaagagtccactctattttgttgttctatgataactcttgcccctgatatcacaaacattccagtcttgttgatatcggcttagaaaggggggcatgggagcatgacctgcaatatattcagcgaacagaaagacaaattgttcaattataaatttttttatcttctgtacattattgcattagggagccacaaaattatgtaggcatcattacaaatggaaacaggttaaaaatgtagaaggtacttatataggaaatacatgggntttcattggncttcttggcagnatgcnccaagagggngcaaaaaatgttgccaatttaggggaggcc

SEQ ID NO: 444099 - DNA, 739 bp, Homo Sapiens
  misc_feature (524)..(524): n is a, c, g, or t
  misc_feature (628)..(628): n is a, c, g, or t
cccaaaagaggaggcttttaatacaaagagggtggggcatagcctgggaaggacttaaataaggaggataagagtgtcaggaaccagcagctgggggtacagggaccctgcggagtgggatgatgcagacagaattccgagcctctttgattctccaccatcggccaagcctgtgctcctgccctaccccagccaccaggaagtccccagagctggagaacttgaggctgttgataaaacccaccagggggatgtcacagagaaggtcaagctgccggaagccttccccacactgccaaagccgcacacaggagctgtgggagcctgtggccacaaggtctgtgttgaggagggctgccaccgacgatatccagaagggctgctccaggcctggctctccccgcagcccgtgagcttcacgctgcagggcaagtggtcgcttcttggagagaccccacaaggccacagagccatcgtccgcgccggacaccatgtgctcctcattgattatgtggatgcagccnatggaaccctggtggccataaaaaacaagctgtggaatccttggggaatcttcccacaccgtccaagcccatcccgggcccccaacgctgaccacaagacttcncggtttaaaggatccaatgccaccaccagcggcctgtggtccgaagaccgtttcacataggaattctttccacatcccaaccttccccggaccatcgtggaatgacgagaa

SEQ ID NO: 444100 - DNA, 1349 bp, Homo Sapiens
  misc_feature (201)..(201): n is a, c, g, or t
  misc_feature (251)..(251): n is a, c, g, or t
  misc_feature (374)..(374): n is a, c, g, or t
  misc_feature (429)..(437): n is a, c, g, or t
  misc_feature (503)..(512): n is a, c, g, or t
  misc_feature (868)..(884): n is a, c, g, or t
gtgctggtccccccctactgtctgtgttcccccgcccacaccataggggcgggcgacaataaagttgtttattttggtacgagcgcttaacagtcggggggagtttcaaccaccaagaaggggtgtttgttagaggacacacccccccgcgtcctccccgtcgtcacggcatcattacccccgcgcggcgggcaccacccnccctcgcttataggcgcccacccggcgtttgtgcttcttaaggaagaaangggcgcgtatttatttagtataaaaaatggctggagttcgcgggttacgttagaactacagcggttctggtccgcgcacgtgcagccgaagcgacatttttttgtacaaagagaaccccgganaagacatttttccagttgccccgcgatagcgctgacgcacgccccttcactcgannnnnnnnnggggggcgccccatcggccgggttggagtagagaaaaaaatattttaaggggtgcgcctcttggtnnnnnnnnnnccccggcgggcctctgtttgagtaaccaccccccactgtctgcgcacttacggaggcgcgccgcggggtgagtttgtgtgtggtgccaaggggaagtgttggttttttgcgggcgatgtgcgtcccgagaccacccccccgcggggtttggccccgccccggggggcgtctcttttttgttttgggggggaaaagttccagccgcccttcagcccagaggcgtgcggggtttctcccggcgggaaaacccgctttacgcccccatttcccgctctccttttcgggggccggtgggccgcccacagcaacggttttgcaaaattcttttggggggccccgggggccgccggcaaggnnnnnnnnnnnnnnnnngcgcgcgttttgcgccgccgagcaacgtcgggggtggggaggagcccttgggggtttgttcttggcttgtttcggtttcttgtgtcaggttcaaaaacagttttatttcattattatccaagtacctttgaaaagataattaattgtacaagtgtcatcgcatgaaaaacagactcgggcagcccctgctggcctagcctgagaaatgtacatatttacacgggccctcagaaaggaggacccaggactgcacagccggcggctggaggcaggtgcagtgctccgtcgccgattcacacagtggcaggcaagagacaagctgtgttgaaggcactcggtggcgcgtacaattgacagaggccctgcaggcctctgcatccgggcctgggccccagccagacctgggtacgtgggcaaatcccatagggaaagtttatcccagcacacgtgcccaagggaggtgcc

SEQ ID NO: 444101 - DNA, 392 bp, Homo Sapiens
  misc_feature (51)..(51): n is a, c, g, or t
  misc_feature (82)..(82): n is a, c, g, or t
  misc_feature (108)..(108): n is a, c, g, or t
  misc_feature (116)..(116): n is a, c, g, or t
  misc_feature (131)..(131): n is a, c, g, or t
ggcccagtgctatgcctggaggctcaaccacaaaacttcccatccaaacantcagatgaactgagcgtcttacacacgcagnacagaggagcacacattaggataganacagtagnataaccacgggcaantaaaccttaaattttctgagcagcattttggtatttaaacatttcttgtaaaaagctgagacagtttgtaagaaaagaatccttaaaatctagatttataccattttttaaagtcccacctttcaatgtttaataaaacaaaaagagaaatccttaatctaaaagctaaattatttttgaatggaaatactactgagaccattgacactggataacagtaatgatcccattaccagataagattgactgacggggaaaaaa

SEQ ID NO: 444102 - DNA, 450 bp, Homo Sapiens
atgcttttgcatgattctaattattgcctttttcagagctctgctggtaaaaagtggggtgccatacaaacagtcccttttcaagcccagcgtgtcatgcatcctgccaatcaatcactgtaatgtccattgtccaaacaggtcaaccgttgtctccatgaaaaactggataaagagttgctgatagtagtgtcctggttcttccctttacattcttttgggggaaggtgctgggaatcagcctagcttgtggcatgtgaccttttttatttgaatggcactacagacagcacttgtgagcacaaactctgaagccacactgccttggttgagatcctagtggccactttctggctgtgtgaccctgacttaatttcccccaagtttcagttccctcacctggaaaacggcacccatctccaaagttaacatacataaagcccttaaaca

SEQ ID NO: 444103 - DNA, 361 bp, Homo Sapiens
  misc_feature (154)..(154): n is a, c, g, or t
  misc_feature (166)..(166): n is a, c, g, or t
  misc_feature (179)..(179): n is a, c, g, or t
  misc_feature (191)..(191): n is a, c, g, or t
  misc_feature (270)..(270): n is a, c, g, or t
cagcagcgccacagctgcgctacccgccaagtttgaatctgaccacacctgcttccacctcccaggatgccagccagtgccagcccagcccagacttcagccatgatcggcagctcaggctgttgctgagcagccatccagccatgatgccggntctgtgcgaagnagccctcggaagnagaggcgggcgnaagtaagtcgccagagcagccgtgtttaaaatcagcgacacccgcaacagagaggcccgatgccgtctctgtggggagngtgtcaccagttctgctcaacatcgcctgagctgaaggccggagagcacgagactactgagtcaggacaactttgaagtggagagctcgta

SEQ ID NO: 444104 - DNA, 271 bp, Homo Sapiens
  misc_feature (66)..(66): n is a, c, g, or t
  misc_feature (82)..(82): n is a, c, g, or t
aaatggaagctggcaatttatttccctggagaatttgaagagtacaataacatttgactgattganctttatttagtaaganttcttagcaaaactccctcccaggcacacccacacagtacttctttattttctgtgagctacaaatctttgactctcaaaggcaactccaatctgaaagtacaagataacactgcttatcaattatttatgctgcacagagcatatttttaaactatagaagtgaatatcactatcatttcacaacaga

SEQ ID NO: 444105 - DNA, 466 bp, Homo Sapiens
  misc_feature (325)..(325): n is a, c, g, or t
  misc_feature (333)..(333): n is a, c, g, or t
ccagtttgattcgtttattgacaaatcaaatgaaaaaaattcacttaaaagaagggtatgtgatcacaaatgtagctaacagggggaacgcatacagcaccagggagggagagtgaggctggacataccattacagagaggaggaagagaaagaatggcgcggggggcggaggaaagagagcacctgccaaaaatcccacactttccacttctcagctatcactcaatcatttttctggatagggttaacagctagaaatggtttaagggcaacatccagggtagtttgtctggaagttcaggggagatgaagagttggagagantgtgggtntagcattttgaaggattctccagcttgaacctgttgccagaacccttttcatggtgaactgggagtcaggaagcttaatcctgggcttagctcagccatgacttgctgtgtgactttgggtgaatcactttcc

SEQ ID NO: 444106 - DNA, 559 bp, Homo Sapiens
  misc_feature (444)..(444): n is a, c, g, or t
  misc_feature (478)..(478): n is a, c, g, or t
ttttttttctaaaaatattgttttattaaataactgttaaataggatttttacaaaataaatggcatagaaaagggtaaaaatgtttatgttcccagaactttctatgccttttcaacagaaaggaaaaggcacagaaagttgtcagctgctattacttctggagagctgccacaactggacggtgttggagtatcaccagttctctctctcatgggaaagaaggggatcaacactttgtagagaggtaggcacgtcttcaggtaacagctgctacacacagctgggctttcaactttaggctcccctgttgatgactgtcagcttcaaggtgtaggcatcccatgggcacttcagggaaggaattaagggagcctgcacgagggtttttcaaggacattttcaaataataggggcttttaggaggggttttgccttccggagnttttgggggaagtttttccctttggcttaggggngttttgccttcatcccccttcttcctttttacccgtaggggggctttttcaaagccgtttttttgcccccgggaccatttt

SEQ ID NO: 444107 - DNA, 584 bp, Homo Sapiens
  misc_feature (478)..(478): n is a, c, g, or t
  misc_feature (550)..(550): n is a, c, g, or t
  misc_feature (560)..(560): n is a, c, g, or t
  misc_feature (573)..(573): n is a, c, g, or t
agtttctaaaaatattgttttattaaataactgttaaataggatttttacaaaataaatggcatagaaaagggtaaaaatgtttatgttcccagaactttctatgccttttcaacagaaaggaaaaggcacagaaagttgtcagctgctattacttctggagagctgccacaactggacggtgttggagtatcaccagttctctctctcatgggaaagaaggggatcaacactttgtagagaggtagcatgtcttcaggtaacagctgctacacacagctggcttcaactttagctcccctgttgatgactgtcagcttcaaggtgtagcatcccatgggcactcaggaagaattaaggagctgcacgaggttttcaagacatttcaaataataggcatttagagggtttgcttctgagtttgggaaagttttctttgctaaggagtatgcttcatccactctttcttttttactganggggcttttccaaggctggttttttgcctaggaccaatccctttaattaggggttccttgcccatgtgttangggtccatgntaggccaaacacntaattcttgcc

SEQ ID NO: 444108 - DNA, 443 bp, Homo Sapiens
  misc_feature (197)..(207): n is a, c, g, or t
  misc_feature (306)..(306): n is a, c, g, or t
  misc_feature (421)..(421): n is a, c, g, or t
  misc_feature (424)..(424): n is a, c, g, or t
gggctttcacatagagatgagtggcaggccagcttgagaaataaagtatagatgcaattgcttactagatgtttcacaggtggataatatgacattctgtagtttgctgtgtacatattagaaaatcgtctgtttctttcttgttctttggttgaatgtgggcccaaaaaaatcattcttacaattatgctgattgnnnnnnnnnnnccctgtgtaaaatgatttcagacacaatggtggagctttgttcagttcccatcagatttaactaaagagtggttttaaacatttacgttgaagtgaccnttgactttttattacctagaaagagttaggtgcttggtgatgccaacaggatgacatgtttcttcttcttagccacaggaaagctccaatatactctattcattgctcaagtggnccntaaaggaatcactttgaag

SEQ ID NO: 444109 - DNA, 1140 bp, Homo Sapiens
  misc_feature (534)..(591): n is a, c, g, or t
atcgagtgagatccggatcaatgtaacaccgtaggatgggctttggggtccggagtcgtgttgtgtatacgcacaggcaggacagagtttgatttcctagataataatcggctggtattcctgtgcacttaatcttcgtgggattctcccctgaaagaaggccgccgtgagcccattagaggcacgggctaaattctctcgtaggggtgaatttcgagcccgagattcattgtaatcggcatggttatcgcctcgggttgtgtgggacaattaaagcccgaccccccttctaggggggaaacgggccagcttttttccccttttggcccaaaaaaatttgggtgcggaaaaccaccgtttggcccaagggcccgtttcaattgcgtttttttcgcgctcccggccatgaatgcccgggagtgcgtctttagttaatttttgggtcttgacaaaacggaagtgtataaatatttctccactgtacaaagttctcccagccctgcccaccccatcacagttcacatttctcatggnnnnnnnnnnnnnnnnnnnnnnnnnnnnnnnnnnnnnnnnnnnnnnnnnnnnnnnnnngttcatatttaaaactatttacaggggcacagagaagccagagtggcccggccgaggtcaggatgagtccgtgcagggggacggagggggcgggaagagatggaagtagctcctctcggtggcgggcgagggcgggcagctgtcctccgccgacaggtactggctgtggggcgtgggtgggggtggataggggtctgagtccgagttcaaatccaggtagtacttgctggccttccagcggctggcgctgtagtcgctgtcacacacgtcggtgctgcagggcgtcgtcgggggcgccattcctcgaatgatgtagggcctgtacggtctcgcagtggccggaatgtttgaagagtagaacatgtccatgttgtacagggagtggtccgtggccggggagggcggcgggttcatgatcggcgggtacagcgtggccttcgtgcttgacgagctgctggacgaggcccctgtgacgtggttccggtcgtagaggggcaccccgccccggccccccatcaggctccctcgtgccgaattcgccacccaggc

SEQ ID NO: 444110 - DNA, 1262 bp, Homo Sapiens
tacaatagcgataaatagaatttattttatacaactgttaccgacatccacacggccacaggggcttccaaaatgggtattggggccaggaggctggcctttggcgtgacgcctaaaaagtgtgaccagacacacaagggctcccagcagctgtgccgggctgccccctccatggcggtcgggggaggcaaggcctggactctcggccagctgagactcttggcctggagggcccagcatgggatggcaggggttaagctgggtgctggctgaggagccaggtaggtccccatcccccatgagggggttacttgtctgtcatgtgtaggcagtggacagggcatcggcagacctgtggcagaactggagggtccaggaggcatactgggcacagccggctccctgcccctcagcccacctggggctccagggacctctaaagaagcagagatagggtgatacgggaggtccctgggaagaacaatcctaccattactaaaagcaggtgcaatgtaatcacatgtctttcaggtgacctctgaaagataatcttggtccatttgctaggcaggacgattgccccagaagaagggacgagttgacgttgcacccaagaaggtcgacaacaggcagaagccgcaaaagtttggcaaaccgaggcacccgggcgtacaccaaaccacagtgcatacaaatcagccggcgacagtaatccacatccctccctctgttgctgaccttcccaaggagggccatagagaggcatcataccaacgacggggagagcatggttccttcgaaaccttcactccatcgttcgccgacccattagttgcccactacatggaaagttcccagaacacggggaattgcatcaaaagggatgattgaatatgggagggccccacaagggaacggggatggcacacgcgcgaggaacaacgccacaggtaccctgcgtatacccagctgaagcctaaatctgccgagaccacacagagcggcagcaaaaaagcacacacaaggcgccatagacgggagataagagggaacgaacatgcacaaagacaacaattcccacatgaagtcccacagaggacacagggaacgggcatcggtgagccaaggcaagaaaaaacacagcccaaagacgaggacagcgaccaatggagagaaaggattcgaggaaaaggcaccggggggaagggcccaacagaggcagaggaggaaggacaagccagaggccaggaagtgtcgaccgg

SEQ ID NO: 444111 - DNA, 580 bp, Homo Sapiens
cagtgtgggacccaaaaacttaattcgaaagggtcgagaacggcatctcttccttttgaaatgtccttagtatttagtaaagaagtgaaagattccagtgggagaagcaagtacctttataaaagcaaatgtttacctcagagttgggtgtcacagaacatgttgaaggagacccttgcaaattgcactgtgggtggggagaacaccaacttcagataataaaatgtccttaaggcttccagcatagagaacaagcaggactggataaagcatatccgcgaagtcatccaggagcggacgatccacctgaagggagccctgaaggagcccattcacatccctaagaccgctcccgccacaagacagaagggaaggagggatggagaggatctggacagccaaggagacggcagcagccagcctgatacgatttccatcgcctcacggacgtctcagaacacgctggacagcgataagctctctggtggctgtgagctgacagtggtgatccatgacttcaccgcttgcaacagcaacgtagctgtaccatccgacggggccagaccgtggaagttctgga

SEQ ID NO: 444112 - DNA, 364 bp, Homo Sapiens
  misc_feature (339)..(339): n is a, c, g, or t
tttttttggagaaagaccatttatttctccacccacagtgggactggtaggttttgaaaagagcaatcgctggcatccctttaaatcttggctgactcccaccgtggcagccaatcagcagaggcggagctggtgagttgcctgggcaacaggcccctggttggccgaagacaattagccaccccactgcccactcccaacgaaagggaaattgactctctgctgtccactctgctttaaaatacatcggcccaaactaggcctcctcctttcgctcctgaagtcagaagcgccagcttttgggtctcaaaattgggagcgatttggtggagaggtttnggttaggtagggttgggagacagcg

SEQ ID NO: 444113 - DNA, 1055 bp, Homo Sapiens
tgtttatcgatgcataagacaaaaacatttcattttaggtctccatctccttctccatccccttggattggacttttggatgcgaagcaacatggtggtcagccactgatccaagcgagatattgagtcaaattccttcactgcttcagtgtaagcttcacggttctgttcttcatgagcttctaggagttttttcaataatgttacattgctcttgaatcagtaagtgctggaaacatttcctcatatttctcaagagcaagcttggcattcaactcgtctactatgaagtggcagagggcagctttgaagaagtaatcctttgcactgtatttcaacaaaggattatccattgtgtttgccccaacctgctcatagatctcaatggctttctggtactgctcaagctgggcagcatatgctgccaccttcagcagacacttgtttgctgagctgttggattcttctcctttgtaataatcagcagattgttcataatgtgcaatagccttctcaatgtctacaagttcagtctcatagatctctgcaatagtaatgtggtgcttggctgcaattgtaaaccttcccatgtctgtgtaaatgtcgatggctgcatttaagcagttgatagcctcttggggatctgcctttttgtaagcatttccagcatccacaaagctggtagcagagtcatgtttgctctgaagctgcatgtggagcttggctgcctgacaaaatgcgtttcctgcagcactccaatttttagccatcttgaacatatttgcagctctggtatacatttcacaagcctcttctattcttgtgtttcctccaaacagccctcggaggaaggagtgggaggccttgactcgcttctcggcctccgccatcagctgtactgcctcacgctccttccccgcgttgtccatgtcgcccgccgcggccgccacagccccctcagccggctcgctgtgcgcccaggcgccttaaccctccctctggcggccgcagggacccgctctcgacgaattcgagctcggccgatttggcctgat

SEQ ID NO: 444114 - DNA, 355 bp, Homo Sapiens
  misc_feature (44)..(44): n is a, c, g, or t
  misc_feature (125)..(125): n is a, c, g, or t
cccatcaactagagcaaagttcaattgccagtttcactaagatnaaatgatctgaacagtttagagttcttatgggcatgattgtcctgacgcttcctgttatcctcatatcaaaaaactgcatnacaaccgtctttgatttccaagatgccaactctcctcacaggaactcatgcacaacttctgggaatctagtggctgtatgttaaagcatcggtaaaagagcattccaaccaaatcaattcacttaatttttcaagtagatctgattactatggtcttttaaaaaattcaaaggctccacctggaaagtcaccgctgaggaggaggagaaggaggacgcggaggtaggagg

SEQ ID NO: 444115 - DNA, 965 bp, Homo Sapiens
ttttttttaaaatgatgaaatggtgtttattactatctggatgtaaaacccagcagtgttgtcctatctgacatggtctagggtttcccagccagtgagagaggggccaggaaggaactaggctgcgtgtcaggcacttgtcaggcagtatcaggcactcagcaccctaaggctaccatggtggggtggggctggtaagctctgatcagccatgaaaggccctctctgccctactcaggcccaagccaggaccagacattctgaagcatggctcagtcgccttccccaacctcaggtctgacccagagtaaagaaagagacctcaggttaatgggaagccacttagctctgctcccaaccagccactttcacacaagtataccaaaagatagcccctgacttcaacagagaggggctttcctgcctgagatctggtgagcagatgggtgcagggaaagtatgctggcttttgtcacagtgacattttccaaagtggaaaaaagttaaaaatatctcccaccttaagttcagatgaaaagtcaccctttgggtcgggaatagtgaggggatggctaggcccagggactccctcaggggagagcgctgagtgccatctgggctggggctgcagcaaggcagggctggactgcacagggaggcaggcagactggatccagcagcctcagggcccaaggaggagtgagaatgaagagggccagccagtgtgtgagaaatcagcctccccaaggcagaggtgaaccctcaatcgcccctcctcccttactcgctcactcagcatttacaggcagcaacgtggtccctggtcaccatggcaaccaatggccaatgcctttctcaaggccaggcccatctgcccatcccacagggagatgtctctgtggaagatgggaagcccagccacaactcccagtggcctagaaagctaaggccatgcaccagggcag

SEQ ID NO: 444116 - DNA, 776 bp, Homo Sapiens
  misc_feature (748)..(748): n is a, c, g, or t
attgtgatttttaagttttattgattaaattcaaacttttttatcatttacacaaagaaactgtgacagactctgagaggactaaaaggcatcaacttaaattttaacatgcatttattaaatttatatgcagatgactacactactgcaattacagaaatgagtaagaacatactctcaagatcttacagtcattggttggggtgaaagtatttcttctgtcttcatgaaaaattaaaaagatagaaaatcttgaagtattttgctaccttaaaacaactacccaccctacatttgtactaaaataggcttttgcttgttttaaaagcaattctagatgaggttatatttttacaatactgtatctcatctcaaataaatttatacattctttaccctgtctaaacttgcatgcaaaataagaaccagcaagccttcaaacttcaatcacagtattccgtaggctatattttaagtctattgcattagttgaaatttattttgcagagtatgttaacaaacatattctaacacttaaaaaatcattacaattttttctgtttttgtcttctaaattactctgagcagtgaattactggagggaagatacccatgtctaaaatttgtgtctggtgccagtctcagatttctgccaaacaccagtaggtattcaaaagtgtggtccctttaaaacagcaggccggatatcacctttctgtcttcaaagattcaaaccagacttccaatnctgggatttctctacagagggttggcgg

SEQ ID NO: 444117 - DNA, 693 bp, Homo Sapiens
tccaccgggcataattgaactttgggaccggtacgggatcaacatacagatctgtgtgaagggtgaaaatacatttaactcagggaatttgtactacttggaaacacctaactgtaatgcaacatgccttgggaatgttatagtgtgaactacctttataacataggttaaaatacgctggctagggtgtgttttcaaatgagaacataatatagctcagaatgaagtggtagttcctgtgattcataatacatatgtaggttttgcatatctcagtgcaatccatgatttatactcagaatcgacattcttaaaaagttatttcaagggatggcataactgtaagaggtcagtgctagaataaagtcctgtaggtttattttggaagggactgtggccagggtagttctcaggttgtgctagagcagcactttgttatgtggaagacaggttttttaagcaacctttgaatccagctctagtcagtctaagcaggcaaaggtaactgatgactaaatttcagtagctactttcattggattgaccctacaactgccctgggacatttcactgtaccagtattaactgcaaacagcaataattgtcattacagcaagggcagtttgggggtaaagcattttggaggaataaccttaaaaagttaaaaagtcattgtaataactgataaactgt

SEQ ID NO: 444118 - DNA, 532 bp, Homo Sapiens
  misc_feature (101)..(101): n is a, c, g, or t
  misc_feature (127)..(127): n is a, c, g, or t
  misc_feature (401)..(401): n is a, c, g, or t
  misc_feature (456)..(456): n is a, c, g, or t
  misc_feature (505)..(505): n is a, c, g, or t
atggtgtttaattttagcatttaacaactcatttgttgctttcttatgacatacaaaagaaagagaaggttactgattcacacaaacatgtttacattggnaattccaacgtaatttcttttctagnaatagtccaaaataatacatgccattgacacaaagtaacaataaacctatattttatataggtgcatttctacaggtcttttaacaggtaggaaatagtatagatagacattgacccaaaaaatagcaatttaggccctgtctggctttagaaattagttagccctggttttcaacataggagttgaaacctatgtttcaacataggagtaggtctcagtgggaacaaggagtccatttattttccaaaggattaagctcagaacatttgggtngtgttgccaatgggatcaggaaacttccaagtcagggaatgtctggctgaatgantcatcagttcaaaaaacacaaagctgtagctggaaattgagtacccacnaatgcctatgaggcattaagttgccac

SEQ ID NO: 444119 - DNA, 813 bp, Homo Sapiens
  misc_feature (30)..(30): n is a, c, g, or t
atgaagttcgcttaccggttttcaaatttnctgggtacggtgtaccggcgtgggaacctaaattttacctgcaatggaaattcagttatcagtcccgtgggcaatagagtcactgtatttgaccttaaaaacaacaaatctgacacgctgcccctggccactcggtacaacgtcaagtgcgtggggctgtccccggatggccgcctcgctatcatcgtcgatgaagggggcgatgcgctgctggtcagcctggtctgcaggtctgtgctgcaccacttccacttcaagggctctgtgcacagtgtgtccttctcccctgatggcaggaagtttgttgtcacaaagggtaacattgcccagatgtatcatgcccctgggaagaagcgggagttcaacgccttcgttctgggacaagacctattttgggccctacgatgagaccacctgcatcgactggacggatgactccaggtgctttgtggtatgggagcaaagacatgtccacctgggtgttcggagccgagcgctgggacaacctcatctactatgcactggggggacataaggatgccatcgtggcctgcttctttgaatccaacagcctggacctgtactcactcagccaggacggagtgctgttgcatgtggcagtgtgacacgccccccgagggcttgcggctgaagcccctctgcgggctggaaagcagacctgttgcagcgggaggaggaacaggaggacgaggacgaccagagggcgacgaaagacacatcgggaaaagcatccggccgagaggaaaccgcaatgatacacgg

SEQ ID NO: 444120 - DNA, 2050 bp, Homo Sapiens
  misc_feature (1189)..(1189): n is a, c, g, or t
gaattccaggtggcgagacacttcaaaggaggaagctaaaaactccagcactttctccacatacagttcaggaagggaggaggtgaccaccttcaatctcgcccctgggcaccgcctcccgggcctcctgcaccagtttgctctcgttgagccggagggccatgaggatggccctggtgaagtcctgctggcgcagtgccttcgcgcaccctcccgggggtgacgctggtgtccagctcaaacgggtcaaagagcacgcgggtgtccagggagtagatgaggagtccctccgtggtggtggccgcccagcagcgcccagtgggagagaagcggagtgaggtcaccctgatctcaggtttgaagtgccgagaactcatgtcacctttcctgacgcctggcagtggtatcgcgactccatcctcctgcccagcatcctgatcaattagtgccaggttgccaaactctgtcatttttcttcggttcaaaaattcctccatggcgtccagagacaggttgcaagagatctcgaacctcttcatgagaatctgctcacggacgtggtagatgcacacgaacttggacatgcctcccgccaggatgctgtggccgtctgcagagtagcacagggcggtgaaggccttccccttggccgcgtgcttggctgtaatcttgtccagctccttcctgccagtcttgaggtcatgcctgccctcaatggagcccgtctgcaccgcgttctcagggtcccagaaggtgatctgtgagttcagtgtggccacagccagctccgcaccatcagggcgaaaagtcacagccagagcatcagaggtcagggccagcgtctccttggtcctccagctgtcaaacatgtcccataggcgcaccgtcttgtcccaggaggcactggccaggacggacttcattgggttaaaacacagaccactgatgggcccttcgtgtccagacaaaacatcaaggagcctgcctgtctgcatggaccacacgaaaatctcaaaggagtcctgcgcccctgcagagacgatctcaccgctcgcatccaccgccacacaggagaactgggtggggcgtggagaggtgaaggtgcggaagtttcggtacctgtgaaggtcaaaggctcgcacggtccccgtcccatggatgaggtcacccacaacgtagccggtggcanttaaaggtcacaccggtcaccccgctggagtgctccgtaaaagtgacgaaagcagaagccgctgagggtgttccacaccttgaccttgccgtcgtccccgccagtcacgatgtactgtccgtcgggcgagttaggccagggccaccatgctgttgaagtggccctgctgcttgagcacgtaggactcactctgccactcccacaccagcagctgcccaggcctgaacagccaaaagcaatccaagtcccccgagctattgatggccactgaggtcgactgctctgatctgagatgctcagggagtggatgaggttaaactctggcacgctcatgaacgatggaagattccagaagcaaagccagtgaccaagaggtgagacttcttatgacatcgctgcagctcgtcaggttcgttaaaatccccttctttattgaagaagtactcggccagccgtgagtacttcacgttttcctgtcttctcctcctcggccggagtggcttttccccggatggctggtctctctgtcgccctcttcatcgacgatgatagcgaggcggccatccggggacagccccacgcacttcgacgttgtaccgagtggccaggggcagcgtgtcagatttcgttgtctctttcaaggtcaaatacagtgactctattcgcccaccgggactgatacactgaactttccatcgcaggtaaaatttaggttcccacgccggtacaccgtacccagcaaatttgaaaaccggtaagcgaaccttcatcatggccgtcgcacgtgtgccgcagctcaacccggcggccgcccacagagacacttcccgggggtccgcgcggcaccgcccacagcccgct

SEQ ID NO: 444121 - DNA, 441 bp, Homo Sapiens
  misc_feature (82)..(82): n is a, c, g, or t
  misc_feature (101)..(101): n is a, c, g, or t
caagggcctccctgcaaccaagtttgctctccgtttgaagccgggaaggcccatgaaggatggcccctggtgaaagatcctntggcgcaagtgcctcgcgnaacctcccgggggtgaacgctggtgtccagctcaaacgggtcaaagagcacgcgggtgtcccagggagtagatgaggagtccctccgtggtggtggccgcccagcagcgcccagtgggagagaagcggagtgaggtcaccctgatctcaggtttgaagtgccgagaactcatgtcacctttcctgacgcctggcagtggtatcgcgactccatcctcctgcccagcatcctgatcaattaggtgccagggttgccaaactctgtcatttttcttcgggttcaaaaattcctccatggcgtccagagacaggttgcaagagatctcgaacctcttcatgag

SEQ ID NO: 444122 - DNA, 879 bp, Homo Sapiens
  misc_feature (494)..(503): n is a, c, g, or t
tgtggacagagtaaaaaagtttattaacattctgagaaggacagaaattttcaagaatcatcattagtgttaacaaagcttgatgaaaaaattcggatgcaaggagggtcaatgagttattgggtggtctttcaaataagcaaacctcaagcaataataccaaagtgttttaaaagagcgtttaaaatgaattttattctttgaattttacaggtagtctttagaggcttcaaacaagaactctgttgcaaaactctaataaatagcttgccccaagtccccaaacaaaatgtaaaacaaaatgagaactaaactcagaaggataagcaagacttcagaatgcttggatgttagcaatatttctcatttacaaagagatatcaggcaatgtacaatctccttcatacaagtcaaagagagaaagagacagacaattgaaatcttcacaaagcactccgaaatcttcctatttccatgatagaaatgtcaccagnnnnnnnnnnttccatggagaaatcacaatcaagaatgaaactgtagcataaaaatctggtagtgaatgtagcagggagaagagaggaaaatccatcctgtttctttcagggatggagagaggaaggaattgagattacttgggtgagggaacttccaatcagatgccgctagagtgctgaatgttcccttagaccagagttgccactgaaagggcagaggggtcggtttagtgacagttatgaaggcaacaaacaaaggggtctcctcaggtcagtcaacactggccagccccatgtctctgtgctctacagcagccttggaagagtgacccaggggcccaaagcagcctgcatcacaagacagcaaaaatagcacaccaccgct

SEQ ID NO: 444123 - DNA, 560 bp, Homo Sapiens
  misc_feature (465)..(465): n is a, c, g, or t
ccacaggaaatccacaaaatatttatttgaatttcagttatgagtgacacataggtctgcatgtcctgagaagttctgtacacccttatctcacttggccatagtcattggaagtttctgatgtgcgtttagaacagacatgtcccctcttgtctaccacagtcttctccacacttagagtttttgtaccaatgatagttcccacatagccctggcaggtctgaaccagttatgcctgcctactgagttttatatttcatgagtcatgagccatgggcaggtactgggggatgtagctggtaaagtgggacatgcattgggaacagaggaccaaacttttgctgtggaggttctcaaagaaactaccccttttcttcagagctagctctggggccacaggtgacccttggtgtccagatcacaagattcagtccaagcctgtcagtctttcataggaggccttanggcaacaagacaaattcaaccaaaactggactgagcactcttcctgcccatgcggctgtttgagacactcagtgcccccttacaaaagctgttct

SEQ ID NO: 444124 - DNA, 254 bp, Homo Sapiens
agaaggagctgagaccatttcaaagaaaaaaaatgctttatagagttttaagtatgacttagatgggtccaggcaaataaactaaaaagaagtgaaggcaacatgtatcgtctggcagaactaaatcttggagtggggtgagggatgaaagactacatattgggtacagtgtacactgctcgggtgatgggtgcgctaaagtcgcagaaatcactaaagaactcatccatgtaaccaaacaccacctgtacccc

SEQ ID NO: 444125 - DNA, 446 bp, Homo Sapiens
cgagctcggtaccctacttttccacagggagtttattccaaaaataatcagggatgtgaaagaagatttagatgcccagaaatttcagcatctaaaattcatcatttacgttcatgcaaaaataactgcggtttcagaccatgaattttatatcattataactaggctcaaacacatctttattaatcaaaatagaaaccattacaatcaacacatttttaagttgtttattcctgtagtgtagaaatccatgctttaggattcgacgaactcttggaaagcattttctgcatcctgctagttgtggaagtgttttccctgcaaaaaggtgtcgcaatgcttgaagaagtcgtagtcaatggagagaggtcaagtgaatatggcggatgaggcaaaatgtcacagcccaatttgttcaacttttgaagcattggttgtgcaacatg

SEQ ID NO: 444126 - DNA, 925 bp, Homo Sapiens
  misc_feature (110)..(141): n is a, c, g, or t
ttttttgttcagaaacccatttattaaagaaaataagtgacagaacaatccacagatggaaaagaaatattccaagtgcatataatcaacatggaattcaaatccagaannnnnnnnnnnnnnnnnnnnnnnnnnnnnnnncaaaagtaattgcatttttggaccattaattttaaatcattataactaggctcaaacacatctttattaatcaaaataggaaccattacaatcaacacatttttgccaacgagaaataagtttgtttattcctgtagcataaaaatccgtgctttgggattcgacgaactcttggaaagcattttctgcatcctgctggttgtggaagcgttttccctgcaaaaagttgtcgagatgcttgaagaagtggtagttggttggcaagaggtcaggtgaatatggtggatgaggcaaaacttcgtagcccaattcattcaacttttgaagtgttggttgtgcaacatgcggtcgggcattgtcgtggagaagaattgggccctttctgttgaccaatgccagctgcaggcgttgcagtttttggtgcatctcattgatttgctgagcatacttctcagatgtaatggtttcaccgggattcagaaagctgtagtggatcagaccagcagcagaccaccaaacagtgaccatgacctttttttggtgcaagtttggccttgggaagtgctttggagcttcttctcaatccaaccactgagctgatcgtcgccggttgtcatataaaatccactttttcatcacatgtcacaatctgatagaggaaatggggttgttgttgttggcataggaattaggtcaaggtggccattttcaaaatggatattttttaaaaatttttcacttcaggctccatggagggcacccacttatccaggcttttttcacc

SEQ ID NO: 444127 - DNA, 724 bp, Homo Sapiens
  misc_feature (507)..(596): n is a, c, g, or t
ccttcggggtgacaggctccttcttaatcctcttccgctcagggccctgcttctctgtgtccgagtccttctgctccccattggcgcccgcggtgaagggcagcttccgcttgctggctcgctccctcacctccttcccgccatcgccacgctccagttttggggtcttggttagagaaactttatctttatcctttttcccagtctgcttctccaccatgtcgctgctgaggggaagctcttcctgctgtggtgctttagggcacccacccttgggcatcgtcctgctcctcacccgatcttcatttacacggccggcgcttcatcatcaaccgtctgcgattccatagctgaaagtcagtgctgacgaggactgtcttttaaatccaatggaggtgtgtcccagagcagggctgtatatattcgtgctccgagggctgcgcggctccgcgacggctcagcggcggggcgcgggcgctgcccatgcagcccgcggccgcgtttccnnnnnnnnnnnnnnnnnnnnnnnnnnnnnnnnnnnnnnnnnnnnnnnnnnnnnnnnnnnnnnnnnnnnnnnnnnnnnnnnnnnnnnnnnngcccctcgggcgcgcccacggctcgggcgagagccgcggctcccggtgcggacgctactgatggggcgtctggccgcgggctcggaagcggcgcctccccgcctcgtgctagtatcgccacccaggcc

SEQ ID NO: 444128 - DNA, 471 bp, Homo Sapiens
  misc_feature (395)..(395): n is a, c, g, or t
  misc_feature (448)..(448): n is a, c, g, or t
tagagaacagaaagaaaagagtcctccagaccagccatcaggttacagaagtagaaaggcagggccacgggcttcacgagagacatggatgtacgaggccgagggacagacgcccgggatcacacaccacagacacacggtggctgagaggcagccggcgtgtgtctcacacagcggagggcacctccgaaggtggcatctgcatgacaacacagcacgaggagtgtgcgagcaatgggcaacgtggacaccagcaaccatggtgggttccgacccccgaggccggccttcctacctggtcacagctcacatacaaatctgttttgcctggagttacccaggacagaagcaatataggaggagaaaggtgtcacgtcctggcgctgaagcaagcnacaacttccgtgttgctgttaacacgactcccgccacattacctccacagggnccacaatcctgcacccacccaca

SEQ ID NO: 444129 - DNA, 360 bp, Homo Sapiens
gggcaaagtgaacccagccccagtttattagaaaaggtgtgaacagagttgcaccgacaggagtagccccagccctctgcccaccctcacccacacccatgccactcgcccccaaagggctgtagtgcctctcagggcgcagcctccagtggcctggacagcagggtcccggagtgccggctgctcccgccccagctccctgatagatttattgcacttgagaaaaagaaagctctgatcctctgctcccatccccccaccctgcccggcctgcgctgtctggggctgttctgtgcatctcaaccaccaccagcacgcaccgtctctccggcaccaggctgcctgcccggccctgtgccc

SEQ ID NO: 444130 - DNA, 348 bp, Homo Sapiens
gcaggtgaatatgattttattcagcaccagctcttaacagctttctcacactagctgtctacactgtctgccttgtcttggctgcttagcctggcagccccccacacagctgtgcagccggctcttccctgccttcagggtcagcagcttaactctttctctctctctaggcacgagtggcctgagctgtgtcctgggtcctctctgtctgtctgcaaagacggacagctttggctttctctttgggcgccagacctgcacagtgtcaacagggaattataccttttatagacaatagtggcttagagccaagtgatgggccttccctatgttatggctaatggtggg

SEQ ID NO: 444131 - DNA, 929 bp, Homo Sapiens
tgcaatagtgagtacagaggcctggaagatgagggagctgggtttaagccccatcaaccggcatcaactagccatgctaccttgggcaaaataaccgtagctaacacttagtgaccacttactgttgtgcgttctcatgttatcctgacagtaacactaatagggtaggtctgtcagaattttctgtccacaagcaacagaagcttacactgagaatttattggagggctttgagacagctcatgtaatggaaagctcttaagaactaggtttagaaggtgcagagaccagggcaacttcagggatccaggtagcaggaaggaatcggtagcctctttggtatggccactgtggtggtagacactgtctaccttgtttgctgagtcttctggctttcttccactcttcctgctcttggacatcagactccaggttcttccgcctttggaatctaggacttgcaccagtgggttggttgccaggggctcttgggcctttggccacagactgaaggctggctgcactgtccgcttcccccgttttgaggtttttgaactccggctgagccactactggcttctctctaaccccgcttgcagacggcctattgtgcgacttcgccttctaactgtgggagcccgttctccctaataacctccctttcatatatacatatatcctactaattctgtccctctggagaaccctaatacctgaattataactctaagtttcagttctggccatagcattatgtcacacccacaccagcatccatattataggttgcctaattaatgtatctgtaaacctatagcccgcttgggtggggctattgagagtcagcacccagccctgatcatatataggatcagcctactggggttggccacgttgtatgtagctgtgaatagcaaggaggggaccag

SEQ ID NO: 444132 - DNA, 328 bp, Homo Sapiens
  misc_feature (299)..(299): n is a, c, g, or t
  misc_feature (309)..(309): n is a, c, g, or t
agtttcaatttttattatgaatgtccaaagtgacagcatactgtgaaaatgctaagttctcattgattaaatttcaagagaccacagactacagcattccaagcactttaatttttgacagagccaaaaacaaataaaagaatgataaaaatattcttttgggtgtaaagagtattcatatttgagtttttgtatttttttcttccctgcaggtattgtgaacactgataatttccaaaacataaattctggtctggatacttgcagcaaatttttataatctctacctgggataagangctaataagnaatgtacttataaaggtat

SEQ ID NO: 444133 - DNA, 465 bp, Homo Sapiens
  misc_feature (148)..(166): n is a, c, g, or t
  misc_feature (444)..(444): n is a, c, g, or t
ttttttttgtgattcaaggttatagctttactgcaactcaggacagtgagcccaagccaggtgttgggctgggccccagaacaaggctcaaatgcggacttggacacacttcgaaggagggctgctctgcccctgctgttcgggcgtnnnnnnnnnnnnnnnnnnnccactgagctgggccttctgtcctcctccctggatgtgcagacatgggccatggcttctgccaggactcacatgtgagctgggccttctgtcctcctccctggatgtgcagacatgggccatggcttctgccagggactcacatgtgagctgggccttctgtcctcctccctggatgtgcagacatgggccatggctttctgccagggactcacatgtgagctgggccttctgtcctcctccctgggatttgcaagacaatggggccatggctttctncagggacttaaatgttaagct

SEQ ID NO: 444134 - DNA, 614 bp, Homo Sapiens
  misc_feature (528)..(528): n is a, c, g, or t
  misc_feature (543)..(543): n is a, c, g, or t
  misc_feature (554)..(554): n is a, c, g, or t
  misc_feature (569)..(569): n is a, c, g, or t
  misc_feature (578)..(578): n is a, c, g, or t
ctgtctccgcccctctctgcaaaggcatctccttaagtagcaacctcaggcactgggggctacagtctgcccctgtctcagctcaaaaccctaagcctgcagggaaaggtgggatggctctgggcctggctttgttgatgatggctttcctacagccctgctcttgtgccgaggctgtcgggctgtctctagggtgggagcagctaatcagatcgcccagcctttggccctcagaaaaagtgctgaaacgtgcccttgcaccggacgtcacagccctgcgagcatctgctggactcaggcgtgctctttgctggttcctgggaggcttggccacatccctcatggccccattttatccccgaaatcctggggtgtgtcaccagtgtagagggtggggaaggggtgtctcacctgagctgactttgttcttccttcacaaccttctgagccttctttggggattctgggaaggaacttcgggcgtggagaaacatgtggacttccccttttccctttcccattcgctgntttcccacagggtgnacaggttgggntgggagaaacagaantcttcaccnggctttttcccaattaggcaggtgttttttgggtgg

SEQ ID NO: 444135 - DNA, 390 bp, Homo Sapiens
  misc_feature (305)..(305): n is a, c, g, or t
gtaccagctgacctctctagtccttcttgcctgaaatggataagatggctgcagctccagcaaccattttgagccacgagattaccctgaagagggaaactttgcattaaaggtggccaagctgcgcagcagagcccgggctcctgatgacattgtggcacccacaccagcactcaaccatccacctccaggctttttccacatgcaaatgaacctctaatgcctttaagccactttatttagctctctattctggccaatgaaagtgattccccactgacccccagccatgttagatcatcacnccttccttcccatttatccaatttctattttgtcattcatttttccatcactgagacacggatcttgacctaaagtaactcaaca

SEQ ID NO: 444136 - DNA, 412 bp, Homo Sapiens
ttttttttggtaagaacagacactttattgcacactatggtgggggagagaggaagaggggtctagggtgacaatgcctcatcccctcccctgggctgagtggttttgacccagggctctgaccagccatgggacacatggacttgaattgttctgaacttatgccagaacccaaagtgacggcctggtgtgtatgcttgggtctgtataaagcagagctttcaatgagaagaggccctaggccccctcccccagccaaagtcatcgggccccagtgaagcagcagacctcacatctcagggcctatttgaaggatccagggatgctcagggagccaggttcattctaaccagtttagtttccagctcttttcacagtggggagtactctgggggagtgggggtggggcgtg

SEQ ID NO: 444137 - DNA, 437 bp, Homo Sapiens
ccagcagaaagagatttaataagggaaatagcgacttacagagggatcagagggcctagacaaaagaagtttaggaccacccaccgctaggcttttggcttaaggttgcatccccacagctgtgattctgagaccaggagacagctgctgcccctacaaggaaggaccactagtgtggctccagctgccccgaattcaggaagctggtgacaagaccatggatataccagttgctgcaaatcctcacattggcaggagcccgtggaccatccaggcacactgcagtggagcacctctgcctctctgccactgtccagagctcatggaaatgcctcttcttggcaaaactgaaactgcagccagatccaaacagcaagaaactctgggaaatgtcacttttgtcctgctagacccattgttttccctgcctgtttccc

SEQ ID NO: 444138 - DNA, 1086 bp, Homo Sapiens
  misc_feature (520)..(528): n is a, c, g, or t
ataaaataaagactttcttaaaggaaaattgcacctattttacctttttaagagtaagccatgaaatcttgtaacatgtctcttaactatttataatgaaaagtggcatttgggtatagtcaccacagcaatgttctacatccctaagattatctaggtaggacatgtcaaagatgactgttgtcattctggaggtcctattagagaatattataaaagggtgaccttgtaggaaggatctgagtcctccccctgaggttctctttttcttggtgctttattagcaactctggatatttttataaaactagttacattataaacggtttcaaacatgtttaatttacattaggtttttatgtaagagtgtcatggaagcactcagcaagcaggctgattgcaatagactcagacatgcgaataaatgtaattgagagtctattcatggtgaggagtacatcccagtgcctttaacctggatttctaatcttaagtgaaatgggtgcagcattcctttggnnnnnnnnntctttttattttcaagtgataattttgtgtttttctcatataagttttctccagagcacccaccttctcttccttcttggtctgtcattatattgcaaaatatttttcctctgaatgaaattatcacaggttgtctcaagcacaaccaactgaatgtctcttaactgtggggaccaaaagggagagagcctggggtctacaagaggagacacatcatcaaatgtttgaatgatcacaaattaagacattatcagcccagtaaatttcttgcttaatgtttttccaagttctggcttgaatatttcttattaaagctatcttatgtgggtattttattttgaaaggtattatagttttgtatatttaacagtaaggagggcactgtaacccaaattagcattttctctatacggaattggtaccttgaagattccttttcaaaaggagatccagcggttttccctaaattttaaggaacttaattttcctccttttttaattttaaagggggaatccttttctaaatttccaaaaagacctggggggtcccttttttga

SEQ ID NO: 444139 - DNA, 656 bp, Homo Sapiens
  misc_feature (607)..(607): n is a, c, g, or t
tctccttctctctgttgatctcactgcattgttcttccagctcatcaatcttgttgcggagccggtcattctcatcacggcagatggagaactgcctcttccactgctccacactggctgccgactcctgcagtgctgtggtcagccgtgcattgctctcccgaagggtctgcagctcgatctcccacttcttcacgttggtgcgctctgcgtcaaggcaatcttcagcttgtcattctcagacttcaggtgtgtgttggctggaccggcgtgagaggccttttcatcgtccgtcccgttgacactggatgcttgggaatgattacttgaggtctcgattttctcctgcgtcttgtctttggctatcttggcagcttctttcacctcctggaatttctctgcaaactttgtcagctgctgctcagaggaaaaccccaaaccatacactgtgttggctctgctgtcggcccactgcccaaacttctgtgacgttttggtgaaggtcatattcggtgtgattgtgctgtttatgatcaccttggctccgtccacactgatgatccgatagctgttccttgtgacatcatagaagtaggaaacggtgacncctgcttgctcgcaggcatccagttcttcttggtgttggggtcaatctg

SEQ ID NO: 444140 - DNA, 430 bp, Homo Sapiens
  misc_feature (21)..(21): n is a, c, g, or t
  misc_feature (52)..(52): n is a, c, g, or t
aaagtaacatcccagggtaanaaaaatgaaaatctggactttttccctgggntccaattgtgttacctcctatagacatggaccagccactcagcaactgcctgacacctaagctgctgtcactgctgagggcacaacccctggtaccagaccctgtgaggctgtcacctcagtaagggcacctctgcgggccccgggacagccttctctaagggctagctcacctgctttctagataaggaatctactggcttaaataaacatgttccactagacaccattctcaatttagagtgtatctaaaatgtcatctgtgctggcctctgtttttgaacaagctaaaaaccaaaaatgcccttagtgtataagtctgttgactgcctctggaagattcttaaataacactgtactttaagggttcatttgcaag

SEQ ID NO: 444141 - DNA, 509 bp, Homo Sapiens
  misc_feature (13)..(13): n is a, c, g, or t
  misc_feature (23)..(23): n is a, c, g, or t
  misc_feature (39)..(39): n is a, c, g, or t
  misc_feature (47)..(47): n is a, c, g, or t
  misc_feature (74)..(74): n is a, c, g, or t
  misc_feature (88)..(88): n is a, c, g, or t
gatgtacccccanaaatccaagnctttcaaaggtccttnggaaattncgaataacttccattccaaacaacttnttcctaggtaatcnggacctcatgtcatctgcaaaatcctaatgaaatatgttttcaattcccagttatttgaaaaaaacttgtgacccaagataaggccgaaaatatccttgcaatatgccacaggaatcccctatattatgatattgagcccatttgtttgtacctaatagtgtggtcaatcaaccagttactaatccagctgtacctacattagttactaatccagctgtacctagattagtaactaacccggctgtacctagattagtaaccaacccggctgtacctagattagtaactaatccggctgtacctagaccagtaactaattccgctgtgcctagattagtaaccaatttcgctgtgcctagattagtaactaacttcgctgtgcctagtccagtaaccaactggctgtgcctagattagtaa

SEQ ID NO: 444142 - DNA, 1101 bp, Homo Sapiens
  misc_feature (127)..(271): n is a, c, g, or t
cgactatgaggcccaggggaccctttcttggggctcagatgaaaccccagggcttctggggtgtccaagaattttttccttgcttaagcccccccaaggtaggggggatttcagggggaaggccccnnnnnnnnnnnnnnnnnnnnnnnnnnnnnnnnnnnnnnnnnnnnnnnnnnnnnnnnnnnnnnnnnnnnnnnnnnnnnnnnnnnnnnnnnnnnnnnnnnnnnnnnnnnnnnnnnnnnnnnnnnnnnnnnnnnnnnnnnnnnnnnnncggcaggagaggggagattctgaggttaggacatgcctggggagattctgaggttaggacatgcctgctcctgaaggtttggagagaaaaggctgggggtaggactgggttcagcaacatcactcccagctccatgcctcacctgagtgataagtgggggactcactccagcaccctccttagcgtggagctggcgctgggccaagggcacaccctcaggagcagcgctgagaagctgggcgcttggtccatgaaccacgccaaaatacgtgaggttgcgagccggcagctgcagcacactgaggttgttgcacagggcggcggccgagcctcgcaggggaatggagcgctcccagcggaacatcctgtgtgggggtgcagccgaatcaccaggcgcgctacaaacagacgcagcggagatgcccgagggcggctatcatcgagcatttcggaagatgcctgagactgggtcataggatggggtgcccagaggacggtgatgggggagggtctcgaggagcaagacaggggagtcccagggctgttttggggcgacgggggaatcgcagaggaggaatggggatgacacaggaccacccgatggccccaagcccgcgagccaaataagtgtgatgaagcccccaaggctttctccctcggctcggatccctgaagcccccggcctagatcagaggtaacacctgcagccccagatcggctcgcctgactcctggttcgtagggtccctccaaatccgccgccaccatagagacgacgcacgtacgcccccgctctcgacgaattcgagctcggccgatttggcctgatcc

SEQ ID NO: 444143 - DNA, 1165 bp, Homo Sapiens
tttcgggtggagcgggtactttatgaataccacagggacaaaggaaggctgctcttctcacacactgctgaatctccggatctccgcaaggtcatagccagtcacagcaaaggagttgcctgaggaatcacaaaatcgagcaccacacagctgggtgtcggcgacacactcaccatgacagtgttccacctcaatgtagccactctctgggtttctgctcagcttccagatatgcacaaaggtgtcctcacctgcagagagtagcttgcccacctcagaagccaggtccagggcgcagatggcccgggcatgggcattgatctggacatgtagatttcctgtagtggcctcatatagatgcacttgtccgttcccatagcctgctgctatgatcccctgccacagctgcacagaggggcacggaactccaaatcctggaatgcgggtcaataatgtgaattctggccctgaccgccagacacacagcaagcctgagtcatctgccgtcaccatgtcagccacacaatcctgtccctgggcaggctcggtggcaatgtctgtgattggcatctggtgcccagccagctcctcgctcagtacaatgttgggaccctttgctgggatgtcaaacaccagcacccggcctgaccacgttcccacacagatgaagtggccactggcagcaattccccgggcaaacacagcctgtactggggaggcatctccagagtccagtgcatgccagtagaccatggtgtagccattggactcgtacatctgtattcctcgatgtgaggtgagtaccagcagcactcggaaggggaggacacaccagtggacctgagtgataagtgggggactcactccagcaccctccttagcgtggagctggcgctgggccaagggcacaccctcaggagcagcgctgagaagctgggcgcttggtccatgaaccacgccaaaatacgtgaggttgcgagccggcagctgcagcacactgaggttgttgcacagggcggcggccgagcctcgcaggggaatggagcgctcccagcggaacatcctgcagccccagatcggctcgcctgactcctggttcgtagggtccctccaaatccgccgccaccatagagacgaccctcgtgcggaattcgccacccaggcc

SEQ ID NO: 444144 - DNA, 893 bp, Homo Sapiens
  misc_feature (43)..(43): n is a, c, g, or t
  misc_feature (428)..(460): n is a, c, g, or t
aaattggtgagaatattttaaaaagaaaagtaatttaaagttncccccggctgtattttatatatcctatgtataaaaaaatcattattcaactatcgatcccattccctattggtaatgcttcttaatcccagacattccgcaaaatacagactttttacaaatcacggcatctttaatacaagaaaattaacatgcattattcttcattctgtgtacagtgatggagttcattagtaggcaatgacccattactacaaacataacggcttctgtgaaacttaagtgctttctcttcttttagtattaacttacgatacatgaggtgacaccagataataggcagtgagatgatatgtgggaagggaagggaagcattaaacaaattcgtatgcctcatctataatttcacatatggataaaggtannnnnnnnnnnnnnnnnnnnnnnnnnnnnnnnnacaagcactcatgttaggacaaagatgaaatgtgcaaactttaaaatttaaatattcattttctctaagatccagctcagtaaaagattaccccagttccctgcaattttaaactacaagatcaaagctaataatttgttataaaagttatatattgaaaagaaataatgaaaaacacaattgggaaatatttaagaaaaaatatgcaggactagccctgctgtgtcaaccctgttccctaaattcaatcatatacccactggtgtgaccaacagataatgcctttgaacagtaaattaagctgaacaaaaccagctcaacaaggttaagaaaaaaatgtcacatcaaggtagtatgttttatttctgaaacagttctgtagttcttacattcagatctattctaaatgtttctttgttaaactcacttgtat

SEQ ID NO: 444145 - DNA, 993 bp, Homo Sapiens
  misc_feature (92)..(92): n is a, c, g, or t
  misc_feature (110)..(110): n is a, c, g, or t
gaggagggcgaggccccctgcccccagggaaaagccggtgggtcttttccacctgggagggaaggccaattcccaggttggggtatgaggcnccggggcccccccttcanccggggcttgcctttgagtggtatccccctcagaagattccagccaacacccagaggaggcaggagcagtattcccaggagaggggccccacacatgaccagggcccgagttcagccctgacacgacgctaggcttgtcagggccctctgcacccattttcctagagtctgatgcttcagtcgcccggaaggatggggcctcagttaccaggtaaggcaaatcctgagcatcttccgggcttccgatgggttcacagagggagttcttgcagtggtagccagagggacattgggagcacggagtcccctcctggtagggccgtttccccttcacgttccccggaggctcatagttgcacaccagtaattcgatgttggtctcctcaacaccctggagcttctcacagaagtgggaaccacagccgatcctctctgtcttggcccataccacctgcgtgtagtggccgcacatctggcctgggctgcaggtggcggcgctgaggttgtagtgctcacgctcgtggtgccactcctccatggccagcggcacgtccatgccctcgtctgtgatggcgaacagattctcgccgcggcgcccgcgctccttgttgtggccccacacgcactgccgtgcgtaggccttggcgaaggcggccagctcctcgtcccatctcatgtgcagcatgtctgaggccgtcggggatacctgggcccggtagaggttgtgcagctccaccatcaaacgtttctcctcatctgtgagggctccaacggggcctgtggtggccaccagcagtagcagtagcggcagcagaagcatcaggaaactgcaggagccgtgcatggtggccagccgatcccgggaatccggaccggtccagct

SEQ ID NO: 444146 - DNA, 1050 bp, Homo Sapiens
  misc_feature (84)..(84): n is a, c, g, or t
  misc_feature (89)..(89): n is a, c, g, or t
  misc_feature (183)..(183): n is a, c, g, or t
  misc_feature (977)..(977): n is a, c, g, or t
tgtcaggacattttgggtccagagagttctctggctcctagaggcacttttgttttgtctgtcactttgtctgctgattttggnatagnaacatggtcgatttggggaaggtaactgctcctcatccaaggaggacaggttgtgagctgccaaaatggaagggacctcagttgttacgcaagntggagccttctgttgccatggaggcgggtctttcgttgctaaggaagttggggcctgggtttccacagcaggcagagccttggttgccagggagcctgagacctctgttaccaagaaagccgggaatcccccgttgttagggaagaaggggtacccattttcctagagtctgatgcttcagtcgcccggaaggatggggcctcagttaccaggtaaggcaaatcctgagcatcttccgggcttccgatgggttcacagagggagttcttgcagtggtagccagagggacattgggagcacggagtcccctcctggtagggccgtttccccttcacgttccccggaggctcatagttgcacaccagtaattcgatgttggtctcctcaacaccctggagcttctcacagaagtgggaaccacagccgatcctctctgtcttggcccataccacctgcgtgtagtggccgcacatctggcctgggctgcaggtggcggcgctgaggttgtagtgctcacgctcgtggtgccactcctccatggccagcggcacgtccatgccctcgtctgtgatggcgaacagattctcgccgcggcgcccgcgctccttgttgtggccccacacgcactgccgtgcgtaggccttggcgaaggcggccagctcctcgtcccatctcatgtgcagcatgtctgaggccgtcggggatacctgggcccggtagaggttgtgcagctccaccatcaaacgtttctcctcatctgtgagggctccaacggggcctgtggtggccaccangcagtagcagtagcggcagcagaagcatcaggaaactgcaggagccatccgaagaattccggaccggtccagc

SEQ ID NO: 444147 - DNA, 522 bp, Homo Sapiens
  misc_feature (57)..(113): n is a, c, g, or t
aggagatatttaaccttttattgtcctttagagcacatctcaatttggactaaccannnnnnnnnnnnnnnnnnnnnnnnnnnnnnnnnnnnnnnnnnnnnnnnnnnnnnnnnttctagaactctctcttacaaatgaacactatcactgtcgttgaaaactttcttgagatagtttattttatacaaacaaactgtatttcttattattcctgaaatatctcatattggcatcctgccatttcattgtagtgcctatcatttttccattgatactgataaagttgcctaagacacaacttcctacatagaggaaataagaggaacaaaccccttttggacagaatctattaaaactcattccactatccctatgtacataaataacattgcctctgctgagtggaatttgcattcgttacttcaaaattcagactcatctacctttccaagttagacagttggggaaagaacttcctaaatcttaaggttgaaggcagagggctcaaccccactccagatt

SEQ ID NO: 444148 - DNA, 1316 bp, Homo Sapiens
  misc_feature (24)..(24): n is a, c, g, or t
  misc_feature (59)..(59): n is a, c, g, or t
  misc_feature (373)..(373): n is a, c, g, or t
aaggttggaagagattggaatccntttccttttcagctcagcaggggacactgattccnaagaagcaagtaacttaaccaggacaggttggccatctggatctacactgaaggtctttcaagtttcatccactttatgcccagatctcagggcagaaaattcagccagacccagagcaaacaaggtgaccagagtgatgtctgagcaagaaagtcccagcagcacactgcaagaccagagtacattcaagaggggagagggcacgtggcaagctggagtcccgagtcagagtctagggcagcactgggtctgaaggacacagcccggcctgctgggctgacagtgtgggtctgatgcctcacatgatgtggcncccactggttgtattccctatgtggagggtggtgggttcctgccctgttgtggcccctgttcctaaactgaggccaggttccatctcagtgctgcagtcctgaggagcaccacgctggcccgccagccaggccacagtcctcagcccctctgggttccacgagaaggccccagggagtcaccgtcactgagagggaaggggccagggaagggaggctgcattctactgggagagactcggggagggactaccatgggcttggaaggagctacagccccaaatattgcagagccaaaaggaatgggatacatgtctaaaaagtgacaacagtcttgtccctattttaaaaacagaatattgttgctgttgcctggtttcatttttttccttttaaaaccactcatatttaaaaggtgaagggctgggagatgtagtccccttcactctggtccttgataggcaccagggggcctcagtctcacgctggctcctgctctccttgcctgggctccagccacatgaagcaagggcagagagggttgcaactgctctgccttcccaacagcgattccctctccccataaaaccagggcacacgtgaggagaagtccaaagagtaaagtgcacagaactccccggagcaggtggcctgggggcgggtcactccgagaaggaaggggtctggggggcgtcagcccagagctacagctgtggagcaaacactgatccctgtgaagtgagcctccagggcacagtcccctttcccttgggccctttgacacttgtttttgggactgtccgctctcagcagctctccaaggaaagtctcggtcccaaagatatcgcccatgctggaggaaacttggatgaccttccctggctggtaatgactcgtgaatgtgaagggggcaggatgtggcaggagggaaagagtacattatag

SEQ ID NO: 444149 - DNA, 393 bp, Homo Sapiens
cccctgtggtgcttggctttcagaagaaagaatcttcaggcctctgctcttgtgagagtaatttctccttaacaccgacagtgcagcgtaagtacagtcagagctcattaaatagacttctgagcataattataattaacaattagctagaaattagttttaatgatttgttttagatgatagaatagaagcataatgtaattatttttaaaccttctacatcatttagaatacaactaccaccacctttcaattattgagaggcaatcatctaaagcatttggcaagtgatccacttacggagccaagctaagggagctgaagagaagaggccgccgccccaacccaggtgttgttagttatctagccttttgcaaagcctcttccgtttct

SEQ ID NO: 444150 - DNA, 427 bp, Homo Sapiens
ggcccaaaatgtgtccattttaggcttccacagtacaaatccctccattgacccattgctggagcagtttccagtgggtagcatgaacaggagccttatggataattcagatttaaggagagtgtggcaactctttcccacaaacttaaccatgaactgggaaagaaagcaccaaaattagaagtaaacacaggaccacaaaagaaaggcactgattgtttattaaaaggtaactagctgcaactgcagtaatgattacccaagaaatgaagtcattgtttttcacctaataaaaatatagtcgtccagctacaaaaccaagatatgacaatacatgtccaaatgcttgctcttaagacatcagcattatctagctaaaactcatgttcacaaagtgttttgctagcacaaaaaaatcctacaatct

SEQ ID NO: 444151 - DNA, 426 bp, Homo Sapiens
  misc_feature (43)..(43): n is a, c, g, or t
  misc_feature (65)..(65): n is a, c, g, or t
  misc_feature (73)..(73): n is a, c, g, or t
  misc_feature (94)..(94): n is a, c, g, or t
gaaggcccccaactgcatccaatctcctgatgtcctcaagcgncccacagggcccctcgggccanaaacacgncgtggtcccagtgctgtgagncctccaaagactgccgctctgtggtctggtcacttagagctgagggggaccccaccaggagattggcatggcgcaggatttgtgccccagattcatggattattttgggatgggccacttccacaaccagatcagggcgccttgacttgctacctttcactctgtcccccatcgtgccaccagctgcctccagtgtgacgttctcgctcccacgtccgtccctcccgttccccagctcgcgtcagcccaggagaagcccttcgaggcctggagaggccaagtgcccccaacatgagccccagcctctgtgccttgagggtgcctggcatcgg

SEQ ID NO: 444152 - DNA, 849 bp, Homo Sapiens
tggggggaggcagcggtgatctttactgagtcagaagggagaccctggggaagtggggcagggcaggggtgggatggtggtggtgagaggccaggcagatgatcttgtctcgggagggaggaggcttctcagcagagatggatccccggcctggaggggagctggcagcaggccaggaggctccgccagaaggccgtgacggtggcggaccggtgaccgcgcctggctcggcagggttctctctgcgggtgtgcacagcaaagcttcggcccgtggggcccggggtccgctcagctctacatccaccacgtgcatgtccgtgaggctggtatcagccacgagcaccccaatcaccccatcgaagcccaggctgggggcagccagggcagccgccgccatggtgttggaatttcgcggggcaaaggggcagaggcgagggacagggccttcgtagagcacagtggaaggcccagggctgtgggctggagcagggggtccctcaagccggaagccatcggggtgtgtggccatggtgacacgaaggctcaggagattggcatggcgcaggatttgtgccccagattcatggattattttgggatgggccacttccacaaccagatcagggcgccttgacttgctacctttcactctgtcccccatcgtgccaccagctgcctccagtgtgacgttctcgctcccacgtccgtccctcccgttccccagctcgcatcagcccaggagaagccttcgaggcctggagaggccaagtgcccccaacatgagccccagcctctgtgccttgagggtgcctggcatcggaaatggcgcaggctgcggcagcccgct

SEQ ID NO: 444153 - DNA, 541 bp, Homo Sapiens
  misc_feature (16)..(16): n is a, c, g, or t
  misc_feature (27)..(27): n is a, c, g, or t
  misc_feature (55)..(55): n is a, c, g, or t
  misc_feature (71)..(71): n is a, c, g, or t
  misc_feature (76)..(76): n is a, c, g, or t
  misc_feature (94)..(94): n is a, c, g, or t
  misc_feature (115)..(115): n is a, c, g, or t
cattcccctgggaaangtccaaggggncggggcaaaaaaaggccccccggttaanaaggaaaaaactcccnctggnaacccctggggcaaaagnaaaaagcctggtaaggcgggncctttcccctccccaagaagcttccatacaatggtcggctgaaacatactgtttaaattagacttatatctctcgtttcaaaatagcagctttaagaagaacgcctcaagtatccttagaaacagcagggcaggaatctcttcctgactgtttcctattccttttgcatcaaatactgggtccttctgatcccagtgtttcatacatgtaacccacatacctcttttttgtttgtaaaacacagggcaaatataccttttcaaacttcaatttcactggtttaggattggtagcagttacagcttcggcaatttcctgaccaatcttaaaagactgctccttagtggctcctttcagtagcacaaacatactgtcagtatcgccatatacaaccctagccccccatttcttggtatcattcaccag

SEQ ID NO: 444154 - DNA, 410 bp, Homo Sapiens
  misc_feature (98)..(98): n is a, c, g, or t
aactccccatgggcgcccttaacaaagcgggaaaaaggggtaactccgggggtccccataaatgatgacgtatggcactcgctccccaaacctgaagnctcagagcgcccggtcataagtcagcattttcccttgtaagttccaagggctggcacacaagctccctggtttaataagaaaaacttcctctgtattccttggcaaagataaagtcttgtatgctggcctttccttccagaagcttcatacattgtcgctgaacatactgtttaattagacttatatctctcgtttcaaatagcagctttagagaacgctcaagtatcttagaaacagcagggcaggaatctcttctgactgtttctattccttttgcatcaaatactgggtccttctgatccagtgtttca

SEQ ID NO: 444155 - DNA, 780 bp, Homo Sapiens
attcttccattgctgccgcaaacaaattaccataaatttagtggttcgaagcaacacaaatttattaccctacagtatgtaaattagtcccacagtgctggttccttccagaggctgagggagagaatgcgttttcttgccttttccagcttttccagaagcggtccccaacctttttggcaccagagaccggtttcgcggaacacaatttttccatggattggggtcggggagggatggtttcaggacgattcaagtgcattgcatttattgtgcactttatttctactattattacattgtaacatataattaaataattctacaactcaccatcacagagactcagtgggagccctgagcttgttttcctgcaactagacagccccatctgggggtgacgggagacagtgacagatcatcaggcatcagattttcataaggagcgtgcaacctacatccctcgtgtgtgcagttcacaatagggctcgtgctgctatgagaatctaatgcccaccgctgatgtgacaggaggcggagctcgggtggtaacgccagcgacggggagtggctataaatacagatgaagcttcgctggcttgccggcccctaacctgctgtgcaccccacttcctaataggccatggaccactactggtctgtgtccggagtgttggaatccctgttctagagactgcttgcaatccttgactagtggtacctccttccatctccaaaaccagcaaggcagcctctctctggccagcagggaaaggtctc

SEQ ID NO: 444156 - DNA, 543 bp, Homo Sapiens
cctggagagataagcctttattttctaaataaattaaaattgtttaaagatgagtcagagctaccataaattcatgcagaggcatttccaaaaggacatcagtagagactttaacacacgtgccctcagaatgcagaaggccagtggggttggttcacaaacttgacactgctagaggaacctaagctgaagagcgccacgtgagggtgggcaatgtggtaccaaacacagcaacagcctccacatcttttaagggcattacacacttggaactccacaagtctaggagataatcaataatagataattattatcctcctttggcacaggaggaaactggttcagaggctagaactccagtcccctcagccagtgcacttgctggttcacctcactgcctttgtttttcaaagctctgcttcaaattcccctccctccaggacgccttccctgactaacgccaggccaatgtccttttcacttagcactttgaggaagttgttgtataacattgcacaatgtctaagaacagtggttctctaa

SEQ ID NO: 444157 - DNA, 428 bp, Homo Sapiens
  misc_feature (367)..(367): n is a, c, g, or t
  misc_feature (370)..(370): n is a, c, g, or t
acatttttacttggtgtaattaataaacgaagataaatcatagtgtatgtgtattatgttgaaaaaaactactctgagtaaggatatttctctcaaatggtcatcactttttttccttggaggaagattgtcatgaaggcatcccttccttcccaaaacgacaacggcaacaacaacagtctcctttacttacagctattaaaagagacaatgtaggggaaagggccaacaccacttggggcaagcatgagctgcagcgattgatgggtgatgggtagcccagccatgctgtgttcttatcttagagaggacagagcaggaaacttacaggggtagcagacctttctgatgccaaagaaataagggnggncaaaatcatgtttgcctagctgggaggtaaatctcttggcagtcagggtccctgaaca

SEQ ID NO: 444158 - DNA, 612 bp, Homo Sapiens
ggcttaggtacgaggccgggatgctcaatacggcacgaggggcgcccgcttaccttgaggctgggttggaaaaagactatgttagcaagtgtcacgccatgcttttgccaactttccaattaagggttgacattcctgcataagcatttctctgtgaaaatgtccttgcctcttacagaggagcagaggaaaaagattgaagagaatcgacaaaaggctctggcccgcagagctgagaagttattggcagaacagcatcagaggactagctcgggcacctccattgctggcaacccattccaggccaagcaaggcccatcccaaaatttcccaagggagtcttgtaagccagtgagccatggtgtcattttcaagcaacagaatctcagtagctcatctaatgctgaccaaagacctcatgattcccacagttttcaggcaaagggaatatggaaaaagccagaagaaatgcccacagcctgcccaggccacagtccacgtagtcaaatggctctcactggaatctctcctcccttggcacaaagtcctccagaggtccctaaacaacagctcttgagttatgagttaggtcaaggtcatgctcaggcttca

SEQ ID NO: 444159 - DNA, 885 bp, Homo Sapiens
gctgaacctgttgataactgggaaaattgtagatcatggcaaggggacatttagtgtttatttcaggcataattcaactggtcaagggaatgtatctgtcagcttggtaccccctacaaaaatcgtggaatttgacttggcacaacaaaccgtgattgatgccaaagattccaagtcttttaattgtcgcattgaatatgaaaaggttgacaaggctaccaagaacacactctgcaactatgacccttcaaaaacctgttaccaggagcaaacccaaagtcatgtatcctggctctgctccaagccctttaaggtgatctgtatttacatttccttttatagtaacagattataaactgggtacaagaaagtgtgccctgactacaactaccacagtgacacaccttactttccctcgggatgaaggtgaacatgggggtgagactgaagcctgaggaattacaaggtcatatgacagggctgttacctcaaagaagaaggtcacatctgttgcctggaatgtgtctacactgctgctcttgtcaactggctgcaaaatacactagtggaaaacactctgatgtaattttctgcccagtcagcttcatccctcagtataattgtaaatcatcacagattttgaagtcacacctgaagacatgctctcacatatagaggtacacaaaacacacccgtcatgcacatttcagcttgcgtctattcatgattccctgtcgagagggcttcattgtctgactcataactggttcaggatcagtaatacatcaacgggaaggattaactagacagaacaatgttactaaacacatagctgacaagaaaatcttttaaagttttgattacatgctatccacaaacatccac

SEQ ID NO: 444160 - DNA, 1290 bp, Homo Sapiens
  misc_feature (68)..(68): n is a, c, g, or t
  misc_feature (1258)..(1258): n is a, c, g, or t
gattctccggatgccgccgagaacgacgacagactcagctttttcttcgactcaccctcgatgtggancggggagaccctgatcaagaacaggagcgcagagcttcgtgtcctatacgctccccggctagacgattcggactgccccaggagttggacgtggcccgagggcccagagcagacgctgcgctgcgaggcccgcgggaacccagaaccctcagtgcactgtgcgcgctccgacggcggggccgtgctggctctgggcctgctgggtccagtcactcgggcgctctcaggcacttaccgctgcaaggcggccaatgatcaaggcgaggcggtcaaggacgtaacgctaacggtggagtacgcaccagcgctggacagcgtgggctgcccagaacgcattacttggctggagggaacagaagcctcgctgagctgtgtggcgcacggggtaccgccgcctgatgtgatctgcgtgcgctctggagaactcggggccgtcatcgaggggctgttgcgtgtggcccgggagcatgcgggcacttaccgctgcgaagccaccaaccctcggggctctgcggccaaaaatgtggccgtcacggtggaatatggccccaggtttgaggagccgagctgccccagcaattggacatgggtggaaggatctgggcgcctgttttcctgtgaggtcgatgggaagccacagccaagcgtgaagtgcgtgggctccgggggcgccactgagggggtgctgctgccgctggcacccccagaccctagtcccagagctcccagaatccctagagtcctggcacccggtatctacgtctgcaacgccaccaaccgccacggctccgtggtccaaaacagtcgtcgtgagcgcggagtcgccaccggagatggatgaatctacctgcccaagtcaccagacgtggctggaaggggctgaggcttccgcgctggcctgcgccgcccggggtcgcccttccccaggagtgcgctgctctcgggaaggcatcccatggcctgagcagcagcgcgtgtcccgagaggacgcgggcacttaccactgtgtggccaccaatgcgcatggcacggactcccggaccgtcactgtgggcgtggaataccggccagtggtggccgaacttgctgcctcgccccctggaggcgtgcgcccaggaggaaacttcacgttgacctgccgcgcggaggcctgcctccagcccagatcagtggcgcgcgcccccggggantctcaacatcggcctgtcgagcaacaacagca

SEQ ID NO: 444161 - DNA, 493 bp, Homo Sapiens
  misc_feature (13)..(13): n is a, c, g, or t
  misc_feature (35)..(35): n is a, c, g, or t
  misc_feature (43)..(43): n is a, c, g, or t
  misc_feature (68)..(68): n is a, c, g, or t
  misc_feature (89)..(89): n is a, c, g, or t
actgggggtcccncaaaagccgagtaacccctttncctgcccnaaaaacacaaatttgaacccccccnctgcttgtaagggggaccttnaaatacccaatatttccatgaaagtagttggaaacgtattcctttaaactcatgaggtggagccgtttcctagttggttcttaatgaaatgcagcattgtgaaggaaaaatgctcattacagaaacagcagtacactaccatctcaatgagtgccaagagcgagcctgttcagtcccgcaaagcaaacattacctctaacaggtaaggtttcccttcagacatgaacaacaaggcttctacctcctcatggaggggcaacagagggcttgagggagcaatgctaatgggtggtcgttgcttaaatatgccaggagcaacattcctttgggatgagacatctgaatgcaaaacaagtaacgccactgtattgtgaagattcccaaattctcgtgcttgtgctgaa

SEQ ID NO: 444162 - DNA, 813 bp, Homo Sapiens
  misc_feature (269)..(277): n is a, c, g, or t
  misc_feature (290)..(529): n is a, c, g, or t
ttggattttatacacattactactaaaataatactgaagttggataaggttatcctttctgtatttgcgtctttcttgtgactaaccaccctgatatagtattaaccactgtgttcaagagtaaaaacaatatatgcaattttcattgaacttaaagagtgaaaaccatgtaaactattgaaactattgtaatccattaatgcttttttagaatggcagaccttgatgtttatttctcaaatggttaagccctcttctttactcttaannnnnnnnngagacagagtcannnnnnnnnnnnnnnnnnnnnnnnnnnnnnnnnnnnnnnnnnnnnnnnnnnnnnnnnnnnnnnnnnnnnnnnnnnnnnnnnnnnnnnnnnnnnnnnnnnnnnnnnnnnnnnnnnnnnnnnnnnnnnnnnnnnnnnnnnnnnnnnnnnnnnnnnnnnnnnnnnnnnnnnnnnnnnnnnnnnnnnnnnnnnnnnnnnnnnnnnnnnnnnnnnnnnnnnnnnnnnnnnnnnnnnnnnnnnnnnatgaatcaccacaactagcctacccttagatttttggaaggatcgatcttatttaactatgtgtggaacaacccagtaatatcagactcgaattactatttcattctatttcaaatgcttataaagctactattgtagattatagtgttaatgcaaagtttacagacttttgatatggaaaaccagataaaacaatgttacaaaaggcaaatataaagagtatggttttcttttttagtggcctttggaaaaattttcactttaaacttcttatttactggtat

SEQ ID NO: 444163 - DNA, 625 bp, Homo Sapiens
  misc_feature (38)..(38): n is a, c, g, or t
  misc_feature (99)..(99): n is a, c, g, or t
  misc_feature (128)..(128): n is a, c, g, or t
aagtgaccctggtgacaggtggaagaaatgaagaatgnaagagagaagaaggtacacattaggaagcaaaggctttgggctgaagaacagaaacgtttnaaaccctgactgttggaagaggaaaaganccaattccagtatgtttccaataaatagtgtttaaaattaatcttgccttatccgtgcaggtgtactggcatgttggagcagttgttacaacctttaagaggttgtgttgatgctgtctctagcatttttatacttcaaaacctaataatgttatcacatcatcatataaagactgcctttcctcaagggtcatttactctcatagcatggcaagtcgaaatctcaggcaaacttcaaaagaatgtttgttctaaacattgagttggaaaaataattttggaatgcagtgtttctagttgggttgaaagataagcattattaatccattaatatcacagtagaaaatttctctaataattttgggattgtctcaacagctttttttccttaattggtgagggaccgataaggctggaggtgttggggtatgttagctgtcattcatggggacttgtgccattggcacagaatttctagattgaaccatttcaaggag

SEQ ID NO: 444164 - DNA, 457 bp, Homo Sapiens
  misc_feature (18)..(18): n is a, c, g, or t
  misc_feature (29)..(29): n is a, c, g, or t
  misc_feature (70)..(70): n is a, c, g, or t
aagggaacaagacttttncacttccccanaagtataacttccaaaccctacacacacctcaccttggaanccctttgccagaaaaactgcatttcttgtggtcatgaaagagtcaaagcattggcccagagctactgcagaagcttgaaatctttgctgagcatcaagtactcaaacttgaaaggaacttgtaagtccctccctgactgctcccttttctggcttctcatttgcaaatggatcaatataaccaaaaaataactaaatggcttttttggtgggggatgaggaggctaaatagttaatttaaaaaacaacaaaatacatccactctagtacatctaatgcacggaatgtcttcttaaagggtggggaaggaacctagtttctccagagtactcagggtcctgggctgcctgcctcttttgtgcagctttctctgatacactctgatctg

SEQ ID NO: 444165 - DNA, 419 bp, Homo Sapiens
  misc_feature (133)..(133): n is a, c, g, or t
  misc_feature (176)..(176): n is a, c, g, or t
tcaaacaaacaaaacggtttaaaaaacaatgagcattttcagctgtctactgtttaagaaaataatgagctctcaagttttgccctctgagcgattttctcccaggactgccctggtaacactactactcaancagtttttggtgctttgcgcagttacttgacctccctgggccntcggttttcccccaccccataaagtggggataacagtacctatttcatcaggtggtggggacgatttaaaatggttaataatgtgcagttcttaaaagtgtctggctcagaataagcaccatacacgttagggggaaaaacagcagccggatgtgaggccctccccaatttcgttactccataaacctctgagttgctggtaacacctgcaggaatgagaagggcctcaatatgggctgaatt

SEQ ID NO: 444166 - DNA, 1399 bp, Homo Sapiens
  misc_feature (1167)..(1224): n is a, c, g, or t
gccatagtctgatgcagaaaccaataaacaaggaggcacccaataaatacattcttagaaagtgtaatatgtgctttgtaggaaataaatgagggatttcaacgtaacaaaggtggggcttggctagagaataatctgggaaagggccatgtgtttattagcaaaagacaagtgaatttcgtgaaaaccagcaatggaatttcttctggctatctgacttcatgcaaatgaggctagaatatagacttctatccaaataagataatttgaagtttcatccatttaaaatccataccttgtaatgattttagtattcctttccaagggtctggttggtggaccagagtctaagtcatctcagtgtgttccctcttccattcatctggcattgttgagtgaacagaatttaaacacctggaagtctgctttgcattctttggtggaaaacacgcagacagacatggaggaggtacacagggtggcaatttgcacaattaaacacttacaaacttaaccccaataggcttcatgtgatgaagtctggatgtataaagaaataaatagatgagaagaggtcaaatgcaatctgaatgacaaagaaccgaggcatctgtctctgccagctgtaggacagatgtgcctgatgcatgccaggtgtgcaaggcgagggatcagaaaaacttttgaggacatgtgttcccttgggccttgcttgttaattaaaaattgcaagggcctttactcctatttgaaaacactgagtaaaagcaactgaatggggggatctgggctttgctgtgattaggctgtgctggtgcctcgctaggatggtgtggaggggggaatgcagaaagtatttgtgtacagagacgacagcatccagcctggcaaaagaggatgtgaggaggtgggagaggaaattctcccactgaaacacagggaagtgggtgatttgcagccaaaggacatacaggaccctttatgcactgatgctggcactgcacaatctcctgaaatcacatccatccacagaatcagttctcctggaagaggtcgatgcctgggtgctctatgccaggtgcttctgtgtatgggtatctctgctccctcatgctataatggacatgaagctaatctttgggctgtgtggcctctgattcagtgctnnnnnnnnnnnnnnnnnnnnnnnnnnnnnnnnnnnnnnnnnnnnnnnnnnnnnnnnnnctgggggaggactgcatgtccttccccagctgtttgctgtaatgaattttttaaaaaggcctgaaaagtattttgcctatgcaaagtgctatggtattgagttgacagaatgtccatgggtgtgggattgaagagagtgacttaggtcaatcccgtactccgggccgtaccaccc

SEQ ID NO: 444167 - DNA, 208 bp, Homo Sapiens
cagcgccactagcctcatcctttgcggcattaaagaccccttctctgatcatcctatctaaacagctctcccccatgaatctcaattacactacccccattgctttcctacaaagcacatattacactttctaagaatgtatttattgggtgcctccttgtttattggttctgcatcagactataaacttcatgaggctagggcgctg

SEQ ID NO: 444168 - DNA, 913 bp, Homo Sapiens
  misc_feature (29)..(29): n is a, c, g, or t
gggaatccggcccgggcccatcggccccnaccaaagggaggctttaaaattaaaaaggctgtccttccattaacaaataaagcaaagcattaacccaatactcctaagagacaagcccattttttgaatggtgaaaagtggtaacaactgccttttcttcatctatgtgcaggtgtcagaaattactattaaacacaacctatatatagtaaaaatctgataatccacatttcttataagctactttttacatttttaatgtctgggtatcctaaaggggtttttccctgatacttgactattacatccgcctttgcttctgcatgaacacgttttacatcgtgaattatctaattaatatagaaatattttgagataatgcatgatatcatatttaatttatgaactgcctcatgacaaaaggtaatgagagctgatactatccctctcctgaagtgtcagcgagtaacccgggcaggctttgctctgggtcactcagccctctctccaccactatctgccaccagtgcccttacagtaatctgcttgtgctcaatgtcctcggaggtttttgagattaacttggatttggcaaatgttaggtgggattttgtgtttaaataatgcaaggttataggacttcaagaataaatgaaaccacatctctaaatacagtctatgcctttgctgcatgcttgctttttggtggagctttgaacagggaaactgtctgtgattatttgttaaaatgaatacttgctacatgctctcctcaagtccttaactttgatttattaaagcagttgtacgtatgatgctgtggttattactaaacacataaaaattatcataatcaccctagcctcaacagtttgcctgttcaacagtggtaaaaataacaaacacgcccgct

SEQ ID NO: 444169 - DNA, 583 bp, Homo Sapiens
acgagcctttttcggagtgcgtggggatgggccaaattggacatctggagccttggagttgtcctctacgtgcttgtgtgcggtgccctgccatttgatggtagcacactgcagaatctgcgggcccgcgtgctgagtggaaagttccgcatcccattttttatgtccacagaatgtgagcatttgatccgccatatgttggtgttagatcccaataagcgcctctccatggagcagatctgcaagcacaagtggatgaagctaggggacgccgatcccaactttgacaggttaatagctgaatgccaacaactaaaggaagaaagacaggtggacccccgtgaatgaggatgtcctcttggccatggaggacatgggactggacaaagaacagacactgcagtcattaagatcagatgcctatgatcactatagtgcaatctacagcctgctgtgtgatcgacataagagacataaaaccctgcgtctcggagcacttcctagcatgccccgagccctggccttacaaaggaaaactaaccgttgcgaacggaaacaactgaccggagcagttccacttagg

SEQ ID NO: 444170 - DNA, 443 bp, Homo Sapiens
  misc_feature (432)..(432): n is a, c, g, or t
gatttggtaattaaagtttatttgaacacaaaatactttctctgtctataaaattggctgttagcagtagcagcagcatgtcctggccaaggggagtagatttctccagactactaaagccatgtatatagccattcccacttcccatattctgtggatatgtacatgtgcatggtagctagagtccctccaccagagtatctctctcatgatggtttcttcagggagaggaagaggagacctggggtgaagagctgggatggttttgagtggggcaagccattaggctgttaccttgaagcccagtctctctgggatagctgtactgcagggtgtcctctgaggcccttctctgtactctgtcttgcttgaggggaatgggggttattttggactcccataggaaaggcacttagcctaagtcaccaaatngactgcttggg

SEQ ID NO: 444171 - DNA, 1085 bp, Homo Sapiens
agagcagtgtctaggaagtaggaccctgcctcaaatgggacttacccaggtaggcagtgagtgatatttctggaaggatcacattcccatctctctaatatgagtataacagtctcatctggatatggaaaaaagattattcagagccaacaaatctggctataggctgtttcactttctctgaaactcatccagtctgacaccagttcacaaagaacacctgtgattccagtctgatctaggcaactctagctgctttcccactaccctcaggtttgccttgtcagccatggatatgggaacagaaagactatgactcgcgcacagctctgcatgttgctgcagctgaaggacacatcgaagttgttaaattcctgatcgaggcttgcaaagtgaatccttttgccaaggacaggtggggcaacattcccctggatgatgctgtgcagttcaaccatctggaggtggtcaaactgcttcaagattaccaggactcctacacactctctgaaactcaggctgaggcagcagctgaggccctgtccaaagagaacttagaaagcatggtatgagcacaggtcatggacagcccctgctcaagaaaaagcatgagctggccacacatgtaatccataaccaccaaaaatactatggagagctacactgcttcagtggggaccaagcagtcatttggtgacttaggctagtgctttctatgggagtcaaaataccccattccctcagcagacagagtacagagaagggcctcagaggacacctgcagtacagctatccagagagactgggcttcaaggtacagcctaatggcttgccccactcaaaaccatcccagctcttcacccaggtctcctcttcctctccctgaagaaacatcatgagagagatactctggtggagggactctagctaccatgcacatgtacatatccacagaatatggggaagtgggaagggctatatacatggcctttagaagcctggaggaaactactcccccttgggcaggacatgctgctgctactgcctaacagccatttttaaggaccgagaaagtaattttgtgg

SEQ ID NO: 444172 - DNA, 1476 bp, Homo Sapiens
  misc_feature (644)..(663): n is a, c, g, or t
  misc_feature (710)..(732): n is a, c, g, or t
ttttacaattagggtcatttaactatttaattgctttttgagattattgctgaaattaggaagggagcattgaaatgggaagggggaggttagagaagacagagatttaaaagaagcaagtaccattttccaagtataaaactcgtaatattaaaagtgacatagcagtatattcacatgactacttaagtctaatgcagaaacaagacagtacagtttttgcagaggccgatgtgacatctgcatgcgacatgatactattaagtgtctctacccacctctgctacagagtagctgctatatgcacacatacacaaaaatacacaatgaaaagcctacaaaagtgttaagtcaaactaaggctcttaattgtaaattaaagtggctacagtaggtccctttgaaaaacaccatctcccctggcaccaatgttgtcacagcacagaggaagcgagtggctcggggtctggttctggggagacgctctacaggggcacatgcttctccatcttggcagctggcaagcccacagtggtgtctgttgggtggctctgggttcctggacctcattcaacataatgcactgaccaaacagctctgaccacagctactctcaaagaggtgcctgccaggtctccctctgnnnnnnnnnnnnnnnnnnnntacccactcttggaacccacaatgcactgctgggcaaacaggaaaannnnnnnnnnnnnnnnnnnnnnntaaatgccacaccagccctgaatggcgtggccagctagtcacagttgttgggtcagtagtacagtgctcaagaacaattcagactaacatgccaaggagcctgaggaaaagtctggtagtcatggctctcccagccagcattcccagtgggggaaactagaagacaccagcctggagaggctgaatattcaggagtccctgagatggggaatggaacagaggaaagtgtcttttgactcatcttaagtactcccctccccaaatagaaacctcaaagactgatccatttcccctagggcctgggccaggagtagctcactgctcactgctgaggagaaaggcacaagatataatgtcataagagcaggacagtggctcagcctacagagttccctataggggaaagaaggcaggaaataggcgcagggtctggtcctgtccctgcaccaccctgagcagctagtcttgggaagggattacaggccctgggccataggctgctcgccattctgctttccctatcctgtttctctccctgtgctgctcccttttagccagggctgagaaatgttcagcacctgaggcaaaactgccatagtacctctgaaagctgaatcaagggggaagaggcagaagaacacactaatagagaaaattttccttgctacgggtgctctttcacacccacctagggtaagtcaaggcaacttgtgaaggtgctttgagctgttccttcaagcaaac

SEQ ID NO: 444173 - DNA, 480 bp, Homo Sapiens
ggcatgcctatccctttccagagttcaaaatgcagggaaccctggcttttgtgggggactagcaggtcagcccaggaaatatattgttcccagccattccttcaaagagagagaaaggggtgtctggtgttctgcatccatgttctccatactctaagcaccattcagcaaacttacaggccctatacaggtacttcatgtcctgtgtgaggttgtagagtgtcaggaaggcataggcattccctgcagaaccgtggcacagcccatatcccttcttcagcaacccatattgccagatcacatcagcacactgataggcatcacagagatacttttcctctctgaataccttataggcctggatgagcatgtagattaccccaggggcgccatggcaccaatggacaagcagatctcgattatcacctatacatggagggtaattgccagaagggaatttcagctggcagacgtagtcta

SEQ ID NO: 444174 - DNA, 669 bp, Homo Sapiens
  misc_feature (527)..(527): n is a, c, g, or t
  misc_feature (566)..(566): n is a, c, g, or t
  misc_feature (580)..(580): n is a, c, g, or t
  misc_feature (645)..(645): n is a, c, g, or t
  misc_feature (655)..(655): n is a, c, g, or t
ggaaatagagtataaattgtgcagtgtgctggacagaaataattggacaaatactcatcctctgagatgttgtagatgaaggcagtttttttcttatttgctacatgtgcttttcttttgtgttttagtgccaaacccaagtctgaaatccacgtgtctatggccactccggtcactgtgtccatggagactgtatccaatcaaaataatgatcagcctaccattgccgtccctccaactgcccagcagcccccaccgaccattccaactatgattgcagcagccagtcccccgtcacaagcagccgttgccctttcaacattcctggagcggtccccatcactccacccatcaccaccattgcagctgcaccacctccatcagtcactgtgggtggcagttctttcctccgtcttgggccctcccgttcctgaaattaaagtgaaagaagaagtagaaccaatggatatccatgaggccagtttctgcagttcctccactggctaccaacactgtgtctccatctnttgcattgctggcaaacaacttgtccatgcctacaagtnacctaccacctggngcctccccaaggaaaaagcctcgaaagcaacagcatgtggatctcaacagaagaaggtgacatgntggagacaancagcactgatgatg

SEQ ID NO: 444175 - DNA, 880 bp, Homo Sapiens
  misc_feature (612)..(612): n is a, c, g, or t
  misc_feature (826)..(826): n is a, c, g, or t
  misc_feature (842)..(842): n is a, c, g, or t
tgggtggcgaattcggcacgagggaaagaaactggaaagaaaaataatttttttatgtgaacaaattttgcaagaagaaaaaagcataaaagacactaacggcaaatctatgtttaaatggaaaatcgtctaactggagaagggcggtatccaccccacattcggatcccagggtcctgaggcctcgcattgagctgggggttccctctgagccccagtgtgtgtggaatcagtgcactcttgactgggcctgtagtaaggtgctcatggggtttgtcttctcacccaccatcagaggacttttaaaatcataggcgtagagagttagctatctgctgaattactgccactcttcttggtgggggctcctagctgtggctgggggctccaggcgcccctgtgattacctcctactgccaccatggcgctcattcagattccccactctcactaacattgcttccttttttgaccagcaggaaacagcaggtctggccagattctcacttgcccatcaatctcgttcttggatgatttccctcattgtgatgcttctgggggcacgttgaccatatgcacctctagaacctaaccagggcttccttctaccanctgtgggcgggcttggtctggtaaccttgtctgctctgccattccactgctcctccatccactcgccaatcccaagagtctggcctccctccagccctgggcagactgaccagcaaggtggacctttacattcaagcacagctggcttttatgacataaagaactaaaggccgaaagaatctcttgctgctgcaaagaacagattttatatttnttcctctaatcttggncaaatgacctttacctttttggaaagattttcatattg

SEQ ID NO: 444176 - DNA, 494 bp, Homo Sapiens
  misc_feature (16)..(16): n is a, c, g, or t
  misc_feature (53)..(53): n is a, c, g, or t
  misc_feature (76)..(76): n is a, c, g, or t
  misc_feature (90)..(90): n is a, c, g, or t
  misc_feature (111)..(111): n is a, c, g, or t
  misc_feature (116)..(116): n is a, c, g, or t
caaaactggttaaaanggaaaaccccctggtttaggtttctaaaggttgccantatggttcaaacgtgccccccangaaccatccacaantgagggaaaatccatcccaangaacngaaattgatgggcaaagtgaaaaatctggcccagacctgctgtttccctgctggtcaaaaaaaggaagcaatgttaagtgagagtggggaatctgaatgagcgcccatggtggcagtaggaggtaatcacaggggcgccctggagcccccagccacagctaggagcccccaccaagaagagtggcagtaattcagcagatagctaactctctacgcctatgattttaaaagtcctctgatggtgggtgagaagacaaaccccatgagcaccttactacaggcccagtcaagagtgcactgattccacacacactggggctcagagggaacccccagctcaatgcgaggcctcaggaccctgggatccgaatgtggggt

SEQ ID NO: 444177 - DNA, 393 bp, Homo Sapiens
atttttaaataaaattgcccatcctcattcagctcttagaacaaaagcaaaaaaccctgtaaatcaggagatataagcacatctgcacccagaataggcccatatgatagggcaaccctgagcttaaacaatgacatcttcaagggtagaactaatctgaaacccccttccagcctctggaagacactggcctgcatcagttagagtcagagcaagtgtcacttcacagggaaaagaaggattatatagacttcctatccctagagtttataaatgtcaactatataaaaaaagctcaaaacagtgttaaaggaatgaacagtaggaattttaataggctgtccaaagaagccaggtctgctgtgggcaagtatagcctaaccctagtcttgt

SEQ ID NO: 444178 - DNA, 1519 bp, Homo Sapiens
  misc_feature (29)..(29): n is a, c, g, or t
tgcaggttgtcaaagtctgggacagcgtngcatgtgctatgtggtggtacaaatagttcgagtctgttttcgtttacaaatcctcatcaaagagttcatgagagagggttacttatctctgtttcacagatgagtaaaacgaggcttagaggctaagtgcatctcctatgtaaaaatgctggatttcagcccactgtgtgcagtcaggtgctgtgtcctgggttccacaggtggacactgaaggccaccttctcattaatgttagcagcagccagcattgagggcgggtcatttctggcagggtaaagatgaaaaaagtacaagaagggcaaaggaatatccttgtgggtcttacttttaggccttttatgtagtttttttctttaaaataccctcaggccagtcccaagcatagcctggccctgaagtgccaattccagcacccccgtgggccaccctagacaccttggccagatctggacactcagggctgagattcaactaggaggcagaccacggaagcaagtttggaggggacagtccctgacagaggctagagcatcatccaagtggaggagatgagacagagggaagggagagggaggcctaaggatttccccagagggggaggtgcatgactgggcagggaaagcagcctgctcgcctggcggctgccaccatctctctcatcggtgggccctcagaccttgccccattgcttagggagacaatgactggccacagacacacccccacacacatttccagggtagacagaaggtaaaaaacaaaggtggttgctcccagcactgcctggtctgggagctccaactatcagagtccagtgaacaagccattatgggcagcttggtccgtagaggtggctggtggtgtggagtacttgggtgggtaacgaatgaagagccggtcctcctctttcttcacccagcgcaggagtttggtcactaccaagattgcacctgccttggtcaccagagggctgaggcaggtatagagctcgaatttggaggtcacccaggccagtagtgtctcacttctcagccacgtggtaaatgaggcgcaggggtcgggaggtgctgtggagacgagcatgcaggcggtggtacaggtccgacagcacgctgccagctcctcctctctgctgtagggggcctctagctcagggctggtaaactggggcagttggcggtggtggtcagggatgtccagcaggcttatacaggaagtgccggaggcccggcgccccgacagcctgcacgctgtaggcaggagcactggctgatgaggcattagagaagctggcagcctccccaagggcacgcatggcaccaagggcatgcatcccatcttcgaccaggcgccggcaggcggccatggcatggaaggcttcacgttgggtgccaagcagcagcaggcagacaggcatagcatccaggcgggccacgtaggcgtagaaaaaaccatcagggttgcctcgtgccgaattcgccacccaggc

SEQ ID NO: 444179 - DNA, 696 bp, Homo Sapiens
cagcaccagggctctgtctgaaagtgccgtgtcgtgccgtgctgaaccgctatgagtccagagcttcccgggcctcctctgctctgcggggaaggctccggggctctccccaccttctcgaatctttgctcagatatcaccttcccagcaaaggctgtctgattatttgaatttgcaccaccctcatccaaatagtcctgttctctttgcctgctttatttttctcatagtaatcatcatcatctgacacgctgtgcattttcctgctctgtgtatggaagtctgtctgtcctgctggaatgcaggcttctggagggtgtggtcttggtttcgttctctgctgtacttccagtgcccaggacggtgcccagcatggagtagctgctcagccaatgctgtggtcttgatgggactgcattcgctttacatgattgaagctgctggcgtggaagctgtgccatgtcatgtaaagcatgcagtgggaaagcagtggggtgggggcgtctttgtattacatcatctgttgttgccgtttcaaaaatccagaggcctttctacacttcagttggatgttgatttcaaaatgaccgatgtttctttctgactcatgaaggctgctgtctttggaatctgacattagagggaagcgaaaactttacaatgtgtggggcagcctggtgtggtggctcaggtctg

SEQ ID NO: 444180 - DNA, 716 bp, Homo Sapiens
  misc_feature (311)..(311): n is a, c, g, or t
cagcccccgcaagacgccagagagggaaaaggtgaaacaaagagataagagaacagaaagacagggctggagacagacagaggggtcgccagcgagcacagacagagacgaagggagggagagatctagcactggggcccacacgacctgagcccctgtggtttggggccgggaggggcaatggtccaagacgcaggttcttgtggtagcctggcaccgccccggcccctcgtcctcctgttgctcacccggtttgcccaggctgccagcagtgatggctgggggctctgctatcctcagcaccaaccacntccgtgggtgcccacgggcaggcaagacagctgggcccttgggtgtggccctgggccccgacgcaccttccacagggtcacggctcctcctcctgctgctcagctccatggactcgctagattgcatggttggtgtaagtgacgtaagtctgtttggtggccagcgctgactgtgttcttcctcatgaaatacacatggaaggactgtgtgcagctcccatgtcattcaattaaaatgggtctttcccccatgcgtcttctcttttcccttccatgagcagaacaaccattgaggtcatctagcctcaatcttcagggagccaatggagcaacaagatggaaggatcctgggtcctcactgttgggcttgactgcattctcaaatgactataattattctattct

SEQ ID NO: 444181 - DNA, 432 bp, Homo Sapiens
  misc_feature (59)..(67): n is a, c, g, or t
  misc_feature (402)..(402): n is a, c, g, or t
gctagtctcaaactcctgggcctcgagcaatcctcctgcctcctcagcctgttacagcnnnnnnnnnaaggtaatctggtaacagctcttaaaagtagtgtgactgatgagtgcacaagcccgtccagccccagccgccccctgggaccttttctgagggtgtctactgccccgctgtgctgtgcccgctaatctgggtgtggcccgatcgcacaatggcttttctggaaggatccgatgctcacgaggcttattgctaaggaggaagatgcaacaggtccagctgttccaagtgactgggtcacgcttcacatcgatgtgcaatgtctcctgccacctgcctgggatgcactctcgtgattacctggcaggctggggaacagcacggggggaggcccccgncttgccccagcgacctgcctgccctgctct

SEQ ID NO: 444182 - DNA, 229 bp, Homo Sapiens
tccccagtttatagctgactgtgcatcaaggcttatgccagctaagcttaaactttctccaggtccgaagattcataacaaatatttataattattattcatggtgtcaaaactgccctgtcagttggggacaggaagatcaggttagaggcagcctatgaggatagaaactcacatctgagtggtaggagaaaatgtatctgttcaggctgggtgccatggcttacac

SEQ ID NO: 444183 - DNA, 1527 bp, Homo Sapiens
accttattatatagaatttgtacaatatatttcttttcgtttgcatattttacccacagcttaacatcctttttacaggctgaactcactcaggctgatagaatcaaaattctttcaaccaaataagaaaaattcaaaatcgtaaacccgtaagaaaacaaattaaaaacggtgatgaaaatacgtcactcctctcgttaggaacagtgtctgtttgtacaacaggtatgctctggaacaggatttctttacagcgtaggcacgtgtttccacctttgctctgcgggcttcgcctcctccgggcctggggctcctggaaagcgccgggacgcggcggctctggctcggcagcgccacccggtggccggagacagaggcggccgggccgagccgggagagcagccgcgggtgcgagcggactcaggcttgtttcccgtgaactgcagcgaagatcccagaacagcaagggcagtgggcggacaggtgctctggggagcccagcgtttatttacagctgatcttcctgacgggaggatggagtacagcggcggccactgccataggggaggtgactccggccctaccgcccgctttactcggagtctggggtgtggaggggcgtgggtggcgctatctcgtctaccttccaggttggctgtgagtctgagcacgcagcggggcctccctcccaagcactaagacttgtttcctgtgagtcccctcttgggaaactccttactgggaggcctcctcgggtctgagggatgaagaaggtggggccttctctggggtggtgcaggcagctcccaaagcaaggtaggtttggcaaagagcaaaagatgggaaaagggtttctacggagccagcagcacctgcctattcaggtcccaagccacaggaaccaggccaggcctttccaccagggcaatggcctcagtcctcaggccaccaagttccaggacctgccccatgtgttcccgtctcccttaaatcccaccctccacccgccccgggatggttctaccagaactctggggcttagctgagaacccaattgtagggctgtgaagcccgctgcaccttggagtcctgacccagaaggcgaaagtgctcttataggaagatgcttccagacctgcagacttgggcccttgcaatccagatccctgcagaccctgcacagagggatcttcagaggccacggggcacactgggccatggcaatgctgacctggtcaagcttggccttggtggtggggccccttctctggctctggcactgtgtggtgggacgtgcttcggcccagacactgcccctaaaggcatgctccaaccccacgggtcccactaaggccggcacgcagcccacacgccagacttgcttcatgttcccaagcgtggctctggagggagaatcatcatcggcactccagggcaagactaaacccatcaaaagaaaaatgtaaaacagcactgactagaactaatgtcgttattgctacaagtgacagccaaacagccacgcag

SEQ ID NO: 444184 - DNA, 1379 bp, Homo Sapiens
  misc_feature (20)..(20): n is a, c, g, or t
  misc_feature (31)..(31): n is a, c, g, or t
  misc_feature (38)..(38): n is a, c, g, or t
  misc_feature (43)..(43): n is a, c, g, or t
  misc_feature (56)..(56): n is a, c, g, or t
  misc_feature (64)..(64): n is a, c, g, or t
  misc_feature (84)..(84): n is a, c, g, or t
  misc_feature (106)..(106): n is a, c, g, or t
  misc_feature (121)..(121): n is a, c, g, or t
tcaacaagaaagcccttggnccgtttccaantgaacgnttgantttcttaaaaaanaattgaanacccgaacaactcaaggcgntggcttccaaaaacgtcttgcnacgcaaggcctctcnagtgccatcggaaccggagcggcaaggggacggggatggcgaagtctgcagtgagctccgtggctgtccacgaggtcacttgtccctctgctgcctggccagcgccaccctcagggtgtcggtgcccaggcgcaggccctgcaagcaggagacggcctgctgggctgcggcagagtccgggtaatggaggaaggctctgcgccgcgggccctgccaggtgagccgcaggggcacggagccgagttcccgcagggctctcttcaggtcactcacacgggcgtcccgggggaggttcccaacgtaaacatcggctgcaagcggggcaccctcccctggtggggagccaggggctgcctccatggaattggtttctggtccgggtgtgtccgggggcctcctgccaacactcaggggcactgtctgctggcagcctggttccggaaggtgctggtgctcaccctggagggtgacatccttcccagcctgctgctctcgggcgcggaggctcctcagtatggggattttctccatcatctccaggctgatcttgaaccaggtgattcccattggctttgggcgcttgcagcctgtggcgatgactctggttggagtgaggatgtagtccacagtgatgtcgtgctcctcaacaagctcttcagggatgtccacgacctggcagtcgtggacgatggtgaccaccggcgtctccttgctgacggcgcccatggataccatcatggcatattccagatcggcgtagccttctcccttcccgattctccagcctttttcagaaacggcgacggatcccaccacaactaaatccacgaggactctggagtccaagcctatggggacactgtagttcctcacaccctgagaggtggcacattttctcaagatgtctttagttgccccagggggtggtgtgatcttattaaacaatcccgttctcagtcgtggtgttggaaccaacaatgtttttttgctctgcagcaccagcagccgaacgccttccagtggtttatcagggtccactttaacttcctgtgttctggcaaaaacgtctaggtctttgatgttttggcaagccagataagaccccttaaagttgggtatcctgtgatgaacaggtcggggaaagtcagctaaattttgtgattccatgtagccccaaatttgttcacgtatgtcctgtttggagacacctgccctcggctccatggtgatgcagtcgctgtgcgacgctccccccgct

SEQ ID NO: 444185 - DNA, 1370 bp, Homo Sapiens
  misc_feature (900)..(998): n is a, c, g, or t
gggagaacaatggctttattcagatgttggtgcctctgcccctctggtgcccccgatccccacaaggggccgcgaggcgggcaggtcacagcaggttgaagtcccctttgtgctgttccagccactggtccagcgtcagggccttggggttgagtctcagggtcagctcgatgtcacggtcgggtctcagggcatagaaacggaacatgttggccaggtcccgggcaccgggaaagccaagcttttcgtagtcctcaggagtcatcttggctcctatggccctctcctcctggaagcttttctctctatttggtcaaaacatctaagccagaaatttcactctgtggccagttagctccttggcatcgtgcacgaccttgcgggtgtgcttggtgagcagggcagcgtactcctcggccgtgtgcctgcaagtgctcagcccgatgttctggccgacgtatttttcttggcatcttcaaaaggctgagcacccacaggacccaggttcagaccgggacatgccatccatgggaacgtcacctgtgggcaagctcagcaagtaggctctttccgtctggggctttttggggcaagaagtgggagaggaggttctcaaaatagcaggcaaccgcacactggtcatgggaacgccaatgtcccggaaatattcctccacctccccttggccgtcaaaagtgcgcgcggccaatctccctgccgtcagcttcttgatgttctccaggccgctgtagaccacatagtggaggcccaggcgcctggccagatcagcgagcagcttcccctgaaagtcccactgaagggcgaaaccccgaagggagtgctccaccacagcaaggagcatccaggaaaccttctcaacgacgattctcattcaggtannnnnnnnnnnnnnnnnnnnnnnnnnnnnnnnnnnnnnnnnnnnnnnnnnnnnnnnnnnnnnnnnnnnnnnnnnnnnnnnnnnnnnnnnnnnnnnnnnntgtgcctccgaaaaccaccaccagtttcttgtccaccatgaggacgagaatgggacgaatccggtccagagatctggcagagcgccgctcacggaagcccagcgtcggaggaccctggctgcagccgccaatcccgacgtgtcggccgaaacccctcctccggcgcagttggctcctcctggatcccgcgggactcggcgtcgtttccgggtttgcccgccccaggcacgtgcacagtgagtttgtgtaaatccagttagaccaaaatgagcgaggtggagagcctcttaaccggatgctacgggtgatgacccgctgagcagagcctgagcctgcaacctccagagacctggggaaagccacatactccgc

SEQ ID NO: 444186 - DNA, 1084 bp, Homo Sapiens
tggaacgtacactagtcggccaatatacacgacagaagctctattcactgtgtgggcatttctcgagtgacctattatttgtagatcagtagtcgtccccatcaatagccacgtcaacatcgatcacactcggtccattgtgcaacgtccatatgttccccggaatgattctcttcccaccctcgccccttgcccattcaaagtcgacaccgttcggcccattctacccctgccgtcagctttcttgatgcttctccaggcccgcttgtagtccacattatgtggagccgtcaggcgatcgggccacattcaccgagcagctttcccctgctgacgctccttctccctggcctgcagcttctcccaagtaattggtcacgatgaaggtggcgtaagcccccatttcagggccagcgtccattgatgaacctggtcatccttggtcctccctgcactacttctgcacgcttgcagcctcagctccttttgcctgccgtttcttccctagggctttcgggtcatccactgcgtaaccgttgaatgtcccatctttccaggagtgtacagggccaacggagccacctctgggcacctgtgcctccgaaaaccaccaccaggtttcttgtccaccatgaggacgagtaatgggacgaatcctggtccagagatctgggggctaatgggaggcttggagttggggttgggtccggggttcccgccaggagcgacaaaggacacccccattgtctcatgcatcgaagtatgtgtcgaaagggggcggcatgggcccggaagcggcaagacgcctgtcccgagatatcggggtcccgcgacccacctcgtgtcccttgggcccgatcccctcctccttcccgcctctcccggttccagtcacccgccccccggcccgggtcccaccggctggagtgacctcctcgccgcaggcctgggggggacaagttccaggagcccgggaccccgattctgcggccgagtccactgcagagtcggggatggagctgtgcgctaggcagccaactccctccccgcagctccggccccacctggcagagcgccgctcacg

SEQ ID NO: 444187 - DNA, 1130 bp, Homo Sapiens
ccatctgggagaacaatggctttattcagatgttggtgcctctgcccctctggtgcccccgatccccacaaggggccgcgaggcgggcaggtcacagcaggttgaagtcccctttgtgctgttccagccactggtccagcgtcagggccttggggttgagtctcagggtcagctcgatgtcacggtcgggtctcagggcatagaaacggaacatgttggccaggtcccgggcaccgggaaagccaagcttttcgtagtcctcaggagtcatcttggcatcgtgcacgaccttgcgggtgtgcttggtgagcagggcagcgtactcctcggccgtgtgcctgcaagtgctcagcccgatgttctggccgacgtatttttctggcatcttcaaaaggctgagcaccacaggacccaggtcagacacggacatgccatccatgggaacgtcacctgtgggcaagctcagcaagtagctctttccgtctggggctttctggggcaagaagtgggagaggaggttctcaaaatagcagggcagccgcacactggtcatgggaacgccaatgtcccggaaatattcctccacctcccctttgccgtcaaagtgcgcggcggccaatctccctgccgtcagcttcttgatgttctccaggccgctgtagaccacatagtggaggcccaggcgcctggccagatcagcgagcagcttcccctgcttgacctcctgctcctggctgcagctctcccagtaattggtcacgatgaaggtggcgtaagccccattcagggccagctccatgatgacctggtcatcttggtctccctgcactacttctgcaccttgcagcctcagctcctttgctgccttcttcctagggtttcgggtcaccactcgaaccttgaatgtcccatcttccaggagtgtgcgggccacggagccaccctgggcacctgtgcctccgaaaaccaccaccagtttcttgtccaccatgaggacgagaatgggacgaatccggtccagagatctggcagagcgccgctcacggaagcccagcgtcggaggacccctggctgcagccgccaatcccgacgtacggccgaaaccccatctaaggattccgaccgtacca

SEQ ID NO: 444188 - DNA, 687 bp, Homo Sapiens
gtcatgggaacgccaatgtcccggaaatattcctccacctcccctttgccgtcaaagtgcgcggcggccaatctccctgccgtcagcttcttgatgttctccaggccgctgtagaccacatagtggaggcccaggcgcctggccagatcagcgagcagcttcccctgcttgacctcctgctcctggctgcagctctcccagtaattggtcacgatgaaggtggcgtaagccccattcagggccagctccatgatgacctggtcatcttggtctccctgcactacttctgcaccttgcagcctcagctcctttgctgccttcttcctagggtttcgggtcaccactcgaaccttgaatgtcccatcttccaggagtgtgcgggccacggagccaccctgggcacctgtgcctccgaaaaccaccaccagtttcttgtccaccatgaggacgagaatgggacgaatccggtccagagatcggctggagtgacctcctcgccgcggcctgggcgggacaagttccaggagcccgggaccccgattctgcggccgagtccactgcagaggcggggatggagctgcgcgctaggcgccaactccctccccgcagctccggccccacctggcagagcgccgctcacggaagcccagcgtcggaggacccctggctgcagccgccaatcccccc

SEQ ID NO: 444189 - DNA, 844 bp, Homo Sapiens
  misc_feature (161)..(172): n is a, c, g, or t
  misc_feature (685)..(694): n is a, c, g, or t
gttgagaatggtggttcttgcgaaacacctgaagttttactcatggtacaaaagtatttaataagtgacacatcagtacagaaacacagagcttgtagcttgtcctttaaaaccagaatggccaagtgaaaagtcagtacagattcttatttttactattnnnnnnnnnnnntcaaagggacacactgggaattgaactactatgctttttcttcgttctagagatgacatatatgttttctgataagtaatctaccacacattgcactaaaccaaagcatacaaacagccagtaaagctgtgctctacctgctactcatgctgggctggacagtggaacaccatcttggtaggagagattttgacaggaagaaactgcagagtccctacctaacccagagaaccttacaaactggtttatacacaaaggattttcagcaaacatgcaaacacactaacatgctataggaatatgttttagtctatttctagcacacagcatacattcataggtgcccagtaaaataggaatgaatgtcaatgtagaaagcatttttgccttcacagtactaacaaacacctaaaaagcacacagcatataatactttgatctttaagtggataatcatggaagttccaagatcacatccactaggttagcctgagtattcatctataaaaatannnnnnnnnncaaaaataatgcttaaaagagacttctagaaacagtggggactacatcaggaccagaagaacagtgacacaagggactgcaaatgttaaaaactggggagtagcttttcacatgggagctttttatgtagagggacgtctcccttccggt

SEQ ID NO: 444190 - DNA, 1059 bp, Homo Sapiens
  misc_feature (518)..(535): n is a, c, g, or t
  misc_feature (946)..(982): n is a, c, g, or t
catacatgttcacgatatatttcaaagttaagagggctaggccctgtggcttcacacccggaatctccgccccttcgtaaagctagccacgttgattcacttgaggtcaggaggttccagaccagcctgacgcaacatggcggaaccccgtctctacgtcaatccgtataagcccgggcgtgttggcgcatgcctgtattccagctactttgggaggctgagtacgggaccattgccttggaacccggtcgtcggaggtttctggttgagtgtagtactgcacccattgcacttcaagcctgggccacacagaatgaaactgtctccaaagtaaaaatttagaacgtagtcatgtacgtctgaaagcgaacactcccgtcatagcgtggaacaccccacacccccggcgactttgctccgccttggtcccggtcgcagacaccgcagaaaggccatcgttctagacatacgagaactccccgtgcagccaaacgctgtagtcccagcggcggaactcnnnnnnnnnnnnnnnnnnagtgcccaaccagccagtcagcaagtgacgtcccgcctttcctccgtttccattggtccagccatgcggaggtcgctcccatgggacgccgagcttccggctgcagggctttgcgcccgggcgctttcggattgggagggcttcctccatggaacgcgagcctcgagacgtctgacgttaggcaccgttcgcagcgcctcgggctcgcacggcaggatcgaaagcgtgattggctggcggcgtctgtggtctcgggcaccgcccagtcgcgggacgctgcctctgcggaactgggggtggggcgtgttgacccccttaaaggcgccagagcccgcggtcacggctcaggttcccggtgcttcgcgcgtctccgctctcgacgaattcgagctcggccgatttggcctgatnnnnnnnnnnnnnnnnnnnnnnnnnnnnnnnnnnnnncggccgccaccgcgatcagcggcggatcccctatagtgagtctatcatgcggaggcggtgggtgtggggttgtggtg

SEQ ID NO: 444191 - DNA, 323 bp, Homo Sapiens
  misc_feature (67)..(181): n is a, c, g, or t
actcctacatagccgatcctgtacatacttgatgaaatgctcttttcccttgatttctaagacaacnnnnnnnnnnnnnnnnnnnnnnnnnnnnnnnnnnnnnnnnnnnnnnnnnnnnnnnnnnnnnnnnnnnnnnnnnnnnnnnnnnnnnnnnnnnnnnnnnnnnnnnnnnnnnnnnnnntttgccattgcactctagcctgggtgacagagtgagattccatctcaataataataataataacaacaacacattttctataataaagagggatcctatctcccaaagaaggagtaagggaaagcatttgacccagcctatc

SEQ ID NO: 444192 - DNA, 534 bp, Homo Sapiens
  misc_feature (338)..(338): n is a, c, g, or t
  misc_feature (367)..(367): n is a, c, g, or t
  misc_feature (407)..(407): n is a, c, g, or t
  misc_feature (467)..(467): n is a, c, g, or t
  misc_feature (516)..(516): n is a, c, g, or t
aagatctaagctgaccgggacaatggcgaaatgcgccgcaaaacctgctggcgctctttactgaccaccaatgggtggcaccagctgtggccactgccaagctgcacgccgactaccagtctcccgtctacttttacaccttctaccaccactgccaggcggagggccggcctgagtgggcagatgcggcgcacggggatgaactgccctatgtctttggcgtgcccatggtgggtgccaccgacctcttcccctgtaacttctccaagaatgacgtcatgctcagtgccgtggtcatgacctactggaccaacttcgccaagactggggaccccaancagccggtgccgcaggataccaagttcanccacaccaagcccaatcgcttcgaggaggtggtgtggatnaaattcaacagcaaggagaagcagtatctgcacataggcctgaagccacgcgtgcgtganaactaccgcgccaacaaggtggccttctggctggagctcgtgccccacntgcacaacctgcacacgc

SEQ ID NO: 444193 - DNA, 277 bp, Homo Sapiens
agcctccctggatctgtcaaccccagtggttttgagagaagagcacatgtgagaatgccctcaaatttggccgtgtgacatacacatacatgcttgactcactctggtcccaaaagccattcctctgtctggcttcgtcacaggagcaaagccaagtttctacaatagtagctttatgaggtaaaatcagaaaaaggccccatccagaatgattcaacgtgaagtcagactgcagtccagccatcctacccatctacatcacccacgtctaagtttg

SEQ ID NO: 444194 - DNA, 891 bp, Homo Sapiens
  misc_feature (879)..(879): n is a, c, g, or t
cgtaaaaaccggggagtgaaaacccaggcagcttattttcagagacactcccaggtcctatccctctgtgactctggatcttcccaggccatgaccgagcgtgaacactgtgtgacactggtaagatggccactaagagtagctttcctgagagtcaataagacgccattgcaccccacatgcaagaggaagctgctcagcaagtaattctggttctcctccttctgggcaggtggtaggatgccgcagggccagtgggctgtgtgcagatatgacaaatgtctcctgtggctcagagcagcaagagcctccagtgtgtccttccccagccataacaactggtgacgtccacagggtggagcctccatctgccaggggctctgagaaccctgagccaccgggaaagccacagtagacatgtagcatgagaaataaaacttcgtcatgctagccactaaaatgatgaggttgtacgttactgcaacataacttagcccatcccaacccagccaccatgggaaccagcttctatctgatgtcccagcctgtgcccatgttacaggcaaagctgtaggcaacctggtaacatggcattttctggacacagagttatttctttagggccacaagccaatggtttcgtgtgctggttctagtttcccatgaatgtgttacgatcagacttttaagttgtgaggaaaacccaccatgttactgatgtagctcttcagaaagagcaggtgttactgcaaacaggagactgcactgcccaaagcccttctcctagcaatcacaatagctgtatcattctgttgcggtgtatgtgttggagggggaagggggaattgattttgaggcaagaccttgggttcagccccncgtgccggaagt

SEQ ID NO: 444195 - DNA, 420 bp, Homo Sapiens
  misc_feature (30)..(30): n is a, c, g, or t
  misc_feature (45)..(45): n is a, c, g, or t
  misc_feature (56)..(56): n is a, c, g, or t
ttcaaatcttcctcctagtggtaggtgtanctccttggatcccantaacaatattnagcgaatcctttttcactgtcaatatcccccaaagaatcctttctgatttgttaggatatcaaacaatataagcgaacctaaactatgaccagcaatggatacaccccctttgaaatcagggttcctctgtagaaaaagtgtgtatattcggttcatttcagaagcaactgtgtccacaatagtctgacagtaggtgggactattgtagaagaagacatccagaattgtgtcattggtgaagtgcctgaggcggttaatgctgggcagggttattcgctgcagatctacatccacaccagtagaatgcaaaggactgtgccagttgactggaagaaattctaccctcccaatctgctgattttc

SEQ ID NO: 444196 - DNA, 599 bp, Homo Sapiens
agcgtctagtctattttgtttaaccctggatagaatagcaaaagaaaattttggtggttgctctaaacaaaacagaaatttgaaagctcaagttttttcttcatttgtattttagttaatactgtacccatatttgtagttaattttaaattgtaccatgtttctgcatacctctatgggtactcaggaattctagtccaatttttgtgactttttcctactgattacctttcctccaacgttttaaaaattatttcaaatggaactgaaagaagcataaactcccataaacccagcacctagactctacaattgccaacattatctatccaacaatctctgactgtaccttttaagtactttctactggactgtttccaggatcacccgtcatttatttgggttgttaacctaaagaatgaatgggggaatctccagtcataaacaacttgtcaattaggcaaatatttgagttccttctatgtgcttaaagacgtgatagagggaatataagagcatttatgttctgaaggaatttttaacctaaccaaagaagatagtagataacttgtgtgcatataagctagaacagtataagg

SEQ ID NO: 444197 - DNA, 392 bp, Homo Sapiens
cccctgttcttcctggttctgaggcggggacggtccgcaagttcctcgtccggcccaatgccagcacctcagggacgtctgggctcagtgtcttcctggaggagtttgagacctaccggccggacaggtgtggacggcccggcggtggcgagacagggcagcggctgctgagcttggagctggacgcagcttcggggggcctgctggctgccttcccccgctgcgtggtccgagtgcctgtggctcgctgccagcagtactcggggtgtatgaagaactgtatcggcagtcaggacccgtactgcgggtgggctccccgacggctcctgcatcttcctcagcccgggcaccagagccgcctttgagcaggacgtgtccggggcagcacctca

SEQ ID NO: 444198 - DNA, 486 bp, Homo Sapiens
  misc_feature (11)..(11): n is a, c, g, or t
  misc_feature (38)..(38): n is a, c, g, or t
  misc_feature (61)..(61): n is a, c, g, or t
atacaagagtnaactcatgttaagaaaaccccaagagnatccgggagggctgaagggaagnaggaatcgccttgaaaaccggggagttccaaagttaacagtgagcccatgatcatgccgctgcactctagcctcggtgacagagcgagaccctgtctctaaaaccaaaaacaaaaactaagaagggagctagctagaaaaaaatatttatatgctcagatgcctctatcctaatgtgcattgctaagaatgttagtctggtgttcttaaaggagggaggagctgaaatccttaaatgtgacccgtgcacctcacactgggcaaaggcaagcttctacatgggatggggaaagggctggtgtgggtgtcccaaaggggaagtcgtgtcaaactctccttttaaactaggtgacctaagtgacaaatcaccggaatcatgtttttggacgttgagttgtttgacagaattttctatgatctttgcag

SEQ ID NO: 444199 - DNA, 1019 bp, Homo Sapiens
aattgtttaaaaaccgaataaatgttttatttctagaaaactgtgccttagccagagctcctctaggtgatcaacccatgtctggagctagctcttcctccaggacacgagagctgggggcctgagtacgtagcgccaggcccggtgtggatgctggggagaatcatcagtgtgggagccgaaagcccccgagggtggggtcctgcacagtgggccatgcctccaccagcaagatgtgcacaggtgacagggcttctccagcctagcagggccagcccaggccctcgtgccccagatggtcaggaccaggtcacaagcttggctatgagcctgtttgtggcttctgtggactgtggtgaggactgggccaggaaaggctcagggtagcctgggaggaagaagcgcatggcagacagaggtgctgtggagggagccacagggcccttcacaaatggaaggctgtcagagagacaggggcaggccacacaagtgtttctgcacattctttcagggtggccacagactggtgggtccaaggagcaggtgtagggacagaaggagggtctgagaaacgcacagcccacatgggccttgaaggatgcggcctcacccagagacaggagtcctggcaggcccccctccagcgtggagatgcctacgcgtgcggcaaggactggagggaagcgttaggaacacagagggcagcagccccacagcggaaccaccaggggcaaggacagcggggctctgcaggcttcactgggccacggccagcccgcatccacccaatgccaggcctcagggccaagagggctcagcctcagcacggggggagccctggggtggggagacgcgagcgcccacctgcgcaccccagcagccttccgccctccgcctgggctcaggggagcagagcctggaagacggcaatgacagggtcctcgtgggtggtcaccaccagcacgctgcggaacttgtcaaacagcatgagcagctgggagcgccgcgtgttctcgttg

SEQ ID NO: 444200 - DNA, 495 bp, Homo Sapiens
cgggaacttaaaggctttgcttggcctggattttatcttgaaatacttttgacagctggctggttgagggtatctgctcacaggaacgccgcatttgctggctttgtccactagtgcttgcccctggctgctgatgcggagcctcacgtggccgcagcccaagagtagggactggcttggccacctacaggctaagcttcgggctcccaggtggctgggagggccaggggtgcacaggtgcatcagagcaggtgctgccttgctggagggccagggctcttctggccagggtccaggtcatcattgtccccagccaggaatccaaggggcctttccaaacctgcgcaccccagcagccttccgccctccgcctgggctcaggggagcagagcctggaagacggcaatgacagggtcctcgtgggtggtcaccaccagcacgctgcggaacttgtcaaacagcatgagcagctgggagcgccgcgtgttctcgttg

SEQ ID NO: 444201 - DNA, 502 bp, Homo Sapiens
aataaaattatatatgtccttgggaaatattatgacagttgactttaagatcaaaaggaaaggaagaccctgaaagtcatttgaacattttaggaaaagaatattggagagaaaaaggtattaaatatatagaaataggtttttaacctaacaaggtctgcctcttatgacgagaatgcaacagcttggtaaatcataaaagaaacatttaagctaataggattttcgtactgtctctatagctgtagctttaaaattcaacgtatataattggcatgggaaacttaatttgcagtcttttcaagcctttagggatagtgtgatgtgtaacaaacaacctcaaatgtggaatgccttggattttatttttatgggtgactttaggctacagcatttcctatacccagagctaaacactgggaataatactgacatcatttaatttaacataaggcaattatgtttaaggggtaatttgtgtcatggtacatatttggattgg

SEQ ID NO: 444202 - DNA, 835 bp, Homo Sapiens
caaacagcctacccacccaaggtttcctccctgggcagcctagcaatgaacagtgcagccggcagggcagaggcccggcagtcaccgggcccgtcaggctcaggcagagaagccacaggggccaggagtcactggagactatttctaaatgatgggggtaaatgcacaaatagaatctcaccaaagggctgcctccacattgatgccgtgcccagagggacagaaccaatgccaccagcctgggtatatgtcactgggcacagctctaaccccctcctccggactctagtcccgctcctctgcgcacagagcccccagcccacaggtacaccttcatgatttggagaaagacgctcgccccatgcacgccctcctctgggccttctgccctgctcccagtcacttccaagcttcctgtttgcctgtgatgttattgtgcctgttgagggaagcagcagaggaggcagtggctgacttggcacagatgcctgctacgtgctctgttgaaatgcgcggggtggccattcctcggtacagactagtcctggtccttgggtgtgggcagtgggggaggaaccaactggtcgaggtttcagagccaaaccttgcctttggttggtgagtccttgccccccaggcctgcgctccacgatgcccttcacccttggcaatctcagggcccatcctgggtagtaaccccactcctctctgctcccgcccgcacctgtggctctcactctgggctcaaccctgcaaacctccaggagcccgacagcagccagctgcctgcactgtcgcctccgtaagctccaacttccagaaccagaagtccctc

SEQ ID NO: 444203 - DNA, 326 bp, Homo Sapiens
  misc_feature (32)..(32): n is a, c, g, or t
  misc_feature (81)..(81): n is a, c, g, or t
  misc_feature (242)..(242): n is a, c, g, or t
acctggccctaccaagaagacttacaggcttnacagggcccagcctcccagagcagcaggagcgcggtcatggccctgctnacctggctggggacagctcttccccacccctgagccacctccaggcctggcgagggccctgagcacctacaggacatgggacagccagtgtcgcagcctgaagaaccgtcctcccttaacctggctgctcaggccttggaagggcggcccaagggtctgcncctggcctgtgtccaaggcagccctccaggtgtttgccaggatggatgccaggatccgggtgcacctggctcgcatggatccat

SEQ ID NO: 444204 - DNA, 344 bp, Homo Sapiens
  misc_feature (288)..(288): n is a, c, g, or t
tcgatagccgacaggtgggagagatagaaagggaaccccagaaacaggtgggggtgggttgtctgagatgagactagacccagtgagatggtggtgtgtgtgggttgtggggcactgccctgatgtccccctagagaaagggtcactgagcaggcctggaatcagctgccttgttggggatggggatggggcaggcggtgggaagggtggcggccatcagtccccatccagctctgggctgggcgcatcctcaggttcttcctcattaaagtacctctcctcctcatnccgtgccacgatgtcgaggttgtcgaagtcggggttgtcgtctactgtgctgtagt

SEQ ID NO: 444205 - DNA, 447 bp, Homo Sapiens
  misc_feature (380)..(380): n is a, c, g, or t
  misc_feature (415)..(415): n is a, c, g, or t
ctaaagggcaaaattctagagagtggtaaatctcagaaagcacaagcataaaatgcagctctgggggccctttccacttctggctatagggaagaacctgaatactgaacttgattcaggcagaggaccataacctgggggtcaggggaaggcatgggggggaccagaaaccagaagaacaatcaagactgcaatgaaaaaaatggatacattaggagcttcaaacacatataatttctcaagaaatttccagatgtctcatgctgcatagggcaggagcctgaaaagctaatttgagaagataataagtagggtttttgttttgttttgcattttgcagtacaaaggagaaattgattagaacttaggaagtgccagtnggttggtgaacatgccatcagtaaaagccctgggnaaccaaggttcatacttagaggtttggtttgt

SEQ ID NO: 444206 - DNA, 531 bp, Homo Sapiens
  misc_feature (409)..(409): n is a, c, g, or t
taggttgggaactaccaaatgaaggacgcaatgactaccacccgatgtctttacccatgaccgagcctttgaagggctctttggaatctgcatccagctgttgaacaagacctggaaggagatgagggcaacagcagaggacttcaacaaggttatgcaagtcgtccgagagcaaatcactcgagctttgccctccaaacccaactctttggatcagttcaagagcaaattgcgtagctgagttactctgagattctacgactgcgccagtctgagaggatgagtcaggatgacttccagtccccgccaattgtggagctgagggagaagatccagcccgagatccttgagctgatcaagcagcagcgcctgaaccggctctgtgagggcagcagcttccgaaagattnggaaccgccgaagaaaggaacggttctggtactgccggttggcactgaaccacaaggtccttcactatggtggacttggatgacaacccacaaggggaggtgacatttgattccctgcaaga

SEQ ID NO: 444207 - DNA, 1024 bp, Homo Sapiens
  misc_feature (995)..(995): n is a, c, g, or t
ggtactgcaactggttcaccagctcaaacacgaggtcaagggaagcctcttcacttttgtcctgaaagagctcagtactcagcttatcactggtgtccagaatgtattggattgtaaaactgttttcttggaaaatgcctggaacataatctatgactttgtctaagcagtcaggactagtaggaacatcacttgaaactgggtgcaaaagatcagtctggaagtgagctggtgtggaatctgccaccgtcccactgagggtttctgatggatagctgtgatcttggattgggaccactcgttctggagcttcagtggaaggatgggcttccggtatctggtcccctacatttgtcctatcaggaatcagaacagacatattattttctgctggtgggcatgatgaattgatttccatggctttcttcatcataggttcatgtaagctgttctcatctgtactctggttcctagatctataaaccccatcaagtgagccagattctagaagagtgtttaatattggcctcaaagacctcagggttccagttcccaatcttttctgatcctgttttcttaaaacaagtcttcaatggagtgatcttctcagagagtctcatttggcatgaaaagtcatcaggaggagagggaggctgcactacacagtctggctcaggttcggtggtttccatttccataatgtggattagctccaactgctcctcagagtctaaaaatcctgaacgggagcctgagagaacggacgacaggagccgagtggaaagcagtgcccgcgccggagatcagcgccgagggcgggagccgacgtctagggaccacagcagccgcgacgcggcgagccgcgcacgggccattccgccgccgcgaacgcagaaagcctcgaccgcgctccgagtccagccagctcgcctgtcacctcgatctctgctttaagtggcttccggtcgcctcctcccgacggcccgtcgcggagncggagcctgggcggccggagttcttccag

SEQ ID NO: 444208 - DNA, 776 bp, Homo Sapiens
ggtataggtgagttgcctttatttggccttttgttccagaaggaagtccttttttccaaccaccatgtgctgtttgccggagcaataccttgagaagcaggagtccaaaatgacaaatgagtctgtgactactcagggatgtgtgtggctacccgtccttcagtggtcctgtcggcagggacagggcactagctgttccattaatgcccgagagaagaggtctcagcctgacacatggccaaatagaagtggagtctgtttaataaactacgcccgaatcttcccctaaagatccctctgcagcctcttgctaagaatgtgggcacccacaggcacaggaccggaagaggcagcgtcgggctcagaccctggggctggtaaagtgtggaagggactgtgtcctgggtaagagaccttgttcttttggtgctttgctgctcttctatccatgttcatttgcaaattacccatcctttgctgccaagacaccatccgtccccacccaacccagtgccaccctgggcttggcatctctgacaggtcaccgggcttctcacctccttcctgttcttcagctacccctgcaggctgcccctctccccttccctcttcccagccttcagcctctccatccatgctgcccaatttccctggcctgcctgcctgcacagctgggcctcatgacccaaaagacccctgtgtgggcttctgtccttgctttctccgggcaacaagggagagaccacaccctcgtgccgattagccaccgggcctca

SEQ ID NO: 444209 - DNA, 556 bp, Homo Sapiens
  misc_feature (15)..(15): n is a, c, g, or t
  misc_feature (39)..(39): n is a, c, g, or t
  misc_feature (47)..(47): n is a, c, g, or t
  misc_feature (67)..(67): n is a, c, g, or t
  misc_feature (107)..(107): n is a, c, g, or t
  misc_feature (139)..(139): n is a, c, g, or t
  misc_feature (192)..(192): n is a, c, g, or t
cccccgatgaacaanaaagatcaataattttaaaatccnggaaaatnccgggaaaaaactgaaatantgccactgtaaaaaaccccgtgcctaacatcgtccctcantgaactgccataatccgtgggtaatccatcanttaaaactgaaagcctgtgccccactggattgtccaatgtaaagcatggagangcgttgtggtcccaggggaagtctctgtcacgcaaggtcatgttacttgtgacaaacataaggccccatgttccacaaagagtccaaacatggatgaacctcccggcccaccctgtagccagagaactactggggcatcttctggctgtatctgagctggggtgagaaataatggctgtcctgagtctcccttaggtggcatggaaacacttctgtatagggagcgaaacagcccatcacaggggccaggcatcaacaggaccagcgaaacaatcaccttccacatggcaccaaccatctctcagggtgcggcgcagtcggtgctcctccctgagccgcggcgcgcaaggaccccagccggttg

SEQ ID NO: 444210 - DNA, 1676 bp, Homo Sapiens
gtttcaaggataatttttattgatgaaaaaaatcttgcagatatgaaaagataatttttttattcctatgacattttctgtttttacgattttcttttcagcaatgaaaacctctgatgttctcttttgggaaggtagtttatccaacataaggatcccatccttttccataaatgaatcgattaatcatgtcaaaagctctcagaggctggtcatagggtaaaatatgtcctccacctcgaataattacctgatggaagtcacccgcttgccggatgtaaccagccacttcactgtcagatttaaagatcttccaaacttttttttctgccttcttgtattcctgggatcctttccagtccatgcccatcaaggagtgctctgtcagggcagctgccacgatgatgtccagttggccattgtagatcagaaccttataattattcatgatttcagttaaccatggcttaactgactgtactgtatcttctcgcaagtacttttcaactatagttccatcattaaaagtctgattccccacgtggatggcttgtctcacctctgggagtgacaaaaatttcacatagtaaagctgatcctcaggttccgtgcaccgcaaaaagttatagttattactacatcctgtaacattctggaagtaagaaggatcacttgttaagtcgccatctagtagtttatccagtatttcaaaggcctcaaaccagttctgcttcctgatgtgttctatgcattcatggcactgcttctggaagtactttttttgcttctcatccaacaagccaatttggtacaggaattctgcatagccccctataattgattcgggatcagaatatccatctccaatagcaattccgttcaggttgatcttcacctctctcacagggttgagggaatggatgaggtgtgcaatggctggcacatatttccctgcataagactccccagtgacataaaagtcattatttttatattcaggaaatatctggaaaaactgaattagtgcactgtataaatcccgtgctacatcgtcctcattgactgcatatccgtgggtatcatcagtaaaactgaagcctgtgcccactggattgtcaatgtaaagcatggagagcgttgtggtccaggggaagtctctgtcacgcaaggtcatgttacttgtgacaacataaggcccatgttccacaaagagtccaaacatggatgaacctcccggcccaccctgtagccagagaactactggggcatcttctggctgtatctgagctgggaagaaccagaagaagaggttgctgttgtaagtcttattcacggtgaggaagccggcataactcttcatgttcagtcctgggaaagggccgaccaaactcaattctcttcctttttggatcttcccagcttcaatgtaaggggtgagaaataatggctgtcctgagtctcccttaggtggcatggaaacacttctgtatagggagcgaaacagcccatcacaggggccaggcatcaacaggaccagcgaaacaatcaccttccacatggcaccaaccatctctcagggtgcggcgcagtcggtgctcctccctgagccgcggcgcgcaaggaccccagccggttgtcctgcagcgcacccaaatcaggcagaagtttatcgcagg

SEQ ID NO: 444211 - DNA, 816 bp, Homo Sapiens
cacaagggtttaagggggaaatggatgaagggtgttcaaaagggctgggccacatattttccggggcataaggactccccccagtgacaataaaagtccataattttaggattccaggaaattttcgggaaaaactggaattagtgcccctgaataaatcccggtggtacttcgtccttcattgactgcatatccggtgggtattcatcagtaaaactgaagcctgtgcccactggattgtcaatgtaaagcatggagagcgttttggtccaggggaagtctctgtcacgcaaggtcatgttacttgtgacaacataaggcccatgttcccacaaagagtccaaacatggatgaacctcccggcccaccctgtagccagagaactactggggcatcttctggctgtatctgagctgggaagaaccagaagaagaggttgctgttgtaagtcttattcacggtgaggaagccggcataactcttcatgttcagtcctgggaaagggccgaccaaactcaattctcttcctttttggatcttcccagcttcaatgtaaggggtgagaaataatggctgtcctgagtctcccttaggtggcatggaaacacttctgtatagggagcgaaacagcccatcacaggggccaggcatcaacaggaccagcgaaacaatcaccttccacatggcaccaaccatctctcagggtgcggcgcagtcggtgctcctccctgagccgcggcgcgcaaggaccccagccggttgtccttgcagcgcttcccaaatcaggcagaagtgaggcagccccacccagtcccc

SEQ ID NO: 444212 - DNA, 476 bp, Homo Sapiens
  misc_feature (324)..(324): n is a, c, g, or t
  misc_feature (437)..(437): n is a, c, g, or t
  misc_feature (443)..(443): n is a, c, g, or t
  misc_feature (460)..(460): n is a, c, g, or t
ttttttttcaaggataatttttattgatgaaaaaaatcttgcagatatgaaaagataatttttttattcctatgacattttctgtttttacgattttcttttcagcaatgaaaacctctgatgttctcttttgggaaggtagtttatccaacataaggatcccatccttttccataaatgaatcgattaatcatgtcaaaagctctcagaggctggtcatagggtaaaatatgtcctccacctcgaataattacctgatggaagtcacccgcttgccggatgtaaccagccacttcactgtcagatttaaagatcttccaaacnttttttttctgccttcttgtattccgggggatcctttccagtccatggcccatcagggagcgctctgtcaggggcagcttgccacggatggatgtccagttggggcctttgtnaattcngaaccttataattattncaggtttcagtttatt

SEQ ID NO: 444213 - DNA, 2041 bp, Homo Sapiens
gccatacgtgttggctatggcgtggatgtcgttggagtagaggcggcgcagatccaggacctctgcatacttgaatagctctgggaggttgattccttctgtgtttagcacaagctccttctcgttcttaattgttggttgtttcattccaggaggcaccgagtgatgcccttggtcgcatagatgacggcaccatgggccaaagatactaccagggagctcatgtcaaagttgatccttcatcagagggaagcttcactgtcacctgggcaccacaggctttccctgggtgtcgtactggtagtcatctatgaaacgggtggttctcacgcaccaggcctggacccggcgctcacatggcctcgggacccctggggcttcctggctgtgggtgggtttccgggggctgcgtcaggagggggggaagggacggggtcctcctcagtgcctaagcccacctcttcatcttgctcttgggtctttcgagcactttccctgtggggatttcgttcctcctgcatgtcttcatcgtcgttctcctcgccctccctctcctccttttcctcactctcataatcaacctcctcctcctgcttctccttgcgtttggcatcagaggcatcggcgtctccctcctcagcttcagcatccacaaatgtgcccctcttcttccttcatcaccctcctgcttctcccggactcctccccaacttccccagcgttgtccagatcccgctgtgtagctcttcgagtgtttacgttcctgaaagctgatgctttattattctttctttttgatggattccatcagaagtttaaagaatcttgtttccatgaagcgcaggatgtcctcgggtctcaggcacttctcctgctggtaatatgcatgtggcaggaactgaaaccgcagctggtacacctggaatttgttctgtttttcttccatacagaaggactcctggacgtcaattttctgcaacacctcccccaagcacaccctggtgagttgcttcttcaggcttttcactctcttcagggctttcttggtgttgagcacgggcacgctcatcatgggtgtcttgatgttggcgctggccaccatgagaatctcccgcaaccttggaatgcccagggtgacgttcatctcgcctctgcctgcaaagtggaaggtgttgagggtcatctgggtggagggctctccgatgctctgggcagccagcaggcccacagcctcgcccggctcacacagtgagcgctgccacttcagctgcagcaaggtcctcaacctgtcgagagaaagctctgatttctcataactcttctctgtttgagctgcccactcttgactgtagtcatcaacctttgtttcaaatgtttctgacactgatgcaaagtagatgtcaggacgccagacagacagactggggtcaggacaagcggccgccttcttctggtatttccttcggctttcctcatccaactcataccacatcctcagcatctcctgagtcccagggctgcggccattgcggttttcactctcaagtttcagggctttcacagcttcctgaattttctgggaataactcaagaaggcgcctcttctcagcagggtgttggggtgcttgctttgccattttttgatagctctgaagtggtggagagcttttttgggatctgctctggataaaacttcatggagatgctgtgatttcattatcacctcgtagttgctggccaggaaggggaactgcttgggctgcaggaactgtgtcttggggatgtccaggccatcctccccatacaggaactgcaccacactgccgtcactgtcacggaccgtgagatcatactgcacgaccagcccctctaggtgcttgatgatgcacctttggagatagcctgaacggctggttttcacagcagtgtccaccaggccctctcgttctgccatgcagtgggagaagaactcaggagggttgatgccggtgaggaacctgccaatgacaaaaccaccagcccctggggtgaactcataagg

SEQ ID NO: 444214 - DNA, 814 bp, Homo Sapiens
  misc_feature (76)..(76): n is a, c, g, or t
tgggaattgggtggaagctgatggggtcaacttcgggaaaaagcaggcaaggcccactggaaagatcccctggganccagagtgcggtgggggcccctagctggacacccctggatgccccaggagggaagggggaagggggctattgctatagagctggggggaggcccaggcggacggagctatggcttttagtgggtgggtgggcagatagagtacttcaccatctctgcagaagaatcgacctaacaaagtcaccctgttcaccccaaaagtgtggtcgtgggagatgagggtctgtgcacgctcctctggaaagagactttgcccttcttcccacagtcctctgggcacctccgagagaggagtgaggccctcacacacaagacaggttctgaaagggagggggacagaataggggtgcagtgagtacacacacttgaggggggacagagatggtacaggcgcaaccacaggactagtagagagtagaggtgggggcaggcagagcaagaccccaggccaccttcttggcccaagttggactggagagcactgtcccaagggtgccccaacctcagccatctgcatcccaggagctggacaccccagaccaggcgtggttattgctcagtggtcttgggcagtcccgagtggcgtcagctgggagagccgcacattgcttggccctgagtgcgctcgctcactggtttctacttcttgccaatttcctgctccaacaaatggagagaaagggggtgtgatctgggactcccccttcttcatggggctgtgatgggagaagagctcgtca

SEQ ID NO: 444215 - DNA, 523 bp, Homo Sapiens
  misc_feature (103)..(103): n is a, c, g, or t
  misc_feature (273)..(273): n is a, c, g, or t
  misc_feature (299)..(299): n is a, c, g, or t
cctgtacttagtagagcccgctaaaatttaatgtgattattgcattaagagtctatcttcccctactagtcggtaagcttcatgagtatagggatatattttnccaccactgtatctcttgagactagtaagcagcccataagtcagaagccagtatatcagagtggctgggcataacacaacggcatgtgtgtctgtttgtgggtggcagcgggggagacactatggggaacctgagagtgcatgcctcacgcaaaggcattcagattcttnaaatataataaaaacactgttggacnaagccgaaacatgactgcaggccacacatgaagccccagtttaagactcttccaacgggtatttgttgagtgagtgagtgaagaacctacaaggaatatattgtaaaaacttcaagaaccaagcagggactagggcaggcggagctgaacggacctccttttcagtctggtcacacatttcagagcccgtgaggttaaggccctaagggatcgtctaagtagca

SEQ ID NO: 444216 - DNA, 756 bp, Homo Sapiens
tccattttgggggaggaagggaaatccccacctttttagggggaataattcaaaaattcgggccacctttcacattgggacctcccccaatgattccttcccaatgaccccattgatagccgccctctgctgggccatgtccaggtgggatgggtgggaccaggactcattttgtcagaagcctcggcaaataaaagaactctcctcatctgtgtctgtactctgttccccatctgaatgtatttctgcttctacatcaataaaaccagcctctaggtccaatttagatacagctgactctgtgaaaggtactaatcctgccttaattgcatgggcatgtgacttcctgtgcttgtacaaattgctctttgtcttgaaagagaaaccacaaggtatacatggatatggccgctccccagtatgggacctgatgtgttttttcagtacactaggtttggcacacgctctgctgcagtaagggcaaatgtacttgccaggctttttgggtttgtgctctttcttgtgagcctcttctgcctgttcaatacttttctgggagtattggctataagcagggttcagacttgaaatcttttttctaggataaccaccactgtggccatgtataggaaaaggaaataagtcctcagaggcaacggatggcaaagggccagggaaaagccacggaggaccttcgaggctctgatgtggcttggtgctgtgcatgaccccctgtggcaatgagtgctgagggcc

SEQ ID NO: 444217 - DNA, 1206 bp, Homo Sapiens
acgtggtgcaaaactgtagaaagttgcttattcactggccttggttccattgaagtctgcgtctcgagtgtccgtttcctcctcagaaccatctgcattttcaataactctacgtcctccagaccttctagaaggaacgaaagaggtctcgtttcctcgcctgagcttgctcttgagtgcgttcacctcgcggcccatggcctcgttgctctccgtggcctcatccagctcccgctgcagcttcctgcggttggcgttgatgcgctgggactcctcctctgcctcctccagctgcctcttgagctgcttgaccctggcattgcctttctctgcctgctccttgtactgctcggccatcttgcgctcgtcctccacctgcagcaagatttccttcagcttcttgtctttctgcttcagcgacttggtggccgcctgtttctctctggcctcctgctcgacctgctccttctaggctgtgcaatcttggcctccaagcgccgcgatggtggatttgaacttggactttgaacgggcccctccatcttgtggaggttgctccggagctccttgttctgccgctcgagctgctgccgggcactctcattcttgctgggccgtgctgcgctctgtggccagctcgttgctgagctgctcggcctgctgtgtggctttgcggacccggtcgctcatggcctccatgttgccctgctcctcctccagctcctcctccagctgggcgatccgggcctccaggcggcgcttctcgtcctggagtgcgttccttcccgacaggctactggccagctcctctgccagttcctccttctcgaggtccgcttgtttgcgagccctctcagcggcggcgaggtcctcttgtagctgcatgaggtctgcttccaagctcttggctttcttctcattctctttggctgtggcaaagatctcatctctggaggcacgggcatcttccagctctctttgaaagtccttcatctgagcctgcagtttgcgtagctgcttgatggcttcctccctccccttgatggcagagtcggcctgaagctccaggtctttcaggtccccttccagcttcttctttgctgcagctgccagggcacgttgctttcgctcgtcttccagttccgtctcatactcgtgaagctgtctctgccagttgcctcctcttctcctcattctgctcgtccc

SEQ ID NO: 444218 - DNA, 983 bp, Homo Sapiens
  misc_feature (57)..(68): n is a, c, g, or t
  misc_feature (899)..(899): n is a, c, g, or t
atggggttcgttttccaagggttggcaccaaaaggttttcccccaatggcccccaannnnnnnnnnnncccagacagccccccggaagcaggccagggaaccagttagcccacgggcttggggggtgccagttggttaaccaggttttaaccagtttcaaagaagcaggggctttttcgcggaaagcccccggccaatgcgggagatccccgcttccaagggtggcccgggcgttttcctcgggggggccaggccagctttgcacccagttgcatcgggacacacactctccaccaaggtcactgccactgctttggctgcctctggactcaagatgggtgccccccagcattccccacattcagtgccccctggggcactgcagcagtgaaccaggaggctgaggaggctctgggtgttatagatcacttcctgctgatttcgtgactggacaaacttgggtggctttaagccacggccgatgactccagcatggaaaactgaccaaatccctccaggacctggcacagctgcagtgtgcctccggttagtgtccaacagggaggcagaagccaaagaagctgaaacaactgagagagtctcattgtccccatctacttgcccaccaaacagttctgtgttgcctcgatgtaaggctccttcaaccagcagctgcaggacagccttgagcccagctggggatgtctgagacaggcgggtgagaagctgacaggctgaggccacacctgggggtccatgcagccttagagaggcaaagaagcggtgcaccccagcccttaccagtcccaggagctgggagggggataaggcttcagaaggaaagggacaaatggccaggagagaggcagcagcttcagctacttcctcctcaggatgtngcaggagaggagccaggtcagacagatgggctgaggcagattccccaaagtgcgcccctagggctgcagggccctcgccaccct

SEQ ID NO: 444219 - DNA, 456 bp, Homo Sapiens
  misc_feature (436)..(436): n is a, c, g, or t
attgctagccactaaagtccactacattttgggacagcttgtttgaagagatggtcattagattgtttctctatgcagaaaatttttgaattggcttattcaaaattgccaacgagaaattacatgtgttgcctggaaagggtatgatttaaaatttttaaagtctcattttagtcccttaaaaaacactttgaatgaagcagccgagtgctctggtgtgctaatggtcagcagagcggctcccagctccctcctgcagcagggcgtttggccgcagcccatggcagggagctggtgggggccgcgtcaggcagccccagggcatggggtacccttttatggaattaccttcctcggattgcggaatgcgcttgggtcagggacaattttctatgtctgggaatttcccaaacaaccaggaccctttaaatttctnggggattgcaagttcaggtt

SEQ ID NO: 444220 - DNA, 505 bp, Homo Sapiens
  misc_feature (24)..(24): n is a, c, g, or t
  misc_feature (40)..(40): n is a, c, g, or t
  misc_feature (45)..(45): n is a, c, g, or t
  misc_feature (53)..(53): n is a, c, g, or t
  misc_feature (102)..(102): n is a, c, g, or t
  misc_feature (130)..(130): n is a, c, g, or t
  misc_feature (141)..(141): n is a, c, g, or t
  misc_feature (156)..(185): n is a, c, g, or t
ggggcgccctgtagtccccggctnccccgggagggctganggctnggcagaangggcctggaacccccccgggaggcgggagccctgccagtgaagcccgangatcgcggcccactgcactcccagcccngggcgacaganatgggccccgcctcnnnnnnnnnnnnnnnnnnnnnnnnnnnnnncattcctatttatgatttgaaatggaaataacaaaaagtacaattactatcatttcaactactaattaagcaagtacagaagaaatctatgacatttgagaagagtaatctgcatacaacagcaccttcctcttgattttgatgtgaaccaccaccagctgtttcaacacttgctctcatttaactgaataagaggtcagcagcaaggttgttgaattactgatgttttccacagtgattcattttaatgtatagttgattttaccatgaatgtaaaaagtgtgtttttctcctttgtatgttatattttcctcgtgcca

SEQ ID NO: 444221 - DNA, 516 bp, Homo Sapiens
  misc_feature (46)..(46): n is a, c, g, or t
agagatccgtgcccagggccggttggcaatgatgcccgaggacttnaaaagccacatgagcaggggagaggcttttttgctgcattgcagagctgtccagcaaagcagacgaagaggatgaaggccagcaagagaaacgcagccccaaaggagatgcccaggacggacgtttttggcagcacgagaatctgcacaatgaagatgcagaagaatatgagacaggcacaagtcacataatacttgaacgctggcagtgccgtggcccggtactctttttctagtactttgttatagaaaagcagtgagattctctgaatgtcttcagacttgagccattgcttctgtgcattaatcccatcaattgcttgaatcatcctttcattcaattcttcttcaaatctcttcttttgtgacttggttcttaaggtgcgattttgaaaattatgctgacccatgggtacatccgtggtgctgatcttgccgttctctgtggtcatgctgtccctgtgaaaagta

SEQ ID NO: 444222 - DNA, 850 bp, Homo Sapiens
tttttgagggccttatgatcttggagaaggggcagtatcctttgggaagggtctgcatgggggccaaatcttggagccacagcccagacacttcagggctgcattaattggagggacggctcttgttatagatgaggaagtctgagatgtcgtgccatacattgctgtcctcatagaggtaggtcatggaggactgcagcgagggctgcagggtggatcggtgatactcaaagagccacagcaccagcccccacaccaccgcagtgagcagcgggaacgggtcccacctgggttcagggatgtagcccttctctacagccaggcggctcagggcaaacaggacgcgtgacaacaggtacatgttgatctggctgttgatgttattgttttctccaaacaccaggatacccccgaggaaggccgccaggaatgcgtgtgctgggtaggtcttgccttgtatgtaggactgcagggcacggagacccttgtaggtgaacacaaaccgtgccaggttccaggagtggatatatgtggcctgcagtatggcccacagcttctcctggaggctgccattccggaagagaaaggtcatgaccagcgcgtgaggggcccggattttggctccatagacagccccgttccggaagcccttaagcacggccaacgcagcgtggtagcggcgcttgcgcagcagtgcgttgacgactacgagcagagcccttagctgcggcggggctgccatagtgcgggctgcgcgcagggtcggggttaggaactgtaagcgcactgacagccggaggttccagctgcgcgcccacagcccctcggtagcgccgccgactcgaccgct

SEQ ID NO: 444223 - DNA, 462 bp, Homo Sapiens
  misc_feature (18)..(18): n is a, c, g, or t
  misc_feature (365)..(365): n is a, c, g, or t
gaacccgtgaacaaacangtaacaatgtttgaatctggcctgttgaatgtttattgttttctccaaaacacccagaatacccccgaaggaaagccgcccaggaaatgcgtgtgctgggtaaggtcttgcccttgtaatgttaggaactgcagggcaacggaagacccttgtaggtgaacacaaaccgtgcccaggttcccaggagtggatatatgtggcctgcagtatggcccacagcttctcctggaggctgccattccggaagagaaaggtcatgaccagcgcgtgaggggcccggattttggctccatagacagcccgttccggaagcccttaagcacggccaacgcagcgtggtagcggcnttgcgcagcagtgcgttgacgactacgagcagagcccttagctgcggcggggctgccatagtgcggtgcgcgcagggtcggggttaggaactgtaag

SEQ ID NO: 444224 - DNA, 428 bp, Homo Sapiens
  misc_feature (361)..(361): n is a, c, g, or t
tgggaaagaactttagcaatatagccctacctcctcattttagtgatgaggaatctgagaactggagaggttcagtgactttttgaaagtcatacaacacagctaaccattatgccaatcaccatgcttattttgggaaactctttatcttttttaaattccattttatgaaaaggcatcttcatggtccagggaatatgtatcttgtaaaatgtacctgggttggagtagcttgtccagtcttgacaaactactgaatttctgtcttgcctctccttcagtgccttttaaaaggttttcccttttctggatctgcatttcaacataggagtcacataaaatgtccccctggggaaaccantcccacttctttctagggaggattggggtatcctttaaatccttttttggggggtttccctctggtg

SEQ ID NO: 444225 - DNA, 835 bp, Homo Sapiens
  misc_feature (88)..(88): n is a, c, g, or t
  misc_feature (435)..(508): n is a, c, g, or t
gactcacagcctgaagacctctgtcctcagggtctctcctcatcacacaagatggggagactgaaggccccaggggtgggaaagggcncagccaagtctcatggggaactccgggggttttcaacccctgggccatggctctgcccaccctgacgagccccgggctgcctccgttcactgccgcttgctggccctgtttctggctgagcactgggtctatacatttccgcgttgcctctcccacggcagggggactgcgacatggcctctccctctccccgtgcctccctctgccaccaaaaagctggtcagggcggagcatcccaagggccctgatgcccctgaaagtctcccttctagggggcagctggtccatcttcagggagctcagcacgtgtctcagcctaggcagacgcttggcccttgaacccggannnnnnnnnnnnnnnnnnnnnnnnnnnnnnnnnnnnnnnnnnnnnnnnnnnnnnnnnnnnnnnnnnnnnnnnnnttcaaggtggaggagcagaatccttggtctgcaattgccagggagggccttgctgcagggccctgggcctcactgaggtcatcccttccttgagcaggtgagaagggtgagacccagggagggggtgacacatggagacctcctgggaaggccaggttgttgggtctgagacagaatcatcaggagtaacggtggcctctgtgcctgagagccctggtgcatgcccagccggctgtatggtcacctggtccttctagccccaggccccagctgtgcctccccccaggacacattgtgttcaatgagccatcccaggaattccggacc

SEQ ID NO: 444226 - DNA, 1461 bp, Homo Sapiens
ctagcactatctcatgcagtgagaataacgggttctagtgaattatcctatctacactaccacctgaagaagttgaaagaaagattgataaatcaacgggagataagactttattagaaggtaacacctgcaaggtaccccacatagttggggccactcttttttctgtcccttatgagttacagaacagggagtctgctggagacacaaagccagcagtaaggtccctttagcctgtctcctgttctctgaagctccctgccgaggctccctcacgcccagaggacacatctccccttcttctctagatgttaatgtagggcctcagatgtggcatgtcaacactcccatggggaatttatgaccatagagatagtagaaacctaaatattttcagaaaaaaaattttttttgcaggatttccaatttatctttgaaaagacagtacaatcatgtttgaatgtctgatgaaagtgtcttatttttaggtttgcaataattgttactttcttattctcattcttatgtaagatgactattgagaaacagttgaaatttattctcctcaaatgagattttgaaagggatttatgggccataaaacttaggaatttcatagaaaattttgtctggtcatcttttataagatgatgatgagtcttatctgcacatagcagagtttgtttcttaggagtttatatgttttattgattctgtttacgatgtttacatgttctttgaaaggttgtaaaagaaatacatatggcacatattaatgatgctgatcctaatgatttgtgaacctcttagaaaattcttttgtcttaaaagccctagagattcttctggttcctttagaaacatgtaacaaacttgggccaggggtgctgaggcatggggaggactgcttattggcaggaacacagagggggtgggcatcaggtagggtggaactggatgaccttccagaccccctcctactcagaagtcagcatgcaagcagcgcctgctgtctcccgatgcctgcagggaggaaaatgtctgtgaaggacactttaatgaaggacgaagctctctgctgctccctcaaagctgattccactggtggcaggcaggaaagcagagaagctcctgcccgccaaacccactgcacaggtggctgctgctggtatcagattctcctttttaagtgtcaatttctgttcacagacagtttgtttttcaatatgggctgatttaccctttcacctctccaccctctcatttaatttggaaaatttttagttccgggccttttctcacttttaacttttaaaaaatctccctggcttttttaaaataaatattaccccccttagtttttcagaactttttttggttgggaaaagatttaaatatcttgcacctctccaaggggaatattacccaaaggtgaatcccccgggccccagttttgcatgg

SEQ ID NO: 444227 - DNA, 2558 bp, Homo Sapiens
cttcttagataatatatattaaaaaataaacctccaattcagggtataaaaacagagcgaaggcacttggggttgggggtggaaggggtggccccccacaggcaatactgagatggcccgggtcaccgtggtgccctccagaatggagccctgagtcccccaagcagagggcaggagggagagatggccgaggctcatgcggggccagtaaccccagctgggcccctcccaggcgtggcccacagctccctctcctcaggccctcggggtgtgagatgctgcggcagctgtgtggttggggttggtccctcacgtcctctcccccattcctctccttcttgcaaaaggccttcctgggcgggaacctcaagtgcagccaggctgggggacagagttccccccaagctgagacaggaggggtctcaggcggcaaaattcctcctccaactcctccagctgcttcatggtctcctccaagctgagcaggttctcctggatttcctgggtccgtgctgggctcagggggccgccccctgggaccccatccccatctcgaggaggccccgccccattgtcttcctccgccggaaacagaagctgcttcagggacagcactttccgaagggccgtggcagcgagctggccctcggggcctggtctgcagaagggcaggaggtcactgaggattctctcggtccgggcatcagctggagacgtctctcggccaccattgccgttctcagagctgctgaggaggggttctcgggtgctgctcgggctgggccggggcttagggcgagaggcaggggcagggactttcagggatccggcagtctcagtgatgagagcacaccagtttttccgctccgacacagtctgtgccaccagctcgtatatctgggcctcctggtcccaggtaaaaaggacgtagaaggctttgtgatcggtggccacctcgcgggtcatggcggaggtgagccgcagcacgggccgcagcatggtcttgccatcgggcgtgggcgtcagtgtccggctatgggacttgagcagcagccgctcgtcctggcgctggagcagcagcagcaggtcgtccagcagcagcacatgcacctccactgccttgtccttagtcacccgccacgtcagtgggccctcgtggaccaattctttcttggtgatgtccaggttcttgaactcgctcagcatagggtcgctgctctgccgaaggtgggacaagtccaggcgccgctgatagtccttgagcctcagcaggtcctccatgtcacgcacggcttggttgacgtggtgtagaatttcccggcagcactcggctgccagctccactttctcccgttctgtgggctcttctgtgttctgcccgatgctctgcaggagcagggggtacttggtcagccgctgcatctccgtggggatcatgtccttcagctgcaggcggcggcaccgcgggcggctctcagcttcctgcacgaaggcacagaaccgagggtccttgcgttgcttggctttgagctgctctaaggcaaatgactggcggctgcagaagcgggaggagattttctggaaccaggagccctcagcaccatcaaaccgggccagcagcacgtctccgatctcctcgatgaggtagccactctcctgcctccgcttcatcaggcgatcgaggaacagggaatgcacctcgatgagctcgtccaggctggggaagatgttctgcagctcctccaaggggaagaacaggcattctgccatgggctggaagaagaggtcgtgcagcacccgcagcatgcgcacgtgggccgcctctgtcaccagcagctcgctgatgacctcctgccgcttcacctggctcttgggcaggctgtgcagggtgtctggggggacgagttcccgccagccgggaggctcttctggttcaagctccagtcccgaccgccccggctccccctcatctccaggctcgggggtggctcgtcgggtagggccaagcagctgccgtggcggaactggggtccatgtccagcgtcgcgtccgggagcggccgcgcaccgccggcccttagccccgaggctgccccgggaaggccggcggcggtcactcacccgccaggctctctgagcgccccagacggccctgatagcctcgttccaccgttctctcggtttcggccccctcgtcggtactgctctgggggcgccaaggactccaggctcattgggccctgcggggatgagtcccccagctccaggggggcgtcagcacctggttcccggtctgggctgtccagggacagagggtgcagagagactccaggggtgtcctgcccaggagccccgatattccggtcccgagagggcatccccacgcctcccttccggtctgtagcacctggcttctcggcctggggctctccccggttccagcgggcggcatccaggatgctgctcagccccttcttggtcttggcaggctcgtccgaccgccggttccccatcacctttttccggaagaagcctcgtgccgaattcgccacccaggcc

SEQ ID NO: 444228 - DNA, 349 bp, Homo Sapiens
gagaaggaaggataaaaggaaaggggggcaatgaggaagcaggagggagatgagaaaaggaaagaagaagggagaggaatggccagacccagagagcagcagaggagcatggggagcaagagcctgggacaggcaggcacagatggcagcggtgaccctgcacccacccaccagcgcccagtaagccacacctcccgccccttgaccccagccttggcacctctcggtttcggccccctcgtcggtactctctgggggcgccaaggactccaggctcattgggccctgcggggatgagtcccccagctccaggggggcgtcagcacctggtacccgggcctcgacttta

SEQ ID NO: 444229 - DNA, 541 bp, Homo Sapiens
  misc_feature (39)..(39): n is a, c, g, or t
  misc_feature (96)..(96): n is a, c, g, or t
aaaaaacgaatcgtgctttgtttttttccccctgcgggncccaacccttggaaatctgttccctgggctcccaaaacgcaaccctggacaaaaggnaaggtcaagaggccttgccatggaaggcaaggcggcctaatgggttcaaaaaccccaactctgcccactgaacacacatgtgaactgggtacctctctcatctgagcttcaagatgagagaaataaaagagaagtcctcatagcactcccctaaggaggctgggaggattaaatgggtaaacagcgctgctcagtgtggagtaggcctttaacaaatacccatctttccttcttgtccctgggctgagcagcctcgccctgaagccaggaaattgaggagaagcccctgaaattgggcagacaggccccgtctgggggtggtgaggtcaagcccctaaggacacctgctgtccagctcagccctctttattcaatattgggaaaccaatgctggtgttaagtcagagccactgcccctagctcccatcttcccccagcttccatc

SEQ ID NO: 444230 - DNA, 432 bp, Homo Sapiens
  misc_feature (12)..(12): n is a, c, g, or t
  misc_feature (28)..(28): n is a, c, g, or t
tgaaaactgaanttaccgggaagaaaanccaatcaagaaagtagaaaacaccaaaaagaatccccggtgacagtaaggaaacagcaagtcccttagttcccttggttgaggaattcattataaaaacatgttctgagtgcctgctgcccatccaatgcatctgcccaggtgctagggccacagagggagggaggaggccagagtccagaggagagggaaaagccgtgggcaattacaagaccaccaccaggtgtcacaactaggtgggccgcagcagctcatggaggaagggatacgggggcagggccattcatttcaagcacgactgcagcccaaaggctccatcagagccagggaaaaagcagggtgagaaccccgctccacaggggggaagtggctgggccaaggtcagagggcaaatcctctaacctt

SEQ ID NO: 444231 - DNA, 1570 bp, Homo Sapiens
  misc_feature (1546)..(1546): n is a, c, g, or t
ggttcatggggactgtccatccttttttgaagatgaaaacacatgccctcagatagcagaagttcttcactgtaacttacagtgggaatcagcactcttgtgtttagcccaggacactggctcgtgtttcgggccattgacaccatcttctcctcacacgtgattttggtgtccttgaggatgctataccacaccatgcctgcaggccggacctcctcgctgcggcagaaaagatagggcactgtttccacgcggctctggatgtaggcactccgcaggaggctggagcagtggctactcaccctctccagtcgccgtagaatcaggtgggccttcctgggccccagctcatcctcacttctccagacgaagtcgccaaacttttcatagtgagagttgtagtggtgctggactcggaacagcatcgaggctgagacctccatcagtgtgttgtaggccatctgctgctcctttccacttgtgtacccattgtacagattgtagatcttgtcagctatttcttctgccttgttgtcatctaccagtggacaggccgtcctcagggtcaccgtgcttagctctgagtgcctccctcgtgtatccacagcatacagagtgaacttgtagagaccgtcgggctccagacacttgaagatgactgagtagatactgacttcagggacctctccatggcttcgaccagctgctacacaagatgtgcccaggccagagagtaagtcatcagcaaaactcaggaattctcctgtgtacaggtcagtgtctgtgtattcatccactttcttatgctgcagaatatagtcggagaccttggtcccaatagctggctgaacatccacccactccaaggagaccacagtactggagggctccactgttggggacagccgcagcaccggctgcagaagggggctgcagttggggagcccattggcatcaaaggcgctgaggtcacacctgcaccagtcatcgatcacatcccctttccctgagcaccagtaggaactcatcagtgcactcttgaaggcctcctttgtgccattgtcttggatgagggtataaagtggcaccacacggttgatttccagcagcactggtgtggggctcagctgctccttgcctggccggcggcaaaggtgacaggtagatggacagcgccccttctcctcacagcgaatctccacacctgaaatgagctggtcatctgacagcatctgggctgtcagcaaacctgagaggtaggtgatgaagggcatggacttgagctccttcttgctgcccagctctgtggtctctttctgatactggagccacagctgctgctggaccttcttgctgggaaagtggatgatgcaggtgagctctgagccatagaggggctctgcgatgtagtgggagccatagtgctggatgaaggacagcagctcctcccgactgctctccttggtcaggatcttgagaacattagtgaagcctgctgcgaagggtgatggtgctgagcttcacacggtagaggttgctccggacncgccactgctgcaccatggggtaa

SEQ ID NO: 444232 - DNA, 440 bp, Homo Sapiens
  misc_feature (17)..(17): n is a, c, g, or t
  misc_feature (29)..(29): n is a, c, g, or t
aaaggcccaccggcttnaattctctaatncccgcaagtgggcactgccttcaggggatcccagctaacctaaggagatttatgtgttgtttgcaaaagcagcagcagtagggtgggcggaaaagaaaaaatgaatcagaaaaatgggcctgagcacagcctgccgatcaagcctggcacctgggcacgcctctcaccttctcctggaggccactctgcctcagcccacctctaactctgcatggctcacccaaatacagcaccctcaaaactggcttttcttcaccttgacagtgacccttttactaaacccttcaagactcagctcaaattcccttcatctctgcatttctgaccattggaagcccagaattaacagcttctttctcggtctttcacacaccaccatttaccctgtgtgtgttcagcactgggtcctgc

SEQ ID NO: 444233 - DNA, 407 bp, Homo Sapiens
  misc_feature (48)..(48): n is a, c, g, or t
  misc_feature (55)..(55): n is a, c, g, or t
aaccttgaacagctaacacatggaagatgccccaggatggcttggagncaagcgnaagtccagtggggccagcctgtggggcacagctcccagtaggctaggggcagaactctagccctgtggcacttccagttcctcaccccatttccctcaggactcttgtcccaggtaccccggcccccgactctggggcttaaactgttaagttactccgtgtggacagggtgaagttagccccacgggaaagtggtgggagaaggatgggagagttggctggctgtggccaactgtgaggtcaggagcacgtgtttctgggggcacaaagctgccacttcttccatctgctttggctcctgtgtccccccaagccaggctctctatgaagcttagagacttcctagtctccc

SEQ ID NO: 444234 - DNA, 426 bp, Homo Sapiens
  misc_feature (18)..(18): n is a, c, g, or t
  misc_feature (110)..(120): n is a, c, g, or t
gccaaggccctttgcaanaggccgtctcccatttgaatgagattagaattaagtccccccactgataccctggccactgagcagtccatgttatccccatcatctgcttnnnnnnnnnnngtgagatgatgcattcctccccataagccacggcggggtaagagggcaggtggcaggatccccagagggctaagcagagaatgaggccaaggaggccagaagagcctgctagctgggccctgccactgctctgtgccatgaatggggaatggaccagctcctcttgccaatctgggcttcagagcaaagagtggccaccagggaggggaaagtcaaacaagtcccaagaccgttctgcctgctctcaaaccactgtctcagagctgaccatcagcagcccagtgaccaagtgaatccaagaatctg

SEQ ID NO: 444235 - DNA, 1343 bp, Homo Sapiens
agcgggtctccagcgggagcgcgagacgctggtcaggctccgcggcgcagctcgaaaaggaataatcgcccccgattgactgaaattcctccggagccggcgccgcggccgcccgcgcccgagaccgcgctccggggccgcgtcctcctctcctccggaaaacgctcgcgacccagggccgccggcggccgcgactctgctgtgtcgatcgcctgagtccgttttcaccgttttgcgggatctggaaccgagttacatgcatgtccagtgggggcaggtttaattttgacgacggagggtcctactgtggaggctgggaggacggcaaggcgcacggccatggcgtctgcaccggccccaagggccaaggcgaatacaccggctcgtggagccacggcttcgaggtgctgggcgtctacacctggcccagcggcaacacgtaccagggcacctgggcgcagggcaagcgccacggcatcggcctggagagcaaggggaagtgggtgtacaagggcgagtggacgcacggattcaaggggcgctacggggtgcgggagtgcgcgggcaacggggccaaatacgaagggacctggagcaacgggctgcaggacggctacgggaccgagacctactcggacggagggacctaccagggccagtgggtcggtggcatgcgccagggctacggcgtccggcagagcgtcccgtatggcatggccgcggtcatccgctcacccctgaggacgtccatcaactccctgcgcagcgagcacaccaacggcacggcgctgcatcccgacgcctctccggcggtggccggcagcccggccgtgtcccgcgggggcttcgtgctcgtggcccacagtgactccgagatcctcaagagcaagaagaaggggctgtttcggcgctcgctgctgagcgggctgaagctgcgcaagtcggagtccaagagcagcctggccagccaacgcagcaagcagagctcctttcgcagcgaggcgggcatgagcaccgtcagctccacggccagcgacatccactccaccatcagcctgggcgaggctgaggccgagctggcggtcatcgaggacgacatcgacgccacaccaccgagacctacgtgggcgagtggaagaacgacaaacgctccggcttcggcgtgagccagcgctcggacgggctcaagtacgagggcgagtgggccagcaaccggcgccatggctacggctgcatgaccttccccggacggcaccaacggaggagggcaagtaacaagcaggaacatcctcgtcggcaggccagcgcaagaaccctcatcccctgcgggcaagcaagatcgg

SEQ ID NO: 444236 - DNA, 1066 bp, Homo Sapiens
tatctccataatctacctttgtaacacctggagaataatatagaagaattcttgaattcatccatccacacttctgcaagtcgtctgttatttttattgataatctgccctgtgcctcctggaaacgtgtaaggtgtagctttccgaaacacatgtccaacatgtgagcatgtaacaatttccaaaagttcctccacactgccaaatcctaaaggaaatttctaggttttctcctccccaaatatccattccagcatcatatgttccaatttcctgaaagtaatctctgtctattgaaaaaaggcctcctgccatggtaggtgtcctgacaggaagagtccgatcacctttccttctgtccatttctctttggggaacaggataccagcgaaaattgagcttccagttgaacccaccataggtcatatcagagcctgccatgtactcaaaagtatcatcactgatcacatcgatgatgggacacaccactgttctcctgtcatgtttgatcctggccaagagaggctccagccatcccactgtacactcacaatgggcatccaggaaggtgatcacttggcctttagacacagcagctccttttaatctagctctgatcaatccagaacgttgttccattcgaattacatgaactggtacttttagttttttcacataactctctaaaggccttttcaaaaagtctctttcactggcatcatctactagaacaatttcttctatcatgtgtcttggtgagcgattaatgacactatggacagttcgcagaagtgtgctccaagcctcattgtggaaaacaatcaccacacttgttgtaggaagattatctggatacacctttgttttacacccttctaacctaacatctggtaaagatctgttgagtgcaatcatctcacttgccattaaattgaactgattgattttaaacatctctttcatcttttcttgatcctctttaggaatgacgactggtttccccatttctccaggaccttcatgaggcttttgtactggctctagaacatctccagcaggaagtcct

SEQ ID NO: 444237 - DNA, 382 bp, Homo Sapiens
  misc_feature (52)..(52): n is a, c, g, or t
  misc_feature (88)..(88): n is a, c, g, or t
ccctgggaaaaaacccccaaatgctgttggcaggtgtgtgccaatgggggtnactgctgccctctcagggtgggctctgaaggagggnaggggaggggtgaacccccagggcactcggagccttgagtctgctgcaggcccagctccactgagtggccacgagcaaactgtgtccccacggggccacagcactgagcaaggccctgagtaggtgggctgggaccttacagctttgtggaaggggcccacaaaccttggaggtctgggtgtcctttgctaataaggcctcatggatgtcactgaggcccccctgcagtttctgcaccttaaaaaatctgtcttggtcacctttctggtctcaacccctgggaacctagtttcc

SEQ ID NO: 444238 - DNA, 343 bp, Homo Sapiens
ttctctcttatagtttgttgacacatgctaaaaatgtctttggagagaacttctgcctgataaacacccaattctagactgtgggtggattttcgagctgacggtggtcaattcctttcattaagcagtgatctgatttctccacatggccattctgccttcttgggggcagagtagatgggcagcagttcaccttttcagagaaagaggtcttctagccacctgggctgctactgaatggttttctccaggacgctctacctaatgattatttctataacattaagcatggtaataagtagcttccaattcaattcatcctaaagccaaagaaaatacagca

SEQ ID NO: 444239 - DNA, 493 bp, Homo Sapiens
  misc_feature (435)..(435): n is a, c, g, or t
aacctgtagattttccaaaattcactaaaatatgaaaggattgagtagtttattattcatactgagaatacttaatttatttttatctagagatgtttttatcaaaataagagcaaaaagtaaatacaatttttatccgtaaaaactctaaaatctttcaaaaatctgtttaaatctatatagttttatgttttgtatttcctacttatttagcagaaatgatgaagaaactgttctgatggcctgcttttctgtccttttcctactgctttaaacattgattttcttttgtactaaatcatatagccaaatattgtttaagtaagtcagttttagggaaatgcttgtgttgctgttgaattataaaagctgagtaaatttcaggattaaactttaaatgactgtggaaataagggcataaactagttaatgggnaatttgcctaaaatgactgaggttattatgggaggttttattaattggtacgggtagg

SEQ ID NO: 444240 - DNA, 351 bp, Homo Sapiens
  misc_feature (17)..(17): n is a, c, g, or t
  misc_feature (36)..(36): n is a, c, g, or t
  misc_feature (46)..(46): n is a, c, g, or t
  misc_feature (51)..(51): n is a, c, g, or t
  misc_feature (65)..(65): n is a, c, g, or t
  misc_feature (78)..(78): n is a, c, g, or t
  misc_feature (108)..(108): n is a, c, g, or t
  misc_feature (116)..(116): n is a, c, g, or t
cccctaactttaaaaanggcaattttgaaaaacccngggccaaaanaaggnaaacgctgaaaggnaaatttggaaaanatacagatcctggcccctaacccctggatncagcaggnccttggtgcagtccctggaaatctatatttttccaacgctttcctatcattactctggatacacagtcagtgttgaagaacaactgtggtttagatcaagagcgtaagctctccctggaactgtggcgaatcctagatccacagcatcctacaatgggttttcaaccctcatcttcctcatttgagcgtgttgaagaatatctgtagtctcaaccataaccatgcaagcaagccc

SEQ ID NO: 444241 - DNA, 458 bp, Homo Sapiens
  misc_feature (67)..(67): n is a, c, g, or t
  misc_feature (79)..(79): n is a, c, g, or t
attaaacctttttttgaacccatgcccctttgttaatcccaatgctttgctctgaaaaacttgtganggcttgtacccngccgaaagagggttgaaaaatacctttaggaagcaaatagtgaattaggggtggcccactaggaagatggctccaggtcaagagtggccaaaccaacaactggggatgtgtgggcctggcagcaagaagcttcccttgtaggagcagcagacgcccgcccgcaggaggctgcagagccaccccagacgaggaaacgcagagcaggcagcgcccgggtttctgagtgccctggggctaagcacccctcgatgccccccgctgcctgcagtcagcgtgagtctacgcgggcgccagcggaaacctcacacgatccgcttcctgtccccccgacagaggatcttcttgaaggcgcggcggaaatcgtggttgaagatggtgt

SEQ ID NO: 444242 - DNA, 541 bp, Homo Sapiens
  misc_feature (16)..(16): n is a, c, g, or t
  misc_feature (33)..(33): n is a, c, g, or t
  misc_feature (49)..(49): n is a, c, g, or t
  misc_feature (68)..(68): n is a, c, g, or t
caaaaatcatcaatgntgtccccaaaaaattcnaattggcaagggcaanaaggaatgaaccaagttgntgcttaaagggggcccggggaaaacccaggcaaccatcttccgcactgtgcccatggggggtgttcgccctggtcacacccgttctccgtctccgccgtcaagccagccgtcaccacgttggttgtgaaaggcaccacaggtgtcacgaccctaggcacagtgacaggcaccgtctccaccagccttgccggggcggggggccacagcactagtgcttccctggccacgcccatcaccaccttgggcaccattgccaccctctcaagccaggtgatcaaccccactgccatcactgtgtcggccgcacagaccacgctgacagcggcaggcgggctcacaaccccaaccatcaccatgcagcccgtgtcccagcccacccaggtaactctgatcacggcacctagtggggtggaggcccagcctgtgcatgacctccctgtgtccattctggcctccccgactacagaacagc

SEQ ID NO: 444243 - DNA, 512 bp, Homo Sapiens
  misc_feature (132)..(132): n is a, c, g, or t
gcatcctaaattaccatcttttgagatgtataatttcttaaaacatactatgtgcaaagttacttttaaccacaaaacttcaaacaactgctgcctttaaaatcaagcaacatccaatactccagcagctancaagttgccgtgagagccagtccaacccttcatacagtcccataccacttcgagcatcacagccctgaatataccagctacggccacagcataatttatggagactgagtagttcagtgatttcttctactgacagtgctccagcaacatcctgtttgttagcaaaaatcaggagcagagcatctcggagttctttttccgttaacaactttgcaagttcgctgtgtgcttcactaattctgtctctatgactgctatctacaacaaacacaacagcttgagtattgaggtaataatgtttccaccatggtcttactttgtgttttccacctagatcccaaatagtgaattttagatttttatattctacagtttccacg

SEQ ID NO: 444244 - DNA, 810 bp, Homo Sapiens
gatacttctgatgtaaaggaactaattccagagttctactacctaccagagatgtttgtcaacagtaatggatataatcttggagtcagagaagatgaagtagtggtaaatgatgttgatcttcccccttgggcaaaaaaacctgaagactttgtgcggatcaacaggatggccctagaaagtgaatttgtttcttgccaacttcatcagtggatcgaccttatatttggctataagcagcgaggaccagaagcagttcgtgctctgaatgtttttcactacttgacttatgaaggctctgtgaacctggatagtatcactgatcctgtgctcagggaggccatggaggcacagatacagaactttggacagacgccatctcagttgcttattgagccacatccgcctcggagctctgccatgcacctgtgtttccttccacagagtccgctcatgtttaaagatcagatgcaacaggatgtgataatggtgcttgaagtttccttcaaattcttccagtaacccatgtgggcagccaacactctgccccacttgaccatccccgcagtggtgacagtgacttgcagccgactctttgcagtgaatagatggcacaacacagtagggctcagaggagctccagggtactccttgggtcaagcccaccatcttcccattgaaatggatccattaatagccaataattcaggtgtaaacaaacggcagatcacagacctcgttgaccagagtatacaaatcaatgcacattgttttgtggtaacagcagataatcgctattcttatctgtgg

SEQ ID NO: 444245 - DNA, 494 bp, Homo Sapiens
  misc_feature (444)..(444): n is a, c, g, or t
  misc_feature (472)..(472): n is a, c, g, or t
  misc_feature (482)..(482): n is a, c, g, or t
gaaagatcagagactcttttgctaggctgttgaagttcgaggtgaaatcatcttttcttcacttgttaactgaaggcaaaccctttgaaatatcctggccttgttgttcatgttgtttttgcatttttatcatcagggtcacttttgttatagatttgtcatagtgtggatcaacctgcattcttgtcagggtttgcaagcctccctgccaacgtgctgatccagtgcctgtcctggagttacccacctcatcctggtctgtctttcttagaacaatgactttctagctctagcctaatacaataatttgtttggtggtttaaaggagttggccaagaaacacaggcaagagctagcattcccaaacttaaatccttaaatctgtttgtcttacttgtttatgggaggaaaaacaggaaacaaaatcacccttaaggttgtggntatctggaaaccaaaacacctccggggnggatgtttcngggttgaatgtt

SEQ ID NO: 444246 - DNA, 492 bp, Homo Sapiens
  misc_feature (26)..(26): n is a, c, g, or t
  misc_feature (51)..(51): n is a, c, g, or t
attaaacggggaagtatgagatgggnaatggatggggagtccttggattanaacaccaccctagaaagaaatatatacccatcacttgtaaaaagacccactgatcaaatatttcccaagggggggccctgatgagcctgcgttaataactaagacttattagcaattgaacggcatcccatctgcttcaaaacaatatcctaatatagagcttgttctcttaagtaaatataatccctctaccttgcctgatgcctgttcacactatatctccttgaaagtcctttcttcatagtccagaataagaaaaccttcagcccagaatgtagtatagatcaatggagagtttggaactacctctccaacccaagggtgccctggttaatggaagtttggggagtaacaagcaaccccttccaacccccacccccaccctacacacaaacatattcttgaaatggaagggggaaggaggaggcaggaagtttgcat

SEQ ID NO: 444247 - DNA, 891 bp, Homo Sapiens
tctctgggaacccaggggctcatatacagcacacaggcctggcacagctctctggcccctctgggagtttcatccccttccaatcagtactctgtctgggttcttttaggtccttgatggcctgttccctctgccagaaactcagggttggacagcacctgtaaattcaagttgggttttgtgtttgcatcaaatatgcgacggatactttctgctgcccgcactggaactgtgcttttctcagtcacaattttgtacccatttgagttttgcacaatgcgtctagcacaagcttcaatatacttcagatctgctgcccggcctttccccattccataggtttttgttggagtattcacagaaataaatacaagatcagcttctttgatggcatcatcaatattggtagataacaaaagattttttcctcgacaggattctaccacttcttttagtcctggctcataaataggaagtgtaggagaattccacgcattgattcttgattcattgacatcaacaaccgttaccctgatttcaggacacatatgagcaatgacactacatgtgggtcctccaacatagcctgcaccgatgcaacagatcttcttaatttcaaacatgattgtaccacttcccagcagcaagcgcagggaccgctcctatcccgatcgttcggacagcaccttcctacgggccgcgctgccgcagcttctccacccgcgccccgctcgatctgagctccctctcggcgcacgcccctccctcaggctgccacgcgttacactctgagtcccgggcctgagcccgtatttaaaggcttttgcctgcgaaggcggaggcttcattcccccgcagccaggccctccatgactctgccctcagctgcat

SEQ ID NO: 444248 - DNA, 400 bp, Homo Sapiens
  misc_feature (339)..(339): n is a, c, g, or t
  misc_feature (362)..(362): n is a, c, g, or t
gagcgtcagtacctgctgtgccccggctcaagcggggtggagaacacggagctcgtcaagtcacccagtgagtacctgatgatgctggtgccacccagccaggaggaggagaaagacaagcctgtggcccccagcaacgtgctgtcgatggcccagctgcgcacgctgcccctggccgatcagatcaagatcctgatgaagaatgtgaaggtcatgccttttgccaacttgatgagcctcctgggcccctccatcgattccgtggctgttctgcggggcatccagaaggtggcgatgttggtccaagggaactgggtggtgaagagtgacatcctatancccaaggactcgtccagcccttnacagcggcgtgcctgcttgagggtgctctgcaaggggg

SEQ ID NO: 444249 - DNA, 454 bp, Homo Sapiens
  misc_feature (103)..(103): n is a, c, g, or t
  misc_feature (113)..(113): n is a, c, g, or t
tgtttacctgaacctccttcatctcagctccttcctccctcctcccagttaacaccaacactgtgaaatactacctgcaaggggacaaggacaggaggtggtnctgtgtgccnacccacccccagggtaagggaagctccctgtcacctgctgcttctgggctcatatttcagggaaatcaggaagtggggttattgctcagcttatgcatcttaactatgaaaggggcgggaagaatgtagggggaaggaaggaaagaacattaggtggggcctgaaatggtaaagtctactgcagtttttcagagagggttggacgacaggcccccctctccatcagggcaggatgtgagccacaaccactaggcagtgagacagtcactgcactcctggcctctgcagccacacagaaacgaaggaccccctgggcacccaggctctttttgaggctgcca

SEQ ID NO: 444250 - DNA, 470 bp, Homo Sapiens
  misc_feature (19)..(19): n is a, c, g, or t
  misc_feature (27)..(27): n is a, c, g, or t
  misc_feature (32)..(32): n is a, c, g, or t
  misc_feature (50)..(50): n is a, c, g, or t
  misc_feature (61)..(61): n is a, c, g, or t
  misc_feature (91)..(91): n is a, c, g, or t
tttggagaatcccccttangggccctnccccnttacccactcaaacttgnaaaactcactncatcctacccaaggattttccaaaagggtncccccctcaggtgtccccctggggatgtgggggtagagacggggagccgtcaagctctgcctttcccatggatcaaaatcactggaatctctttcttatactgggccttcttcggtagatagcaatccttcaaacaaccataatcttgaaaaccacccatatcagctctcaagggaagaagcagaacacaaggattaatacagtacagacatatctatcagcatttacatgaatttatttcaggtattgaccttttgcaatagtaagagctggttaagcagcttctacaaggtggttgtttttgcatctgatgtgagtatgtgaggttcacaggacaggcagtcgggaagaacaattgcgaattcacaggccttaactg

SEQ ID NO: 444251 - DNA, 600 bp, Homo Sapiens
  misc_feature (349)..(360): n is a, c, g, or t
attggtggctttgtaagaccaccagcctcttaatgatggttagcttctttaggtcattaaatcaataaaaacatataatgctgttttgctcttctaatgctcctcttccatttccagttatcttcacatttacatttaaatatacaaacctgagcccgccattattaatttccctataaaatgacgatacatgtgaacatttataaatggactaatactgcttgtctttcccccaccgcacaaaactggttcttaagatgccagcaatgaatttgagactatctttatttataaatggaaaccggaaacttttataccaaactataataatgtgcagcactgtagggcnnnnnnnnnnnnccctccaaatacagtgaaatttttttattcacaagagctgccacatctcagcatttagtaatagagctgctttaataaaattctagtttgattgtcatgtcaaaaaaaggaaaaatgttgcatctttgtggattttaaaacataaattaatgaagggctctgatagggctattaggggagttgggcttggggaaaccgttttttgggtcttcacagggttacccttgtttgggggggtgt

SEQ ID NO: 444252 - DNA, 884 bp, Homo Sapiens
tcaggacctttaaagttcttcgaattaaaggcatgttggcttgaacagcattcaggtttgccctagggtagtatgggaccatcagataagccataggatcagactttacataaaacaggaatatcaatggcagtaacccctgagtctccttcagcttctctccaagctctatggtaggtggctgctctctcaatcaccttggcttctgtgtcaacatccacagaatagccctttaacagaattatctgcccattaacctcagaacgtaccaaaggacgcttgctgctaagttccttcatgggctcagcatcaagaagatctcgttccaagctcattgtaaggagaccaccagagttcatgtatttgagtaatcctatttcaggatgaagcagaggcagctcagggaaccatttctgtgccaaactagttagcatctcatattcctctctctcatgataaatttcctgaaagacattattgcgcagctgagttatttcttcttttattttctcaatttgagagccatcgggatcatctgactcttcccaaattactcttttcaaccaatttccatctgagtagagcttttaagcttttcaatgtcttcttaatggatagcaagtgatccacactgggactcttctttaaatattcaataagctgctttttaaactcaatactgtccttgtacttagcttgtactgtggcaatgagcctttcctctgaatgaatcttttgcagtacttgactatatgtatttgaaattatctccttgtctgcatcaccttgatcaaccagagctatctccagctctttgcagacacttgactcagtcttctctaggatttcatcaatattatccatcgcgtcttctgaaatcagtg

SEQ ID NO: 444253 - DNA, 903 bp, Homo Sapiens
  misc_feature (377)..(377): n is a, c, g, or t
  misc_feature (608)..(671): n is a, c, g, or t
gaggaaaggagcgatgggcgacgtgattttaatggattagactggtgagttctgctgaaagtttgacatctttaggatcttacattttcttcaagttgagctaatgaaaacaggctcgtgactatttatcacctgatttctaagtggatattgggttgaacaccacatatccatgactattaaggaggcttcatggtgtagtttgacaaaggctctctccttgaccaaacttcagtcaggccctaagtcctctttttaaccaggcctccaccttggcccccattcttgatgggcctatacagcccagctttagcaagaatcctgctaagctagtttagagagaatcccacatccccagatatctatggaatttcctncatcccctaacttttggatgtgtaagtccttggcctcccttcaacgagaagcctgttaagttcatttgcaagaactctactcttgatatctcctcttagtaatttcctaatcactgaccccctcactctgcccattagttataaacccccacatgttctggttgtattcagagctgagcctgatctcttcctcttgttgggatagttttaaaacctgcgatagttttaaannnnnnnnnnnnnnnnnnnnnnnnnnnnnnnnnnnnnnnnnnnnnnnnnnnnnnnnnnnnnnnntttacatgttgaagcatgaacttgagaatctagagcaggagtccacaaagtatggcccatgggccatatccagcccgctgccggtttcggtaccactcatgacttaaaaatgggtcttacaattctgagtgattgacaaaaaatcaaaagaaggataatatttagtgacccatgaaccttatatggcaatcaaatttcagtgtccataaataaagttacattggatgacagc

SEQ ID NO: 444254 - DNA, 772 bp, Homo Sapiens
gagagtcagggatgctgcgagaatccccaagaagaagccagccagtcccgcccccactgtgtgggcccggctcggagcatctcgctggctgccccataccaagctgtaagctgctaccacatgggctgccccaccctcctgacattcacaggcataagcgcccatggcccctggggtcaccaccacctccagtccatcccgccggggggtgagtgcagtcactccactgggctggtgccacacacaggatgcccatgctgagcttggagaacatggcaagaccacatgcgcagctgtagccacgggaacttcaaacactactggacgttctccaggctctttaggacacaaagaggagacatctgctgactctatgtcttggaccaaccctcggtgctccccggcatgggccacacactcatccagccggaagctccaggcacagactgggtcctgggccaggatgcactctgagcagctctggagacggccacagttggttgtattcacttgtgtcacctcagtacgggagccaaccaggagccagctgtggtacaatttcatgttctcaactggctgtggctctgggaataaggccagatcttcaagaacgctgagctgagctccgatccgcactgctcggtggaggtgtccatcctctctccaggtctgggctggggcacatcattgtccacgacaggcagtcctctgttgcagtcatgttttagttctctgaagggaccattcagcactgtccgaatgtctcgtggtc

SEQ ID NO: 444255 - DNA, 523 bp, Homo Sapiens
  misc_feature (22)..(22): n is a, c, g, or t
  misc_feature (49)..(49): n is a, c, g, or t
  misc_feature (55)..(55): n is a, c, g, or t
  misc_feature (77)..(77): n is a, c, g, or t
  misc_feature (84)..(84): n is a, c, g, or t
  misc_feature (91)..(91): n is a, c, g, or t
  misc_feature (104)..(104): n is a, c, g, or t
  misc_feature (141)..(141): n is a, c, g, or t
tgggttgtaatccacttgtgtnaccctaaaataacggaaaccaaccccngaaccnaactgtgggtaacaaatttcangttcctnaaactgnctgtgactctggnaaataaagcccaagatcttcaaagaaacgcttaactngagctcccgaatccgcactgcctcggtggaagttgtcccatcctctgtcccccaggtagagcacatcatactctttccctgagaggctggtcaccctgtgggccacgactctgagataggctgtatctgtagtgaccagcagggggtggccatcagctggaaacactggcctgtccatgagtgggtggtcccggatgaaggtgagtacgcggtcaggcagggagagagatgagccaaagtgccggagcttcatgttgttggtgatgcactctccaggtctgggctggggcacatcattgtccacgacaggcagtcctctgttgcagtcatgttttagttctctgaagggaccattcagcactgtccgaatgtcttgtggtcg

SEQ ID NO: 444256 - DNA, 468 bp, Homo Sapiens
  misc_feature (398)..(398): n is a, c, g, or t
  misc_feature (423)..(423): n is a, c, g, or t
  misc_feature (438)..(438): n is a, c, g, or t
  misc_feature (456)..(456): n is a, c, g, or t
ctttttcatttcgtgttaaagactgatcaccctgggaaaatcaaggcagtccagccaaaccccaactcccaatcaaatgcagtttgtatcgaaccccacgactgcccagcacctttgggaagcccattgctttctatgcagacgcagagctcccagaaagcacaggtggatgtgctcagcttgccttgtgacgtgaatgcctgaaaacagaacaggactaaaaattcactgtctcagagcctgcagcttgggagtctgagttctcagggacaagaagagaagagttcccagtgtgggcaaggaccagggcggaccagcctttaggccgggctctggttcctcccctctctgtgggatttcccttttgattcctcccctccttgccccattttgcagcntccacagtttaggtgcttaaatcantgggggatttaagangtaggttttccggagggngaggggcaattt

SEQ ID NO: 444257 - DNA, 1130 bp, Homo Sapiens
agccccggtcagggtgcccatgtccagaatgatgtcggcccccaggtccttgcaagcataggacacgccatctgccagcaccagcctgccctcggcatccgtgttgttgatttccaccgtcttccctgagtacagcaggtggatgtcatctggccttgtcgcattgggccccaccgagttctcagccaagcagaacacagcgtggaggttgtctttgaaaccctgcttgattgcggctctgaaggcccccaggacggccgcagcacccccgcagtctcgcttcatccccggcatggtagtcttccctttgatgctgaggcctccagtgtcatagacgatgcctttgcccacccaggcgatggtctgcgtggctccatctggggtgtggctgaggacggccagggctagggggatgcagggcggctttgccaaccccatagattcctccaaatcctctcgtcttcaagttcctcatcccggatgatggttgggatgatccccagctcctttccaactttgttaatctcctcgaggaaggtgtcggtgttcatctcattgcagggtgtgtccacgatgcgggctgctagccgcacgccgtctgtggcattcgctaagcactgcaatgtggacacctccaccggcccgttgtcttgtcccaccaggaaaaactccacggtgaccgtcttcttctccaagcgccgagaggcacctgagcggtgggtgaacagcgggaaggcccgggccagggcacaggcggaagcaaagacctccggctgctcgcagaccatcacaatgcagcgatgcgctccgggcggcaggcaggtccgcaccagccgcgtgatgaagtgggcggccgaggggctgttgtgccggctcaccctgcagggcagggcagccacggtggcgtagttcaggtagaggggacagctgtccgtggggttggggttgagcgtgctcagggcagcctgccagagctcctcggtgacccggggctgcagcttcccgcggacgtggctccagggcacgcggtgcaggtggtgcagctgcccgagcagcagcaggggccggctctgtgggtccgagtcccccgcgctcgcctggaactgcagccccacgttcgccatcttcct

SEQ ID NO: 444258 - DNA, 1318 bp, Homo Sapiens
  misc_feature (16)..(16): n is a, c, g, or t
  misc_feature (1232)..(1232): n is a, c, g, or t
ggacgtgccgacaggngctgacgacggggatgtcgtttgtgaattatgtggtggatggggaagatgatggggtagggaggtgggaatatagatcctgtatcgcgagggtgcgtcttggaagtgtcacagtttttcactcgatcctcggcgtcgagggtgtgagtgcgtccagtgactagcgacgttgtgttttcgtgctggaggtgtatctaggtggaggttgctggtggtgtatagagtgaaatggccgccaccgtttgggtgtctacttgcgtagggcgggttcagggctggatacttcgggtgggtatgtgaatgaggtggagttgtttgtgctctgggttaggagggtgtggtggccgttctttatgtgatctccccgtaactccatttttttatgatcgtggggggggttaaagatccggctgttgggggcgtgcggtcgcgggggcgagcctggcgcggtatatagagggacctcgcctttatggcgccctgtactcgcccgtttttcagagaaaagagcatcccccaaaacaggtggtattagagggtgttcaggaatggaaaagtaggaaggagtgtagtacaaatacaataaggaaatgcctgttactctcatatgatttctctgagaccaggtggccaaggatcccctagtcttccacatatgtttaaagagaggccttaatttaaggtactgcagtctttgctcacaagagccaagtaagacggtgctacttggaggttgctataggactctgacgctatttatttgaatcctaggtgctcttgtgacttctctgacttcagtccttctggagtcagatcacccagcttctctgatgagtgactggtcatttttaaagcatgcctgcagcagtcttcaagaggtttctgcctgggcatcacgatcagcacacatttgctcatacacataccaggtgatgaggactcaaccactgcagacaggcagagccatgcaaataaagccatccagcaaggtcaccttttcctcagatgccccagtttcaggatgatagaatttgcatattaagtgttaataggcctggcaataaccagcttttgcttcccttcctcaatgagggacatgccagaaacagacttgcacacaggctctgctcatatgggaaacaggcctgacacacagggtctgctcatatgggaaaatgatttcagtcacagtccttagctccaaattctgtacttgnaacctagattataatctagctcctaatcaaactagattctgctccagttcagtttactaaggcattccctctaagctgcctcagtg

SEQ ID NO: 444259 - DNA, 583 bp, Homo Sapiens
  misc_feature (24)..(24): n is a, c, g, or t
  misc_feature (165)..(165): n is a, c, g, or t
  misc_feature (197)..(284): n is a, c, g, or t
aatccacctaagaacttggattanggaaaccaaaaatccgaaattggggaacaggttccaaaatcctttcctggtgggtagttggccctaaaactgtccatccgcctgccggttgggttggagcatttggtgggtgtaacccacgctgtgtgcctccaagggtantaacattccatcttcctccatttaaatcctcnnnnnnnnnnnnnnnnnnnnnnnnnnnnnnnnnnnnnnnnnnnnnnnnnnnnnnnnnnnnnnnnnnnnnnnnnnnnnnnnnnnnnnnnatggctgagccaaagcctaccatgtacctaacctttattttctttcccgaacataccaggctgtctcctcataacttccaagcatgcacttaaaactccacatgaatacaaggttcatgggacttggtattcatagaaagggaggcagaaagctggtctgttcctgataggcttgtaatttaatatcattctgttcatgtgctttggatggaagcacatccggcatatgatgctaatcagtggttcccatacccctggcttcctaattttaatgtttctcacagcatagtagattacat

SEQ ID NO: 444260 - DNA, 495 bp, Homo Sapiens
  misc_feature (37)..(37): n is a, c, g, or t
  misc_feature (59)..(59): n is a, c, g, or t
  misc_feature (113)..(113): n is a, c, g, or t
gatgccacaaacctgaactgtctggttgggttgctgnctctccccccccgtggtgggantggtgtgccaagagaaaagcaccacccagcaggagagggaccccagcctgcccnggaaaggttttgaggaactggattctttatcaccccatttctccccttgtgggttcccacagaggggttccatgacctccctgttgttgagaacagggctgcattcagagaacagacgatgggcctgggctgtgagagcaatcagaacactgtgaaaataggagggctcgttggatcccaggaatcatacacagactgcgttggggctgtgggaagccaaggacagaaatgtctccttcaccccaaatgataagggcaaggattttcaaggcccagagggagaaatgttgcatttgcatttatttaagtgctgatgttggtcagcagcgcatccagccatgtctttagaatcctctgaatggccagacagatggctgctctc

SEQ ID NO: 444261 - DNA, 919 bp, Homo Sapiens
aaaaccaagttaatcccactagactattttaagaagttaagttgatataatagcaaaatttctcccacccaaaactatgtcaacaattggatgtactcactgagtcaccccttactctgccactaatttatttccttgttgcttaaatgatgagagacatataatctccaccctcacggagttgtcatcaccctggagaggaagaagacagccaaaagagagaagtattgtcttgtagacttactagattcacatagtatcatccttctccagtgtgtaaggtgttgtctaaataggtccagttaaagaactacagggtagccattttttacaaaaatttttggccacgtttttaagttcacaggggagggggaatgtctcatactctagccctcctgagcctaggccctctgtgagatgtgtcaccatttcttggacaccatgtgagacattccccctcggattagagatgctcagcctgcatcaacaaatctaaagacctgcatctggctaccctggggcgagtcctgtatacagtgcctattcctggagctcgcctctttttgcctttagttctgattatgtgatgtattacttttcccagcaggccagtgctagcatactggaagagggcatttaataagctggcacccttgatgctatgctcctaatccaaccttatttgcctcattggccatgtacattatggtggcaggcctccattccagtcacgagtagtaccctcaagcgttccccagtcaagatgtccccaatttgctgctcatactgtgcctattgtacaatctacaatgcgcttatatcactctagctgtgggagatcttgtaaatctctccatacggccaacatcagttcatctttctgcttgaaaactttctctgaataggccaggttgcagca

SEQ ID NO: 444262 - DNA, 509 bp, Homo Sapiens
ttttagctcacgaaagaagttccaggatatggctataacaacaaactaatcttggtgatatctgtgactgtaatactaacgattttgattctaattttttgtcttattgaggtaaggacaataattaattcaggttttcagaaagcaatcctgtctttgtgtggattcagaacccacaaactgaaaaccaaagccacttccccacttgacattcttcttcagtcgtttaaggctgaggtatgctttgttcttttactgcagtgtatattccaggatttttaaaggatcctcgcttccaagagatctcaagtcacccttactctgccactaatttatttccttgttgctgaaatgatgagagatgtataatctccaccctcacggagttgtcatcaccctggcaacccctccgtagtcaaggccttcttctccatgaaattttatcattaatcgcttccagagatcttttggtctcattttcatgacctgtcaatatgattcccacatat

SEQ ID NO: 444263 - DNA, 1929 bp, Homo Sapiens
  misc_feature (1892)..(1892): n is a, c, g, or t
  misc_feature (1906)..(1906): n is a, c, g, or t
  misc_feature (1911)..(1911): n is a, c, g, or t
ggcagacaggttttacataatctgagtatgtggtgtgcacgaagtaaagcattaacctatgaccaggccaaagctgattctcacagagccaaaaaggatatcaaaatgggcccgtttgatgttgcccggaaagtgtttgcagctggagaggagactgctcacatgtcacttgtggacaagtcagatctcttttttcatgattattcaatagcacccctcttcgtccaggaaaattacatacacgtgaagcctgtagcagcagggggtgacatgaaaaagcacctgatgcttttaagcagagcagcagacagcatatgcgatggtgacctagtggacagccagatccggagtaagcaaaactggagtcttctgcctgcgcaggccatttatgccagtgttcttcctggagagttgatgagggggtacatgacccagtttcccaccttcccaagctggctggggaagcactcgtctacaggcaaacatgatcgtattgttcaggacctggccttgcatatgagtctcagaacttactccagcaaaaggactgtaaacatggattatctgtcgcttctaagggatgcacttgtacagcccttgacctcacaaggagtagacggagtacaggatgttgttgcacttatggacacatattatttgatgaaagaagactttgagaatatcatggaaatcagcagctggggtggcaaacctagtcccttttcaaagctggatcccaaggtgaaagcagccttcacaagagcttacaataaggaagcccaccttactccatactcacttcaagctataaaggcatctagacacagcacaagcccatccctggattcggaatacaatgaagaattaaatgaagatgactctcaatctgatgagaaagaccaagatgctatagaaactgatgccatgatcaagaaaaagacaaaatcttcaaagccttcaaaaccagaaaaagataaggagcccagaaaaggaaaaggaaaaagttcgaagaaatgaaaccatttttcactagcgacagcaactttttactctccctcctgaccagtccagctggtctagagaaagccttgttttttcccagagcaaccatgttttagcataatgggatgacctggtgtcccattataaataaagggtggtatggctagaagggtatgagcagtaggcttatgtacacctcttatagaggttgataggactgcttgggtcctccactgtcctctgtcaatctagttagacgtgcttctgaatgactgtagaattggaactaggaaactacacctggggctttggagtcagattttagttaacaataatgagcctgggagcagtagtactaaggcgtcttttgtaggcttaagaatttatcctaatggcctttataggaccaatgctgattttttttaaaggcagttcctattatgtggtgaaattttgtaaataaatgattatacaaaacagtcaccacctagaactgggtattctttgtacattgtcagatatctttcaaagtataaattaggaataaaaatgttccacatgatatgtgtacaaattctttttaagattgtcatcttgtacagcaaaatattatgttggtatattacttccttattaatttgcaaatgattggattaaaaaagctcactgtattccttactaacctgttgtgtgaaacataacattggcagtcgaggagtcagaactcgggattcccagcctcactccctctgtgtgtgttgaccacgtctctggctgtgaataggatttcatgcagtggtctgttatggggctttgcagcgtggggggctgcagaagattctcagacattcttatccttctggagtctcaacccatcaggttcaaaccanttgggaccaagccngggtnaaggtccctaaattcaat

SEQ ID NO: 444264 - DNA, 446 bp, Homo Sapiens
  misc_feature (380)..(380): n is a, c, g, or t
ggcaatgttttgagtgttagggatttaacagtgaaccaacaaaaaaatgaatgaacacatagagttaggttttatggctcagtaaagtggtagttaaggccaatatcttcttattgaaagagataatgctgtataatacattattaccatatttactttaaaattcattagtacatttcttaatcagagaaaagaaatataatagcttcatatctaactcatactatcaagcttacaaaaaacttctgaaattttaaagtgtttataacacataatgctaaatttagtagattgctgagatctttatccgattttgccttatcattacatgttaggcggcttaatgtatatcattactaaggaccaaaaattattatttnttttatttaaaacatttattttttgccggggattgaggttaaatttggtttccgtataaagtgggg

SEQ ID NO: 444265 - DNA, 439 bp, Homo Sapiens
attttagatgtcattgaatgtttttgcacagaatatatggctaatatatgtttattgactgacagtctgtcttagaattagttcagaattgaccctgtaaagagggtaagtcatttaaagtttttaggtagatattgcagagatacggttttaaaattattctgatgatgtaggtttaatgaccaaaggtgagaggctggagattgggggacttgttagtggggtgctatgaagtctgggtaagttggtctcaagactcaaagtttaagatacactgccctatagttcctggccaaaagcaagcatacaacagtgttaaatcacttttcaccattttatcctacctagaaatacctttccctctcagcaccaacactgatatgtcaaaccagattataaacgctgaataatgggaatagtaaagaaactgttatacgta

SEQ ID NO: 444266 - DNA, 1109 bp, Homo Sapiens
ttacagttcttattgctaccctaaactgtgtgataatcacgtcgaattttgaacaccccctcgcaataaccttgtgtgcatccctgaatatagttcgttcacgatcgtgaaatattgtgagcaataatggttccagacagagcgcccgtgaatgaccacatcggtaccccgctcctttaaacccagttacacagatcttaattacatttcgctgcaatcaatctaaggagatcttgaaggcctggattcttctaattaacttcaagatgacagaagattaggttttcttgtgatgaagatacttacaaggaatggaaggaatttaacaaactgttggtgtaattccaatcagaaaagcatattaactcttgctgaagtaccactgaatgagacaaaaatgaagctgtgaagtagcaatctgattagcaggctggcttctatgtcccatcactctcgtagtcttctattattatgttttcttccatgtctccttgggctgaaaagggctggggctggctagcaggcagttcactggcactattctgactcaaaggaagagaccaggtttccggcacagtggcttgagtgggttcacccagagattcctctgcagaatgtcctccattaagctgggcttcatctccgctgtcagggtctatcattccatgttccctgtcagtcagggcttcccattttcaatcttccaaagtgtcgcttcagagggagccttccaatatcttggataaaagaaatctgagcttgatttctcattggaatggttagtagagcaaggtatggcaatagctgagtttggcggcataaagctggtaggcagaagtcaggaaaaagtgcttttgctgccaggcaattttcccgatactttttatttattagaaaccactgaggtttgtgcaagggtcgaaaacttgatcctcctccttggcaatgagcatatcctcgggctttgttggaatgcatcacacctctcgtagctatagatgtgctatattccctgagtaaagagcgtgtattccagtcaccactgaggatatctgcaaaactcagaaattcactggctctcacatatcatcaatttccatgaagaaatc

SEQ ID NO: 444267 - DNA, 629 bp, Homo Sapiens
  misc_feature (509)..(509): n is a, c, g, or t
  misc_feature (593)..(593): n is a, c, g, or t
tagctgaggctccatggacacctttcatttctttcagtcagagaggaggacagtctctgtctctgcatttctggtgtcttgcttgtcggtggcagagcatgcttgccggcatttgcttaggcggccatagtagttgctaagtgtacaggtgactgggcagggatgggaggtggccacaggtgagagacaagtgctcagtcagtccctggtgccaggactgtgtgcctcggtgccttgggaaatggaagctccctggtgcagctgcagctgtggggtggaggtagagaagccagcaagaccttggtcttaaccccgtgttcattttcttgctagctgtgtgacgttgggctacctcgcttctctgagtacaaatggtgtgtggtgaatgggtcccaggtatgctacgagctttgagggctgctctttttctcttcatagcgataagtgttaaactgtctttcttaggaaacgttcacagacttgcaacagctgatgtcctctgagtactngtctgactccctcaggcaagttcctgaattcagtaccattcattattatttttgtgtaagactttgacaaagtatagcccctgncaccagagcagcctgtacagtgggtctctaaggtgg

SEQ ID NO: 444268 - DNA, 911 bp, Homo Sapiens
tcgggttaaatgaccgaactcttgagcattccctttgggcatttgaaggtctctttagaatgcgtaatcagatggtcaaggaggcaaagcctttaaagacacccttcccacagtcactgcatttgaacagcttcttctgccaacatggacttcattgctgttgcccacaactggaaccaggtgggaaagctgcccccatgctcagtgtgcctttcttggtttccccctcactatgagtgtcctggtgctggatgacttctgtagctcttttagatgctcaggatgggctctctcatcctccactctacacaaaccatcaagaccaaaacctctcctggcttctgctctgctgactggagtcacagtccacccagctgggcacccacgactgttcatcatcctccagctgggtaaacacaggggatctcgaaggtgcaagtcctccgcctccccggccattggaccgtgcgggcagaacccgtggactggacccacggcctcagccgaaacgcgtcccgggcgcggaaaccctcggccgccgtggaaccttcccgggaagctctccccgcgcgggtgaaatgcgtccgaagacagggaaccgcttcccggagccgctgggaaggaggacggtacggaggcccgggagacccacggcgcctgtccgcgagcgataagtctgaggaagatggagccactcgccggtggggcacggcgcgtggaaggcgcggcaaaggtccctgcccttcacctcgcgcaggggatcgcgaggaagtcaccccggcccacgcagagctgcctgaggcgccgggacagccttcccgccgaggactgcggactgccgggcaacgccggaactcccggaactcccgtggcccgcgcctcccctcgctcggcgcccctcacgccacgac

SEQ ID NO: 444269 - DNA, 795 bp, Homo Sapiens
tcgccgtgacacctcagccaactctccggtttgctcgtgacgggcaccaccaccagcggcaccacgacggtccatcatcgtccagctgggaaacacagggatctcgaagatgcaagtccccagtgagctaaacgagtgcaaagttctccagcatcacatcccggtataggcccttctgggtcacacttaaggagcccccactcctccctggagaaatataccgtcacatcctcaaacatcaccaagccctgcaatgatgggtccaactgagcctccgcctccccggccattggaccgtgcgggcagaacccgtggactggacccacggcctcagccgaaacgcgtcccgggcgcggaaaccctcggccgccgtggaaccttcccgggaagctctccccgcgcgggtgaaatgcgtccgaagacagggaaccgcttcccggagccgctgggaaggaggacggtacggaggcccgggagacccacggcgcctgtccgcgagcgataagtctgaggaagatggagccactcgccggtggggcacggcgcgtggaaggcgcggcaaaggtccctgcccttcacctcgcgcaggggatcgcgaggaagtcaccccggcccacgcagagctgcctgaggcgccgggacagccttcccgccgaggactgcggactgccgggcaacgccggaactcccggaactcccgtggcccgcgcctcccctcgctcggcgcccctcacgccacgaccctcgtgccgaattcaccacccagcctcgctacctaagccgaatgtggtttag

SEQ ID NO: 444270 - DNA, 370 bp, Homo Sapiens
aaaattgtgcttgtttttgtgggctgtttcatcttctgttggtttccaaaccacatcctttacatgtatcggtctttcaactataatgagattgatccatctctaggccacatgattgtcaccttagttgcccgggttctcagttttggcaattcttgtgtcaacccatttgctctttacctactcagtgaaagcttcaggaggcatttcaacagccaactctgctgtgggaggaagtcctatcaagagagaggaaccagctacctactcagctcttcagcggtgcgtatgacatctctgaaaagcaatgctaagaacatggtgaccaattctgttttactaaatgggcacagcatgaagcaggaaatgg

SEQ ID NO: 444271 - DNA, 420 bp, Homo Sapiens
  misc_feature (27)..(27): n is a, c, g, or t
  misc_feature (33)..(33): n is a, c, g, or t
  misc_feature (50)..(50): n is a, c, g, or t
ttttaaacagttaacctaagttcctcncccccnggtagtgaagttggaangggccccaaaatccacagtgcccatttccctgccttccatgctgtgcccccttttagtaaaaacagaaattggtcacccatgttccttagcattgccttttccagagatgtccataacgcacccgctgaagagcctgaagtaggtagctggttccctctctcttgataggacttcctccccacagcagagttggctgttgaaatgcctcctgaagctttcactgagtaggtaaagagcaaatgggttgacacaagaattgccaaaactgagaacccgggcaactaaggtgacaatcatgtggcctagagatggatcaatctcattatagttgaaagaccgatacatgtaaaggatgtggtttggaaacca

SEQ ID NO: 444272 - DNA, 1052 bp, Homo Sapiens
  misc_feature (245)..(245): n is a, c, g, or t
tcaaaagttcttcgtggagggaaaggggggattttttgttgggaaggaaaaaaaccggtaagcttttcccaaacccttttctgtaggggcctgggcatcccatgtttccattaggtcccctggttgtgccagggtacacaggggtcccaactttttccttctgccctggggtggcatgttcggtgagggtttctggaggctacttcatagtttctcaggttggtatcctatggctgcttaaggtngaaggcttcccccagagcagtctgatggaggactaagttgttgccaacactgcgaacatcaatgccctcggtggtcatgcccacacctagctcagggtgctggcggatgccacgctcaataatctcagcgatatgcttcagtgctgaggcatactgtcggctgctgtaataggccaaagccaggttgtaggaaaggtcaggctggtagcccgaggcctgcagggcggcaaaaaacttggagcatgcagcttcatactgtccctccttgtagagcaaacaacccaggttgatctggccatcggtctcattctcgcccccactttcctctcccccttccctactcggcagctgctctaccaggctcctggaccctggcagatcgccctcgctgtacttgatagcagcttgcaggtggaggacccggctgtggtaggcggggttatccaggagaaggaaggcgacccgggtggcctccgcataaaggcaggccttgtatagggcctgggcctggtacaggcggtactgctccagttccgggttcagctggcccagctgctcatagcactcggccgccagcgcgaactcctgcaggcggtagtagcagtagcctagcagcgacaggccggcgcggctcctggggctccgctgcagttctcggcccagcagctgcaccgcctcggcgtagcgtgcattgcggatgaggcggtacactagcgcggtgaactccccgtcggggatctgcgcgccgctcaggccagccataaccaccacggctgttatgcgtgcgatcccgggaattccggaccc

SEQ ID NO: 444273 - DNA, 494 bp, Homo Sapiens
  misc_feature (385)..(385): n is a, c, g, or t
  misc_feature (423)..(432): n is a, c, g, or t
aaattgtgacttgggtaaactgaatttgttctcattctgcatagacactggatggtttaggaaagcttagtaacgttagcataatattatggctgtatgatttcatagtctggttcagtttcattggcaagaggaggtgtgatattgtagagttttgaactaaaaattgagacttcagtcccaggtttgacattattacttccatgctttgagagttaaagtatgtttgttttctcacctttaaaatgggcttatcattacttgctttacacagctcatggggttattgagaatcagataagaaaatttgcatgaaagatttttatcaatgtaaaggattgttattgcgttgtaggacagtttatagggtatatctgttgttttncactcaaaggacttcaatttttcttttctggaaaaccnnnnnnnnnnaaggacaacgtcttgtttccgttgcccgggctgggagtgccaggggtgccagtcctagcccc

SEQ ID NO: 444274 - DNA, 2530 bp, Homo Sapiens
gtgcaggaggtgggggtctatgcgcgagtagcctcgatggggttcttccttcaatcccaggaagggatccccaccagacaacaagggcttggggatggtcccgatggcgtctcggctgacgtgcgcaatgatgatggagtcgcgctcgcataatcacggtctgcgtctagacactagtgtgcttgtctaggagtctgtgagacaagctcaggcgtgccaggggtcagtatgcgtgggtggtccctaggcgcgtgcgcccgccgcacaccgtgcacctgccccgtccgtggcacacaccagcgaagcgcaacgcaccaacgccgagcgtcgtgcagtagcgggcaaggacacaggccaagctgccgcgcgagccgtgcagggcaggggacatgggggccatggcgcgcagcgaggtcaacatcgatgtcgcagcgaagtgaacgtcctgcacggggtttccgccattagcgcgtttccatgggaagcgtacttgtgcaggggctggcacatagtcaatgtcacggggggtacaggcagctcaagctgcccaggacatgtggggttcacccactgggtaggcacacccacacaccaacttgtataggcacattggatcaatgggttgtgggagacaggggggaagccaccagggagcaggtagcacagaggcacatgactgtcagtgggcatgcatgcacacaggcatgagcatggcacaggcacaggacagcatcttcagccaagctgcatccacacaccaccacatcggtgccgtgtgatccgattcactgccactgcccccagctcccgccgcccgacgctccttctcacggcccggggcccggcggctgcatccgggtggacccactgcttttgctcccttcactctgctgactcccggtgctgccgctgccatagctaaagcccgggtcctggtaggcaggcgggaagcagggtggggtcccgggtactggtaggggtagccctgacccagagggccagggggcagcccgggtggggcagcggggccagcgtgtcctgatccgaagtcccactggagccactgttgaggttcagggtggcgagattgctgcagagatccccgaagacgtagtagcactgctcggagaaggtgatcttgttgaccgtgtgccgcaggaagccgtgcttcagcaagctgctggcgtacttccgggcctcccgccgctccttgaagccctccacgtgtgtgtacagccagtccaccacgtccgccccgatgacggcattggcgatggtgatcttgagccacatgcggtcgcggatctccagtcccgagtctggcagctgcatgacccggacgacggcgctcatgtcactcttcaccgtcagcggcgcctcttccagctcgtagcggggcagggctcctgtcagtgccgccgtgtgggacagccaggcggcggggtcgatgggccgcaccgggtcagcccgtgggacggtgaagtagcttcggggcgttgggtcccagcacttggccacagtgaggctgatgggccccgtctgggaaacgatctcccgcagcacccgcacggcatcgtcattgctcatgttctcaaagttcacgtcattcacctgcagcaacatgtcgccgggctcgatgcggccgtcagcggccacagccccgcccttcatgatggagccaatgtagatgccgccgtctccacggtcgttgctctgccccacgatgctgatgcccagaaagtgatgtctttccatgttgagcgtgacagtgacgatgttgagggacatggtggagtcggttatgctgctgaaggaggaggcccggtccgcctgccgaaggcgctgcttcctccgccggcgtttgtgcttccggatgagtctggatgaggtgctctgctccgtggagctgctgagcctgctcgtgctgccatcctcgtccgagtccacaaagctgctggactcaagctcgctgctgagggcggtggacgcgctgtctggggggcagcccccacatcccgccgtcggtctccccttgggtgcccattggtccgggcggcctcctcgcggttccggcgtcgggcacgctcccgccggtgactgaccatggactccgtgcctgtctcgttgtccatcccgtcacggctgctggccacattcgggtggaaggaggggggccgggagtccccgatgccgcctgtccgctcaagaggcgggggcaggtctgtgtggctgtccgtgccctgggaccccgcatccgagtgagcaccctcagccaggaccagccaggagaccacgcggccgttgaagcagggaagcttggcattgtcatcaaagatctcctccttcaccaccccgaagtcctggtccatggacttaaagaagaatttgtaggcgtgcacgggccggttgctgagcacgttcttgaagtcggccagcgtgacgcgctcgggggccacgggcagcttgaccaggtacggcgtctcctcctcgtccagtggtcctcgtgccgaatcgccacccaggcctcgct

SEQ ID NO: 444275 - DNA, 1105 bp, Homo Sapiens
  misc_feature (114)..(114): n is a, c, g, or t
  misc_feature (187)..(187): n is a, c, g, or t
tccccattccggaaaaggccagaggcgggacccggtactgggcgggtgctggagaaaaggttccccggatggtgcttccaacacagaccggtttgtccaagtctcaagaacttngtaaccagggccaggtgggtcagccatccggcaggcagccccagccaggcagttcttgcaggcgggaggacgnccggtaggggcaggtccacatttgccaatttacaaaatcgggcaagggaacatgaaagccgatctgcaggctgcagcgactgccaagccaggaaagtcgcagcagtgatgacgggcaagggatgcctcccggtcaccagccacgtctcatttgccagctccaccaactgcattgttcgagacagcatcttctctttgtcttccacgtatttggctggcacagaaggtgaagcttggaacagtttgaagctgctgcaataggtcttcaccagttctgccaagcacagagatggcacatccagtcccaggagcttcactatctgcatgtaagtgctagaaaacacatccaaatctgcatacaacagcgtgcagatggcccccattgttaggggccagttatgctgtcggcaggtgattaagacgcagcacccaaccaacacctccttcttttgcagcctggccgctcggatgccagagtgccgatatgcctgttggtagtaggcaaccgcggtatcctcaaatgttggtggcaactgcagaactcgacaaaggtctctcactcgccggagacctcgttgctggctgcgactaacttgttcgttttcccctgtgcttcgggaatatgttacctctcggagattgccctcgtcgctgaaggtagtggtaaggaccccctcggtgaccacgcagccgcagtcggagcacaccagctggctctgcgaatagtgcgagtcttccaccagctccgtggagccgcagtccgggcagcggcctctgcctggcatctcacaaccggccccaaagccgcggaagccttcagagactcctgggtctgcaacagcaaccgtgaggcagcaagaagtaggaggggacacttcaaagggttcacccccgtcttccatcccgggaattccggacc

SEQ ID NO: 444276 - DNA, 848 bp, Homo Sapiens
  misc_feature (771)..(807): n is a, c, g, or t
  misc_feature (821)..(821): n is a, c, g, or t
cttcaccagttctgccaagcacagagatggcacatccagtcccaggagcttcactatctgcatgtaagtgctagaaaacacagtccaaatcggcatacaacagcgtgcagatggcccccattgttaggggccagttatgctgtcggcaggtgattaagacgcagcacccaaccgacacctccttcttttgcagcctggccgctcggatgccagagtgccgatatgcctgttggtagtaggcaaccgcggtatcctcaaatgttggtggcaactgcagaactcgacaaaggtctctcactcgccggagacctcgttgctggctgcgactaacttgttcgttttcccctgtgcttcgggaatatgttacctctcggagattgccctcgtcgctgaaggtagtggtaaggaccccctcggtgaccacgcagccgcagtcgggtctccacttctgctgtcccatcccgaaaggcagagcggaccagtgactggcggtgctggagaaggtcaccgatgtgcttcaccacagaccgtttgtcaagtctcagaactcgtaaccaggccagctggctctgcgaatagtgcgagtcttccaccagctccgtggagccgcagtccgggcagcggcctctgcctggcatctcacaaccggccccaaagccgcggaagccttcagagactcctggtctgcaacagcaaccgtgaggcagcaagaagtaggaggggacacttcccgctctcgacgaattcgagctcggccgatttggcctgatnnnnnnnnnnnnnnnnnnnnnnnnnnnnnnnnnnnnncgccgccaccgcgntgagctccaagcgcccaacgtggtata

SEQ ID NO: 444277 - DNA, 428 bp, Homo Sapiens
  misc_feature (301)..(301): n is a, c, g, or t
  misc_feature (386)..(386): n is a, c, g, or t
agatctgcgtatgaaatcatacgagactatagccttttaacatggattttacacatccttgaaagcaagtttctggagactccgctgctgtctaatgtgatctccttgctacacacactgtgggtgaccaacctgggggacaaggtagtggagtgggagagccagcgcctttgccagcctagctcccaggagcctgccaagcggcttgccctgcacctggtcaatgagttcctttatgttctcatcgtgctcatgaagcacctgaggcccaccttggcccccgtccagcttgaccaacttntttcgggacactttgattccgtgcttgaggtaccgggccactgtcatacaggcctttagggacatgaacagattcaccgtaaatnagacagtgctttccaccaaggacgtccttgtcctctttcaca

SEQ ID NO: 444278 - DNA, 919 bp, Homo Sapiens
  misc_feature (798)..(831): n is a, c, g, or t
agcgggattgggaccagcccagcttgttggccgccaaacccttgccacccctgcaatgggtgatatacaaataggaatggaggacaaaaagggccaattagaagtggaagtcattagagcacgaagcctcacacaaaagcctggttccaaatctacacctgctccatatgtcaaagtatatcttttggaaaatggggcctgtatagccaagaagaagacaagaattgcacgaaaaacccttgatcctttgtatcagcagtctctggtttttgatgaaagtccacagggtaaagttcttcaggtgattgtctggggagactatggcagaatggaccacaaatgctttatgggtgtggctcagatcttgttggaagaactcgacctgtccagcatggtgatcggatggtacaaattgttcccaccgtcctcactggtggatcccacactcactcccctcacccggcgggcttcccagtcatctctggaaagttcaactgggcctccctgtattcgatcatagtgaactcataccagagtcattccaataaaactctacttttcaggcataataatctgaaccagatatttcatgatcgaaagcattgttggagacagacaatcaacttgtgttttgcctgtagtagtttttcaataatatgtcccaattgttatttaaaacatggcttcatatgacagaacaaggcaatctatcaaatttacaggaagaatcaacatgctggtgagagtcactgatgcttctaacaaatagaaaaagaggaaactttaaatccacgcatnnnnnnnnnnnnnnnnnnnnnnnnnnnnnnnnnncaaattgaacaaactggaaactctcactctgtgaaaagttgtattctacacatttctgcacagaccacaagcagtgttatttccctga

SEQ ID NO: 444279 - DNA, 487 bp, Homo Sapiens
  misc_feature (182)..(215): n is a, c, g, or t
  misc_feature (306)..(389): n is a, c, g, or t
  misc_feature (414)..(422): n is a, c, g, or t
caatcaacttgtgttttgcctgtagtagtttttcaataatatgtcccaattgttatttaaaacatggcttcatatgacagaacaaggcaatctatcaaatttacaggaagaatcaacatgctggtgagagtcactgatgcttctaacaaatagaaaaagaggaaactttaaatccacgcatnnnnnnnnnnnnnnnnnnnnnnnnnnnnnnnnnncaaattgaacaaactggaaactctcactctgtgaaaagttgtattctacacatttctgcacagaccacaagcagtgttatttccctgatgnnnnnnnnnnnnnnnnnnnnnnnnnnnnnnnnnnnnnnnnnnnnnnnnnnnnnnnnnnnnnnnnnnnnnnnnnnnnnnnnnnnncaccacatctgttatttccactagnnnnnnnnnggctgtgtcatgacaggcctcatgatgctaacagagattcttcccttcttttttccaaaagcacc

SEQ ID NO: 444280 - DNA, 1464 bp, Homo Sapiens
  misc_feature (954)..(989): n is a, c, g, or t
  misc_feature (1427)..(1427): n is a, c, g, or t
caatagagttgtctcttttattagcacattcaaacagcagcagaaaacaaccttccatttgattcttactgagatttattatttttaataatgccacttttcagaagtatagtcatgtgctcacttagacaggctgacgaagtgaaaacttgtatgtgatgcaaagtaccctttgggccatcgattaagacataatatagtgcagtgacaagtcaagtcaaatgcccgcagcagacaacaaaccccagcctccccttcccatggcctggctcccattttgcaccatagaacccacaatggaaatctggcaagacatagaacacatatggctactgactgacatgaaaagtaaattttattaaacatgtttacatacatgaattggaatttcatttaaaagcacaggggagtgttaagacaagtggtcaaaatagaaggatactacccaattataatcagttgatttttggccactaagacagaacggaatctagtagaagtgcaccaatgcttcagttcctcctactcagcatggtgagcagtggtcaatctgtgccctgtggaatgatgggcagataattctggcatgtgtaaataataataaataattcacttggtgcaggcagtatgtctatgaattaaaacctagtgtgtacacagtgtctacatgtgttacagccccacagtaggaatctacaccaaaatatttattagaaggaatttggtccgtactacatcacgttttccggagggtaaaaaataaagtccatctatagacatttcaccacagacccagagactgagtctggctaaaacctgcaaaatgtctataacaaaagtggatggcttagatttcttggttatttcggtatagtaattaacaagcaaactgtacaagtacatgcaacatacaagctggcctatgtggaactaacatacattattaaataaccnnnnnnnnnnnnnnnnnnnnnnnnnnnnnnnnnnnnacaaaatgtgcatgcagctctgaacagttccaagtcatgctgctctatttgtgtaatcacaaaagtggagtgactcataaaaggagggagaacatatcaatgcacctgcagagactgcagtttgtagcacatgtacagaatgtcacaagggaaattcaaggccaagagaaactaaatgaaaatgcaaattgaaagttcattttgtttattttccccccaaaaagtaagatactttgcattaaaaaatcaagctttgtgcttgcatcaatctcaaagaaatgtaaactaaaattcaataaaaacaatagtttagtgcagaatatttcaactggaatttccagtggaatattgaacagctcataccatgctctttccagggcagatggatgtgtctacactgaggcatggctgagaagcctgggcatagctcaaagtgtncttaggctcaaatccattcctagcctcgtgccgaatt

SEQ ID NO: 444281 - DNA, 1062 bp, Homo Sapiens
aataattgccagcgaaattttcgcggttgtgggccccccatctttgttcccaagactttggaaagaaagtttggggggcagaaaggggcaagggaaatgggccccatcccaggggacccaagacccccccaaaaggccagcccctgaagggggggtccacagtgcccaggcaaagggggtaaaaaaccaaggataagctggggtccccatcactccagctttcagagtcccccccaccaaggctgctttaacagacagcgtcccgcagtggtgtgatgaagaagacaccagaagcccagctgacctcccagactgccccatgaggcagtctgaactgaggcagtctgaacttcctacagtccgaatctcatgctttggtaagaatttgttcaccaaaatacaaaggactccctggggaacagagccccatgggcgactctttcactgaacccagtggaactgccactcactccagaagataaaggtccttcctgagggattctgacaggaaaaaaaggctggaatggagtagaaaggaggccctgaatttgaaaggaagcacaaagctaggcttcatatttgtcccagtgcctgttactttgaccctgacaactctgaggtaggacacactggggccatgacccctttgacagaagaggaacatgagactagctgtgactaaaggattcacccagatctcctagcccaactctgccccagagcccaaagtgctcaagggagaactcctttgagaggagactgccccgcctttaatgtgaaaagtcaggcctggaggcccagggtggacgtggtcctcagccagaccaagggcctcctctagtggaggggcttcctgggctctctctgcactgcccctcagggtgctttctggggtccagtcaatggatcttacacacccatgaacactgagcccttggggagacgtgtccaggcttcagtttcccctcccagctgacaacaaaagtaaataatggatgtgactatcctgtggggaaggactaggaataccctcgtgcagaattcgccacccaggcctcgctt

SEQ ID NO: 444282 - DNA, 380 bp, Homo Sapiens
  misc_feature (101)..(101): n is a, c, g, or t
gaggttgctcatcagctcactgacaaaatagagcaaagaagaattttaaaagtgctacagcatcactgcactgttatgtttattctcaagtaccgggtttncgagaccacttgtaaaagcaataaagcacaaggagtgactgcagtaagtgggatccttaaatgtaagcctctaagaaatttcagtgaatccagcacaaacagcaaaactggagctctccaaagcccagggtggcatatgaacaacaccaagcccagcacaagaaccaaaccgtgacaaacagcacgccaaacccacgcactctggacccagaccttttcatcactggattattatcaagtgcctagaaccaagagttccttcaaggcctttttgtgtgg

SEQ ID NO: 444283 - DNA, 307 bp, Homo Sapiens
  misc_feature (68)..(68): n is a, c, g, or t
  misc_feature (202)..(202): n is a, c, g, or t
gcaactgctttagaaagaattaattaatccttcccacgttgggacccaccctgggagctgctggaagncctggggacgctgccccagtgtggtgatgggggatgacctggcactcaactgcttccaccacttcagtgtcagttgaggagactcctggggccgaggacaagggacaggcacagaggctcctcggtgaagggcnatggggggcactgctcccccactggcctcaggagcctgcttttcagagcagcaggtgggctctggattctagcaacggacacactgatccttaaccctggttagg

SEQ ID NO: 444284 - DNA, 349 bp, Homo Sapiens
tgttaacgttactccccagactcttcgggcaaaggaatggctagattcagagtaagaacaaccctcccttttttgtaagtccccgtgtttagcagggagaagaaattctctaacatgggtttggttttgttgtgttcttcatgtggaaatgtcgcttaacaaaatatccaggcttttgtttacgtggaaaaagcatcccttgtaatgattgctcatcatacttaaaaacctttttcaaaggattttcatgttcccagctataaggactatttccatgacatgtgttattggcagaatgagtgttaaatatggagcatatagcatggggtgactttcattgtcctaacct

SEQ ID NO: 444285 - DNA, 659 bp, Homo Sapiens
ttacggcaggggaatcttttacaaaaatgaaactatgtgctatcaacaaccaactccttaagaacaatagtttataacaaagcagaattccagacaagaactacaggtcagaaatggaagggatgtcggaaatctaatctaaacctctgactttctagactaggaagctgcttgagtggcttttcaaatttacatccagctagttaatgccaacgccaacagaaacaccctgatcctagtttcctaaaacggtatttagtataaatacacatgaaaatttttcttatttttgaaatttcaaagtccaattttataacacaattttacaatgcaaattcttgctgtttcactttctggattcagctgaatagttttgtgaaaatactgacaaacttgccttcacgaactgacttccaagaacaaattgttaaaactttaacagaaaaatcagttaaaggtgctcatcaagagagtccttttcatttggtataaatccaaaactatgaaaataccttttgtattatgtgcatgcagaaaattaagaatttattcaatttgcagaaataaatcagtgatataatggaaacatttaaaattttatctctggaaaataatccaaaatcatctatcaaaaattataggccgggcgcagtggctca

SEQ ID NO: 444286 - DNA, 375 bp, Homo Sapiens
ttggggaggaataagctggaaatcgaaaggagccctttaaaagcccctggtttcttcaccagtgacacaaatgatgggtatgtgggtaggactaatcaaagcaaatcagcaagtgttcctagatgaaggctccctgctagacaaaatcgggtgcaacaaagtggaagaagaggcccttccctctaagcctcactgggactcactctcctcattgcaaacgtgatcgagttggacttctcccatgaaatacccctagtgcaaatgagggtttctgtcctccgctcctctaggcattattctaagccaactactataaatgagaaacttatgtgagttgccttaaacattccgtgcaagttttgcatttgatttcac

SEQ ID NO: 444287 - DNA, 570 bp, Homo Sapiens
  misc_feature (533)..(533): n is a, c, g, or t
  misc_feature (553)..(553): n is a, c, g, or t
gaaaacaaataataaaaattcgacaaaataaattagaggtttataaaaggcgggtgggcgggtgcagtaggcgtgtggcactgccgcgctggaccagcggcaccttgctcagctccaccacgggcgagcgcggcttgttcttcatcttgggcatccgctgcaccagctgctgggcctcgcggtagtcgttgcgcagctccttcttccactgcaccagctcagggtcgctatcgcactgtaaaatgaactgtttcccaccgcggatcttgaggagcaggcacttgcgctccttgatctgcgtctcctccaccgactggatctcctccatggtcagcaggctgcggggcctcgccctcgccccgccactcgaggcggttggggaacaggtagaagtaccgccgctgccactgggtcaggaaggggttgcccatcttggacatgtagccatgcatgatgcagtcctttcccagggcgtagtcttcctcatggcccagctgcttgttcttggctttcttgcgagcctccagccggtntgtctcagcgttgatggtgncgtagacagtctctgcc

SEQ ID NO: 444288 - DNA, 199 bp, Homo Sapiens
cactcatcgtgaaaaaacatcagacaaacccaaacggatgaaatgtgaggaaaatctgtagttggttttacgcggatgttaatctcttagttttgatcattgtgctgtagctgcataagaggttagctgggtgaagtgtatctggggaccctctatggcttttgcatcttttctctaagtctcctgtcatttcaaagta

SEQ ID NO: 444289 - DNA, 1075 bp, Homo Sapiens
  misc_feature (766)..(782): n is a, c, g, or t
tttgggaattcagagcaaaccaaagatgagaattcttcaaagtccacatttagttttagtatgacaaaaccatctgagaaggaatctgaacagccagcaaaagccacttttgcctttggagctcaaactagtactacagctgatcaaggtgcagcaaagccagtttttagtttcttgaacaacagttcctctagttcaagtacaccagccacttctgctggtggtggcatatttggtagttccacctcttcctccaatccacctgtggctacctttgtgtttggacagtccagcaatcctgtgagcagctctgcctttggtaacactgctgaatccagcacctctcagtctttgctattttctcaagatagcaaactagcaaccacatccagcacaggtacagctgtcaccccatttgtctttgggtccaggagccagcagtaataatactaccacctctggtttcgggctttgggagccacaaccacatctaactctgcaggatcctcctttgtatttggaactggaccctcagcaccatctgccagtccagcatttggtgctaaccagaccccaacatttgggacaaaggtcaaggtgcccagccagccccaatcccccccaggcttttgggatcctataatcaatcctttccacaagcaattaattttcccccaccggggatttccccaaacccctgggcaacccaaccctttacatttttttggggggaaaccgagcggggtcccaaggaccaaagttaagnnnnnnnnnnnnnnnnnttgggtggatttgtggggacacaagcaacacccctaaactcccagaggcctgggccattttttggggccttcttggggaaaacaagacttccccttaaattttctaaaaaattccgggccttttttccccagatttttggggcacaactcacgcccactaaacaaaaaatttttccaaaccttttcccgaaaaccaacaaagggtgccaatccaaggggaagtgggttcccactttttatgggtggcccaaatttcccaaaagcaacaccctgggacaacctttcagaaccct

SEQ ID NO: 444290 - DNA, 360 bp, Homo Sapiens
  misc_feature (63)..(63): n is a, c, g, or t
ccttggcccagggaatatgtgtctgtgtccaggaaggtactgagggtctgtctgcacctgaanccagaaaagaaagtacacagagccgtgggctagcaggcagaaagcagccccaacttgggtaggaggtacagaactgtgtgaaaaatgctttagaaaggagaagagatcccagggaagctacattcagctctgtagttctgcttatacctgtgcactggctgaacaccagataaggactgagcttggctcagctaagctggagctcagcactacttatggggtatatatctgggggtggaagccacggggctttgctccaggactgctccatagcaaagatctctccctccttgtgct

SEQ ID NO: 444291 - DNA, 793 bp, Homo Sapiens
cccgtcccctcaatgcagttagtggggaccagcaaggtaggaagagttcaccagctatggccaccccaagggcaggaagggcgaccaggtgaaatgcccaagtccggaagcctcctcttgcacacacctccgtgctttgtctgtggccaagagcttacgggagatcccccccacatgttgccaaagatttactggccccagaccaggagcatcagcaggagccccccagcacggtggctttcagggagcctcgaaagtgcagggagagaacccggtgtggcttgtctgctggaggctggggaggagggtggactcggggaggcagtggccagcgccgggtcaaggtgggagctgtggctgagcaatgccgtgtgctctccccgcccttcctacctggccgggtggggatgggcgctcaggccacagaagagatctgcttctggtcctcgtgctcgccctcggggtcccccatcaggggctggcgctttttgagctcccggtggtacttggccatgagggaggcgtagatgcagccataggcagcggccaccaccatcatgatgcagacgacgccgcacacagacccctgcaatgatcaccgtgcccatggctcgcctcacgctcgccggccggtgcctctgcttctgtgggcaggctgtgctgggctccggctccggctcagccccgggcttgggcttagcaggctctggactggccttggtgcagggtggcccaggaatatccagcccagctgagctattctcgtcctccagctgggagcagtatgttgaac

SEQ ID NO: 444292 - DNA, 461 bp, Homo Sapiens
  misc_feature (22)..(22): n is a, c, g, or t
  misc_feature (49)..(49): n is a, c, g, or t
  misc_feature (94)..(94): n is a, c, g, or t
aaaaacactgttggcccaaaanacaagctcccaggtccaacgctgcccnaaaggaaggccctgctggtaggtttgtgcaggcccgtaacctccnaacgccaggcccggcttcccctggggcaagaggaagattgcccaggcagggatgacctgagcaaatctactcaggatccaaggcagggatgcaatggccgctcacaggaatggaagatgaaccgcggacctgcaagggcaccccagggactggcctggaccctacaacgcacttggtggcacgcccttctctcccctgtgctcaggacaccgaggtttggtcgaggatacctcatattccccacaccacatccaccacccacctgtaactgttcctgtaacaggaacaagggctggttcttgcgatgttcctccctccctccttcccagattggattggattgctcctactgggattaacccacctt

SEQ ID NO: 444293 - DNA, 577 bp, Homo Sapiens
  misc_feature (62)..(62): n is a, c, g, or t
  misc_feature (94)..(94): n is a, c, g, or t
taataaagcttaatcttgtgggaagtttcaatttacagcctgtgaaattataaaggcatttnattcctcaaagattcacccaaaacaacccgtnacgcctacattacattagagagcagagattggttaggcgaggcgagaccagaccgcatttctagacccatgaacacagcgaatactagcaagaaaaaaagctttctccccgccaaaggggaggcttcccaaccacgagacaaacgcgtacagcttttctcccttgtacagaaagagactgactcctgttgcgccatgggggaggcggagggacacaacgtaaaagtgggggttccaaaaggagtcaaaaggagagtatggggttaccgtcacgccacaccgagagaagcggagacgacactttcacccggtgggggcgggggcgaggctcccccagcgcggactcgggttcggggcgtgcagggcgcactctctttgtgggtctccaagcgaaggcacagttcgggggccggggtggagggcgcgctctagcacggccgggcgcacgggcacctgcaggaggatcacctgtctgttttcggat

SEQ ID NO: 444294 - DNA, 438 bp, Homo Sapiens
  misc_feature (241)..(241): n is a, c, g, or t
  misc_feature (384)..(384): n is a, c, g, or t
  misc_feature (389)..(389): n is a, c, g, or t
  misc_feature (400)..(400): n is a, c, g, or t
  misc_feature (424)..(424): n is a, c, g, or t
ttttttttgtctgggaggtgtttaattccacctcgaacaacttggcaaggtcagcagagaagcaaatggataaaagtacttcacaacagcagaaaagttccatcaggggcgcgtgattcccacaaaaccatggcaatgtgtcctactctcaggaacccacaatggagggcggctccggagattttccatgaggcagtacgaggcccgtacatgcaacgctgctgagccccgcctcaggctngggttactgggccgccccgagtccccgaaacagcgaccagcagggggccaaggccgaacagccctgacccccgccttccttccgggggtgttgccccatttgtttccaggacaaggacaggaccccagcgtttcgggggcttnggganggcggattttnccagggggcacgggcgggtttttncttgtttttttggg

SEQ ID NO: 444295 - DNA, 478 bp, Homo Sapiens
  misc_feature (430)..(430): n is a, c, g, or t
  misc_feature (451)..(451): n is a, c, g, or t
  misc_feature (467)..(467): n is a, c, g, or t
atgtgatgcatgtagaaaagcctttattcatagatcatcgcttactaaagcatgagaaaacacatataggagagggagctttccctaattggaacagatcaaggaatttatcctggaaagaaacaccatgaatgtaccgactgtgggaaaacctttgtctggaagacacagcttactgagcatcagagaattcacactggggagaaaccctttgaatgcaatgtatgtggaaaggccttcaggcatagctcatctcttggtcagcatgagaatgctcataccggagagaaaccctatcagtgtagtctctgtgggaaagccttccagcgcagctcctcccttgttcaacaccagcgaattcacactggagagaaaccctatcgatgtaatctatgtgggaggtcctttaggcatggcacatccctcactnaacacgaggtcacacacagtngagagaagcccttccngtgtaaggaat

SEQ ID NO: 444296 - DNA, 1106 bp, Homo Sapiens
  misc_feature (1032)..(1066): n is a, c, g, or t
acaaaagtcacctgtattccagccaaaatagctttaaaaaggaatccctgctaaagggggggacaaactacgtaagacacaatacatttaaaatatgtattgaaattacaaatcaaactttttccatatgattccagagtacaaaacacaacattaaaaggcattcaaacagctcttttatacatcacagtgttagtggcacaaaatgtactgacatttcaaaaacacaaatcaaatctgttttgattttgtttcaccaccacttgtcaaatacataacgtatacatgtgcatgactcattcatgcatatttttatacaagattaaaatacacccatagtaaagtgagcaaagaaggaaagaaagggcaggcatggggcatgtagctacccctcactgaaggctccggaactgtggaagacagaattgcacaaatcaaaggaagggtggagaccctgggttttttaaacatcaagacggcatgctctcctagttgtgaagcattagcaattaggttttaacgcaggcccctttgttccttttggtgtttttggtaatacctgtcataatcccttcattttgtttattttcataagggcttaggttaattatcagaaataaacaagctttggtattttttaaagagaacttcatgaagctttacacatgcaaaatgttttcccttgatgatctccttatgatttatatatatacacaggtgtgctcactaataaatgagaatctgagacacacacacaaagcccatcctggatcctttcaatcccctaatttttaaagactaccaagaaaaaaatgtttttttaatttgtaaaatgacttcctaacttttgcaatacaaatgaaaacaataaactcatcttgaagtaatttttgcatctctgatagtccctcccacaggtcctgtgttctaatcaggaactggcctgtgccctaaactggttttatggaataatatgttgtcaagatcatttgttcccctttaagaaaataggccgggtggggtgctcaggcnnnnnnnnnnnnnnnnnnnnnnnnnnnnnnnnnnnagatcacctgaggtcaggagtttgagagtagcctggccaa

SEQ ID NO: 444297 - DNA, 698 bp, Homo Sapiens
  misc_feature (33)..(33): n is a, c, g, or t
  misc_feature (75)..(75): n is a, c, g, or t
  misc_feature (115)..(220): n is a, c, g, or t
  misc_feature (244)..(267): n is a, c, g, or t
  misc_feature (567)..(567): n is a, c, g, or t
  misc_feature (589)..(589): n is a, c, g, or t
  misc_feature (595)..(595): n is a, c, g, or t
  misc_feature (628)..(628): n is a, c, g, or t
aaggcagatcacctgaggtcaggagttttgaanagtaccctggcccaacatggtgaaaaccccgtctcctactgnaaaatacaaaaatttagctgggtgaaggtggtgggtgccnnnnnnnnnnnnnnnnnnnnnnnnnnnnnnnnnnnnnnnnnnnnnnnnnnnnnnnnnnnnnnnnnnnnnnnnnnnnnnnnnnnnnnnnnnnnnnnnnnnnnnnnnnggacaaaagcgaaactccgtctcnnnnnnnnnnnnnnnnnnnnnnnntgccagaggtggcagatgttggttcctctgtccacagctactcctatgagttgaggaggaagaactaatttggacagttattcctgcaatccgatgctttatctcagatcctaagtcagtctctgctacgtggacatctatggtgactgcatctttgcaaggtgctgacctcctatgaggctgcaagctcatctggctgggctatggactacacagcagagccagactgagaggtcaggcatttccagcaaaacctccaaatgtggtcagttactcaagggcctcagagaagccacaggnccactgggctaaggccagtccntactgnccacccaccctgggcggcagtacagcagccatngttgtctaaagggccttcgccccttactccccaggattaaaggcctcttagtgaacacatgccatatgcc

SEQ ID NO: 444298 - DNA, 632 bp, Homo Sapiens
  misc_feature (139)..(156): n is a, c, g, or t
  misc_feature (183)..(294): n is a, c, g, or t
  misc_feature (620)..(620): n is a, c, g, or t
ttttttttgcatttcacagtagttatttattccattttcaagatctgatcctttaaaaaaattatctaaaaagtcttctctgataaataatacatctttaatttacaactctttttgattatacaaatgaaccaagtcnnnnnnnnnnnnnnnnnngagacagagtctcgctctgctgttaannnnnnnnnnnnnnnnnnnnnnnnnnnnnnnnnnnnnnnnnnnnnnnnnnnnnnnnnnnnnnnnnnnnnnnnnnnnnnnnnnnnnnnnnnnnnnnnnnnnnnnnnnnnnnnntgacacccgtgaccagctgaaccaagtctttttaaagtaacttctgcccaatcttgggcagagtttctgagcaaatctgtgctggtgagtcgcgaaacagcagccctggctctcttggtggtccggtgtgtggtggggtcagtaattcacactccgcatggtggccacggtggtcaggggcgaacggggcaggcctttgctgacctgtctatagtcctcaggcctgggtcttcagtagcgtcacgatgtgctgggagggtgcgggacggctgcaggcccaggggcatccatcacgttgatcagatagtcgatgtcagtggccagtntttgcaaatttt

SEQ ID NO: 444299 - DNA, 423 bp, Homo Sapiens
  misc_feature (250)..(262): n is a, c, g, or t
aattttcaaggatgggggtgataagagcaacctttgccattagcccttccaggaccccatgtaagactttagacaccttctcactcatctcagaccttctcagggtaacttggtgaaaatgtcttccgatctgagccccagtgagcctccctgcaacttggcgacgagggactagaccagaaaaggtcaacccgagtgtccctgaccgttgaaatgattggcaaaatggagtgcgtgtctgggtgtggcnnnnnnnnnnnnngaggagtgcccagttgtgattagaattttcaatggggatgcagtgccctaaaaatgaaaaacaaaagcagaagaatgggaagaaatagaggtagacttcaggacacagagaccatctttcaagggccttttctctgttattgaggggtattcaccagcaaa

SEQ ID NO: 444300 - DNA, 275 bp, Homo Sapiens
  misc_feature (124)..(185): n is a, c, g, or t
ccttacagtatagacttatttacttagatatttacttgtttgtctatatcctccccaagaaatggtcactccctggggacaaagcaaagtcagccttgattgctgctgtgctgtgtcaatattnnnnnnnnnnnnnnnnnnnnnnnnnnnnnnnnnnnnnnnnnnnnnnnnnnnnnnnnnnnnnngtgaaatgtatgaattaacaagtgaattgacagatttcatgcattaagaagcagtcagggcttggcgtttatgaacacagctttggaaag

SEQ ID NO: 444301 - DNA, 479 bp, Homo Sapiens
gcaggagcccacagttgctcaactttccttctgcctccctggaagccaaccccaggcttcaagatgcccatgacctgtcattaagcaccctgggccctctggaaggagctaccctctgcacccactggaggcaggccatgggtgacccaaggatgctcgggaatggggatcaggtggaaaagacattcccagggaacacttttcacctcctgctacctaaggcactctttgcctccagtgactctgtggttgcaaagctaacccagacatgctgagtgagggaggggtgcttgcaaacaagactgggctgaggagtgggtctggaggtgaattaagcaaacatgcgccctgttctaggcacaggggtctttctggctgtgattcggctgaactgatttgatataggacaggctggcaaagatgaagaaaaagaggattgataatttacatagagaactaaacctctggccatataggtt

SEQ ID NO: 444302 - DNA, 402 bp, Homo Sapiens
  misc_feature (391)..(391): n is a, c, g, or t
aagaggaatgtggtggaccctttgtattttaaaaaaaataattgtggggcctactttacgtatctcctgtataaaaaccagctttcactccacatgaatagagaagatgctgaatacgcaggaatctgattatccctcacgtgattattaccgggcctctggggcaatctgcttgctcactcattctgccaccattctcttcattcaagtgtttaacagcacatttatcaaaggcagctctccgatgcaatgtttaacgagtgtcttctcaggagtgtatccgtgtcatttattcttctcatccaggtaagcacgaacttcacagtactactaaaaatcttcttcaaattatattgataatggacttatttctgaccgtttttggatttgnccccgtgcttt

SEQ ID NO: 444303 - DNA, 128 bp, Homo Sapiens
gtaattttctatgtcaaattagtgtcagtcgcccttttataccacagttttcccgttcgtgaatttttagtttaaacttacctctcaattagctgagtgcctcactcaagcaatcttttcaagaaggg

SEQ ID NO: 444304 - DNA, 756 bp, Homo Sapiens
ttcaatattaggccacatgatttattcagtagtttttatgttcccaaattacaatttatgtctattcataagactacaaaagttaccattagaattgtctgtgcttataaaataccaacttttttttaaaactgttacatatactcattaacaccagtctgcaacaagttacatagaatcagaggcacttcaaaggcttaaaaagacgtttacaacttaaatgcatttttaagaacaaaaactgatttttctttaaacctctactcgtaccttcaaattgcaagaaattaacaaatacagtggccaaaggaatctgcagcaacttcttaaaatactgttaacatctttgggtttgctgaggcttgtcagtaacttacatcaaatcctcccaaaagaagatctgattagatagatatgactaaacggttttgtagtaataatccaattttacacattaatttgctgttgcaaatctgcccaaagctacaggtaatgaaaaataaagcaagtgtaaaatggatagtctgacacttaaaaatttatacaaagtggaagttgaagtttacatatttgaaaatcacatatacactaaattaccatgatctgaatgttccaggacaaattgcaccatgacagctacgaaaggcatagggttgggtttaagggcacagaaagggatgggcagagaaaggagtgcgacaacagatgaagtaacaaagtaggaccaacttgggtagggcaatctgagacgtgctg

SEQ ID NO: 444305 - DNA, 1199 bp, Homo Sapiens
  misc_feature (58)..(58): n is a, c, g, or t
  misc_feature (75)..(75): n is a, c, g, or t
  misc_feature (198)..(198): n is a, c, g, or t
  misc_feature (443)..(458): n is a, c, g, or t
  misc_feature (483)..(583): n is a, c, g, or t
  misc_feature (1134)..(1134): n is a, c, g, or t
  misc_feature (1167)..(1167): n is a, c, g, or t
  misc_feature (1174)..(1174): n is a, c, g, or t
catgccatttggttaccaatacggtaatggtgccaaacttacagactttaaaaaaccnttccctcccattttccnaagttctgtttccttaggactttggatttttaaacatgtcctacccttagggttcctaaataaataatgtcctccctatgaagaacatgtggggttaaaaacccattctcctaatttgacaangctatattcctaaaagattactgcaaaacctgcctatgtttaggaacagggttgaaaagtactatctgaaatctgagggatgtttagaggactgacccccagacaagggatttaaaatgttttttggccaggcacagtggctcatgcctgtaatctcaacactttgggaggtaaggcaggaggatcatttgaagccacaagtacaaggtcagcctgggcaacaaagtgagacccccatctctacnnnnnnnnnnnnnnnnttagccaggaaaggtggtgcacacnnnnnnnnnnnnnnnnnnnnnnnnnnnnnnnnnnnnnnnnnnnnnnnnnnnnnnnnnnnnnnnnnnnnnnnnnnnnnnnnnnnnnnnnnnnnnnnnnnnnncagtggacagaaaaaaaatttaatttttccagagaaaagggaagggaaaaggtgttccataatctaggatatgttcaagagcctttgctcttatagtcaaatatataaaaacaattttccttaaagaaataccagtctatgagccaaggcaagctttggctaaatgattggttagcttttatttggctctagaggtttccatggaaacagcctgagagacagaaaaggcagcattatcatctttatccatgatgccatctgataaaactgcacattgattcattcatgctattcagagcagatgtattacttctgataagcctggacaaagggaggcatgagttttatcccgtcacgctttgaatttcctgtcttcccctgtttgaaaccttaaattaaaatcctgataaaacctcctctgaacatttccctcaggagcctctagctgaagtaatgcttcaataatcagaaggcatatgaaggaaacggtgaagccccaaatgggagctccactgcccaggttctttaaaaattatatggggcaccacggnttcctgtaggctggagggaaattgttctgaggnggtattnacaattcccttatatcaggtcttag

SEQ ID NO: 444306 - DNA, 505 bp, Homo Sapiens
  misc_feature (42)..(42): n is a, c, g, or t
aaatccttaaactttaatactgaaagcttaaagtacaagganggtaagaaaacaggaaaatcagagaatcccggaactttctcccacattagagcaaaggatttctggaagctttcctctttaagttatgccagagatttcagagttagaaagagaaacagaggaggtgatagtagggacttgcctggctatagtcttgagtttcttgtccgcatctatttacttgaaccagattttccttcctttacctgtctccatgctgactctgagctgtgcagttagttccatttcacaggtctgctctttctaaactatgtctcaagatgtgctagtaatgctctaaccttttggttcctcatcaacactgctggtctggctggctcttgctgttgtcccttcttgacctattctggccttttttgtttatcacgattcttctctgacaaatgtggtgatttcctagtatttgaccctagcctgatccaatgaatgaatctgccctcgt

SEQ ID NO: 444307 - DNA, 485 bp, Homo Sapiens
  misc_feature (34)..(34): n is a, c, g, or t
  misc_feature (51)..(51): n is a, c, g, or t
  misc_feature (116)..(116): n is a, c, g, or t
  misc_feature (143)..(143): n is a, c, g, or t
  misc_feature (472)..(472): n is a, c, g, or t
ctgcttaaactcatccgaaaaatccaagcgttcnatggcggaaaacctgantccaacggcagggccaaccccgtttatgggcaacccccaaaccccttattagggttgttaatcanccacaaatgagcaaactggctcatcantcggtgcaaggctgaacaggtgcaaggaaatacggagggcaggcggggtagggggcacggaatgcttcccaacatgagggcatttcaggccagcaggcggggcccagagacccagaagcaccacaactcccccgtgtccacaaggcactttatgcattcaaaaccaccgaattcacacccaggtttgctcagacagaggcccagaggcgaccccgctctggcgtggctaccacctgagcggctggcggccctggcccagctcggcctccgcttaggcgttataccagacctttaggtggtacagcagttgctccaggttctcgccggtncctcgtgctaagc

SEQ ID NO: 444308 - DNA, 417 bp, Homo Sapiens
ggcatttctttcctgagataaaaacttatttttaattgttttctgaattacttataacacattgttattagagctctggtttcagctaccaactgtaaagaaaaactttagcctttctagagttctttagagagcagttcatctcttcgaatcatcacacaaaaataattatctctggtgttgttttaataaaaagaaggcaagctccaagtgaagggaggagagtgggggtagagagggatgggattcaggcttgattagctgtgaggaaggaatgctttaccccaatgagcccagcgccgggcttttttcccctaaggacctcgggaagtggaaattcttatggctggatatggggtattaactggattacccagctagtcaggcactttcagtggattttaaaggttttatttg

SEQ ID NO: 444309 - DNA, 495 bp, Homo Sapiens
taatgataaaattatatccagattcaagcgcctcttgtagcgcttcccacagtcctcacatttggatgggttttctccactgtggtctctttgttggtctttacagtatgaccggcatacaagcctctttccacagtcttcacatttcaatggctttctttggcagtggagtttcttatgattcaaaatactagaagcatgtctaaagctcttcccgcagttatcacagttataagatctctctcccgtgtgggttctatggtggaagtcaagacctgacttactaatgtaggccctttcccacactcctcacatttgtatggcttttctccagtgtggactcgttgatggaccaaaagatatgaggaccatttgaagctcttcccacattctttacaattatatggtttctgtcccatatgaatcatctgatgcttatgcaaatctagcctatcaatgaatcctcttccagacttttcagatttgtacagtttc

SEQ ID NO: 444310 - DNA, 532 bp, Homo Sapiens
aaacaaatcttactgctgactgttgtatagagaattgactgtagagaggcaagaagaggacaagggaaatcagttgcaagactttttcagtggtcctggtgagagaagataggcttctttggtaggcatggaagtggtgggaagtggcaagaaatggtcacgttgtcctgagataatgaggatatggatatatgtggagttgtgaaagaatgagaattaaggaaaatacctggattttggaggtggatggaatcaagagttgtgactcatttttgatatatcctgtgggctgccaagtgattatggtccttccacaggaaggccagggctggagacacctatgggcaaataggtgggctttaaagttattgggctggaagaggtcacctctagagttagttccaatggaaaagactagggcccagaggtgggctatggagcagtaggagccagcgccgtgtccattgagggggaagaaaacccagccagtctggtgtttctggaaagcaatggaagaaattctagcaaggaa

SEQ ID NO: 444311 - DNA, 635 bp, Homo Sapiens
  misc_feature (381)..(381): n is a, c, g, or t
  misc_feature (585)..(585): n is a, c, g, or t
aggtttgttaattttattatttggttctcaaacgaggcttcacctcagggtaagcacgaatctgttggcttgaatcttggctaggaatggtctgcacaaattcaaactgacgctggggggagacggctggttgccgtggcaaccagagagccgtttttaattccgcacggtgagtggcggctgctgccgctgtctcgggaggacggtggccctgggtcccgcgcgctctgcggccaggctgcccgctccccggaggccgccatttcccctctcggcgggcttctaagttcaggctctcagagtctccaccaaatggctggaaacgaacaaacgcaaagatctcgaaagtgtttccaaaaagagggcaggtcctgcccgagnatgccagtggcgtgaggccactgttgctccagagctccgtatttacagcaagctcctcacgcgagtccccggcagccacggcccctccaaactcggggctggggaggggctcaccctggcgagggaagacggggctgggggctcacccctggcgagggaaggcacccatcagcgtcctgagcctcaggcgtcggccctgacctncaactctgttaacctgcatgaggcagcgtcatctctgggactgtttcccg

SEQ ID NO: 444312 - DNA, 489 bp, Homo Sapiens
tttgtggcattacttcctctttattatagaaattttatacttttattacaatagtattttttgaatgtatgaatttttctagaattatcttttatccttattgttacagtttctaaacatcataaaactcaacttctaaatcaaatgcattatgtacatgatatcctgtttaatttacttaactgtaagaaatctttctttatgaaattatgtaaaatgtatatttttcctttaatggaaccctaacactcagcacgttgactgtaccaggtaccaaaatatactgctgaaagaggttacagcaaaattttgggttgagaggtgggagtggaatcagaaaataaagaaaaaggcatacatgagaggatgaaagatagtaatgggatgataaaaatggaaccagggataggactaaggtcaggaaatgcataatgaaagcaaaccactgactgcatagccaaagccaacttgaacagaaggtaacttgaa

SEQ ID NO: 444313 - DNA, 438 bp, Homo Sapiens
  misc_feature (341)..(341): n is a, c, g, or t
  misc_feature (406)..(406): n is a, c, g, or t
  misc_feature (411)..(411): n is a, c, g, or t
  misc_feature (426)..(426): n is a, c, g, or t
gcattactttctctttattatagaaattttatacttttattacaatagtattttttgaatgtatgaatttttctagaattatcttttatccttattgttacagtttctaaacatcataaaactcaacttctaaatcaaatgcattatgtacatgatatcctgtttaatttacttaactgtaagaaatctttctttatgaaattatgtaaaatgtatatttttcctttaatgggaaccctaacactcaggcacgttggactgtaccgggtaccaaaatatactgctggaaggagggttacaggcaaaattttggggttgagagggtggggagtggggaatcnggaaaataaggaaaagggccatacatgtggtggggtggaagggtaggtaatgggggtggttaaantgggnacccgggggttgggnccttggggtccg

SEQ ID NO: 444314 - DNA, 469 bp, Homo Sapiens
cttggcaaagctgctgtctgcagtttccccatcgaagcaactcgtggaagttgctgctgaaaaaaggggtggtgtaagatgcaaatggccgtgaccagcacttggccgtcctgcgctgttaggccaaggaaggcctgcctgggcccacctggctgcagcggggagctgagccctccctgaggaggaaggaatcgcacctggggcagcaacagcagctcctgcctgggtccctcatggccgcgtgagccgcttcctcactgtaaagctcttcacctatgtaactatgtatcaatgtaaacaggaacgtatcctccgcctctgcatctctggtgaatccgggcgatacgtggtgagacaccttaataaacacctagatagaccctgccgtggtgagcacctgcctccaaggggcaagcacggggcattttcctggctaggaattctgtctttctcaccacgagactcttcc

SEQ ID NO: 444315 - DNA, 477 bp, Homo Sapiens
  misc_feature (18)..(18): n is a, c, g, or t
  misc_feature (142)..(142): n is a, c, g, or t
gataacgggaaactaacnggactattattacatacagaaatagagtttacttatttaaaatcactgtaattgtgtcggttgtttactaatagcgggtggactcctaactggatataggtggtgacacccaaaactgggaaantacagagaacccgagatcatgcatgagagagtcaaggaaaataggagaaatagtttttacttatctgaactcagagcaaatggttttacaaagcagccgttgtcccattggcaagccattgccctactttggcaagttaaaccttatattttcagatcttggatcaagaaccacaacttggaaaaatattttctgttctctcttcctctcttcctcccctccttccatatcccagccttgattctgtcgcccttatacactgttggttgttttctctttcacatacctagtaattggtataacagagttatcttttcctcttcttttcttttagc

SEQ ID NO: 444316 - DNA, 410 bp, Homo Sapiens
gcaaacttttcttttaagctaatataaaaatatctaagaccttctgctgattgtcacatagtataagggtatgtgagtaaatggttgctaaactgcattttggcactaacatatgaccagatccatctgttgggatcccatgccgtggtcccatggcagtgagctattgtggaaaatgtattctactgagtggagggagatgaaggaagtgatcactaaggttggtgagcttgaggggaggtctcttagcccctctagagctcagattgttcatcttcaaaaccatggtgctaaagaatatagctctaaattttttttccagtggcaaatattctatgcttctgtgacagaggaactttgaagttacatggcctaagtcagggcagctgctacagacccgggtactacag

SEQ ID NO: 444317 - DNA, 516 bp, Homo Sapiens
ttttttttaaataaagtattgtcattattcattgtttaaaattttagaatttattcttcatattgatttattactcatgttcttcacgttaaatattattctttaatgaggtctgaaataatactaacatgatactgagaagacactggcctttatttttctctacctatactctgttagtatttgggacagttttttatacacttgttctatataatattatactttaaatatataacagtattccttcaaatattcctagaatgttactaagcctgatacctctggtaaggcacccctctagtttagtgcctgtgtatatctttagtgaagccaataggcttctttcactccttttcaaaggtgtttacatcatttccataatgctaaggcatcaacacattttaggttttcgttttttgttaatcattcttacagtttttggttacttacctcagcaggaatttcgcataggaatagggaatagaaaatagggaataggaataggaagtggaa

SEQ ID NO: 444318 - DNA, 444 bp, Homo Sapiens
  misc_feature (23)..(23): n is a, c, g, or t
  misc_feature (31)..(31): n is a, c, g, or t
  misc_feature (94)..(94): n is a, c, g, or t
cccgtgccccctgtatggagcangcaacatnctggccatgctcatccccagagatggctggccccctggcaagatgatttcaagttttggccangctacccctacttgatgccccaggaaatgaagtatcatacttttcctaaaagtgctggcagaataagagtgagcaaatcccttgaagtctcctctaaaaggtgaaaacctccagctatataatgttctgctagtctcaagatcttgaatattagttttaaaagagccccagaaggaagaactattaaattgctcctatagctagatgcagtagctgaatatttcttagagctagcactgaagtccactccctattagactgggctgggtcctgaagcagcatttgctctaggaagtaatgactgagtgatttcaagaaaagattgaaaagctcaaagggtacgtttgccc

SEQ ID NO: 444319 - DNA, 389 bp, Homo Sapiens
  misc_feature (26)..(26): n is a, c, g, or t
  misc_feature (89)..(89): n is a, c, g, or t
gaacagccctggcaaaactccctgtncccccaggcctcccccaaagaacagcgggtcaaaaatactgatctaactcacaatgatgtgangaaacagctaaacaattattaaaaaagcataaaagcactttgcaaatatccaaagtgctattttggcatctatataacaaccagaaaacattcattgtttgtgctatttggcaattttgcatttacacctctccctgactgggctcttctgggtaaagccttgagatttctactgtgcctccacgcgcaggcaaaagacattcttacttagactagatccctcgtcaatatgcatggaagtgggggttaatggaggtcacttacaaatgcaaagtgaaggcaaatgagaccaaggagttc

SEQ ID NO: 444320 - DNA, 1638 bp, Homo Sapiens
  misc_feature (1588)..(1588): n is a, c, g, or t
ttttttttgggcttaatggaattttattttgaaaatatggcaagagtctaaggcacttcaaacatttaaatacatagaggaccaaagtaaatgtgacacggtaaaaaggaatccataaatacaaagagaacactgtgtttctctagaggcaaatacagagccgattcctctaacacaatccaacctttagcattggagttgtgcaattaatacaaatgatgatgttacgtgtagttcttcatggctttagtatggaatacaaaagctgaaaatactgtgtcaagttcatatagataccctttttataaaaagtcatatattacatctacctagttaagaccaaatgagaatattcttttgtaagttttatactttgtctggcccaggcccaagttaccaatgatcaaagtcatctcgacttccttattttaaaataagacaaaagaaaaatccaaaactatgctggaatgagattttggaagaactttctaatggttccacatttagtacatataaatatttgtggaaaaatcttaaaacgtctcagtgagaaccagacaccactttgtgggagtgaacagaaggtgccccttcagatcagaattccctgtgactgtacaaaacggagcagagactcaacagcaacagagactgggttaaagtgtgccctacacagaagacggccagaaaggaggtgcgtgtgcccaggctagcagtctctgcactgtgaaagcttcagcctttacccctgggcttgatgcttctgtttgctggtgagctcaggcacaatacgtatacattcagtatctgtcaccccaacaggaacaattagcagcttaatagtggcatgtaaataaagggctatttgcatacaatcaatcaaatgaacctcggtgggtggggccaggagacgtcttccttccaagcctaggggtgcccggagactgggcttttgcaaagttgacatgggcatacagaagaacagcgatgtccttgtgtcctgcttccagggcgattgagagcgcagtgctgccatcgttgtcctctaggtgaccgttgcagccgggctgggccagcagcagcttgacaatctccacgtgcccgtgctcgctggcacacatgagggccgtggagccctcgtcatcctggatgttgacatcagccccacaggccagaaggcccttcaccatgtctatccgtccgtgactgaccgccagcatgagggccgtctgtcccgcctgactagctttggcattcacatccccacagccgaagagttcttccacaatccgcatgtccttctctgcttccacagcggcgagggccgccaacatgatgggggtgtagcctgccttgttctggtgatccacattacacacatcggcatctaacagcagcttcacaatctcgaagttggagtgggacacgctgtaatggagggctgtgttgccgttgccgtctgccaagttgatgacatagcggaggacatctggggaaatggcctcaaaagcagctatgtagtcccccaccatggctggaatggctgacttctgactggacacgcggaaccactcgtgctggagggtgntcagacagaacctcatatctttgctggtcaaagctttggggttcatttga

SEQ ID NO: 444321 - DNA, 813 bp, Homo Sapiens
  misc_feature (51)..(51): n is a, c, g, or t
  misc_feature (97)..(97): n is a, c, g, or t
aaaccccccagcctgcctccgggcccggggtggtctggaacaggagacccnaccccttcccactgaacacctgtcctctgttaatgggaattggtangaaggcatgttttggagggaccgggtgcctattaggctccctgaagtcactgcattttggccctgtaaggacagcccagggtctactacagggcctcctttgaatttgacagtgcttggtgagatctagcaataaataccttgggtaagtctggagtgatggtttcttacacagtgtaccttctcaatgactggctggggttgtaccaaaaatgaatgaacagatagtgccactagtacctctgatcccttgctcatggtagactcatttgaacattcctttagccacgactctgcacccccaaatgaaaacatattgaatttacattcactgatcattttacactggaccaccgcctccatcgactatgccagtcccagcagctagattatattccatgtgctggtcctgtcttcctccactcctccccgctgcctcttgcatccacagttcatgcttctaccagaccatccctgtcaggggacaggaatttacaggcagtttgcaaagagcatcttcttcagtcagagactctcattgccgtttcctttcagtccccatattcctgaacaggcttggaaacttgacttaaccttgctgggccctcttatttcttcagctcttcaaggagtatggtccaagcaagatcctacgatgtgctgcagagggaggctctctgcctcttgtaaagtaccatgtccccccggcgcctgctg

SEQ ID NO: 444322 - DNA, 417 bp, Homo Sapiens
ggtgtgagcacaatgtaattttatttagaggaattatgttgctgacttggctataacctaagaagatcacaggcagctctgcaattgacagtgatttaaatgttttccatacattatctcctcctgtggatttataagccaaatgatatcaaaatctctatagcttccaacattcatataaatctgcataggtccttggacatcagttctaaataaattttactctataagaagtatttttaacaaaaaatagagctttatgccctatgccattaatgctggacttcctaagtaagcctacatgttgcatcatttcttttgttgttggtgttttttttagaggtggggaactgggcacctctaaaaaatgttacccaggattgcactcaaactcctgggctcaacaatccggccgcc

SEQ ID NO: 444323 - DNA, 880 bp, Homo Sapiens
cggtccggaattcccgggatgggcatgagaccagccaggcactgggaaacaaggtttggtgccagagattttggtggcttccaagactgctttttcagagacaggctcatggacacagcacggattgcagttgtcggggcaggtgtggtggggctctccacggctgtgtgcatctccaaactggtgccccgatgctccgttaccatcatttcagacaagtttactccagataccaccagtgatgtggcagccggaatgcttattcctcacacttatccagatacacccattcacacgcagaagcagtggttcagagaaacctttaatcacctctttgcaattgccaattctgcagaagctggagatgctggtgttcatttggtatcaggttggcagatatttcagagcactccgactgaagaagtgccattctgggctgacgtggttctgggatttcgaaagatgactgaggctgagctgaagaaattcccccagtatgtgtttggtcaggcttttacaaccctgaaatgtgaatgccctgcctacctcccgtggttggagaaaaggataaagggaagtggaggctggacactcactcggcgaatagaagacctgtgggaacttcatccgtcctttgacatcgtggtcaactgttcaggccttggaagcagacagcttgcaggagactcaaagattttccctgtaaggggccaagtcctccaagttcaggctccctgggtggagcattttatccgagatggcagtgggctgacatatattttatcctggtacatcccatgttaaccctaggtggaactaggcaacaagggggactgggaatctgtctccggatgccgaaactagcgaagagattctttcc

SEQ ID NO: 444324 - DNA, 479 bp, Homo Sapiens
  misc_feature (452)..(452): n is a, c, g, or t
  misc_feature (462)..(462): n is a, c, g, or t
gctggtaccggtccggaattccctggatgggcatgagaccagccaggcactgggaaacaaggtttggtgccagagattttggtggcttccaagactgctttttcagagacaggctcatggacacagcacggattgcagttgtcggggcaggtgtggtggggctctccacggctgtgtgcatctccaaactggtgccccgatgctccgttaccatcatttcagacaagtttactccagataccaccagtgatgtggcagccggaatgcttattcctcacacttatccagatacacccattcacacgcagaagcagtggttcagagaaacctttaatcacctctttgcaattgccaattctgcagaagctgggagatgctggtgttcatttgggtatcaggggattaaagggaagtgggaggctggacactcacttcgggcgaataggaagacnttggggaacnttcatcccgtccctttg

SEQ ID NO: 444325 - DNA, 2035 bp, Homo Sapiens
cagattaaaatcaggtttggagttaacagaaaattgcattcctaacttaaaaacttcaacttctctagattcctttagaaaaggaataaatatagtttaaaaaaatgttgctttgggtagaagtcttgattcattgcttcattcttacagctttttctttgcttccttactataaaataatccaatgttattgtgaggacaatctctgattcagttccaatgctcttgtatctccatgagttttggcattgtttaccagcacgtcaataagctcatagtcatctttggcatataagtgtctcagtaggtaccaacgtgcagttgatgcaatagatttgggatacccaggctgatataccactctttccaaaagacgccgtgtctctcttgcccccattttgcgtttgaattgtaacaaagcttgtaaaagaacagccagtggacaaaagcaaagcttcaaggcctcagttgtagcctcttgaaccaaagatggccagtgatcattggaaatgttagccatacagacttttaatgcaagtagtgctagtctcaacagacttgagagcttcccactccaactgccccgttgggatgccaattgtagactctttctgtaacacatctctgcagctctcatcattccttgggattgatacacatgtgccagccactgccaagctggaacagaggttgagttggacatgactgttttttgtagttcttcaagtacagcatctgggagtggcttttgtgactccaggagtggtttacactgaacttgtctcaaaagtaagataacggctggctgatcagggttactttttaaattctttgtgcagagagtttcagcttcagatattcttcctgtgtctattagaccagtgacagcttgtgagagaggccccttttcaaggggactggttgtaattttcaaaggatttttcgtttttaattggagcaggaaacagcagataacagtgccaaggtataaatctatcctctttggctgagtgttgttcactaaggccagtttatcatcagcgtgacaggctgccattagcccagcccagatagcaggatcacctggagaaagggagagctgcctttctgaatggtctttagtgcagtatttttttcatcttctgctgaactgcttcccatagccaactgatttaccgcagtgtacagtaatgccttctttccatgatttgagtccagaatatgagccacatttcctgctacaacacctccctttgcatttcgttgagcatactgtgcaacaactcgagacaacagagaccaaagagcagggtcaccagggttgctgtgaacagctttagatatttgtttttgcacagccacactgcggccttggagtgcataaatcgctgatgtaagaaggcacctctgataattactgtctttgtgtttgatgtgcttcagtaactcattaagtgctgcttttgacagtgtagcatcctgcattgccaaccctagagcacacagggcttgaaggctttctgtggttggttcctttaagatagagcatttaaatagcaatgtcttggctacatccgtttttccttgtttatattcagttattgccagagctgtcaagatatgggctttgtcttgctccgattcaacaatagacaaggctctcctcataggctttgctgctctctttataaagccccttcatgaataaagccaatgcaaaacctatgatgtcttctaacacttcaaggggtgttgacttaaaagcctggatagctttatcatattcaccagtggaacataacaatctgccgtaatttcttattgcaacattgtaagtatcttggtcttctgcagtctgtaacaacaaaattgccctttggtatgcatttgctgcttcctttttcagttgtagatgttcgtttaagtaacccaacattgtgaaagctggggcataattctgaattctttctacatatttattcaaaataacttgtgctgctggaatagcattcatctggaggatgttgtactgtgc

SEQ ID NO: 444326 - DNA, 606 bp, Homo Sapiens
  misc_feature (450)..(450): n is a, c, g, or t
  misc_feature (484)..(484): n is a, c, g, or t
  misc_feature (540)..(540): n is a, c, g, or t
  misc_feature (545)..(545): n is a, c, g, or t
  misc_feature (592)..(592): n is a, c, g, or t
ttttttttcagattaaaatcaggtttggagttaacagaaaattgcattcctaacttaaaaacttcaacttctctagattcctttagaaaaggaataaatatagtttaaaaaaatgttgctttgggtagaagtcttgattcattgcttcattcttacagctttttctttgcttccttactataaaataatccaatgttattgtgaggacaatctctggattcagttccaatgctcttgtatctccatgagttttgggcattgtttaccaggcacggtcaataaggctcataggtcatctttgggcatataaggtgtctcagtaggggtaccaacggtggcaggttggatggcaataggatttgggggatacccggggctggatataccacttttttcccaaaggacgccgtgttcttcttcttggcccccattttggcgttttggattgtnaacaaagggttgttaaagggacagcccgtggggncaaagggcaagttttcagggcctcgttgtagggcttttggaaccaggtgggccgtngttcntggggatgttagggcctacggtttttatggcagtggtgctaggtttnaccggcttgggggt

SEQ ID NO: 444327 - DNA, 916 bp, Homo Sapiens
  misc_feature (873)..(874): n is a, c, g, or t
aaggaaacaggataaatgaaatatggaacttccataaaatagaatactacatagccatatatttttaatttaaaaaataaagttcagaacagtgaacttagacagctgctgtttgcgaaaatactgagcaagaataaagatatacatatttgcttaatacacagtaaacttctctggaaagataaacacaaagctggaagaacggattgcctatgcaagaggaattagcaaaccttgagaaggattgagagtgaggctttcctctgtatacttctttgtgtcttttgaatttcaaaccacattcatatattgcttatttaaataaataaataatatattttaaaaagaggatagtaggaagataagtggagtcagggagtataggcaactcttttgaggagttttatgcaaagctgggcaagtccacctcttccttagctatgtgacccaggcaagttagtaaatgtttctaaaactccattttctcactcttagaattgagatagtaatacctgccacatagaattatcttgaaaaataaggtaagaagacaggtttcagatacttggcacagcaatagcacatagtaagcaccagtgaatgcttagtagtagtagtagtctaattcctaagagtccatggaactctaggttcaaaacccagtttcttctgggaccattagatggcatcagactcaagcaggtgctcctctagctgacagctctaaaacacaaggaagatctttgttttccttattccctagtcctttccccacaaaattctgacaattacgcatttcctgcttgtttcacaattgccatgtggattccaagtggctatccctgggtggaggcataaaggacttgaaactcnnatgctgtttccacatagggccgggcagacaggctatggaggt

SEQ ID NO: 444328 - DNA, 511 bp, Homo Sapiens
  misc_feature (346)..(346): n is a, c, g, or t
  misc_feature (400)..(400): n is a, c, g, or t
  misc_feature (430)..(430): n is a, c, g, or t
  misc_feature (435)..(435): n is a, c, g, or t
  misc_feature (456)..(456): n is a, c, g, or t
  misc_feature (470)..(470): n is a, c, g, or t
  misc_feature (487)..(487): n is a, c, g, or t
  misc_feature (501)..(501): n is a, c, g, or t
gctgactcctacttttccaatttggatgccttttgtttttttctcttgcctgactgcgctgtgggtacttccagtactatgttgaataacagtggtaaaagtgggcatcctcatcttgttccagtccttagaggaaaagctttcaacttttccccattaagtatgctgttagctgtgggtttgtcatagaagacctttattatgttgaggtatgttctttctatgcctagtttgttgaggattttcatcatgaagtgatgctgaattgtattgaatgcagaaatccttgacaaaatactaggcaaatcaaatctaacagggacatcggaaaaggataattacaccnttaatcagggtgggggttttatcccggggggaatgccaagggatggatttccanccattaccaccaaattccaatggaattgtnggttntattccccggttaaaccgganttttggggacccanaacccttttggttcccnccttggttagggtngccggggggg

SEQ ID NO: 444329 - DNA, 426 bp, Homo Sapiens
  misc_feature (113)..(113): n is a, c, g, or t
  misc_feature (116)..(116): n is a, c, g, or t
  misc_feature (132)..(346): n is a, c, g, or t
  misc_feature (395)..(395): n is a, c, g, or t
gctcaatttttcaactagatttgtaatttggcacagtaatgaaatcttaagcccatgcacctattctgggcttcttgtttgtttgttttgagacggagctaggctgcatgcantgngaatggagtggcacannnnnnnnnnnnnnnnnnnnnnnnnnnnnnnnnnnnnnnnnnnnnnnnnnnnnnnnnnnnnnnnnnnnnnnnnnnnnnnnnnnnnnnnnnnnnnnnnnnnnnnnnnnnnnnnnnnnnnnnnnnnnnnnnnnnnnnnnnnnnnnnnnnnnnnnnnnnnnnnnnnnnnnnnnnnnnnnnnnnnnnnnnnnnnnnnnnnnnnnnnnnnnnnnnnnnnnggcgtgacaacttgttgccttgccacctatttttgtttttgaacttcanttttcctaaacaacatcccgaattactgagg

SEQ ID NO: 444330 - DNA, 517 bp, Homo Sapiens
  misc_feature (23)..(23): n is a, c, g, or t
gggtgggggtgggaatcgatccnagaatgtaaacccacattattccttagtcatgaattagttagggggatgtaattgttgtgaacagggggacaataaaaagctggagattaactccttggaagccagttggcaagagttacaaaaacatgcccccaaaatccacacactctgaaagaatatgaagagttgattccatataggtgggtgctgagcatgtaaataaagtgatcccagcagtactaatggaagccctcagacacggaaaagaaccaccacgataagacaatcttcctcaataacatgcctaagactctgcggggatagtcagtggcaaactaatcttcatttcattccatcctttggtctttttgctgaagctgagaactgaggactcaacagctaaaaggcttacttcagaaggacaggagatgaatactgactcacctaacagtgtcagattttgtcagctagtaactttatattttgagctaagcctgccagatacatcttatcc

SEQ ID NO: 444331 - DNA, 423 bp, Homo Sapiens
  misc_feature (27)..(27): n is a, c, g, or t
  misc_feature (46)..(46): n is a, c, g, or t
  misc_feature (69)..(69): n is a, c, g, or t
ggaagacactcaaaccgtaccaaaaanaaatacttttaaaaattanttaaaataaaatgtaaatagtanttttaacccttttccacaaattttagatatgggaagtatgggggagccgtagacaaaatgttcctagagttcattgtcctaatcttcaacactgtgcatttcttacattgccattgtcaaaaactctacccgggtaagtatgactattaattctctcctgcctatttaaatcctctctcaggaaagatataatgggtttttatgtactaacatgtgaagggtatatatttattacataatcacccttaggactatttacacattattgagaaagatgaccctcgttaagctaaaaaagtgatctctactgttgttaccaaataggggctgaaacagctccagtgtgtggctacc

SEQ ID NO: 444332 - DNA, 1005 bp, Homo Sapiens
  misc_feature (861)..(871): n is a, c, g, or t
  misc_feature (967)..(967): n is a, c, g, or t
agaaaagaaagaagagaaagagaaggagggagtgttatttccttgggaacctagggaggagaggttcctttgttgggaaacttttgttgatagctgctgcctttgtcctgatcgttttctttcccttttctctggtggcctgttgtggtgcaacgagctgatggcatttgatcttgccccattcaggttggggagtgaagtgtgaggacccttttcccccgcttgctgtgaaagcacagattcattgactacagtacactgttgttcagaaaagaaggctgcaaatgacttctgagactttatgtcttttcttccagaccaagaccgtaggaaggagtcacatctagccggcttagccaaagtacaggtgtatttgttcagggcacttgatttagatttggagggggtggggtgggcagagcagcaagaggcgagtaaagagaatggtggtttcagagatctctcttcccaaatgtgtaaatattctataccagataagtttaaataagaaatttaattgctgcttaatttttgattatgtactttatctgtatagcaggctttgtcgtcagaagtttttatatcgatttaaattgctgctctttagcagccaaacaggagcaaaatgtaaaatttttgaacttactgtgtctaatcatcatttgttagtctgtagttaatgtcaacagttaatttatgaacccacgatcgttccacactgcaccaaagtcagtcataagaggaaatcgaatattctgggagcactgattgcagcagggtggctcctttgtgtgcagcaggtgtagtagtcttcattttcatgggtacgttttaatattaattacctaagctgccatgcannnnnnnnnnnacagttctcaagggagagcacagaacaatttctcatttcatatttgggagtatgaaagtaggattctattttgtaatgctggataatacctaaagntgcattgaatgcttgggaggaatgctttttgatgttga

SEQ ID NO: 444333 - DNA, 474 bp, Homo Sapiens
  misc_feature (25)..(25): n is a, c, g, or t
  misc_feature (43)..(43): n is a, c, g, or t
  misc_feature (321)..(329): n is a, c, g, or t
  misc_feature (457)..(457): n is a, c, g, or t
ctacgtaatggaacttaaggtatanggaagtaaacccaagagnctcccaagtgcaagatgtcccaggcttggcatgtctgggttgtaagagttcagcagccctggctctacttgtttctctgcttccttttgtggaagttcaaaccagctgactcacagttacagagcgagtctcaagtcatacccttagagaagtgacagcaagaaaaggcttcgttaagtggcctgtatacaaccataaaaaaatacaacaaagagagttgtcccattaatgttcagtaagagacaaagactaaagatggcttatgacataaagtctgnnnnnnnnngaaatattcagttgcttaccaactgctgatacccttgtttctaaataaatctgaattagactccaaaaaagcctcaaaatataaatagttagaaactactgatattcattaagatatttttatggggntccacgtgccaagcttg

SEQ ID NO: 444334 - DNA, 1012 bp, Homo Sapiens
  misc_feature (74)..(109): n is a, c, g, or t
  misc_feature (147)..(451): n is a, c, g, or t
aagtgatcatatataggcctagcgttacgagcgaacgacgagcgcagcgagtctagtgagcgaggaagcggcgnnnnnnnnnnnnnnnnnnnnnnnnnnnnnnnnnnnnagtcgacggtgccggacatatgcccgggaattcggccnnnnnnnnnnnnnnnnnnnnnnnnnnnnnnnnnnnnnnnnnnnnnnnnnnnnnnnnnnnnnnnnnnnnnnnnnnnnnnnnnnnnnnnnnnnnnnnnnnnnnnnnnnnnnnnnnnnnnnnnnnnnnnnnnnnnnnnnnnnnnnnnnnnnnnnnnnnnnnnnnnnnnnnnnnnnnnnnnnnnnnnnnnnnnnnnnnnnnnnnnnnnnnnnnnnnnnnnnnnnnnnnnnnnnnnnnnnnnnnnnnnnnnnnnnnnnnnnnnnnnnnnnnnnnnnnnnnnnnnnnnnnnnnnnnnnnnnnnnnnnnnnnaatatgtggtacagatattgctcttcttcaggtaacatacataaaatccaatgttatatactaaaataataatccacaaatccaaacattgttataattatacaacaggtgactgatagtagataactaggaacagactgcatttgacaagattttctttaataacatcataaacatccctaatatgatgaaagaccaagagctataatcaagatgaatatgccaaaacagccaaggagctagtagctagtcttcagacaggctacgagtttgttttataggaccactccgcccttgggtctggtgacactttaagttttctaggcaggagtgaaaaggagttaataatgccaattccaggtataaatacaaatgagaggcacatagtagtaggcataaccaaaatccaggccaaatttttggctcaaaggtgatctgcaatagttccatgatcagttatttataatttcagcttactataaagttgacttccaggttaaaggcaaattttcctttcacattacctcataaaagccatttaagggctgggtgccgtgctca

SEQ ID NO: 444335 - DNA, 424 bp, Homo Sapiens
  misc_feature (27)..(27): n is a, c, g, or t
  misc_feature (42)..(42): n is a, c, g, or t
  misc_feature (50)..(50): n is a, c, g, or t
  misc_feature (73)..(73): n is a, c, g, or t
  misc_feature (96)..(96): n is a, c, g, or t
  misc_feature (132)..(132): n is a, c, g, or t
  misc_feature (188)..(188): n is a, c, g, or t
taaccttccataaaacatccccctaantatggttggaaaagncccaagancctaataatccaaagatgaaatnatgccccaaaaacagcccaaggnagcttagtagcctagtccttccagacaggcctacgnagtttgtttttataggacccactccgcccttgggtctggtgacactttaagttttnctaggcaggagtgaaaaggagttaataatgccaattcccaggtataaatacaaatgagaggcacatagtagtaggcataaccaaaatccaggccaaatttttggctcaaaggtgatctgcaatagttccatgatcagttatttataatttcagcttactataaagttgacttccaggtcaaaggcaaattttcctttcacattacctcataaaagccatttaagggctgggtgcgc

SEQ ID NO: 444336 - DNA, 509 bp, Homo Sapiens
  misc_feature (45)..(45): n is a, c, g, or t
  misc_feature (58)..(71): n is a, c, g, or t
  misc_feature (151)..(151): n is a, c, g, or t
  misc_feature (175)..(175): n is a, c, g, or t
acccctttaatccttttctttgcatattcaaaccttctccaactngctcccttcaacnnnnnnnnnnnnnncaaacctcacctggctcaaggcaatcccctgggctggctgcagggccggggtgtgtggagcacgaactgccggactccgncaggtggaagcggaaggcccccancggtagcctcccgtgaagtctgaggtggaagaaggaggagtgaggagtgcaggggcctcaggtacccctcccctagttcccagtcccctgcccttgaatggtcccaggctgcccctgcctcattagaagggaaaaaggggtggagatgtggtatgaggatttagggccctggggacagacgtgaacaggtgagaggaagtcaggacaggtgcagctagaccccgggagatcccccagccagccccgctgtggacaggtgtgtgcaggccgcgtcacctccattgcggttgcaggcggggaaggtcttgcagggaatgggcaggccggtgcgggc

SEQ ID NO: 444337 - DNA, 398 bp, Homo Sapiens
  misc_feature (313)..(313): n is a, c, g, or t
  misc_feature (374)..(374): n is a, c, g, or t
  misc_feature (383)..(383): n is a, c, g, or t
gctccgctcgcgctctcttttcctgatttcttctccccacgacagctggagggatttctttaacacttaaattggttcctgtttctgtcctacctaaaaacctattgtgactgtttattgctcttagacaaatcaaactccttctcatggtttaaaaggcagtacgtaaactagctcgtgtcagcctgactttccagtgtccttcctgccagtcccacctcattgcctagcaggtactcttgtctccgtccatcgtctccacaggcctgctccgttgagctctttctgtccctgcatgaggcttggaaatctntccggtgctacctacttcactgtcatctatgtcccaactcattgtctccttcttagagganttcttgagnactgccactcgtatt

SEQ ID NO: 444338 - DNA, 488 bp, Homo Sapiens
  misc_feature (147)..(189): n is a, c, g, or t
attatatatggaaaaagtattatatttattattagagaagttaatatgaatatatgaaggtaaccctgctcattatgaacatgcgactctctggaatatataaagatttgtaaaaagtttcaagaaatggtcaactttataaatgtnnnnnnnnnnnnnnnnnnnnnnnnnnnnnnnnnnnnnnnnnnnattggaagaaaacagattaaaatgataaaacccagtgctagtaaattacaatgaaacagatatatttatatattcctgttgacaatgtaagttattaaaatgttttaagataattatttagccttttattaacaagcaacaaatgcccagcaaatccagtcattgtacatgtaagcaattgttgtcaagggagaaaaaataaatcataatcttcaacttagtaattctctactcttgcaataaatattgaagtaagtcaaatatttaagaagaaaggaagtaaattaaagcatgtaaaa

SEQ ID NO: 444339 - DNA, 463 bp, Homo Sapiens
  misc_feature (20)..(20): n is a, c, g, or t
  misc_feature (26)..(26): n is a, c, g, or t
ccatactttaagaatacatnaaaaanttaaaaacaaagctcccatgttgtcctttaatgtagttcctaatagaattccctagcctttttaaatttaagttacttccaagagctgatccatgttttctgtgttagaaatttgacaccctggttggagagagaggggcccagctgagtggtgggcagaagcagaggatcgccattgcacgtgccctggttcgcaaccccaagatccttctgctggatgaggccacgtcagcattggacacagaaagtgaagctgaggtacaggcagctctggataaggtcagtagactctaaaaagctgaaggaccaccacattgaaacctattgaagattcttgccagtgcttccggagtctgggctgagaaacagaaacatagcaaatggagctacctcatggagctgtattgatttctcctttctgtcaggttacattgtcc

SEQ ID NO: 444340 - DNA, 417 bp, Homo Sapiens
attcccataggtttttggggaacaggtggtgtttgattacatgaataaattctttagtgttgatttcttagattttggtgcatccatcacctgagtagtatacactgtacccagtttgtagtcctttatccctcacccccctcccaccctttcccaccgagtttccaaagtccattgcatcattcttacgactttgcatccttgtagcttagctcccacttatgagtgagagcatacaatgtttgattttccattcctggggttactttacttaggaataatggtctccaattccatccagggtaactgcaaatgccattatttaattctttttcatggcaataaatatttttgaggaaattgaatatgaatgtgaaatttggaccccgggataatccttaaaattggtgggattta

SEQ ID NO: 444341 - DNA, 472 bp, Homo Sapiens
  misc_feature (23)..(23): n is a, c, g, or t
  misc_feature (408)..(408): n is a, c, g, or t
atatgtagagcacaaatgtcagnacttgtttagggaatagaaagaatttttgtttggtttcagagtggagtgcttagagttactgtgacagataaaactggagaaatacatcagaccaggtcctaatgccacaccaagtaaggagttctgtgttctggtgacttcataacagattgaattctgcgaaatcacagaggtttgcactagttaagccaaatgggagaactgaacaagatgcatggatgtatttagatgactagcaactcaacagaagagactagagctagcctctggtttcaactgagtttcagaggagaaatatctgggccaacctgactaggatgctagcaaacttttggaattcagccattattaatttatcttgttaaatgtggactattttagganaaaaccaaaattacctttgtgggaggagcaccacacatttaacttcctttcggttttggctttg

SEQ ID NO: 444342 - DNA, 466 bp, Homo Sapiens
  misc_feature (151)..(257): n is a, c, g, or t
  misc_feature (400)..(400): n is a, c, g, or t
  misc_feature (413)..(413): n is a, c, g, or t
  misc_feature (426)..(426): n is a, c, g, or t
aaagacaggatctcacccagaatagagtacagtacaagattatagctcactgcagcctcaaactcccggactcaagcgattctctctcctcagcctcccaaacagttgggaccacaggcatgtgtgaccacactcagccaatctttcaaannnnnnnnnnnnnnnnnnnnnnnnnnnnnnnnnnnnnnnnnnnnnnnnnnnnnnnnnnnnnnnnnnnnnnnnnnnnnnnnnnnnnnnnnnnnnnnnnnnnnnnnnnngtgttagccaccacatccggccatcattcttgaagaaacaaaactgaagctaactagtaactagttaaccctacccaggctccaaatccagggactacgatttcttcccaagtgacgcaagcaggccagcattttttcacctnctacccttaggtntgtgtttgcaganttttttttccggggaagttttaggtaggtgagagaattga

SEQ ID NO: 444343 - DNA, 475 bp, Homo Sapiens
  misc_feature (14)..(14): n is a, c, g, or t
  misc_feature (144)..(144): n is a, c, g, or t
  misc_feature (220)..(232): n is a, c, g, or t
atgcctacaaaatncctatcctaaaatgcccggtttacaacacaaaatccatggggcatgccaaataaacagaaaagtatgacacacagaaagaagggaaaagcaggcagcagaaattgtcccttgaaggcccagatgtcagancttagtagacaagacagcaaagcagctattataaatatgttcaaagaacttaaagactgaattctagcactctggnnnnnnnnnnnnngaactaaaggaaatcatgcttaaaataccaaaaatccaaatcgattttacaagttaaggaacacctccaaatttgctcatgcacagctgatgagaagtcaggactcccaactgagcctcaggctctgttcaccattccaggctattttctttgacaatgtattgtgtagtaatccaaagactggtcgagggaatttggtttttgccataaaggtcatggggagacattaaagctttctgtacc

SEQ ID NO: 444344 - DNA, 350 bp, Homo Sapiens
  misc_feature (21)..(21): n is a, c, g, or t
  misc_feature (32)..(32): n is a, c, g, or t
  misc_feature (74)..(74): n is a, c, g, or t
  misc_feature (204)..(204): n is a, c, g, or t
  misc_feature (215)..(215): n is a, c, g, or t
gctgctctcgaaatcccctgncctcatgtganacttctcgcctcggccctcgcaaacgtgctgggattaacagncgtgaagccagcatcccctggcccactaatttttataatttttaagtaagaagattgggtttcgcccacgttaacccgggcctggtcctcgaaacttctgaacctcccagtgatcccacctgccctcagncctccccaaantgctgggagcccactgtccccggcctcgtctcctactttctttgctccaaggtaggattagaagtagaaactggagccaggagctatagtgccagctacccgggaggctgaggtgggataattacttgaacctta

SEQ ID NO: 444345 - DNA, 507 bp, Homo Sapiens
  misc_feature (484)..(484): n is a, c, g, or t
gtacaggttgattcacagtgggagagagccatgtccagaattttttcctgatagcctgaattttcttcttgtctttcatgtctttgcttctatttatgttctttgtacctcttcttccttgaacttggatcttctgcatagttgactctattatatcatctttggggctgcagaataaaatgtggaagattttaaagttaaggttcccagaataatgttgtcgcccacattgcacatatgtcacattttgagtttactagttaagcctctaaatatgcactttatatacaatatgcgcagtgcgatgatttaggtttgccatgagaacctaaaaattttaaggcttaaatggttcggtaacagacactttaaaattatcttaggatgaaggctaattttttcttttatatactctttacaaactgagggcataagggcaatagctgttctccatataggtacttctgcctgacagggttggggngggcttctttggtttggcctacc

SEQ ID NO: 444346 - DNA, 305 bp, Homo Sapiens
tgaaccaccgcacccagtctctatttagtttttgggatcttccccccatcatttgcagctgaactgatcttaactctctggcctgcccaactgaattgttaatgctgctgcagctctgaatgggtgctagtttgggcatgccagtttgggcatgtggtgtacaggtgggggcaagtatatgtcagaatcctgagatggagtccctcaaatacacagcagaccactatcactggcaacccagcacttacacaagtgattaaatcccaaaaacattaggccattaaaggaggattcaggggttttgg

SEQ ID NO: 444347 - DNA, 449 bp, Homo Sapiens
ttttttttcagaccagctagatatttttattaatgatatataacctctttaaaacatgtatatttaccaaaagcattctgatatggcattcctctagtgtgactttttgcatgtaaattaatacagcctttttgaccttccatacagtcaggttcctcttcagtgtggatgtttcctaacgaccaagttcaagggctttccaacatctctttcactcatgggacttctcaatgtgtgctttgacatgttcccaaagtggaagctaaaaacaaagaagaatctccacacattttacattcataagatttttcacacttgtgagatcacagctgaatattaaggtattaggcagagcgaaaggtttcaacacattccttacagccagaggacgtgcatttatatccactgtgctcacaagctcagtaaggcccgaggaaaataatgaaagc

SEQ ID NO: 444348 - DNA, 410 bp, Homo Sapiens
  misc_feature (358)..(358): n is a, c, g, or t
  misc_feature (396)..(396): n is a, c, g, or t
cctaaatgaagggcgttttaatggagacacatcagaagaagttagggaaggtttggcacggcggcacgtctcaagcagccggctgccacagggccctcagcccacccttcccagtggtcacccctccttcctgtgctgggctgcaggcctgtccacccatgagtcagtgttcctgtttcccagttccacagaccatgggtccccaccacctcagcggaacagcagggtggcaagggtgtgggcaccagaggagccactgggttgcaggaggacagccctttgggaacattgaaccaagttttattgcgcccattttcggagcccacagccacagggccatgtattttccaaggttttntgggattaactcctgatgattttttaaagatttccttntgggtgggttttca

SEQ ID NO: 444349 - DNA, 976 bp, Homo Sapiens
  misc_feature (61)..(69): n is a, c, g, or t
  misc_feature (108)..(182): n is a, c, g, or t
  misc_feature (229)..(267): n is a, c, g, or t
  misc_feature (279)..(288): n is a, c, g, or t
  misc_feature (290)..(301): n is a, c, g, or t
  misc_feature (329)..(359): n is a, c, g, or t
  misc_feature (396)..(404): n is a, c, g, or t
gcaagcagcaggattcctggcagaaaaaaaaggatttccaggaagattcttttggatcacnnnnnnnnnggccgctcattaggcgggtttaatttccgggtactgcannnnnnnnnnnnnnnnnnnnnnnnnnnnnnnnnnnnnnnnnnnnnnnnnnnnnnnnnnnnnnnnnnnnnnnnnnnaccactttgtacaagaaagctgggtcaggaaacagctatgaccatgnnnnnnnnnnnnnnnnnnnnnnnnnnnnnnnnnnnnnnngctccgagtttnnnnnnnnnntnnnnnnnnnnnnttatgtgaacggaaacacatttattacnnnnnnnnnnnnnnnnnnnnnnnnnnnnnnnttcacattgtattgagctacaatatggcagcagattnnnnnnnnntatttttacacagtttaaggtaactcctaacagaacatagccttgttgccacgagacaggacacaggattccaagtactcagtagcggcgagtgaagcgggcatcgctgggcctgctcccccggctctggcctccaaacccgccctgcatgccaccgtgtgggatggggtggccccgggaggccccgcctggggcaaaggtgccgcgccctgacattcctcctcggttcatcatgtggccaggcccggagtgaccggacatgcttctctcgccaccttgccacctcttgtgatccctgtccatcatgcccccgtcggccgtgccctgccatgaccggtcatcctctcttcggccatggtccccccagtcacgtctgcccctggggggaggaggcagcccccggccctcgctcatcctcttgtcagagccatagcccccccagccatcgcgggagtcccggccgtggcgctctggtcctccatggcgttctgggtaatgctgtccttctcgttctcccatcattgaccttgaaccttctctcctgtccaccgagtggtcggggtagcggccgc

SEQ ID NO: 444350 - DNA, 1249 bp, Homo Sapiens
  misc_feature (828)..(829): n is a, c, g, or t
  misc_feature (1009)..(1018): n is a, c, g, or t
aaagctacctcactagcttttgtgaaagtcaggctggaaagtgcttccagccacagaaataggctgtgggtgtaaatattaaccttggccatcaaataagtaggcatagagtgtgactcgccctctcttggtcttccctgaaacagcagggtcaagaactcctgggtctgtgttagccacgtggcttacaaaaacaatgacacagaagagggaaaggtgggactagccaagtggaaggccagccgtttatctctcagtgtcctgtgtcttatatcctgagcagagcaaggtgcaagaccctggactgggcatccagcagaaacttccgagaaacttgactgtgaggaaggatgcttgcctagcaattggtcggatgaagggctccatttgatacttccttcactgtggaaggaagaaatttgtaaaaattatttccagaatatgcacacattaaaggtttataaacctgacctttctttagtagaagacagtaagagaatactgttggctctgggaactaaccatttgagctgtgggacccagggaatctctcttgtaagcatcatctttagtgggtgactcctggtggccctcccagctctggtggtgctgtggggacctgccttggagatgccttggtactagtaccttttttgtaccaggccatgagcctagggcacagggcctctggtctgcagatttcaggaaggcagctgtgttgtgtgaaccgatacagcctgccagcacttctgtcccgagtgactgtcgttgtcatcgttagcatgttgcctgaaaagccttggggtcttggcgctgacactgaagctnntttttttcccttctgggtctgtgatgtccagcattacccagaacgccatggaggaccagagcgccacggccgggacttccgcgatggttgggggggctatggctctgacaagaggatgagcgagggccgggggctgcctcctccccccaggtttgtgtcccacacccgacagtacctgannnnnnnnnngcccacaagggggcccgcaagtcgctgggatgtgggcacagggtgggaaacacagagggattcactctccagaagccgccacagttattagcacaagagccagagatgggggcaatccaaatcagagatgtctctctttcaaggggcagacgtgactggggggaccatggccgaagagaggatgaccggtcatggcagggcacggccgacgatcccgggaattccggaccc

SEQ ID NO: 444351 - DNA, 1020 bp, Homo Sapiens
  misc_feature (143)..(261): n is a, c, g, or t
ggggggattccaacccttttccttgcccgggttttcttgggaaccaggttttgcccaggttcctttccttattggggcccgggcgcccaaaaagaaggtgttttaaaaaattttttgggggccgcggggcgggcgagcaaagnnnnnnnnnnnnnnnnnnnnnnnnnnnnnnnnnnnnnnnnnnnnnnnnnnnnnnnnnnnnnnnnnnnnnnnnnnnnnnnnnnnnnnnnnnnnnnnnnnnnnnnnnnnnnnnnnnnnnnngagccggaaggtctgggtgtcatttattgacagcagtttatacacatttgtttccttcccagtgcaggcatagagcccgtgagaagggcagtctctgaacgagggggccaggaacgtaggtcggacacgtctttggcaggcatgttcagccccagcaggatgcaatccttcaagttggaattccactgggtatctgagagggaccaaggtggggggtagagaggaagtcttcaacaggactcacatctcggtccaggcctcctctctcactatacaagtccatccaagttttaggaccctggggggcaacagtcaggcccacccacctcaacaggggcagattcttcaatctgtgcccagttcacacacacctgtttccgctggtcacacagttaaagagaatcagacttatggtaacagacagaccacttcctctctgcccctccccggcacctctcttcagcagcatctgcacaggaaccgctgggaagacggagggctggcttctcagttcaggcgcacatggcctcatccgcaaaccttccatcattgacaggacgggggccacacgtggatctaggcagacacctgtgtctccccagtccatcgacatactgccccgcctgcgtgctgccaaatgctggtgcccaggccggaactccagcaggccccgaattgggacctaaaagctggtttgcataggcacttggcaagttatggtaggaggtggattgaaacagtagatggatgtgagcaaga

SEQ ID NO: 444352 - DNA, 1203 bp, Homo Sapiens
gcgttttttgttcagtgtgctaaaaattgttttgttttgagtaaaggaaaaagatatataaggttaaaaatcccaagtcaccacagccagaaaacagacgtaggaggtgcctcatagctgccatgcccctaccacatgtgtcagcaggaagtcaggcttttctttcaaggccaagacactagaacagtgctgagcagggtaggtcaggaggcatttactctcatgggcattgcgttgcaggctcactcacccagacagcaggagaaacaggccatggaagacaacacgtggtctacagactcataagtagttctctgcctctccagttttaagatggccataagcatggccaccctcacccacaagaaggtcagaggtaggtagagaggagggagctgacacacaggcacccaggacaccctgcttcagggctcagcatggaggtggcacaaggcctgaggagttgcacatagcacgcattgagcaatactcctctctggcctcctgtctgatttaggggcagaaggagaatgtaggagaggcaatgttggtggggagggggcggggcctgacattcatttttgggactgaatcaggcaatcaggactctgctgatttcttcagctgccaaatcaggagatctgaggttggcttttgggctttgctctgtacaaacacagggagtggtcggctgcatttttctcaagctctgtacccaggaaggggcggcaagagcaccacacagcttagtctgtctgtcaacagccggcccttccacccgtgctccccacctgactccccatggacatgcgggggcttgctctcccccatcccctatttcccccatctccctactcttttgcctactttcccagaaccaagaaatactggtatttcccactggaaccaacccagatttccctgggacacagtgaaggcacatggcactgctgtccctctgctgcttaactcaggagcctagtctacaacatcaaaggcaaagtctgatgacccacccttcctcccttgatggacatctttggattattaggtaacttctgtgtgtatcaaatgactctagtagtttaaaaaacttttaagtaaggcagtatgaaataccttacaactcaggacaggctctgagatgagagaaatataagatcaaaagatttaggcaagcaaaagcatagttttaataaaaac

SEQ ID NO: 444353 - DNA, 801 bp, Homo Sapiens
  misc_feature (351)..(371): n is a, c, g, or t
ttagcattttatgacttttattttacatgtcgccaacgtttgtacaacatacagtggctacatctaaaactttgagcatttttttatggcgcaaagagacagaaaggttaatgacacacttaactgttacagtgactttgggtagggccctaaagacagcacacgctccagagggcgggctgagtgttgttcacacttgggtcctgaatcgctgttgtaaggtacagagacacactttaactggggaatggggtccccacacagtgatcgccccacgggaggggtgacagaatatgccaggaattgtcttggacatgggccccagtcaccacaatcagatggcttatttgnnnnnnnnnnnnnnnnnnnnnccttgattgcgacacaccaaagctgttccaatttgtaaaaaactgtagttattacattgcaatgaaatctctttaccaaatcttgggccagtgttttacctggatagtgcttacattataaatattggtttttgcccttagtgctaacataagaaaaatcagttccttgtatactcaataacagagcttggaccagccaatgctgtctattcactcatggctataatgcagccgacagaattgttcaccatggaatgttttataaacctgttcatattccagagagacaaagactcaaaactacaagtgcaaagttgggtagagagagctgccagaaacactagctcattaggcatagaggccacagcaaatcacattgttccacaaactcattcttcacacaaacatttaaaacactatgcagccaggt

SEQ ID NO: 444354 - DNA, 631 bp, Homo Sapiens
  misc_feature (18)..(18): n is a, c, g, or t
  misc_feature (69)..(69): n is a, c, g, or t
  misc_feature (109)..(109): n is a, c, g, or t
  misc_feature (154)..(154): n is a, c, g, or t
  misc_feature (161)..(399): n is a, c, g, or t
  misc_feature (418)..(431): n is a, c, g, or t
cgttgtgaacaaagtatnggcaatctgaacccacaaccttttaaaccttgttaaagttacaactccctngaaatgtcatatttaaactccggtccttggtaaaactttncttgccaaacgggttgaaacctgagctgaaccgtggtgcctcagncctgtannnnnnnnnnnnnnnnnnnnnnnnnnnnnnnnnnnnnnnnnnnnnnnnnnnnnnnnnnnnnnnnnnnnnnnnnnnnnnnnnnnnnnnnnnnnnnnnnnnnnnnnnnnnnnnnnnnnnnnnnnnnnnnnnnnnnnnnnnnnnnnnnnnnnnnnnnnnnnnnnnnnnnnnnnnnnnnnnnnnnnnnnnnnnnnnnnnnnnnnnnnnnnnnnnnnnnnnnnnnnnnnnnnnnnnnnnnnnnnagagcgaaactccatctcnnnnnnnnnnnnnnggaagatgaagctgaccatatagaacttattaagataattttgtaaaggacaaagattttcaagaggatgaaattttaaattgagagaatattttgaaactttactatttagaaacatagttgcctatttaatgaagctgaaaagaacgtgtatcatctggaaactctggtcatggtctccattttgagatgaacttcac

SEQ ID NO: 444355 - DNA, 853 bp, Homo Sapiens
tgagccaccgcacccggcctcttttacttcgcttaaatgtccaattttagtagtaaaatcccggaaaatgtttttaggagtatgtttaactgaaaagctcatattttctttcatttttgggcaattcttaaggtaagcaaactaatgttgcatgataaagcccccatcaagtatctcatacttaagcaaagacctcaaatcattgtggctttattgcagctttccttcaaaatatcatctgtgactgaggaaatccctatcttcctatcagactaatgaaaccacaggacagcaattagacttttaagtattggggggtttagagctctagatattcgatatgcagactactcatgtttgtttgttttaataaagactggtccaaaggctcattttcacacaagctacagtttttcagttccaggaccaggtaaagatggtcagctccgtgatccataaaatccaagggtgacgactcaggattaggaccatttcttggtgacattgagatggtcgagctggtccgcaatgaatctatgcggggggaacttggaagtggcggccgcctttatggcctcgaaggcctccctcctgcgcaccgcggcgtggccgcgctcctgctcccgggtcatgtagggcatgctcagccagtaatggttctccgcctcgatctccaggcggcggatcatgttctgcttggcgcgcaacgacacgaaccgcggccgccggtgcttcccgatccactgacggccgggaatgcggccgcgccagaggagcgcagtcaggaacatggtgcctgccgcgctgctcaagactctgcgtctccgcggccgccagcagacgccgtggcgta

SEQ ID NO: 444356 - DNA, 323 bp, Homo Sapiens
ccagcatcctggatggcatttctagacctgccctggtccagagagctgatcgccttgaagggtgagtcccagtcctggcagccacaagctgactgaagagcttttaggccttaagtgaacactggcaggagcttggcagtactccctatgggcccgtggtggtggccatggtgtgatgttcctctatctgtggaaaggggaccgaagagtgagaagcactatgtcatatggctttattgccagcccagccacagcagactagaacaccgagtagacttctaaagtttttgactccagtccctggctcccagatggcatctccc

SEQ ID NO: 444357 - DNA, 782 bp, Homo Sapiens
tggtgactggaaggtgaggaggacgactgtacctgctggatccggaacacgcgcaccccgaggaccctgagtgcgtgctgccgcaggaggcctttccgctgcgccacgagatcgtggacacgcctcccgggcccgagcacctgcaggacaaggccgactccccgcacgtgagcggcagcgaggcggatgtggcctccctggcccccgtggactcctccttctcgctcctgtctgtctcacacgcgctctacgacagccgcctgccgcccgacttcttcggcgtgctggtgcgcgacatgctgcacttctacgctgagcagggcgacgtgcagatggctgtgtctgtgctcatcgtcctgggtgaacgggtgcgcaaggacatcgacgagcagacccaggagcactggtacacttcctacatcgacctgctgcagcgcttccgcctctggaacgtgtccaacgaggtggtcaagctgagcaccagccgcgccgtcagctgcctcaaccaggcctccaccaccctgcacgtcaactgcagccactgcaagcggcccatgagcagccggggctgggtctgcgacaggtgccaccgctgcgccagcatgtgtgccgtctgccaccacgtagtcaagggtctcttcgtgtggtgccagggctgcagccacggcggccacctgcagcacatcatgaagtggctggaaggcagctcccactgtcccgcaggctgcggccacctctgcgagtactcctgacggggcatctgctgggcttgcccggggggc

SEQ ID NO: 444358 - DNA, 366 bp, Homo Sapiens
  misc_feature (303)..(303): n is a, c, g, or t
  misc_feature (349)..(349): n is a, c, g, or t
ggcatgctgacgtttgttttttatttggtaaaaacctcaaaatagtcaatgaagagtagagagagtgtagtttaattaggtagagattcgtgataggaagtggactgcagcagaggcgacatgaaattatctggggaagccagatgaagcctttccgaaaggaagacgagcatttgttaccttacatgttcattcatcaaattcactgagctccccttgagatccaaacacggtgccggacactaaggatacacagttaatttcagcatcgcctcccgttttccaaactctggcaccccaggnaggataagcacagcattccaccgagattaagagtccccggtggagntcacggtccatcgtgca

SEQ ID NO: 444359 - DNA, 403 bp, Homo Sapiens
tcaagcagaagattctttttatcaaatgaaatcttaagcagaatcccagcatataaaacagaatggaattactttgatctgattgaagtgggggctggtttcagagatcataggccatcttcttggcctgtcatggaggcctgtgaggcatctctacagaccctggtactctgtgaagagtttggaaattactgatctactttaacccccaaatctctaagctgaaaagtacaaaggggcccagagagttagataaatttcccaaggctgtgtggtaaacccacgtctccagtgtcccgggccagcaggcttttccctcaattgccttcctttttcagcaaaataagactaggagcttggccaggtgcagtggcttatcctgtaatcctaggcactttaggga

SEQ ID NO: 444360 - DNA, 461 bp, Homo Sapiens
ttgatattcaatatagcatctttattaccacagaaactcatttatgtccttaatcattgtttaatataatatataagcatgtttaacacaaacatatcaaggatcgggctggaatcttttccattctatagaaaagcactaaccatccattaaagcaggtagctactttcagagcatgatatgagctgcaaaaaattgccctgacttatgccgcccccaacacaaccactcaccatatctaaaattacacccttgaagacattcattgtggttatggtagcatctaacaaagctgttcctattccagatattcggactgagaattccacaataaatttgagatacactcagttaaataaaaatgtctttactaaatctttgggcaaactggatccatgtatactttgaattcctcaaaagtagatttttattttattttatttgagactgagtttcactct

SEQ ID NO: 444361 - DNA, 367 bp, Homo Sapiens
  misc_feature (228)..(228): n is a, c, g, or t
tggtatttaaaatgttttaatgtatatgtgttatgggtcataggtactcattagtatgcttcataatttattcacgttagatatactctttatagatatcaaatattacatattataatttcttaaaatctgctgtggtggaaataaatgaacacatgaagtctccctgaaagaaaatcagtgtttcttgggaagaaccaagattccctgacagaagctaccctatgntagaggacaaagtaggtcttcaataaatattagtttggtttactggcttttcccaaggatacatctggagggtctgcattccctttctcactggtgccgcctggaccacaggaactagcctttcttccgcgacaatctt

SEQ ID NO: 444362 - DNA, 1064 bp, Homo Sapiens
  misc_feature (158)..(193): n is a, c, g, or t
cctagagaagagacgaaggtgattcagggccgagcagggctccctggaagccccctcttcctgccccaactttattttggttctagaatcattccagttggcatacccggtccccaccacggctgtcctgggcacacagttaacatgtcatgcagttnnnnnnnnnnnnnnnnnnnnnnnnnnnnnnnnnnnntcagtggcctgcaccgcacagccactgggttagagaaagtcggggtctcccaggctgcaaagccttgtccagccatgtgtctcctggccctgggctgacctcctgctgtggccatagggtagacagcctggccttggggctgggccatggctgtgtcagttagggaaagccaccatcctgcctccagtcccctgggcccttgttctagcccctcctccccccatatcactggggataatttgttggcctgggtctccacagctcaccagttatggaccaaggaacagggcagccagcctgagggtccatgctgtcacctgtgggtggccccaccgagcaagatgataccccaacctgctggcctgggtgagctcagcccttcccagcactcagccatgaaggcaagaagcggcttcctgggactgcgggacaccaggctggggatgacaagctctgcctgctctcctcctactggggctgtggggtaaccaaagactgatgccagtagaggtgcaacagcccagcccctctgcttctgggtgggagcccccagggtgcccctcgtactccaggcccctgcccccacagcgatcaggccaaggcgatggatcttgaagccacacttgcgtggcttcctccatccagcctgagctccctttcttgatctggtaagtttctctgagaacactcacccgcaagaaactacttgccccagaatccccctctcagatttcgcttctagggaactcaagctaggagacccggtgtcgggggcacccaccccgtgatcgagagccgcctccttcctagcctggcattcagtcttctcctggcgtccctcaagccgcccttccaccctgccttccccggc

SEQ ID NO: 444363 - DNA, 427 bp, Homo Sapiens
  misc_feature (381)..(381): n is a, c, g, or t
  misc_feature (409)..(409): n is a, c, g, or t
aaaaccatttatttggaaggttgtctctagtatgaatactctttccattttgatgttcgggtaaaaaccttagcatgcacattacatttctgtggttcctctcaaagatgtatattctgatgcctagtgagttccaatgcctggggaaagcctctgacacatacatttatatgatttcctttcagtataaactctcttatgacaagtagtgattgaactctagtaaaggttttgccaccctcatttcatttcatacatctatgcccttttaattacctaggatttacaagttctgggcttttgagtagaattcttgccacacgtattacacttctgtgatttttctccggggtgtatacatccgggaattatatatacaanttcttacacccagtgagtagtggaatantaggctaaaacctagggg

SEQ ID NO: 444364 - DNA, 501 bp, Homo Sapiens
  misc_feature (21)..(21): n is a, c, g, or t
  misc_feature (29)..(29): n is a, c, g, or t
  misc_feature (57)..(57): n is a, c, g, or t
  misc_feature (104)..(104): n is a, c, g, or t
ggggaatctccgggtgaactnaacaagangtggaactaagcccgggaaaaacctggncccaacaatccaaccaacaattaaaaagggtttcctttccctgccanggaattaacctgatgtgccagtgaaggtttggagctccgtttaaaaggttttgcccacactcattacatttgtaaggtctgtctccagtatgaacagtctgatgaagtctaagatggacacgctgactaaaggaattcccacactgattgcatttgtaaggtttctctccggtatgaattctctgatgtctattgagtgtggagccctgattaaaggctttgccacattcatgacatttgtatggtttctctccagtatgaactcttcgatgccctacaagatgtgaatactgactgtagaccttgccgcattcattgcatttgtaaggtttctctccactatgaattctcagatgcactgtaagacgtgaacattgactgaagaccttgccacatt

SEQ ID NO: 444365 - DNA, 348 bp, Homo Sapiens
  misc_feature (333)..(333): n is a, c, g, or t
gtctgtcctgaaggagggctttatgagtgtagcaaatgtgagaaagccttcacttgcaagaacacacttgttcagcaccagcaaattcacactggacaaaagatgtttgagtgtagtgaatgtgaggaatcctttagcaaaaagtgccacctaatcttacacaagataattcacactggagaaaggccttatgaatgcagtgatcgtgagaaagcctttatccataaatctgatttcattcaccaccagagacgtcacactggaggagtgcgtcatgagtgtggtgaatgtaggaaaacctttagctacaaatctaacctcatttgaacacangtgagttcacactgg

SEQ ID NO: 444366 - DNA, 554 bp, Homo Sapiens
  misc_feature (76)..(76): n is a, c, g, or t
  misc_feature (140)..(140): n is a, c, g, or t
gaaaaagccttatgaatcaagtgaatggggaaatcctttagccgcaaatctaacctcatcgacacggagagtccanctgaaaaaaggccttaatgtgaaggaatgtgctattcctttaatcagtataatagcactggagnagactgtggtagccatctccgtaaatttaaactttgagcacccacagtggggtattcttcataagtttcaggtatgtgggaagctctgaggaggttcattgtaatttctaatctgccgaggcctatagcctgatttatgtcactgccaatttctgaggctgaagccatttcacatttcacccctaccacctggcaggtgcacaccatgtgcatgagtcacttccccacagtgctcagagaagcaaacctctgtactctcccatttgcttggggaaattattaataggccaagcatgtagggtcttcatgtcttttctctgactttagagtatacacctgacccagttgtggtccagagaatctgagttgtgctgtcagctttctaaggattacttttttaaggaacattgtcgc

SEQ ID NO: 444367 - DNA, 996 bp, Homo Sapiens
gccacttccaagagtgtgtttataaaaaaacagcaacggagtacagtgctgaccccacagagtcttccaggccagcaggagcagcaggccccgattcccggctccctgtggcccagggtgcgtgagtctgggactcctggccctccaggcccctcctctcccagagaccctgatgcagcttgtgggctggaccctggagcccagctgcaccctggtgggtcccaggcggctgagcagagggctcggacagtgtgcgtctggcctcggggtcctcccatctgctcctgggccatcgggggccttgtggctcagcccaccagcgggccacagccgcaagcctcatctttatcatcccagctcccagaggtgccgtgggcgcgagtccctgccctcgagcccggggagggtccagctgagccccctgcaggggacaccaggggcctgtgtctgagaccagtgacagaaggggcttcctgcttcccgggctgagtgagagctgggggagccggacagagtggtatttggaagccgggaggagtcccctctgcccatcctccagccatcggcttccacctgccctccccaggtcatgccctgccgtggtctgggctactgggccggctgcacgccagaccccgcagtggccccgttctcctggggggtcttggagatgtggaggaaggtggtcctcatggcccggtggcaggtgtccacgagcgcagggacgtccgccgcagtgaggccgctggtggggatggcttccagcacctgcactgtgactgttcctgaagtgaagaacttcttcttggtgttgtagaaggaggagaaggaagagtacaccacggggacgatgggcacctgtgcctggactgccaggtagaaggcgcccttcttaaaaggcagcaggtccccattgtcgttgcgagtaccctcgggatagatccacactttgaggttctccctgaccatgcgctcgcccaggtcggccatcactgt

SEQ ID NO: 444368 - DNA, 1060 bp, Homo Sapiens
cccggggctgaaatggaggagcttggggggagcccggaccgaggtggtatttgggaaacccggggaggaatttccccttttgccatttcttccaggccattgggttttcccacctggccttcccccaggttccatgccccggccgtggtctgggctactggggccgggtgcacgcccagaccccggcaggtggccccgtttctcctggggggtcttggagaatgtggaggaagggtggtcctcatggccccggtggcaggtgtccacgagcgcaagggacgtccgccgccaggtgaggccgctggtggggatggcttccagcaccctgcactgtgactgttcctgaagtgaagaacttcttcttggtgttgtagaaggaggagaaggaagagtacaccacgggggacggatgggcacctgtgcctggactgccaggtagaaggcgcccttcttaaaaggcagcaggtccccattgtcgttgcgagtaccctcgggatagatccacactttgaggttctccctgaccatgcgctcgcccaggtcggccatcactgtcatggcagtgctagagcgctgccggttgatgaagaagacgcccccgaggtacatgatgaggcccacgggccccaggaagagcagctcccgcttggcgatctgcacgcagcgctccggaaggacctccatgaggcccatcatgtccaggatgctctggtggttggagacgatgacacagggacgggcctcctgcagcctgcgcgggtcccgcacctcgaagcggagcccgtaaaagtacttgaagcttcgcacgaaccagccgatgatgctcatgttctccaccgtccggccgccgtggcgcagcaggcagacgagcgaggccacggcggacaccgtgaagcacagcgcgcagtacagggcgaccttggcgtagaactcggccgcgcggctcagctgcaccagcagcagcagcaacagcagcgccgcggccagacacggccacagctccatggcccggcccggcgcccgacggcgccgccagctcgctcccgctcccgctcccccc

SEQ ID NO: 444369 - DNA, 1145 bp, Homo Sapiens
  misc_feature (223)..(223): n is a, c, g, or t
  misc_feature (321)..(321): n is a, c, g, or t
tggaaccagtggaccgaaggggggtttccctttttccccggggttaagtgaaaatctgggggaacccggacagaagtggttatttgaaaaccggggagggatttcccctttggcccatcctccaaacccttggggtttccccctgccccttcccaagggtccatggcctgccgtggtctgggctactggggccgggtgcacgcccagacccccgccaggtggncccgtctccctggggggtcttggagatgtggaggaaggtggtcctcatggcccggtggcaggtgtccacgagcgcagggacgtccgcggcagtgagcncgctggtggggatggcttcccagcaccttgcaactgtgactgttcctgaagtgaagaacttcttcttggtgtgtagaaggaggagaaggaagagtacaccacgggggacgatgggcacctgtgcctggactgccaggtagaaggcgcccttcttaaaaggcagcaggtccccattgtcgttgcgagtaccctcgggatagatccacactttgaggttctccctgaccatgcgctcgcccaggtcggccatcactgtcatggcagtgctagagcgctgccggttgatgaagaagacgcccccgaggtacatgatgaggcccacgggccccaggaagagcagctcccgcttggcgatctgcacgcagcgctccggaaggacctccatgaggcccatcatgtccaggatgctctggtggttggagacgatgacacagggacgggcctcctgcagcctgcgcgggtcccgcacctcgaagcggagcccgtaaaagtacttgaagcttcgcacgaaccagccgatgatgctcatgttctccaccgtccggccgccgtggcgcagcaggcagacgagcgaggccacggcggacaccgtgaagcacagcgcgcagtacagggcgaccttggcgtagaactcggccgcgcggctcagctgcaccagcagcagcagcaacagcagcgccgcggccagacacggccacagctccatggcccggcccggcgcccgacggcgccgccagctcgctcccgctcccgctcccgcttctcccccgcgcgctcaggccccttatgcgagggcggcggggcatcccgggaattccggaccg

SEQ ID NO: 444370 - DNA, 320 bp, Homo Sapiens
ttgattttctgtttatttcactgacattgtattttcttatgagaataattgatgaaatgatttaaaggaagtgacgttttcaataaaatcaccatgaaagcaataaattattttaaggtttattcttccgaatgcctacaagtagttacagttacttaaatatagaactgttttaagtttaacaaaataggacaatttacaaatataactatatcatttgaagtgggatgtctcttttaatggcttcaccattttttacagccctgaaatcaaactgaaacatccccttagataagcatcattacagtctgctctccgtc

SEQ ID NO: 444371 - DNA, 1007 bp, Homo Sapiens
  misc_feature (965)..(965): n is a, c, g, or t
gtcttgtgaacgaaattttttatttacacactgtatctagaagcagatacataaattcttatacaattaatttccaaaaatgtgcaagaaattactataatttgtttacaaaccaaaacacgtattaaaatcaatggactttggataattcattctgtggtgttctcagtacaaatggtacacacctgatttgaaacatacagaaaaagtgtaaactaccgcaatctgaattgcaagtattaatttcatggcactccaacgactatgaaatttctttcacccaacatgtaaatacttgttacaaaattctataagaatttttcataatctctggatgtagagtttggatcacttttcagaaacgggcaacttacacacttcgccatgttatgactgattaataaaaagaatgtttataaaaacccttctttacaggattaaaaaagtattaaaagaaaccatatttgtgattgcctagtgtacccaacacttttagaattttaaagttatttacggaactggctattgttccttattagagttttcaagaaaactgtctattgctggtagtgtgatttcattttgaaattaagacttcgcatttaatgaaaagcaattaagatttaaatgaaaatgtattattccgattcattcataaagcagtatctctcatatacaatgtgaaatgtaattaaaactggcatttctgaaagcattgttacaaagatattttagacttgtagcactagcagagacattgcattaacctatgttagattttataacttttatcctgtttcagtaatactggctcaagaattacaacgcatactttgggttttgtttcctttatgccaatgatttagccttttggaactgttttcttcaacagcaagatggttggttgccccgtgtagctggtttccttaaaaactatttttaggtctatgatcatttcctgtganatattttgaccttctaaattttcagattattgcaccaagtag

SEQ ID NO: 444372 - DNA, 686 bp, Homo Sapiens
gctaaaacttggaatttaatgaattttactcactacagttatactcattttacattaaagtaaaaaagaaaatagccaggagagtaattcatctccagaaagcagtttaaagttattgtttttattatttttatttgctaccaatatttttattgtaagaaatacaaaaggtattacaaatatacaaactatttgctctttttgcctcattcaatttagctttcacataagtgaacacattggacagtgatatttcaacaccaattttgaaaaaaacaatgaacttcatcatctgacaataaatacctacattttcattctagcacccagtaagacatccagtttccaaaggattattggtatgcaaccctctgaattttctgacatgttacctttgccactgcaacagaaacaccactgcagttctccctttcccaataagtcagagtaaggggcaggtaagaatggctatctgacttcagaaaccctgggtcacaaagcatcccttacttgagctacttttaaaaccagatttttaatgatagggtacttaaagttttggtggtccttgaatgacatattttacgttacatatttaccctacttttctattctcctcctcagataggaagggtatagataaactggctatattttcatctgcctcttgggaaaggagcaagagc

SEQ ID NO: 444373 - DNA, 1633 bp, Homo Sapiens
  misc_feature (45)..(45): n is a, c, g, or t
  misc_feature (48)..(50): n is a, c, g, or t
  misc_feature (55)..(55): n is a, c, g, or t
  misc_feature (95)..(95): n is a, c, g, or t
  misc_feature (189)..(189): n is a, c, g, or t
  misc_feature (199)..(199): n is a, c, g, or t
  misc_feature (253)..(253): n is a, c, g, or t
  misc_feature (941)..(953): n is a, c, g, or t
  misc_feature (1618)..(1618): n is a, c, g, or t
ttatggaggggatgttgtttagatttagacagccctttccctttntgnnntagtntatcccatacctgaagccatttttcctagaggggcaaaancgttagaatagtagggaggttctgcttttcagagagctgtgctgcacccacagggtggacccgacaggccactgtgtaactctcaatctgtgtncagagaaagnagaagcaacatctgatacaaagtcacctgccaacattcttataagactgtgtcncaggcagtgaatttccacactgcttcttgggtctgcagaactcaaagcaccaaaacagagcattctgtagcaatataagcaaacggaataagaataattatgcacctttaaggaacatgcacccttataagtctgtaccctgatatgaaaatagcagaatgaatttcaagtatgaagaaatacagtaaaagtgtggcctgtagatggagagaaaacagcagcctggaatgtggtttatattcttgattagtttttctcttggtaccacagccaaaactgaatgctctgtacaatgacttggtttaaaaatcaagatgcatacaaagatgctagaggcatttctaatgggtgccatgagcacagtctgtgcccagcatcaggaaccatctctagatgaatgtggctaggtcaagttgggagtggtggccaggcctagacaggcacacctgtggtccatgatgtggaggaagatggagagcaccatgtggacaagccaggatggtagcagggaacactttagtggtagaaaggaagagatacaggggacagagatgtagaggtgtggggatgttggtcatcttgggctggttcacacagcctagatgagtatctgatatacacaatttctacatttctagaaccatgatttcaaacacagaaactaacaagtcaaatttccaaattagannnnnnnnnnnnnactttcaaaacattttctattataagtcagaaggaaaaaagcttactgtatgtgacagtcttcctgaaacctaagagaaagttttaaccaggccctatggcaatgcagaaacactaatacattttacagtgaaaacctactttaacacatctcaaaatgataatcgtataaaactttctagttctaatttgcactctacgcgaaccaatatttttcttttcttaacacatactgctcttctataccaaacacttgccctttaaccttcagataaaaacctcaaataccaaaaaatgcaacaagcttttgaggtgttgggaattgttggttgttaaaatcccttttattttataataaattatacaggcaatccttgctttttattaccacactggattgcttctgtacacagctaagttgcctgaagcatggaaacttggacttctccatctgacacgttctggaagcctcaaggcacaagctgacagttctgcttctacagaaaaactctcacactgctctcctctcaacagtactgcctgttcccactactccacatgacacctacgagggcactacatcacgtgagggaagcttcttcatgagggcagacaagaggaggcaccaccaaggcactggtctctgcctggcatctattccgaggncacctggcacagttt

SEQ ID NO: 444374 - DNA, 376 bp, Homo Sapiens
  misc_feature (13)..(13): n is a, c, g, or t
  misc_feature (218)..(218): n is a, c, g, or t
  misc_feature (264)..(264): n is a, c, g, or t
gggatatattttnatttatctatgtcttcaattttttagtcaatgtttataattttcaataaacacatctttcacctccttggctaaatttactcctaagtattttttatgttattgtaaatgggattgttattttccatttctctttatgatagctcattattaatgtgtagaaatacaagtgatttctgtattttgatttcgtgacctacaaattngtttatcagctctaacagacttctgtggtggagctttcagggtttnctgcatattagatcgcgtcaccagcaaacagagatacttccacttctcttctcatatatgatgtctttagctcattctcggctaaaatgctctcgggtaggattccaagcgc

SEQ ID NO: 444375 - DNA, 392 bp, Homo Sapiens
tttcctcaagtttattttaataggctttaaacacaaatatgcaacacaaactgtaggggcaggaaaagggatgttgtgaccccattcattcaactaatcacggccagggctgcccccacccccatccattctgacatccagccagaaccttgtcccagcatgtggtgggcaggggcggcggtcggggggcaggccgcccacgcatctcccaaatgccacgaagagacaggtggtatctggtgggtctgtctgaggcaggtgcagaggctgcagcatccgaacgtggaaacgtcgctccagcctggaaggggacagaggcagacgccacgtggagagaaatccgaattctgatggtgtgggggggtggaagaattgagaaggaggcacagcag

SEQ ID NO: 444376 - DNA, 353 bp, Homo Sapiens
  misc_feature (308)..(308): n is a, c, g, or t
cctcgtgccaagcttggcacgaggcacatacatagtgtacactaaattttacatacacacagaggaatatatatgtgtatagttatcttgtgtttagaaatttggaatccctcctagttgtcttgtaacatgtgcttactctattttgaggattttcttctatgaatttcatgtagctctttaaattaactttcaggaggattgtaacaatgtgctcgccacccagtattttaccagccttgagttttctcaaagggggcattggaggggttcttatacatttacagtgggaatgtgaattgatacanacttctgtggagggcagtttatcagccactatctaaattacacat

SEQ ID NO: 444377 - DNA, 460 bp, Homo Sapiens
  misc_feature (27)..(27): n is a, c, g, or t
  misc_feature (259)..(357): n is a, c, g, or t
  misc_feature (361)..(361): n is a, c, g, or t
  misc_feature (371)..(371): n is a, c, g, or t
  misc_feature (433)..(433): n is a, c, g, or t
  misc_feature (445)..(445): n is a, c, g, or t
tttaatttatcattcttactttaattngaaacagttaagatttttgtttaaatttattttttgaactggtaataattttacatgtttcaaaattccaaaaatataaaatgataaagagtgaaaattattcctcatcactgtcctcccaattcttctggccaaccagtatgccacttttaccctttcagagattatgtgtgtacatataaacaaatgtttcttatttatttatttatttttgagatggagtttcgctctnnnnnnnnnnnnnnnnnnnnnnnnnnnnnnnnnnnnnnnnnnnnnnnnnnnnnnnnnnnnnnnnnnnnnnnnnnnnnnnnnnnnnnnnnnnnnnnnnnngggnttaggaagtntgcaccaccacacccagcttttgtatttccagtagagatgggggttttcaccgtggccggtnaggtgggttttngaactccggacccca

SEQ ID NO: 444378 - DNA, 351 bp, Homo Sapiens
gcagatgggagaaagtatttagaaactccaaagcaattggtaatccccaaaatgggtgtatctggtttgaaatgaaaccttattttattggaaatggttggtttcccaattctgtttgccattggccaatataattgtgggtttgcacatggccagcacatgccaaacagaagtagacaaaggtctcactctgtaagtgggaccttggggaggagctgcctccatcataaagggaggggttagtaaaaatggtctcttaagcctgttcctgctacagttatagaggttgctcagaaccttctcagcaaatatagcagttatctattgttgtgtattaaaccatttcaacac

SEQ ID NO: 444379 - DNA, 383 bp, Homo Sapiens
ccaccaacatcaaaactgttaacatagcggcggcggcggcaaacgtcaccctgcagccacggcgtccgcctaaagggatggttttctcggcagagcagctcttcgccgaccaccttcttcactcgtgctgagcgggatttttgggctctccggggttcgggctgggagcagcttcatgactacgcggagggtaggagcggccacaccatgcgagcacaaattgaagtgataccatgcaaaatttgtggcgataagtcctctgggatccactacggagtcatcacatgtgaaggctgcaagggattctttaggaggagccagcagaacaatgcttcttattcctgcccaaggcagagaaactttttaattgacagaacgaacag

SEQ ID NO: 444380 - DNA, 267 bp, Homo Sapiens
aaaaagcattatcttcaaatatgaaagattaatttgtatctactgtaaatatgtattaccagccttatctgcatttatacacactgtgtgtgtacctcagtgaccttttataaaccggaaaaatggttgatttaataatttgttatgtaaatacaaagttgtctataaattggaaaatttgatgccagatggcttcataatatacaaatgtgttttgtaacatcatgcctttatggattaagtataaatacactggattgtctatgt

SEQ ID NO: 444381 - DNA, 537 bp, Homo Sapiens
atcaattcaaattatatattttcatcttgtccctccaaaagaaaaaagaacaacgcatttttatcaagcaaaagataagtggcaataatacaaggaataacgaacatataatattttttcattaacaatccaaacactacaaaacatagaatatgcaatttaaaaatggaaatacaaattaatgaaaagttgggtacatgtcacattagcaatgcaaaagaccagcttaagcatagtttctctaaattgacaattaataaaaggaaagttccctttctcaaatatggcacaaaaatatttcagtcacttctaggggaaaggttaatcaaaatgttccactaattctattattacagcctgtattactaatgggtttacggaacgtaagcgtcatcttgcatttaaaatttacaacctttatcaatcattacacactcattccatccagtctgtcaaaaataaaattatttcatttctatatttatgaaataactattgatatgttatgaatctcaagtggtgaatatgtatgatgga

SEQ ID NO: 444382 - DNA, 460 bp, Homo Sapiens
taaggagtatggtccttcaaaagtagggtttatccacctaaagcattcctggatcccaaagacatagtccttaaaggcttctaatatgtaattcctaaccctaaaatcacaatcccttggtttgaaaacatcaaagctaagaaacaaaaaaataaatcagggtgaaagtgtgcagcagctatagctacaagagtggaaaataaattctattttttccataaagactctatgaaaatataaagcccaaagtcagtgacaacagaagtccacatataaatggtgtttaaaaatagaaagtcttctaaagcttctcatgagatgtcaatgaatagtcataatcttaagaccttataaatcaaggttaagttatacacaactatgctgatttacataccttctacaatgtccaactgacatacataatttacagacacccataggaattcataatgccctatca

SEQ ID NO: 444383 - DNA, 413 bp, Homo Sapiens
  misc_feature (343)..(343): n is a, c, g, or t
tcttctttcactgcctatataattaaaaaaccatctggttctaaaagtggcttcttgtatgtttaccagttgaaccagccagactttggctttggccttgccttttgtgtgcttgatggggaaatgaacaaagaagatacacataagaggtaaataaatgattctttgcatgaaacaatttcttttccccactgcctgctatactaaagaaaatcagaaagtgggtatccttttatcaaggtacagagcctcctgacattagaggcctcattctaagtgtctacacagataggtacgtacattcttctaggattggagccttcacttttatcagaatctcagntggacctctcttatccccaaacaaccatcattctgcagtcattatttaatgtattcagcaaaacttagtt

SEQ ID NO: 444384 - DNA, 460 bp, Homo Sapiens
aataagttaaagttaatacaaatataaaaaggggaaagtcctctagattcaatgacatccacaaattgtacattatttacaccaaaagcacagggctcgtgtgggtgaacagtctgcagtcaaagccgatgctgggtgtcctgtagtgtagcagcccccgcgccgggggctcaggctcaactgagggttttgtcattttcaagtctgaaagtggctgttctcctgcctttgttgtttcttcttttcctggcgtctgggtttttctcccaatggggtgggtggtttgtgtcccgattcactgctagtcccagaaggtgtccagccgagactctttcgggaggaggctcttcgtgctggtactggtgttggggatcggaacccgtcggatccccttctttttaaaaacgggcgggctcaacctggaattttataactccggaaatggtactttctggggcgg

SEQ ID NO: 444385 - DNA, 354 bp, Homo Sapiens
cccactttcaaataaaggctggaaacacaatttttaaagttctagttggtaagattaatctcaacacagtagcctggagccccgggcctcgcctccaactgcttcacagcctggccctgcgaagggtggccctgcagtggcctgggccaggtgggcttgcagtcggcttgccttgaggtcccagcacagaggaaatgggagaagcaggactcacacccaagcgactggagcaaggaaaggaaaggctgtcagcctgagggcgggcactgccctaaggatggggactgggcatgaggcccagctcctgagtgcagctcagggctggaaatgaactgcatccttggtttgcaggag

SEQ ID NO: 444386 - DNA, 510 bp, Homo Sapiens
  misc_feature (443)..(443): n is a, c, g, or t
  misc_feature (462)..(462): n is a, c, g, or t
agtaattctgtttaaactgtgattttctttattgtgttggtgcaatattttattatcatttaacctcaggatattcagaccaacaggattgtgttgctgctgaaagtctgagcagtgttttaccgtccccagcccccctcccacatggtcacatgttcacttgcttttccttccatctgttggttttgtgagctgagagcatctctggacacatggaagggagccagggattcctgtgatacagattttgaaccagcagagtactttggttttcttcatgtcctaagggtttgatccagaaaccctggtgcttcccctgcagaatactgtacttcatttaacagaatgattgatttttctttcaatcagcatgtttcaccaaaaataggaaaggttcttctaagggttaaattttgtattttaaaagttagttgggccatttngattcaggggatttttctnacacacctttggggcaaatgtatggctttttcatcccctgggggttta

SEQ ID NO: 444387 - DNA, 391 bp, Homo Sapiens
tgatagttgttgttttagtaggcagtctatctggttgggttcagaccccaagtttcaacctggctgctatggcctataattccaatgaatgtcacttctgtttattatatgctgaattggacagatctacatgttctctacttgggctggggccaggagttcataaaccagtttatgggcttgctctcctgagttcttcatctctgtgatctccctagtactttctggttccctgaggcttcccttttctgttctctcaccagaaacttagaacagttacccctttctgatgtatacttgcatatctaggtccaagcagcaggaaaacagaaaaagacagagtgagaattggtctcatcctcttagaactactgctctaccaaaagagagg

SEQ ID NO: 444388 - DNA, 385 bp, Homo Sapiens
  misc_feature (35)..(35): n is a, c, g, or t
  misc_feature (118)..(118): n is a, c, g, or t
  misc_feature (221)..(221): n is a, c, g, or t
  misc_feature (365)..(365): n is a, c, g, or t
gcctgattcacagacgctacaggatggagcggggngcaggagccaagctgctgccgctgctgctgcttctgcgggcgactggtttcacatgtgcacaggcagatggccggaacggtancacggcggtcatcgaagtgaccagcgggggtccctggggcgactgggcctggcctgagatgtgtcccgatggattcttcgccagcgggttctcgctcaaggtnggggcttaggcgtaggtcctggagagggcggagatgcgtgggaccatagagccaaggatgataattccgtgacttgcccttgcccctctcctcgatacccaggtggagcctccccaaggcattcctggcgacgacactgcactngaatgggatcaggctgcact

SEQ ID NO: 444389 - DNA, 534 bp, Homo Sapiens
  misc_feature (383)..(424): n is a, c, g, or t
tgctttgctgatatatttatttacatatttccccatttcagatgatggtgacaaaaagtagatggagaccccaccctatccaccccccaacaaattacagacacagatttcacttagcatatagaagcattggggcatgtccaaattcattccactgggttactacagccaggagagatttgatcttgggggcagtctgagcacctcaggcccagaaattgagctaaagagaggtcgccattctgggccttgccactggtgtgccagcagaggtgacagaagagaatcatggtgaactgagctgtctagccctatcatgtggtctagaaggtgacagtgggctcttggatagcttccagtgagatccacagtcccacagaaannnnnnnnnnnnnnnnnnnnnnnnnnnnnnnnnnnnnnnnnncctgccctaaagatgtcacaaggctatcatgaagctccaatcagacacaacttgtcaaaagtgctttgccaaagttccagtgccatacaaatttaagggaatttgattga

SEQ ID NO: 444390 - DNA, 523 bp, Homo Sapiens
  misc_feature (421)..(421): n is a, c, g, or t
  misc_feature (426)..(426): n is a, c, g, or t
  misc_feature (447)..(447): n is a, c, g, or t
  misc_feature (464)..(464): n is a, c, g, or t
  misc_feature (469)..(469): n is a, c, g, or t
  misc_feature (476)..(476): n is a, c, g, or t
tactcgagagttgttttcccagtgactttcttcttcttcaatgtgctctactggcttttttgccttaacttgtaggtaccagctggtaccctgtggggcaacctctccagttccccaggaggtccaagccccttgccaagggagttgggggaaagcagcagcagcagcaggagcgactagagtttttcctgccccattccccaaacagaagcttgcagagggtttgtctttgctgcccctctcccctacctgggcccattcactgagttttctcaggcagaccatttcaaattattaataaatggggccacctccctcttcttcaagggaggcatccgtggatgctcaggtgtttcaaaaccacagccacttagtgattcaggttcccttaaaaccatggcctaagtacagggcgggtttngctantctttccaacaatggttgganccaccaggacattttantggcnttttttnccgggagggcccattatttggccttgttggtggtttttggggcccgt

SEQ ID NO: 444391 - DNA, 269 bp, Homo Sapiens
  misc_feature (185)..(185): n is a, c, g, or t
  misc_feature (211)..(211): n is a, c, g, or t
  misc_feature (255)..(255): n is a, c, g, or t
agggcccaaagccagttcataatggcaaagataggatttaggctgtgactgtctaaaagttcctttcaatattaggcacctgaaaaggaatttgcttttcattaagatttatattctcacttctttctttgtgttcaagcagggtattgtcaattgcttcttttgttggggcactagctacacangacacgatgtggtgggatcattgganacatctgacaattcaccagaagtggtctccatttctaaatgctnctatgcacgaggcc

SEQ ID NO: 444392 - DNA, 1248 bp, Homo Sapiens
tttttaaaagaaaataacaaaaaaaccaaactttacttgcatttagccattaataaataatttacagtatgtacacgcggtgacactccacacaggtcgcagacacgtggacgcagtgaggggtccccacttccaagcagaacgtgagcaaacacaaccaaaataaagtgcttcactttttacttccaacatagggaccaactaaaaccagcagggagagggaggggccgggccccgagcgccctcccacccgcccacacacggttctggcagagggagcaggacctcttggagggagggggagacacacgttctgcagcctcctggccagtgtatgagaggtccctggggaacagcagaggggctgccgatgggtgggtagggtgtggagctgtagggctgctggcaggatcaccctccagggcctggctgcacttttgggagtgaagcctggctttgtgctgtgggcacagcagcacaggtgggactgttctgggcccctggatgagcaccctgggctgaaatgaggcgggagccagcggcaagtctctcctggctgtgtggccacagggcttaagggaagagattagaggttgaagaccctgccagggatgctcagagctgagagtcctaagaccctgctcctctccccagactccagacgtggatggaccgggctgggggctcttggggttgtgaggaggaagcagaggatcagggcaggccagctggccccatccactgggtctcctgccacaccctggggcccaggcacccctgcccaggagctcttgcatctgcaggagagagaggaacagaagtcaaggatctcttctctgtttagacatttagaaccaagcacttcgactttctaagcacagggtggaaggggcaggggcccaggccagagacgggcagctgagcaggtgcctgaaaaccgggacctgcactggtacccacagcagccaggtgaacatgggcagggaggccacaggccagaaggcaccaggcgggcacgacctactggccaaaaggttccagcagtctgctaaggtgccaagcagcgccccggggttgccctgcctggggccaagccccaaggatgcctccctgtgtggctggggtgtccccgctggcctagggggatcgagtgtgctctcgtgtaagagtgtgtgcgtgcgtgtggcgggcacagggggccccacggatcggcgagcagcagttggccgggcctttcagtgcattgcg

SEQ ID NO: 444393 - DNA, 1382 bp, Homo Sapiens
  misc_feature (32)..(32): n is a, c, g, or t
  misc_feature (179)..(179): n is a, c, g, or t
aattcccaaacaacgccccggggtttgccctnccctgccaaaccccaaagaagccctccctttgtggctgggttgtcccccgctggccctaaggggaatcgaatgtgctctcgtgtaaagagtgtgtgcgtgcgtgtggcgggcaacagggggccccacggaatcggcgagcagcagtnggccgggcctttcagtgcattgcgagggggaaggagctgactctgacggttcccagtgtgtctctggtgggggtggggggcttcagcctgaggggatttttcacacattcacactgcaggggcggggcgaggggagctgctctccctctcacacagctctactgtcaaacatcacggcaccagtcaccacaaccttgtcacgtgcactagaaggggaggggtccatgcctgagcccttggcagcaggcggtccctggcgttctgcggggccatggtggacacgccaggagatctgcaccccgtgggcggtcccagcccacacatggggaagccgagaggacggagcccgcgcctccctccacatctacgcgtctagcagaacacagggagcagggccaggagcgggaccagggcgcccaggaggggccggggggccaggggcagccccgcagccgccctgcctggcaggtcccgagtcctctcatacaggtgcagtttgtctttgttggagtggagcatcttgacatcctccaacgcgtagtaggcggccagtgtgaagttcacgtcgcccgtggtgaggaggtcgaagacgcaggcctggtagtacaggtcctccaccggcagcttctccttgcacttggccacggctgtctcgtatgggaaggtctcgggggctgtgggtgcagggctggcggctgccagcctgcgggcaccggtgccctcagcattggtgtggaaggcctggaagtcgatctgctggttgagggggcagccccgcaggcagaggtagagaccctggctgtcccagtcctccacagcattgaccacttcctctggcatgcggacggcaaaggtcaggtagcggcccacctggcgcaccacgatggtggtgccgatgtacttggcctggatctccacgtgctggcctgacaccttctcagtgatcttcaggctgttggccccgtgcttgtccccaccgttcttagagccatccacgaaggcggccgggagctcgtccatctcagcctggtacaccttctggtccacacactcctggaagttcttgaagatgatggtgagcttgctggtggcagtggccgctgagccgggcagcacaggcgtgcttggtgacctgcacgttcaggtaattattgtcagatgagcaggccaggcgccgtgcaccttgcaggtctggaagcggtc

SEQ ID NO: 444394 - DNA, 460 bp, Homo Sapiens
  misc_feature (405)..(405): n is a, c, g, or t
  misc_feature (439)..(439): n is a, c, g, or t
gaaaaaactgggaaagatacttggtttctgttaacttttgtgttgcttgcttaagtgattaaagccagtgcttggagccaagccttcatgccacgaacatgctccacagcctgccctttgctctcctgctcacactgaccaagaatgccgcgtgcttggcctactgaggtgaaaggacaattgaatgacaggtgggcaaagggagaacttccccttcttggtgcgaggaaagtcacaaatttaaaaatgttgcttccagcccagatcctaaatgctagttctcagcagctgcgtggcttaccgttcgccatttccaccaccgccagctgccagcaccgctacaggttcacaggggtgttgaacaggacaatggggaaaggcatttttaggcctttgcagttggtntacatttttttagggggaccattattttcaggcnttcttttattttacccgggca

SEQ ID NO: 444395 - DNA, 400 bp, Homo Sapiens
  misc_feature (19)..(19): n is a, c, g, or t
  misc_feature (355)..(355): n is a, c, g, or t
gtaacccaggcaacaaatnagaggaacagggcaagaaggaggaacaagcagcaggagcagcaacagtttgaaggagcagccagcgaatacgtgtgcccacaagaagtagcgagccgacttgagagggttcaggaaccagatgaagctcgtgtcgggccggttgggtttctctagggggtcaggttcattgcgggccaggcccactgggttcttctctgcctcctctgctgtcagtaaatgcagctcagcctccaccttgcccgtgagctcaaactcatcgttctcattgcgggccaggaggggccaccagcctttgacgcgcttttgcttgaagatggacacgaggggctacgtncacctccccggtggccatctccatggtgcactgcttggctgtctt

SEQ ID NO: 444396 - DNA, 1242 bp, Homo Sapiens
  misc_feature (526)..(526): n is a, c, g, or t
  misc_feature (578)..(578): n is a, c, g, or t
  misc_feature (586)..(586): n is a, c, g, or t
  misc_feature (718)..(718): n is a, c, g, or t
cccaaagcaaaacgaaatggtttatttaaaaacaacgcattcagtactgtgtttggaacacaaggcaatgaggcaggcacattcacacttaacaagtacatttgaggagctgtcgaagcaaatggttgcattttcttcacaaactacagtcacaatatacacgcaattgcctctgtccttgttcaccaagaaagcagaagatatttacaagttcctcagtctagcagtgctggcttctcttgggtctctgtggccctcacattctggcagcttgtttccaagggcaggcgaggctgcctgtcacaagggaggtcagtctgatttgttaaggccctcggcttcttccaaagagcaagagaacttctgacagagttgggaaagagggaagttttcaataccagtatctcagcataaaatggcactttccaaaacaaatgcatcaagtgttgagtgacggggtgagcgggcagggaatcacggtattaacaatataagaggcatttattttccctgacacatacttctngctcatttatttaataacttacattcgctattcttctactttttgacctttnggtttcancattactcttaaagggctttgctcctccttctatactgatacactattctttaaaatgctgaaatgcaatggtgaaatcaaagtatgttaagcgagagaagatatccacaaacaattcttttgtccttgacnttctaattaatgctttcaacaattaattgtcaatgtccatctaactaatggaagcagcacagtgtggtgtagcagaatcagtggttgggagacccagactctaattccagttagctagctgggcaaataagtcactccaactttctgaacctcagttgtctcatctccacatggaggatgttgatctggaatcctgacttgagataacatctagatctgtaaagttttgctatggacttaggtggttgtcccatgtgagtaaatgatagtgtattgcgatgtttccatacatttgttttgtgtcctgggagaatttcagtgctaactaatgatgcttggtgaccggatctcagcctgttactcaactcctcccagggctcttggctgtaagcgctcttgtgcttttctgcacagtatgggttcagatctggatcttgaaatatggctaaagagcacttctaacatggggtacagttattctccatattaaaaaatggtctagattccttcagagggaaacctcc

SEQ ID NO: 444397 - DNA, 1904 bp, Homo Sapiens
  misc_feature (424)..(424): n is a, c, g, or t
  misc_feature (600)..(600): n is a, c, g, or t
ggatttctcaacaagtcttttcaacagtgatacacaatattcttccctttggaatcggtgctgttaaatagacatgtactatatagccattttccaatgcaacattagagtacagaacaggtattctgtggctagtgagtaatactgctgctgtagggtgcatacacgttaggattggacgaggatcttactcaggattgcatcgtagtagggacagaaagaccatcttgttatagttgaccaggcgagcaaatttaatagcaacttcctccagctctctctggactggactgagtcccccagggactgtgggcaatggcttctgatgacccgaggcaaggtaggtttctaagaaggtcaggattcgagattccatgatcctgcgaatgggggtcatcggggactgggccacggcttggatctnggcccttgagcacggtttccttgttcgtggtgaagggagaggacccacacagggagaggcagctgctcacctccaggcacaccttctccccgatggtagtgaggacgtccttcagatggaaggagggcaggtgcatatctgttagcaaaatcttcacaatcatcttgagtttctcnagcaaagtcggcctggctggaaattccctgcgctgccatgctgaaggtgaccagcaacacagcccccaggatggtcagttgttcccagctgcaactggagctcgtggaagcgagactggtccattaaaactgtttcggggaatggcctctggaggtggttcccacttcagaagcttcaggtaagcgtaattctggacagcaacagggctcagcctgggcatgtccccagagccagcagccattccccccactggcagggcgtgtttatacttctgagtcataaggtcctctgaggcttcttccagccactgggtgacaaagtccagggaatttggttgcctctccaaaatctcttgaaacttcttcctttcgtattcaactgactgctgcatgagatgaggcctgatgctactgatagcaaagttggccatgtccactttcattaggtccaacacagaaaaaatttctctgaaaaggggcactatttccttaatgtcctttagtttcttaacttcctcatctcgagcaggtgcacacagtgtccccatcatgccaataatgaattctgccagcttggaaatgtctagcgccccattctctgcttcctgctttatcagatccagatccaagacttctgttatctggtttctcagtctagtatgaccaggcagcaagaaagataagagagtctctttgatttctcctacaagtttgatagcatggtcaataatgctgggggatcttcacttagctgcacactcaagcaatcccaaaacgctttatgtacaatctcctttactctcttcttcaagctgttttctggtaattcaactggtttaatctgaaagtctccatttactacaatttcatgggctagagccatgttggtgacgcctctcgctgtctctagaagttcttctactgtcacaaagcgaggaggactagagtgaggtctctgcactctttgggggctggaggagtctgactttattgctttttgtaaggcttcatcagcaccttccacagcatcttcgaggccttcctcagaatcattggattttgattttcctgcttcatgttacagttggacttgtcaaggttttcagacattctcaattaagtttattcactttcttgccaagaagacgatcatccgtcggcgctgcacgcgggcctaggctggacacaagaggctccccagcagaaagggtctttcggcaaaagaaaaaaggggctctgtcccccggcgccgggaatcccctcctctggcactgagctccactcgcgcccggcgtccggattcc

SEQ ID NO: 444398 - DNA, 436 bp, Homo Sapiens
  misc_feature (166)..(175): n is a, c, g, or t
  misc_feature (283)..(283): n is a, c, g, or t
  misc_feature (365)..(365): n is a, c, g, or t
  misc_feature (387)..(387): n is a, c, g, or t
gcaaaaaatcactaacttttaaaataaagtatgccctcagttgaagtatgcctgggaaatctttccttggtccaaatcactgggattgatcttaccctaaacccatagtatttgtgcttttgaaagtgatttgaaactcaaatattttggtttttgcccccctccnnnnnnnnnncactgccccagcttgaagaagagagtaaaggagattgtacataaagcgttttgggattgcttgagtgtgcagctaagtgaagatcccccagcatatgaccatgctatncaaacttgtagggagaaatcaaagaggtgagggcaaagagtgaattgtggatgcttttctgggtgtgttagggagtgttttnttcaactttcttgtgttcaccncccagaaggacttttaaaggaaatttgaagggtcccagggaggttaaag

SEQ ID NO: 444399 - DNA, 425 bp, Homo Sapiens
  misc_feature (402)..(402): n is a, c, g, or t
ttttgtccataacattggggtgctaagacaattccggtccccctgtccccaacccctcatgaattctgagggaatggcaggtagaaaagcccacccactcattccatcatgatctctggtggctaagtaccatgagttaggaatgtctaccacaagtagcatctggaaaatctcgtagatggaacaggctgtgaatgtagaatcctgccctctacaacacttttgaggcacgctgtaggaaaacagtcctggacttagatagggcaccatcatgaataccactgcgtaaggaatttggacatctttctcccactcgtgtagggaattctaagattccctgacaatagatctttccatacctgctcttcttagtatatgcccagaatcattctggaaaggctncttctgacggatatggaggcagc

SEQ ID NO: 444400 - DNA, 586 bp, Homo Sapiens
acttttccaggggatttaaatcaagtaacaacattttaccatcagaatatattttgctactatttaaagtttgctttgaagacaagcaattccacagactacataggaaagacaacttcataattaagttacaaaagtacttactttactatgtgaaggattggacttaatggtctgctgtctctaagccaagttatgaaggatctggctctttctgatgaaagtgtatctagctctggaagatgtgtctggtaaaagaaatacaattaggaaactttcctttctcatagacttcagcagtaatagaacaaaatcatgattcctaccatcacccccaactgccagcactctatttcttagcctcaacagcagcaactacacaaataaaatttaaactgttgaaaaatctgtttatatttttctggataagtcaataaaatatgtgcaatgacaagtatgtcactgacattttaactgactatatttttcttggtaagtcaataaaacataaacaacgattagcatgtcaccagtattgtgtggcggctttatgtttcttctagagccctgtgaaaagtaggaccga

SEQ ID NO: 444401 - DNA, 982 bp, Homo Sapiens
ttttactgtcaagcgaaatagttttaattagtaggctgatcataaataaatctacataaaagatttaacagaattacaaagagttttgtgttcctttgtggactcaattcataatatgcattagtcaacctcattctctaactgtgacaaaaagagttgtcatccaacaatgcagcacagtttaagcaattcatatgctatagttacatttttacattttctttacaaatgtaacatttatgtacattatatatagatttttttctatagttcatgtactgaaactctattgtttttacagagaaaatgttgaattcatttaatgaatagagaaacattccttgttaaaaggtaattcatataaacaaataacacgggtaccaatgccttttggcatctcttgccagagttcaagtccagaaatgttatattaattataagaaaaaagaatttatctaattttacattatgacatatcattccacatagctacataaatttgccagcttgcaatgaacagagcactgtactgccatactactggaaatgtgtagaaaccaattcaaaatatacttggtgaaacagcatcatcgttaccattaatttgagttgaaaaagatctgtcaagttctttcttcccctttactttttaccaaagcctcagacagagtgctgtgcgttgcatcttgtattaacaaatgccttcatttcaaatttctcacgcgcttctctgacagattatgctttacctaggttatagatctttttcttattcaattttattctacttcacttacaaatctgctgctgaacatgaagcaaaaattcatagtaagaaaatgcagcctctgtccggtcttcaatcaaatgctgaaaaaattctgctttggcaggactctcatcttttactatgtgaaggattggacttaatggtctgctgtctctaagccaagttatgaaggatctggctcccctgaaagta

SEQ ID NO: 444402 - DNA, 259 bp, Homo Sapiens
  misc_feature (100)..(100): n is a, c, g, or t
gactgggttctaggtttaattttatttaaaaagctcaggtcataatgcagttgttattgcttctttaacatcatacttagtaaacaataacatatcaggngttcagtttggggtatatactttttaaaactttaaacttatatggacttgctaatggacattgaaattttcttctcggaagtcttccatggtgagaaaacgtagctattacagttggtttctgatgagttctataatagcaaagatattcagatcattg

SEQ ID NO: 444403 - DNA, 899 bp, Homo Sapiens
  misc_feature (11)..(11): n is a, c, g, or t
  misc_feature (26)..(26): n is a, c, g, or t
aatctgaaaantcccggttcccctcntcttcgggaaaatctccccttttcttttttaagcctccccaattaggggaattaactcccatgaagacatgcccaggctaggaaggcagagaggcaacagaaggctgaggtggcattcctgctcccagacgtgcaagcagacagctcctggaggccacaatccccaccattctgaatcttccctgtaaattgccagatcaacaccagcacctctgcagaccccttggcctggtgaatgtaacactgtgcgctggtggactcccttcagaggggctttcagagccgctggagccgcacaagaaactcagtctcatgactttatagttgctcacatcccttggagccaaaatattgtccagcccccaaggacttctgttaactaaaacatgcacacgtatacgcatgtgtatgaatgtgtgcatgtatggtgtatacacatacacgcagatgtgttcacttatgtatttggctttcaaagatgcatatgatgtcctaagggcagtttcagcagaagtagctacagccatagttccaccccacaaagctaagaagcatatctgcatgtggccttcccagtctccgagccgggggtgacacaggcagatgtagagtgtacggaaaagaactgcatgtttagatttgcccagggcctaatgagtgcctcagtaacctagaatatcatcgctgagctctgtactcagacaaaagtgaactgagtcgagaccgtttgtgtgcactctgactggttccaaacaagggtttgtgatggaaacttctgctgacggtgcaccttggtgccctctcaggcacccgagcgaaacctgaactgcaaagctggggtcttatgagtgcctttctatcctggaaacctag

SEQ ID NO: 444404 - DNA, 1238 bp, Homo Sapiens
gattcattcaacaaatatttattgaacaactactctgtgtcaagtcctgtaccaggcactgaggatacaagaataaataaaacagtctctgccctcaaggagcttacagtctagcataagaacttaaaacacctcagaacctactgagaaaagtttctgggtatctagtatattgtctggaatactccaaatttcctaaaaatgtgaatctaaaatttatcaggaaacacagttgggcaattgaagatgcagtgaaatttaaaagaaaattcaaatattcaccctttatgtaaaaaccatgaaatctaaatgagggagaaacttaagaaagctgaaaatctacctattttaaagactttggaccagatttaaactttaaaaattattttattatctctgggtgacattttcatttatagtggcatttatatatacacatacatataggaggtgaatgtgagatatattccttagggcttttgataaaacccatatctttatccctagttcatttacaagagagcagcgtaatggtaactttgagattttccttttgacagtaatttccattatcatttgaatgggagaaattcttaggacatgatttggaatcatttctagaatataaatttcatataatcttattttataatgagacaaaactgtgtctttgtaacaatacgtgataatttaagcctatgttttaatggttattgacaaagtttaatggcatccaaaatactcttatgtctatctgaatttttttcctgtactcttcttttttcttaaaagcatgatagacccctctgcaaatacagagcctttgttgttgctttgctgtactttggtaccttgctgtttattccttagtctagcagcatccttagtttgtagtatatccttacttagttgcaactaaaaaaaattgctagcctaggctttaactgggagtttctattatctagaaggttactgtgaacctttcagaaaagtggaaagcaaccaaaagagctgtctcaaagactgtgtccccccagagtttgtccagctcttactgtagacactctgaacaggcacggttatctcatgtccaaagctcataacagcacattagaagaaagtggggagcctgttagaagcaggcatattgatagtgtgggagaagacatagcaaattacttagcagatattttaaaaattttaaaatccaacagcagtttgaggcaaatgatttccct

SEQ ID NO: 444405 - DNA, 421 bp, Homo Sapiens
  misc_feature (386)..(386): n is a, c, g, or t
tttttttgattcattcaacaaatatttattgaacaactactctgtgtcaagtcctgtaccaggcactgaggatacaagaataaataaaacagtctctgccctcaaggagcttacagtctagcataagaacttaaaacacctcagaacctactgagaaaagtttctgggtatctagtatattgtctgggaatactccaaatttcctaaaaatgtggaatctaaaatttatcagggaaacacagttggggcaattgaggatggcagtggaaatttaaaaggaaaattcaaatatttcaccctttatggtaaaaaccatggaaatcttaaatgagggggggaaactttagggaaggctggaaattctaccctattttttaaggactttnggggacccgggtttttaactttttaaaattatttt

SEQ ID NO: 444406 - DNA, 482 bp, Homo Sapiens
taatgttcttttcaacacttccttttattctaaaaggaaatatgtctgttttctaaagtaaaatgatttgacaaatgagattgaatttagaaaaatatttacatatggaaggtgtttacccagtttatataaaatatctttaattttacagatatggcattacttaaataacttttccacagatgataggaatgtcacttcaaattcctgatcagagaatctgcttacagatgcacgagcactttttctgatttggagtctcttttctgcagacatggaaagaatgtgagcgatagtttcagcatagtcttcttcactctcagccagaaagccagttatatctccttcgtgaggaaccacaatgtcaagctttgggccccccgaattgtgtgcaaggataattgtgccagctgccatacactccacaactcctcaacaacttgcacaggcaccagctcctttcgccggccgccaacaaccag

SEQ ID NO: 444407 - DNA, 469 bp, Homo Sapiens
  misc_feature (413)..(413): n is a, c, g, or t
  misc_feature (448)..(448): n is a, c, g, or t
  misc_feature (454)..(454): n is a, c, g, or t
tttttgaacgcttctttttcaaatattttattaatctgtttggccaaacaggtaatggaaactgagaataataatttgctaaaaagttcaggtcatgaatgcccctttcccccaggaaacagaagactccatggttacagaatgcaccattgggttatgacaacgtttcaaaataatgtttccatttcatatgtaacaatgtaaacttcaaaaatagtaaactctaacccctgaccctctttacagatctatcacagatagaattttctggcagacctaaattgtgtaagtaaacagcctgggtgcttaaaagtttcataaaaaggtttacagatttcagtaaataatttttcagtcttgggtcaggaagtaaaagcagccagcaattcccctcctggcacatgtaccctatntggggttttgttacaccgcggggccacggtctgtnttacantgggccttcagcttt

SEQ ID NO: 444408 - DNA, 466 bp, Homo Sapiens
  misc_feature (29)..(29): n is a, c, g, or t
  misc_feature (42)..(42): n is a, c, g, or t
  misc_feature (69)..(69): n is a, c, g, or t
aatggtgtttaacgggcgtaaggaaaggncgggctcttctgntcttgctcctgaggtccctgaagctcnaggttcggcagcggccctctgcaggctccctccttcttcctcactttgaagtcgggtgagcagcttgatcaaccagacatcccactcctctggcaggagcaggaggagaaaacccaggccgatgatgatgatggcgatgacccggaccccattgaagacgatctgactggtgtagtgatcaatcactgcattcacaggtatgctgaggacgattccaagagacatcagagtgggatatgtaacggcaattccaaaatttaatacaatattgaatgtcaataaaagaactgaaaatccacaaaggtttccccatggaatgtcatcaaaagagctccagtattccactttggtaaagtagaggataataggaatgcaggtgatgaagaggatgttaacc

SEQ ID NO: 444409 - DNA, 129 bp, Homo Sapiens
aagtcactagacatcgtggaaaatccattcctagataactcaagaataaaaatatttaccactgtgaaaattaaactagtttctattaatgcttgactacagcaaaaaagaagtgttattaaaaacctt

SEQ ID NO: 444410 - DNA, 366 bp, Homo Sapiens
gtgaagacatctcaacctcctcagctgatcaattcgaagccgtcggtgttccatgggcccagccaggcccactcggccctgtacctaagttcccactatcaccaacaaccgggaatgaatcctcacctaactgccatgcatcctagtctccccaggaacatagcccccaagccgaataaccaaatgccagtgactgtctctatagcaaacatggctgtgtcccctcctcctcccctccagatcagcccgcctcttcaccagcatctcaacatgcagcagcaccagccgcttcaccatgcaggcagccccttgggaaccagcttcccatggcaggtccagtctgccttacactcacccaccatgcag

SEQ ID NO: 444411 - DNA, 354 bp, Homo Sapiens
  misc_feature (42)..(42): n is a, c, g, or t
  misc_feature (67)..(67): n is a, c, g, or t
  misc_feature (297)..(297): n is a, c, g, or t
ccaggccctctgggatcctgagggcaggaggtgagcctggancctgcccgtccatggcagggctcancccgccactcaccagggagacggggggcacctgtggagagacctctgccctctcattcctcctgttctccttcttccgaaacacggacctcagaagggtgagtgtcccctgcaggggtctgtctagctcagaggtgcctcggcgactgtctttgctgtttccagagaatcccatatagggggagggtgggctgcttttgcttcccatctggaagctctccttccagttcnatggccttctggccctccggtcgagctggtttcttcatgctccactgaaggcattca

SEQ ID NO: 444412 - DNA, 501 bp, Homo Sapiens
  misc_feature (18)..(18): n is a, c, g, or t
  misc_feature (43)..(43): n is a, c, g, or t
  misc_feature (185)..(195): n is a, c, g, or t
  misc_feature (479)..(479): n is a, c, g, or t
  misc_feature (488)..(488): n is a, c, g, or t
tatggtaatccaaagggnagaacggggttaaaagactgccaanggtgaaccctagggtgggggccaggcaaggagaaaacccacacattagcctagagaggttctgtttccttccataagataaggcactggacagaaaatttccttaggtaaaaggctgccataagaatttcttgtcatttacnnnnnnnnnnnttgttgtcatccataaatggtccatatctaggctcagttaggtagaccctgaaaagttaagaactgatccctcaaagctacattgttaccagaaacaattctcattcattctgaggccttatggcacattagggaaagagagaggaaaacagtctgggcacaaaaaggcatcagacattgcttgtcattccactcatcaaagaaagtggaccgttcaacaagcatcatcagaaagaaagtgctggctcagaattccaaattctcttgatgatagatgaccatgnatgggtgtnatgcttatttacc

SEQ ID NO: 444413 - DNA, 146 bp, Homo Sapiens
tatttaagaagtgtcatttcttcactttagtatctcagttggaaccaaccgcaaatcctgaatgcaatcaataaagtccaaaataggcccctgcactaaggtttgatttatttatcggaaagttgttcctaatttgttggcgtttc

SEQ ID NO: 444414 - DNA, 422 bp, Homo Sapiens
aaggcaaaagctgatcaaattcatttaatctttgttaaaagcatcacaaatgattcatcgatttttaaaaaggaaaaataagaaggaatgcattgtctctttgttatgtgcatggcagctgatggcctcgttcccaggcgcccaggtctacctgaacatcagatatgcagaccctcgaatttacaaccagggacagccacgggcccacgcctggatctccatgggtgcacagacgggaacgtatcaggctgtctcagatgccacctccttcccaggtgcttgggtccacatgcccaacatgttcttaatagaaatattaacataaaatacaggaaacccacagataactaaggggaaaaacccaacccaaacagcagagagaattaaatggagtggtcaaggaaggccaacgacctagagtg

SEQ ID NO: 444415 - DNA, 496 bp, Homo Sapiens
  misc_feature (474)..(474): n is a, c, g, or t
ttttaaagctgatcaaattcatttaatctttgttaaaagcatcacaaatgattcatcgatttttaaaaaggaaaaataagaaggaatgcattgtctctttgttatgtgcatggcagctgatggcctcgttcccaggcgcccaggtctacctgaacatcagatatgcagaccctcgaatttacaaccagggacagccacgggcccacgcctgggatctccatgggtgcacagacgggaacgtattcaggctgtctcagatgccacctccttcccagggtgcttgggtccacatgcccaacatgttcttaaataggaaatatttaacataaaatacagggaaacccacaggattaacttaagggggaaaaacccaaccccaaacaggcagagaggttttaaatgggagtgggttcaagggaagggccaacgacctagggtgggcttaccgcgggcatttttgaggtttaagggggngaggggcattttcccggggttt

SEQ ID NO: 444416 - DNA, 705 bp, Homo Sapiens
  misc_feature (185)..(185): n is a, c, g, or t
  misc_feature (229)..(263): n is a, c, g, or t
  misc_feature (693)..(693): n is a, c, g, or t
tcagcgtgaccctcattttcaagaaggggaaactgaggcccagggaggagagtaactgaaggtcacagcacggtcacagcagaggtggccgaacccagccctctgcgcgccagtctgtgcggtctccacacccttacggtttcctagaatcagggatgttagtgtaagtctataggaatataggntggtggggggggtcaccttttgccttgaaatgggaagtcagtannnnnnnnnnnnnnnnnnnnnnnnnnnnnnnnnnntggcagggatctcagatgaccgtggcctccctctcagagggggagaacgccagagccctggctggtgatgtgctggctgggggtgaatcccaatgagggtccctctcagagcgggagaacgccagagccctggatggtgatgcgctggctgggggtgaatcccaatgagggtccctctcagaaagggagaacgccagagccctggctggtgacatgctggctgggggtgaatccgaatgacagtgcagacgttctcccatccaccatgtctgagcttgggggaattgccttcatttaccctgggaaaagaaacatggtccatttagaggggaaaagcccaggggtgaatctttcacgccccaaacagttgcccggttgggagggaggcacccgttcctttgttgagttaaaaaccacccattggagaatnggaaccttcatt

SEQ ID NO: 444417 - DNA, 454 bp, Homo Sapiens
ggttttcttgggccagcaggaaatgggcaactggtttcctaaaaacacagggcaaacctgtgcccacaggtgccaacctccagcaacctccagacgtcccggcccaacatctgcatgttttgcctagctccctgctccctggaccagctgttccctggtacttcttcatgtcatactcaagctctgatgccagctgtttgtcaactgcaaagaagtccttgagctcatctcggtaatcctgcatcacctccctgagatagtgcatgagttcccgcaaagctgggatcttatttttctccagcacagtcttcagggagatgataattggaataatattttctatgaaattcctcttctgaacttgtgagatgagcttcttctgagcttcctgcatgactacatttccaaggccatgtcatcttcttccataaggaggtctttgtctggtttagcc

SEQ ID NO: 444418 - DNA, 699 bp, Homo Sapiens
  misc_feature (23)..(23): n is a, c, g, or t
  misc_feature (61)..(61): n is a, c, g, or t
gggggcaggacccatggccgagncaaccattccaagctccctttccctttcgtccctggtnatattcggtctctttcagcttccggtaactgcaagaaattctgcatagcccgaaggtttaccagcaaagactgggatgcagtcttggggtcctcttcctttcggaggatttctgaaagcaagccctgagttctgttaaaagccacacgtgcaaataccgcctgggagattcctgctcgtttcagttcatcgcgtacccactggtagatttcggaagacacctctgtgttggtcgaaacctgttgctccaaaggcttattcatagatctactgacagggggagggtggttcaagtattgttggtttaaggactgctgggctaaaagtctattcactgcatactgctggttcagcagctgagccatcaccagctgctggttgaccaattgaggactgataggtgttgatacgagcccagggtgcaggtttggaagaggtgtccggacagagggctggctgccatgggatgagtgcgcaggggatggaggctgctcggctgtgttccctggaactggttgctggccaaaattgacatgattggcgccttgctgggatagctcagaaagactatccatttcaaccatcatatcttttgtcttcttgaaatgtttgtaccaccttccaaattcttgacatttt

SEQ ID NO: 444419 - DNA, 826 bp, Homo Sapiens
aatgacttggatcatacagcctaaatgggaagaaggacattttgctgcatcaaggaagccgttaaactcctgctaagctaactagctcttttttatgggtccatgcacacgaccgaactcctctttcactgaccagagattatttctgacaacccaggatatcccgaaagcttggaggcatatggctggaaaatgaaacgacccaggacatcatttctggctgcatcattattttgtgtcgcgtagtaccagatgggcagtcagtgagcggcgcagggatgtgaacggacggttttataatgtgaaaattttcccttggtaaagctaaaacagatttaatttccctctcttttctttcactacttccccctctttattccccctctgtctgcaatatcagtgaactcaactttgcagtgaggtggccaaaaagagagagaatgaggagatcttgatcatcttagtgtcggaggagtcgcagcggactgggaactgcagctgcgaccccccgcgtcctgtgcggatttcagggctgataccgcataggcggttatggaacaggacggtacaccggagcggcggaggatagagaccctggcccccgggagaggtctgctgatttcgcagcagccttcgaagccgtggctgcctttcatctgctgcgttttattactattatcgccgttccggaaaagtccatggaagacagcccgctgccagacctcagagacatcgagctgaagctggggcgcaagtacccgagagtctagtgcgctctctccgtgggggaggagccggttcccagggaacgggaccggggaccctg

SEQ ID NO: 444420 - DNA, 1316 bp, Homo Sapiens
gcacgaggaagagttcagtgagggccaagggggacccccagaaaaaggtatggagctaactcatctcttttacaaggggtggccatgacttactgttgcaaagtactcagtgtatatttaatgttgattgttgaattttagttacgagagggaagaacaattttacttctgtccttatttcacttgctgaaaagctgtgggacaaaatgtatggaatagacaaggccactttctttgtgatttctgcttttcatgcatattattttatttacccataatttccaagaggtttggcgttccgtctcctgcttttttctttcatccacccctttcctttttttggaagggggttatatatgagagttcattgaagaagtccagtgaggctgaagtaaaggggcaagatagggcagttaactaaagagcactttatttctttgaagcctttctaagaaagaaatgggggtgcgagtggcttgaatctcccatgatgttggagggcacttagtggggttgaagtatgacataatatttcccattggggaaaggagaatttctcttagagggtggcaaaatgcctttgcccagtgtccctattttaggcatcttttccttccttattccttccagtcagggtgtgtcctatacaaaacttcccatcagttctcctcaatattccccatttgtaaatgatcacttctcttttctaaacccttttcctgttcagatccatacaggatttgcaagggtaggatcatacatgcaaatgccccttgttcatctgtgtcttctgcaaactagtctcatgaagaattctggcgtgcagccagggtagctgaagtttgggtctgggactggagattggccattaggcctcctgagattccagctcccttccaccaagcccagtcttgctacgtggcacagggcaaacctgactccctttgggcctcagtttcccctccccttcatgaaatgaaaagaatactactttttcttgttggtctagcattgctggacacaaagtgtagtcattattgttgtattgggtgatgtgtgcaaaactgcagaagctcactgcctataagaggaaataagagagaaagtggaggagagggacaaaaggagtaattatttggtatagatccacccatcccaacctttctctcctcagtccctgctcctcatgtttctggtttggtgagtcctttgtgccaccacccataatgctttgcattgctgcatcctgggaagggggtatatggtctcacaagttgttgtcattgtttttttgcatgctttcttaataaaaaaaa

SEQ ID NO: 444421 - DNA, 436 bp, Homo Sapiens
ttttttttaacgtatttcatatatttaatatttgtatttgaatatattagactagaataaattttctgcatttgtatatattatatattttatagcactctgtcagttatataacacaaaagacattcataggtaaacattaaaatggcagtatacatattaataactgaacattaatgagacaataataatcaggtattcatttaatgggagagtctaatatttcctggtagtcctgccttcttaaattcctccagtaaagtttatagccagcaaggacaaaaacactaatcataatgattacccctccaaaaacatcatagatgctaggaaatatgtgcagcacgagaagctgcaagaccatagctaccacaatctcccaaatgttgtactgtgctaacccaaggtgggtgggatttgtcccagggcttaatta

SEQ ID NO: 444422 - DNA, 949 bp, Homo Sapiens
ctggacgatggggcagcccacgtcatgcacagggaggtgtggatggccgtcttcagctacctcagccaccaagacctgtgtgtgtgcatgcgggtctgcaggacctggaaccgctggtgctgcgataagcggttgtggacccgcattgacctgaaccactgcaagtctatcacacccctgatgctgagtggcatcatccggcgacagcccgtctccctcgacctcagctggaccaatatctccaagaagcagctgagctggctcatcaaccggctgcctgggctccgggacttggtgctgtcaggctgctcatggatcgcggtctcggccctttgcagctccagttgtccgctgctccggaccctggatgtccagtgggtggagggactaaaggatgcccagatgcgggatctcctgtccccgcccacagacaacaggccaggtcagatggacaatcggagcaagctccggaacatcgtggagctgcgcctggcaggcctggacatcacagatgcctccctgcggctcatcatccgccacatgcccctgctctccaagctccacctcagttactgtaaccacgtcaccgaccagtctatcaacctgctcactgctgttggcaccaccacccgagactccttaaccgagatcaacctgtctgactgcaataaggtcactgatcagtgcctgtccttcttcaaacgctgtggaaacatctgtcatattgacctgaggtactgcaagcaagtcaccaaggaaggctgtgagcagttcatagccgagatgtctgtgagtgtccagtttgggcaagtagaaagaaaaactcctgcaagaactgagttagtccaaggataagtattgtaaatacggggcgggctctgggaggggagagactttaccacaatgagggcttttatttccatttggacaccgtgggacacagagcgaa

SEQ ID NO: 444423 - DNA, 980 bp, Homo Sapiens
  misc_feature (129)..(137): n is a, c, g, or t
ccattcaattccccccggaaacttttcttcaaattgggggggcccacaagccttccctggttccgaagataaacttcccgaggaaaattgggggttttcctgggaaaacagctttccggggccctgagnnnnnnnnnagtttttcacgcccaagggcccttggcaaccactggtgatccttgggcagggaagacaagttttgcctgcggtggtggcagcgtggaagctgtgggcacgcaaagtctccatggcgatgacaggcacgtccccccaggcccacctcctgcagcccctggaccactccacacagcaggcccccgccgcccactgacagcgcgatggcccccggctttttcccacagtgtctccttcagctctttcacgatggaagcgtggccttcccagatgagggggtcatcaaaggggggaatgtagacccaacccgggttgttcttcgctagggccttggccagctcgaaggcttcatccaataactcacccaccaccttgactgtggcaccttcattcttgaggcgctcaatggtgagagcaggtgtggtgctgggcaccacgatggtggcggggacgccgagttgcctggccgcatatgcagccgccatgcctgcgttgcccgccgaggagcagacaaaatgtgcacagccttgcttggcccacctcttgcagaagtgcccaatgccccggatcttgaaggagccggagggctgggcactgtccatcttgaggtagacgctggtgccggccattttggacagggccatgctgtcacggatgggggtcttcacgtgcaggggttctccagacatcattcccggcaaaggtgatgggtctgagcaggagtcagagccaagccagcgagggagggatcaactgagtagatagcccacgaagagagggggctgaggacgggtggacagtctatcccggaaattccggaccggtaccatctgaattttgcgggg

SEQ ID NO: 444424 - DNA, 473 bp, Homo Sapiens
  misc_feature (18)..(18): n is a, c, g, or t
gtttcataaatatatttnatttttcaatgaaaaagtttgcacattagaaaaattagtaagggtcaggggtgggcttcctgggaggatggctgagatggttcctcaaccctggttggtggccctgttgaccttcactgggaacaagttcaggggcgaggtcacagctttgaggaattcctcactgctgtgattcaggtctctcctgtccaccctgctctgggtacctgggtgtgttacttgtgggcacttgtcacgccagcaagttggctaaggatgggcacagagcagtcacacagataccaaaaaggtccaattcataggcctcgctggctgccgacctttgggcctctggcatagtggggctcctgattaacaagaagtttaacctgcacccggggccacagggtgtttcaggccaaacataacgacgagggcgttgggattaaaattccagcccttccggggtttttttt

SEQ ID NO: 444425 - DNA, 1130 bp, Homo Sapiens
ggcgcggtcgctaagccagaagcggagtcgcgggcgcggggcggggcctggacccgggcctggacccggagggcgggtccctgggcctcgtagctcccgggcccggacgcgcgctcacaggcgcgcgcgaggacgcgctccggggacgcgcgaggacgccgtggcgggagaagcgtttccggtggcggcggaggctgcactgagcgggacctgcgagcagcgcgggcggcagcccgggggaagcgtccgggaccatgtctggagaactaccaccaaacattaacatcaaggaacctcgatgggatcaaagcactttcattggacgagccaatcatttcttcactgtaactgaccccaggaacattctgttaaccaacgaacaactcgagagtgcgagaaaaatagtacatgattacaggcaaggaattgttcctcctggtcttacagaaaatgaattgtggagagcaaagtacatctatgattcagcttttcatcctgacactggtgagaagatgattttgataggaagaatgtcagcccaggttcccatgaacatgaccatcacaggttgtatgatgacgttttacaggactacgccggctgtgctgttctggcagtggattaaccagtccttcaatgccgtcgtcaattacaccaacagaagtggagacgcacccctcactgtcaatgagttgggaacagcttacgtttctgcaacaactggtgccgtagcaacagctctaggactcaatgcattgaccaagcatgtctcaccactgataggacgttttgttccctttgctgccgtagctgctgctaattgcattaatattccattaatgaggcaaagggaactcaaagttggcattcccgtcacggatgagaatgggaaccgcttgggggagtcggcgaacgctgcgaaacaagccatcacgcaagttgtcgtgtccaggattctcatggcagcccctggcatggccatcccttcattcattatgaacactttggaaaagaaagccttttttgaagaggttcccatgggatgagtgcacccattcaagttgggttagttgggcttctgtttgggtgtttgttacaccccctgtgttgtggccctggtttcctcagaa

SEQ ID NO: 444426 - DNA, 448 bp, Homo Sapiens
ctatgttgacgagactgctgagaaaggctgaagaggcttgagaggtgcctgtagtgtttgaggcagatcgttgtctatttcttctgaaaagtcagtctgagttgcagaagtaatagtgtgccttggagtagcagcagcattattattatttgtagtattaacttgaacttggttgatttcttttataacttgttcataagatggtgggagctcagcaggaaccagctcattaggcctccaagagcctgctgcagatgatgtaggaaatcccagtcctgggggtggggttcctggaaaccacgaggctggcctcagtggctcagctgccacaatggtgatctctgggcgccttctatctcgatgaagttcactctgaatagaagtccgagaagctcttccacggggcatttttgctgtgtactattcatgagtgatctcttgattaccg

SEQ ID NO: 444427 - DNA, 865 bp, Homo Sapiens
agcggggagtgcgcccggagccggcgccgcgggccgagtgtcctggtgaagacctagttcttgccggagacaattccactgcagaagcactttacttaaaaggacttgccaggctggacaatgcccgttgacttggggcaggccctaggcctgctgccatcgctggcgaaggccgaggactcccagttctcagaatcagatgctgcccttcaagaggaactctccagccctgagaccgcacgccagcttttcaggcagttccgttaccaggtgatgtctgggcctcatgagaccttgaagcaacttcggaagctctgtttccagtggctacagccagaggttcacaccaaagagcagatcctagagatcctcatgttggagcagtttctgaccatcctgcctggggagatccagatgtgggtgcggaaacagtgtccaggaagtggagaagaggcagtgacccttgtggaaagcttgaagggggacccccagagactgtggcaatggatcagtatccaggttctaggacaggacatcttatcagagaagatggaatctccaagctgccaagtgggggaagtggagccccatcttgaagtggtgcctcaggagttgggacttgagaaattcatcctcagggcctggggagcttctgaagccacatcgtgacacgaggaatctgacacagaaagcagaactaggccctgggctgcctcccagcctggcccgactggagcgaaaggctgatccgaagacggggacctcgggagcctcactggtcccagcagacacctcaggaaccgtggggacaactggattccactcaaaaaggagcattactgggatctcatgctggagacctatg

SEQ ID NO: 444428 - DNA, 767 bp, Homo Sapiens
ttaataagaaatacactttaatgagggaaggaccatttgctttatacaaagacttactttaggattcctttaacacattgcctctttagagaattttaaataaactacaaaaatgcataagtattctgtagcccagtatgaaaattcccctacggtaccattgctaagcaatgagttacagaaacaacttttgcaaacatctttgatataaaatatgtgtatatttgtttggcttttgctttttgcttttcttctttagaagggaaatgagaagctattgcaaaaacacaattatccagaaggcaagaaggaaggcaagagatgggcgagttttaccagctgtctatcctggctttccacttggactacacgctccttcctttgcttctcctctaagcacagcaccaggcacagtgcagagatgagcaaacatatagactgcctgccactcagctcaggggctagagaaccaactggaccccttttgtgggtaggctgctctctgcttctgcagcttctacctgaaactgagataaactacaaaattatgcttgccaggacgacatgagaaatgaaaccaatgctatcagagtactccagaatccttggttgaaaacagaatgagaattggtgtgatacaacactcctactaaatctccagtgatattttttaaataaaacaagtcaaggaattatctacgctgctggctgcttcagaaagcagtaagatcagaagagcctgtagtttggtccacaatgaactggga

SEQ ID NO: 444429 - DNA, 473 bp, Homo Sapiens
ggcacgagggatgctctcagtttaatagtttagggccatgaggcttggagtccagtgacggctgtttttcccgtaaggaaattccacccgcagttggtttcttcttgccttcaactcacccgagcagaaccttgaacttattttttaagccatccagaaaggagccagatttcgctggggtgatactgcttgtcgcctgggtcgctgccgaagtggcctgggtcgctgccggtgtctcctgggcaggtgcaggcgtctcctgggtggcctccgctggagcaggggtttcagcaggggtctcggcaggggtctcggcaggggtctcagcaggggtctcagtaggggtttcttctaccggggcgtcttgggcacagaccagggccccggccagggcagtcaggaagaggagagcgatgagtttcatgctgcgggatgagggtgacacagccacagaatccgcctcgtgccgaatt

SEQ ID NO: 444430 - DNA, 426 bp, Homo Sapiens
ccataaggtgagggaataatcatcccatctggcacagaaataggtggccgtgtcctcggttgtcggactggtgattttcagatccaccgtggtcgacgaggttttggagatggtgaatcggcctttcgcccatttcgcgtagtatgtggtattatgcttattaatgattccgatgtattccagccccttccctggagcctggcggacccagctcattgcataggtattgaggtcgattccagaggctgtgcaggtgagtgtcagggttgttccaggcgtgaccaggcgacccccggactcctccagcgactgacactggacacctttgagcacagcgaccaggagaagccagcgcagcccagtctccatggtgagcgtctgtgttgagtgcgatcactgagtggacacctgggagtcctggggctg

SEQ ID NO: 444431 - DNA, 1758 bp, Homo Sapiens
tgcggggccgggctcctgcgtgggcgaccccgctcacccttcctctcccggccttgcgcagcccgggttggcgccatgtacgccgtgtacaaacaggcgcatccgcccaccggtctggagttctccatgtactgcaacttcttcaacaacagcgagcgcaacctggtagtggccgggacctcgcagctctacgtgtaccgcctcaaccgcgacgccgaggctctgaccaagaatgacaggagcacagaggggaaggcccaccgggagaagctcgagcttgctgcctccttctccttctttggcaacgtcatgtccatggccagcgtgcagctggcaggagccaagcgggatgccctgctcctaagcttcaaggatgccaagctgtctgtggtggagtacgacccgggcacccatgacctgaagaccctgtcactgcactactttgaggagcctgagcttcgggacgggtttgtgcagaatgtacacacgccgcgagtgcgggtggaccccgacgggcgctgtgcagccatgcttgtctacggcacgcggctggtggtcctgcccttccgcagggagagcctggctgaggagcacgaggggctcgtgggtgaggggcagaggtccagcttcctgcccagctacatcatcgacgtgcgggccctagacgagaagctgctcaacatcatcgacctgcagttcctgcatggctactacgagcctaccctcctcatcctgtttgagcccaaccagacctggcctgggcgcttggccgtgcggcagggacacgtgctccatatgttggccatctcactgaacatcacagcagaaaggtgcaccccagtcatctgggtccctcaccagcctgccctttgattgcacccagggtcctggctgtgcccaagcccataggtggggtggtggtgtttgccgtcaactcgctgttgtacctgaaccagagcgtccccccgtatggtgtggctctcagcagcctcaccacaggcaccgcggctttcccgctttgcacccaggtgggtgtgtggatccccctggactgcgcccaggccaccttcatctcctatgacaagatggtcatctccctcaagggcggtgagatctacgtgctgaccctcatcaccgatggcatgcgtagtttccgagtgttccacttttgacaaggcggccgccagcgtcctcaccaccagcatggtcaccatggagcctgggtacctgttcctgggttcttgcctgggcaattctctcctcctcaagtacacggagaagcttcaggagcccccggccagtgctgtctgtgaggctgctgacaaggaagagcctccctcacagaagaagcgagtggatgcgatggccggctggtcagctgggggtaagtcggtgtcgcaggatgaggtggacgagattgaagtgtacggcagcgaggcccagtcgggcacacagctggccacctactcctttgaggtgtgtgacagcatccttaacattggaccctgtgccaatgctgccgtgggtgagcctgccttcctgtctggagagtttcagaacagccctgagccggacctggagattgtggtttgctccggccacgggaagaatggggctctttcggtgctgcagaagagcatccggccccaggtggtgacaacctttgagcttcccggctgctacgacatgtggacagtcatcgccctggtgcctaaggaggagaaagagaatcccaagggggagggcacggagcaggaa

SEQ ID NO: 444432 - DNA, 346 bp, Homo Sapiens
gcattttccagcccctgtcttctcagtatgtatgagatccacatgctaagacagtcatgctggtgatcaaattactttttgaacaagtgatcaaaagagaagaagtcctaatgaaatcctaatgaattgtatctcaggctacttacctctgacagtgcttactttattaagtcggctgtcaggaagcagcagggcctctcaccagtgtgcccagctcctggctcagcccactccaaatacagtgacaagaaagcttgagaaatgctgtcaacctcaggagggaggatgagaggtggggctacagaacccagacagctgagcccacagagagcatttggggatccac

SEQ ID NO: 444433 - DNA, 421 bp, Homo Sapiens
acgtcttccatattactgatcaaaggggaaagtcaaaaggaaaagttgagatttctgccagtccacagtcgggttgtgagcatcgtctggattcctctgagccaaagttcttgtgacagttaatacgcatcacagtaaaggctgtcatatatcgtatgcaccatgactcggaagttggccagagtctcattgctctggctgaggaagcactccttgaactcctctacagctgcttctgtttgctcagtgtcgatgaacctctgaagatctgctttgtattcctccacagaaaccgatggatcgatggtcttttccacgacgctctccagaagaacgcaaccagaacctgcatagcagtaaagggggagggcagcaagcaggaggaccataaccaccttcatgttgaggctgctgtgtttgg

SEQ ID NO: 444434 - DNA, 347 bp, Homo Sapiens
tttaaagtatccaggcaattttactcatagttctgtttagttccagatagcaacagctgattgttcaaagtgcagggtttttggatattcaagtaccacaggatcggagaaaaggagtacttgaaacctagagttgcgttttcacttgagaagacacactttggaaacacctatccaacagactacaaatataggctattaaattaaaaatctggtttcaaaataatacccacttaggttggaaatatctttctccaaactcagatccaacttttgaattgtttggtatcaaaggcaaagttaagagggacttgggtttaaaaactaaaattaccaagtgagtgctt

SEQ ID NO: 444435 - DNA, 563 bp, Homo Sapiens
tgatgccgcggttcatggacacaaagcgctcgaaaggcggcctgtcccggacgttgggattgtggaggctggtgttgagcatgatgatggagaaggacaacacgtagcaggtgtctgtggactggaagacgcctgggttgcagaggcagtatcgagtggcaaaggcctccatcatccggtctatcttctgggcctcgcccggcagccggaagctccacaggaactgcctgagggcctggacgaggttgaggttggcgaactcgtggcagtccacgaaggcctggaggacctgcaggttgatgggatccctctcccccaggtaggtaccaatggctgtcttgttgaggccctcgcctttatacaggaaccgtgcaatgtcctggacgtcaggggtcagcagcttgtgctcaatgaaatactggatacccttggcggggtccatgttgaacttcttgcgcccaatacacagctcgttctgcttctgggccatccgctgtcctccgcagtccgaagcagtcgatttgggcaaacacatctgcaatctcatccttcagcttctggat

SEQ ID NO: 444436 - DNA, 905 bp, Homo Sapiens
  misc_feature (351)..(410): n is a, c, g, or t
  misc_feature (618)..(632): n is a, c, g, or t
  misc_feature (650)..(675): n is a, c, g, or t
gacctctttgtaattgcatgtacttctctatgtaattttcctcttgatctctactatcgtttgcttgtgtttctagtccttaaagttcataaatttaaaaaggagatttcaggatggcctttatggacgttgtctggacatacatcctcactttcttccgcagtttaccctggttttcctcagacagaggctagcgcagccccccggagtccttgttctccttaagagggtctcgctctgcaaagcattggcgccatggcttttcctttgcatgggtgtgcacaccgagagacaggcagcttaggaaaaacaacataaggaagacttaaaaggatgcactgatttacgacnnnnnnnnnnnnnnnnnnnnnnnnnnnnnnnnnnnnnnnnnnnnnnnnnnnnnnnnnnnncatggtttatagtttttcacttacatatactattgtaaatacttagcagagtcttaagttactgtataaaacatttcattgtgtttgaagacatacttatgggtcttgaggtctgggtcctaatacttttaaatagtgtatttattatgtaaactgaggagtgccatttaaagtgtgaggattgcctgaaaaggttttgtttctttcnnnnnnnnnnnnnnngaaatggagtcttactcnnnnnnnnnnnnnnnnnnnnnnnnnnaccaatctccggtttactgcaaccccccgccttccgagttcaagtgaatcctcctgccctcaaccctcctgagcaaactgggtacttcaggccccaggccccccttgtccggttaaattcccggatttttccgttaaaaaagggggtttcaacatgtttggaaccattattggttttcctcccccctggaacctcccgggatattccccctggccttcgggccatcccaa

SEQ ID NO: 444437 - DNA, 495 bp, Homo Sapiens
  misc_feature (16)..(16): n is a, c, g, or t
  misc_feature (169)..(169): n is a, c, g, or t
attgtatagaatgganttagattgtctataaagccacaaatacgtattttgccacagtgtattctatattgcaatgatttttttagcattttaatattttaatatatattgtaaaatttagactgatgatactaacagttgatgaaatgacatataatttatatatganaagcttacgctatattgtatgaattatttgcatctttcagtggccagttttccatatgtatatattatggtctcaatgtttttcttacgcctcattttaatttataatgaaggtaaaattaaaatgtattttaccacgtttcttttcattacttttatctgtgagctctgacacatctgaaaaagtaatctgatgtgcaaattataatttaaatatgttaatttttttgcttcttaaatttgcttttcatcattaaaatgtcaagttcaagtgatatgtgcctaatatcacttggatgttggtgggtttttgaatttttgggtggt

SEQ ID NO: 444438 - DNA, 747 bp, Homo Sapiens
ggcacgagcttttttacaaagaagatcccatatttaattcaagtatttatagcatcagcaaaaatgggcagagggcgggaagttgagaacactaggttctgtgctatgttacctgtattcagtagaagtgtttctggagtcaggttttaagtcatgatcctgaagcttccttcccctcttccactaatgatgcaataatagctgttttcattttaacgagcagagaactacgaggaaaggtcctagctctgccttccacttgcagcttccctttacctcctcttattgctttcatctcaaatatccctgctactcaaccaatcctaaagctaaagtactgagatgcacacaaaggaaaggtgtgagagtgcttggaagcatccagctgagcccactggatgaaaatcagacgatagggcctcctgttgtaatatactagccagagaaaagcgccaagaacttcagggatattattcactgctttcttgctccctaaccctagatcagattggattttactttgtagttcaggagttaagaagtcaaattgctgaccgaggtggggaaggatgatggaaattaaaggtttacatttgtttaatggcagaactgagatttgctcagcttatctctttcccatctgtctgtaatagcaatgactgaataatcagtagaccaatggaagaggagtagcaagtttaaatttgtaacctgactctgggttctgttctaggaatagtgcaacac

SEQ ID NO: 444439 - DNA, 402 bp, Homo Sapiens
caagagtgctcattcaagttactcagattttctggaagtcttttctgaagagctatgtgatgttgttctatgggacagactactcttatttaacatctgggcacttaggtagacaaccttctactgacctggaataaagtgtttcctaacataatattgaattattcagaaataatccattacttcaaaaaagaaaatattcattgggctagcccaaccttctctaggccctaagaattattacctcccctttctaattctagcaaacatggaacattctccttaggcacttgacacccacgagggtaatcctgagtgctcagtttggaataggttgcaaatctcagattttagggattgagtcacaccttcaatctatagaatgaagttgaccaattctcg

SEQ ID NO: 444440 - DNA, 1056 bp, Homo Sapiens
  misc_feature (126)..(163): n is a, c, g, or t
aggtttttaaaaaaattttggccttttttaataattccggggtcctttaaggttggaatttttattttgtggtatagggataaaacagtaggaaagcctaaaaatttttcttcctatgaacctttnnnnnnnnnnnnnnnnnnnnnnnnnnnnnnnnnnnnnntcaatagcactgtcatacacagaattcctgtatcttcttggatttttgtatgaatgctcactatcttactactgcttgatttattcacttggtaatacattgtttaaatgacagcagctttaaataagtacatgatatatctaataatagagtgtgtcttctctacttgctttgtcaagtttgtttcagctatttgtgtttctttacttttccacataaaatttttggataagtttgtgaagttccttaaaataaaactgatgtaaacttcagaagtatattaaacttagtgatttgggagagaaattatatttttacaatgtcaagtcttttcagacaaaatatcatttttcaggtgttcttttgtgcctttcaacatattttataacttgataaagacctaactcattgttgtgtttattcttaggttttctatcaacacattttctaattatttcttgtataaaagttatttttatagttcttcgttgatacttgttttccttacttaatacattggctaggagctcaagtgttgtgttgttatgctgatggaagataccttgtttcagatttcaatgagaatgctgattaaatattatcaataagatgtctgctgaaagtttctggtaacagctttttcattatataatttgtcaccttggaagaattctctaatgtttcataaatttgtggctttttcagaaggctatcccacattcatagttttctactctggaagtgatcatgtaatgtgcaatgaggtgttaattccttcagatggccttgccatattcacaatattcatagggtttctaatgagtatgaattctctggtgtctaacaaggtgcgacttttggctgaaagccttgccacactctatacagtgata

SEQ ID NO: 444441 - DNA, 134 bp, Homo Sapiens
tgttgcccctgtggaagaagccttttcttgctgatggctgagttttctatttgtcccttttatttttactatggcaaaacagttttaattaaaatgagacaaggcctcgtggagtggatccagcactttgggag

SEQ ID NO: 444442 - DNA, 868 bp, Homo Sapiens
  misc_feature (24)..(24): n is a, c, g, or t
gattcaggaggtcagggaacactntgctgcactctcggccaatgtagtacagaattcctttctttggtataggcagcttagttgaatccataagcagaaataactgcaccagcttccttgccttgctctccaatcttgactcaggccatgaatgtggggcatattttgaggaatagctggaaacctctgaatcaggggatggtacctctgcagcagcttcctcaaaaaagggcctcctaaagtgagggagagcctgccaaccctcagcaaaggctctggcagcatcttcttccagagcttcgttgtatttctctggccaatccataggatctttgttatatattttcgccatgaacttcagaattttcatcttggtggtttctaggtgggatcttgggccccagaaaaactcatactccactggtttacagtcagttactggcctgtagtctaagtaacgctgccatacaaactccacagacagaagtctctttgggttcccaaaaatggaaagcctcctttcccgctgcacccccatcctccagagcatttcccaaatctcagcctccttggcttggttgccattcaggaatatttggcctagaatcatcatcaggaggcccatctttggcccatttgggctctcttctaacccttcaaagggcacaggtcccagtttgtttaacagaatgtaggtgtgtgcctcagggtcaagttctctcaattcaaacctaaaaatgcactccaggtgggctgctgctcgcctgagtatctcaggaaactggttgcgatattctttaacaatatattcccgcatttcagactcccggatagggtacttgctctgatccttcaccagcaggaactg

SEQ ID NO: 444443 - DNA, 1050 bp, Homo Sapiens
agcggagtggtgatgttggagccggttagcgaaccccaagagtgcagagtgtggagcgtggagcgccgggactgtgcacgcttgaccggaagcccagaccagtgcggtcctagccagagagaaaggacatttgccaacaatgagacacgaagcgcccatgcagatggcctctgcccaagatgccaggtacggccagaaagactcctctgatcagaactttgactacatgttcaaattactcatcatcggcaatagcagtgtggggaaaacatcttttctattccgttatgcagatgactcctttacatctgcattcgtcagcacagttgggatcgatttcaaagtaaaaactgtattcaaaaatgaaaagagaatcaagcttcagatttgggacacagcaggccaggaaagatacaggactatcaccacagcctattatcgtggagccatgggctttattttaatgtatgacattacaaatgaagaatccttcaatgcagtacaagattggtcaactcaaatcaaaacatactcttgggacaatgcccaagttattctggttgggaacaagtgtgacatggaagacgagcgggtcatctcaactgagcgaggtcaacatttaggagaacagcttgggtttgagttttttgaaacaagtgccaaggacaacattaatgtcaagcagacatttgagcgccttgtggatatcatctgcgacaaaatgtcagagagtttggagactgatcctgccatcactgctgcaaagcagaacacgagactcaaggaaactcctcctccaccgcagcccaactgtgcctgctagtgtccccgtgcacacaggcagctccagggggctctggttgccaacaaacagcatttgtaaatggtctattagccttcatttatactgcctaacaattatttgaaggaataaattgatgtcaatggctcgtacgcattcaattcttgggagctttcctgtttaatatgtggcaaatatgtgatcttaaatttataaggactatccatctataaacatctggtacctgc

SEQ ID NO: 444444 - DNA, 1548 bp, Homo Sapiens
gttgtttctttaaaaaaaatacacatttcccaatttcaggtataatggtttttgaagccgggggaaaggcagccagggaaaaataaggggcccctttttcctattgatccctatggttggtgaggctttgagggagaaccctgctccccactcgggggtattcaaaaaataatccctaaaagcagctctttccaaagcaatcttgtcagagaaataacaaaacctcataacaaggtagccagggacccagcctctgggtccccattcctttattgggaagtggtagcacttggcactgacccactaaatataaagaactaaaactgccccaggacgacaagtccaagaacactatagtgccccctgcatcccgaacactccactgacgggggttatttatgtgcaagcttgcctacagctgagggtggggtggcatccttggccccactgcagatccctttaacccacactgtgactctttctcattgccacccaaaagcaaaaaacagccacagcttctttatccacctgcagctttctctggtttagtatcagagtggcaaaaaaagcagcagcacgtggaagagatcagctgctggtactaagccagcttcacttcctccaaccaagcagctctattgccaggtcccccaactcactaggaaccctccaacaaccatacacctgccagtaaaatttaagagccaagctgcggaagaaaactgtcataaaagtgggtttgttgaccgggggcagtgggactatttggcttgattaaacaactattcaactaccaggtctcccctctacttggaggcttcctccaggaccctctgatgatgaggcctgggtccaaacagtcacacctcagttgcttttcagaaacatgcctcccaactttgggatttgagagccagccttgccagccatttgaagcccagagaaacagcctccagcctttacttgctattacaatgttattttctgcaatgctgaggacacttaaaaataaaatctatctagaaagtgtgcagattaaagaaacaaaatatcctgaaataactgttacaagcaaatcctattgcactcagatttcaagatggcagccccagcaaaagggcatcacagctgtccctcttcaacaggacattttgagtagcagcagatgttggtgctgctgaaatgtggaaagatccagactttggcaccaggagctatagcaccagaatccagggctccaacacccaaagacaagaattattggcgagatctttttaggcatggcttggcgcccttctgtttccatcagcagagaagagccacagacttagtttcctaatacctttagttgaccaccacagaggttgattttctttgaactctcaaggttgccaaccagtgaaggagaatggcagggaggctgcaagtgaaggatggcagccttgagtgagctagtttctggccagtaagccaggagaagcagcagtaagagatcttggaaatagcatcttgagcatcagagatccggagaattccggaccggtccag

SEQ ID NO: 444445 - DNA, 1296 bp, Homo Sapiens
aaacaggcaacttgttttgccctggttaccctgggggctccgaagacaagacctaataggctgaggctggtaccccctctgcccgaataacgcctcgggctggccgctgcagagctttcaggggtggccaggtccccaggcctactcagctcacggcgcagagagaggaaggagaaggcggaaggttcaggttccagcccctcctccaaggccccatatggtgggcctgctggtgcggcagctcctcagctggggctcccaggcccgcccccagtgccccacagtttggcactctgctcccagagtgtggcctgtaggccagctccgccgggggcgagtcagggcctggtgacggctccccatacaggctggcgtcctccgacccctcgtcttcctgcaagtcccggtataagtccagtggggccctgtaagcagcaggggagcctcgggggggcaggggtggcggctcctcatcctggggccagccgctgctgcagccaggccacacaggaggccacgtccccgctggcacgccgtgcctgcagcagctcctcagctggcagcacactggtgcccagctgggccagcacctcacccaggatctcacactccagccggagggcgaagcagcccagggccacctgcaccagctggcaggcggggggcagggcggtcaccatgagccgatggctgtctctgcgtacgtagcccatcttctggaagctcttcaggaggaggtcgtctgagagcacacccttcagcacgtgcacgtagcccccagagaaggtcttgatggtggtgaactccttcctccagggcagcaggtacaggtgcaccgcggcgagctccagaagctcgaaggcgcgagccaggccgcgtagcgcgggcgccaggtcggcgcggccccacagcccgtcggtgagcagagccagcgcgtcgtcctgcagcgccccgtgcaggtcgaagtcctccaccaggatctgccagagcaccgcgcgcagcgaggggtccccgcacacgcccgcagcggcccccgtcgcagctcgcgctccaggcactggcggtagtcctcggacagcgagctgctgcccatcctcggccttccaggggcgcccccggttatcgaccgcacccttctctagagacgcgcttccgcccgctgagccctctcccgaccagagccccttcgcccggcagatggagctgcggatcccgcgggtgacggcgctacctgtctgtccccagcggtctccggccgccgcggatcagttcgggcctccccgcgcgccgcgcgct

SEQ ID NO: 444446 - DNA, 931 bp, Homo Sapiens
ggaagcgcgcggcgcgcggggaggcccgaactgatccgcggcggccggatgaccgctggggacagacaggatgggcagcagctcgctgtcctgaggactaccgccagtgcctggagcgcgagctgcgacggggccgcgcgggcgtgtgcggggacccctcgctgcgcgcggtgctctggcagatcctggtggaggacttcgacctgcacggggcgctgcaggacgacgcgctggctctgctcaccgacgggctgtggggccgcgccgacctggcgcccgcgctacgcggcctggctcgcgccttcgagcttctggagctcgccgcggtgcacctgtacctgctgccctggaggaaggagttcaccaccatcaagaccttctctgggggctacgtgcacgtgctgaagggtgtgctctcagacgacctcctcctgaagagcttccagaagatgggctacgtacgcagagacagccatcggctcatggtgaccgccctgccccccgcctgccagctggtgcaggtggccctgggctgcttcgccctccggctggagtgtgagatcctgggtgaggtgctggcccagctgggcaccagtgttgctgccagctgaggagctgcttgcaggcacggcgttgccagcggggacgtggcctcctgtgttggcctggctgcagcagcggctggcccaggatgaggagccgcagccctggccccacgaggcttccctgctgcttacagggtcccactggacttataccggcgcactttggcaggaagacgaggggacgagaggacggccagctagtatgggggagcagtcaccaaggcccttactctgccccacggaggaggcttgccttaaaagggcaccaatcttgggaacagaattggcaaatcgtggggcactgcgggccgggactgggagcccca

SEQ ID NO: 444447 - DNA, 522 bp, Homo Sapiens
aattccaaatattttgttagcaagaacggagttgcagttactcaaggaaggggaggagctcttcctcatatcttttttgcagccagaaatcaaagctgtcttttctttcagtacttaaatacctaagtttaaaaaatggcttctgcaccagctaccctcactgagcaagcattcttttgtcatttatggctgtttgagattatggcagaagatcagcctgtagttcctcattgaagaaatgcagaactcgatcagtacttcagcagttaatcgttggaaccgcgatgccccgttccactggccgcggccgcttctccaggacccgcggcgacggcaagagggcgagaactgaggccccaagtggctccgcggccgagaagcctcttcctggggcggccgctgacgggaggttaaagctacggctgtggcgcggggccagcccggtaagcgaccccccggatacccccggcggtggtggcgacgcagacgcggaacagggggagagagtggcgacagaggcgg

SEQ ID NO: 444448 - DNA, 548 bp, Homo Sapiens
ttttttcttaagttttcctaaattttatagacaccagaatcttccccaactggggcctaggagcctccccctgtaactcatctgctaattgcctgatgtgaaagaggctgtggcaagaaccccacaactgtttagatcctgagagccactcagtatccctgggccagtcccaaccccaggttgtgtccccctcaacatcggtgctaacgcccatggctctcgaaatcgtgtgccaaggcagtctgaggtgccacagcaagtgatcaagggaaccactggctactttaaaccttcgaggaaaacagtgatgctcaacatcagctgggcactgtaagtgaatagactggggagagcatgcagcctcagcacatgagaccacactagcttcctttggagatctgatatctgtcatagtactgtgtgaaaatcaatgtggaaaagagagagagtgatggttgcatagtctgattccaaagcttgaggtgtgcagtgcttgacaggttcatgtacatggtaagaaacagtgacaccatgcttgtgaagagcca

SEQ ID NO: 444449 - DNA, 833 bp, Homo Sapiens
  misc_feature (218)..(231): n is a, c, g, or t
ctccccccctgggttttaatttgggttaaaatggctaggaaaacctgttatttcctaaggagaggcataacctcttttcaggtggagccgtgataattggaggattttgatacttaggagtatgaaacatataattaagaaggtgatttcgtaataaagataaccaatgtgactattttaattattttgttggcagggagttggttttacatcacccnnnnnnnnnnnnnngccctggtttcaaattcattggtaataaatatgctaactttctgaatcaaaatggagagcctctcaagaaaaagagctatgcagtcagcaatgacttaaattagtcaggatagcaggcatctggggttaaggctgtttccaccattttggtctcaccaccatatacgagtgggaccacagctgtgtagcacttgtttctgtcataagtgtagcaggtctctgtagcactgtcttcatcacagatattgctctgggtagcagtaactatctgattatccagctccacttctgtaggatcacattttttacagaggtcagacaaatggtacacaaatctggttctcaatggtgaggtgggatcagagatattctccctgttgttcagaggaacaataattcggatgtttctctccacaatgtcctcattaggatcttcggaagaacggatgatcctggaagtaatccgggcacacttacatttgttgtcaacaagaacaatcctttcatcttcttgggctttcacatgaacagccttaataaaaaccgccaggactccccagaaaagcaaatggttcttcatcttgacttcacttcttctcccc

SEQ ID NO: 444450 - DNA, 723 bp, Homo Sapiens
  misc_feature (60)..(78): n is a, c, g, or t
  misc_feature (346)..(360): n is a, c, g, or t
aaaaagcatattttagaggaaaagtggggaaaggttttggtttttcccaggggaaattcnnnnnnnnnnnnnnnnnnnggcgggggggaaatccaagggaccatttttattaccccctcctggattttcacttcctggagttttatttttctcccccttgtttatttgttaaatgctagaaaactgtattcttaagagaggcatacttctttcaggtgagcatgataattggaagattttgatacttagagtatgaacatataattaagaagtgattacctaataaagataacaatgtgactattttaattattttggtggcagggagttggttttacatcacccnnnnnnnnnnnnnnngccctggtttcaaattcattggtaataaatatgctaactttctgaatcaaaatggagagcctctcaagaaaaagagctatgcagtcagcaatgacttaaattagtcaggatagcaggcatctggggttaaggctgtttccaccattttggtctcaccaccatatacgagtgggaccacagctgtgtagcacttgtttctgtcataagtgtagcaggtctctgtagcactgtcttcatcacagatattgctctgggtagcagtaactatctgattatccagctccacttctgtaggatcacattttttacagaggtcagacaaatggtacacaaatctggttctcaatggtgaggtgggatccc

SEQ ID NO: 444451 - DNA, 868 bp, Homo Sapiens
  misc_feature (226)..(244): n is a, c, g, or t
aggaaacgggggttgttcctgtaggcgggagcaggtcccttcttttgcagcggggcaagccatagcaaatcgtggaaagtttctggggcgtcgctagaagcggtgaccccctttagatatacgggagggggtattcccccttaagagaggataaacgcggtgggacgctattcttaagataaattcaggggggcaggggaatatggggttttcgccttcccacccnnnnnnnnnnnnnnnnnnngcccccgggtttcaaaatttcatgggtaaaaaaaatatgctaaacttttctgaattcaaaaaatggaagagccctctccaggaaaaaggagttaatgcagtcaagcaaatgactttaaattagtcagggatagcagggcatctggggttaagggctgtttccaccattttggtctccccaccatatacgagtgggaccacagttgtgtagcacttgtttctgtcataagtgtagcaggtctctgtagcactgtcttcatcacagatattgctctgggtagcagtaactatctgattatccagctccacttctgtaggatcacattttttacagaggtcagacaaatggtacacaaatctggttctcaatggtgaggtgggatcagagatattctccctgttgttcagaggaacaataattcggatgtttctctccacaatgtcctcattaggatcttcggaagaacggatgatcctggaagtaatccgggcacacttacatttgttgtcaacaagaacaatcctttcatcttcttgggctttcacatgaacagccttaataaaaaccgccaggactccccagaaaagcaaatggttcttcatcttgacttcacttcttctcccc

SEQ ID NO: 444452 - DNA, 669 bp, Homo Sapiens
  misc_feature (54)..(64): n is a, c, g, or t
gggagagaggaaagagggggcgccccctggttttcccaaaatttccattggggnnnnnnnnnnntagggccaaacctttttggaaattccaaaaagggaggggccccttttccaagaaaaaaaggaggctaatgcagttcaaggaaaaggaacttaaaattaagtccgggttagcagggcatcggggggtttaagggttgttttccaccattttgggtcttcacccccatatacgagtgggaccacagctgtgtagcacttgtttctgtcataagtgtagcaggtctctgtagcactgtcttcatcacagatattgctctgggtagcagtaactatctgattatccagctccacttctgtaggatcacattttttacagaggtcagacaaatggtacacaaatctggttctcaatggtgaggtgggatcagagatattctccctgttgttcagaggaacaataattcggatgtttctctccacaatgtcctcattaggatcttcggaagaacggatgatcctggaagtaatccgggcacacttacatttgttgtcaacaagaacaatcctttcatcttcttgggctttcacatgaacagccttaataaaaaccgccaggactccccagaaaagcaaatggttcttcatcttgacttcacttcttctccc

SEQ ID NO: 444453 - DNA, 1356 bp, Homo Sapiens
  misc_feature (666)..(681): n is a, c, g, or t
  misc_feature (938)..(951): n is a, c, g, or t
ggagggggggtatcccagagccaattgtgcggggaccaggggtttctgcgggggaaaagcggcaatggccccgttttacatttttcctttatggggcgccccgcggcccaaactaaattgttctaaaaaaatttttttctagagccctaggggggcccgcatatgttcattatgtcttgatcgcttttcgcgtcgggcgatcggtgtcgtttgttttactaggcggtttggttttagacaagtgttcgggtggagtggtgttttatgcttatgaatctatttaattgctcagactgtgctagagaatacgtaccatgaaatacatatatttcataaggttcagttacaaaatggattgtttcaaatggcaatttcttacactaacctgattatgaaaaaaagaagtctgtatcatctgcttccaagtctgttatgtccaaatatattttaattatgcatttattttgctacttttataaatattagagatttcaccttaaattatttttgtaactagttctagaacatgttttccaattattatttttctaatggagacatataattgacctatgtttatgcatatatgttctctacacagtgaaactttttttaaaaagaatagtaaagaaaatgcggaagctctggctctccaaggcaaagtcnnnnnnnnnnnnnnnngcgggggggaatgcgaggaacattttattacacctcctgattttcactccttgagttttattttctccccttgtttatttgtttaatgctagaaactgtattcctaagagagcatacctctttcaggtgagcatgataattggaagattttgatacttagagtatgaacatataattaagaagtgattacctaataaagataacaatgtgactattttaattattttggtggcagggagttggttttacatcacccnnnnnnnnnnnnnngccctggtttcaaattcattggtaataaatatgctaactttctgaatcaaaatggagagcctctcaagaaaaagagctatgcagtcagcaatgacttaaattagtcaggatagcaggcatctggggttaaggctgtttccaccattttggtctcaccaccatatacgagtgggaccacagctgtgtagcacttgtttctgtcataagtgtagcaggtctctgtagcactgtcttcatcacagatattgctctgggtagcagtaactatctgattatccagctccacttctgtaggatcacattttttacagaggtcagacaaatggtacacaaatctggttctcaatggtgaggtgggatcagagatattctccctgttgttcagaggaacaataattcggatcc

SEQ ID NO: 444454 - DNA, 948 bp, Homo Sapiens
  misc_feature (181)..(194): n is a, c, g, or t
taatgctagaaaactgtatccctaaagagagccatacctctttccaggttgagcatgataattggaagattttgatacttagagtatgaacatataattaaggaagtgattacctaataaagataacaatgtgactattttaattattttggtggcagggagttggttttacatcaccccnnnnnnnnnnnnnngcccctggtttcaaattcattggtaataaatatgctaactttctgaatcaaaatggagagcctctcaagaaaaagagctatgcagtcagcaatgacttaaattagtcaggatagcaggcatctggggttaaggctgtttccaccattttggtctcaccaccatatacgagtgggaccacagctgtgtagcacttgtttctgtcataagtgtagcaggtctctgtagcactgtcttcatcacagatattgctctgggtagcagtaactatctgattatccagctccacttctgtaggatcacattttttacagaggtcagacaaatggtacacaaatctggttctcaatggtgaggtgggatcagagatattctccctgttgttcagaggaacaataattcggatgtttctctccacaatgtcctcattaggatcttcggaagaacggatgatcctggaagtaatccgggcacacttacatttgttgtcaacaagaacaatcctttcatcttcttgggctttcacatgaacagccttaataaaaaccgccaggactccccagaaaagcaaatggttcttcatcttgacttcacttcttctgaaaaactggagcaaaaaaagtcagggttaaggtgtgtgatctataaggagtgtgcaaatgatggtgcttctgctttcttaaaataacactccaggcagctaacaaactaaaaacaatcacaactgtggttgaagtctgaagtttaaatgctccc

SEQ ID NO: 444455 - DNA, 845 bp, Homo Sapiens
  misc_feature (79)..(95): n is a, c, g, or t
  misc_feature (131)..(132): n is a, c, g, or t
  misc_feature (354)..(368): n is a, c, g, or t
tttctctacaccagtgaaacttttttaaaaaggaattgtaaggaaaatgcggaagctctggctctccaaggcaaagtcnnnnnnnnnnnnnnnnngcgggggggaatgcgaggaacattttattacactcnntgattttcactccttgagttttattttctccccttgtttatttgtttaatgctagaaactgtattcctaagagaggcatacttctttcaggtgagccatgataattggaagattttgatacttagagtatgaacatataattaagaagtgattacctaataaagataacaatgtgactattttaattattttggtggcagggagttggttttacatcacccnnnnnnnnnnnnnnngccctggtttcaaattcattggtaataaatatgctaactttctgaatcaaaatggagagcctctcaagaaaaagagctatgcagtcagcaatgacttaaattagtcaggatagcaggcatctggggttaaggctgtttccaccattttggtctcaccaccatatacgagtgggaccacagctgtgtagcacttgtttctgtcataagtgtagcaggtctctgtagcactgtcttcatcacagatattgctctgggtagcagtaactatctgattatccagctccacttctgtaggatcacattttttacagaggtcagacaaatggtacacaaatctggttctcaatggtgaggtgggatcagagatattctccctgttgttcagaggaacaataattcggatgtttctctccacaatgtcctcattaggatcttcggaagaacggatgatcctggaagtaatccgggcacacttcc

SEQ ID NO: 444456 - DNA, 660 bp, Homo Sapiens
cacgccctccggaggcggcaaggaaaggtggtgttagagctgcgggcgtctgcaccggcgtccccgtccttggagggcggcgggtggctctgggcccccaccgtggagccgggccaaactgcggagggagagagggcgcggagcccgggagtctcgatgtccttgccccgacgtcggtgggcgcggcgacaagcacaggagaccaggaggccagagactgaggcgcccagggcaaaagctgcggccacactggccaggaggagtgggatggggacggagcgggaggccgaggctgggggcaggtcccggcgcacgccataagcagaatccccagggccagactgactcccagtagctccatcttggcagtcaccatgctccatggattcctggttcccagcctgatccacatcagtcccaccagatcccctgatatccacacagcccctggagctatgccatccacagtatgggtcctgagaagccaaacagctcctctgacaggccccatgccgggcacaccggctgagagggaggtagacaatacagccagaaaaagccacaaaaagcctgtgaccctcagtgtccagctccagccctatgatccgtcgtgctgtttgggctgtccgcttcccactgcaccgggcagggctgtaggca

SEQ ID NO: 444457 - DNA, 1262 bp, Homo Sapiens
agcggggtttcgttcagttctcacagtgatctagtgtctgacttttctagggaatccaatcaataaaattgaagactggctgcaggattgcggatactctgaagaaggattttctgaggaagcaggacagtttatctacaatggcttctgcagccatgggaccagctttgaagatgacttgaccctgggagcggaggccacactactggccgccaatggcaaactcttctccaggagtttcctcgagacagccaggccttgccagctacttgatcttggctgtagtttggcttccagcatcatgactggggggaccaacaagactagttcaagcatctcagaaattctggacaaagtgcaagaagatgcagaagatgtcctctttcagtctgggctttggccaagaggatcacaaagacacttctcggatacccgcccgattttttcaccaccccctctcaggccaagggcattgatttccagctcttcctgaagtcccaggtgcggaggattgaaatggaagacccctgcctcatgctggccagcaggtttaagcaggtgcaaacactggctgtcactgctgatgccttcttctgtctctactcctatgtgtctaagacacctgtccaaaagttcacaccatcccacatgttctggaattgcaaccatccaactgatgtgccatccatcaggattctgtcccgagagcctgaaacccagtcacccagagaccgccttcggaaagccatctccaagatgtgtctgtacccatggccccgagaccggccaccaccaccccacaacacccccaaaaggaacagtttggaccaagttgtgttggaagtgatggacagagtgaaagaagagaagcagttcctccagcaagactctgatttggggcaattctcacaggaagatcctgtgccccctgctgagggtaagaagttgcccacttctccctatccatgtgtcttctgctgtgaagaggaaacacagccagaggatgtccacagtgctagcaccatcccaaactctggattcgaaccccaaggtagcctgttgcacacattctctgcccatagaagatccacagtggagcacagacccagctcagataaggagagagctgtgtagtctaccagccaccaatacggaaacccatccagccaaggatgagactttctggaaaagaaagagcagagcaagaaagagcctcttccagaagaatctcatgggcaggaaggttaagtccttggacctgt

SEQ ID NO: 444458 - DNA, 665 bp, Homo Sapiens
tacaaagggcgcagtactgtggcacatggtatatattcaatacctatctgctaagatgtgccaggaaatgccagaggcccactactggtttttagaaagtacagactaaaacttaaacaacaagaagacatctcccagaccctagaggctgagtgagcttctgcctttaattttctttttccaattacctttttacagatgaagaaacctaagcactttctcattctgtcttgttttatcttgtaggatatgggggatagaagatggtgtcaaaatttattgagcatttatattaagtccagcatggagctaggcattgtcacagagtttgcctcttttaatccttgcaacaaccccaaaaggtacaaatgtttaccccagattagggtgagaaggtaaagaagggctaaggttgtgaatcttgcccaaggtcatataactaataacatgcacagctgggattcaaacccaggtctctccagtcaacatatgctgcttcctaggtcctgacttgagccagaccttaaccccaggtatctggggatccttccgtaaagacacagcaagataagattttatctcagcttttaaatttgggactctaaaaagcttggctgatgcaacaaaccctttgatgatttatttaaatacttatagctgcagct

SEQ ID NO: 444459 - DNA, 644 bp, Homo Sapiens
gaaagccacaggcctgtaaattttatttgtaaaaaagcatttctatttttatacaaaatttttactgcctcagaaataatggaagttatttattgcctattgttaacttattgggtacctaaagagcagttctctgtctagctagaaccttctgaagtagtctctagaggaattgttctaggaatgggctttttttcaccgttgaaccctagacctgaagttcatgctttatcctctcgttgtttgtatctgtctgattattttgtttgtaacttccattatctagtttacagttcagtcgtctgactttccccgtatgtcacatttgttgaaactggaccttctccccctgtccctcaccccaaaacacccggaatccatcccctttcgctctctccagatggattctcttggggtttcattgtgctgtggataaggagtgtaagaaatgcaaattatgtgaatggctcggagactccctaatgacctaagatttgcattagtttttctcctgcacccttaaaagtgattttgttgccgctgcatagattctgtgtaactttttactcttccttgttttttccctagacatcttcatgcccgttagttcatcgtttgcctaggcatgtccctgtgggcgtctc

SEQ ID NO: 444460 - DNA, 281 bp, Homo Sapiens
  misc_feature (108)..(108): n is a, c, g, or t
  misc_feature (130)..(130): n is a, c, g, or t
tatggcgggatgaattaccgtcggctagggggtggcgtaggagttattaaaatgacacattgtaatcccatatttggtgaacacagagaagacagtccttgtatatanttcctctgtattcctggggagnctttgacccttggagctttgtacagcttgagaaaacattagaacaaattttattatttgccggtgcctcaacaaatggaaatacaatccaatgaaagtacttcacctgcaagatgcacaataattttcaactctgtgcagaagaatattta

SEQ ID NO: 444461 - DNA, 641 bp, Homo Sapiens
ctagccccacagcggccatgtaggtgctcccgatggtcttgatcttctctatgtccttgtaaaagtctttttccatgagctcgtcaaagtcggcgatgatctcgttgagaagccgcagacactccacccccatgttgttgccgtccagctcgatgtagaagtcattgaagttggggatggaggcaaacatgacgcccacctgggagtaggactggtagtagaggtccatgttccgagggttggacatgaggaagtgctgggcgacgtgggccggcaggaggttgaagaggatgcgcctgttgtccagcttcaccttctccatgtcctctcgctcctcctctgcctgtgcggcccagaggtagtccagcctcagcctgatgtccacctgcctggcatgcagggccagcgcacaggagaagagcaggatggccacaatcggctcgtagctgcgcccggagacggcaccacccccagtcctggtgtatccgctgagctccagaacgaggatgtaggacgtggtgagcccggagagcaggatcatttttggcaaggaggacacccggaaaaatatggctagcgggagggtgcccaccaggcagcagagcagggcatggtgtgtagactcgcagggcagggtctcg

SEQ ID NO: 444462 - DNA, 1128 bp, Homo Sapiens
  misc_feature (14)..(14): n is a, c, g, or t
  misc_feature (49)..(49): n is a, c, g, or t
  misc_feature (98)..(98): n is a, c, g, or t
ccccactgtgccanagggtaaaaaagttttgtgaggccataagacaganctgtcctgcacgttgattgaaaaaaatgcctatcttttgaacacgtgtncccctagttcttgtaaaaggattagaatggacttttacccaaagttcacttgaacaccagtacttattggctcaccagcaataggattagcaattttgaaaagaggtaggctctccttaagagagcaagcctctgaatctaggccgaggatcagggttcctactgacaagggcattaagtgcacagcccctgtgcagagccctgatcaacacctaacaccacaggctgggctgaggagtcggctgtaggcacaaagacaggcatgacagaaaactgcatcacgggtagtttaaccaaagccactttgggctttggtaaaagcaacttctgaggatatctcggtggtgttgtaagagtctgcttgtcagtgttagagccacaagagtcttcaaaagatggttctagctttatttctgaagcttctagttcttgagtgtctggtctagggattggttggttgttcaatgattcaatggtcttgttggataacttctggttttgtgcacagttttccattttccttttcttactaggtgggtccctgtgttctgcaggtatctcgtgcccagttcggtagatgtgagactgcagtgctgttctactggcgtagggacagccgcatgtgcaccggaaggtcttgccacagtcctctgcatgtcttttcaggtcccattctgtaccgtacgaattgctgcacttactacatttgtgcttcttctcagcatgcattttcataaagtgctgttttacgagagaaaactgagaaaacggtctctcagggcctctggggcagccttcaattggacagcagtagaatttcggtccagttttcaaatcttttcttattgttggattgactatgccatcctgcaggcggtggctcttgactaggtgcatgttgagcgcggggctgttgggcaggatcttgccgcagccgcgcacggtgcacaggatgttggtccgcacggcccgggacagctcgctcacggacggctggatcagctcccccaccgcggcgcggggacagcgg

SEQ ID NO: 444463 - DNA, 576 bp, Homo Sapiens
ggcgtgacacatttgataggggacatagaagttgtgacctttcatttcagtggaaagcattgggcgaggatatatttattcctaaaccatcgagccacacatgcattgatgaagcctgaaagaatccacagtaattgactaacaggcagtactgaatgaaagatgtcatatgtggtgaaaaatatttaatatatcagtttcttgggctcacatacagccctttagttccaagtgcttggttagattagaaaatgggatgaacacaatttgatgctgaagcagctgctgagcagcacccagggagtctaggtcatacgccctatattgttttcggcccacttattgttgagttgaaaagtctcatatttgtagactagagtgtatgtgtttacaggcccatgttgtatctgagttttctctggcaactaagatctctttctaaacgttctagaaagatactggtatcttactggcccattatttagtaagttttagaatacatgtacatcagtgttttcaactgcttggtggacatttcactgatgcataatcaaagtagcagattataatcatcag

SEQ ID NO: 444464 - DNA, 431 bp, Homo Sapiens
ggcagctgaaaaggacactgctgccacggtgcctgagctgttgtcagggaggcaggcgacatactcctcaccacagccactgtccagcaaggggatgccaagcagaggctggccagccagggagccaggcccagcacacgtggctgcctcgggctgcaccacccgcacctgctgctcctccgcccatcgcggcagccacgccaggccacagtcacactcaaacgggttcccactcaggtttatttcacttaaattaaataaattagcaaatattccttcttctaacgtagacatcttgttgttgcttatatccagctctgccagcgctgagagtttggccaggagcccaaggtccagcgccgggagcaggttgtgggagacgtctagcgctgtggcgtccgcggggatgcgcagcgcgggaccgagcgtcc

SEQ ID NO: 444465 - DNA, 417 bp, Homo Sapiens
gatatctagaatcactataaataatgatctactgacagtaactgctttgatatttccaggtcagattggctttcttgcctctcaggaggagatagacttttactctaacaaagtgatgacctgggggtttcagggcatgcttcctgaggaagtgacattcagacctgaaggatgagtaaagctagtcaggggaaagtatgagggaggggataaggagatgacggagaaagaataactacactctgggaactgaaagaagctttatctagatggctgaatgttgtcatctgaaattgattgcttcatcctgttaatccttattgattttaattcttcatggaagtgatctattaacattcctttatagcaacaattgaatagaatttattaacatctttttttccttatcctcgtgcc

SEQ ID NO: 444466 - DNA, 754 bp, Homo Sapiens
  misc_feature (483)..(557): n is a, c, g, or t
  misc_feature (631)..(681): n is a, c, g, or t
tccataccttttttgcattcgatcatgcatccaactatatcaagatcatattaacaccccactccatttgcagatgatgagatggccaatgacgggtggttggcatcatgtactggtcgtggcattgctagctgccctgggcaccatattccctgcatgtcaccactcctggttgtccaacaaagcaaagtcacaatgacaagatccagagaggggagtctccagctggagatggtgccgctgtcacagggcaccagagcagcaatgtgacagcttctcatggaggcagactctgttcccagtccctacccaaccctggcttgatccttgtcagtgtcttatttctttgccttgccatttatctcagcctggcttcccttccaggcagctctgagtggctcttggtccaggcttgtctccatctctccttcctcttgcccaactccctaaactcaggacccagtcactcctgctccttacatnnnnnnnnnnnnnnnnnnnnnnnnnnnnnnnnnnnnnnnnnnnnnnnnnnnnnnnnnnnnnnnnnnnnnnnnnnnaccttaggaaacaggtttccttccatgaacctttattaagacctgtggggaatgaccaggatctgggcccccannnnnnnnnnnnnnnnnnnnnnnnnnnnnnnnnnnnnnnnnnnnnnnnnnnatcactgtggcatgtggaaattagaagcatgtaggcctcgtgccgattaacacccagcctcggtacctagtca

SEQ ID NO: 444467 - DNA, 448 bp, Homo Sapiens
ctgtagacttccaagctgtataatttggattcactggccaaaatctcctctgagatacttacatttttaagagtctatggtctcttctcttcgagggcatgtatatggtgctgagtgtatgtaattttctgagatctatcaaagtatcaccattttctcatgcccaatgaaactgtggtatatgttattcatattctctgtcatttccagtcctcttttctctctgagaagacagaagaattacagttctctacaaagttataggtaagcatgatcatgtgacctgctttggccaatgaaaatggtaagaacatttaagagacaatttatttcttgttctttctctgctgtagaaaaccctaaagactcatgtcgagatggtcacatcaaaaagcagccaagcttctgagcgtataggtccctgaacgtccaagataagcatagcccc

SEQ ID NO: 444468 - DNA, 2175 bp, Homo Sapiens
ttttttttaaatgagccagaaggcagatactgtttttattttgtgtggggggagggggaagcggcacagtactagcaggagatgaaataaaatgattaggaaacaatgaggttataagatcactgttcttatttgggttaagcaggtcatgttgagaagatggttatttctttcagataaggatgctacattaaaggaatcgtgtgcagcatgaaaagattagaatcgagctgcacctaagaaaaaaatcccaaagttactttcaaaagtatgtgttatctgccagtcacagaggggaaaagcacctagggtgaactccaattttttaatgaggaccttgatcaggaccacaaagcctgaaacatttattttaatgcagaaacacagcccctagttacactgattgcatttgggaaaattggagggttttttcgtccttagttttttttattaaattacaggatatggttttcgattactaagtattcgaaatcctcataccagcaacagaaatgaaccacttccaaattctaagacacaaaagaccaaagagaagcaaaagcgatacaaattaatatgtgcccctctcctttctgctctaagggaatctacaaaccagtatcacatttaggagtcaaagtgttaattcttcagcattcctgacaactagaaagcacattcactgaaggctgaaggtgagggagtggatggtttaactttaatatctgaagaatggcgccaatagaggaaagaaaaccatccaatctcagtaaggattaatgcaaatctggctagaaaaagccaccaggtaatccaagggttcactgtggaagaactcatgaaaagtactctgaagtatacacaacaggtctaaacatctcccttgtcgtaagtagttgtgtaaaattcaagataaagatttagtctcatcttttaatgtcagttttttcccccatgttaaagggaatgaggaggagtcctcttttattcccccacaagaaaaagggagccacattaatatgtgtatattcccataactctaatgtaagtgcggatctccaaagcctagggatttttccgtaaaagagagtgggccgttctggttacccttttattagaagggtattccaccacagagagccggaggttttccagatgtgtgtaagagagccaggtgccgcaaggcaagcaaatgagcgcaaacagtattatggaaaacatttgagaagttagctccatgaggactgtgggctcccacaagaggactcgactgggtagcctggtctgacacaggaacgtgaaagcagagtattgcttcaaagctggaaaccttccataggagcctcacactgttggaagatgtactgctgctggttaaggtcaacctggggtgcaatgctgctgtcttcatcttcggtcccgaagtaatgctcaataagatcaaaggccttttggtagatctcctggttttcatgactctgtaagaactcaattttatccagaccataagcttcttcaatcaaagcacagtaagggttaatgccagtgccattccttttggcttcctgttctccaagcctcaggatattttcccaagccatttagggcaacctgtacaatcttagagtccatgaccgtgaggagatcacagagcggcttgatacaacccagttctactaggtacttgatctgttcagctgatcctccagaagttgcatttgtgatggcccaagctgcttcttttcttgtccgaaattcagcagtttgtaaaatactaatgagggctgggaaaatgttggcatctatcacagtctggatctgtgccctatttccagctgtaatattagatatcgtccaacatgcttcctttttgatagattcctttgggctactcaggaaatgcaataaactctgcagagctgagcaattcagaattacctgtgtctgaatatcatcccctgtgacaatgtttcccacagctcgcaaagcaggagaaaccactttataatcattatgcatcagcagttccacaagtctcctacatactcccgcatcgatgaccgcttgaattttatcattgggtccatctgatagatatgagagggcccagcaggcatcagccagtacatcagtgtcactgacaaacagcaaccaggaaagcacattcagacatgg

SEQ ID NO: 444469 - DNA, 548 bp, Homo Sapiens
agactgtgatggatgccaacattttcccagccctcattagtattttacaaactgctgaatttcggacaagaaaagaagcagcttgggccatcacaaatgcaacttctggaggatcagctgaacagatcaagtaagtaccaatcaggcagcatattgtaagttaaagaaaaattattattgtgtctatcactttataacctcccacatattacctagagtaaaagattagctgcctttgaggggaaaagtaagtgagagacgatcttaccaaataagaatgtttagttccagtccttaggaaattgtccttggtgtcataattagatgtgtatttaattctttataactctcccatttctttttgctgaaaaacaatcctgggatataagaagtaggcatagtcgaggcttgaggcaatagaaatccttgcttcaacctactctggagctacttgtcagaaatatcttgggtaatataggttacttgtagaacttgagcccaagtttaataactcactcttgccctttttagtttagatgtcttaatag

SEQ ID NO: 444470 - DNA, 424 bp, Homo Sapiens
gcctcaaataaagatcaaaaggcccttttgggtaagatcctccctggttttccatgaactctgtaaagaactccaattttatcccagacccataagcttccttcaatccaaagcacagtaagggttaaatgccagtgcccattcccttttggcttcctgttctccaagcctcaggatattttcccaagccatttagggcaacctgtacaatcttagagtccatgaccgtgaggagatcacagagcggcttgatacaacccagttctactaggtacttgatctgttcagctgatcctcccagaagttgcattttgtgatggcccaagctgcttcttttcttgtccgaaattcagcagtttgtaaaatactaatgagggctgggaaaatgttggcatctatcacagtctggatctgtgccctattt

SEQ ID NO: 444471 - DNA, 825 bp, Homo Sapiens
ggaacttagttttgcatagttctagtgcagctgaaattgaaaagttatttccctttagctgtgttattatagagcagaaattctgtttttaaaaattagcctaagatatacttgtttttgtaaagaaaaatatttaatgttgaacaaaataaattggagttggagtagaatgtagtttgaggaaatttgcagcttccaatgcctcttgtcttcctatttcagaagtttaaatattaagcatgacagaaaatatgtattaacactactcaaagcaaaagtgctgcagggctttaaaattctcttccaaccatttatcttgaaggaaaaattcaatagtaatataatacacaaaatcaaataataccttagaaggtattaagattataattgttgcataggttagatatagagtcattgtaatgttgtgaataattacagtgcctaaaataagaatagaacaacatatacaacaccaaaaaatatctagtaatatatttaaagggaaattgagctgctttttttgaaactttgagatctaaaaataactgtaattatttgaatgactaagaggaaagtacattttttgaaatgctgaaaattgcctttctgtgtttattcaaactgaaaagctgagaccaagagcaaggaaggtaaaaagttaacaggcaaacattttctcttagaaaaggtgataaaatcataagtatttggaattagaacccttgcacagcactgaacctgggaaagagatttaaactctgaatttatctttgataacagggattgattttaaaatgtacatgtattaaattacatttgtaattt

SEQ ID NO: 444472 - DNA, 698 bp, Homo Sapiens
agcttacatgttggggattcttatccagaaatgggaaactccttgggctaaagtatttcctatccgtctgatggtgaagtccttcatctctcgcagtgcctgcctcaaggaatccatgttctctgcagtaatctggaccataacaccatcttccacaatactggacttggcaaggtatccagaagaggatttcagagcgccactgaacacaaagaaactggcaccagtcacttttctgggctgattgtgaatactgatagcctgggtctgatagtttccatcatcattctgtacacacacaagatgagagtctgccttttcattgaagcaggcacctcctgccaggacatgctcattggacttgttcatggctttcatcatctcattgtatctgttgctgggaattttgatgctagttttccgaacttccatatcaaccaccaaaccttgaactactggcaaggtatactggtaatttctgaagtctgcaagaagattcatgatggtatgccccgtctctccatacaatggcttccgttatctgacactgaatagtgggcatggataaagtcgatattcagctccaagtctcaacatcagacggataggaaatactttagcccaaggagtttcccatttctggataagatcccacacaagtaagtctggctaggtccgaggatccatcaagaatacag

SEQ ID NO: 444473 - DNA, 444 bp, Homo Sapiens
aacctcaactttattcatcttccatgtgcctgctgagtctcagactccctttctttccatcagctctggcagcctcatcaagatgactgaattcctacttcagctcccttgcctagcacctgagatggccaatggggctgaagcactgccatgaccccagcacttggccagcactgtgctacgttgctggtcacagctgggccatctgccactttgtgagctcatcatcagtcccaagtggaactagactcacagacctagattgctgacccctgcctggtttagcacagctccagattgcagaattccacagctatattgcgaaggctgagcctcctctgcatactgacagtgcctcaactccacccaggttctccacacctctcggcaatctcaggtcaccttgggaccaggttcacagcactgccttcctctcctgccctg

SEQ ID NO: 444474 - DNA, 575 bp, Homo Sapiens
cgagctccggaccccccctaagtgggactgctccgcagagccagtctcggtgctgctgaaggcagtgacagctttcctccaggagtcgttggctggggcctgcacagggagagcctggctgctgctctcccagatctcagtgcccaggctgctgccaggcacggtcacgtcaccttgctccagacataagttgttctgcttttttgcaaatcgaggaggaatacgggaggaaaggcctcgacctttgacaggcacctgcacggcctgctccttctttcttctctcttcctccagcaggcggcgctgcttcttggtcaggacttcgatgaagccttcgcccaccatagaacccacctcactctcctccccggggctggacccgcaattttcaatgatggcacttccatagttcaggtcaaactgtttcatggcctctccctgttcacctgccctcggagctagccaacttgcctccttctctgcctttttactggaggcttcgggtatgtcagcactggcatgggctgcccgctccagggatagggggagtgccactcccactgctgcagccactt

SEQ ID NO: 444475 - DNA, 471 bp, Homo Sapiens
  misc_feature (425)..(425): n is a, c, g, or t
  misc_feature (433)..(433): n is a, c, g, or t
  misc_feature (454)..(454): n is a, c, g, or t
ctcattttcatatcaattggcagaaattatctttattagaaaaatgaaattttcctgtatttacatttttacaccatatgaccgggcacttctgttgcctcaggagttatatacatatcagtttgcacacgaatttcaatccccattccttaaaacagttgataacacattgaacaaaattaaaagacatactacaagaggacaaccatagtatatacttcctctatcatagaaaggtgttaagcaaacatataattttgtagctatgcttggaaatatttaatacacttattggcacttcctcatgcagtggattaaaacatggacagatataaactgctgcagttgatcagtgaacattaattcccaaatgaaggccattgcttagggcagccagcttgctttcagctccaccatacagggcntcaggtcngttctgagtggggttttgggnttctgtttggatgtggc

SEQ ID NO: 444476 - DNA, 406 bp, Homo Sapiens
  misc_feature (387)..(387): n is a, c, g, or t
tgtaattgtgaattttttactgctaatttagaatgtccaactcactcctacagatattacaacttacaatacatgacacacacaaaaaacatgtcaaactttgctgtagagctgttagagaaagccaatatagatactgaaaattttagaagcttgtatttaataccctatacatttcaaaataattaaacattttaaatatgtaaacatagttttcaaaaagtgatgctgagcacctttaaacacaatactgatacattgtgactaaacatgcatttagatgaccatgaatttttaaaatctaatttaggaaccatttttaaagagctactccttgaaatacttacatgaaaatattgatagctccagtttctacctaaaaaccanaagagtatataattaggga

SEQ ID NO: 444477 - DNA, 449 bp, Homo Sapiens
cgaggaaacataataccagttttcgcagaaatgtgtctcaatctgtgactaccaaagccctcctcagtccttccctcagagggacacatttgctgtttctcccgcaagcagatgttgtggatgaggcgatagactccttggcaagaacgaaaggtgtgatgaaacctccctgctcggaagggtctccgtggaggtgtcctcatttcacatgctgggttttgcaagcgaggaagccaggcagtggaggaactagagagaggcaggcgtgtgtgtggacaagcgctggagccgcagccctcagactggcacgggaacgccagcgttgggtgttcagattccacgcgtatgtctgggctcactcacagcatggccgagtgtctgcagtgctggtcctgacccttccagagcagcagtggacagatgagataagactgtttcagaaacaaaga

SEQ ID NO: 444478 - DNA, 958 bp, Homo Sapiens
  misc_feature (23)..(23): n is a, c, g, or t
  misc_feature (71)..(108): n is a, c, g, or t
gaatggaatattgaactacgtanttgtgggcgcccccttgcggaggttttatacccggcgggtggcggcgnnnnnnnnnnnnnnnnnnnnnnnnnnnnnnnnnnnnnnatcaggccaaatcggccgagctcgaattcgtcgagagcggggttccacatcaacatacgatcatgtggctgcgccgggctgcgacactgcagttgtctacgcggccggggccgggacgaggaggcgttggacggggtcgcatacgttcgtcccctcgcattgctggccccgacagctgcgccaggatccccgggcggcggcgcggggcgtgaacgctctgggtgctcagccaggcctgcgcgggcccgaggccggaggaacccggactccggcgtagcggttttgacacaagggcgcatatcttcaaagcacctagtacctcctaccattgtcaactgatacagaattcgttgttgggaaggactggggaaacagctgtaaacatttgccaccctcagaagctgctggtcctgtgtcacaccaccttagcctcttgatcgaggaagattctcgctgaagtctgttaattctactttttgagtacttatgaataaccacgtgtcttcaaaaccatctaccatgaagctaaaacataccatcaaccctattcttttatattttatacattttctaatatcactttatactattttaacatacattccgttttattttttctccgagtcaagacaagaaaaatcaaaccgaattaaagcaaagcctgtaaacttcaaaacctgattctgcatacacgatctgttaatagtaaaggatggtatggcttcagtatttataccctggatgtgatacctttagataaagttttaacatatgcaaaaaacaaattcaagaaccaaaaagactctagggaacacgtgaagctatacaatgagggacgatgaaggtacaa

SEQ ID NO: 444479 - DNA, 539 bp, Homo Sapiens
agatctgtatgcagaatcaggttttgaatttacaggctttgctttaattcggtttgatttttcttgtcttgactcggagaaaaaataaacgggaatgtatgttaaaatagtataaagtgatattagaaaatgtataaaatataaaagaatagggttgatggtatgttttagcttcatggtagatggttttgaagacacgtggttattcataagtactcaaaaagtagaattaacagacttcagcgagaatcagttgacaatggtaggaggtactaggtgctttgaagatatgcgcccttgtgtcaaaaccgctacgccggagtccgggttcctccggcctcgggcccgcgcaggcctggctgagccccagagcgttcacgccccgcgccgccgcccggggatcctggcgcagctgtcggggccgcaatgcgaggggacgaacgtatgcgaccccgtccaacgcctcctcgtcccggccccggccgcgtagacaactgcagtgtcgcagcccaggcgctagcccacagcagcgctccgct

SEQ ID NO: 444480 - DNA, 782 bp, Homo Sapiens
  misc_feature (694)..(736): n is a, c, g, or t
atagctgactcttgaggatccaaggcagccaatggagacgctgctgctactactaatgttagcattgctgctaaaataactgtgttgcttctattctgcttcttctatgtgattgagaattagcatagttcattcccatggaaggtcaattgacaggctagcccagaagcattgagtagccaaactgattggtgagacaatcaagatttcaagatctcatatgatccacattgccagaaccacattctacctccttaatccacaaatgcattataaatccttacaaatcctaatgagatacagtttcatgtaagtaaattttaagatatttgatattcccctttgaagtaccaatttttcttactttcgaaaattagaatgaaaaccttcatgaaatggtattattcactgcctactttcttaaagactatcttcatcatgatccaactcctgtctgtataactcagaattaccattcttaacaataattatggcactgtgttgtaaagtggtgaggctcccaaaggtcactctgtatataatgctatgtgccatagtctttggctgttgggtttttctgtttcattttattttgattttagaatgtttctgactccttcatcttatcaggcttgtcactttttgtatgtagcagtgtactttctagaggtgaatctgtctaacttctaaaggnnnnnnnnnnnnnnnnnnnnnnnnnnnnnnnnnnnnnnnnnnntagaattaaaggattttcttagagccatgtgacatctgtgttagtt

SEQ ID NO: 444481 - DNA, 450 bp, Homo Sapiens
  misc_feature (408)..(408): n is a, c, g, or t
agaaatccttgacttacctgtgcagggtccttatgcattgctgccactgcaatggaccctgtgggaagatgtggcagacttgtacagttactacttgagaccatcactacgacagttactgttactacttgagaccatcattacgagactgaatgaagggggacgaacgtagaaatgaaaacttaagacgaaagaaactgttttaaagaaggcgaactggggaagaagagagctccctgcttctagtgagcaaaggcagcccctgagcttccacagccctccacatttattgggtaggatgaaagggaggaggaggtaacgactggtcagctgcttaattgatcacaagttcacattattgttaacaggcttcaattatgcctaatcacaagaaacacttgtgcctgngtcgtgactgccttcagcattccttctgggtggcagacgcag

SEQ ID NO: 444482 - DNA, 609 bp, Homo Sapiens
  misc_feature (140)..(141): n is a, c, g, or t
  misc_feature (591)..(591): n is a, c, g, or t
ctccgtcctggggattcacagactgccgcccaggcccgtgatcagacagcagctctgctgaacagcgcggggttaggagctgcggatctgtttgtgctaccggcgaactgcggcagcagcgacggctgcgaggagctagnnagctccgggcggcgctgcagagccaggcagaagcgtgcgcagcttcctccaccggcgcaggatggcttcgaggtgttgggtgcagcagagctagaggctgtgcgtgaggcctttgagaccggcggccttgagggtgcgctgtcgtgggtgcgctcaggcctggagcgcctgggcagcgcacggctagacctggccgtggctggcaaggctgacgtgggccttgtggtggacatgctgcttggattggatcctggcgacccaggcgctgcgcctgcttcggtccccacagcacccactcccttcccagccccagagcgcccgaatgtggtgctctggaccgtgcctctgggccacacgggcactgccaccaccgcggccgccgcctctcacccaacgcactacgacgccctcatcctcgtcacccctggggcccccactgagaaggactgngcccaggtccaggccttg

SEQ ID NO: 444483 - DNA, 1036 bp, Homo Sapiens
  misc_feature (444)..(444): n is a, c, g, or t
  misc_feature (492)..(493): n is a, c, g, or t
gagggatgtctttctggtgtgggccccaaagaccaaaccttaacatttttgcagcaccccctgggaaattgtcattgacgccccccctttgcgatgcggagtctggcgatgctggccaggtctctggtgaagacgctttggatggggacgtccaacttcagcattctccatcttttcacagtcgatgtacagctgggccctgtcttcctgcacaaacagggtgatgctcttccactggccggttgccaggagagcttcttcccacagacaccacgtgctgctttccttggacggtcaggctgaggtccagggtgcccgccttgccattggacaccacgctgaagacctggccagagtggtctttccgctccagggccagcagcgtgccccgggtcttcttcatctgcctcagggatgccagaaggagggaaccctttttctgcnccgcacaggcatccaccaggttcttggaacttgtcatcaggcacaggnnggggatcagggttggcatcctcgatgcggaaagctgggctggaagggtcggggcccttcaccagtcggcgcccagaccccttgcgggcggccccggtgagttcaaagatgtcaaacacgctgttgtctccgccagactctggaatgcggttggtgccacacacatgcatcaggaacaggacgcctagtccccaggccagccccatggtggagctgttggtgcccagcagggatcctgtgtgtaccggagcgcggcggccgggagcggtggcgagggcggcgagggctggaggggcgcggggaatgcctgtgcgtccggagtagaggttgctcctggagagcgacaggagccctgaactcgcaggccagctcggacgcagcggctggcaaggcggaggagccgcgcgcttttaaaggggcgctcgcattcctggggattcctccggccaatgggcggcggccgggcaggaagcgggaggtgggggccagtctgggctcctctctccgccccccgctgcctggcgcgcaactgtacggcggggta

SEQ ID NO: 444484 - DNA, 1171 bp, Homo Sapiens
  misc_feature (204)..(222): n is a, c, g, or t
ttttgccatgcccatcagggtttattgtttctgtaacagcggccacgccctggggcggtggcctgtgcagctggagatctctcagcaccttgggttgggggcggggctgggcgggacatgggatggaggcggtgcctgtggccagacagggtggaccttggggcctgcaggcaggagatgagttcggcggccacagtggccccnnnnnnnnnnnnnnnnnnngggaggttcagcgggcgcgctcaccgcaccaggtggaaggtgagccagtacatgagcataggctgcgccgccgccaccgccatggtcaggtacatgcgcagctggttccgggccccacgcaccgggaccccctcagctgctgcgtctgccaagatcttcagccgcagcgtccggatcatgaacacaaagatggccacgcagcaccagcccagcaccaggtagtagccaatcttcccgaagagcaggcccatgaggaccccgccaatcatcccgacatatttgtagcccaagaaggccaccaggtcgatggtggtgaggtcggtgttgacagtgaccagatagaggctgagcaggatggccagcacctccagggtcagccaggccagggctgagctcgcttgcagccccaggaggtctggggagaacctatcctgggtccccagcgcaagaccagccaccaaaacgtaggtgatgaaagccattgctggaatgtagaggtccggggcattgacgtcaaagcggggggccaccggggtgtcctgttggtactgcacttcccagtcctggtgtaggtaggggaagaacagcaggcccagctttctgcccacatacatggtgtccacagcaaagtaatacttgagcttggtgatggggatgaagcggtcgatgttcttatccaccagctccttgccctgcgcggccaggctgctcccataggccatggccatgttggacaccgggtcagccaggaaggctgcatggggcgtgggagaggctgcaggataactcaggccaccaggtgcccgctgggccccatagccccggctctgggctgaacttgtgtcatcgaaaagctggtgggggtcggccatgcccggctgggacacagggatcctccgcttcgaggccgaacctggcatcccagcgctgtgcacacctcagggttcca

SEQ ID NO: 444485 - DNA, 1241 bp, Homo Sapiens
  misc_feature (1153)..(1189): n is a, c, g, or t
gcggacatgggatggaggcggtgcccgtggccagacaggtggacctggggcctgcaggcaggagatgagtcggcggccacagtggcccccaacagcagcagcagcagcgggaggttcagtgggcgcgctcaaccgcaccaggtggaaggtgagccaagtacatgagcataggctgcgccgccgccaccgccatggtcaggtacatgcgcagctggttccgggccccacgcaccgggaccccctcagctgctgcgtctgccaagatcttcagccgccagcggtccgggatcatgaacacaaagatggctacgcagcaccagcccagcaccaggtagtagccaatcttcccgaagagcaggcccatgaggaccccgccaatcatcccgacatatttgtagcccaagaaggccaccaggtcgatggtggtgaggtcggtgttgacagtgaccagatagaggctgagcaggatggccagcacctccagggtcagccaggccagggctgagctcgcttgcagccccaggaggtctggggagaacctatcctgggtccccagcgcaagaccagccaccaaaacgtaggtgatgaaagccattgctggaatgtagaggtccggggcattgacgtcaaagcggggggccaccggggtgtcctgttggtactgcacttcccagtcctggtgtaggtaggggaagaacagcaggcccagctttctgcccacatacatggtgtccacagcaaagtaatacttgagcttggtgatggggatgaagcggtcgatgttcttatccaccagctccttgccctgcgcggccaggctgctcccataggccatggccatgttggacaccgggtcagccaggaaggctgcatggggcgtgggagaggctgcaggataactcaggccaccaggtgcccgctgggccccatagccccggctctgggctgaacttgtgtcatcgaaaagctggtgggggtcggccatgcccggctgggacacagggatcctccgcttcgagggcagccggggcgtccccgcagccgccgccgccaagcctgccgggtgcatccttcgccgccgccacgtaagccgcggttcggagcgtgcccgcccgctctcgacgaattcgagctcggccgatttggcctgatnnnnnnnnnnnnnnnnnnnnnnnnnnnnnnnnnnnnncggccgccaccgcgataagctccgagttcgccctatagtgagtctatacatg

SEQ ID NO: 444486 - DNA, 389 bp, Homo Sapiens
gaggaccccgccaatcatcccgagatatttgtagcccaagaaggccaccaggtcgatggtggtgaggtcggtgttgacagtgaccagatagaggctgagcaggatggccagcacctccagggtcagccaggccagggctgagctcgctggcagccccaggaggtctggggagaacttatcctgggtccccagcgcaagaccagccaccaaaacgtaggtgatgactggtatgggacacaaggaagccacctggggctgggaatgttctagttcttgatctgggagatggtcatgcagtcgtaggcctgtgtaagacttcctcgagctgtccacataagatttgtgcacttaagctgaatatggtggctacacctgaatcctagcacttt

SEQ ID NO: 444487 - DNA, 418 bp, Homo Sapiens
  misc_feature (42)..(42): n is a, c, g, or t
  misc_feature (117)..(117): n is a, c, g, or t
  misc_feature (133)..(133): n is a, c, g, or t
  misc_feature (139)..(214): n is a, c, g, or t
  misc_feature (349)..(349): n is a, c, g, or t
aagtgaacccaataacatgaatcaatagtgcgccgcagccancgcccatggtcaggttacatgcgcagctggttccgggccccacgcaccgggaccccctcagctgctgcgtctgcnaagatctttcagccgncagcgnnnnnnnnnnnnnnnnnnnnnnnnnnnnnnnnnnnnnnnnnnnnnnnnnnnnnnnnnnnnnnnnnnnnnnnnnnnnaggggaaacatgaacacaaagatgctacgcagcaccagcccagcaccaggtagtagccaatcttcccgaagagcaggcccatgaggaccccgccaatcatcctgggggagggagaggaggctgtgtgaggatcanagcccaagggctggggctggcgtgaagggcgggggtactcacccgacatatttgtagcccaagaaggcc

SEQ ID NO: 444488 - DNA, 906 bp, Homo Sapiens
  misc_feature (851)..(851): n is a, c, g, or t
  misc_feature (857)..(857): n is a, c, g, or t
gctggaccggtccggattttcgggatattcacacaggagagaagccctttaaatgtgatgaatgtggaaaaagattcattcagaactcccaccttattaaacaccagagaactcacacaggtgagcagccttatacatgtagcttatgcaagagaaactttagtaggcgatcgagccttcttagacaccagaaactccacagaagaagggaagcatgtctagtgtctccaaactgaggaaagttaccatgtagagcttgactttagaagtggtgaaagaatacaaaattatgaggcacccaatgataggaatctgtgattaataaaacatttgggaagggtacatgttacacttcacaaaaaggaatctaagctgtctgttttattcagcattgcatcttctgtgcctagcacaagagttgatacataaggagtactttataaataaaaaaatgaaagtgtagtgatgagattcctttagctatctatctatatgtatatatctggttattcaaagcttccccacccccagtcatctaaatttttcaggtatcaagtgctcaacagacatatgatagtcaaggctcttagtctcattttttactctttgtcaagagaaatggaaaataagagtacttgggccctcttaagggagctcagagagaattactaaattagggacagtttcaatagttatcattctgtctacatgaacaatcaagaccaggactcagggaactttactctgtaacagaaagagaggattcagtgtttgccctgggagaattgtcccattcttgttgcttctctcctgagtacccactaccacaatgtcttctgtcagggattacnagtagncaagggaaggtctgaatgtaaagacaggcctagggaccttggcagcact

SEQ ID NO: 444489 - DNA, 3092 bp, Homo Sapiens
  misc_feature (15)..(15): n is a, c, g, or t
  misc_feature (137)..(146): n is a, c, g, or t
  misc_feature (152)..(152): n is a, c, g, or t
  misc_feature (302)..(302): n is a, c, g, or t
aaaaacgcagagatnccatccgaatgggaaggcattggggtctggaaaccagaaatgcagggacggccagtgggccccagcagctctggggctgcacttttgaagaactttctctaacggttttgaagatagcattnnnnnnnnnnttaagnttgcaccaggaggcctaagaaggttccattccagagagaaagtccactgtaggtcagtcacagcaggcccaggcccaggacacagggttgagcattttacggcaggtaagaggcttctggaaacttggcctctgaggcaaccctggcccnaggtggagaggttttcagtgctgaagtcaaactgcccacattcctccatcctgaaaggctaaggaagcaaccactctaacgtcagactcatagcctgtctccgccaaagttggtacggcccctttcctgaccaggtccgaagtcttcagctgaaggggggaactgagaccccttggagatgctctgtggcctgacgtttggtccccagccctgcaggcaggccgcctagtcgtcctccccgccaccgtacatgtctgccagcttcttgaagcggctgccccactcgttcagataatcgtaatcttggtcttggtcggaggcggaggaggtgagggagctcagggacgcggcgtcggagccgctgccctcatagtcgaacaccaagagggtgtcgtagggcggggctgtggggtctgtgttagccgccttcaggttctcaattataaagttgccgatttcatctgggttggctggccgaggacggtacatgggtgtcgggatgatggttggtgccacgtcattgcggagaaccacctccggcctggcctccagacctcggtggagctgggtgatgtcatagtcctggtcctcttcgccaccccccttttcgccatagtagaagacgttgtcacgggtgtcatcttctgggagtaggaggggctccttgatcttccgcttctttctcaccaacaaaagcagcaccagcaggaggaacagcagagccaggacagcccccagcacagggaggatgaaacctcccttccagggtccagggcaggtttcgacatggccatggcagtcgcacacagtggccctgatcaccgtcagctgctctttgttgccatggtcagacagagaaaggtgcacgtcatatgtatcctgcttcaggaacttcttcagggacaagaccactgtgtcaccttcctcgttgacctctgccgtccagtagatgtctgagtcatctgtgagctgggcctggaaaggggaggtgtggggagacaggtccttgtccgtgatgttcagcacctggcgcacagggctttggttgcagatggtgatctgacggggctcagggactgggccatggtcattgacatcaatcagtgttagcagaagggttcccgtgccagtggtgggagggcttccattgtccatggccaagaccatgacttcatagatgttgttcctcacaaactgctcatcctcacggtcgagggtgcccacagctgtgacctgcccactgtctgggtccatggctagccaccctgctgggtctctcaggatgcggtagctgatcttttgattctccttgtcagggtcttctgcagtgtagacacacacaggctccccagtggggatgccctcctggacctcaacgactttggagggtgggacaaacacaggtgcctcattcacatcctccacgtggaccactatggtggctgtggaggttgggagcttcagcacaaaaggggcctcgttggtcacttcaacgtacagggtgtgctggtttttggcctcaaaatccaaacccttcctggttgtcaggatgccctggttgctctcagggtgggtggtgatggtaaaatggtccccgtcgtcaccgcccatgataaggtaggtggcacgccacgctggtgagttgggggcgtccagatcagtgaccgtcagcctctgcacctcatggcccactgcattctcaggcacatgggcctcgtacttctgggggtcaaacatgggagcattgtcattggcatcaaggatctccactactgccactgccgtggtggtggagccgtccccatccatgtctgtggcctggatggtcagtgtgtactcagggactttttcccggtccaggccactggagatgacgctgatggtgcctgtgctccggtgaatggtgaacatgaggtcgtgtgggtcctttgtttcttggctatggatggagtaagccaccccccccattggtaggtgtagatggcatcatcctcatcccgtggctgtcacctgcatcacagaagtacctggtaggactccctctaagacactccctcggaaggtgtcctgggtaaacttgggcttgtggtcattctggtcggtcacgatgatggagatgttcatggggtcctccactgaggcaccattctctgacacagcgtggccaaagagctcatacttggcaatctcctcccggtccagtggcttattcaacaacaaccagcctgtctccttctctacagcgaagacaccctcaggggggctgtctgcccccggccccgtgatgctgtagaaaatcttggtgtctctatctttattagacttgagctgattcagtctctgggggaagggacccttgccattttcagggacagatattggagcaaccacccaatctctcttgtgtcttcgtaagatacgtttggatgggaagatcttcaatggattcctttccttcagtgaccttctttcctggactgtctcgccattccgcacagtgaagtcatcattatcagtgctaaacagagctggctcttgcccagggcagcccatgaatactttccccagcgcctggccgggctcctgctccgcgcctcccgcctccaaggtcacttcagcctccctgaagaccgcccggcacggctcggaggccgcgcactgcagccagcaaacctggagaaggaggagagacgcgagaggtccacgagggagccccatggctgcagagagaggggtgaagcagctgccgcgacggcgggccggtgttccgctcagctcttgcccctttga

SEQ ID NO: 444490 - DNA, 252 bp, Homo Sapiens
tctgggaaaagtttctttaataaaaaagttctagtacatatacacgattgtcctcacccttcatctatagcaacgcaacagggaaaataaaaaataaggggcaacctaggcacactcagtataaaaacgcagagatccatccgaatgggaggcattggggtctggaaaccagaaatgcaggacggccagtgggcccagcagctctgggctgcacttttgaagaactttctctaacgttttgaagatagcatt

SEQ ID NO: 444491 - DNA, 1618 bp, Homo Sapiens
  misc_feature (484)..(484): n is a, c, g, or t
gcacgctgggttccccccggggaggggaggaggacccttgaagggcccaagccgccttgggcttcgctggccccttccctggtgggtgcggccaggacccccaggggagccgttagggttccctcgccctgaagccccgtaggcgccacaccttcatctaatagtcgcaatccgggtacaggttggtgagctcccctgagggcacctgctgtcgagcaggtggcttcggattcggagtcaacctgaatccagtactttaccctgtaccccattggcttgccagaagggggcagccagttgaaatggatcttcctggacccagcggcctttagcattgggggttctgcggggcggcccaggtcgcccgtgagggggtggctgtgatgacaacatctgactcgtgaagctccggtccagttcatctggttccctgatgatgatggtggtggagtggggctggcccaggtgggccccaaacttaggngttgctgagctggacgtggaaacggcggacctggcggccccgccagagagggggtcaacttcttgcagctccaggagcttcacctgcagctctttccaggcctccccaggctggaacagcagctcaccctccacggggatgtagtcccggttgccctgcgcggtgccatcctgtgtgcggtaggagacctgggacttcccgccgtccaggacacgccggatgacagggatgcgggccacctggtccccgcggctgaccgagaactcaggctgctcaaaggacaccacgtctctggcttgctccttgatgatggtgatgtttaccaggcggcggccgagggtggcagtgcctgcgggcacgtcgatggcctccaccagcagctgcttctcgtcgtcatcctcaggccggataaagaggggcacccgtacgtccaccagctccacgccctcctggaactccaccatgccccgggcgtcctggtctgcagtgagggtgtagtagccgggggccaccttgaggtcgtggaaggccctctgttccacctgcttctctgtaagcttcagcagggccggcttggccgagcggggcgccatcagcactgtgtccacaatggtgtggtcttgctttttcccggcattgggctgctgccggaacttggtctgctggagcttgtgtacaccggagatctgcctgtagacctcgttcaggttctcctccacctcctggcgcagctgggcgcactcccgagtgtcaggcttcagcaggttctcggtgcaaaggcgggccaggcgcaaggacagcccgtagggcaccagctctgtggggttgatgctggcggcatgagtggcaaagccaggccgctgcatgttgttggtgaccttccagcggaccacgtcacggcccttgaggttcccgctgcgcagcatgggcgtgtccaagtggtcagaggccatcaggttctcccgcagcatgtagtggtcttccttaaagcccaccatgtgacctcggttgcagcacgggagaagtgccaggcaggccttgcagcaggcacagtacttccagcatagcagcagtagcagggccaggagcggcaggaggaggaggagcagggggatgagccaccagaaggagccc

SEQ ID NO: 444492 - DNA, 2195 bp, Homo Sapiens
gcggccgctcgcaccgcggctcctgccagctcactctgagagatgtgggccccagggcagagaacaccaggcgggtgggcgtgtcgggcacaccagcagtcaggcgagagtctgggccccaggagggcgctgctggcctcccagccaggattatagagtctcgtgggcccctggaaggggggaaccctttcatctgagcccgactccgggaccccagggcccaggacagcggaagcctgctcctcccgtgttcccagatgggagggaggccgtgggaggagacggaggtgagggtggagtagtccctcggcagtgtggtcgagtgtgagtgttctgagcgggtcagtgagttgtagtcccgtgtgagggtggaggatgtgcttagcacgcggtggggcacgtgtgggctcaggtgggtgccataggcagcagcactggtcgtggtcatcctgtgcagggagttggtgctgcccgggaaggcaaagtccatccggccattcaccaggtgctcagtgtcatcggagacgctgggcctctggctgcccgatggagagcgtagaacgtcatcgctgtacataaggaagctgtcgtagtcctccccgctctgggcgtccacgatagggatgtcagggatgatggggatggacatgggcctcttgggctgggtggccaggttgatgatggcctcccgctcaggcccccagccggccccgttgcgcgccttcaccgtgtagcggtagggctgggactcccgaaggttctcaataagcagcatccggttcttagggttgtcaaccagcactttcttcatgggcccaataggtcggttgtcatcgttgaccaggccatagcagacctcgtaggctgtgatctcaccgttggtctcagccggctcagcccagctcagctgggtcaccgtggaggagacgacattgaaggccagacgccctggctcgctgggcacttcctggtgggtgcggcaggacaccagggagctgtagggtccctcgccctgagccccgtaggcgcacaccttcatctcatagtcgcaatacgggtacaggttggtgagctccactgagggcaccttgctgtcgagcaggtgggcttcggattcggagtcaccctgaatccagtactttaccctgtaccccattggcttgccagaagggggcagccagttgaaatggatcttcctggacccagcggccttagcattggggttctgcggggcgcccaggtcgccgtgagggggtggctgtgatgacaacatctgactcgtgaagctccggtccagttcatctgggtccctgatgatgatggtggtggagtggggctggcccaggtgggccccaaacttagggttgctgagctggacgtggaaacggcggacctggcggccccgcaggagggagtcaacttcttgcagctccaggagcttcacctgcagctctttccaggcctccccaggctggaacagcagctcaccctccacggggatgtagtcccggttgccctgcgcggtgccatcctgtgtgcggtaggagacctgggacttcccgccgtccaggacacgccggatgacagggatgcgggccacctggtccccgcggctgaccgagaactcaggctgctcaaaggacaccacgtctctggcttgctccttgatgatggtgatgtttaccaggcggcggccgagggtggcagtgcctgcgggcacgtcgatggcctccaccagcagctgcttctcgtcgtcatcctcaggccggataaagaggggcacccgtacgtccagatcatcggacatggagttggagaagtccatgaggatgtacaggtccacggggctctccagtggctcaaacacctccagctcaaaatgccgctcctcaccgggccgcagacggacccgcaggccttggggggacatctggctgcgccgcagggtggtgtcaatctgggtctcctctgtgatttggaagctgctctccatgaccacgatgctctcccgctggcagcccgcggccagcagctccgcctgggtgttgcagcgccggtccctgaacatctcgtctgtgcagtaggcgcagtccttatccacacggacacactccgtgcagctcttcactggggccttcttgcagcggtttgccaaggtcccagagaggctgacgctgatcaaggctgccaggagc

SEQ ID NO: 444493 - DNA, 3936 bp, Homo Sapiens
  misc_feature (395)..(404): n is a, c, g, or t
  misc_feature (635)..(698): n is a, c, g, or t
gggagcgggggcgattcgttcgggtggtagttggtgtaggtgtgcccacgtcgtggcgccgctggtggctgcctcggcggtggctgcgggctgctagtcttggcgccgttggcggcgtattatactggtctactactcgctcccgccgggaaataagtttggttctactaagtcctaactattctgcgcgcgtggcccgcgaattctgtgtctatcacgctcgcgcggcactatatttgccgcctggtcggtgttggtgacaccacgctgtcattcgtgcccctctagcaagtggtctgtaattgtgtccctccctcctcagatggggcgtcttcaatatgcttctcgtctcgaggggatgatgtttgttccccagcacgatagtggtgtctctnnnnnnnnnngccggttcgtatgggggtgtccccgttctccaagtggttctccccgccgctccccgtgttgtctcccgctgtccccggctgcgtgttgttatccgctgcgcgcccctcgcgccttctgctctttttattagcctgctctcccctctattgggcgccccctcttgggtacccgcagaaagctcggggtgcctccgcttatattgtgtggccccccccggggaattcttgtgnnnnnnnnnnnnnnnnnnnnnnnnnnnnnnnnnnnnnnnnnnnnnnnnnnnnnnnnnnnnnnnngaaggaaacaaggcgcttgttttctctttgcacaggcagggagggtgttcctgagtgaccttccagaagagttcgaaattataagcctggagtgccgagggaggcctctgccgctgggggtctcgctgtctgctttggggttctggggcctctccttaccccatctggggtcccaggatgggcccaggggtccaggaaccaaggcagcactgcactggtgcccgcacggtccgggagcaggcctccgtagatcaggggtcaggggccccggcatcaggctctggggagtgaggtattggaatctgaggctcaggggtcaggggccccggcgtcaggctctagggagtgagctattggaatctgaggctcaggtgtgggagtgtcagggctcaggacataggtattagaatcccagggtatgaagtttcaggtttggggaattagagccgtgagtatttgggggaagagcacggagcgcttgctagccacggggcttgggtgttgaaacactgggcctcctgcctggggtctgagatgacagagtagggggttaaatgcccaggtatcaagtatccaggtccccaggtgtctggtcctggggatgcgggagtcgcaggactgggctgcctgttctcaggagtcttggcctggtgctcacagccaagctgctcccatcagggctgtgcaccccagacgtgcgtgttgcccttcctgcggcgcagcagcacatagacgagcgcaaccgccgccaccaccgcgaggcccccaaagatgatgcccaacagcaccgcgtagctgcgtcctggctggcacttcggggtgggtgaggaccaggtgccgtcagcctggcaggtgctggtctctgccccggccaggctgtagccgttgtcacagtggaagtagatggtggaacccgccaggtacctgttgccctccttttgtccgttgggaggtggggccagccagccacaggacaccactggctgcaggctctgcatgcgacgctggtgcagctggtgggccacccgagtggcagtgcccgtgctcaggctcccagtggctgccacatcaaagttgcagaaatgatcgtccccacatagtttggctgcctcttgtgccaggctggggttgagggtggtctcactggggaagaggggctcgaaggtggggtcgtgcttgggttggtacaggaagttgtggaccaggaaccaggaatcgtaggtgagcagggaggacgcattgtgcacggtccagttggccccaaacaggaacagctcctggggactggtgcctgggggcaggacgcgcccgctgtgcagggtgaagtcgtcggtggggtcgttgttgagtgtcccgaggaggccgtgggtgtgggtgaggaacttctcaggcagcaggacggacacactcaggaacgggccctgcacgctgacctccaggccggcccctgatgccagcatgatggagaccctgtccccggcagccaccgacaggaacattcctttcaggtccatccagctctgctcggtgaagctcagcacctcctggttcagcagcacctccagacctccggtcctgttggccagcctgacttccaccacatctgagttgccctcctggacggccactgcggtcagcccagtgccacgggtctccgtgccgttggacatcgtcccgggctgggcccgcgcctgcaccctcaggtcggtcagcgctgcctccagcagcacgtactctccgcgcccattgaatgtgaagttggtgccgtcgaaggtcacaaagtgtgggtctccgaaggcggaggccagtcttgggggccggtagttgcggcagtcattggagggccgccgttgcatgtagcgggggcagtcgggtgcccagaggcagcagtaatagaagctgaggacatcgtagagccagtgggacatgctgggcactcggggtggcgtgcggaacgggggtgcgccccagtcatggccgcggtcgggagtgctgccgccgctggagtcagctgtcaggagctgcgtcccgtccgctgtgtagcagcactgctgacctgagccgtaccggaggctggcctgcacagaacgcacacagtgcacggccccggggtggtaggtgcacacgctgccctgctccatgtcacagccgtagtccgtgaagaagcggccggagtcagcccgggcctgggtcagggtgcaggggcagtccggcagctcctccaggaagttgggcagctgatcctccagctcctcccaggcctggcactgagttcgtgcccaggccacagggtcctctcggaagtcatcgctcaggtgccaggccagtgcgtggtcgttggtccagagcgcctgcacgtccttctgccctgcgtaatttttgctgtcgatgatccgaagtgcacccactcgccatctctggtagctgggaggagcaggttttggggtgaaagtgaaagagccggagttggggatgtgtgtggccagggggtacaggtacgaccactttgcagtccactcctgtgagtagggcattcctgtctcttcgtagccccacagttcgatggtgatggtctgcgtgggcagcgacttgacatgccaggtcaggctgaggttgcctgaggtgttggcggtgccgtagtattgccaacgcgtctcgttcaccaactcgctcttctccatcattgacactttgttggggtgcacagccagccaggtgcccgcacgagggaaggagtggccgttgtccagtgacacagtgaaggggatgcggccgctctcatagagcagaggtgacacacagtgcacttgcccggaggagtccacatggccgagggtctggatgctgtccttaaacctgcagatcacactggcgtctgtggggctggacatcttgaagtgccgcaccacaaagtccttgccgcccatcatggatcctgagtagggcaatatctccaggcagaagtcccggaaatccaagcagcaggtgccaaggccagagcacgtcgggtggcaggaacatggcccgtccagggcgccacagcgcatggagcagctctcttgggcatctggaggagaggatgctgagggcctaaaagagagccagggcacggacgggccaagtctcgttgtgcatagattagcgctggggaaagtccccgtgggggcaggctgtgggcagggaggagggctcaccagccagccaggtgcccgcacgaggaaaggagtggccttttgtc

SEQ ID NO: 444494 - DNA, 1932 bp, Homo Sapiens
  misc_feature (629)..(629): n is a, c, g, or t
  misc_feature (662)..(662): n is a, c, g, or t
  misc_feature (666)..(666): n is a, c, g, or t
ggcaaaacgacgggaaaagtttatttctctggaaagggaggggtagggggcggggcccggggtcagggcagggcaatgtcctccagctttttgtccagtgccttcaggtcattcaggaagcgggtcggggtgaggatgtgtgaggagccaatgagcaccttccacttgccctcggtggccctggtcaccttgtaggcggccctcatttttgacatggccacaccgcccatgacatacacgatgagccgggggcccgcccgggcttttacgccagccttgttcttgtgccagtgaccgaagcgggcacttacagcggcctgggagctggccgtgggggcggggtcggatacgaagggccacaggtttctgtccagccggtcctccacggggttcttcatttcgtccttgatgaccggggtccagcgggaccgctgataggtgggctccatgcgttctctcggctccagccggctggaggtccccgagcccccggggttggtgacagtgcctcccagctgctccaggttacggatgaggctgctgtgcgcctgtacattggcatgctggatcagcttggccaggttctcctcactcacaccattccgaaggaggatgtagagcagcgaggnccccggatcttttttgtaggcgggcaccgccgncgtncccgcagcaccggaacgatcagcttcatggagtccttgattcttctccccccttctgcgtcggagcccatggccaggtcctgctccacactacacagtttctccaccgagcccttgaaagtgcttcatacaatcatctgctagatgcaggtgcgtagaatacttattcaggctccttctggtactgcgggcatctttttcaggatctgggataggtctttgatgttcgccttgtccgtggtcagcctcttgctctcacagaaggtcctcaggagctccgtgaccttctgggacacatctgcgatatgcatgtggcgaagctccacccacaagtcatcgtcctcgtccagcaagacggcctttttcccgcgcctcgttcagcccggtggtctcatacctgtatgtgtcctgctctatgtccagcagatcatacgccatggcctggaacgtgagctcatgcagtagtggggacacggggtcagctgcccggtccattatcagcagctgggagcgggttttctctgggccctcgcccagactgggagtgtctgccttgaaggcgttcagcttggccaggacggcgtgggccaactgggctgtgtcctctgggcccttgcggtagcggatggccgggtactcctgcagggtggcgcacagcgtggcaatctgctgggccagcacctcgagctgccgcgtgcgctcctctgcccggaaggggcagtagaggttgtaggtgctgtggggagcatcgagggagaacacctgggcctcgtaggggaggaaggcaaggtgaatctccttcaacgtcttcaccacctttgccagacgagagcggcctagctcactgaacaggggctcggggcaggtgtcggtgaagaagatatgggccgctttgtaggtgaaagtcggggtcccctggaagtctttgatcagggcctgaaccgacttctccgtggggctcagcaaataaatggcctccagactgggaatgggttcccgccgtttgttgatgtcttcaacaatggtgatgccctcagccaggatatctgacattttgcagcaggaagacaagatgcgcatgcttgggtgatccatgataagcaccttccactccccatccttcttgacactccgaataactccgctcagaattttttcccccaccaccgccttcagccccgagggcgccatcttccccgaggggcgccgccgccgcttccgggtgtgtcccaaggtggggcgatcccgggaattccggaccggtcca

SEQ ID NO: 444495 - DNA, 491 bp, Homo Sapiens
  misc_feature (57)..(57): n is a, c, g, or t
ctgtgcaccaacggccctctgccttgcagagccccggctgtgatccgcaccctctcncagggtccccccacgcccgctcctggcgtaccccggggttggtgacagtgcctcccagttgctccaggttacggatgagagctgctgtgcgcctgtacattggcatgctggatcagcttggccaggttctcctcactcacaccattccgaaggaggatgtagagcagccggacccggatcttgtcgtaggcgggcaccgccgcgtccagcagcaccggaacgatcagcttcatggagtccttgatcttctccccctctgcgtcggagcccatggccaggtcctgcgggcatggggtcagccgtccaccggccgctatgtgtcagggaaggggatgggagaggcgggccaaggacatccccaggatcctcggcaagaggacatttgggtcctacctcatctcagcaccaggtctctcaaggtcccaccccaactt

SEQ ID NO: 444496 - DNA, 1670 bp, Homo Sapiens
tggtcgtttttgtgtttgttttctccttaccttcggatcatgtgttgtgcctctttgtgtttttctgtggtcttgtttgtgctcgatggcattattcttgtttcttttcctgaggtgtgtgtccctatcttcccttggtttgtgtttcgtgtgttctctcggtggatgtcttttgctcatctgcctttcccctcccatgcttgtgtgctcctaatttggatctgttcgtcttctctcgggtgcatgtcagtcactgtgcttcattgtcctgtcagttgctccatggcttctgggttgatggtttggtccctcttactcatcatcccgggattagttcatcaaccatcacagaggtcctcctggcatggattccctctgtttctttggtgaaagcacaagtaaactcagctagccttaaccgaccatgtaagagcgcttagagtcagagtccttggggatagatggggagacgggcaggagtacctgcctcagtgcttcatgcgttgtccaggcacaatcattctcagagccacctggatcatggacatcaggctctttctgtggccttgctgggcatccagggtgtgtgggctgggatgccccagccttgccacccattactggttcgtctgctaaggaagagggggcagcccatcgagtgggtggaattgtccccctcattctggttctgcatctgtaggctgcagaagcacatcctgtgtagcttatgcagcttctagtgctcggtggggtgtggtggatccacaaggcgggctcccaaagggacatgccctcctgttctccccagatgacaccacacctccccttgggccccaacccgaagcctcctctcagccccattctcccaggtcccaagtccctctgcctcttgactagaccccacagccaggaatggagccacagagcccccagcaggctgtcgccacttgtgtccagaggcgacaggagaggccctgccctcgtggagtctaccagcatgtttcattctgtgttctgcaggctggaagcatggggcaggctgctttcccacccagagctcaggctgggctgtagcccccagctccaggacgccggggctggcaggtctggggggagtcgggacttccaggattgccggggctggcaggtctcgggggagtctgggggcagtctgggcgggtcaggactcctgcagctgcggctccctggcctggtcttcatccaggatgagcggggactggaactcccggccttgcaggtacacttctaaaccctctccagagtaagacaccaagggcgatatctcacagatggccggagggtctccatttgggggcaagctgggcagctctgggagccaggccccatgggcatccaggaagcgggccccggcccgcagagcccaccggtagtgctgggtgagcagggcctggcgagcggtgcggggactgtccctgtcggctggctctgcgttcttcagtggggaaaattcctcctcccgcagcacttccaaggcagcaaagttcttagcaaaccggaacacatcaaacacaaacttctccatctttatcccgttcggttttagcggctttaccagattcccctcctcatccacatacgggaccttcttcacagccacgtgatcccgggaatccggaccggtccagcct

SEQ ID NO: 444497 - DNA, 920 bp, Homo Sapiens
  misc_feature (712)..(712): n is a, c, g, or t
  misc_feature (718)..(718): n is a, c, g, or t
gctgcaacgggcggggcggggccgggcaatgtttgttccccgagttcggagcctaggagccccccgcggcatgcggcgcatgtgccctcggcctgagtcgggatggagctgcctgctgtgaacctgaaggtgattctcctaggtcactggctgctgacaacctggggctgcattgtattctcaggctcctatgcctgtggccaacttcaccatcctggccttgggcgtgtgggctgtggctcagcgggactccatcgacgccataagcatgtttctgggtggcttgctggccaaccatcttcctggacatcgtgcacatcagcatcttctactcgcgggtcagcctcacggacacgggccgctttggcgtgggcatggccatcctcagcttgctgctcaagccgctctcctgctgcttcgtctaccacatgtaccggtgagcgcgggggtgacgctccttggtccacactggtttccttgggtcttctcaggaccgtagtgcctaaccagacggattgactcaagcagaggcgcccgcagatccctttgcagtcccagagtggcaggattcaagatgcccgaagggttactgaagcccagccaacgctgctgcccggccctggcccgggccttcctcgttgccttggggaggtcgttctagggattgcttctgacctccgtctcttggacctaagatggaatgtgtccccangctcanggattgcctgaaccaagaggccaggagcccccatgggccgcccagtaccatgcacactcctgtcccgaactccctgaggcctccccctcccttcagggcacccactgggttcccaggcctggaacccagggtctcctctttaactttcctacccccatgggtgggcacccacagagggcccctcaacccgagttcctggccc

SEQ ID NO: 444498 - DNA, 1122 bp, Homo Sapiens
  misc_feature (163)..(163): n is a, c, g, or t
tgggtttcaccaagtggttttgggttgaaaaccctttttgtggggctttttcaaggcccctgtggtttattccctttgggggcacccatgtgacccaggccagtagagaaaggaaccgggggcccttcattttccacaaggccccaggactgctcctcggggnctgagccaggacctgaagcttttccaggggtttcccaccaaaagcccaagcaaacttggggggagggcctgagggggcatcagcagtccttaaaggcctgagcttgcaacactcaggccagggactcggctgagggcctctgtggtgccaccatggggtaggaggtaaagagagaccctggttccagcctgggaaccagtgggtgccctgaagggaggggaggcctcagggagttcgggacaggagtgtgcatggtactgggcggcccatgggggctcctggcctcttggttcaggcaatccctgagctggggacacattccatcttaggtccaagagacggaggtcaggagcatccctagaacgacctcccaggcacgaggaaggcccggggcagggccgggcgcagcgtggctggcttcagtaccctcgggcatcttgactcctgccctctgggactgcaaagggatctgcgggcgcctctgctgagtcaatcgtctggtaggcactacggtcctgagaagacccaaggaaaccagtgtggaccaggagctcacccccgcgctcccggtacatgtggtagacgaagcagcaggagagcggcttgagcagcaagctgaggatggccatgcccacgccaaagcggcccgtgtccgtgaggctgacccgcgggtagaagatgctgatgtgcacgatgtccaggaagatggtggccagcaagccacccagaaacatgcttatggcgtcgatggagtcccgctgagccacagcccacacgcccaaggccaggatggtgaagttggcccaggcataggagcctgagaatacaatgcagccccaggttgtcagcagccagtgacctaggagaatcaccttcaggttcacagcaggcagctccatcccgactcaggccgagggcacctgcgccgcagccgcggggggctcctaggctccgaactc

SEQ ID NO: 444499 - DNA, 1561 bp, Homo Sapiens
  misc_feature (134)..(146): n is a, c, g, or t
  misc_feature (182)..(190): n is a, c, g, or t
  misc_feature (206)..(439): n is a, c, g, or t
ccccccttcccttttaggggtccgcggggggggttaaatttatttcaaggtggccggaccctttatggaataacacaataaaaccctcaaacgccctttgggggttttttaaaaaaatggggtgcccccggggnnnnnnnnnnnnnggggaaccaccccagattccccgccgggtttttttnnnnnnnnnggttacccccggtccnnnnnnnnnnnnnnnnnnnnnnnnnnnnnnnnnnnnnnnnnnnnnnnnnnnnnnnnnnnnnnnnnnnnnnnnnnnnnnnnnnnnnnnnnnnnnnnnnnnnnnnnnnnnnnnnnnnnnnnnnnnnnnnnnnnnnnnnnnnnnnnnnnnnnnnnnnnnnnnnnnnnnnnnnnnnnnnnnnnnnnnnnnnnnnnnnnnnnnnnnnnnnnnnnnnnnnnnnnnnnnnnnnnnnnnnnntacagaattccccaaactttaatgctgtgctctgaaaagggaggctggaggttgtggtgggtcacagtgttgctgacacctctggcctccagccctgcatccctaggcaccatgtgaccaggcagtgagaaggacggggcctcactcccatgccagactgctcctcgggctgagcaggacctgaagctctcagggcttccaccaaagcccagcaaacttgggggaggcctgagggggcatcagcagtccttaaaggcctgagcttgcaacactcaggcaggactcggctgagggcctctgtggtgccaccatggggtaggaggtaaagagagaccctggttccagcctgggaaccagtgggtgccctgaagggaggggaggcctcagggagttcgggacaggagtgtgcatggtactgggcggcccatgggggctcctggcctcttggttcaggcaatccctgagctggggacacattccatcttaggtccaagagacggatgtcaggagcatccctagaacgacctcccaggcaacgaggaaaggcccggggcagggaccgggcgcagcgtggctggctttcagtaccctcggggcatcttgactcctgccctctgggactgcaaagggatctgcgggcgcctctgctgagtcaatcgtctggtaggcactacggtcctgagaagacccaaggaaacccccgcgctcccggtacatgtggtagacgaagcagcaggagagcggcttgagcagcaagctgaggatggccatgcccacgccaaagcggcccgtgtccgtgaggctgacccgcgggtagaagatgctgatgtgcacgatgtccaggaagatggtggccagcaagccacccagaaacatgcttatggcgtcgatggagtcccgctgagccacagcccacacgcccaaggccaggatggtgaagttggcccaggcataggagcctgagaatacaatgcagccccaggttgtcagcagccagtgacctaggagaatcaccttcaggttcacagcaggcagctccatcccgactcaggccgagggcacctgcgccgcagccgcggggggctcctaggctccgaactcggggaacaaacttgccccccc

SEQ ID NO: 444500 - DNA, 1954 bp, Homo Sapiens
  misc_feature (660)..(726): n is a, c, g, or t
gacgtgtgtttgcgcgtggttgggtagtcagcatcgcgtatgtgcgttgtgtgtaggtctcgtggtagtccacctaccacgtctgcacttagggctagttgggtggatggtcgcgcccccctttggtcacaggctgggcctcgtcccccgcccttggatgctctgtagtgcctgttgtgcatgtggcggacggtgacgggttgggcgcttgcgtctgggtcctgtgtggcgcagccggtgggtacgtttaggacgctgtgcgttcactccaccgccttgattccttcaaatttattgcaggcaaacaccttccgcgctggcttcgctagcttatttactgtacatccggagctcgctgtactcttgaggcgttgtgcgcccctcctgccagccgctgatcccacatgcgcacgccttactttcccaaaagcctgtagaaggcgcccccaccgttagggagaaggcagacattacacatacacagaaacagcatatctatctggccagctccgtccatgtggaagcccctggaacatacacatcctggaacctttcctctccttatgcacagatggacaggctgcctgtcgccctgtctctgggctcccccaatagccagaatcccttccgactggtcccttgccctgaatatctgggaannnnnnnnnnnnnnnnnnnnnnnnnnnnnnnnnnnnnnnnnnnnnnnnnnnnnnnnnnnnnnnnnnntacctgctgcccattctcttcccttgggagacaaaaggatgtattgacccaaattccggttccaccccagcttaggggcagtggcctaaggtgctatttgggcaaggtccagtggaaatcctgaaggggctgtctcgtggggtgagggtagatagggagctccttagcctgaaagggtggatcgtgaagggggcttcttgggagtggcccttggacagtcagtggatgctcaaggccagggcagcggagtggggagatggcccctgcccactcagatctgctccttgtgcttcacatgggccagcttcacattctcttcctcgttggagggtggggctgctccaggtggcagccgatcatcagctggtacacgaagacacccgcaatggagcccaggagtggggacacgatgggcacccaccaccaatgctggccggtcgtgaagactgcagagccccagcccgcaagggctgtaaaaaggcgggggccaaagtcccgggcagggttgacggcatagccggagttgaagcccatggaggtgccaatgaccaggaccaccaggcccacggtgaaggcctccaggcctcgggggacggggttgttgtaggggtcaacaatggccagcacacacacgataagggaggctgtgcctatgaactggtcaaagaagccattgatcatatccaagtgtccagaggggtaggtagcaaagatgccggctgtgccattggggcccgaaacaaaaagctggttgtcggcgaagtgccagattgcatcataatacagcccaaaaactattccagcacccaagaaggctcccagcgtctgtgccagggtgtagatgggcagcttgatccagggctcacgagccaggaagcacatggcaaaggtcacggcagggttcaggtgggccccagagacctggccagcgatgaggatgcccagagtgacagcaaagccaaaggccaggttgatggtgaggaaaccaccgtgggtgccccggctgagcacaacctgggccacggagccacagccaaacatcacgaggatgagggtccccaggcactcggccagcgcctgtcggagcagccggtagcggatgtggagcatctccccgcagcgggacaccagctccttctgtcgacccatggcggggcaggcggcggcgctgtcgggcgggcaggggtggccctcgtgccgaattcgccactcaggcctcgcttcctat

SEQ ID NO: 444501 - DNA, 1158 bp, Homo Sapiens
  misc_feature (777)..(794): n is a, c, g, or t
accttttattttctcctctccagtggggttggcttttattgcttcttgtttgggtttggaatggaaatatggatagcagcataaagtgcttttattttgacaaaattcatttttttcaacaatggagacatagatttgacccacaataacttctccccctctctttttactctgctcaaaaagcatctctcctcccattacccaaccttggtcataagtgtgcctggctggtttgcagatatttgttctgctttgtaaaaattggccattagtgcatttattgagatgatctctaaagagctatgccctgacctacccctgattctatgacattggggcccttcttttgctgaaactgccttacgtaatggttttactccttgaaagagatttgacggaatccattttatgccaagtgctgccctgcactgtttctgcaatatgtggtgtatgctgtggtgatcttgctgggaatgattataagtgtgtgtgtggtgggggagtgggtattacatgcattgctgaagagtcatcctggtgttcctcattcctcccaccttcccgtggtcattttaattacggggcagtgtcaccgcaaagggaggaaactcaaagccgaaagcaaaattccaggcctgattctggcttttgaggttcctggttcttgaagccaggcctgacccgactctcagatggggtcagtcccgtcgctttgcagactgaccctggaaatctacaaaatgcagattttcctgatttcctcttctcttgcccagnnnnnnnnnnnnnnnnnnaaagcctggattgtaaccagattttcttttttcccccttctcagctgtagatatgatatctcctttcagggccccagcttaagggcaaagtgagttaatgtgtagacaaaggcgagggacaagagagagttaacatctagacagtggaaaaagccatgggtgtgtgggtttctgggaaccaccaacacttgcaggtttagctttttcccagggttgactaccagaaagaaaaccatggtttttgcaagattaaaattgtggtttaagtgtgccctaaattaaccatcccccattttttatcatattttccaccattcactttcagggtttttaaaaatccagtggctcacccctggggcgggaa

SEQ ID NO: 444502 - DNA, 1531 bp, Homo Sapiens
  misc_feature (1037)..(1064): n is a, c, g, or t
  misc_feature (1369)..(1377): n is a, c, g, or t
ttttttttaaccacaaatggttgatttatttctgactctcagcccgtctctcacgaagacagagcctattgaccaaaaacttcaggatctgcatctgggcagatcccaggaaggggaagtcaaagggcccaggtcagaggcccaagttcagacttcagcagcagactagggtcagactttaccaaagtcagaactcgaggttcatgtaagtccttagatcccgctcccaagccctgtctttctcctccctccttctctcctccctccagctcagtgtggccacccgagggggtctctccctcccagccacagctcgggtatcccaagctgggaaatgtgtcactcggggctggggtgctgatctgtagcctagtccttcctggtctctcttgaggacagtggggatgggattggcacggccctcaccccggggtcccagccccattcctggctcccagccccccctcagcagcagtttgaagcccgggctggagatgggcaccccaagtggaaggttgggaggctgaggaccctgcgacagtgacagcaggtgagcagtggatgtgcggtggttggaatcttggaagtgggtgtcacagttctcgcagtactggagggagggagtaggagaccggttttccgggctccttgtctctccatggctctccctgaccatgcgggctacctcaaggaagccagcttcttcagcgagctgagccgcatccctgccactcagctcacagacccccacccaggcagcccccacggcccaggagatagctcacagctgccccctggcccgctcgagcagcacacatcagtggggtccaccagaaggcatcccgggcgttgatattccccccagctcctcctgcctcatgcggttccagcagtctcctaagttctggcaggtccccctcctgggctgccctcagtatccggtgagtcatcttatcctcagcctcaagggatctcccttgtccatgtcttcctgatgctccttctgccactgcttctgctgctggtgccttcattannnnnnnnnnnnnnnnnnnnnnnnnnnnggcaggttcagtctgagatctctgggagtcaggagcgctgctctcatccccaatcagggcctcatagaaagctcgggctgcagccccatccagggtggactctggcttctcgggctgtggctgctgctgcccatccttccagaggtcgctggggtcagtggctggggtgaaggtgatgagcaagggccgggacatggcttttgggagaactgagaaaatgataccaggcaagggaaggatgagacaagtaagccaagctcgtggtgaccctgtagcaaccacagcctcagagacctgcagtaggnnnnnnnnntcagcctggccctttaagtcttccgcgatcccatttcggagtttcctcttcccaaacaaaaatagatgggtcactccctagaagatctcggggagagtctcctatacgtgttgctgtgtagcttccatcccgggaatccggaccggtccagcct

SEQ ID NO: 444503 - DNA, 1003 bp, Homo Sapiens
  misc_feature (47)..(57): n is a, c, g, or t
  misc_feature (215)..(215): n is a, c, g, or t
  misc_feature (348)..(375): n is a, c, g, or t
  misc_feature (680)..(688): n is a, c, g, or t
gaagcgaaggtgaagccggcattcctgcgccattaaggtccccagannnnnnnnnnnagggcagcccccacggcccaggagattagctcaccaagtgccccctggccccgcttggagcagcacactccaggtgggtccaccagaaaggcatcccgggcgttgatatcccccccagctcctctgcctccatgcggttccagcagtctcctaagttntggcaggtccccctcctgggctgccctcagtatccggtgagtcatcttatcctcagcctcaaggggatctcccttgtccatgtcttcctgatgctccttctgccactgcttctgctgctggtgccttcattannnnnnnnnnnnnnnnnnnnnnnnnnnnggcaggttcagtctgagatctctgggagtcaggagcgctgctctcatccccaatcagggcgtcatagaaagctcgggctgcagccccatccagggtggactctggcttctcgggctgtggctgctgctgcccatccttccagaggtcgttggggtcagtgtctggggtgaaggtgatgagcaagggccgggacatggcttttgggagacctgagaaaatgataccaggcaagggaaggatgagacaagtaagccaagctcgtggtgaccctgtagcaacctcagcctcagagacctgcagtaggnnnnnnnnntcagcctggccctttaagtcttccgcgatcccatttcggagtttccttttcctctcccctcatgaggcaggagcccggaggaaacagtatgcccgtcaagggtctctgtcgggactgattcgcactaggggcccaacaggcaataaggacccagcggattggccgaggataggccagtcccctgggcagcagcgccgcgccgggactagaggggaacgtgaggagagctgcggaaagagatccagcctggctccctcctttcgccgccctaagtcagcctcttcacccagtgagcacaaaactgtattgcccccc

SEQ ID NO: 444504 - DNA, 1634 bp, Homo Sapiens
  misc_feature (16)..(16): n is a, c, g, or t
  misc_feature (67)..(67): n is a, c, g, or t
  misc_feature (74)..(74): n is a, c, g, or t
  misc_feature (86)..(86): n is a, c, g, or t
ataaaattaagattantattctgtgtatcccagtgacttctagagggttaaaaaatgactgagaaanaatagancagttctttcanggaaaaccacctccttttgggactcacaccatgtgtttttcattcaaattagtaatgttcaatttttccctgcagttgaaccagctattagctttctggagagtcaaaattttcttcgttttaggatcaaatttgtattgtctgtgttccatgaaagaaatagaaaaatccatctttcatgaaaactgcatcaactttgtggccaattccaggaaagtcatgtgctatcattttgggataacctggatccatagatcgtttatattcatcatacctcccagtatttgttagcaacaaagaagtaggtttttccagtgttttcctcagaaagagcagcatcgatatgcttcacagttctagggaagccaaaggagctgtagatgtccttggggtatccgtgtagcacattctgtccctgaacagcccagtacttattccctttgaaaaaccggacttcatctctgtcggcaaattcgtaagcagcttcaagcccatttggcagttgtggccagaaaacagaaatgaaattgagctcaacttccgggtagaagggatttgtgcgcatgtagaatctgtctttaaagaacatcacttctccccgaatcgtagttatagcatcaaaggttagcttactgtcacacgcttttggggtttgtgggccgatgggctggacaggattttgggaacgtccatatatggcttggatgccatcaatgtcatcctgagctagctgaacatcaccactgaaggtgtagctagggtacatcaaagccccgatatcagtagaatgggagagtccaagagaatggccgagttcatgagccgcaacacgatgtaagttgtactctctgaaattgttggtccacctttcatcttcatcaaaatgagcatcccctccaatacctgggcctggttgaaaagcatgagcaagatttcctccaggtccatcaaaaggagagttgtcccgatgatctcccctgacaaaagatatcatgatgtctgcttgaccctcagagaccttggtgaatgtcagaggtgtgacattactccagagttggaaggctttctcaatggcatggtccacatctgctcttggcaaatctggcgtgtaattttcaatcctgtaggtcagatgtgtttgctcccagcgagggttcccctcagtgaggacaaactgagccacatcaggcactccacatctgggctgcttcatcaccttcagggtttcagcatctggtttcccagtcactttcagcccaaagaattcctgcatttgcttcaatttttcaaccactgggccactatttctccgcttttcaacttggctcccatcattcttcaggttgtagtatttttcccaggtatttctggactaagtccacatcttgctcttgtgtttctagagtcgctgggaagctgtgagacaccacaccccagaacagcagcagcagcagtggaggaaagctgtgcatactggcctttgtcttctttctcagtgcaaggtgggtgatggcttcccagcctcttgatcccgggaattccggaccg

SEQ ID NO: 444505 - DNA, 1200 bp, Homo Sapiens
  misc_feature (245)..(245): n is a, c, g, or t
  misc_feature (259)..(259): n is a, c, g, or t
  misc_feature (287)..(287): n is a, c, g, or t
attgggcccaagaacccctttcccccatgggggccgtggtggaaatttggggtttagaatccatttttccccctttttttaaaaacccccctttattccaggggtggtaggaaatggagggttctcccagggattttttcccatagggtgcaggccttcacataagcgtgtttcaaacgagggcccttggacccccccgggaatttcatacatgcaggatcactgccggggacctgccggtactncaggtagtttcctngcacgaaatgttgggtgagcagcttctngggatccccccaggatactgtctcccctcccctcaaaacactttctaacacactcaggctccttcccagattttctcctcaggggcacagtcgccctcttttgcgattatggccaggatgattatcaggaagcctgtcttgggcatgatctgattgtcacccagcaggcccatcgtaggagaggcccaggcaggtggcaaagatgtacaagtggccgatggggtccacttccatcagctcgatgccaaagaccagctgcaaggaatcggaagctttgctgaagatcacaggaaagaagtactgccaatttccgacgacactccccagcatttctgcctttgtgaccggctccctggctcgatacttgaggagcagaaaatgaaccaacttggccaccttcctactgagtgctgcttggaactcagactccaggtcagggaaggtgcttggcccctcctcttcttggttgctggagtcctcataggattggctccagagagggtagttcatggtagtggggaggctggaggctccctgaggactctggggaggatctggtgactcggcagcaggcacctcccccagggtgacttcaactagagtagaagaggaggaggcagcctcctgctcctcagtagcaggagcctgcgcacccaccaggcccagggcctctcctcgggcctcaaggccttcttcaggcttgcagtgctgactcctctgctcaagaggcatgatgactctggtcagggcaacaggcgggagtgtgggcaggagctgggcaatggagacccactggcagatcttctccttcagtgctcctccgggggcctctggtcctccaggtcagcctgtcccctcagaaccttgcctcctcaccgagcctgggccggcttccctccgccgacgtcaggcc

SEQ ID NO: 444506 - DNA, 1067 bp, Homo Sapiens
  misc_feature (128)..(128): n is a, c, g, or t
attgatgcgccccggagatgtttcccatacgtcgccgcatagtgggggtggagagagtgtttgacagtgtactcgccacaagagaaaagtgtggtaacactcggctttaaaaaacacacccccatttnacaccccaggtccttcccagatttcctccttcaggaggcgctgtcgccctcccattggcaattgtgcccaggacgataatcagaagggcctgtcttgggaaagatctgattattaccccagcaggccatcatagaaagggcccaggcaggtgacaagggtgtaggtgttgctggtggggtccacttctttcacgtcaatgcgcaaagatcatccttcagggactcggaggctttggccgaagatcagcaggaaagcagcgcttgtaatttttgatgactctctccagcatttctgcctttgtgaccagctccttggctcgatacttgcggagcagaaaatgagccaagtcatccaccttggttactgagtgcttctcggaacaaggactctgcgtcaggcgaggtgcttggccccctcctggttcttggctgctggaaccctcattgggttgcctccagcaagtgaagctgatggtagtgggtaaggcagaggctccctgaggactctggggaggacctgctgactcagcagcaggcacgttcctccagggtgccagggaccagaggagaggaggaggagacagcagcctcctgctcctcagtagtaggagcctgtgcacccaccaggcccagggcctcttcttgggcctcaacgccttcctcaggcttgcagtgctgactcttctgctcagaagacatgatgactctggtcagggcagcaggcaagagtgcaggcaaaagctgggcaatggggacccacaggcagatcttctccttggtgctcctctgtggcctccagggaatcctgtcctccggttggcctgtctgctcagaaccttgactcctcacagggcctggcctgcttccttccgccaagtcccaagctgctggtcagagcagctcgcttctctctaaccctcgtgccgaattcgccaccca

SEQ ID NO: 444507 - DNA, 1743 bp, Homo Sapiens
tattccccagttgggaaacaaggaaaatggaaatggtccaacctttgggggacgggggtcatcccagaggaagtcctaagagccccccaacatggttggcgtgtctctgggtcctcaggtcatcaccccaggcctcaccccacaggggcacccgccacgggcccgtggcccaccgtgcaaaggttccacttggtgcctgcgtgggaacgcaccacctgccgtggaacttcctcctgcggggcagaggaggggtccagaagccacaggagtcaagtcagcaaaattaagttaatttacaaagttatagtaaaaaccacaatagtgacccagtccctcccacgcagtgtgagccctgggctgcgccacacccgcaggtgggcccgtgctggcacctcacagggcaaaggtggtgaagaagatgtgcatcttggccaggaaggtggtgacggagccctgcctccagagcttcatctccacgtccagggcaaagtcccggggctccagcacggcccgctgcaggtagaccacacccgtgtaggcattgagcctgcgcgtgccaaagtagccctcctcattgcccttgatgatgttcagggcgatggtgtcccctgtgaaggctggcgcggggccaatgcggaagatatgcgcaggcaccaggaggcccgtctggaagttgagctggtagtgcgtgatgcgcgctggcgagttctggcactccaggaagtcatggcacgtggtgcgctcgcacttcgttttggagacttggacatagttgggaggacactcgaagcgcaggcagcggaagctaccctggatgttgtggcaggtctcagcctcggaacagttgtgggtacccagtgcacactcatccacgtccttgcaggacctcccgttggccgtcatggtgtagccctgctcagggcatgcacactggtagctccctggcacgttgagacagcggaaggtgcagaggatgccggcgccttgagcacactcgtcgatgtctgtgcaggtgtgcccatcctcagccagctggtagccctggcggcagtagcactggtaggagccatagatgttggcacactcctggctgcagcgctgggcctcacactcattcacgtcttcacagcgcttgccgtccgctgctagcaggaacccggaggcgcaggaacagcggtaggagccgagtgtgttctcacacgtgtgctggcacaggcggcctggcgaggcccagcactcattcacgtcgatgcagccccggccgaaggcatcccgctgaaagccggctttgcagtcacagcggtaggagccagggaggttgtggcacacttggccctcaccgcagcggtgcacacctgtctcacactcattcacgtccacacacttggtcccatcatcgctggcgtggtagccgcgcgcgcagatcagcgggttcctctggcatgtgtaggagcccaccgtgttgatgcagctgaagcctggccgacatggctcggacagtgacgtgcactcgttgatgtccacacagttgccttcaggatcctgcaggaagccatccatgcagcgctgcctggcctggcagtagaaggagcccttggtgttctggcacaagaagcccggctggcaggtgtgcgtgcccatcgcacactcatccacgtcttcgcactcgccatccttgagggcatagcctggctcacaggtgagtgccttgtagcagtggaaggagcccagtgtgttcacaca

SEQ ID NO: 444508 - DNA, 481 bp, Homo Sapiens
  misc_feature (77)..(117): n is a, c, g, or t
gcgttttcctctgttactttataaccctttcatactagttgaacttttttttataatgtacatgtactactttatannnnnnnnnnnnnnnnnnnnnnnnnnnnnnnnnnnnnnnnngaattaatcacagtggaacatgaaatggaatgtcaactttggggacgggtcatccagaggagtccaagagccccaacatgttcgcgtgtctcttgtcctctggtcatcacccagcctcacccacagggcacccgccacggccgtggcccaccgtgcaagcttccacttggtgcctgcgtgggaacgcaccacctgccgtggaacttcctcctgcggggcagaggaggggtccagaagccacaggagtcaagtcagcaaaattaagttaatttacaaagttatagtaaaaaccacaatagtgacccagtccctcccacgcagtgtgagccctgggctgcgccacacccgcaggtggcccgtgctg

SEQ ID NO: 444509 - DNA, 1019 bp, Homo Sapiens
  misc_feature (177)..(177): n is a, c, g, or t
  misc_feature (216)..(216): n is a, c, g, or t
ttcaaaaattttccattaccaagaggaaaaaataggcagtgcagcacctttagaaaaataattaaaagtttcatgccatttacaggtaagtgccacactgagaatttacaatacagtaatttactgcaatcacaggggagttccataaagaaacaaagctcttacactccaggtttntggaaggtgttattggaaatgcttaactgaaacccccangaacttggtatatctttaggattgagttgatgaaggtcataaaaggttttcatagcatctattatataaaaggagttcactgcatttggatagctggtttagtgtctctgacaagtgtgaagcctagaagaattactggcttgatggtgatctttctgtatccggcaagacagaccttctccacagtaacaacgctggaatatttctagtccatgagagccttttctcctatgcttggtacacacttgaccttctttcaggacaggtttacagatcttggaccagaagtgtctagcacaacacaatcctgaggcacagtctgatgaccggagacaaacagaaccttcttgtcctacgaaggagaagacagtaggaaaaaagtacatagttactgctaaacctgcatcgtttcactaaaataattcaaaagacacttctgatgtgctaagaatgagtcttaacatccttacctttggtgtgatacatttttgaagacaaggtggttcttctggaatacccatccaaggtgctatgatcattaccaaagctttcagtgatggtttcctcaatttctcctcggaaatgattttgatcagaagacacacatattcctaaggaagcaggaaatagtgattaacttcagggttgtaatgcattactgctaacagctgtgacagtggcagtctgttatgccagcatcaacttgagatacttcattgcagtgacatcattttaaacacaagccaaacttcctctttactgttaatgcaaaactctccagatggacagaagcaccaatgtgt

SEQ ID NO: 444510 - DNA, 1126 bp, Homo Sapiens
gccatttaccagggtaaggtgcccacccctgagaaattttccaataccagtaattttactgcaatcgccaggaggagtcccataaagaaaacaaagctctgtacactccaggatttttggaaggtgttattggaatgcttaagcggaacccacaggaacttgtatatccttaggattgagttgatgaaggtcataaaaggttttcatagcatctattatataaaaggagttcactgcatttggatagctggtttagtgtctctgacaagtgtgaagcctagaagaattactggcttgatggtgatctttctgtatccggcaagacagaccttctccacagtaacaacgctggaatatttctagtccatgagagccttttctcctatgcttggtacacacttgaccttctttcaggacaggtttacagatcttggaccagaagtgtctagcacaacacaatcctgaggcacagtctgatgaccggagacaaacagaaccttcttgtcctttggtgtgatacatttttgaagacaaggtggttcttctggaatacccatccaaggtgctatgatcattaccaaagctttcagtgatggtttcctcaatttctcctcggaaatgattttgatcagaagacacacatattccatttttgcagtaattcccggggcagcacatagcgtgacgcatgcagcgttttcggcgcttcctgcaggcgagacagatttgcacgcctgcgtcccctccgcgggtgggactagcgcagtactcatcagtgccgcactcctcgtcctctgcgcacgggtacggctggtagttgtcaatggtctggtacttattcccgcccgggtacaggattcccggcgcggcgctgactgcagagcctgggtgccccgcagcgccgcccagcggtgggggcaggttcttgatagcgttggaattgagaaccgagttcaaggtggcgctcactcccagcagagggtggccgccgagagccgccgctaccatcgcgacaaagacccgggtagctcccgctgcgcccagagccatcatctcagaaggactcaagagggagaaagaaagagaaaatgaccgtcactttgcaagcctgggtccccacgaaacc

SEQ ID NO: 444511 - DNA, 945 bp, Homo Sapiens
aaagcccttagaaggaatttcctgggccctgaaaggggggttcctttccggaattccgggcaaggacaggccctttttccccccaggttaccaaccgctgggaatattttctagtcccatgagagcctttttctccctattgctgggtacaccactggacctttctttcagggacaggtttacagatcttggacccaggaagtgtctagcacaaacacaatccctgggggcacagtctgatgaccggagacaaacagaaccttcttgtcctttggtgtgatacatttttgaagacaaggtggttcttctggaatacccatccaaggtgctatgatcattaccaaagctttcagtgatggtttcctcaatttctcctcggaaatgattttgatcagaagacacacatattccatttttgcagtaattcccggggcagcacatagcgtgacgcatgcagcgttttcggcgcttcctgcaggcgagacagatttgcacgcctgcgtcccctccgcgggtgggactagcgcagtactcatcagtgccgcactcctcgtcctctgcgcacgggtacggctggtagttgtcaatggtctggtacttattcccgcccgggtacaggattcccggcgcggcgctgactgcagagcctgggtgccccgcagcgccgcccagcggtgggggcaggttcttgatagcgttggaattgagaaccgagttcaaggtggcgctcactcccagcagagggtggccgccgagagccgccgctaccatcgcgacaaagacccgggtagctcccgctgcgcccagagccatcatctcagaaggactcaagagggagaaagaaagagaaaatgaccgtcactttgcaagcctgggtccccacgaaaccgtgccggttcggctgcagagtcagggtccgggagccccctgcggtcccagagtcct

SEQ ID NO: 444512 - DNA, 982 bp, Homo Sapiens
ccgagagagggggaggccctagaagaaattactgggcttgatgggtgattctttcctgtatcccggcaagacagactttctcccacagttaacaacgctggaatatttctagtccatgagagcctttttctccctatgctttggtacacacttgaccttctttccaggaacaggtttacagatcttggaccagaagtgtctagcacaacacaatccttgaggcacagtctgatgaccggagacaaacagaaccttcttgtcctttggtgtgatacatttttgaagacaaggtggttcttctggaatacccatccaaggtgctatgatcattaccaaagctttcagtgatggtttcctcaatttctcctcggaaatgattttgatcagaagacacacatattccatttttgcagtaattcccggggcagcacatagcgtgacgcatgcagcgttttcggcgcttcctgcaggcgagacagatttgcacgcctgcgtcccctccgcgggtgggactagcgcagtactcatcagtgccgcactcctcgtcctctgcgcacgggtacggctggtagttgtcaatggtctggtacttattcccgcccgggtacaggattcccggcgcggcgctgactgcagagcctgggtgccccgcagcgccgcccagcggtgggggcaggttcttgatagcgttggaattgagaaccgagttcaaggtggcgctcactcccagcagagggtggccgccgagagccgccgctaccatcgcgacaaagacccgggtagctcccgctgcgcccagagccatcatctcagaaggactcaagagggagaaagaaagagaaaatgaccgtcactttgcaagcctgggtccccacgaaaccgtgccggttcggctgcagagtcagggtccgggagccccctgcggtcccagagtcctgagggcagggcctcgtgccgattaacagccgggcctcgcacctag

SEQ ID NO: 444513 - DNA, 1021 bp, Homo Sapiens
gggctcagcttccgtcctctctgcttccttacagcacccccacctgccagagctgatcctccctaggccctgcctaaccttgagttggcccccaatccctctggctgcagaagtccccttacccccaatgagaggaggggcaggaccagatcttttgagagctgagggttgagggcattgagccaacacacagatttgtcgcctctgtccccgaagacacctgcaccctccatgcggagccaagatggggaatggaactgaggaagattataactttgtcttcaaggtggtgctgatcggcgaatcaggtgtggggaagaccaatctactctcccgattcacgcgcaatgagttcagccacgacagccgcaccaccatcggggttgagttctccacccgcactgtgatgttgggcaccgctgctgtcaaggctcagatctgggacacagctggcctggagcggtaccgagccatcacctcggcgtactatcgtggtgcagtgggggccctcctggtgtttgacctaaccaagcaccagacctatgctgtggtggagcgatggctgaaggagctctatgaccatgctgaagccacgatcgtcgtcatgctcgtgggtaacaaaagtgacctcagccaggcccgggaagtgcccactgaggaggcccgaatgttcgctgaaaacaatggactgctcttcctggagacctcagccctggactctaccaatgttgagctagcctttgagactgtcctgaaagaaatcttttgcgaaggtgtccaagcagagacagaacagcatccggaccaatgccatccactctgggcagtgcccaggctgggacaggaggctgggccctgggggagaaagagggccctgtttgcatcagcctctgacctttggccaagcaccacctgcccccacttggctttttttggtgccccttgttccccactttcaggcccccaggacctttcccttggccccttttgggtcccggatatccaaactggttcccctggc

SEQ ID NO: 444514 - DNA, 900 bp, Homo Sapiens
atcaactactgcatgccccttctgagcatggggggtggccacacttgcaggaggttttgcaggaaggaaatgaagtgtggacataggggtccccttctacttacttgggtggagaaggaaccaagagtcagccccatggggagtgtggcctgttccctccctgagctccagactgagtgggaggcactggggagggactgagggggacaggcagtggtgccaggacccacagaggagctgagaaattagctggggtgagggctgagtgtctgcattcctactgctgcctgtagaagccacggggatggaataggggtgcagaataaaggtaggctctaacctttcaggacagtctcaaaggctagctcaacattggtagagtccagggctgaggtctccaggaagagcagtccattgttttcagcgaacattcgggcctcctcagtgggcacttcccgggcttggctgaggtcacttttgttaccccacgagcatgacgacgatcgtggcttcagcatggtcatagagctccttcagccatcgctccaccacagcataggtctggtgcttggttaggtcaaacaccaggagggcccccactgcaccacgatagtacccttgaagacaaagttataatcttcctcagttccattccccatcttggctccgcatggagggtgcaggtgtcttcggggacagaggcgacaaatctgtgtgttggctcaatgccctcaaccctcagctctcaaaagatctggtcctgcccctcctctcattgggggtaaggggacttctgcagccagagggattgggggccaactcaaggttaggcagggcctagggaggatcagctctggcaggtgggggtgctgtaaggaagcagagaggacggaagctccc

SEQ ID NO: 444515 - DNA, 1034 bp, Homo Sapiens
actttcattagtgttttcaatagtgtgggcgcaggctcagaaggtggagaggctggcctcagaggacacccaggcttggggctaagtcccagtgtccatatgaagctgtttctggccttgtccgtttttgttgtcccaggctctgtgcccctcactcagtcaagaacttgtctttgtgttgcttcttggggacatgctcagggcagaagtcagagcggaggaggcgggaaaagtagattatgatcatcacgtccagcatgagcaggatacccagcaggaaggtgcccagggtcctctggttcacataacgcaagaagaaatgggtgaggtaggcctgaggggccaggcggaagagaaagtacatgaccaggttcacatacttgttaacccggtagaggagatgatcctgggcattactgattttcatcatcatgcgaatggtgaggaagatgttgctgacttccaccagtagtgttaagacacccccaccgacaaagctgctccaaaagatgccggagaagaaggcacccatggccatgacgtgatggacaaggtattcccaagaggctcgcgtctgtccgctagccacgatgtccaccgtatcgtggatgaaataccccgcagagaagcaaacgagcaaatagccagaaagtgaccacgccgtctcaatctccactaacatgtcaggagtctgccatacacacagcagtgcccagatccccgacacaatggagtgagcgaaggagacgagcaggttgtgccagcgccaggtgcgcagggggtcggcgcgcacgtgcacgggtaggggcaggcgacagagcgcgcgccggagcgcccggaaggtcagcgtggcgcccaggagcagcggcagggcggggtgcagcagtcggggcatgctggccctccctgccgtccgccctcgaggccgcctcctaggtctgttctgggaaccgggatccctctcgggccagtccaggccggccgcctctcccgccggccgccagccccacacagtgatgcagggaattcggacc

SEQ ID NO: 444516 - DNA, 1370 bp, Homo Sapiens
ttttacaaaaacctctttgagtcctttattaacgtctggagatgtgtggtacatacaattaacagcatcacaccagctacagaagtacagataaccaagaatgtacttcagaacaaggatctgagagcaacttatggtgttgcctgctctgaacctccacaaaaacccagttctgacacacgcaagacagacgatataacaatttcacttgggaatggttttttttaaaaaatgacaagaactaatagttcaaaccctttagagtgtgagatgtggcagctcgcttggtgccgtggcactgctgtaaaaggccaacatgggcatttgaaggtcaggcagaagaaccgaatggggtgggtggaagaggttttattttcagtgtagagagataacagatggtccgagtggatactttcagtccaggctcagtatggggcctgcaggaatccactagataaatacagtctataaaccggaaggctgaaaaacaccagccagccatccttgtcattgcttccaactggtggacactgatgcatccggagtcacttatgacacagatcaggtttaacaggggtgcacccgaacgcaagaaggcagctcactatgtccagtcagctctgatcctgttcacgcccttggatgttcatgggttcctctgctttcacacgggaactaaggaacacttcctttatttcaatgttccactttggaaaaaacccgaacccttcccccacccccaccatcattcttcataaatttgcttccaatctcctgattgttctgggtctagactttttcctttcgcttcaatttggacacttttttgacagtcccgttcttgttaagcagcttcaggacacggtctttatgatctaaaaccttaagcatggagtctctggcttcactgatttgatccatcacaagtttacacctctgcatatttccctgtatcagttcgtttattcggtggagatcatcatctgttgctgcttttttctttgggataatcccttcctgcaggttagtaagtctttcatagacatcatgttctagattcgtcagctgtagtaactgggcagcacagaggtggactttccagccttgagcacgacaggatactcctttctgattagctatttcctgcagcatagctttcttctcctctttgacccggacgtcactgtacctctgaaagtggtggtaagcagctttccaggggttccgatagtgacgaagcaaagtaatggggggtcttggacgcactgggacatatctcacaccttcctcatccatatactccttgggaggagacttgcgcttctcagccttcaccagaagactcttggcagtggacttctcatcatcag

SEQ ID NO: 444517 - DNA, 2616 bp, Homo Sapiens
  misc_feature (1782)..(1782): n is a, c, g, or t
gtctccctggaggatgggaaagcatttccaacccaatttttccccccaaccaaaaagcaaagggcggcagatgagtggggcaacgggctgaaagctgtagcatcacttgcaggtggcatagtagagcacgcgcccattgatgtggtcacggatctgctccacacgcttctccagtcctgtcaggtccgctgagcgcagcatgatggcctggctgccccgcagcagctccaactccatgtctttcatcctgtccatcatctccatggtctccccaaacagctcctctgcctctgtcttcacactctggatccgggcaccctgctcacccagcatggaactctgacccaaccggtccttcaactcagcatacttttgttttatgtctctcagatccctcttgggcactcaatgcctgctcgctggcaccttccgcaagctgctgggcctggactgcctctgccccctgctgccgggcttggtggcggagctcctccatccgtgtccagaagtcacccagctgcttggtcatgcttgtcaccagcttttctgctggccgcagtacctgctgaacctcagcaaccctgtcctggataagccgaagggagcggctggtgccttgcatggtgtcctgagcttcctgcagtgccactgtcccctgccgcaggttcccaaccacatcttccacctggccctccactgcatgggctcggctcctggcttcctcagcctcagcctgcaaccggcgggcacgcgcaatgtcctgcttggtctgggacagcaccaagtccacgttggggagcctggctgcaatggcctggatctcattcatcttctgcagaacagtagctgagtctgtgggcagccacagggccagcacggcctcgctgacctcctggatagtggctgcatcagtgtcggggtctgttaggaagtcccggacctgctggattaggagccgtgtgcgtctgacatcttcctccatctgggagcggctggcgctcacctgggtctccaagcgctgggcactggattgaatctgtgaggcagattcctcggctgccctaatcatctgcctggtccgctggagctgggcattgaagccccgcagctgctcagccacctgccccgccatcaagaaggccccaccggccctgggaaggacacccctgcagcgggagccacaggctgtgccattgtcttggggacatagctcaccagggcatgatattggggtgcaagccatctgcctggagttgccacagagcttgttgaaggtgggtgtcaggtcaggcaacgaagacatctccagcctcagggccacaagcttggggctgccggtgcctcctcctcctcccgcctgccgcaccagcctctctgcctctctccggctgtccctgagctggtccaaaaggcgcgagctgtcggagacctgctgagcagcctgggctgactgctcgtaggctgtgctcagcatccggaaggctcctgaaggatcagcactgcttattttttcaaactgctccctcttcctgtgatacatagtaaggagaccattgaagcttctgtcaagactctccaggtctctcggaagggacaacgtctcctcctccaggggcagatccagctgcaggccctggagagttcgcctgagggagaggatggcactggccacctgagccacctcctgctctgtgactgcggggctgctgagaactgctcggatctgctcaatcttactctttgcatctaggatccgggaggccaggccacggtcctccagcnccaggccctgaccacaggctggcggtggcattgcggagtctaccaaagcgcagggcctgctcccggaggtccgcatcataggtctggaagcaagggtggcaggccacgcacaccgggtagcgattgcagtagcctcgctggcactggtcacagcggggcccggtcaagccagggcggcagaggcagcggcctgatgccttgtcgcagcccgggccctctgttccccggaaatcacagtcacaggctcggcatcctgtggccacgtctccataggtccggtctggacactggcggatggctgcagcgctgcacatcaggccaccaaagccttcccgacaggggcactgccctgtgaactggttgcactgtgggctgagggagttgtgcgggtcgcaggcacacggttcacagccctggccactggccagcttccagtggtagggagcacactggtcacatttgggacccaccacgttgggcagacaaaggcagcgcccactctcctcgtcacacggcatgtccctccgggaccccaggatgttgcagtcacagcggtggcagccctgcgggttggcgtaggtgagtccagtgaagcccggcttgcataggtcacagcgctctccctgcacatgctccttgcacacacactgcccggtcactgggtcacagggagcccctggcactgccccatccggatcacactcgcaggagatgcaggtctcctgaatggaagctcccgggcgccggttccggaaatagtgcagctgacaccgctcacagttcttgccttcggtgtggtcccggcaatgtccctcgtccgaatcgccacccagc

SEQ ID NO: 444518 - DNA, 1109 bp, Homo Sapiens
aagttacctatggcagatactttgaatcatctggagaaatcacttgcccacctggaaaccctgagccacagcttcatcctttctctgaagaatagtgagcaggaaacactgcaaaaatacagtcacctctatgatctgtcccgatcagacaaagagaaacttcatgatgaagctgtggctatttgtttagatggtcagcctctagcaatgattcagcagctgctagaggtggcagttggccctcttgacatctcacccaaggatatagtgcagagtgcaatcatgaaaataatttctgcattgagtggtggcagtgctgaccttggtggggccaagggacccactgaaggtcctggaaggtgttgttgcagcagtccacgccagtgtggacaagggtgaggagctggtttcacctgaggacctgctggagtggctgcggcctttctgtgctgatgacgcctggccggtgcggccccgcattcacgtgctgcagattttggggcaatcatttcacctgactgaggaggacagcaagctcctcgtgttctttagaactgaagccattctcaaagcctcctggccccagagacaggtagacatagctgacattgagaatgaagagaaccgctactgtctattcatggaactcctggaatctagtcaccacgaggctgaatttcagcacttggttttacttttgcaagcttggccacctatgaaaagtgaatatgtcataaccaataatccatgggtgagactagctacagtgatgctaaccagatgtacgatggagaacaaggaaggattgggggaatgaacgttttgaaaatgtgtccgctctttgtataacaccaagcagatgctgctgcagagggtgtgaaggagctgtgtcttgctgcttgcttaaaccaggtccctcctgctttccatctcttgaaacttctcctcgagagaccgagatgagcatctgcacgagatgggcactggagcacaatcacggcagtcactacggggaaatgattccattgtgaccaggaacttctttccctggtcctgggatgccagctgctggtgaagtgtgtcttccattcctttctattcacgtttgg

SEQ ID NO: 444519 - DNA, 1164 bp, Homo Sapiens
  misc_feature (19)..(19): n is a, c, g, or t
  misc_feature (35)..(35): n is a, c, g, or t
  misc_feature (41)..(41): n is a, c, g, or t
  misc_feature (993)..(1013): n is a, c, g, or t
aatgtgttgtgtccttttnaaaataatgtccccangcgcanctgggtgtcccgtgaaggcaaaggtcaatgaagttcccaggcctgagctcaccccccatgttcctccctcatctcttcaagagactcccaagtatcctagcaaccctgcaagtcccatgcctcaagtacgtgctgggcgaatgaccttggggtcgttgttggtgaacagttcttttgcacgtttcaacattgctgtttccaggggcttattctcagggggaaggaactttgactcaaactcgttgggcctgaaggaggagacagtctccaggaggggcgtcacaaactcgcccttgtcccactgccccttctccatctgagtgccgcaggttcccaaggtctttccctgtcatcatcatcaaggatcaagtagttgacgccagagttccggggacctggcgcctcattctgcttggctgtgaagcagttctgtgtggcttacccctgggcaacatgagggtagctttgctcccctgccgcagcctgtggcaaacgctgggttcagttcacagtagttggcctctgagttgagccaggcagagggagacgagggaaccttgaggaacggcaccttgcagggcttaggcgggggcttagggcacagttgactgtctgatcccctcagcgcctccccagccctggcgtctgaggagaccctccgaaccactgctgggctcagggcaggctcgcttcccgtcctgaacacaggtgagtttgggcaggggcttgtgtccacacccgaggactgaggtggcagcttgcagccaatcggcaggtagctctctgactggtgggctttgagggacaaggctcttctgtcctgcatgtgatccaggcaggcgggctggctaccactcttttctttgtttctgaagtaaaagacacataggatggaaatgtgttactaacgtgtaaaataaaacttttaggcaatgccatgggaacttaaacnnnnnnnnnnnnnnnnnnnnnctgctcagaacgagagtgctacagcataccctaaaagtaaaggaatgaccgctggagaaacaaattactgatgggacgattaatatatgactgtgttgtgtactccatccccctgtccccatgaccaatgcagcagctgagtcctaggatg

SEQ ID NO: 444520 - DNA, 1376 bp, Homo Sapiens
aaggccatgaaatcaagttcaaaattggggtattcttttatcgggttttttcgttgggggggaaagaatgttgcctgggattctttccatctaaaaggctggattgttagacctggggcagaactctaggatctgactttagcctggggaagcaaagaggaccaaaacctaaaagctcaactttctgcatggtatgcatgattcaaatgagctctttctgcttgggagtctgttggcttggagactcggatatgatagggcttcagttcctcaggagggacagaatctggggtattgctcatgaggtcatgtccccggaaggactttgggaaggctatgacatctctgatgcttggagatccagtgacaaggcatatcagtctgtctaaccctaaggcaattcctccatgagggggtgccccataatctaaagcctggagcagatgggagagcattttcacatcctcctttagtaaggttgccaggatataacgctgcagctctgcattgtgaattcgaattgaaccacctcctatttcattgccatttaaacccaggtcatagtgttggctacgggcctttttgggctccagtgtacaggagatgtatgtcactggggtggggagcagtaaatgggtggtgggccgattccagctcttctgggattttcctcccttgggcaggaagagtgggaaaatctaccaccccaaaggaaagagaacagagtggggtcacggagcaccactcctcttgtttctagaaggtcagcacattccagtcgtaattttcctaacaaagagcatgctttattgtgctctccagcagttagtaggaccacatcttcctcttgggtctccattagtctgattaattccagtctttgtgactccattatgaaattagcaactggagaattccagtttctattggcgttaaggaatacaggtaagatttcctgattaaaatggtcagctgcaaagtttctaatggattcaatgtctttcctttttaagtattttgctccttcagggatacatatggctttcacagttccatggggcttactaagtgcatcttgaagaaatccaatctctgtgtttctaaacacatcactgatatctataatcttcattccaaagcgagtgtcaggtttatcagttccataggtggccagcacctcagcaaaagtcatagtaggaaaaggaacaaccacaggatctttgtcattgggccaggaatactggagcaaaccctcaattaaactctggatcccagtctggtctacaaatgacatctctatgtcaatctgagtaaactcaggctgtctgtctggtcttgaaccttcatctcgataacatcgggcaacctgaaaatat

SEQ ID NO: 444521 - DNA, 968 bp, Homo Sapiens
aaggctttccctgtttccctgaggaccccttcaggggtttttgcggacttgggccttctgggttccacactgggcacgtcccagaccccaggtactctgggttctctgccgtaggtgtccctttgaaggtgctgggtggagccccccgcttctggtgggtcctggtcccagtaatagaggttgtcgaaggctgggctgaaggcaggaggagggtggggctgaggggcagctcctccctgggggtgtcaagtactcggggttctccacggcacccccaaaggcaaaaacgtctttgacgaccccattcttccctggggagagagtcttgggcctttccagagtggcaccagcaggtcgggcagcaggcagagggccctctcggggcgaagggggctggggccgaacatctggctggttcacatattcaggctgggggctgcaggtcaggggggcaacgtagccatcagtctcagagggcaggggtactgtggggtcctcactgtaccgctgtagagggctggggtcatgtgtggggaggctttgcagccccttggctgcccccattcccaggtcaccatcaaatacatcggagccagccccttcggagggtgccagtggagacctgggggcctcctcttcagagggctccagccctagtgtcaggtccccaccgccactcctggtagatgagctgcggtgcctgtggtggaccatgcccccagcgcccggggcagggtctggacagaagaagccctgctggggtaccagatactcctcagcatccaccaggtcccccatgtcatcgtcctccagcagtgagcggtagaaggtgctgtccaagggactggctgggcccaagtcctcattctggatgaccacaaagcgctgggggtccctggccatgcgggagaattcagacaccaactcccggaatcttggccgacattcagagtcaatcatccaacatt

SEQ ID NO: 444522 - DNA, 1290 bp, Homo Sapiens; identical to SEQ ID NO: 70845
  misc_feature (61)..(71): n is a, c, g, or t
  misc_feature (154)..(154): n is a, c, g, or t
  misc_feature (163)..(165): n is a, c, g, or t
  misc_feature (249)..(249): n is a, c, g, or t
  misc_feature (263)..(263): n is a, c, g, or t
  misc_feature (289)..(327): n is a, c, g, or t

SEQ ID NO: 444523 - DNA, 1916 bp, Homo Sapiens; identical to SEQ ID NO: 312485
  misc_feature (147)..(147): n is a, c, g, or t
  misc_feature (1310)..(1310): n is a, c, g, or t

SEQ ID NO: 444524 - DNA, 1066 bp, Homo Sapiens; identical to SEQ ID NO: 312486
  misc_feature (218)..(218): n is a, c, g, or t

SEQ ID NO: 444525 - DNA, 963 bp, Homo Sapiens
  misc_feature (580)..(580): n is a, c, g, or t
cggtccggaatttccgggatcgcgggccttgcggctgcgttttcaatctgcttccttgtgagtcaggtgggtcctgggcccaggaaccggcccggagccgtggacgccctacagctgagaaggggacccaaggggtcggccgcggccaaggcccctaggaccgccgccccagctcacgctgccgacggcagctatagacattctgcgtcaggtccgggctcctggacttcgcctttcccgagccctggaggtggggagaaaagtggaagaactggccagagagtctggaagtttgggttctggtcctggctgtgccactgactcactgtgaccttgggatcttgtgctgtgaagacatttcccaagtgcttcatgttagccagcaaatctgacccacaaggcctggaaagaggtgattgttaggttgcgcagaggtggtcttatccagctcagcttcccctgggacccaccgtgggacctgaggcagaactggggtggacttggcctcctccatggcacaccggctgcagatacgactgctgacgtgggatgtgaaggacacgctgctcaggctccgccnaccccttaggggaggcctatgccacccaggcccgggcccctggggctggaggtggagccctcggccctggaacaaggcttccggcaggcctacggggttcagagcccacagcttcccccactacggcctgagccacggcctaacctcccgccagtggtgggctgggatgtggtcctgcagaccttccaccctggcgggtgtccaggatgctcaggctgtagcccccatcgctgaacagctttataaagacttcagccacccctgcaccctggcaggtgttgggatgggggttgaaggacacccctgaggggagtgcccgcacacgggggtctgaaaactgggaagtgatctcccaactttgaccggaagggctagaggggcat

SEQ ID NO: 444526 - DNA, 1144 bp, Homo Sapiens
ggtccggatttccggatttcatctgcttccttgtgattccggtgtctccttggcctaggaaccggcccggagccgtggacgccctacagctgagaaggggacccaaggggtcggccgcggccaaggcccctaggaccgccgccccagctcacgctgccgacggcagctatagacattctgcgtcaggtccgggctcctggacttcgcctttcccgagccctggaggtggggagaaaaggttcaccaatttttaaaatccaaatatatctcatggtacagtggaagaactggccagagagtctggaagtttgggttctggtcctggctgtgccactgactcactgtgaccttgggatcttgtgctgtgaagacatttcccaagtgcttcatgttagccagcaaatctgacccacaaggcctggaaagaggtgattgttaggttgcgcagaggtggtcttatccagctcagcttcccctgggacccaccgtgggacctgaggcagaactggggtggacttggcctcctccatggcacaccggctgcagatacgactgctgacgtgggatgtgaaggacacgctgctcaggctccgccaccccttaggggaggcctatgccaccaaggcccgggcccatgggctggaggtggagccctcagccctggaacaaggcttcaggcaggcatacagggctcagagccacagcttccccaactacggcctgagccacggcctaacctcccgccagtggtggcctggatgtggtcctgcaaaccttccaacctggcggggtgtccaggatgctcaggctgtagcccccatcgctgaacagctttataaagacttcagccacccctgcacctgggcaggtgttgggatgggggctgaaggacacccctgagggagtgtccccacacgggggttctgaagactgggcagtggatctcccaacttttggaccggaacggctaagaaggggcatccccgggaagggcccttgggcctgcgttgaacaacctttcaacctttggtggctgaaccctcccaaggcttgctgtggctgggccccaaagcccgaaacccccccgcattttttccagggagggcccttggcgggtttggctctcatatggggaaaccagata

SEQ ID NO: 444527 - DNA, 922 bp, Homo Sapiens
agcagccttcggaagttcagccacaaagtcgaagtggttcagccagggccaaaggcccttccagggatgcccttttagccgttcgttcaaagtttggagatcactgcccagtctcaagacccccgtgtgcggcactccttcaggggtgtcctcagcccccatccaaccacctgccaggtgcaggggtggctgaagtctttataaaagctgttcagcgatggggggctacagcctgagcatcctggacacccgccaggtggaaggtctgcaggaccacatccagccaccactggcggggaggttaggccgtggctcaggcggtagttggggaagctgtggctctgagccctgtatgcctgcctgaagccttgttccagggctgagggctccacctccagcccatgggcccgggccttggtggcataggcctcccctaaggggtggcggagcctgagcagcgtgtccttcacatcccacgtcagcagtcgtatctgcagccggtgtgccatggaggaggccaagtccaccccagttctgcctcaggtcccacggtgggtcccaggggaagctgagctggataagaccacctctgcgcaacctaacaatcacctctttccaggccttgtgggtcagatttgctggctaacatgaagcacttgggaaatgtcttcacagcacaagatccttttctccccacctccagggctcgggaaaggcgaagtccaggagcccggacctgacgcagaatgtctattcatccgtcggcagcgtgagctgggtcggcggtcctaggggccttggccgcggccgaccccttgggtccccttctcagctgtagggcgtccacggctccgggccggttcctgggcccaggacccacctgactcacaaggaagcagatgaaaacgcagccgcaaggccc

SEQ ID NO: 444528 - DNA, 946 bp, Homo Sapiens
gccagtcttttggggggcggtttgcccaccatttttgcacacattccctcccggggccaggttgaccccaggctgccaggggaagtcccgggatgaatgttgcttgggggagaaagttgggccttgaggaagtttgagggtggtttccacgtccccacacggggcacatccaggcgtttcattgtggccaggcagaacaaagttcacgggggtggccactgcaccttggggaactggggggtcctcgctgggggcacctgcaaggcgagcattgaccctgttgtggctagaccagagccagaggacagcggcgttgggactccccacccgggtgcatggaggcagcagccatctgctcgaagtggctagcgcagtctcggcagccgaagaagtagtgcacgtagcctcggatggctgggaggacctccttggccttggctgcttcctgtgagtggtctacattttgccgagctgcctgcacagtcaagaagtggaagaggacccacagggagcagggaaagccccggaaatgcggctcactcccctggcagccaatccagttcaccttcttggcaagaacggcaccctctttcctgtcgtccagggcagttttaaagaaactgtagggaattttatttctcttctgcctcttgagccattcattcacggagtgcaggaagttctggactaagggccggccagggaaatacttggccagcactgccacaaactttttcagggccaccaggcgctgcccttccaggaccgggaacctgcccacttctatccgcaggatgtagtgcagtgcagattccaggtcagccatgtagatcttggagcgatctgccaatttccaaacagtgggagctatcttgttagcagtggttggtgcaactgtggtctgggcagcctccctggtgagcccagagagtctctgcaggtaagc

SEQ ID NO: 444529 - DNA, 1417 bp, Homo Sapiens
  misc_feature (70)..(70): n is a, c, g, or t
  misc_feature (128)..(128): n is a, c, g, or t
tttctggcctgggaagtaggtgtacatgggcagcagggcccatgaagggacaggggataggagcccccancacagaaggctgatgtccaggtaagagaaggccccctcccaaggcaccctgcagccantgcttcgggccccgtccagctcggggctccaagctggccctcagggatgtcgaccagctgcttggagctgcggcccacgcgcctgacctccaaagggccccagaggcggttcttctcagccctggactcagccagcaatgcagcccctgtgtctcgcttgctcaagtgccactgcccaagcggctgctcctgctcattcctctgaagctctgccatgtgctcaggaggctcctggcctggtgcagctctgaggccagggtgcagcttcgggggtcgacttgcctcaggtccctcagccggcacatgtggggtggtgtttgtgggggacttcatcatctcaggcttcccagggtccagagttgaattccggctttccagctccagggctcccatcgccagcttctggggcggctgccacattctgcacatccctccgggcagctgacccagctgcagggaagtccaggatgatgttgcttggggagaagtgggccttgaggaagttgagggtggcttccacgtcccacacgggcacatccaggcgttcattgtggcaggcagaacaaagttcacggggtggccactgcaccttggggaactgggggtcctcgctgggggcacctgcaaggcgagcattgaccctgttgtggctagaccagagccagaggacagcggcgttgggactccccacccggtgcatggaggcagcagccatctgctcgaagtggctagcgcagtctcggcagccgaagaagtagtgcacgtagcctcggatggctgggaggacctccttggccttggctgcttcctgtgagtggtctacattttgccgagctgcctgcacagtcaagaagtggaagaggacccacagggagcagggaaagccccggaaatgcggctcactcccctggcagccaatccagttcaccttcttggcaagaacggcaccctctttcctgtcgtccagggcagttttaaagaaactgtagggaattttatttctcttctgcctcttgagccattcattcacggagtgcaggaagttctggactaagggccggccagggaaatacttggccagcactgccacaaactttttcagggccaccaggcgctgcccttccaggaccgggaacctgcccacttctatccgcaggatgtagtgcagtgcagattccaggtcagccatgtagatcttggagcgatctgccaatttccaaacagtgggagctatcttgttagcagtggttggtgcaactgtggtctgggcagcctccctggtgagccca

SEQ ID NO: 444530 - DNA, 1075 bp, Homo Sapiens
  misc_feature (960)..(986): n is a, c, g, or t
cgtttacggtgagcgcgacggagaggttgtgccgattttcttgtcgccggcgagatgtttgaccccagttcgaagattcccaggtgccacccactcgaagattcttggaggggtttatgcgcaattctccaaaacagtgggggggcgatctttggtagcacgggggattggggcccgcctgtggttttgggcaagccctccctgggtgaggcccggagaagtttttgccaggtaagggggtatagaaggacctgggtttccatgaggcacggggactcggtaggacagagccattccggaacagcaaggtagcaagaggggaagtcggtgacaccaaactttctcaccaccattggcctctgtgttcagcaccctgcgcaccgccacgcctttgtgctgggacaggtcccagagccacctctctacccaggtaggagcctcccttttcaaagatcagagccaggtactcttcgttatttctcgcaaagaatccatcaatctcctccagcttggcaggctccagtgggggacaggctgggggccacgtgtcatgatgggactccagggcgtcaatgagcctctcccgcagcgtctgcacgtcagcaccagccactggaaatactgctcccgagccgttcttggtaaaggccttgaagaacctcacagtcgggaagccagggatgttgaagtctctgcagactgcactgttggtctcctcagcacagtccagggcggcgagatacagggccggcctccaggctttgacgtcttcggccagcgccttccacgtcggggcgaaggcgatgcagtggccgcaccaggaggcgaagaactccacggcccaggcgctgcgggagcccagcaccgcgccgcgcaccgtgtccgcctgcagcagcgtcagcgggtcggaaggcgaatagagcgccgaccgcggggccgcgttagcgccgggaaccgcgnnnnnnnnnnnnnnnnnnnnnnnnnnngacggcggcggcccggagccgctgttgcacctcctcatcctcggcgctgcgctcacatcctatatattccagaccagtacagcctgctt

SEQ ID NO: 444531 - DNA, 1239 bp, Homo Sapiens
gatgccattaaaagcggtcccacttggttccacacaggtggccaccggcccgcaccagggtttgaagccacattcatcgatgtcaagggcacaggtgggccccgctccagccccgatgggcagtgcattcgaagccggacggcacctcatggccaagagcccccgttggcatacgggttcggaggtgcaggcgttgctcagctttctcacagttcctgcccgagtagtccgtcagggcaggtgcagctggtactggtcatggctcggcgttgatgcacgtgcctccgtttgttgcaggggtggtgtctgccacagtagttcaggtctttgtcacagagcaggccgccccagttggtctcacagttgcactgccagggctccacacatactgccatgcacgcagccggggtaggggacacactcatcgcagaacctcccttgccagccgtagctgcacctgcactccccaggcacggtgcatcccccgtggagcaaattacacccttgtttacacacagcttccttgcactccttgcccatccagccgtccatgcaggccttgttgccgtactggtcgcaggtgtagtggccgaaaaagtcgttgcggggccggcagaacttgttgcaagtggcgctgtagtagttctcgtcgcagcgcacgcggatctgcagctccaggtgcgccacgtggccgctgaagtgcaggctcttccagcggtcctccgggttgatcatgccggcatgcgacactcgctcgatcagcagctcctcattcggggtggtatcgttgtcccagtcccaggcctccacgatgagggtaaaggagcgcggccaggcgaactggaaggggatgacgacgaggcccgggtcctggtcgccgccggcccagggcccgcgcccgcgctcggtcccccgcagcgcccgccggcggcaggtagaaggagttgccgcccagcacgggcgtggcgccgtggccgtagctgcagggccccgtgggcgtcaccttggcctggtactccttaaggcacacgcgcacgtacgtgtcgcactcgtcgtggccgcagccccccgcgcgcgttgtccggccgtcgccgtcacagcaggcgccgctcagcagctccccgttcacgttccgcagcgcgcatcagctgcagctcgaaatagcccatgggccgcgccgcgtgcaccacagagcgccagcagcagcagcagccgccggggaaggcgcccccggccctg

SEQ ID NO: 444532 - DNA, 929 bp, Homo Sapiens
  misc_feature (27)..(27): n is a, c, g, or t
  misc_feature (35)..(35): n is a, c, g, or t
  misc_feature (393)..(401): n is a, c, g, or t
gttaaatcgtgagggatactttctttnggacaagngggaggttttctgggtacctcatctctggcgttctcaaaaggtcacctttcccttcctgggcccagtcaggggagggagccttgttcttaattctggcaggtgcttccaaggacagagtcttaatgtagtgattgatcctctccacccgaggtgaatcgagcttctgtctcagatgccagtctgaccgtaaactggaacagccccgttaactggacagcataagagatggcgagacccgcataggctgggggaatctgcccgtgcataagaacgatcatcagcccccgtggtggtgatgagggcgatgctgatgaggtccagccgcacagccagccgaccgcatcgcacacgtaaacnnnnnnnnnggagcttggttgtcatccagcagctcctggtatctgtgcagaaactcctgccctttattgtaggcgtggatggtggcaaggccctgtatgctggacgtgatgtgggagaggaaaggtgactgcgtgatattgtccagacgcttcagctcccgaatcaggaccctggagacaatgtgcaggactgaaaagaggatgacaaggggccccactgccacaaggaaccacgggaagactcctgcgatcattcccacacagaagaacaccaggataacgttctggatgaacatctcggcctggaacggcagccgcacgtcaacttcatccatgtctttggaaaacctgttgagaatcctccctgtgggggtcgtgtcaaaatacttcatagggcttcgaaggatccttcggaaaagctcgtcatgcagccgggaggaagctcgcagcgtgcccttgacaaagacaactcctcgaatggctttcaggatcagcatgactgccatggagagggcgtagatgctggcatattacggc

SEQ ID NO: 444533 - DNA, 1839 bp, Homo Sapiens
  misc_feature (37)..(37): n is a, c, g, or t
  misc_feature (41)..(41): n is a, c, g, or t
  misc_feature (131)..(131): n is a, c, g, or t
tgaaagggccactgggcacccccaccttgcgggcctncctntttcattcatcccagggcccccctgccctttttcctcatcgggagctcccagccattcaccagatgcgtcaggcaggtccccagcaaacncggccttgtttttcctcctgtcggtcagcgggcctcctccgcaggcggcggcggtggcggtgcagcaggtgcaggggtgtgccaagcagcaggatgggcaccatggccaaggccaggaccaccagcgtggcctgtaccacctcctgccagggagagggcgagagtcagggcgtccctgctgtgcacacctgcaaaggaacctgagtcacagcagtcacggggcccagagagcctgcggtcgctcctccctccagggcccccgggggctccgtgccctcactgggtgagggtctgcctccataaggactcctgagggaagggacccccggttcccagtgccagttgtgccacctgctaaagatgcacaccatcacctctgacggccctgtctgcacggcccggggcctgcatccccgtttctcggacgaggatcttgcagctcccagtggccctgtgaccgcggggtccccatgaggccgtgtgagcccggcccccaccagccgcagcccacctgccgggggtagagcagcctgttgctggggctgtgggagaagaggaacatgttgatgaagtggatgaggatgctgggggccgaggcggccctggcagcccagacacacagccacttgtagatgactaggaacacgaggtaaccgaaagagtcccagcaggaaggtgagctccggcagcgtctccagcagcagccggtgcctctggccaaagtgcacgtggttgaagactccgaggacccaccccaaaaggccatgtgcacgacgcccaggatgacggacatcttcatcttgaaggagttgaggaagctcaagtggttggcagccaggctccaaataggatcgatgccaaaggggtagggtcccaggaagacaccggtgacgttgggatccagggtaagcatcgtgtgctgggccaggaatgcatcactccagccagactggttggccatggcggccacactccagccccgagggggaagatgctggtggcgcgactgaagcactcgttgtagatgaagccggtgtagatggagaacaggcccataagcaggagcaggtagcggcccctgaagaaagtctgccagatctcgttctgcgcggccttcacagccggtcggttctccgcaaggaccatggccagggcgaagaggaacatgagcagcccgtggcccacatcccccgaacatcacagcaaacaggaaggggaaggtgatgatggtgtagggagcggggttgacctcctggtagcggcccacgccgtaggcatccacgatgccctggaagctggccgtgaagcggttggtgcggatgagtgtggggggcatgtcccggcaggggatgcggtgagccacggcactcactccctcctccatcgagctgtcccgcagggcctcctgcagggcgggcaggtctcgcacagagcaccaggcctcggcaatgaggcacttgtgcgtggtgctcacgctgcactggttcagggccaggtacacggccttcatcttgtggacctgcacctgccctggcggcagcagctgcagcacccggcctagcacctggctcaggaaccgctctgtctccccgaggacctcctgcagctcctggctctgctgttgcagctgctgcagggccccgaggcgggcctcctcctgctgcagaaacgggaagacgtgatcccgggaatccggaccggtccagcc

SEQ ID NO: 444534 - DNA, 1258 bp, Homo Sapiens
tccagggagctttctttctaggaacgagggtctttaagttgcagacaattttttcccttaaactttcggggccttgggccgtccttggtgggcaaaacttgagaagtggtagggcatggctcgacagaagcctcaaatggcccacctgtgtggaactttgcccagagatttcccgcaacttgcattttcaagcaactggtgccattttcccgcttttttgggcagaaggaaaagcagaggcagggtgatcagggtgaccatggtgagggacactgatccccagagcatgatccccaagagacataagcctcgcaccaggtaccacagaaataagctcagattctcactcagagaatcactcagggtggacgtgtcctctgttacccgagacatgatgttacctgtctggttctgttggaaaaactccgtctcctggcgcaggacagccccaaacacctctccctggcaagtggctgtgcacgtggcccatggtgttgttaatagatcccgtcacccacgaactccagcactgcactggctatggtgagaatggacatgagagttaagtttcgagtgaaggtatcggctgagccatcttgtagaatccagtcagtgaggcggcccgtaaagaatggaatggccatctccccaagagaggagaggaccaccaggaccaggaacagcgagaggcggcgcgtctccgagcccaggcagcctagaagccgacgcacagggtttccagagccgccctgaccgccgggcacccagaggctcccgagtttgtgccacagggctgctgcgggcagtgccgctgcataactgacaacgaaggcggtagggtgacttccccagtgcagtagcctggtgctatccgcggacccgggggctccccatgagatcagctctcggaacaaggcaagtcccggcagggccaagcccagtgccgcagctaatggcttcaaagcagccagccagccctgggcacctgcgttttcgctcttggagccaaccgttgccctgaggaccccgcagggagaatatgcggggcagcgcggtccggagcagcacccagtcggcgagaagtagcagtactgtccccagccatgcgagagaagctccggggaggcagcggcacccgcggggagcgggacacctagagctagccattggcactcggacgccgtcccggtcccggccgggcctgggactctccgcgccccggtgggccgaagctccgggtccgccgagatccgggaat

SEQ ID NO: 444535 - DNA, 1300 bp, Homo Sapiens
cgctggtacggtcggaattacgggatatcgtcgaccacgcgtcggagcggccaggcccggcgggaccgggacggcgtccgagtgccaatggctagctctaggtgtcccgctccccgcgggtgccgctgcctccccggagcttctctcgcatggctggggacagtactgctacttctcgccgactgggtgctgctccggaccgcgctgccccgcatattctccctgctggtgcccaccgcgctgccactgctccgggtctgggcggtgggcctgagccgctgggccgtgctctggctgggggcctgcggggtcctcagggcaacggttggctccaagagcgaaaacgcaggtgcccatggctggctggctgctttgaagccattagctgcggcactgggcttggccctgccgggacttgccttgttccgagagctgatctcatggggagcccccgggtccgcggatagcaccaggctactgcactggggaagtcaccctaccgccttcgttgtcagttatgcagcggcactgcccgcagcagccctgtggcacaaactcgggagcctctgggtgcccggcggtcagggcggctctggaaaccctgtgcgtcggcttctaggctgcctgggctcggagacgcgccgcctctcgctgttcctggtcctggtgtgtcctctcctctcttggggagatggccattccattctttacgggccgcctcactgactggattctacaagatggctcagccgataccttcactcgaaacttaactctcatgtccattctcaccatagccagtgcagtgctggagtcgtgggttgacgcggatctataagcaacaccattgtggccacgttgcaacagcccactttgcaagggacacaggtgtaaggggacggaccttgggcccagacaaaggacattttcccaaaaagaaaccagacctggtaccatcacaggctcccagcgaaacagaaggacacggtccaccctgtagagaaattccacttgtggtgaaaaacactcggagacgataatacctgggagaaccaaggtgcaaaggcccaatggtcacatgagggcaactaggcccggagggacaagggtcccccacaagtgaacaccgtgctacaacaacgcacgagtgtataccctagtaccacaggtggtggtaaaagttcaccaagtcgaaaacgacctgcggaaaacatagcagacaacacacagagaaccatgtcactgacagacacagcaacaacacgtgctaccgaaggaaacgccaaattgtgacacaatg

SEQ ID NO: 444536 - DNA, 1131 bp, Homo Sapiens
tgttacggcaccggggagccccgcccagcttgtccccgatactggcctgcaccggtcccacaaaatcgctagtcccccagagccacccgggggacggcctgtgtaccgagccaggaggaaccttcggttcgtgggaaaaccccgtccctgggcgcaggacgcccccaagcacgtctccggcaaagtgcctggcacgtgggccatggtgtgttataggtccggtcaccccggactccagcactgcaactggctatggtgagaaatggacatgagagttaagtttcgagtgaaggtatcggctgaccatcttgtagaatccagtcagtgagcggcccgtaaagaatggaatggccatctcgcccaagagacggagaggaccaccaggaccaggaacagcgagaggcggcgcgtctccgagcccaggcagcctagaagccgacgcacagggtttccagagccgccctgaccgccgggcacccagaggctcccgagtttgtgccacagggctgctgcgggcagtgccgctgcataactgacaacgaaggcggtagggtgacttccccagtgcagtagcctggtgctatccgcggacccgggggctccccatgagatcagctctcggaacaaggcaagtcccggcagggccaagcccagtgccgcagctaatggcttcaaagcagccagccagccctgggcacctgcgttttcgctcttggagccaaccgttgccctgaggaccccgcaggcccccagccagagcacggcccagcggctcaggcccaccgcccagacccggagcagtggcagcgcggtgggcaccagcagggagaatatgcggggcagcgcggtccggagcagcacccagtcggcgagaagtagcagtactgtccccagccatgcgagagaagctccggggaggcagcggcacccgcggggagcgggacacctagagctagccattggcactcggacgccgtcccggtcccggccgggcctgggactctccgcgccccggtggggcctgaagctccgggtaccgccgagtcctcccctactggcggctgggggagggaacgagggcggggctctcggaaagtcccaggaacaggctgatcctgcgctggcgagaag

SEQ ID NO: 444537 - DNA, 1437 bp, Homo Sapiens
  misc_feature (1237)..(1237): n is a, c, g, or t
  misc_feature (1298)..(1298): n is a, c, g, or t
  misc_feature (1358)..(1358): n is a, c, g, or t
  misc_feature (1371)..(1371): n is a, c, g, or t
ggtctttctgtcagaacctgatggctgcctccagtgtcgctcccccggagaggcaggtccctgggctgccctcttcgtgaggaccatgtgtggacgtgtgctccctgcagtgctcacccggctctgccagctgctccgtcaccaggcccgagcctgagtgccccacatgtgctggggttggctgccctggccgtgcacctgggtgagtccaggtctgcgctcccagaggtggatgtgggtcctcctgcacctggtgctggccttcctgtccctgcgctctttgacagcctcctgacctgtaggacgagggattccttgttcttctgcctgaaattttgtacagcagcaatttcttactctctctgcaagttttcttcccagtcacgagatactttgtgcagctgcttatctccaggccttattaaaaagtttcagttcctcatgttcagattgttctcagaggcccgacagcctctttctgaggaggacgtagccagcctttcctggagacccttgcaccttccttctgcagactggcagagagctgccctctctctctggacacacagaaccttccgagaggtgttgaaagaggaagatgttcacttaacttaccaagactggttacacctggagctggaaattcaacctgaagctgatgctctttcagatactgaacggcaggacttccaccagtgggcgatccatgagcactttctccctgagtcttcggcttcagggggctgtgacggagacctgcaggctgcgtgtaccattcttgtcaacgcactgatggatttccaccaaagctcaaggagttatgaccactcagaaaattctgatttggtctttggtggccgcacaggaaatgaggatattatttccagattgcaggagatggtagctgacctggagctgcagcaagacctcatagtgcctctcggccacaccccttcccaggagcacttcctctttgagattttccgcagacggctccaggctctgacaagcgggtggagcgtggctgccagccttcagagacagagggagctgctaatgtacaaacggatcctcctccgcctgccttcgtctgtcctctgcggcagcagcttccaggcagaacagcccatcactgccagatgcgagcagttcttccacttggtcaactctgagatgagaaacttctgctcccacggaggtgccctgacacaggacatcactgcccacttcttcaggngcctcctgaacgcctgtctgcggagcagagacccctccctgatggtcgacttcatactggncaagtgccagacgaaatgccccttaattttgacctctggctcctggtggggtggccgaanccgtggagcctgnttgctgctcctgccgggtggagggagacactggccagaagccccgctggcccccgggaaactgcaa

SEQ ID NO: 444538 - DNA, 1187 bp, Homo Sapiens
  misc_feature (843)..(843): n is a, c, g, or t
  misc_feature (925)..(925): n is a, c, g, or t
  misc_feature (1101)..(1101): n is a, c, g, or t
ggtccggaattcctgcgatgcgtcgggagcggcggcccagttccttgtgggagctgtagttctgcaggcgcggaagccgtggtgctcggccggcatagcactcggtttcccagagggctgagcgcgccgcacggaggtgcggcgccgaccaagatggagactgccgagcagccttgagccggaaggtgcacgctctttgtggaatacgactgctcaccccgcacagcaagcagcttataagtggccctcctgcctgatttcagccctgggttcaagccctgggtggctgcttactaccaaaatcgctcagtagctccaagcctgcctgcagagggttggcaccattaaatgagttgagcagctgaacagaggccgtgccggggcactccgaggcctgagacgaccacgcctgtgccgctgaggaccttcatcagggctccgtccacttggcccgcttggctgtccaatcacactccagtgtcaaccactggcacccagcagccaagagaggtgtggcgtggccctggggacgcatggctgaggcaggaacaggcctcctcccagccacggtgcagccattccatctgagaggcatgagctccaccttctcccagcgcagccgtgacatcttttgactgcctggagggggcggccagacgggctccatcctctgtggcccacaccagcatgagtgaccacggaggcttcaagcggcccctagcgccctcagggcggtctccagtggaggggcctgggcagggcccatccggagccctgcctcaccaagggtgcctccggtccccgactacgtggcacaccccgagcgctggaccaagtacagcnctggaagatgtgaccgaggtcagcgagcagagcaatcaggccaccgccctggccttcctgggctcccagagcctggctgccncccactgactgcgtgtcctccttcaaccaggatccctccagctgtgggggaagggggagggtcatcttcaccaaaccaggtccgaaggggtcgaagccagacacgaagaggaagaagggtcctggggaaagtggggaaagccaggcaaggggcggccttgggaaatcctgccaccnaacaaggggcaagggcccctgtggaagctgggcccatcttggccggggccccggaaaccccttaggctgtaggaagtgggggcacc

SEQ ID NO: 444539 - DNA, 1135 bp, Homo Sapiens
gacccttttccttcgtgtctggcttcgacccctcggactgtttggtgaagatgacccttcccctccccacagctggagggatcctggttgaaggaggacacgcagtcagtgggggcagccaggctctgggagcccaggaaggccagggcggtggcctgattgctctgctcgctgacctcggtcacatcttccaggctgtacttggtccagcgctcggggtgtgccacgtagtcggggaccggaggcacccttggtgaggcagggctccgatgggccctgcccaggccttccactggagaccggcctgagggcgctaggggccgcttgaagcctccgttgtcactcatgctggtgtgggccacagaggatggagcccgtctggccgccccctccaggcagtcaaagatgtcacggctgcgctgggagaaggtggagctcatgcctctcagatggaatggctgcaccgtggctgggaggaggcctgacgggggtgagggcggctcatcaggacctgaatcctcctccccaggcagccccatcggggacagtgcttccacttcagcaccaccgggcaagctgaggtcagagtccgagtcactgagggagactgtgtcggaaggcagcgtgtcatactccgtcccgtgttcgccctccacgctgggggacggctcacctgttcctgcctcagccatgcgtccccagggccacgccacacctctcttggctgctgggtgccagtggttgacactggagtgtgattggacagccaagcgggccaagtggacggagccctgatgaaggtcctcagcggcacaggcgtggtcgtctcaggcctcggagtgccccggcatggcctctgttcagctgctcaacggctcaaggctgctcggcagtctccatcttggtcggcgccgcacctccgtgcggcgcgctcagccctctgggaaaccgagtgctctgccggccgagcaccacggcttccgcgcctgcagaactacagctcccacaaggaactgggccgccgctcccgacgcctgtcgggacgtgtagtcctgtgcgcatgcgctcgcccctctactcctccacgccccggcccttgggtccggctcggaagcagccccggaaacgacggcat

SEQ ID NO: 444540 - DNA, 1134 bp, Homo Sapiens
  misc_feature (234)..(252): n is a, c, g, or t
  misc_feature (425)..(425): n is a, c, g, or t
ggctctttggtggggtttccccggtgcccgcgcgcccagaattgggggcccaaattttcccccccgagggctcttctgtgcccctgttttttgggtgccgggttttcccccaaaaggcccggcccctttgtcgtggttttttccccccctttctccccaaggggaccgtttttcctttttgggtgtttgggagtttcggacccctttgggaattgggtttgggggaaaaataannnnnnnnnnnnnnnnnnnagtctgaagggatcttgggttgaaggaggaccagcaagtcaggggggggcaggccaggttctgggagcccaaggaaggcccaggggcggtggcctgaattgttctgctcggtgacctccggtcccatcttcccagggctggtacttgttccagccgctcgggggtgtgccacngtagtcgggggaccgggaggccaccctttggtgagggcagggctccggatggggccctgccccaggccctttccactggagaccggcctgagggcgctaggggccgcttgaagcctccgttgtcactcatgctggtgtgggccacagaggatggagcccgtctggccgccccctcccaggcagtcaaagatgtcacggctgcgctgggagaaggtggagctcatgcctctcagatggaatggctgcaccgtggctgggaggaggcctgacgggggtgagggcggctcatcaggacctgaatcctcctccccaggcagccccatcggggacagtgcttccacttcagcaccaccgggcaagctgaggtcagagtccgagtcactgagggagactgtgtcggaaggcagcgtgtcatactccgtcccgtgttcgccctccacgctgggggacggctcacctgttcctgcctcagccatgcgtccccagggccacgccacacctctcttggctgctgggtgccagtggttgacactggagtgtgattggacagccaagcgggccaagtggacggagccctgatgaaggtcctcagcggcacaggcgtggtcgtctcaggcctcggagtgccccggcatggcctctgttcagctgctcaacggctcaaggctgctcggcagtctccatcttggtcggcgatcccgagaattcc

SEQ ID NO: 444541 - DNA, 1266 bp, Homo Sapiens
  misc_feature (1090)..(1103): n is a, c, g, or t
gctgggtggcgaattcggcacgagggcgtggaggagtagaggggcgagcgcatgcgcacaggactacacgtcccgacaggcgtcgggagcggcggcccagttccttgtgggagctgtagttctgcaggcgcggaagccgtggtgctcggccggcagagcactcggtttcccagagggctgagcgcgccgcacggaggtgcggcgccgaccaagatggagactgccgagcagccttgagccggtaggtttgtggtgagggaggacgggccgcgcgggccggccgagcctccgggaggtcaccgagcgcagctttaatacctgagctcgaaggccccgctgtgctcgccgacccccgtacctcgcggccgggcccttgggacccacagcatccttgtgaggcccggaggcctgtccagcccgactggacagtgccgaggggcaccgagagccagcttggcaccgagagttcgtttgttctctggcggggaggtcttgctggcacatatagtggagaaaggccgggctctgcgttcatgtggagaaagagacggcttccttcagcctacggacatgaaggagtcaactctaccttccactcgttgccggctttcgccgagaaccccgagaaacggactaccggagtccctatcttgcagcccgatccccgctacccgtcggagtgccccgctgaccaagctgcctctggccccgggggcggatccccttcaaagagaagggaattcaaatcctcaaaacaacggtacccgtagacaatccacactaccacacacaaaagagggggccacggggcaacctctatcccccccaccccatcccggccccgccgaaacacccctctcctccgcgtcgaggcctccccccacccccttcaatctcactacgaccccaccctcaacccacacaacagcgcgccccactcaaaacacgaacaccacccgcggggccccacagtgatgagccgggcacttataggccccgctcgagccgttctatgggccgcccgccctaccctggggtgaccccctcgtacgttcgcacacccgacgcccgaggcttggcccctactcannnnnnnnnnnnnntcactcccacctaagtcatattcaccaagaagcctccggtgcgcgtaggacgcgccgagcagcgatactagcgcccacgacgcatgccgtgaaagcacgaccaccccgcgatgcggccaggacgcagacgccggcagagggtacgggtcgtggcaccacccat

SEQ ID NO: 444542 - DNA, 943 bp, Homo Sapiens; identical to SEQ ID NO: 152224

SEQ ID NO: 444543 - DNA, 1224 bp, Homo Sapiens
  misc_feature (94)..(94): n is a, c, g, or t
  misc_feature (96)..(96): n is a, c, g, or t
  misc_feature (101)..(102): n is a, c, g, or t
  misc_feature (110)..(118): n is a, c, g, or t
tgctggtgaagtgtctggtggcgttggtccctccagctttctgcttcagtgctttcatggaccagtgtcccagccacatgtcacttctccactntntcagnntgtggatnnnnnnnnnttttttcatctctgtaccccacaaaataacacagacaccccattcctaatctgttcctcagagaaattgagtgatatgtctccaggcatggccagtattccccaggacacagagaggacaaaattacaccatttaagaaacactctggtctacacctgtgtctgctgatttcttttcctagcaaccctggacctcacacctaaggacaaaggtcagtagaactggggaggccttgagtcttggcctggtcatttccaaggttccaagtttactacaatagggagttgataggggtgctcaggggttggccacgatggtgtccttgatccacttccggtaatgcaccaccttggtgtacagggaaggcctttcgggcagggcacatggttcactgccccatgacgtgataccttgcagcacaccattacagacaagtgggcccccagaatcacccgagcaggtgcttttgccccctgtccagcgtccagcacacagcatgaacttggtcaccttctgagggtgaacttgcgcacacacgtcattggaaataacatggaggtccacacactgaagtttctttggggtcaagaactcctctggttcaatgctgccccagcctgaggcgtagcaggtggtccccagtgctggctcctgggtgggcaggtccatgaccttcatagcatccgtgagctcggcaggctctgacaggcggagcagcatgaggtcgtggctggagtcatcacctggcctgaggaatcgattcttcaggaggctcatatcgtagagcgggtgtgtgaagctgtggctgacctgaaatacctggcctgtgtcttcaggatgaaacaggctgtgccgacccagcaagatcacgcttttgttcctgatgcagtgggcagctgtgaggacccactgggggtgcaccagaacaccgccgcagactgccctgccacgagaggccacaagcacctgccagggttgggaatgcttctcgcactcccagcctcccacaatccgagacaggatgaggggtgcagcaccaatccacgtcacggacagggtgaggaagacaaccgggacccacatggtgacacagctctccgggtgca

SEQ ID NO: 444544 - DNA, 948 bp, Homo Sapiens; identical to SEQ ID NO: 152227

SEQ ID NO: 444545 - DNA, 905 bp, Homo Sapiens; identical to SEQ ID NO: 322764

SEQ ID NO: 444546 - DNA, 905 bp, Homo Sapiens; identical to SEQ ID NO: 152228

SEQ ID NO: 444547 - DNA, 865 bp, Homo Sapiens; identical to SEQ ID NO: 152229

SEQ ID NO: 444548 - DNA, 967 bp, Homo Sapiens; identical to SEQ ID NO: 125682
  misc_feature (762)..(762): n is a, c, g, or t

SEQ ID NO: 444549 - DNA, 1350 bp, Homo Sapiens
taacattttaaagtaagtcttttaatgacatctgcattgtattttctagctgaagcaaaacagtgcctgtgggatttatgtgacttcttaaccttgaagtccattcatagaaccctagcttccttttcacagggaggagctgtgtgatgaagcaggcaggattacaggccactcctttacccagggaagcaactgcgatggtataagagcgaggtccaccaatctcctgccggtttatcatagctacagcccaggctaagcctgagagaggtcgttcccacacttcaaagttgtctccctgtctaagctggtacccttgcttgcccaaggggtcctgattgatggcaattacgtccttatcctgaaggagagctttggcttgagggctgatgtgtcggaggtcattagacatgaataaaggagcagccatgatagcccagagggccatctgagttacttgctgattccagctgaggccaaagttgccaatcactaacatatctgggtcattccaaccccctggtccagcaacatcaacaattctctcctggttaaaagatgtccagtccaagatactctttatacttttccaggaatcatcaatgtcagcaaaatttcgccagtgattgcagtactgtcggatttctgtataattgggcttttgaaagggccacatataaagaggccactcacaggagtacacaatgcttctgccagtcctattcagggccaaggacatgtgcttataaccatctgccaaattttccaaactgtcacagtaacaaccatcaaattttagcagatctactccccagtcagcaaaggtctgggcatcaatgtcgtagtatccaaaactcccagggaagcctgcgcaggttttatttccaacatctgcataaatccctagcttcagtcctttgctgtgaacataattagctagctggcgaatcccatgaggaaagcgctgagggtctgcctgaagtctgccttctgaatctctttggggagccatccaacagtcatcaatgcagaggtactcataacctgcatccttccagccttctgagaccatgagctctgccatctccatgaagagcttctcactgatgcaggaatctggctcttcctggcagtcaaggttgcacatgaagcgctcccagtgcagccagcccatggtaggcgtccttgccaatccattgtccagtgctctagccccagggatgtcccaggaaacgagggccaggaagcgaagcgcaagcgcgcagcccagatgtagttctgggttcctcagctgcattgtcacggtgaccggacagcataaatttccgcgggtaacctgggcttttaaga

SEQ ID NO: 444550 - DNA, 2125 bp, Homo Sapiens
  misc_feature (1335)..(1335): n is a, c, g, or t
tgtgatatagtgcttgtcattttaattgtaacatattaccaaaaagctttatatacatagctttatactatttacattgcagtagaggaatggcaatgctaacaggtgatcagtgcttccaaactttttcaatacctacacatgggagatctaaagagtacaatatatttaaggacttttaaggaattgttttttcctcactaataaagcatgccctgactaaagagaaggtcctgtaggcacaggcttatttattcaatgactggcaccttcgcagggggtactgacacacaaagtgccttcactggactttacagttctcactgcctttggactccagtccagctttggggctggggacaagtcggcctcgcttgaccctcaggccctctctggggctgtcagtcggacttctctcaggaagattattgactgggacggatttcgtggtgggttctcggaggatggtgcctgaatctactgggctccgctgagcaactttgaccttttgtgatctgctgccaccagctgttggtttggaggactctgcaagattttctttggcgagactcagtggggatagcgctaacttctgtgcagccaggcgggggcttgttcgagttgccattgttgttccttcgcaggatatatgggctagtcttttctgtcgggatgtcagcaaaccctttctttacaacttctggaagtccctctggctcaaactcagtaccttccgtgtcttctgcagggtgaataccactcatgactgctttcttgctttttttagaaaagctctctggggtagcaggtgttggtcctccaccattctcccatattccactggatctttgcctcttgccctgaagctttattttggccagatgataacctcttttcagtaacagaagggattggagatggtcctggaacaactggacctagcaaaggagaccctcgggaatcttgtttagattgctgtgaacacagatgggcccacttgtgtctctaacatctctttagctttctctaacttttcatggcttataagcaaggaacagtacttatccaagtattcatctgcctccttggttttttcttcaagagtttctttcagttctttgatctcagttgttaattcatcgaccttggtatccataacagtacctgttttctgcttctcctgtgcagcttgaagttgagagagttctttctgcagtatctccttttcctcttccagctgtttacaggatttgatcaacaacttcattttcccctgggcacgttcattttccttcttcaactgatttacatattttagattgtccattcttggtntttcttcaattcttcccaaaatctgagtagtagctttcaatgaattattgagctcttctttactagactttaaaaggtctatctccagcttctgtgaactgagacattcttctttagaagtcaatttctctcggtatgtctggatttctacttcatactgtttgtttgtgtccaaaagcaaagcctggtgtttcttttcagcttcatgaagccgtagctgatattcagctatttcctctctcactttcccttccttttccacctggtctttgtgcatgcaatctaggctcttcttcaattcactattttctagtgtgagctccttcaattgatctttgctgctctttatttcttccaaccagtaactgcaactctccagctagcctatttttctctccactgagttcttcttgcagctctgctgttttctgtgccatctcatgcatttccctctgcagctcagtttcctttgcagtcattttgtttactttttcaacaaaggacattttgtccatttttgtcaattcaagctcattctctagattcttgtaagaactctgcagcacttctaatgtgtcctgcaaagaggcatttttggattgtagcacttggatcttctgctccaattccactgtcagatttctcagttctaagttttgctccttccaaagttggtgctctccttccacctgggacagtttagagacaagctgctcttggtcttgaatttgatttttcagtctactgatttcttcatccttcttctccagtttctgcttgccatcttcta

SEQ ID NO: 444551 - DNA, 916 bp, Homo Sapiens
gggtaatagaaagcccacccatgcttaccaagatggttaccagctttccccaacggattcaattggtgattacctgtgccccggaaactgggcttttcatttatataacccaggcccaagaagccctgtgctgtttccagtattgattccggtgctcctccgttcaccatccgaccaccagaacctccaggctgatagttgttcactaactcatagagctctggcaatgtcttagaaactggaaattgccgcttatggaatgaactggattcatcctcaaggaagagcggatgaaaccattcaaaaagggaatagtacagtccaaaacgcaggtcagttctgttcctaatggctacctcaagttccttgacaatgtccctcttgggcccctcatctatggcattccagttccacgaatattctgacccccacaaggtaaagccttcatgatgtttggaagttaagacaatgtatttggcaccagaggcctgaaaaatatctgcccactggttggcattaaaaaattttgctgtaaatagtggtccaaaatcttcatatttgaaactaggagggtaattatctttcataaattccacatacttcggtatcttttccttttgccaataccaccagaaccactcgctaccgaagctgggcacggaaaacactccccagtggatgaagatgccgaacttggcctggtcaaaccacgcgggcagctggcgggcgtccagggactcccaggtggggtcgaagcgcgtggcgctgtgggcagggcacggcggcggcggcagcagcagcaacagcaacagcagcaacgggaacgcgagcctggggagctcctggggccgcatgtcccggcgcaggccggctgtcctctctgcaggctcccgcggcctcgggagcgctgttcttc

SEQ ID NO: 444552 - DNA, 2177 bp, Homo Sapiens
  misc_feature (11)..(11): n is a, c, g, or t
ccgcaggagancataaagggattctctttgctttgtgataccgccccggctcattgtgtgaggtttgtcggtgtcttaataaaaagcggcccgaatatgaagtgtccccgcggccctagaataagacttatttttctctatggcggccgcccagaaatctccctgataccccgtcctttgttctatgttgggggcgaggggattctcacatggttggggggcgctactcgttttttgaacctttctttttgtggggtatcataacacttcaccgttgtggctcaaccggaggcccctcaaaatcaaaaggtggtgtttgcgataaacggggtttatgcaaggggggggctaaatggggtggggcgagccaaggatgatttccatcttcggataaaacatttgggcatgctgccgcaaatttttcaccccatttttcgcgttatttccctgctctggggaaacaaatcaatgtgaaagagactttaatggcaaagtgcactggagagttaaaatggttacatgggtaatttaagaaaaaatttagtgggaaaaagggaaagggctgaactgccaaaataattttcttatccagttttacatttgctttctccatgtgctacaattatagacacctgatagttcctagccttagacataacttgcagcatcagccactctgctgcactttagatcacattagttagggctagagcccagccccatttacacggcatctgatgaatggttagctgtggcagttctaccataatgccattttgctccaaagaaatccagttaagtggctgtccatggcccagtagtttcacctctgttgcccccagaatagctttgggatggccaaggaacagctgtcctgatgtgggccatttaagaaaaatggcatagactaatttttctttaggcttggatgtgtaccacacatctggggtgacagtgtcattctgggatcgccaggtatgggtttcataaatagcttctccattgacttttagccaggaccccatttgcctcagtcgctcctcaaaaactacagaaatggtgccatctagtgtgggcccaatattcatcaaaagatttcctccacatgaaactgtctctacaagttgcttcaccaattcttcaattgtaagatagtcagagattccagcttccctcctatagccccaggacagtttgtctattgtcatgcagttttcccatttatgtggcaaaagatgtcctgggttataacgatcactgcaggtatagaagccaccatgcttacagatgctaccagctccccaacgatcattggtgactactgtgccccgaactgggctttcattatataaccaggccaagaagcctgtgctgttccagtattgatccggtgctcctccgtcaccatccgaccacagaacctcaggctgatagttgttcactaactcatagagctctggcaatgtcttagaaactggaaattgccgcttatggaatgaactggattcatcctcaaggaagagcggatgaaaccattcaaaaagggaatagtacagtccaaaacgcaggtcagttctgttcctaatggctacctcaagttccttgacaatgtccctcttgggcccctcatctatggcattccagttccacgaatattctgacccccacaaggtaaagccttcatgatgtttggaagttaagacaatgtatttggcaccagaggcctgaaaaatatctgcccactggttggcattaaaaaattttgctgtaaatagtggtccaaaatcttcatatttgaaactaggagggtaattatctttcataaattccacatacttcggtatcttttccttttgccaataccaccagaaccactcgctaccgaagctgggcacggaaaacactccccagtggatgaagatgccgaacttggcctggtcaaaccacgcgggcagctggcgggcgtccagggactcccaggtggggtcgaagcgcgtggcgctgtgggcagggcacggcggcggcggcagcagcagcaacagcaacagcagcaacgggaacgcgagcctggggagctcctggggccgcatgtcccggcgcaggccggctgtcctctctgcaggctcccgcggcctcgggagcgctgttcttccgtctctgccgctgagtatgccgcc

SEQ ID NO: 444553 - DNA, 441 bp, Homo Sapiens
tccataatgtgtgcccagttcggggcacagtagtcacccatgatcgttggggagctggtagcatctgtaagcatggtggcttctatacctgcagtgatcgttataacccaggacatcttttgccacataaatgggaaaactgcatgaccatagaccaactgtcctggggctataggagggaagctggaatctctgactatcttaccattgaagaattggtgaaggtacagtgaaatgtctggtggctattaacataatattcttaatagtgtggtcatgtaggaattatttcttctatggctcaatggcctataaatataggacattgttctatcctgtgtttgttcttctaggccgtgactatatatacatgtataaatatataaatgccacatattagcacattaaagatggaacttatttttggcacaccttactgga

SEQ ID NO: 444554 - DNA, 437 bp, Homo Sapiens
aggagccaaataagtgctttttaattacattcctctgccttacaaggtacaagtgtgtcaatatacaagtctagggtcttaacatgtttttccttttgactgcttaaatccccctgtccttgttcccacctgtgtggtctcggcccccagacttcctcatcttcactggtgtaatggtgtacttggtacgactcttccaggacacaaagttggcattaagggccacagaagtaagaactgggcggcaggggagcaacatcaaggcagagggctgttggaggaggccattgttcatcatctgggcggcggggaacagactcggggcaggggcggcgacggtcgggggcgccaggttcagagagcgcagagcgcgggtcagtgcgcacagggccatcagcacgacacccttacttttagccaagctgctcggtgctccc

SEQ ID NO: 444555 - DNA, 1093 bp, Homo Sapiens
ctccacccgacggggtggggggcattttattagagtacagggatatcagctttgggcagaagcagaaggcagcttcacgtaactcttcatggggggtagtggccgaatctttcggccagcccagccccccttgcggtgccaccgcccactgttaggcctcttgcccagccagcggttgcgacctgccttgccaatgacccgtttgttatgatcaacgttggatactcggcctactgttgctacgcacgtttccagcacctgcatctgcctcttagagggcagctggataatggctgtgccattcaccttccgcagtagcacaccacacgtccctgcagctcggatatattgggcaccccggcctggctcactttccacgttgttgatgagggtccccacaggcagagccccaagaggatgcgcatccccttcccgagcagcaactgccattcggcctatgtggttagagttcaagattgtatctccagcctgcatgttttctgtggcgatgatccagcgtttccggctgcccccagcaaccagagctatgtctgctgacctacagggatcatagcggacttggataaccttctcctcaaagggtcctgacttggtctcctcaggccggaaacgcagaaagtcaatcattcgataacgttgcttgtggcccccgccaataccatgcacccggattcggcctgtgtggtctcggcccccagacttcctcatcttcactggtgtaatggtgtacttggtacgactcttccaggacacaaagttggcattaagggccacagaagtaagaactgggcggcaggggagcaacatcaaggcagagggctgttggaggaggccattgttcatcatctgggcggcggggaacagactcggggcaggggcggcgacggtcgggggcgccaggttcagagagcgcagagcgcgggtcagtgcgcacagggccatcagcacgacacccttacttttagccaagctgctcggtgctcctagatgacgttgactgtccggcgccgtcgctccgcaataacgtaaaaggaggcgggcagaaaactggagcccaagctggatcccggga

SEQ ID NO: 444556 - DNA, 1410 bp, Homo Sapiens
tacctacaatggtcaattttattacaaagaactgtatcaaaatatacaagtctgtttaagaacaaccaagaaatgcagctgtttaagggacaaatgagaatcaaccgttagagagcaggcagcctctccccgccgctgtccactgcaggagacggcatcctcagggccacattttccacgggacatccttctgaataatttaaagggtaagtccggcacattacaggtcttcgcgggagggcagctgtgtcgggctttctccttctgtggcttcagcctctgccggcggcacacaggcatcttccgtttcttcgaagccgtcaggacacacacagacgtagctcccctggagtattgtagcagttttcgtttttcctcacacaggttttttctgctagtgagcactcgtccacatctgcacactgtccgtgctccctcgcgtagccagagatacactctttacagtttcctgggccttcccctgtgcagcccacacagctggagtcacactcttcgcacgtgtaggagccgttggcgtttcttacagaactgcgcagcgctgcagggaggcggttcggccgcacactggtccacatccacacaggcgccctcgtccagcacccagcccacttcacactcgccgcagtctctgttggtcaggcccgagcacgtcttgcaggactcgtcacaggctgtgcagatgctgtgggtctcgttccggagcgagctgaagtagccgtccatgcagtcagtgcacagcgggccctggtaccccatgtggcaccggcaggacccgtcgccctgtctgctcccatctccgctgcagtggccattcccgctgcagggcctctgggatccgccctggcatgcgagacagtcgggaccgtaggttcctggagagcagcacactttcagtgtcttcacacaaaaccactcgaataagtcaggatattcgctcttcagctgcagccaccaggcctccaggtgctcctcctgcgcctctagcatctgattgcattcgaagtcgctgctctcgcacagcccctccaggatctccagcaggcgaatctcgctggactcgtacttggacagcgtcttttcctcccaagccgtgttcccgccgccaaagttcttctttgcggtgtccaccatcccctggttaaacttgtccaccagcccccggcaccggtggcagggcgtcggcttcttggcggcctccggcgcgggcggcagcagcagcagaagcggcaggagccccagcgcggcccggcgcggcaggcgcatggcgggtagcgctgcgggaagacgcagccggagctccaggtcctgcggccgtgctgctccggcctcccggccgccctcgtgccgattcaccacccagcctcgtacctagccatttgttttctcccc

SEQ ID NO: 444557 - DNA, 1076 bp, Homo Sapiens
ttttttagcagtagcaaaaccatttattaagtgcagaacaaaggctgggtccttgtgctgctcccagctctttggttacaaataggtttgggcccacagaggacggaccttgcccccttcatgcctcccaggagacacctagcccctgctctgtgcatgcgggtgggctgggcccccaggggtgcaaggatggagtagctgaggaggctccgggagaggagtcgggaggacgcctagtgggacatggcgggggtggggcagggtgcggtcaagtttggaagaactgttggtccatgtgggtgctaagggttccgctggtggtcagtgtccggctcacaaactcctgggtcacatgccgggtgagggagccgcctgcctccaggtgctgggcccccagggtcggcccatccactaggaagggctcggtggcgctggtgtgggtgttggtgatgctgctgtactcgctttgcagcgggtgctggaagagcccggcacggctgcccagctgcgggaagggtcctccatcctgggactctatggtgatgatgccctcgcgctctggcccgaagccctcagtggtcctggcctgcaccttgaacttgtagggcacgttctcgctgaggcccggcacggtcagccggctctcggggctgtctccatccacccggaatgcggtggctggccctcctccttgggccatctcacaggtcaccaggtagccgacgatatccccattgggcctccgtggccgctcccagctcagctgcagcgagtctgggctcagggcagtgaacaccagcgggcctggggcactgggagtgctcaaagtgaaggcggagcctggcaggggacacagtgggctctgcgggtgcacctgggattcaatggtgatgacaccctcacgctctcggccccagccttcctggctctgggcccgcacgcggaacacgtaggagtggttgggcaggaggtcttccaccaccaccgaggtctgggcagggttggggatgttgagccgatgcagctcaccgccgttcagcagctggtactccacactgtagccctgcagcggccgc

SEQ ID NO: 444558 - DNA, 1049 bp, Homo Sapiens
  misc_feature (22)..(22): n is a, c, g, or t
gccccagccttcatccagaagntaagtttctttttccttgctgctacttcattgtttaactctgaatctgatttgtcccatgttgttgccagagtaggctgggcatggaacctcttgctcccctgttcagtgcctccatttggatgaagaatggtagaatttggctccttaggacgtttccattgcggtctggtgactatccaaaaaatgagggccccgaacaccaggatcagaaggccaagcgtatttacgaaaacaccttctggcgggaatgtactgtatgcaggatctctcagggaaaaaatcagtttctctgtcaatcccataagtgctgttgcaatcactgttccaaagatgacaattccagaataaacatgtatgggcatgagaaatgctcggagagaaagcggagcccatggaagcagaaagactgaaaaacctgaaagaagctgtaacaaatagcatatgacagctatcagtccaacccagctgtgcagactgtacatattggctatattgttaacattgtggttctcaaacacggccaccacagagataattgcaagaatggcagcaactgcatttaaccctgcatggatggatttcatcaggagcttgctgcatttccaggtccacggcagtctgtagacgatgatggcgatgccctggatgaagacgaagccggtgaccatgagcactgggtgccagttaaactctagtgcgctcccatcccagccaagcccctctcggtagtggaggacccagacgagggcgaagatcaccgacaggaagccgacgagcagtgccgaccccagcagcgccaggaagcgccagtagccctccatggccatcagcgccccatactccgcaccgcgggggccacaagaacttggagaggcggcggcagccctctgggtagtggccgggcggcgggaccggggcgtcgacttcttggggctgtctccgcctgcggggagggactttctgggctgctggcccggaatgtggggccttttgcgggtggggagctggccccaactcagaaatgg

SEQ ID NO: 444559 - DNA, 3122 bp, Homo Sapiens
ggggtgcaggtggcgtttattttcatggatttatacacactggaaaagcctctgcgcccatgcccacgccctcctccctccccccggcgctgggtcccctcatatgaaagggaagtaacaccgaggagcacacggagatatagggtgtggggctgggggggccagcgctggggccaaaagtctgggtccccagcctcccacacgcagcccctcgggccccttgggtgtgtcaataaataacccaggtccaggctggtgtgggcctcactcctcgctgtccagcttcaggctgatgctccgtgctttgccccgtgccagggtgtgggtggtgttcccgggccctcacgctccgcctggctggggcccctcgagcgaagcagctggctctgtttgcgcaggaagtccacgggggcagccacaccatagctgctcttgcccaaggcagctctcgggggtcccgaggaggcatgcgagtgcgagcccgcttccagctggcccaggtgggccacatagccgtctgacaggaactggcactgcgcctgtagcttccgcacggcacggcccacgatgtaggtctggctcggggacagccccagcgccgcgtatacagccacatctttgggagacccataaccggccacgatgttcagttctacctcctgcaccaggctctgcagaaacattgccttctggcgtagtgggtcgtgggtgaggccgtcgcagaaggagacgacgccgtgggggaagttgtgctgcgacagccatgccaccacgcggtgcttctgcatatccggccggcctgtgacatacacgatcaggtagccggagtcctgccagtgcctgaccacgtccacggcgccagctcgcaccttggggtcgctgcccatgatggagacgctggcggtgaaggagccgtcgatgctgaagaccacagcctccgtgccgcgggccaccacagtcaggcagcattcggcataggtgtggtcgcccctgaccaccatgcgcacggggtagacaccaatgcccagcgcgcgttctgggggaactgggaaggtgaggcggcccgagctattggtgacttcggtgccaaagtggatccacttgcccgacagcggctgcgtcatgatgtagacatccaccttctctccagtgagcgtgacgacgtccaggggcccgtacatgaagcgcccgcttagcacctgggggcggccctcgcacaccaccgtgtcgctcgcccggtggttggaagtgacgttccggatcttgacctgcgtgcgttttcgctgccacttctccctggggaaggccgggctgtagatggacggctcctcgcattccgccagctgtggccgctccttctcgatcacctggcgcaggatgaacgccaccacgtcggcggactcccagtagctggcgtggaagaggtggggcagcgtgacggtgggaaaggcggtgagcgcctcggggcagtacagcgagtagtcgatccgcttggtcccccaccagcgctccaggatcttaaccacctcactggtggtgctgggggcggctggctgggccggggggtcagtggccaactcactgcccttccagaaggcaccgctagtagaggtgggtgttgagggcaccagcatctccagctcctccagaaagaggctggagtgcgtctgcagagtgtcggccagcagcagggatgagccatctcccagggggaacttctggtagcggggcacggtcagtggggcgatggcctggaacttcggggccagcaggggctcgaggcgtgaggcgcaggggtcggccgcgtggaagaggttgtagatctgttcacaggctgggcgcatctgggctgcctccagggcgggcatcacagttttgcgcagagccagcaccaggcccagtggggagccgaagaggaagaagccagagaccttgaagtcaaggcgggcagtgctgctggggccgtcaggtgcctcggaactggcagcgggtgggcagaaggccgtgcttgcccgccggggctcccaggaggaggtggttgcgggggctgcctgaaggctgttctgagagccctcgggctcaggactggccatgtcgctggggatgcgctggggaggcaaggccgagggttctgggctgccccgacccaggccttccacaccatctgccagggggtcccgcactgggccaaactccggagagagcagctcattgttcatgctcccacggcggctgctgccccgactcccggtgcccgcgttagcactgtggcaagagtgcatcacagcccaggatgccagcaacaccatctccaatcagtgcgacctgcccacagaagccggcaccctcaggtgagcgcaggaaggctgagtaggcctggttggtgcgggcaatgacggtggccacggcgcccctggtagcgggaggatgaggtggccagcagtggcagggcagccagtggaatgtgttcttgggagcgagacaggctgtccccatcgtggctgtaagggctcaggttggagacaagggcataggcggcggcgcagatgggtggacagggcaccagtcgcagcgccacgtggcccaaggcctcagggaagtggatgcgggtgacggcctcgaaggcggagctcagcgtctgcacatccgcctgcttggagttggcgtctccagggcctgagtccaggatgttgccgctgtgcaggataaggaagagggcgtggactgcgcatgcctcagcccccagctccccggctccatccaggccctctgagtccctgggtgcttgggccccatcctcaatgcctttagctgcctcggctccaggctctggcgttccctctgcctccactggggaggcaaaggcatcaatgaagtcattggagttccacttggtcatctccttggggaagacctcctcactgtccgagaagccttcgtgggcatcaaagaactcttcctcggagctgttctcagagtctcgggcaatgttctgcatgcgccactcagacaagctctggggagacacagcccctccatgttgggatgagtaggaggaacgggaggatgaggaccactgcttcccaaagctggcatcggcctcgtgccgaattcgccaccca

SEQ ID NO: 444560 - DNA, 836 bp, Homo Sapiens
  misc_feature (87)..(87): n is a, c, g, or t
  misc_feature (135)..(157): n is a, c, g, or t
  misc_feature (184)..(286): n is a, c, g, or t
tttaacctgttggccccagtgcagtagctcactccctgtaatccccaaccctttgggaaggcctgagtggggagggtcacctgaggntaggagttcatgacgggcccaaggcaacatagccatacctattttccnnnnnnnnnnnnnnnnnnnnnnnttagccaggtgtggtggtgtgcaccannnnnnnnnnnnnnnnnnnnnnnnnnnnnnnnnnnnnnnnnnnnnnnnnnnnnnnnnnnnnnnnnnnnnnnnnnnnnnnnnnnnnnnnnnnnnnnnnnnnnnntgagagtgagaccctcatggggtggaaaaaaaagatctaacatgttaactttaggaactataaaatgccttcaggtgtatgtgatctgaaattacaagtggtgacttctcagaaagcatatgaacacggtgaatgttgtaatgttctgaagataagctgatacttagtagtgatatgttctaaagacaagaacatgagggccccaaagcctgtgtcatcaactctgctttgaggtcactaatttttaaatacagagcataaagtagaactccaaacacttgggcaagaagaaaatccattgcaaatagccaacacatttctattaaacctcacattttcaattttgtatttggttgagagtactttttaaaaaaaaggcttaaatcaatattatctaacacacacaaaaaagaatctcattaattctcctcactctgggccagatgctgtggctcacacctacaatctcagcactttgggaggtactgggtcaaagggggctctgcaggtcgatgatcccctcaaacctgcaaagacatcccatctatcc

SEQ ID NO: 444561 - DNA, 1146 bp, Homo Sapiens
cagaagaggcaaagcccagccacagcagctatgtccttcagcagctaaacaaccaaagagagtggggttttctctgtgactgctgtattgcaattgatgacatttactttcaagcacacaaggcagttctagctgcctgtagctcctattttagagtgtttttcatgaaccatcagcatagtactgcacaactgaatctcagcaacatgaaaattagtgcagaatgttttgatctcattttgcagtttatgtatttaggaaaaattatgacagctccctccagttttgagcagtttaaagtggcaatgaactacctacagctatacaatgttcctgactgtttagaagacatccaggatgcagattgttctagttcaaaatgttcctcttctgcttccagcaaacagaacagcaaaatgatatttggggtaagaatgtatgaagatactgtggctcgaaatggcaatgaagccaacaggtggtgtgcagagccaagttcaacggtaaatacaccacataatagagaggctgatgaagagtctttacaattaggtaattttcctgagccactatttgatgtatgtaaaaaaagttccgtgtccaaattatctactccaaaagaacgtgtgtcaagacgctttgggcggagttttacctgtgatagctgtggatttggctttagctgtgaaaaattattagatgagcatgtgctaacctgtactaacagacatttataccaaaacacaagatcttaccatagaatagtagatattagagatggaaaagacagtaacatcaaagctgaatttggtgaaaaagattcttccaaaacattttctgcacagacggacaaatacagaggagacacaagccaggctgctgatgattcagcttcaaccactggaagcagaaaaagtagcacagtggagtctgaaatagcaagcgaagagaaaagcagagctgctgagaggaaaaggattcattattaacgatggagccagaagatattcctacagatgaactgaaagactttaacattattaaagttactgataaagactgtaatgaatccactgacaatgatgaattagaagatgaacctgaagagccattttatagatactatgttgaagaagatgtcagcat

SEQ ID NO: 444562 - DNA, 1166 bp, Homo Sapiens
  misc_feature (53)..(115): n is a, c, g, or t
  misc_feature (129)..(179): n is a, c, g, or t
  misc_feature (185)..(359): n is a, c, g, or t
aaagaggggtttttttcctaaaattccccccggggggtgttttttcctccctnnnnnnnnnnnnnnnnnnnnnnnnnnnnnnnnnnnnnnnnnnnnnnnnnnnnnnnnnnnnnnntttttcaaaaaaannnnnnnnnnnnnnnnnnnnnnnnnnnnnnnnnnnnnnnnnnnnnnnnnnncccctnnnnnnnnnnnnnnnnnnnnnnnnnnnnnnnnnnnnnnnnnnnnnnnnnnnnnnnnnnnnnnnnnnnnnnnnnnnnnnnnnnnnnnnnnnnnnnnnnnnnnnnnnnnnnnnnnnnnnnnnnnnnnnnnnnnnnnnnnnnnnnnnnnnnnnnnnnnnnnnnnnnnnnnnnnnnnnnggcctgagggcacatgtttatttagcagacaaggtggggctccatcagcggggtggcctggggagcagctgcatgggtggcactgtggggagggtctcccagctccctcaatggtgttcgggctggtgcggcagctggcggcacctgtgcactcagccgtcgatacactggtcgattgggacagggaagacgatgtggttttcagggaggcccagagatttggagaagcggatgaagttctcctttagttccgaagtcagctccttggttctcccgtagagggtgatcttgaagtactccctgttttgagaaactttcttgaagaacaccatagcatgctggttgtagttggtgctcaccactcggacgaggtaactcgttaatccagggtaactcttaatgttgcccagcgtgaactcgccgggctggcaacctggaacaaaagtcctgatccagtagtcacacttctttttcctaaacaggacggaggtgacattgtagctcttgtcttctttcagctcatagatggtggcatacatcttttgcgggtctttgtcttctctgagaattgcattccctgccaggcctaccacataccacttcccctggaattggttgtcctggaagttctgctgcagagggaccttgctcagaggtggggctgggatcaggtctgaggtggagtcctgggcctgggcatgcagagcccccaacagggctaggcccagccacaggagacctaggggcatgatttcagggccgaggaagcaggcgctgtggtggctgctgggcctggcaggggtggaa

SEQ ID NO: 444563 - DNA, 1746 bp, Homo Sapiens
  misc_feature (308)..(321): n is a, c, g, or t
ggccccgggccctggcaacatttaaccagaagccagccttcgagcttctccgggagcccgacttttgtgaaagcagagtggagtggaggggggctgccccaccctcgcttgtacacagctgggcccagatggccccttctgatccccccagggctgacccagtccccagacccaggcacgaagagagaggtcagagccggtaagaaggaccccccagagtctctccgtcagtgcagaggcaccagtcaccaagtgaacgtccagcttccgaacaagggggagcaagctccagctgcactcgtgatttnnnnnnnnnnnnnnccccggatcttctgggtatgctgccagctccggcttcttggctgccccctcccagcctgcagctcctgggccagagctgcagagcagggaacttcccaggagagtccaggagacaggaattacagacctcccaggccagaaggaagtggggacagagaccccaggacggggcccggggatggccattctgacctcgggcctgtcatttatccggcgggacccggtgggcaagtgggcgagtgtggtggcaagggtggggggcggaggcgaacacatgggcaccatcagtctgaggtacacaccggagactccaccctgttcccagcgctcacttctggctcatttcttcgtgcatgtggttccgggacaggtacttgagggcctcatccagcaggatgacaggcagagatatctggagcaccaccacccactggcgcccgctcagtggggtcacctggaaaatgagaggcaggggcggcacgagcaggatgaggaagtgcagggccatggacatggccacagccaccagcagccaggggttcatccagggcggcatccgcagcagcgactggttctccgagacgctgttgagggcattgcacatttcaatggtcacgagcacggacaaggccatggtggtggggaagcgtgactcgaacacctcacagtcgatgccggcaaagagcgggttgtcttcggagcacttcaggaagttcctcagctggtcagaagttgatgtgaggtccctcggcgtcatacacaaaccaccaggtggcggcagccactgtggccaggcctacgtacactccgatagccaggtatcggaagaagagccagccactgatgagggcttctcgggggctccggggcagcttctccatgatgtccaggtctggcgggttgaagcccagagccgtggcaggtaggcagtctgtcaccaggttcacccagagcagctgcacagggatcagggcttcgggcaggcccagaattgccgtgaggaagatgcagacgacctcgccaacattggaggagatgaggtagcggatgaattgcttcatgttgctgtagatggcccggccctcctccaccgcagccacgatggaggcaaagttgtcatctgacagcaccatctctgccgccgacttgaccacggccgtgcctgagcccatggcgatgccgatctctgctttcttcagggctggtgcgtcgttcactccatcgccagtcatagcagtgatctcgttaaaggactgcaggttctccacgatgcgggacttgtgtgcgggctccacgcgggcgaagcagcgggcggtgcggcaggcctggcgctgctgctcggggctgaggtcatcaaactcgcggcccgtgtaggccttgcccgccacgtcttccgtgtccccaaagatgccaagcctgcggcag

SEQ ID NO: 444564 - DNA, 1211 bp, Homo Sapiens
  misc_feature (41)..(41): n is a, c, g, or t
cccagggggtgagctgcccttttggtcccacagccggccantaaagacaattcccaaatcttgagtgggtggcagagactcctgcgatgcccgtctcaggtagctgtggggcaccagcccacaaagccgaggttggctctcctaggagtgagaactgcccaagggctgcagaaacaggccacccagctctatctgggggctccatcggtgggtagggggacagtgggggcagttctgggcccacccagccactgttcctgaccccaagtcctggtgactttctgaggtgcccactcccatccaacctgccttgctggccagccttgtggctttgcccagctgtgtgtgtgagggtggcatgcccacctccagtccagcccagggcggtagcagcaaagcgtggcatcgcctcggtttcttacaaaaattcataataatattaataataatatactcgacattgtcgggctggggcgtggcccgggagtccgtgtggggcaggcaggtgcctacgaggggcaggggcgtgtgttggccccggcctgggcgcggtgctgcaggtccaggggctgtgggggcggggcgccgggtcgggccgagtgcagcaccaggttcttgacacagcctgtgatgcctgaggagaatctgcccccggtcagcgtggccacgtcaggggctccgccgatgtagacgctgcccttggcgttgactgccacgttgggacctggggaccggccgctgaccagctcctcaccgtcgacttggatggaacctctgcggccctcccgcagtgctgtcacccggtgccactcgccgtcattgatggggtcctcagagaccaggcgggcctccccactacccagctggtacctgaagacaaggtgcccgtcttgaagcccgaggctgatgaagtccttgccttggccggcctctcccacctccacaccctgccagagcaggaggccactggctgtgctggtccgaacctccagctcgatggtctcgggcacctcgggcaggctcctggagaagacatggccagggaaggcgaggaagccatcatcgtggaaataggctccgtactgcccaggggcatcattgcccccgctgccttcaagatgccagtcggactctgctatgccatgtccagagccttgttggcagcgtgggccagagaagccagggaggcagaggcagcgggtgccctggca

SEQ ID NO: 444565 - DNA, 902 bp, Homo Sapiens
  misc_feature (790)..(790): n is a, c, g, or t
ccgggccgaggcgatggcgccctgggcgctcctcagccctggggtcctggtgcggaccgggcacaccgtgctgacctggggaatcacgctggtgctcttcctgcacgataccgagctgcggcaatgggaggagcagggggagctgctcctgcccctcaccttcctgctcctggtgctgggctccctgctgctctacctcgctgtgtcactcatggaccctggctacgtgaatgtgcagccccagcctcaggaggagctcaaagaggagcagacagccatggttcctccagccatccctcttcggcgctgcagatactgcctggtgctgcagcccctgagggctcggcactgccgtgagtgccgccgttgcgtccgccgctacgaccaccactgcccctggatggagaactgtgtgggagagcgcaaccacccactctttgtggtctacctggcgctgcagctggtggtgcttctgtggggcctgtacctggcatggtcaggcctccggttcttccagccctggggtctgtggttgcggtccagcgggctcctgttcgccaccttcctgctgctgtccctcttctcgttggtggccagcctgctcctcgtctcgcacctctacctggtggccagcgacaccaccaccctgggaattcatctcctcacaccgcatcgcctatctccgccagcgccccagcaaccccttcgaccgaggcctgacccgcatcctggccccacttccttctgtggatgggcctcagggtgtctgggagaccctctgggctgaggnaggaggaaaaagggcaacaaccccagcctggtttagggtttgctgggaggccgggctttcccgccttgtggcctgaaaaaccacggggggcctggtcccccaactggggggg

SEQ ID NO: 444566 - DNA, 1110 bp, Homo Sapiens
cagcggtaagggaggtatctttggttgggcgccggtggataacgtgaaaaggggcaggggattcgcggccgccaggaggcgggatattcgggttttagccttgaaaattcccggttttgggggttttggcagcgggcggtggcccaggaatttggggggccccccggggcccttggaggcggtttcaccccaggttgggggaccagggccccgtggttttttcgggcacaagagcggtgagccccggctttcccagcaacccctaaaccagttggggctgttgcctttttccttccttctcaagcccagagggtctccccgggaccctgaggggccatccacagaaggaagtgggccaggttgcgggtcaggcttcggtcgaaggggttgctggggcgctggcggagataggcgatgcggtgtgaggagatgaattcccaggtggtggtgttgctggccaccaggtagaggtgcgagacgaggagcaggctggccaccaacgagaagagggacagcagcaggaaggtggcgaacaggagcccgctggaccgcaaccacagaccccagggctggaagaaccggaggcctgaccatgccaggtacaggccccacagaagcaccaccagctgcagcgccaggtagaccacaaagagtgggtggttgcgctctcccacacagttctccatccaggggcagtggtggtcgtagcggcggacgcaacggcggcactcacggcagtgccgagccctcaggggctgcagcaccaggcagtatctgcagcgccgaagagggatggctggaggaaccatggctgtctgctcctctttgagctcctcctgaggctggggctgcacattcacgtagccagggtccatgagtgacacagcgaggtagagcagcagggagcccagcaccaggagcaggaaggtgaggggcaggagcagctccccctgctcctcccattgccgcagctcggtatcgtgcaggaagagcaccagcgtgattccccaggtcagcacggtgtgcccggtccgcaccaggaccccagggctgaggagcgcccagggcgccatcgcctcggcccggggccccacccggaagaagcgcccc

SEQ ID NO: 444567 - DNA, 800 bp, Homo Sapiens
aacctaggctagtacgaggacgagtgttaatcggcacgaggccgggccgaggcgatggcgccctgggcgctcctcagccctggggtcctggtgcggacctgggcacaccgtgctgacctggggaatcacgctggtgctcttcctgcacgatacctgagctgcggcaatgggaggagcagggtggagctgctcctgcccctcaccttcctgctcctggtgctgggctccctgctgctctacctcgctgtgtcactcatggaccctgtgctacgtgaatgtgcatgccccagcctcagtgaggagctcaaagaggagcagacagccatggttcctccagccatccctcttcgtgcgctgcagatactgcctggtgctgcagcccctgagggctcggcactgccgtgagtgccgccgttgcgtccgccgctacgaccaccactgcccctggatggagaactgtgtgggagagcgcaaccacccactctttgtggtctacctggcgctgcagctggtggtgcttctgtggggcctgtacctggcatggtcaggcctccggttcttccagccctggggtctgtggttgcggtccagctgggctcctgttcgccaccttcctgctgctgtccctcttctcgttggtggccagcctgctcctcgtctcgcacctctcctggtggccgcaacaccacactgggaatcatctcctcacacgatcgctattccggcaggccagaccctcgacgagctgacgaactggccctttctgtgtgcccagcctgggacccggtggggggaaggcc

SEQ ID NO: 444568 - DNA, 2531 bp, Homo Sapiens
aatgagacacactcatgtagccagcatcattagggtatcgtatagttccagatgtggagcattagacccttgcagcaagaaaactgtagtggcatcaaggcccactttgtatatagaatagcttgtgacaacggctgcatctgggacctcaagttctgccccagtggagcatgggaacttccaggcacccctcggaaggctcctctcctgccccggttgggtctcttggctctggcctgctcagacgggaaagtactgctattcagtctaccccatccggagggcgtgctggctcagcaacccccatatgcagtgaagcctgccatatataaggtacaatgtgtggcaactctgcaggtggggtctatgcaagctacagacccctctgagtgtggtcagtgccttagcctggtctggatgcctaccaggccccaccaacacctagctgctggatattataatggcatggtggttttctggaaccttcccactaactcacccctgcagcggatacggctctctgatggctccttaaagctctaccccttccagtgtttcctagcccatgaccaggctgtgcgtacccttcaatggtgcaaagctaacagccatttccttgtctctgcggggagtgaccggaaaatcaaattctgggaccttcgacgtccttacgaacccataaactctatcaagcgcttcttgagtacagaactggcctggctgcttccctacaatggtgtcactgtggctcaggacaactgctatgcctcttatggactctgtgggattcattatattgacgctggttaccttggtttcaaggcctacttcactgctcctcgaaaaggcaccgtttggagtctttcaggatccgactggcttgggacaatagctgcaggagatatatccggggagctcattgctgctatattaccagatatggcactgaatccaataaatgtcaagcgacctgtagagcgaagatttcctatatataaagcagatctgataccgtatcaggacagtcctgaaggtccagaccattcttctgcttcatctggggtccccaaccctcccaaggctcgaacttacactgaaactgtcaaccatcactacttgctctttcaagacacagatttgggttcattccatgatctgctccgtagagaaccaatgctgcgcatgcaggagggagaggggcattctcaactctgcctggacaggctgcagctggaggctattcataaggtacgtttcagcccaaacctggactcctatggatggctggtatctggggggcagtcagggctggttcgaatccattttgtccgtggactcgcctccccactgggccaccgtatgcagcttgaaagccgagcccacttcaatgctatgttccaaccatcctcccccactagacggcctggcttctctccaaccagccatcgccttctgcccactccctagccttggcccacaccagatccttggagtgaagtcggtcaagaacaaatggcccctatgcacagagccataggaactgggggccttccctggacagtgatcatgccaggcctggacctttaggcctgcctccccaggactccttagatcccactctttctacagacttctgtgatcacagccccctgcgggcaggggggctctccctccaccaactctcaaggctcctcagcctaagactatggctcatgagaaacactcaggcctgacctaggcttgggagtcaaactgctcatattgagcatattgttaagtgggtaaagccaagtaaaggtactgggtgtttttgtgaccacttgtgaatgggtgtatggagaactgaaaagggtatctgcatgaaggctcctgtctgactattccaggatccaatattactgccttctgaaacttcctctttagggtaaccatcatgtatgcccacgagggtgatagtaattcgtgagactgaagttgcttagagtacttctttgaccaaggaataccacagacaccctaccgatagaacagtggctcagatcttacttgctcctgcttacgaagtattcccaatcactggtcatctgaccctacttgaacactcctgaacagtcatgttttttaaaatcttcctttatatcaagtcagagagtatacttctataaatttcactcatggatgttaggaaatctagtcatcttccctgtgattgccctgttaagtatttaaccatagctatcatgtgtttcccaaatcttctctagattaaatatcttcagttacttcaaccattcttttacacgtcatgatttttgatccttcatgatactgtcacattgttgactcattagaatgtttacctacttcagttctatgtataggaggtgtttagaacccaagtactgtaatgtattgttatatctcatcttgttagagtcctcttgtgggatgctgcagactcacagtgactatgatactgcctcctaagccaaggacacaccccagtgatgagaaattgcatcccatgcgtc

SEQ ID NO: 444569 - DNA, 2228 bp, Homo Sapiens
  misc_feature (64)..(80): n is a, c, g, or t
  misc_feature (149)..(200): n is a, c, g, or t
ggtactatttggtgtttatttagacacacaaataaacctggtggttcaaacagcttgtgctccnnnnnnnnnnnnnnnnnggcatatatatatttttttgaaaaagatcaacatatcaccagtcccccatggtttttctctactgagcnnnnnnnnnnnnnnnnnnnnnnnnnnnnnnnnnnnnnnnnnnnnnnnnnnnntttcaatagataactacattcaagtaatgaaacacaggatttacaatttccctccgaaggcagaggaaaagcagattcacacacagttcacagaggaagtaccatgagagcccggccagacggcagccaaggacgctctgggggcaggggcggggccagcagcagaagtcaccacagtcccactggtgcttatcgtggggagcgggcaggtgtgggtggagggcagggctagcctgatctgtccaggaacctcaatcttccaggaggtgctcgaatttggggttcacaaaggagaagccagcgaatgcagactggtccatggagtcgatgaggttcttgtcgctgtaggagaggcgcgccttctcgttcaggaactcctggtcaaagttactgtagtctctgggtgacttcactttgggcctgaaaggtggctccaacctccgcttttccagcagagtccagtttatggtcttgaagaaggggtggattttgatgtttccggtcactcccagcctcttggttggttccctttcaaagagcttctccaggatgtccttggactccttggtgatccagcggggataatgtggcgtgtccacacggatggactcgaagagttcatcctcatcatcaccatggaagggggactggccaatgagcatctcgtacagaaggaccccgaaagaccaccagtccacagagaatgtgtacttcaggccctgtaggatctcaggggcgatatagtcaggggtgccgcagaaggtgctggcccggctctccccgaatatgttctctttgcacatcccaaagtcggcaatcttgatgtggccatcccggtccaacagcacattgtccagtttgaggtccctgtaaatgatgcccttgctgtgtagaaactgcagtccacacattatctcagcggcataaaacgtggcacggtagagttcaaagcggcctttgtcctggatgtggtacatcaggtcccccccgttgaggaactccatcacaaagaacaggtggtccttggtctggaaggtgcagatgaggtgggtgagaaagggattctctgcggcaagtgtcagcacccgcttctcaaccatggtgcactccacgtcgtcgtcgatcaggaccacatccttcttgagggccttgatggcaaagtactctcctctgcccttcagctctccaagcagcaccttcccgaagctgcctttgcccaggaccttgtggaagatgaagttgttgatgttgcacttgctgctgccctcccagatcttgccgtaggtcccactgttgtcttgcatgtcctccccagcaactccggtcttcttctcgaaaccctgatatatcccaacaggctctgaggaggctgagtctgatctccgggaggctctctgggtgacttggttcaaggcctcagccaaaagcttctggttgatgccgcagaggttggccaccttctcccggcatttatggtgcacattcatgccgcagtcttcacactttaatccctgcttcaccagtccccagagcaggctgccgcagtggtcacagaaggtggggctcatgtagttgtgaaccttgaagcggtgcggcatgtcgatgttgaagcgttctttctggaatatagtgtcccggctgttggccgcggtgccagtgcatctgccgatgatcttgtcgatgcatttcttgtggatggcagcgttacattgcctgcatttgtagccttgcttgttgaggccccagacaaagtctttgcacacagaacagaaggtgggttgcccaaagaaggtggcgataaactcatggttcttgatgtagtggattttggcctgtttgatggctccgcggcggttcatcgttgggaacttggcctcgtcctcactgcgcatagactgtttgcaatccacgtcctccaggaaatactgaacagacatcaacaccttggcctgaggctgcaggtccagccagaactcagccttgccattttcttcttgcagcgctcggcatcccgagaattccggaccg

SEQ ID NO: 444570 - DNA, 1412 bp, Homo Sapiens
  misc_feature (185)..(185): n is a, c, g, or t
  misc_feature (597)..(597): n is a, c, g, or t
ctagacgctcaccattaggagatcggcagaagtgggagctcaaagaccaggggctgggcaggctcctgggagcctgatccgagaccgtgtcggctgcaaggggacacacaaccagggtactgttgactagctttttgcatagctgtgagatgcgggactcgatttccccagccaaccacagaaanctaccattgccagtgtaagccagcttgtcaaaacttaaattaacaccagggattctaagtcagcaacggcctcagactcgagtatgacacgacagtttaaagaactacaagccctcagactctacctagcggcggcagtgcccgcggtctgctatacgatgtactccattcggtttaagctctgggcactttccaagtctctgttgtcctgtttgtttgtccagtttgggtgttttgtcggcgtgccgttggggggcttctcttctctgtctaccagcgtgtacgccggctgcttggcaaaccgggctttctgctggtgtttgtccatgtcgtcctcttctacttcagaattgtgtgtctttattttagaccattttggagtttcttgttctcataattccttgatgggganccgtgttggcccccatgtttctcaatggggtttttgatctggttcagctgctcccgcacgttgttggtggtgttgtcctcagaggctgagtgtgtgtggctgcccggcttccgccgcttccgcaggcaccagtagaaggccgtcaccaagcaacagatccaagccacagttaagacagagctcagcaagggaacaaggaaatctgttctgttcttcagaggccgcctctgaactcttacttctgcaacggcagcaatcagcgagctgtttccatcacgtttactaacaagatcgattattttgtcagtgatttccttgatcgggttcccatcatcccgtatatcttcagcagaaatggccacatgtatttcattgttcgctgaaggggaaggctcgcaagcgatgtagattgaatattcagcggaaacattcttcaaaatattcaaattcctcaattcactgcaaatgtgctccgtagtaagacctggtgacatcatctccttgttaaaggtaaatgtgatgttcgcacagttatcctggtaataggagtcagaggtgcactttgtcttcaccggctggagactggaagaccgacactcgcccacaccagtgcaggggtggacgaagcactggtcgtccaggatggggatgcagctctgcccgctggggcactcgctgtgccctttgtggagcaggcaaggtcgagggccacaccagacctttgagcaggcgatccgtccattcaggcactggcaggtattacagtcatcatcccattggccccatcatcccgggaatccggaccggtccagcct

SEQ ID NO: 444571 - DNA, 1356 bp, Homo Sapiens
ctttttgtctggcaaacatttattgactgctttctctgcatagaacaaccggccagcccctggactccagaggcccagcatcattgttaagagacctacatgcatgaaccaatcacacacgtgctatgagaatagagaaaagaaataagtaattctcacagacactgacaaactggaaaaaacttctttcatcccaggtactttatggctgggatcaaaggggtgactcacttgtttgcacaggaaacaaaaggcaaaaggaagtgttggcatcagttttccatctgcacatataacccccattcctccatgaattgcatgagataggtttcattttctcctggtggcctgtctggagccggctcctcatagagtctagatagaagaccctcctctccgagcccatccccctcagaaggctcgcagccctctgaatcctggtcgaagctggacagcgaaggaatacacagcctgccagtttggggatcccagtcgaccagggtcgtcgatggctcttcctccggcccctcctccgagtctgtgtgctcctgcgccagggggtctaagtcttggagctgaggggtgtatgagtactgtaacgtttgcgggcccaagactgccaacgctgcctgcgactccaataatgttccttgtgtggacacctcctcctgcaaactgagctcctgctcttcaggccccgcacaaatgtcagtggttctgacatcatattcatattcaatgactgttttatccggggggtattgttctgctgagggactcttgctgggtgagagaagtaccttccggtgttttcttcagagtcacaaaaaatttccatcaaatgcgaagcataccctaaatgtttcacctcctcttcctcctgagggggcctcaggttcccgctgggctgaggatcattaaggctggatacatcactgctttttcccagtaaactcatatcctgatgagaaattttagaatcatcccgagatattgagggtgataaagttaatcacgattttttccagcaggcacaaagaatcttttgtcaaattcatttcccataaatcaaaatcaaatttgcctgggtgtttctctttgcccaacgtggatatatcggtagatggaatagcccatcacagaaaaaagaaacacggtaatagatatgggcaaaacataccagaagatgattttagccttgaactctgatgattgatctttcaaagtcctggcacactgcttctcagaaggctgagcacggcgagggggccctgggacgaaggactccacgtgtacgcagtaaagagtgttcggctccagcccaggtgagcaccagcgtgtggttggtcacacact

SEQ ID NO: 444572 - DNA, 1261 bp, Homo Sapiens
  misc_feature (891)..(1150): n is a, c, g, or t
ccattgccaccgcatatttgctttctgtatcccccagttatagaaatcaaaacgagccagttgtatgtgaatgcattgtatcaaaccaagtctctagatgataggaggcattgtcattactaggatagtaactcagtagaaagagtgaattgagaatatgaggaatgagagtggggtccagactaaaaggaggccaggggtcctgaactgccccatccaactgagttcattctgatacctactgatctgaagcagcaggtccacgcccaggtgcagattgtcccagatgaacaggcagaggctagagatgctcattcctaaagggatcaaataattctgagaatggcaagaactccattaactctcttctccaaaactacaaaaatgtgcagaaaatacgaacaatttttaggagcttacactctttgaaagtttatccatgggctgctggaccccttaggaaaataatagctagaagtgcttcagacactgcctggcacacagcaggtgctcaatgaattacactgcctggcacatagtaggtgctcaatgaattgtctgatgaagtgattaaggagccttgtaaatactgattaaaacatgtatcaccccatccaatttttcaaaccagtgcttctcaagaacaagcaggaaaattaatgtaatattgttttgaagtagccgtggtggtttcggggcagaagcccaggggtactccttactccgcctgctccagtaactagctgacatggaagtgcctcgtcattctggttcagacacaggtgcagatagatgacttctctatcccactttaattctccttgaagatcattcccagggacattcatttgcttaaattaacatgctcggccaggcgcggtggctcacacnnnnnnnnnnnnnnnnnnnnnnnnnnnnnnnnnnnnnnnnnnnnnnnnnnnnnnnnnnnnnnnnnnnnnnnnnnnnnnnnnnnnnnnnnnnnnnnnnnnnnnnnnnnnnnnnnnnnnnnnnnnnnnnnnnnnnnnnnnnnnnnnnnnnnnnnnnnnnnnnnnnnnnnnnnnnnnnnnnnnnnnnnnnnnnnnnnnnnnnnnnnnnnnnnnnnnnnnnnnnnnnnnnnnnnnnnnnnnnnnnnnnnnnnnnnnnnnnnnnntcaagttgaaccaggtattgcgtcctccttttaccccatcgctagtgaagacaaccaccgcctggggagacgctccttttccgaaacactcgagtcccgccgcgtcccgga

SEQ ID NO: 444573 - DNA, 1189 bp, Homo Sapiens
  misc_feature (91)..(100): n is a, c, g, or t
ttttatgttggaggcacatgtagacactttggcataacaaaccccatagagcctgcagcccaatccactctgttttggtttagaatgaagnnnnnnnnnnaattatttttcttggaagtagggaggatttgaaagcttgaaaatcaagaatcaaaagacagtgaatctagaaggcatctgggagcagaacagagattgaagacgggtgggcacaggagaaagcgccaccatcgatcccggactgctgccctgggaaatgtgattttcttaatagctgagttcatggttgcttgaggtcaggcctggctattcatttccagcgatgtctgaccagagaggactcatcattgacgacctcagggtcacgggggcgacgctgacaccggaacggcagcagcagcaggacgattaagacaaggaggatggctccacagacgctcatgagcgcataggacacaatccacaaaatgggcgtcgctcaaagactgagcggggacacagttgctggctacatcctctgttgagaaaggcccggaaatttcagacactgcagcacctgcaatttctgcacaggggctcgctgcgaagcccaccctcttctgggctctgtcgaagatgacgtagaagccctccatcaccgtggcaccgatcaccagcgcatttgtggatggggaaatgccgaatcggtaacattcataattcaggccggcccccatcatgggctgaatgtaaagctgaggcaggattgtgatacggaatgacctgctggagttctcgtctctcaggtagatggagattttagggaagtaagaccaaggtgtttccgaattcgtccagcacgccagctgggacccagtccagaaaccatcagagaattctggaatcagagatgcgcgggccacagcttccaccaccgcatcaaacaccttctggggcaggcgcagcagcgtggtgccactgtccacgatggccttgtctgcgttatactctctgcagtccagattaaggctttggcctccaatttccaatttcagaatttctatctggtagtaccactcttccttaataggggtataccagatgtctcctttatacaaacttggttcaattccacccaagacaagactacctccgttggtcccagatccagcaacgggcaagccggctccacacatctgcatggagaaaa

SEQ ID NO: 444574 - DNA, 1473 bp, Homo Sapiens; identical to SEQ ID NO: 122800

SEQ ID NO: 444575 - DNA, 971 bp, Homo Sapiens
acaacagcaacagcagaaacttggaatgtttgcccaatgactctgaagcaccagcactttcccagagggcacagggtgagtgctgtgattcccgctgtgttccatgtagcaggtgaacctctgctcctctccttggcaaatcctggtggccacccaggtctggtaggttccattcccatcaggcaggacatccccccactgctgggtgtcgtggctcaaagataccccatcctgacgccaggtcagtgtgatattccggggatagaagctggaagccctgcatgtcacggtgatgttgccctctgaggcctcgctgcgggtgacattcaccatggggggcactgttctcctcaggactacgctggattctagatatcgccgtagttcctgcaggcagtctgcatgcatagcgtgatagtgtgtcttggtcttcatggcatcttccttcaagaaattcctgacgttcatggccaaggtctgagctctggaggactggggcactgtccattcctcagtctccaggttttgggagaggaagagctccccatcgtagtagaaatgctgggagctcctggtgctgttgtcttcatggatctcacagaccctaatctcctggagggaatgcaagccttctttctggtccttgatatgagccagggtcatcctgaggtcctttccgttccctgtcaagtccctggtctctctgtcccatgtcttatttcccaggacatcttctgcccactgtccctggggctttgccctgcatttctgcctgtcatagcgcaggaagggctgaccatccagatgtacctcagcgagaaaccctgactgcacagatccatcccaggacagcaccgtgaggttataacgaagactgtggggctcagcagcagctcccggaggtgcaaaagggaagatgccagccagaagcaggaagaccgggcccagccccatggccccgacgtcgccac

SEQ ID NO: 444576 - DNA, 1170 bp, Homo Sapiens
  misc_feature (59)..(59): n is a, c, g, or t
  misc_feature (82)..(82): n is a, c, g, or t
  misc_feature (90)..(91): n is a, c, g, or t
  misc_feature (105)..(105): n is a, c, g, or t
  misc_feature (461)..(469): n is a, c, g, or t
tttgatagggatctcaatcgatagtgtgagcacacactgagtgagacagagaggtgagntgggcctgctctttctctcaccntaaactcnnccagcaaccctacnccttcatgggtggtgttccacacttgagtgaagtcttcctgggaaccataatctttcttgatggcaggcactaccagcaacgtcaggaagtgctcagcctgggtgaggcaggccagtgtttaggggctggtacagaaggtggccattcacaggccacagcccactcccagggttttgcccaatcttcttcccttcctccatcccagtgtctcaccattgtggtgtacaccaaggggaccacagcagctgcaacgtcagcaatgaagatgaggaggaggatgaaagaagaactgagtggggaacaggggtctgggttttagggagagacagtccctcatgccctccttgccctaatnnnnnnnnngggaaaagtgagacagaagcctgagcctaggggggtccaaagcagggtttgggaatcccagggcctggtgtcaagggcgaggggactcttggtcatcagcctgtggagctgggtttcacacaccgtcacgagggcacacttgctctcagtcttagcaccatagcagcccaggaaaccaagagcaaagaccacaacgccggctgcgatgaggaagtagcccacgttgacaaactgcatggcactggacgacagtggcccgaagatcttcagaaaggatgccccatcgattgacacccagatgcccactgccaacagggctgcaccacacagaaagatgagcaaattgaagaggatcatcatggtcttaatgaagctgaagcactgcatggtggctcagggaaaggcttcagtgaccgcagcagggatcatagtttaagacagcaggaggacaggacaaggtcagcaacatagaccatctttggtctcagctcttgatctgccccatgaagtaggggctctcttgccttacactcctaactgcacagggagaagggtctctgtaaacatcttggaaggtattgggaggcacagatcagagagggataggatgaaagactgaaccctgagagtacacaagtatgaggtggatgtgaggtggatgtgcctctgtgtgcctgtgatggtcagcgtgtaggtgtagc

SEQ ID NO: 444577 - DNA, 1162 bp, Homo Sapiens
  misc_feature (202)..(202): n is a, c, g, or t
  misc_feature (773)..(773): n is a, c, g, or t
  misc_feature (837)..(837): n is a, c, g, or t
agcctttttggtcttggggccaggttttccatttgggctggtgttgggtaacggtttgttcatggcaaccagaaatggggggaaagggccactgttctctttgaaagtagggtgagttcttcaaaaatcccgtatagttggtgaagccacaagcacttgagccctttcatggggggtgttccacacttgagggaagtcttcnctgggaaccataatttttcttgatggcaggcactaccagcaacgttaggaagtgctcagccattgtggtgtacaccaaggcgaccacagcagcttgcaccctcagcagtgaagatgaggagggagggatgaagaaggacgtcacgaggggcacacttgctctcaagtcttagcaccatagcagccccaggaaacccaagagcaaagaccacaacgccggctgcgatgaggaagtagcccacgttgacaaactgcatggcactggacgacagtggcccgaagatcttcagaaagggatgccccatcgattgacacccagatgcccactgccaacagggctgcaccacacagaaagatgagcaaattgaagaggatcatcatggtcttaatgaagctgaagcactgcatggtggctcctgttcagggctcttggcagtgagttctgaaagagggaactgctgaggctccacaaaggacaaaacagctcccgggtgttgccactgagtgggcaggcagagggacgcctggctctcacacaccactgctcacctggttctgtttaggcacgccanaggatgatctctgtgaaatagcacccctacatatatgggggactcctgatggcaggcaccccanagtgctgacagccttaatggaggatggattggagggaaaggcttcagtgaccgcagcagggatcatagtttaagacagcaggaggacaggacaaggtcagcaacatagaccatctttggtctcagctcttgatctgccccatgaagtaggggctctcttgccttacactcctaactgcacagggagaagggtctctgtaaacatcttggaaggtattgggaggcacagatcagagagggataggatgaaagactgaaccctgagaccacacaagtatgaggtggatgtgaggtggatgtgcctctgtgtgcctgtgatggtcagc

SEQ ID NO: 444578 - DNA, 1086 bp, Homo Sapiens
cccattgccaggtgccacaaccacccaagggtgactgcatagttcggatgtcatacaaaagctgattgaagcaaccctttactttttggtcgtgagccttttgcctggtgcagtttccattggctgtgttggtgacgttgtcattgcaacagaatgggggaaaggcactgtcttctttgaagtagggtgagtcctcaaaatccgtatagttggtgaagccacagcacttgagccttttcatggtggtgttccacacttgagtgaagtcttccggggaaccataatctttcttgatggcaggcactaccagcaacgtcaggaagtgctcagccgtcacgagggcacacttgctctcagttttagcaccatagcagtcccaggtaaccatgagcaaagaccactacgccggctgcggatgaggaagtagcccacgtttgactaactgcatggcactggactgacagtggcccgaagatcttcagaaaggatgccccatcgattgacacccagatgcccactgccaacagggctgcaccacacagaaagatgagcaaattgaagaggatcatcatggtcttaatgaagctgaagcactgcatggtggctcctgttcagggctcttggcagtgagttctgaaagagggaactgctgaggctccacaaaggactaaacagctcccgggtgttgccactgagtgggcaggcagagggacgcctggctctcacacaccactgctcacagggaaaggcttcagtgaccgcagcagggatcatagtttaagacagcaggaggacaggacaaggtcagcaacatagaccatctttggtctcagctcttgatctgccccatgaagtaggggctctcttgccttacactcctaactgcacagggagaagggtctctgtaaacatcttggaaggtattgggaggcacagatcagagagggataggatgaaagactgaaccctgagagtacacaagtatgaggtggatgtgaggtggatgtgcctctgtgtgcctgtgatggtcagcgtgtaggtgtagctgctggtgtgtgtgtctgagatcccgggaattccggaccc

SEQ ID NO: 444579 - DNA, 1639 bp, Homo Sapiens
ttttttacattgtaacaggtttatgcattttgaagtgccttctacacatccacccagaggctctggtgatttcacttatgcccaggctataaaatgcctttctctcatcccccagtagagcactgggatcaccactaggcctagggggcatatcaagggtttaatagactgggggaatgggcaacagaactggctaccttagaggctctggaatgccccccacccatccacccaccaatggaaggaaagtcaggcatcgcctaaaaggagtggtccctatctagccccaagtctggagcagaaagggcaggtccattctggcccaagtgacattgttagatcctgtcccctcccccaatcactgctgcttgccagggtgcctcttcacagttcccatgtggcagcagtagtggcagaggcagaagtggacttattgtagattgcagtacagatacatggacacaatcatggcagccagcttcgaggccccccaattccagctgccacaccaacccacgggtgactgcattagttcggatgtcatacaaaagctgattgaagcaaccctctacttttttggtcgtgagccttttgcttggtgcaggtttcattggctgtgttggtgacgttgtcattgcaacagaatgggggaaaggcactgttctctttgaagtagggtgagtcctcaaaatccgtatagttggtgaagccacagcacttgagccctttcatggtggtgttccacacttgagtgaagtcttcctgggaaccataatctttcttgatggcaggcactaccagcaacgtcaggaagtgctcagccattgtggtgtacaccaaggcgaccacagcagctgcaacctcagcaatgaagatgaggaggaggatgaagaagaacgtcacgagggcacacttgctctcagtcttagcaccatagcagcccaggaaaccaagagcaaagaccacaacgccggctgcgatgaggaagtagcccacgttgacaaactgcatggcactggacgacagtggcccgaagatcttcagaaaggatgccccatcgattgacacccagatgcccactgccaacagggctgcaccacacagaaagatgagcaaattgaagaggatcatcatggtcttaatgaagctgaagcactgcatggtggctcctgttcagggctcttggcagtgagttctgaaagagggaactgctgaggctccacaaaggacaaaacagctcccgggtgttgccactgagtgggcaggcagagggacgcctggctctcacacaccactgctcacagggaaaggcttcagtgaccgcagcagggatcatagtttaagacagcaggaggacaggacaaggtcagcaacatagaccatctttggtctcagctcttgatctgccccatgaagtaggggctctcttgccttacactcctaactgcacagggagaagggtctctgtaaacatcttggaaggtattgggaggcacagatcagagagggataggatgaaagactgaaccctgagagtacacaagtatgaggtggatgtgaggtggatgtgcctctgtgtgcctgtgatggtcagcgtgtaggtgtagctgctggtgtgtggtctgatcccgggaattcc

SEQ ID NO: 444580 - DNA, 906 bp, Homo Sapiens
cagggccctcccacacgcaacacggggccggcggacggattgtaagatggcacccaacccctttgggacccgtagattttgtgaccactaatgcctcatgagatcaattttcaatgtcattgacatcaagtgggatttttccaacagcctgggctgcatcagtatggaaatatacctttctggaactgcaaatccgccctatttctgcaataggctgcttcactccaatctcattgttcacagtcatgactgacaccaggctagtatctggctggatagcagcctctagttcctttaggtcaatgatcccactcttctgcactgggaggtaggtgacctgaaagccctcagcttccagtgaacggcaggagtccaagacacatttgtgttctgtctgggtggtgatcaagtgctttttccgtgacctgtagaatcgggccacccccttaattgctatgttgttggattcagtagcaccactagtaaaaatgatctcacgaggatcagctccaatcagagatgctacttgctgacgagcacgttccatggctgcctcactctcccagccataagcatgtgtccgggagtgtgggttcccatagtagttgattaggtaagggagcatggcatcaagcacccgggggtccagaggagttgtagcttgcacatccatatagagaggtcgcagcactggccccacctccggggcagcggctgtatctgcgggaaccgcagactgaggagcacggtctccaacgcgcaggcgcagcccccgagtgggcgccgcgggcttcggcctcggagccgctgtcaccgccactgccgcccgcctccaagcggcttcggagcagcatggtcccgctggcagagcccaccttccgaagccgctgcagtcctgggccccag

SEQ ID NO: 444581 - DNA, 2181 bp, Homo Sapiens
atggagctgcggtcttctccacagtccccagtacaggcttccacttgtgccctcaacctcttcataaagtcacagagtaaatagaaggtgagtttatttctccagtcttgaaattaacaattttcaagaaaacaaattattagaataactggtggagtcacagacatatttctagctccattaggtcaaaggaaaggaaagaggacaagggtagaaaggagacaagccctctaagaaactgtccattcagtctgtctgcagtcaatatgaagagatagcctttggagctacagaaaatattacattgaagtggattatgcttgctgttaaagaagctggtccagccgagcagcagcagaagacgaagactcaaatgtccatgtagagcatcatggtccctgaccaaagagacttcttctggttcctcttgctctcctcaccaagagcacagatgtgcccagcagcaatatgacagcaaatgtctctatggcttcgggatgaaaatgtccacacactttaagacccgagaagaaatggggagtgctccacacccaaggaactgaagctagggaaagacagttttcttgtgtttctgtcatagaggtggactgatgctgaagtcaactggtctataccaatctagagcatccactaggtgtaacaaggtgtctggttgtgcacgggttggtgaggcaggaggggccagaccagcacaaagtcagggccctattcttctagtgttgggtccacttgatgctcttgaggtcaatgccatcctgaaccatctcccagagagggctcatttctcgaagacgcttcacatgctgaatgcatttctccactgtgtagtccacttcctcctctgtagtgaagcggccaattccaaacctgatagaagagtgcgctaaatcctcatcagtgccaattgctctaagcacataagagggctccagggatgcagaggtgcaggcactccctgaggataaggcaacgtccttcagtgccatcagcagactttccccttccacatatgcaaaggagaggttgatacagccgggataatggtgcttagggtccccattcatcaccacatctggaaggctcttcattatattctgtatcagccgctctgacaactttgagattcgcttgtggtcatactccatctcttgctgtgccacctcacacgcagcccccagccccaccactaagggtgtgtgcacttgtcccagcccgcataccccgctcctgcccccctccactctgcagggcctccacacgcacacggggccggcgacggatgtagatggcaccaacccctttgggaccgtagattttgtgaccactaatgctcatgagatcaattttcatgtcattgacatcaagtgggatttttccaacagcctgggctgcatcagtatggaaatatacctttctggaactgcaaatccgccctatttctgcaataggctgcttcactccaatctcattgttcacagtcatgactgacaccaggctagtatctggctggatagcagcctctagttcctttaggtcaatgatcccactcttctgcactgggaggtaggtgacctgaaagccctcagcttccagtgaacggcaggagtccaagacacatttgtgttctgtctgggtggtgatcaagtgctttttccgtgacctgtagaatcgggccacccccttaattgctatgttgttggattcagtagcaccactagtaaaaatgatctcacgaggatcagctccaatcagagatgctacttgctgacgagcacgttccatggctgcctcactctcccagccataagcatgtgtccgggagtgtgggttcccatagtagttgattaggtaagggagcatggcatcaagcacccgggggtccagaggagttgtagcttgcacatccatatagagaggtcgcagcactggccccacctccggggcagcggctgtatctgcgggaaccgcagactgaggagcacggtctccaacgcgcaggcgcagcccccgagtgggcgccgcgggcttcggccctggagccgctgtcaccgccactgccgcccgcctccaagcggctcggagcagcatggtcccgctggcagagcccaccttccgaagccgctgcagtcctgggccccaggctcccgggaattccggacc

SEQ ID NO: 444582 - DNA, 903 bp, Homo Sapiens; identical to SEQ ID NO: 151680

SEQ ID NO: 444583 - DNA, 718 bp, Homo Sapiens
cgaccttccccccatttaggcgtgcatcaggcctctgaggcatgggactggcaccgaacatcctgccagctctgagcctgaccctgcaggacccgagggaaggtggaggtgcatgtcgtcagccatggtactggtacactcgccaggtcttaccgaagtctgaggagcgctcgatcagcatgccggcgggcatgggcccctggaactccatcatgacttcttgaagctggaatctcctgtccaggtccagctgcagagagacagggttcacatcattctgtgactgccaccagcgcatggggccggaggatgaagccacattctctactcggtgactgtagtagttgtgaggctgcctggagtcacacttgcagcatttcatctgccactcgccatactgggtgcagtaggtctcaggcttggtcagtccacaggtagatgaagctcggagaaaccgggtcctcccaacaagcaggtcccctacaggtggatagcaggccccacgggagcaggcttgttgggcatgcaggaggccaggcagggccaaacacaagaggaagaatggtctcatcttcagccaatggggtgatccccagaaaggacctttccttgctgtgtgttctgccgttctttctccagatcgcctgaaagctcctcattgaatgtgggggtctcccctcccggctccaggtttttaaacacagcctcacctctggag

SEQ ID NO: 444584 - DNA, 1009 bp, Homo Sapiens
tttttgcgcacccaagccggtttatttggtctcccgcacacactcaggcctgcatcaccggccgtgatttctccgcttgcagcttcactccggagcccgcgaagccggtaccgccccgctgcagcacgatgatgtcgcggtctgtgagtttgtctccagtcacagggtccaccatgtccttccgaatcagcttctccacgcattcgagggtgaccacagccccagagggccgcagcacagcgcagggggtggcgttgctcaggctgtcgcgggtcacggcacacacgtagcgctcgctgcgggtgatgagccccacgcggtccacggagctgtctagcggtgtgaagtgcacgggcgtcaggtccgacatgcgcaggggcttccctgacatggggcaggtcaccgtgcgggacggcttctccagcttggtggccttggcttcgggcgtcagcgacgggatccagaagctgggcagcactttgtccttgtccttacttggaggacccacactgggcccaggttggacatcatctgggctggtgcccgagagggccttggctgtgaaagggttgaggggccggctcacgatagccgactccttctccaggaagccccgcacatggtcctgcgaggccgcccgctgaagctccttctgctcctcgcgccgggtgccccgctgcttctcgtaggccttcatctgccgggcaatctccttcttctggtgcagaatgtactccaggatggcctcacgctcatacaggtagccatctggggtgacaacaggatcgtggcaaggctgcagggagagacaacagcagtcgaagtccttcacggcatcccggctcagtcgaatgttctgggtcccatagcccgaggccgctgtgtccttcttcttctcgtggtaggtgtagacggcccctgcggtgcagttcttgccatgccgcgtcatcctcactaacgactcccagtccctcggtcgcttcttcaactgtgccccgacaccggaccc

SEQ ID NO: 444585 - DNA, 859 bp, Homo Sapiens
aggtccacacaagcccttgggaattcaatttttcccccgcctttgaagggggaccacaagcccccagaggggccgcagcaccagcgccagggggtggcggttgctcagggctttccgggggtcaccggccacacacgtagcgctccgcggggggtgatgagcccccaggcggtccacggagctgtctagcggtgtgaagtgcacgggcgtcaggtccgacatgcgcagggggctttcccgtgccatggggcaaggtccaccgtgcgggacgggcttcttccagcttggtggccttggcttcgggggtcagcgacgggatccagaagctgggcagcgctttgtccttgtccttacttgggaagggacccagcactgggcccaggttggacatcatctgggctggtgcccgagagggaccttggctgtgaaagggttgaggggccggctcacgatagccgactccttctccaggaagccccgcacatggtcctgcgaggccgcccgctgaagctccttctgctcctcgcgccgggtgccccgctgcttctcgtaggccttcatctgccgggcaatctccttcttctggtgcagaatgtactccaggatggcctcacgctcatacaggtagccatctggggtgacaacaggatcgtggcaaggctgcagggagagacaacagcagtcgaagtccttcacggcatcccggctcagtcgaatgttctgggtcccatagcccgaggccgctgtgtccttcttcttctcgtggtaggtgtagacggcccctgcggtgcagttcttgccatgccgcgtcatcctcactaacgactcccagtccctcggtcgcttcttcaactgtccc

SEQ ID NO: 444586 - DNA, 1104 bp, Homo Sapiens
cccgtcgagtgccgctatgggatgccggggcacatctagcgggcctcccagttcctggatccgagcctttggggcagggtttggccgttctcgggggaaaattgaaacttttcgtgaacggaaatgggttttccttacccctgcgtgggcttgcttgggtttgttttgcttgactttttccctggctgggatagccaagtgcgcttttttgggccagaaaccctggggccttgggagtttccaacccccagtatggatacttgctccaggcaataccatgctgccttcttccggaagggtccagtttcactagccaccatgttgttctgcagttcagccagagtctggtcctgtttgattaagatgtcatcacaagtggtcaaggcttgacgaagttttcctgccccagtgctgtggcaacaagctctctctgctgattggagagactcaccaagtttctgaagctctgtccgcaacagccttatattcttctggccctcttctaacttcttgtccacatcaatggtgaagggcttggctgagggtggtggttctaacattttctgatacttatgcaactcttcagtggtagagtttagctctgctttgcactgctgtaatttagctttaacctcctgaagctgctgggtggaggcagaagctgccaacctttgtgaccgccgtagggccaattcagaccctgattgctgatgggccactgactgttgtctggcttcctgcaagagagcttctagctcttcaatcttttcatcccgctcctgaatctcttcttggtaaaaacttgtcagtgactccttgaggatatttagtttttcttcatacatttcctccaatagttccttttgggtgtccaaatgttcactgcaccactgttcccgctgttgcatctgttctaccatctcattgcaaatttcatctcggagatgcatctccagctgtagcttttcctgtcgttccttcaaaagcagtgtcttcatggcttccacaacttgtaggagctcctctttgccatacatggagatgtcagcttcattttcaatatcatcatcaaggcctggcctcgtccgaatcgccacccaggcc

SEQ ID NO: 444587 - DNA, 1843 bp, Homo Sapiens
ggtccggaattctcgggatgcggtagaggcggcggcgaggactggcgacggcgaggagatagtgtctgccttctggagagctgaccaaacactaaggatgctgaagttccgaacagtccatgggggcctgaggctcctgggaatccgccgaacctccaccgcccccgctgcctccccaaatgtccggcgcctggagtataagcccatcaagaaagtcatggtggccaacagaggtgagattgccatccgtgtgttccgggcctgcacggagctgggcatccgcaccgtagccatctactctgagcaggacacgggccagatgcaccggcagaaagcagatgaagcctatctcatcggccgcggcctggcccccgtgcaggcctacctgcacatcccagacatcatcaaggtggccaaggagaacaacgtagatgcagtgcaccctggctacgggttcctctctgagcgagcggacttcgcccaggcctgccaggatgcaggggtccggtttattgggccaagcccagaagtggtccgcaagatgggagacaaggtggaggcccgggccatcgccattgctgcgggtgttcccgttgtccctggcacagatgcccccatcacgtccctgcatgaggcccacgagttctccaacacctacggcttccccatcatcttcaaggcggcctatggggggtggagggcgtggcatgagggtggtgcacagctacgaggagctggaggagaattacacccgggcctactcagaggctctggccgcctttgggaatggggcgctgtttttgtggagaagttcattccagagccacggcacatcgaggtgcaataccttgggggaccagtatgggaacatcctgcacctgtacgagcgagactgctccatccagcgggggccccagaagttggtcgagattgcccccgccggcccacctggacccgcagctttggactcgggtcaccagcgactctgtgaaactcgctaaacaggtgggctacgagaacgcaggcaccgtggagttcctggtggacaggcacggcaagcactacttcatcgaggtcaactcccgcctgcaggtggagcacacggtcacagaggagatcaccgacgtagacctggtccatgctcagatccacgtggctgagggcaggagcctacccgacctgggcctgcggcaggagaacatccgcatcaacgggtgtgccatccagtgccgggtcaccaccgaggaccccgcgcgcagcttccagccggacaccggccgcattgaggtgttccggagcggagagggcatgggcatccgcctggataatgcttccgccttccaaggagccgtcatctcgccccactacgactccctgctggtcaaagtcattgcccacggcaaagaccaccccacggccgccaccaagatgagcagggcccttgcggagttccgcgtccgaggtgtgaagaccaacatcgccttcctgcagaatgtgctcaacaaccagcagttcctggcaggcactgtggacacccagttcatcgacgcagaacccagagctgttccagctgcggcctgcacagaaccgggcccaaaagctgttgcactacctcggccatgtcatggtaaacggtccaaccaccccgattcccgtcaaggccagccccagcccccgggaccccgttgtccctgcagtgcccataggcccgcccccggctggtttcagagacatcctgctgcgagaggggcctgagggctttgctcgagctgtgcggaccacccgggctgctgctgtggaccacttcggacccacatctgtgctcggcataagcttcatatgg

SEQ ID NO: 444588 - DNA, 890 bp, Homo Sapiens
  misc_feature (655)..(655): n is a, c, g, or t
gcagcatcatggcttttctggtcccagtccttctcgtggtttcgctcctttgcgttcctggtagcgattgctggcagcaagaatcagtgaagagctcgttgatgcccctgtactcgatctcctggcagaatgagaatacgcacagctcctccatgacatgcagcttccccgtgtaataaaaattcgaaacatatctgaacaaggagggattccgatcaaagtagtattccttatcggccacactgtaatcatcacacagctccagaatggcctcttcagaatggcaagtaagcagcttccccagtctggtgtgaggaaaccgcaggagggtgctttggtcaacagactgcttaaagccccccacattcaggttgacaagttcctcgtcttgtccagggcgatggaaaaactcaccaaacaccatggtggatacagaaggcagagtgctggctggcaagggagaagaggaagatcaggctgcacccttgaggtggagatgccacacgctctgccttcatcctgcccggtgggacgtccatcatcatccaagaagctctgcccttctcagcacactggaatgtgtggtgcacataggcatttggtggcccaaaagaagggaagaatcctgttctctggttgtacaggccaaagcaantcactggaaaatcactctcaccgagtcagaagaggtgcttggacatttgcaccaagcagatgcgcctcatatgtagaagaggaaccagtcgggtcccctttcggaaggacgaatggaagaggaagtcaggggacgatgccttcagccgacgttgaggaacaaaccaggacctcggcgaggacagagtgtggtccagaaggcatcgctggcctcgctgcactgagcgagagcgctc

SEQ ID NO: 444589 - DNA, 2497 bp, Homo Sapiens
  misc_feature (137)..(139): n is a, c, g, or t
  misc_feature (141)..(142): n is a, c, g, or t
  misc_feature (151)..(151): n is a, c, g, or t
  misc_feature (157)..(157): n is a, c, g, or t
ctatttcatggcccagggatcttcctagggaaaccagttatggccccaatttcccctttaccttctggggcccccggcgccaaaacgaaaggttctagaaaagctttttgaagggcccaaggcgggccgacaatttnnnanntcgggcggnttcttnttttttccatactgaattaggaggtttattaggctcgtagtttcccatgtttagaacatgagcatggatttacatgcattgtctcattttgtgggatcttagtcagctgcacctttgattctacttgtcagtaatttaaagttagctcaatgtgagtaaatgacaaccacagaatgatgcataagctgtagccacaaaccccacccaataccatttatcttatattccaaactatatcacaactctctcttgtaaaaaataaatttcagaacaaggcatttaattgacctcacagagaaaaataaagacaattctatcatttcagaattcagcaatgaatgtccaactatggctgaaaggtacaccctgagaattaaatgattttaacgaacccactgaggtttataaagctgtgttaacctaatgttgggaaaggataagagaaacaggcacatacacccccgctcattttgctgtgcaattctccaaggaggtggtgttacaaatgtcctcattgtcttcaatgcttgaagcatctgtggagtcaggatcgctcaccacaatgcctacagaagagagactggtaatgaaggtgtgcatccgctgtgcatatatatccctaatgttaaagtaaggtagctcatgacacttctctggtgcatcctcactgcactggtccacatcaatgtccttttgcttctggtagtacttggaaaaacttgttgaagaatgatggtgatgggaaagggccaccaccaagatgccacagatgatgcatgtgctggcgatgagctttcccgccaaggtgaccgggtgggtgtctcccatagcccacagttgtcatgctgatggtggcccaccaccagcagatggggatgctggtgaggctggatgtgtggtcatctttctccacggagtagataagcacagagaaaatggaaatgcccacagagaggaagagaagcagaagcccaacttcatggtagctgtgtctcagtgtggcacctagagaccgaagtcctaccgagtgccgggcaagctttagaattcggaaaatcctcataagccgtaggatctggaccaccttgcccatgttctcaatatcctcactctcttcctccttggtgtctacagccaacgtggcatagaagggaataatagagacaaagtcaatgatgttcagagggtttttccagaatttcttttgacaaggagcggcagccagccggacggcaagctccccggtgaaccaggcaatgcacgcgatctccactccttccagcaccggatcatccacttctccatcctcattctggaactccgacatgctgtgaacgcacatggccacgatggaggccagcaccacgctcaaggaggagatagcgataagcttagcggacaggcagtacgctggattctccattctaatccagattttcttccggagctgaccaaatcgcagtgtgtcaaacttctccagctctttctcaaacagagacgactcttcaaacgaggagtcggtactcacatcatggcttttctggtcccagtctttctcgtggttttcctccttgcgttcctggtagcgattgctgcagcaagaatcaatgaagagctcgttgatgccccagtactcgatctcctggcagaatgagaatacgcacagctcctccatgacatgcagcttccccgtgtaataaaaattcaaaacatatctgaacaaggagggattccgatcaaagtagtattccttatcggccacactgtaatcatcacacagctccagaatggcctcttcagaatggcaagtaagcagcttccccagtctggtgtgaggaaaccgcaggagggtgctttggtcaacagactgccttaaagccccccacattcaggttgacaagttcctcgtcttgtccagggcgatggaaaaactcaccaaacaccatggtggatacagaaggcagagtgctggctggcaagggagaagaggaagatcaggctgcacccttgaggtggagatgccacacgctctgccttcatcctgcccggtgggacgtccatcatcatccaagaagctctgcccttctcagcacactggaatgtgtggtgcacataggcatttggtggccaaaaagaagggaagaatcctgttctctggttgtacaggccaaagcaatcactggaaaatcactctcacctgcaggagtccggacgcatccagctagctccgctctgcgacgccgcctgcccgggctgcagggatcaggcctcgcggcgcggccccgcgcctgccgccgcggcgtttgagttattcggggtggcccgccccgctttttgatt

SEQ ID NO: 444590 - DNA, 895 bp, Homo Sapiens
taaaaaatgcggaaattcccgccttttgttattgcaccaccttttaaaaataccgaagtttaacggataattcccggtgagggcacgaaatgtgaaccctatcaacaacattcttcccattcagtatttcccatcagaggataaatgcaacaacaaaaggcaaacacccatgatttggcagtcctatacaaaaggggccctgtcaaaacattctatcacaaaacaagcacaataccgcaaaataacacaacatcaacaaaaaaaccctgaaatttgacatccctacacaaattgtggaatttcatcttcgaggtcttcaaactgttgcattcgttttagccttggtctctgacacattggattcacatcaggcaagccaagctcctcagagtcttctttaggttgaccagttgcttgcccaggacaagctgatgctttgtctgggtctggcattgacttcaccacgagaccgtggggatcgtgatctgtgccaggaggcactgctgctgagggtgaagctggcttctcctcattccccctgatactgatgatgggagcatgtggtttataaaatgttgtccaatgttgaggctgcagtgttctgggtgctctgacaggagcgagagggtaggaatctgaagaccgtctctcagatgcctctctcactgacctgactggctctgcatatggcttactgggttgagtggcattgatagaatggtccccactaatctggaggcttgttgtcactcctttttcctggagtgcactgggcatgatcattgtagtcttggcagttaggctgttttgttcatactgtttgtcctgaacttttggtgtagagtttgctggtcaaagccattaaatttggaacaaacagtagtagcagtgtctt

SEQ ID NO: 444591 - DNA, 857 bp, Homo Sapiens
  misc_feature (22)..(22): n is a, c, g, or t
  misc_feature (162)..(162): n is a, c, g, or t
gggccccccaattccattgccngaaaaacacccttccatttcaccactgtcttgcttttctgccacagcaagtctatcagcatccgggtcgttagctaaaacaattctggccttggtttgtcagccaaagcaaaagacaaagtctgtggaaacagtactttntaaggtcttcaaagtagtcattattgatggaagcactcggattgtggagaagtggactgctatcaattaaagaatcgtcccaagcttgaggccacggttctagattttcttcaatagcttgagaaatccctttatcgtgaggagaaatgatctgagctccattatcccaatagaccttataaccattatcctgctttggattgtgagatgcagttatcatgattccagcacaaagtttcaaatgtgatactgtgaagggcacaaagggggttggcgttatatcagaaaagaggtacacaggaatcccctgactgataaatgtggttgcagcaagtcgggcaaaccttctgctgctacccccactggatggatgagctcgggcgtcaaaactgatcacgatgcctttctgctttaagtcactgaattgtttttccaggtatctgcaaaatccctgtgtagtctggatgatggtcaagtcattcatacgagaaattccaggtcccatagcagctcggaggccagctgtcccaaactccattcgggccccaaaacattttcgtagttcttctttattaccttctgctattagtcgtttcactgcctccaaagttaaggaattcttgtcccagcgcagccactgggcggtctcctggtccagccgggcgtcctcgcctagaccgctgccttctggagcc

SEQ ID NO: 444592 - DNA, 1832 bp, Homo Sapiens
tgccttttcccggcacgacggggtgggcaacaaaacgtggatgcctggcctaaatgtgcaccaggacccgggtagtgagggagcataaccagctggcttttactcgctttgcgcaaatatactctggcgtggaaaaattttctgcataccctgccagtccatcagtcgttctcactctcagatcaccttttttatcagttgctatcatcataccagtttaagtccctaatggcagaaatttcaaatttgccacaagcttttggataattagttttttccatcgtagtttctgaggttttcaaataatttcttaatggtttcttgatcatggcagataaaataggaagctttagtaatatggtagccatactccacataaatggcctttagttgctgagacaaagacaaattcttggttgctaggaagctagccaactctgcacttatgacagcggcactgactccatctttgtccagaacaaaagggcagcacatgtatccaatagcttcttcaaatgcaaataaaacagttttcccctggtctattagctgtttggctctgtttcccatccacttaaagccagttaatgtttcctcaaaatgaaaaccttcctttaaggcaatggcccgcaagattttggaggagacggtgctggacaacatgtacgtgtctttgagagcactgcgatcctggttcttctctttccaagatgtaaaaagccaccagcccaggagggcccccaactcattgcctgaaaacaccctccattcaccactgtcttgcttttctgccacagcaagtctatcagcatccgggtcgttagctaaaacaattctggccttggttttgtcagccaaagcaaaagacaaagtcaagacacctttcccctcttcgggattcgggtatttcactgttggaaactcaggatccggatctttctgttcaggaacagcctcaggaggaacaaggtcaaaagccttgaaagctgactgcacaaagctatgacccaccccatggacagaggtgtgcacaaacttcacctttgtctccctgttcacgctcctgtggaaacagtactttttaaggtcttcaaagtagtcattattgatggaagcactcggattgtggagaagtggactgctatcaattaaagaatcgtcccaagcttgaggccacggttctagattttcttcaatagcttgagaaatccctttatcgtgaggagaaatgatctgagctccattatcccaatagaccttataaccattatcctgctttggattgtgagatgcagttatcatgattccagcacaaagtttcaaatgtgatactgtgaagggcacaaagggggttggcgttatatcagaaaagaggtacacaggaatcccctgactgataaatgtggttgcagcaagtcgggcaaaccttctgctgctacccccactggatggatgagctcgggcgtcaaagctgatcacgatgcctttctgctttaagtcactgaattgtttttccaggtatctgcaaaatccctgtgtagtctggatgatggtcaagtcattcatacgagaaattccaggtcccatagcagctcggaggccagctgtcccaaactccattcgggccccaaaacattttcgtagttcttctttattaccttctgctattagtcgtttcactgcctccaaagttaaggaattcttgtcccagcgcagccactgggcggtctcctggtccagccgggcgtcctcgcctagaccgctgccttctggagccgccatcgctgagcttgtgctaccgctgcagagggaagcaggcggtgagatctgcc

SEQ ID NO: 444593 - DNA, 1525 bp, Homo Sapiens
cgatggggctctcacattcagacaggtaatgcctggagagtccttgcacccgtctggggtttacagaatttcgtccgtgtgtttgtgggtaaaaataatttggcaatttgtcggtaagtatgaaatacttggaattccgtaaaaaaaaggtagctgttggattgaattgtttgaattgtatttacaaccgctgtccagtcatgctgtctgttataccagggtgtaagattttgcgtaaggattgtttcctttcaaatggccccgggagtcgagcagtgattcttgggagctgctcattttagctgcctgtcccagctctgctccctcccgctgaggtaatgtggccacggcccccggctgccacgactgtccttctctcgtggaggaggcggaggaggcggcttccatcgggatgggctccaggaccgtggggcgcttcagggtcccggcttttctgaggttccaaagcatgcttgtcctaagctcaggtccctgctggtgcctggaccacctcggtttaacaaaaagtccattctaaggtatggaggcaaatgtatgaggtcacctggccgatgtgcctttggaactgccatattcattactcttcctccatcctgaggtttggggggagatgcagtgaacctgcagattcccgattcggaaggggtgctggaggtcagactgtccgtgtactcatttgtccctgccgtcaactgctccgatgacgtgtctgatatgaagcactccgtgatggtgaacttggcgtgcctcagttgctcttccatcttggcgtgttcgtaggccctggccagttcttcgtaagtggaggaggcactttctgtggagaccatgctgcttcttgctcgatctgtgtcttgcgaggggctgacgctgtaactgtcgctctctttgtctactgatcctgcagccctgggtgttggcagcctcccgtctgtggtgagggtgtgtgctgagatggtggggtggggtcggttgagggtccactggctggcatagcggtttctcgctgtgggcccagccttggcattcctcctggtggtgggattcgttcccggccgagcgtctgaaacatccactaagggcccagtggcctgagacaccgattggtaatggaccgtgtgagtgaccgtcagggacttctgcttagctgcctctccaaagtcagcatccgtcaacagaaccgtggagcgatcatcaatggtctccatcgtgtctctctcttcaatcaaaagctgagccctgggtatgtcgatgtgcattcgcagggtctgctgttgcttgcttaacgtatctgaagtccgggtattcttactcatgagcatttcagctaaactctttgcatctcgcagcctctttagcctctctcccgccgcctcctccgcacaaccagcaggaggacaaacagcagcaagacccccaccaggatacaggagatggtcaccagcatcttgagcccctcgttggtcgtcagcccttcttcgtttatcccgggaattccggaccg

SEQ ID NO: 444594 - DNA, 1974 bp, Homo Sapiens
  misc_feature (1623)..(1624): n is a, c, g, or t
  misc_feature (1639)..(1639): n is a, c, g, or t
  misc_feature (1871)..(1871): n is a, c, g, or t
ggcaaagctcggagtcccggcggaggggcggacaggtggagggtttccactcgcactgaccgcagcgcacgggcagcggggctgaccaggcgcttcccggccccataaaactcgggcgggaggcgaacgccgttttatgcaggcggccgggcggcctggctcgctttcattcccggctccgcgaggcgcgagggccgagccctccaagctcgtaaacgccttggccgctgagctccctccccgggcccgcgggccgtcatataaggcgcagcgccggcttggggtccagccgcccgcccctgccgccaccgcaccatgtcctgcctctactcccgcctcagcgccccctgcggggtccgcgccttcagctgcatctcggcctgcgggccccggcccggccgctgctgcatcaccgccgccccctaccgcggcgtctcctgctaccgcggcctcaccggaggcttcggcagccacagcgtgtgcgggggcttccgcgccggctcctgcggacgcagcttcggctaccgctccgggggcgtgtgcggacccagccccccatgcatcgccaccgtgtcggtcaacgagagcctcctcacgcccctcaacctggagatcgaccccaacgcacagtgcgtgaagcaggaggagaaggagcagatcaagtccctcaacagcaggttcgcggccttcatggacaaggtgcacttcctggagcagcagaacaagctgctggagacaaagctgcagttcttccagaaccgtgagtgctgcgagagctacctggagcctctgtttgagggctacatctctgctacgggaggccgagtgcatggaatccaacagtgggaggctgggctcagatctcaaccacgtgcaggaggtgctggagggttacaataagaagtatgaagaagaggtggcactactggccactgctgagaatgaatttgtggccttgaagaaggatgtggactgtgcctacctgcgctaatcagatctagagggcaacgtggaggccctgacccaggagatcgacttcctgaggcggctatattaggaggagatccgcgttctccagtcgcacatctcagacacctcagtggtcgtcaagatggacaacagtcgggacctgaacatgcactgtgtcattgctgagattaaggctcagtatgatgacattgtcacccgcagccgggccgaggccgagtcctggtaccgcagcaagtgtgaggagatgaaggccacggtgatcaggcacggggagaccctgcgccgcaccaaggaggagatcaacgagctgaaccgcatgatccagaggctgacggccgaggtggagaatgccaagtgccagaactccaagctggaggccgcggttggcccagtctgagcagcagggtgaggcggccctcagtgatgcccgctgcaagctggccgagctggagggtgccctgcagaaggccaagcaggacatggcctgcctgatcagggagtaccaggaggtgatgaactccaagctgggcctggacatcgagatcgccacctacaggcgcctgctggagggcgaggagcagaggctatgtgaaggcattggggctgtgaatgtctgtgtcagcagctcccggnngcggggtcgtgtgcngggacctctgcgtgtcaggctcccggccagtgactggcagtgtctgcagcgctccgtgcaacgggaaacgtggcggtgagcaccggcctgtgtgcgccctgcggccaattgaacaccaccctgcggagggggttccctgcggcgtgggcttcctgtggtatcagctccccctgggtgtgggggtcttgcggcaagcagctgcccggaaatgttagggcaccccaaactcaangtcccagggcccccagggcggtcttttcctgccccctgcccttgctttgggcccatcccaggtcccagggcggccctgggaaagcaagttgcctcaagcctac

SEQ ID NO: 444595 - DNA, 1136 bp, Homo Sapiens
tctatgtgatggcaaagtttgatggcagggcccaattttaagtccatgcattcttgaacagtgggaagggtaaggagcaacagggcctgcccatcaatttcctggtctaggaatattcttgctaatggagcacagtcagtggatctgatgaaccgcacaacgtctgccacactccacttcaaggggttactgtccaggtgaagcctttcagcaacttcgatccttatttcctttggtgaaggaggtttattttcatcgtcagaaaatgaaaaggtgcgaagctccctttttctccttttgtctatctggagggcagcgatgtggatatctcactttgggtgggagaagaggagcatgactttttttctgacatttctgattcttcctgtagctcatcctgctgctcggatgtactgccttcacttagggaatcaatcatccccttcatctgggtcaccctcatcttcaccccccacttccctggggagagcccgctggggtattatcaacagatgcagaggagcgtttcttcttatgaacaaaaacatttttccgcctctttctcctcttactggcttttttcagggcacaagctaagttactatgcccaccaggtggcctcccaattcttttatttttcttctttccgtaatagtgtgtgtatttggtctttgtaagtacagaacagttctcagaacacttatccagaaccatccgtggaccgaagaggttaggacagcattccagtttgatacaggtttgccggcagaattcagtcacccgatctgctgttttcactatctcaacagtagcccgataactctttcctttatatttggcttttaggacttccccacatccgtgccacacagagtctttgtccagctggagctcccgaaggacacggctgggtttgtaggctgcattgataagtaaagtgaggacctctctaaggaccagaacacagttcccaggtcctacacattgaggcagctcagcaattcttcctttgttaagatatggccctgagaagcaacggtggttgaagtatatctttggacagcaatattttccattaatcataactgactctgtggagttcagctcctgattcctcaggccctcgtggacagtcc

SEQ ID NO: 444596 - DNA, 1210 bp, Homo Sapiens
ggaattcccgggatggctccggggcgcggagaagctgcatcccagaggagcgcgtccaggagcggacccgggagtgtttcaagagccagtgacaaggaccaggggcccaagtcccaccagccatgcagacctgccccctggcattccctggccacgtttcccaggcccttgggaccctcctgtttttggctgcctccttgagtgctcagaatgaaggctgggacagccccatctgcacagagggggtagtctctgtgtcttggggcgagaacaccgtcatgtcctgcaacatctccaacgccttctcccatgtcaacatcaagctgcgtgcccacgggcaggagagcgccatcttcaatgaggtggctccaggctacttctcccgggacggctggcagctccaggttcagggaggcgtggcacagctggtgatcaaaggcgcccgggactcccatgctgggctgtacatgtggcacctcgtgggacaccagagaaataacagacaagtcacgctggaggtttcaggtgcagaaccccagtccgcccccgacactgggttctggcctgtgccagcggtggtcactgctgtcttcatcctcttggtcgctctggtcatgttcgcctggtacaggtgccgctgttcccagcaacgccgggagaagaagttcttcctcctagaaccccagatgaaggtcgcagccctcagagcgggagcccagcagggcctgagcagagcctccgctgaactgtggaccccagactccgagcccaccccaaggccgctggcactggtgttcaaaccctcaccacttggagccctggagctgctgtccccccaacccttgtttccatatgccgcagacccatagccgcctgcaaggcagagaggacacaggagagccagccctgagtgccgaccttgggtggcggggcctgggtctctcgtcccacccggtagggcacagacaccggcttgcttggcaggctgggcctctgtgtcacccactcctgggtgcgtgcagacccttcccctccaacccccaggtcttccaagctctgcttcctcagtttccaaaatggaaccacctcaactccgcagtcacccgacttaccaggacgcatgccctcgctctgcctcatcagaccaagaccggactccctttctgcaccaggctggtcggccaggtgtggggtccgcactctcaatcca

SEQ ID NO: 444597 - DNA, 1749 bp, Homo Sapiens
  misc_feature (1207)..(1207): n is a, c, g, or t
ggtccggaattcccgggatgcaaatccaggttcatgaagatttgcccgttttcttctaaaagttctatagttttagctctgaagtttcgctctttgatccactttgaggtaaattttggcacatggtatgaggcaggagttgcgtttcactctcctgcctggggcggtgcctgcaccgtgttgaaaaaggttgtccgttcccactgaacggtcacagctcccttgtctaagatcaacgacccctgaacatgagggttccaactggactcttagttctactccactggcctgtgtctgcccaccattactaccgccgtgccatactgaggtcaggctggggcttttctgggctgctgggtgagctggagaatgcggttgtgtgacccgcaggaagggcagagctgagcgtatgacctgtgtcgttcccctccagaaatacccgcagcccaaagggcagaagaagaagaagatcgtcaagtacggcatgggtggcctcatcatcctcttcctcatcgccatcatctggttcccgctgctcttcatgtcgctggtgcgctccgtggttggggttgtcaaccagcccatcgatgtcaccgtcaccctcaagctgggcggctatgagccgctgttcaccatgagcgcccagcagccgtccatcatccccttcacggcccaggcctatgaggagctgtcccggcagtttgacccccagccgctggccatgcagttcatcagccagtacagccctgaggacatcgtcacggcgcagattgagggcagctccggggcgctgtggcgcatcagtccccccagccgtgcccagatgaagcgggagctctacaacggcacggccgacatcaccctgcgcttcacctggaacttccagagggacctggcgaagggaggcactgtggagtatgccaacgagaagcacatgctggccctggcccccaacagcactgcacggcggcagctggccagcctgctcgagggcacctcggaccagtctgtggtcatccccaatctcttccccaagtacatccgtgcccccaacgggcccgaagccaaccctgtgaagcagctgcagcccaatgaggaggccgactacctcggcgtgcgtatccagctgcggagggagcagggtgcgggggccaccggcttcctcgaatggtgggtcatcgagctgcaggagtgccgggccgactgncaacctgctgcccatggtcattttcagtgacaaggtcagccccccgaagcctcggcttcctggctggctacggcatcatggggctgtacgtgtccatcgtgctggtcatcggcaagttcgtgcgcggattcttcagcgagatctcgcactccattatgttcgaggagctgccgtgcgtggaccgcatcctcaagctctgccaggacatcttcctggtgcgggagactcgggagctggagctggaggaggagttgtacgccaagcttatcttcctcttgcgctccccggaggccatgatcaagtggactcgtgagaaggagtaggagctgctgctggcgcccgagagggaaggagccggcctgctgggcagcgtggccacaaggggcggcactcctcaggtcggggtagcctctgccccgttcaaggccgccagctgtgatgcatcctgcccggcttgcctgagccctgatgctgctgtcagagaaggacactgcgtccccccggcctgcgtggcgctgccgtcccccacgtgtactgtagag

SEQ ID NO: 444598 - DNA, 1627 bp, Homo Sapiens
  misc_feature (1492)..(1492): n is a, c, g, or t
cagtttaaaatgttttatttcatagctcataaaaaagtatgtatgtacaagactcaagtaaatagaaaggcagctttcaatcacaaatcagtttttcagattttactgtggaagcatatttaatgcacacatttgaatgttacacataaataattttaacgatggagtccaagttctggattttacattagatctgcatatataagacacttgtggtcaaatttcaagattggtaaagccagtttcaagctgcttatattttgagtacaggtttcactattacaaatatatgatgttaaactaacaaactcatgaccttcaaagatgtcttcgtcccacgcacacacatttgtaatttgtgtccatttgctatttcccttcttctataatcttcaaattatatagttatgcattgagttccctatgcatctcacccatctcctttatctcagccttctcatactttgccattctcttctttctggaaataaccagcacaacaattccagcaacaactgctatcaccacaaccacaataacagcaataacaccagcttttagaccctgcattgagaattcaggtgctttttcatcaacataataaattaaagtttgaccaggatccagatccagttgttccccatttactgtcaggtccattttcttagaatgaaacaaggattcacctttaacatctttttcaaaataataagccacatcagctatgtccacatcattctgagttttttgagaagaattttgaaccagatcaatagtgataacattattctcatacaaaatactcgtgataaattttggatccagttgataacgcgttgtgatctccttctgaagtgcagtccgcaaacttttactatcataaggtttttctcttgctttgtgttttagttcaatgatgatccagtaggttctcactcgctcagagcaggttatttcagtgtccttgtctgttcttctgaccccagcagtgttcacacaccagcacgtggaggtgccgttgcactgcttggccttaaagagcccgctctcatcgcagtcaggatcataaagcccatcattgttctggagggccccttcaggttttgctcttctcccaagttttgagccattcatttctgccttcatcaccaaacatttggcagccagctttgagcaaatgacagtattttgtgcaccaactgaagtacactggcacttgacgattattattcacaaagcagtttacggccagcttgtagttttcacagacacattcaaggcgagcaaagctgcgaagtgaggctgctccccgggacggccctcgccgtttcctaccgcgcggagggcctgagccggagcacgtccgcaccgtccggtctccacgctggaaagcgcggcctcattggtcccctccctattatgcccgtttcgggggctgagggccgggggccgctgccccccagcccagcccagctccacaactctgctccantccgcgcctcaccttcctgagctgcggcaaaagtcgccgtcgccgcggcaagcagaagcccgaacgcgaggacctgcgggggcgccatgctgcgcccgctctcgacgaattcgagctcggccgatttggcctgat

SEQ ID NO: 444599 - DNA, 985 bp, Homo Sapiens
cataccagttcttcaaatgtcctatactttggaaagcagaccctactctggagcactcgccttaattagattctgaatttccttgaattttggatggtccttatcagctaccagctgaagcagaacagcctcactcgtggtcactatgatcccggttcgagcgagacgctcgagggcaaacatcctgtccatcatgcttcttgatgaggtggcatcagcaacaatgtgaacctcgactcctcggccaactagctccagggcagtttgttggatgcacacatgagtttctactccaaataatacaacactcctgactccgggaatctctgctaatgccgcttctacttctggtaataccattgaaaacttggtctttggaagtaccagttttacacctgttaaatcaatttcttgaaccgtgctcccaagacctttagggtattgttctgttacaataacaggaattcctaaaatccgggccccttgcaacaatctctgtcccacgctaataatatccccaaaatacttgatggctggtctgaacctttcctgcatatcacagcagaaaaacacagtgcttgaaggtgtaagatttcccagggtagtgagctggatctgcagcggcacgaggcgcaccttgcagcgctcgctcaccgcgaagcccttgggcaagtccacgtactggccccactcctcggcgaacagctgcaccacgaatttgcggtgcatgtcgatctggtcgccgtacaggctgaggaacttctggatgagcagctcgtagcccgccccgtgtggcaccgacgagggtcgcgcgaagactgagaaacagaagagcaccgggactgtgcccgacggcgcccccgcgcccccggcgccgctgttggggagcgcaaggaccgccggctccgcagccgccatgttcccccgagcgtctgcgagtctccgaggccgcccagtcgccctcgtgccgaattcgccacccagg

SEQ ID NO: 444600 - DNA, 2164 bp, Homo Sapiens
  misc_feature (2128)..(2128): n is a, c, g, or t
cccccaccttccaacctcccccccttctctttattcctaaacaacaggctggtaccggtccgggattcccgggatcgctgccgtctctgcgttcgccatgcgtcccggggcgccagggccactctggcctctgccctggggggccctggcttgggccgtgggcttcgtgagctccatgggctcggggaaccccgcgcccggtggtgtttgctggctccagcagggccaggaggccacctgcagcctggtgctccagactgatgtcacccgggccgagtgctgtgcctccggcaacattgacaccgcctggtccaacctcacccacccggggaacaagatcaacctcctcggcttcttgggccttgtccactgccttccctgcaaagattcgtgcgacggcgtggagtgcggcccgggcaaggcgtgccgcatgctggggggccgcccgcgctgcgagtgcgcgcccgactgctcggggctcccggcgcggctgcaggtctgcggctcagacggcgccacctaccgcgacgagtgcgagctgcgcgccgcgcgctgccgcgggcacccggacctgagcgtcatgtaccggggccgctgccgcaagtcctgtgagcacgtggtgtgcccgcggccacaagtcgtgcgtcgtggaccagacgggcagcgcccactgcgtggtgtgtcgagcggcgccctgccctgtgccctccagccccggccaggagctttgcggcaacaacaacgtcacctacatctcctcgtgccacatgcgccaggccacctgcttcctgggccgctccatcggcgtgcgccacgcgggcagctgcgcaggctcccctgaggagccgccaggtggtgagtctgcagaagaggaagagaacttcgtgtgagcctgcaggacaggcctgggcctggtgcccgaggccccccatcatcccctgttatttattgccacagcagagtctaatttagtatgccacggacactccttagagcccggattcggaccacttggggatcccagaacctccctgacgatatcctggaaggactgaggaagggaggcctgggggccggctggtgggtgggatagacctgcgttccggacactgagcgcctgatttagggcccttctctaggatgccccagcccctaccctaagacctattgccggggaggattccacacttccgctcctttggggataaacctattaattattgctactatcaagagggctgggcattctctgctggtaattcctgaagaggcatgactgcttttctcagccccaagcctctagtctgggtgtgtacggagggtctagcctgggtgtgtacggagggtctagcctgggtgagtacggagggtctagcctgggtgagtacggaggatctagcctgggtgagtacggagagtctagcctgggtgtgtatggaggatctagcctgggtgagtatggagggtctagcctgggtgagtatggagggtctagcctgggtgtgtatggagggtctagcctgggtgagtatggagggtctagcctgggtgtgtatggagggtctagcctgggtgagtatggagggtctagcctgggtgtgtacggagggtctagtctgagtgcgtgtggggacctcagaacactgtgaccttagcccagcaagccaggcccttcatgaaggccaagaaggctgccaccattccctgccagcccaagaactccagcttccccactgcctctgtgtgcccctttgcgtcctgtgaaggccattgagaaatgcccagtgtgccccctgggaaagggcacggcctgtgctcctgacacgggctgtgcttggccacagaaccacccagcgtctcccctgctgctgtccacgtcagttcatgaggcaacgtcgcgtggtctcagacgtggagcagccagcggcagctcagagcagggcactgtgtccggcggagccaagtccactctgggggagctctggcggggaccacgggccactgctcacccactggccccgaggggggtgtagacgccaagactcacgcatgtgtgacatccggagtccttgagccgggtgttccagtgggaccactaggtcttggctggcttcacagtggggttcanaccaagggcttcttggttcccaacaacttgcccggg

SEQ ID NO: 444601 - DNA, 1747 bp, Homo Sapiens
  misc_feature (87)..(88): n is a, c, g, or t
gccttctactctactagctgaatgggaagcatcctctcctatcgagtaatgtgcagctcggagtgtgcttcgctgcttctcaacgcnntccaaaaaagtcttctgtccgagcttcggtctctgggggatgcccaccacggtccactgtgcatgctccatgctcaggggggcagccatcaccagggggcagcagtttgcagcgccggttctttgtcgaacacacaaaggacttgagcaggtgtttgctgagcaggcttagggatgccggcctagagaacagcatgacatctggagtgccctccatgagagagcagtacaggaaaggcgcctggggagatgacgaggttggtgccaaaggcagctggcaatggtctgctgggtggctcgcagctgcttcttggcgagttccaggccatggtacagcttgtccaggttactcctggagaggctgtccagagccttggatgaagtgatctgtccctgagccatccttctcggggctctccatcaaagacatggtggcaaagaccacgtcgctggccagaaacttgtgcttgaacccaaaatgaatgctgaaagtctgcacgcgcatgtccttcatcccaaatttatttgcagactcttcaatcatttcccgcaaattctccttcaaggagatgtccatggcctggaacttctgcttcacctgcttcaggggaagacccatgtctgcaaggaactcctggagccgcttctgtccatgcacagaccacagcttgaacctggctgcggtatagctggtgttgcacaggctgtcatggagggaccagtgctggtagagcaccaggcggaggtcatactcaaaggagatccgtgtgcagtccacggagagtgtgttctcctcatcctcgttccggtggttgtggcgggaaacgtggcgctgcaggacaccaacatcagtcacgtatttcatttgagtgatcttgtcttgcacccactggtctgttagtccaacgatggcccaccacagcatgtcattcaggtccttggacagcatccaagccagctcaaacatcaccatggctgacgatgtcccatgatattcatactgctcgtagtcaaagaggatgtctcttctccgggcctcccactctcgccgctgcctcctccgcatggtttgctccactatctcctcttctaaccgtgtgcgcttctcagaaggctctgacccatcactgtcatttcctgaatgctcttcatcctcctcttcatccctgaagatgtcttcataggcgggaacttcaaggtcatcatcttgtttaatgagtaatttgatctgggtatcgttgtatacattgacgacattgactggcctatgggtgtcacacacaaagaatatagtgtcttcatcaggttgaagaatatccaataggtctacattagctcacacaagtttatgtagatataatatataatgaatactgttctttatgctcatagagatatgcaagtttcatagttcttgccacaccaagaatactggaacctagcagtatatttgcactgtggtcacaactggttacaaggcactgaaggatcttgcacagcacacagagcatccacagtcacgaggccacgaagagataggaccctctggctctggaccacctcagtagaactctttgcaggttatcgtacacgtactataccacgcgcagaactagcgctcgcctgacctctcctattaacaccagttctacctatcata

SEQ ID NO: 444602 - DNA, 629 bp, Homo Sapiens
gtttgtgtgtgttttggagccctaaaataagcattttatttaataaaaaatggcttctacatctcaaatcatgtccataacttacaatctaaatgaaagccagttacataaataagaaggtcattctggaagaatcaaattcctaggacaggagggaaataagtgcgtccagaaacttgctccgatcctcagctttcagctcaattactgagaggtcaaaatggttgtgcagcatccgggagctggtgctttccgctgccttctcaaacgccctcccaaaaaagttcttcctgtccgagctgtcggtctctggggggatgcccaccacggtcactgtgccatgctccatgctcaggggggcagccatcaccaggggcagcagtttgcagcgccggttctttgtcgaacacacaaaggacttgagcaggtgtttgctgagcaggcttagggatgccggcctagagaacagcatgacatctggagtgccctccatgagagagcagtacaggaaaggcccctgggagatgacgaggttggtgcaaaggcagctggcaatggtctgctgggtggctcgcagctgcttcttggcgagttccaggccatggtacagcttgtccaggttactcccc

SEQ ID NO: 444603 - DNA, 1311 bp, Homo Sapiens; identical to SEQ ID NO: 311468
  misc_feature (498)..(498): n is a, c, g, or t

SEQ ID NO: 444604 - DNA, 904 bp, Homo Sapiens
  misc_feature (665)..(665): n is a, c, g, or t
  misc_feature (700)..(700): n is a, c, g, or t
  misc_feature (766)..(766): n is a, c, g, or t
  misc_feature (771)..(771): n is a, c, g, or t
  misc_feature (875)..(875): n is a, c, g, or t
caaagcttacactcctttcatacgcttttctgtaggcgatgttttaaatatgactgcttcctacatccttttcatgcaacacccaacacttataagcggaagaacacagaaacagctctagacaacaaaccttgtggaccacagtgttaccagcatttggagggagcaaaggagtttgctgctgctctcaccgctgagcggataaagaccccaccaaaacgtccaggaggccgcagaagaggacggcttcccaataacagtagcaggcccagcacccccaccattaatgtgctggaatcaaaggatacagacagtgatagggaagcagggactgaaacggggggagagaacaatgataaagaagaagaagagaagaaagatgaaacttcgagctcctctgaagcaaattctcggtgtcaaacaccaataaagatgaagccaaatattgaacctcctgagaatgtggagtggagtggtgctgaagcctcaatgtttagagtcctcattggcacttactatgacaatttctgtgccattgctaggttaattgggaccaaaacatgtagacaggtgtatgagtttagagtcaaagaatctagcatcatagctccagctcccgctgaggatgtggatactcctccaaggaaaaagaagaggaaacaccnggttgtgggctgcacactgcagaaagatacagctngaaaaggacggctcctctaaccatgtttacaactatcaaccctgtgatcatccacggcagccttgntgacnagttcgtgccctttgtgtgatagcacaaaaatttttggtgaaaagttttgtcaatggtagtttcagaagtgtcaaaaaccgctttttcccgggatgcccgctgncaaaagcacaggtgcaaacaccaaaagca

SEQ ID NO: 444605 - DNA, 891 bp, Homo Sapiens
  misc_feature (35)..(35): n is a, c, g, or t
  misc_feature (42)..(42): n is a, c, g, or t
  misc_feature (66)..(66): n is a, c, g, or t
  misc_feature (176)..(176): n is a, c, g, or t
  misc_feature (192)..(192): n is a, c, g, or t
  misc_feature (209)..(210): n is a, c, g, or t
agggtggaggaaagaaactgagtgggctgcctgtncctggtncgggggatggatcaggcacccaanggttaggggaggggagccccatcacccatgtttagtaaaataataaaaccagtggttggacagagggaagaccccactgccctgggatgaggctgctctgaggcaagagngtgtacgtatcctacnctggcccaacacacgcnnacttcccccactgggctccttggcccgtgtcagcgaagggagcgcgggacggtgggggaggcggagcggtagcagcggtacccctccagtgccgctggcaggagcagcaggccgctcagggggtctttgcggcagcggcccatggcctccttgtagctcagccgttccttggagatggggtctgtcaaatccttctcgtagctggactcgtcctgcaggagctgggccagctcttcactgatcatcccggagaggagggcctgctggatggggatgcggcctgtcctcttggggtcgatgagccccccggtcaggtgctgcacctgcaggtgtgggagcacgctctcccggggcatccagcccttctggacggcctcgcccaccgagagcctcttcttggtgacggggtcctcgatgccggtgaaggccttctgggcgttaagcagcctctgtgtggaggtgttctcgatcaggcccctctccatcgccttgtgcacagagtagcgctcacggctgagcaggtccacgatgccccctgtggccgcctgggcctccagtagcttctgcccagtgatggggtccagcatgttcttggccacggccgtcttgatgctgcacttgttgtctgtggttgtgtcatagatcccggcgatagggaagctgtcatcaccgagcccgaga

SEQ ID NO: 444606 - DNA, 1227 bp, Homo Sapiens
  misc_feature (1144)..(1180): n is a, c, g, or t
aaccctttttaaaaggtggtaaagtaaaggtttttatttctcaccccttttttccccaaccagtgggccccccaaccccaatttcaaaaaggcggaagttaggggagggtggctaaccaatgtgagggattaattcccagtgattcccggtccacaattgcattccagggaaggagggtaccccatgtcactggaatggggcgatatgggtttattttttcttcccctgatttggataacccaaatggaacaggaggaggatagtgattctgatggccattccctcgatacattcctggcttttttctgggcaaagggtgccacattggaagaggtggaaatataagttctgaaatctggtacacaggacttgcggctgcagtcaccgaactgggtttcacttccatttccttacttgtttcttcatctgaagaagaggatcctgaatgataatcagaggtaaccttatcaagggccctggtaactttcctggagatctcatccttgttctcatctttattttcaaagctggcaacaatgaatgcattgtttttctctccataccgacagcacacctcacatgggtccacccagagagtgagctcctttggcaagcccaggtcactatacaagatgcagctgttttcacaggctttcaggacatcaggatcaactctctgaaatttattgacacgaatacatctgtaggcctgtcctttcgatggtttttctggataccagtgatttttatatttttcttgaagtattagggtcaatttctcagcaaacctctcaactgcctcttttttcaacttatcatgttttcgaactagccttgtgaaaaagaagacaacggcagcaatttcattcttcatttttttcccgccgctgccgccgccgctcttcggccggagattcggcggcccagaccgtgtcctggccgggaactgagggctccgcctcaacgggcccgcgctgggcaacagggagcgcagcgagcctcgtccggcgcgtgcggctcccgcgtcgtcgggcggccaagcgcgcgttgagaggactggcgggcggacgagcgcgcacacgagtgagcgcagccccaaagcccgctctcgacgaattcgagctcggccgatttggcctgatnnnnnnnnnnnnnnnnnnnnnnnnnnnnnnnnnnnnncgccgccaccgcgtaagctccagtcgccctatagtatctatcattcc

SEQ ID NO: 444607 - DNA, 1933 bp, Homo Sapiens
  misc_feature (546)..(559): n is a, c, g, or t
  misc_feature (580)..(580): n is a, c, g, or t
  misc_feature (589)..(734): n is a, c, g, or t
ccggggggcaaaatgttgtggcccaccatttgtttctgtatcagaacgcgccagccacaggaaatgtaagcccgagattccgtcgagccaatcccggatttgtttatcggcggcggcgggggcagaattaatttattacgcccaagggggcgccaagggtatttgagtgtatagcgcacgagtgcggtggggcacgggaaggtattaccgtgcccgtaggtgcacaggtggttttatccccacagaagggcgaagccagggcgttggatgggtatttattcaggcacacatcgtttccgcgataccgccgccccgcaggtgtgtggagaatggaaattaccaaaatctgggggcacagagggggtttcggtcttgtttgtcaggacaggtcccgcggaggagggcgggcgcagaagtccaatttttgtgattgggtgacaaggcgccttccgtttggaccctcccgggattttttttcggggggagagaccccagagcgttgtgttgtggatttggtttctgcgcgggaaggacgaagccgcgcgnnnnnnnnnnnnnngtgggtccacggcgcagatgnttgggttgnnnnnnnnnnnnnnnnnnnnnnnnnnnnnnnnnnnnnnnnnnnnnnnnnnnnnnnnnnnnnnnnnnnnnnnnnnnnnnnnnnnnnnnnnnnnnnnnnnnnnnnnnnnnnnnnnnnnnnnnnnnnnnnnnnnnnnnnnnnnnnnnnncatgcctcaaactattttttatttgcaactacatgatttcacacaattctcttaaacaacgacataaaatagatttccttgtatataaataacttacatacgctccataaagtaaattctcaaaggtgctagaacaaatcgtccacttctacagtgttctcgtatccaacagagttgatgcacaatatataaatactcaagtccaatattaaaaacttaggcacttgactaactttaataaaatttctcaaactatatcaatatctaaagtgcatatattttttaagaaagattattctcaataacttctataaaaataagtttgatggtttggcccatctaacttcactactattagtaagaacttttaacttttaatgtgtagtaaggtttattctacctttttctcaacatgacaccaacacaatcaaaaacgaagttagtgaggtgctaacatgtgaggattaatccagtgattccggtcacaatgcattccaggaggaggtacccatgtcactggaattgggcgatatggtttattttttcttccctgatttggataaccaaatggaacaggaggaggatagtgattctgatggccattccctcgatacattcctggcttttttctgggcaaagggtgccacattggaagaggtggaaatataagttctgaaatctggtacacaggacttgcggctgcagtcaccgaactgggtttcacttccatttccttacttgtttcttcatctgaagaaggggatcctgaatgataatcagaggtaaccttatcaagggcctggtaactttcctggagatctcatccttgttctcatctttattttcaaagctggcaacaatgaatgcattgtttttctctccataccgacagcacacctcacatgggtccacccagagagtgagctcctttggcaagcccaggtcactatacaagatgcagctgttttcacaggctttcaggacatcaggatcaactctctgaaatttattgacacgaatacatctgtaggcctgtcctttcgatggtttttctcgataccagtgatttttatatttttcttgaagtattagggtcaatttctcagcaaacctctcaactgcctcttttttcaacttatcatgttttcgaactagccttgtgaaaaagaagacaacggcagcaatttcattcttccgct

SEQ ID NO: 444608 - DNA, 1442 bp, Homo Sapiens
  misc_feature (193)..(193): n is a, c, g, or t
ctttttttccaccgggctccccttggggttcacagtgtcctcatccccttcctgtccaaaggccatctttgccttttcattcttaagccagactagccaatttccttccctttttctgtgtccccctcccatgtagtatctccttagggggaggtaaaggaagacatgctcctctctgggctggctcggcctntggaaggtagcttgctatctttatgatgctccagttccaacattctagatggggagaggctcagcagtgatggagcaggaggggcggatgagaggtgtgctggccactctgccctgagtcactaggccaccaaaatgcttaggagacgtcttttggtagctcgcttctataggtgaccttgaggagttgggaggcagatagaaggtcccgaagtggagatttccctgatctgaagttccttgataatcccactgaagagagagtccattcagtggcctaaacaaagaatctgtatttccatgacaccttaaaattccccattaaatcaaaatctccctcaaagcaaagtaaaaatggttctattataatcagagtcaatcaggataatgagatgaagaagagaggaaggaaaaaagttttaatgtgaagaaagaagcttgttgtcccatagaagccaaccactgctgtttcttcgtatggcctttcccggggtccgaagcgtctcagccctagcccaggccaacgtccagtgacatcatcactacaaatcccaggatggaggcccaggatgccagtttcccattaccactgatctgggcttcggggatgatgtcgtccatgaccacgtagaccatggcaccggcagcaaaggccagagcgtagggcaggatgggctcaaccagcaccacggcaaaggcaccaaagaccccggccaggggctccaccatgccgctcagctgcccataccagaaagctctccaggtggagaagcctgcccctcgcaagggaaggctgacagccaggccctcggggaaattctggatcccgattccaatggccaaattcctggcactctcaaaggtagcagatgccgtcttttctatagccccaaatccaactccaacagcgagatcttttggaatgttgtgtatagtgatggccaagatgagcagtgcgatcctcctccagctgctgccgccgggctgtgccagattccctcgagaaggcacagggacagcaggaccctctggaaggccagtagctgccgccttctttctctgatatgcctcaccattctcactcttgtctatccggatggaaagttcactctcagggaagagcagcgcgggaccctcaggatcagacttcttcttcatcaacgtagagccgaagttcagtgccggggccgtctgggggtcttctgctgcacccaagtgaggcatcaggaggtcagccaagtagacaaaag

SEQ ID NO: 444609 - DNA, 889 bp, Homo Sapiens; identical to SEQ ID NO: 125854
  misc_feature (109)..(109): n is a, c, g, or t
  misc_feature (149)..(149): n is a, c, g, or t
  misc_feature (183)..(183): n is a, c, g, or t

SEQ ID NO: 444610 - DNA, 2313 bp, Homo Sapiens
aaaaagaaataaaatgttttactcatttacacaaatacacacactgaagtccaccctgggagctggtaaaacaatttcagtctcagacccgtctgttttccagggtcctccgagcctgggcttcctcaagagcgtggcccaagggccccacagcccagatccggcagccccaccaccttcactgaggaggccccgaagctccgttcccgctgctccttagagacaggggaggcagatatgcacaaacgcgcctcggcccagcttggggctggcgggggaaggctgtttcttccaacctttgcccccagttgggtcagtagaccccccagtttcctccccttctacctcccagctccactttgggggctgaggaagcgagaggttttctaggcagatttggagccctggagattgagttcacagtgtatgttctgggggcgctggtgcagtcagcggtccagtctccagcctgcaggcgtgcacactggggttgacgatgggtggccccccgcaggtgtaccacatttggggtggcccccggccccctatacccccagtgttctctttgatccagtcccgaaacagagggagccttgtgtacacgcctggcttgttcctctgagcgcagccgtctccccagctcaccacaccggcctggaagatccgcccatccgcctccacgctggacaggggtcccccggaatcaccctggcaggagtccacgccgccgctgaggaagcccacgcacatcatgcgcggcgtgatctgctgcggcaggaggttctcgcaggtggtctggttgatgacgcggatctcacccttttgcaggatcagcgcgccagtgcctccatactgggtgtgtccccagcccgtgacccagatggccttgccggcagggaagacatgggaggcgtccggcaggcagatgggccgcaccatggagctgtactctgccggtttctccagctccagcagcgcgatgtcatagtcgaaggtgaagtcattgaagaaggggtgggagatgatgcgcttgagcctgcgctcctgcaccccaggggcgctgcgctggctctggtcgtgcaagcccaggaaggccgtccactgcgtggggtctgagtacctgaatcctctgtcatcgatgtagcagtgtgcggcagagaccagccagttgggagagatgagggaagcaccgcagatgtggccctggcccagagcatgcaggcttacctgccagggccactcgccctcatccgcatccgtgcccccaacaacacgagcctgtctcgtgaatgaccgcagcccaccagtcgcagtccttctcatctgagccgtcgctacagtcctccttcccgtcacactcagggttgcccttgctcaagcagagcccattgaggcagcggtaggtgtgtttggtacaagtgacgacgttcaccttggggcaggaggcctcgtcggagccgtccccacagtcgtccttcccattgcactgctggcttttcgagaggcacttcccattggaacacctgaaggtctgggccggacaactgcacccctgctgcgtcgctgttgtcttccgcagtcgttcaccctgtcgcagacccagaagaggggctttgcagaacttgttcttgcacgtgaactggtggccggctgtcgcaactgcagttgagctcatcgctgtggtcggtgcagtcggcccagccatcacagcgcagctccttccggatacaccgccccgtgcggcacgtgaactgccccgggcatgggtcaactggagtcgtaggagagggtattcagctaagaagccggtgtcggtgtaggactgatctgagtggaagcgaactgtgatcttgttgctgttgctggtgacgacgaactgggacctctctccgcagtatttctccccattgatctccacgtagtccttggggcaggtgcccgcaggcacgccgggctccagcaggtagaagaatttgaagcgcaccttcacatgctggttgttgggcacctcaatgttccatgtgcagtcaatgttgggtgggtagtggcctgggtagtaggggctgttgaatgtcccctgggctttacgtaagcggcctccacagctgctcatcctaggcagctggaagaaggtggcctcaaagccgggatgccgccgctcagtgttggttatcagtgtgatgagcaggacgttctgggaggagtggaaggtcaggttgtaggagggagggtaggtgccacacaactgcaccagggcgtggggctccatggggctcaaggtgttgtacaccgtcaccaggtcgctgccgcgct

SEQ ID NO: 444611 - DNA, 1087 bp, Homo Sapiens
  misc_feature (1062)..(1062): n is a, c, g, or t
ggccgcgatggcgctgttggccggcgggctctccagagggctgggctcccacccggccgccgcaggccgggacgcggtcgtcttcgtgtggcttctgcttagcacctggtgcacagctcctgccagggccatccaggtgaccgtgtccaacccctaccacgtggtgatcctcttccagcctgtgaccctgccctgtacctaccagatgacctcgacccccacgcaacccatcgtcatctggaagtacaagtctttctgccgggaccgcatcgccgatgccttctccccggccagcgtcgacaaccagctcaatgcccagctggcagccgggaacccaggctacaacccctacgtcgagtgccaggacagcgtgcgcaccgtcagggtcgtggccaccaagcagggcaacgctgtgaccctgggagattactaccagggccggaggattaccatcaccggaaatgctgacctgacctttgaccagacggcgtggggggacagtggtgtgtattactgctccgtggtctcagcccaggacctccaggggaacaatgaggcctacgcagagctcatcgtccttgtgtatgccgccggcaaagcagccacctcaggtgttcccagcatttatgcccccagcacctatgcccacgttgtctcccgccaagaccccacccccaccagctatgattcccattgggcctgcctacaacgggtaccctggaaggataccctggagacgttgacaggagtagctcagctggtggccaaggctcctattgttcccctgcttcgggacacggacagcaggtgtggcctcttgaagtccgcagtggctacaggattcacggccagcccagcaggacgactccatgcgggtcctgtactacatggagaaaggagctggccaacttcgacccttctcgacctggcccccccagtggccgtgtgggagcgggccatgaatgaagtcacctcccctcaccgaggacgactggggatctcgggccctcccgggggccctgcccttacccccgaatccggaatgaaagaattgggggtggnccacttcccccccgggaagtcccag

SEQ ID NO: 444612 - DNA, 1953 bp, Homo Sapiens
  misc_feature (270)..(304): n is a, c, g, or t
ccggttttgcggggggggaggttttcgcgcacgaggacgtggggggaaaaatttcggcggggcgggaggtggcgtatcggggcgcgccacaagaggagttgttatccgccgcaaggcgggcgacagcatgtcgggtgagagggactctttggggggccgcgataatttttttctcgtgcgcgcgcggtttatttgcgtggggaggggtcctggtgtgccctggtatttgggaacggggtttttgggacgggggtaaagtttctctccaannnnnnnnnnnnnnnnnnnnnnnnnnnnnnnnnnnttcgtggtccctcccagccccccgccctgcctgcttccctgggcggggctccctggtcccatcccctggggactccggggggagtggccaccccactcctcatcccggatcggggtgagggcagggccccgggaaggccgagatcgccagtcgtcctcgtggagggaggtgacttcactcatggcccgctccacacggccactgggggggccaggtcgagaagggtcgaagttggccagctccttctccatgtagtacaggacccgcatggagtcgtcctgctggctggcctgaatcctgtagccactgcggacagaggccacactgctgtccgtgtcccgaagcaggggtacataggagccttggccaccagctgagctactcctgtcaacgtctccagggtatcctccagggttacccgttgtaggcagggccccatgggaatcatagctggtgggggtgggttcttggcgggagacaggtgggcataggtgctgggggcataaatgctgggaacacctgaggtggctgctttgccggcggcatacagggcctcggggcagcagcacttgtctgggcagcaggggcacctgacgtagcagcagcaagtgtgcgggcagcactggcaccagcagatgcccaggaggaggaagatgaggaaggcagccaggcataccacaaccacgaagagccagtcttctatgggccccgcctgaaaaccaggtaagagctcagccacccctgaggtcctcccaaggacgatgagctctgcgtaggcctcattgttcccctggaggtcctgggctgagaccacggagcagtaatacacaccactgtccccccacgccgtctggtcaaaggtcaggtcagcatttccggtgatggtaatcctccggccctggtagtaatctcccagggtcacagcgttgccctgcttggtggccacgaccctgacggtgcgcacgctgtcctggcactcaacgtaggggttgtagcctgggttcccggctgccagctgggcattgagctggttgtcgacgctggccggggagaaggcatcggcgatgcggtcccggcagaaagacttgtacttccagatgacgatgggttgcgtgggggtcgaggtcatctggtaggtacagggcagggtcacaggctggaagaggatcaccacgtggtaggggttggacacggtcacctggatggccctggcaggagctgtgcaccaggtgctaagcagaagccacacgaagacgaccgcgtcccggcctgcggcggccgggtgggagcccagccctctggagagcccgccggccaacagcgccatcgcggccgtctgggcgcgtctggcccgcgcgtcccttccaaagtaccttagggggcgcggcgcgcaccaaggccaggaggggtgcacgctcctccccttcccacttccgttccttgtccctactccaagtccgtcctgttgcattctggaagttttaatgagcgtaaacgacgtggacaaagggcatgctttcagatatgggggagaaaggtgcttgacccgccgcggtcctccgagccacactccacccgctgcgcgctccggtgaatggttcggcccaggtacacaagggtgggagccgagggctgggcttaggggtgag

SEQ ID NO: 444613 - DNA, 1128 bp, Homo Sapiens; identical to SEQ ID NO: 155044
  misc_feature (134)..(134): n is a, c, g, or t

SEQ ID NO: 444614 - DNA, 2009 bp, Homo Sapiens
  misc_feature (241)..(250): n is a, c, g, or t
  misc_feature (536)..(549): n is a, c, g, or t
  misc_feature (785)..(797): n is a, c, g, or t
ggggtttccccagctcccgacgacacagagcttaaagaagactccccacacccgtcttcccgaataatatgggccagcggcgcgggcgcgttatattttcaaatgcggaatctccccgggcgacctcccggctttagtagagtcccccgttagatctcccttcaagaagattcgcaattcgggaatttgttttccaagaaccccttccgggttccccgccgcggggcgcgtttttttattnnnnnnnnnnagtccccagaccccttaagtccacgggcccccagggattttcccttggggaaaaacagggctgagggggcccgatttttcccccttgccccttcaccggggaccccggcgggggccccaaagcgaaaatggtttttggagaaagtcttttttcgaaggggccggagggcgtgcccgaaacaggaattcttttctggggtacgggggcctccgcttgtacctaataaagaatcttttatttttgttattaaaaaaaaggaagtactttggtagcttatttaaataannnnnnnnnnnnnnaatgaatgtcgagatacggagcccctgcatcttttagctaattgtcagtggagtcagtggggtgctaagtgttctgaactgaagtaggtgcactaaggttccaagctccctgcaaggatctggacgggaggaaagcagaggccctgaagggaaaaaagcctgcttcccaatacttattttttattactgtacaaaaagcacactctccctctttttgtctctcccaccaacggcannnnnnnnnnnnnaacccaagaggactatacatggagtgcagggacagagtgaccaggaggcctttgtccggcaccctgcccacaggctgagctcagccccaggccctttcaggcatctagacactcccatagcctgtcaggctggggcaaggagatcccaggtcacacatactccttggaagagttggacttagggtaagagcggggtgcacggtacccagccttgctctcattcccaggacaggaacaggagagcagtgcacctcccaggatgactagggcagaccctgcccagccaataaagatggcagggccaaactcatacttaatgttggtagggatcaaagggttataaaagtctgtgacaatctgatggccataccaggagcaagctaccaaggcggcaagacctgccacgatgaaaattatgcctccacccatggctatacgggccttcttcactttgtcgtctcccccacagcgcgtgcacttcatgcccatcgtggccacaaacatggccaggaagcccagcaccagggagaccaccattaggggctcgagtggcctgcaaggccgcggacagggcgagcaccgagtcgtacattttgcagctcatcatccccgtgctctgcgtgacgcagtccatccacagcccccttgtacatggcctgggccgtgatgatgttgtcacccgcataggagctcatctgccactgcgggatggcggtgcaggccaccagacccacccagcccagcagggccatggagaagcccagcaactgcaggcccgaattggccatttccgccctcagaaaacactgggggcgccgggcgggagaccctacagtaaaacaaacgacacttggggggcagccccacaaaagaaaacttgaggtggagttttccggtcacccaaagagacaaaaagggtttgggccaggtgaatgcaaatcttgtcaccaaactacacacaaatcgacccctccagtgaagcgatggcctcgcggcacagggagtaggatacgccgggagggtggttccagacaaaattggtggtccccgaaggccaggcggttccctccgggcgctctcggcgaccctaggcaaacaaaaggtggaggggccgtctgggcgcgtttctgagcgccggcaagtcccaaagtatcctgggctgtaggtccgaggctgcggtgcgcagcagaggtggctcggaggtgagccagc

SEQ ID NO: 444615 - DNA, 1034 bp, Homo Sapiens
  misc_feature (115)..(115): n is a, c, g, or t
  misc_feature (330)..(330): n is a, c, g, or t
  misc_feature (595)..(595): n is a, c, g, or t
  misc_feature (656)..(656): n is a, c, g, or t
ccacccagggcgggaaggcgtggaaggggggggaggcccagggtaggaactttgttggcggcttctctctggaaggggcgggggttccacccgttcgctgagcgttgttccagcntgttcagccccgaggggccacaaagccccagtgaggactgaccgaaggctgaactccctccagttgagcgagtttgcaatggacggcagtgaggtcacgcccagcagggacaacgtgccgagggccagcactcccaggggagaggtagatctccattcggccagacctccttcctcccacccagaggtggctcttgttggccaagacctgcttgnactgccaggttggaccaggtcgtagcggtgggcgcggcgcagcggcaagcagaagctgtagagggcgtgcagggcggcgcagaagaagctgagcagcccgatctgctttgggtgctgtagccagtggtccagccagtcggggaagcgctggtacttggtgccgcgccgcagctgcagggcagccgccagcacgccgggcaagtacacgagtgacagcagcacgtaggccacgcacggcaagtgtggtgttgaccacggacacggngcagcttgaagaacttgttctggctttcctgcacatagggctgcagaacgtcccggacganagttgtaggcatagaagcagacgaagagccccagggccagcagggtgggcaccttccaggccgggaggaggcgcaggggcatggcctccacctcccaggctgacgccagggatcccatgtccacgggcatgaagcccatggcgagcgccatctccgagacagcacgcttggcttctggctggtcaccgcagatgggcacctgcctgttaccatcccttgggccagcctgcagggtccaggcagagatgacattgaaggccttgaccactgtgcaagtggggaagagggaggccaggtactcagcattggactcacgatgctgaaggtgctcttgctctgtagggttgctcacatccaccaggatcttgcccgccagct

SEQ ID NO: 444616 - DNA, 1065 bp, Homo Sapiens
gtttttctggggtggccccccggaggagaactaagaattggaagctgtttgtccttaaaaacttgggaaggccctgttctagggctccagcccagaaaaactgtgcagaactctgcaaatggtagagggggcacatggagctcagtggaacttagagaacaagggaggagctggtgaccaagtccacagtgtcttggaggagagatgagggaagtggtttcaaggcaacacgtttttctgggctatatcattccaagagagcaggtgcaaaaggttactttggtttcctcaaagtagagaaagaaaatccagggaagaaacggtaaaactcaaagcttcctgggagaaaattgtagcctagaaaagctcatcttttcccctgggggttcctgtattgcggcagagaggagggggtaggggaagggggtcctgtgtgagtgctgcaaggccatcggttgttcctgggagcttctccagaccttggctttcccccgtcacacgtttacccaaagaagaccagagtctggctccagggagccgaatgtgtaaaggacaggagtttacctgcccctcctcaaggtgtagggccccaagaacagcctctgaggtgtgtgcagtggggaagggttgggcgtaagagatgtcacctccagcatgggggtagcacgtggtcagatgcagagaggggtgctctctcggacactgcccagccttgccccacctagccgagtcacaattcggtatcagccaccacgtgttgtcttgctgaatggccgtttctggaggtggcctggccggtcccgttttcctgagcccctcggttcacactggcctttccctgagcctcaggggaggtcccaggtcctgagctatagccctggcctccaccgttttccgtgtaataagggtcttcgcccagcctttctcctgtggggctccagctgcggcgattcatcaggaaatagccagtgatgcccaagacagccagcagggctcccgaggtgaccagtgcaatcagggtcttttgggaatagctctggtggcttgcaacatcttgctcagtga

SEQ ID NO: 444617 - DNA, 1383 bp, Homo Sapiens
gcagtgctgtactggtcctgggagttattggatctgcagcgccctgcgcgctcctctccccgactcggagcccctcgtgctgcgcccgtgcccatggacccgcctattgagcgcaggagccccagcgcagagaccccaacgccgagacccccgccccggccccgccgcgcttcctcccgacgcagagcaaaccgcccagagtagaagatggattggggcacgctgcagacgatcctggggggtgtgaacaaacactccaccagcattggaaagatctggctcaccgtcctcttcatttttcgcattatgatcctcgttgtggctgcaaaggaggtgtggggagatgagcaggccgactttgtctgcaacaccctgcagccaggctgcaagaacgtgtgctacgatcactacttccccatctcccacatccggctatgggccctgcagctgatcttcgtgtccacgccagcgctcctagtggccatgcacgtggcctaccggagacatgagaagaagaggaagttcatcaagggggagataaagagtgaatttaaggacatcgaggagatcaaaacccagaaggtccgcatcgaaggctccctgtggtggacctacacaagcagcatcttcttccgggtcatcttcgaagccgccttcatgtacgtcttctatgtcatgtacgacggcttctccatgcagcggctggtgaagtgcaacgcctggccttgtcccaacactgtggactgctttgtgtcccggcccacggagaagactgtcttcacagtgttcatgattgcagtgtctggaatttgcatcctgctgaatgtcactgaattgtgttatttgctaacttagatattgttctgggaagtcaaaaaagccagtttaacgcattgcccagttgttagattaagaaatagacagcatgagagggcatgaggcaacccgtgctcaggctgtcaaggcgtcagtcggccagcatttcccaacacaaagattctggaccttaaattgcaaccatttgaaaccccttgtaggcctcaggtgaaattcgagaatgccacacatggagctctggtcccctaaagcctcaaaacaaagggctaattctatgcctgtcttaattttctttcacttaagttagttccactgagaccccaggctgttaggggttattggtgtaaggtactttcatattttaaacagaggatatcggcatttgtttctttctctgaggacaagagaaaaaagccaggttccacagaggacacagaagaaggtttggggtgtccctcctgggggttcttttttgccaacttttcccccacgttaaaggtgaaacattgggttcttttcattttggctttgggaaagtttttaatc

SEQ ID NO: 444618 - DNA, 2744 bp, Homo Sapiens
  misc_feature (20)..(20): n is a, c, g, or t
  misc_feature (673)..(687): n is a, c, g, or t
  misc_feature (784)..(792): n is a, c, g, or t
cgaagaccgagatctaaacntgtcgtatatgagtgcgcagtgcgccacgtggaggcgactagttgtaaagcggggggcatagacgggggtaaacgtgccgatccggaccgttcgcgcaccaggcacccatatgggtctcaggcgggccgccaactacaaactccgctcgacgcaggaccgccacactcacgcacatccccatcggccgcggccagcgaagggtgcgatcgacggagcatcacaatggctggtcgcgcagggctgctacgagacaatagtatcgaatatgccggcgaaaaagtacgtgaggtgcagaaggtaagaaactaggcgagacgcggaaggccggaaggggggcaaagcgaaaaaatatacgcataggcgccacgccccgtgccacacacatacacaagggggttcggcgaaggcacaccgaagcaccgtccggggcgcctcaggtcacacacgtgtaagggcccgaaaataaaaatcgtgtctccgccggacctagaattatcggcgccggtaaaaaggtattacgaatgtgcgggaggatgaaggtggccgatcatacaacaataattatttcccgcggcggcgtcggaaaatcacctgacgaaacgtccggatgggagacctccaggcggtgcgctgctgggtggcatccgcgaannnnnnnnnnnnnnncacgaggatggagtaaggtctggctggcgactaataataaggacccaactaggccggggccggctacatgtgacgccacacatcaggccagcgtgcnnnnnnnnntaggagacaggaatataaggaggtgacgcgccgtggtaggaaggcactgttcgggagatcgtctggagaaagcgacgggcagcagaaagtctcggggggggcacgccccagcagcccctccgcgaaggtgagcgcatcggcggcgaggggcagctcgcgcagccgccggctctgcggcgtgaagcagcccacgacctctcccggcggcgcccccgccaggtccctgcggccgcgaccctccagccgctgcagcgcggacggcggcatctcgtcgtagaggcggtaggacaggttccgcaggacgcacaccgcgttctccacgctcttgtcctcgcatttgcccgcgtccagggcgtggttgatagaggtgaccagggcgtccaccagcccgtggcactcccgcatcttctggcgagtggcctgagaggctgagctgaggttcctgaggaagccggtggcgttgtagaagatctccgcctccgaggcgttctgctggatgagggggggacccccagcccccgacagggggctcaacaccaggtctgtgagctgctccagcgtgtctctggccaggcggtccttcaggtggtcgctggatgaaaggttccacaggatccctgtgacatttttgcgaagctcatcatcctgctcccgcagtgtccgcagcagctcgaagatcccgttctcctccaccagggccagcttgttgtcagcgttgtcgtagatgaggttgcgcatggcacctgtggcatggcgctgcacttcctggttggcgtggttgaagagcttcaccagcctaggcacggcctgaaggctgcgggcctgcttcttggcggctgcatcgctgtagcacttgtgctggatgtaggccgctcccagcacctgcaggttggggtctgaagccatgaggtacttgactgctgagggcaggtcaatgtcatcaaaaccgctgctgagtctctgcagggttcggtggctaccgtagctgttgaacccatgcacgttccggcaggtggcccgagtcagccaggctgaggctgaggctgcgcacagatggcgctcgagccactggctccaggacggcccccggcactgccccgcctaccccgcggctccggtggctgctctggaatcgctgcagggtccgcacggcaggggcacggatggtccggctcggggaaacctcagtggcctcgggccagtccagcccccctgcccggctggagctggagctggcctggcgctcgtacgcaaaggccctgtaggtggaggtggccgcgggctccagctgctcagacaccaggctgtagcggtcgtccaggcccccgggccccagccgcagcgagcgcagggagagtgtgtcatagtcggcccggctcccaaccccaccgcgctcatggaaggacacgggcctggtgggcatgggaggggtgggctgggcacccccgtacccagcggccccaaaggcgctgccccgcttgtgggctgaactcagcctccgactgcagctcagatccacggcggagcgggaggaccaggaggctgggctgtaggccggcttggcgatgggccggaagcccgaggtcttgtccccactcaggccctgagagcgagagctgaagccagcctgcagggtgtggtactgccccctggatgtgcctctggcagtctcggcctcaggctcgggctcagcggccccgttgtgccgcggctgctgtcccagctgcaagaggcgggcgcggacctgctcctggacgcgggctgcccgcagccgctcggcctccggcccctcggcgccccggcggtccagctgcaggtcagagggcagcgccagggagcacacgccggcctcaggcccctacagaggcctccaaaaccctctctggcttctgggaccctggcaccactgccctcgtgcggaattcgccacccaggcctcgctaccttggacc

SEQ ID NO: 444619 - DNA, 2076 bp, Homo Sapiens
  misc_feature (868)..(868): n is a, c, g, or t
atgaaactttaagtacataaataaccactctttcctgccctggttgaggccgcgctgggtccgggaaatatctgctttccaacggggcacctgggtgggagccttccaagaacttcagctcagcggttcccagcaagggttcgctgagtctctgtcctaggaggtccgagctgggtatgctgtgcggacgcagacactgcgggaaggaaacaggtgtcccgcggcggccaaaccttcgggcagcagcccaggtcgccttgctcaccccaggcggtctcatggcacgggcctctcgaaactgtgggcaagaaagggtcctcgtgagaactaggctcagaagaagagcgggggcggcgccacctcggggggagcggaccaggctggggccgcaagggcggcgtccggggccgcgtgggcggcttcgccgtgaatgagctggtgccgcaccaggtgggtcttgcggctgaagctctttccgcactgcgggcaggagaaggggcgggagcctgtgtggatcgcctggtggcggactaggttggttttggagctgaagctgcgggcgcagacggcgcaggcgtgggggcggctgccagtgtgcaccgcctggtggcggcccaggtgcgacttgcggctgaagcggcggccgcactgagcgcaggcgaaaggcctggcgccgctgtgggccctggagtgggcgaccagattaggccgcgagccgaagcggcggtcacactgcgtgcaggcgaagggccgttcgcccgtgtgcacgcgcgggtgccgcgccaggtgctgcccatgggagaagccgcgcccgcagtccgggcagaagaaggaccgctcgcccgagggggcgcgctgggggcaccancgggatcgggatcctgggccgcagccccggtccgccaggcgcgctggccaggggcttggcggcgggggcatccacggtggcgcccagtgcgcactcatcgcacccaaagggggcgaccctcgctgcggtgcagacactggtgcgtggcgaggttctttttccagccgaagctcaagccgcagtcggagcacgcgaaaggctttggcccgggaaaggatggggtcggggacggggcagtggaatgaggagaagcggacgagtcgggagagggcctggccgggccggccgtctggtgcaccctttggtgccgcaccaagtgctgcttgtgcgtgaagctgcgtgggcactgtgcgcactggtagggcctctcgcccgtatggatgcgctggtgccgaatcaattgcgtcttcttgcgaaagcgcttctcgcattccgtgcaggggaagggccgctcgccggtgtgggtcttttggtgcgagcccaggtggatcttctggctgaagcgcttgccgcactccgcgcacgggtagggccgctcgcccgtgtgcgtgcgcaggtggcgggtcagatgggccttcttgctgaagcgcttgtcgcactcggagcacgggaaaggccgctcgccgcggtgggtgcgctgatgcagtagcatgtgggcgcgctgcgtgaagctgcggccgcagtccgggcaggcgcaggggccctcgccccggtgcagccgctggtgcagtcgcaacgtcagctggtcccggaagcgccgctcacactccccgcagccgtagggcttctccggcatcggaccccacccagacagcgcgagcccactcagtgcccccggggcccctggctccagtttgtacgcggcagccagatgccccaggtcaggcgcgggaaaggggctgggaagtaacgatagatgctggggccattcgacctcctcttctgcctcctgatcttcgtcctccaccttcaccttccgaatcatccactcctctcctgggcaggtacccacaggctgagccttctgtgctgagcacgcctggcctctgcagggagcctcggcttgttctgtgtgggcaccttcctccggtgtaggggcctcgtgccctgagcacacccccagtgctctctcttccctagaagaggacatctgctcctgggcattatgggatccttctctgggctcactttggggggccatctctggc

SEQ ID NO: 444620 - DNA, 776 bp, Homo Sapiens
atcaggccaaatcggccgagctcgaattcgtcgagagcggggttgtcaataaataatgttttcaaaatgagtagtgtacagaagatgatgcaagctggcaaaaaattcaaagactctctgttggaacctgctcttgcatcagtggtaatccataaggaggccactgtctttgatcttcctaaatttagtgtttgtggtagttctcaagagagtgactcattacctaactcagctcatgatcgagaccggacccaagacttcccggagagcaatcgtttgaaactccttcagaatgcccagccacctatggtgactaacactgctaggacttgtcctacattctcagcacctgtaggtgagtcagctactgcaaaattccatgtcacaccattgtttggaagtgtcaaaaaggaaaatcacagctctgcagaagaaaacataggacttattgtgttcttgtctaaccagtcttgttttcctgctgcctgtgaaaatccacagaggaagtctttttatggttctggcaccattgatgcactttccaatccaatactgaataaggcttgtagtaaaacagaagataatggcccaaaggaggatagcagcctgcctacatttaaaactgcaaaagaacaattatgggtagatcagcaaaaaaagtaccaccaacctcagcgtgcatcagggtcttcatatggtggtgtaaaacaagtctctaggagctagtagatcccgagggatacttggaaagttcgtcctcctatacccaagcaaga

SEQ ID NO: 444621 - DNA, 1081 bp, Homo Sapiens
  misc_feature (122)..(122): n is a, c, g, or t
ttagggagggagcctgggggccagagcttggagggcaggaagagagccactggacagacaagctatggtttggattggggaagagattaggaagtaggttcttaaagacccttttttagtanccagatatccagccatattcccagctccattattcaaatcatttcccatagcccagctcctctctgttctcccccttactaccaattctttggctccttacacattttttatccctcaaatattcatccctggcccaaccagtccccttgagcctccctctggtggagactcctccaccccatgagctccccagagcatccaagacagagtgcacagagacctggggaaggaagctgaactttgcagagatgtggacaggtgcaggctagggtacagggtggtggtagaggagacaagttttatttccaggcccacagtctctccccaacaccccccaagaattccagagggagttctcagtgcccccggacaggcctctccagcttcacactcttggccgcttctccaatcagctcccagaaactcctgaactccagtttagagtcattgcagctgcccaggttggcaattttctcttccaggccacagttgctcggcatgagatggggcagctgctgggtgaccaggtcccgtagctcagaaggggtcagcgtctccttcccaccctccacggagtactggtgaaagttcttgatgagggtctcaatggccctctccacatcactgaattcctgagcatcctctgcgttggctgaccgacactgtcccatggtgctcactgtgtctggtcctttggtgagagttctgttgtcctatagctggccccagaggagctgatggctcatgatctgttggcagccgctgagacaagacaggaggagccagctcacctgagctcagctcttataccagtcctggaggcagagagatgaatgtagagaacttggatcaggaggaagccagagaagggcagcctgatggagggaggcagattgagtgagtgtttgcctgacctcccttcagctcccctcagcggcccagagatcccaggaattcc

SEQ ID NO: 444622 - DNA, 1271 bp, Homo Sapiens
  misc_feature (1081)..(1142): n is a, c, g, or t
  misc_feature (1162)..(1174): n is a, c, g, or t
  misc_feature (1177)..(1192): n is a, c, g, or t
  misc_feature (1210)..(1220): n is a, c, g, or t
gggtccggaattcccgggatcgaaaggagccgggaggcgctggcggctccaagagtctctgtgtccctggcagcggacctcatcttccctcacgccggagccccgatctctgcgccccggcccgacccagctgcgctctgtccgtctaagacgcgcggaaactacaactcccagagctcatctcgccgagatccggccccacgagtcaggtggcggaggtcaggtgacagcggacccgcctctcccaaagtctagccgggcaggggaacgcggtgcattcctgaccggcacctggtcgaggctcatgcgtcccgtgagggcggttcctcgagcctgggggcgctcagattgctttggagacgctgagagaacctttgcgagagcgccggttgacgtgcggagtgcggggctccgggggactgagcagcacgagaccccatcctcccctccgggttttcacactgggcgaagggaggactcctgagctctgcctcttccagtaacattgaggattactgtgtttgtgagagctcgctaggcgccctaagcaacagagttctgagaaatcgagaaacatgataaggaattggctgactatttttatcctttttcccctgaagctcgtagagaaatgtgagtcaagcgtcagcctcactgttcctcctgtcgtaaagctggagaacggcagctcgaccaacgtcagcctcaccctgcggccaccattaaatgcaaccctggtgatcacttttgaaatcacatttcgtttccaaaaatattactatccttgagctccccgatgaagttgtggtgcctcctggagtgacaaactcctcttttcaagtgacatctcaaaatgttggacaacttactgtttatctacatggaaatcactccaatcagaccggcccgaggatacgctttctttgtgatccgcaaccagcgccctttagcttcttaaacccggggatgactgactacttgggccgggcattcctttacccccggagactaaatggggggaaagggcttggggtaaatttcaatttggggttaaaaccagggggtttgggccaaaaggaannnnnnnnnnnnnnnnnnnnnnnnnnnnnnnnnnnnnnnnnnnnnnnnnnnnnnnnnnnnnnccgggggaaaccccccctgnnnnnnnnnnnnnaannnnnnnnnnnnnnnncggaggggggggggtggnnnnnnnnnnngaaaatatttaatttgggggggggggtcgttctttctttataataaaaaga

SEQ ID NO: 444623 - DNA, 1230 bp, Homo Sapiens
ccctcactgactccctagctatgtaaggtaagttcaatggctctccgacagaaggatttctttgctatataattcaccactaattcagaatcctcctttgtgaatgcattcccagactttgtctcctggactctttttctgatgtccaaggagatgtataaaaccaaccctatctatataaatccacaaaagcagccaaagatgatgagcacaggatctgcgttgccaggcgccggagttgaagagggggcataatctacccaaccgtgtgcagggataaatattttcactggatcactgaagggcccaactccccctttggtgacggctgcaatcctcatctgtgcacgtagcattgtggacttgaacagagatccgagctcggctgccattctggccaacttcctccaagagctctttggaaatccctgcactctgccacacgtgggatatccggtagccccaccagttctccatcctgtctgcttagtcggaggcttcatccatctgatgtccacattatcactagattcattcagaaacacagtgacatttcaaggtgctactgatggggctccttcagtcgtgctggctagaatccaagggctcactgcagaccagcctatttcattcctgcaggaaacaccaatgctgtaattagccagggcttgcagctgcttgatttggtacagatgtggtaaggcagaggtgttaaaaatcatgactgagccattactcagcggatcagcttccttgacctgaatgctgcaattcctgaacggggagtatccatcaaaaccaggaacccaggagatcagaatgctgtgtgcagtgctgttacggatgctgacttcagttggtggggagggaattgctttgatgttgatctgcactcccttggacacggtcagccctttgtcattgtgggcctcacaactgaagaccgccatctccgtcaggcctggaacagttagcacggagggggatttttcaggctgttcgttaacacggctactgttttgaacccagaaaatgttgacgggctcaggcgggcccacagcctgacaggtgaggttgaaggctgtgtttctggtgacattcatgctctcaggctgcttagtaaagtgaggaagtccttgtacttcgatgtagatgggatcagacacgatctcttcattgtttattttcatcttacagatatacgacccattgtctgaacgctgcacactg

SEQ ID NO: 444624 - DNA, 964 bp, Homo Sapiens; identical to SEQ ID NO: 155046
  misc_feature (68)..(68): n is a, c, g, or t

SEQ ID NO: 444625 - DNA, 1454 bp, Homo Sapiens
ccatccaggtaggggctaggcttgttagtagggggcataggaaccagtggaggtacggggtctccaggccccaaaagcatgaagggggtgtatggataagaagggaaggggttcagggatccaagaggagtcttgtagcccctcctggttaggaggaaacaaagaagaaaaaggggaatcttagcctgtcctatatatgccaatattgattatttttccaagtgcctccagctgactctgagtcttacacattcaaagatccattcttctctggaagattaaccagacaccctgccacatcttgaccattctagatggtagaaactatgggagttagaggtaagtgtccttattggcttcctaccacatacccccagatccttgacagatttggatattgcttgcctgctctgttacttccctaggatcctagggttccagtttcggcctagaaactatagtaacagacaccagtgggagaatacctgcctctaggaaacagtggcccaggcccccacctgaacctcaggaagacaagctgtacagttgcttgacccaaagcatatagctatatagggatcaccaggaactctacccaatcaccttccccacaggtgtgagaggagagtaatggagtccacgttgctttcataccatacaaccatgttccactctaatctccaaagaaatctttgttattaaagaatggaaaccccttatgaacctcttctatgagattctacaatttctggtctagatgtgcttaccctaaaattttacgaaaatgtaacaggttgccacagcagccttctaggtcagaacctctttttaccttgagcttatgttccttcctgttaataatgacggctgtgatctgctgatccatgaatatcaagatagtacagagaagagctgggataattgcagctatcacagtccaccagggattggggccaatgggattaataatccatccgcgatcatcccttgttggcttgaacacactgggaacttgaagctttggtgatgggactccaatcaaaaaatcaataatcaccattgtgaagatagtgaggaaaacagcaaagtcactcaccatggagcgtactctggttgggaaataacggctcgtcttaaacgtctttaaggtgcttgagaggatgaaggtggtgaaaaagagaatacaggaccaaaagaggacatcaggagtgtagggtccatgatggccgcacgcagatcccatgaactctccatgcatctcctggcattcactgacagtcaggttagcccagtggacttctgctgtcacgatgttgtggtccttccagtactggagggtgtgattgtttggattctctggcagagtacacctgcagtaatagaggctaaggtggtccagctggctgtgcatgtggatggggtaggtctctgccaggtgaatcagtttttcatcc

SEQ ID NO: 444626 - DNA, 1380 bp, Homo Sapiens
ttgattttctgaccataatttattgactccaatgcccaggccacaccaccctttgttataggaggcttctgcctagactttggccgggccatccctcatgcctgtgtggggcccctgcaggagaggggccggggcaggtggtcttccaggcccccttcctggcattctgttaccagacctcaacctggcttggagggcccaggtttccttgttaggccctgccccgcaccaggcaacgctaacacaggatgggaggcttaggctaaggcacatttacagtagaggggccaggaaatccgaggctcacgttccaacgctgcagtgcccaccatgtgagatttccaggaccgtcggtgcagccactgagccgtcccttctacaagccagaggtgttccctgcccgctgaggacggaaggagactcatggggccagaccgcaggccctgactgcacactcccgtttttggcagggaaactaaaattgggggagggaccccccaagtctcatatgcacacaccctggtgcccctcctttgtccccgttctttccttccatggcaggggctacgtgggcaccgggcgcttgtcctggaagaagcgcttgagcgtgcagacctgcagcacagccaccagcagcagcaccgccacgttgacagctgaccagaagttgacccgctccaagttgccctcttgcaggttgcggtcacgtgcctcgaaggcccgcagtagcgtgagcatctggatgctgcgctccagccgggtccgcatggtctcaatggactccttgatgtcctccattttaacatccagcatctcctcgggctccacagcctctgcccatccttcgacctcctcgtcatcctggaggctgtcaaagatcagttcaaagaacaccagcttctcggagatggtgctgaaggagttgtcaaagcacagcttgtagtccccggcctccgttggctccaccgtgtgtaccccatcagccttgcgggactcgctgaccaacagcacgccctgagggctctccagcgtgaagtccacgtccagtccagcacctccgatcacctggtattcggtctcgaggcttgcgttggccggcgcggactggtagaaacactgcttcctccccgccggcaacaggaacgtgaactcaccgtcctggattggcgggggccccgcccctcccacctccactggtggcattagtagccacaaggccagggctagggccgcgccggccgccatcatccgggtcaccctctggtctgcaaaggggtcgcggctcctttaagcgctagccctgccccggtgctactcggcggagctcattggcagtggcttctgtatttgtccgtaaccagagatcccgggaattccgga

SEQ ID NO: 444627 - DNA, 1042 bp, Homo Sapiens
  misc_feature (117)..(118): n is a, c, g, or t
gggggaggacctcccagccagggtctccacaaaacatttcgttaaacccccctgcttcagagagctctggatgaggcaggttcagtatgggctgaggggcggaccttagattcctanncggaagtttagaaagtgatccaatccccagtttttgccttcagaaaggccaagttgaatccatttttctgccagggcaactgaggcccaaagctcaagaagaacctggcagaacagtagaagacaatgtctcttctgaacacttcaaaggtaatcagagctggagatactgacaagtcagtattaggttgacctcaccctacccctaatgtccacccttcaaaatcccctggcttccctccccgctaaagtccaagccagtgcccacaagcaagcttcacgcgtagaactcattggtgggggctttcttgtagatgggtttcttgcccaggtcatagctgccttcatccttcttcttcatacggtacatgagcagtaggatcaggaagacggcaaagaggatgcccacgatgccacccacaatcagagctgccaggacctccgttctctcaaagatgttgctgccctgcacagtgctggacattgacaccttgttggacacatcctcactctcttcaacgggtgagattctcttggggataacctcattctcctctagtttcttgggttcggtggggacttggctcccagaccctgccctctcagggatatggttatctagaggcaccaagggatggacaacttcagggccgatcatggagtcttccaagtcatccagatctccagagccagacagctcaaagtcatcagattcctgcccgggccccactacatcctcatcgtctggtagggctccggagaagtatcggccttctaggaggtcctgggggtcgatgacctcagtctctcggatcgactcggcgactccgcctacgaagagcagcagcagcgcgaacagacgggcgggggccatggcaccgcggactggagaaggcgcgcatcccgggaattccggaccggtcca

SEQ ID NO: 444628 - DNA, 1526 bp, Homo Sapiens
  misc_feature (833)..(870): n is a, c, g, or t
  misc_feature (1473)..(1473): n is a, c, g, or t
ctctccttttatctagacatatacatatttttacatcatctgtacatagagaatttgaacccacacaacattctgaaagtaattactgttccatcattatctgaaaagggagaggggttgggggaaggggtcgctaccaagtctactggactgtcttcatggcatcactgtaagcaaacccctgacatggcagtggtatgtcctctgtaacacttgataagaggcacagaaccactaaaagttactaacatcattagtgcctttctgattccctggaggtcatttcatagctgagcttcttaatatttggcaatatattctttttccatcaaaaaatatccaggcacctaaaacactgtcagaactggctgtgcccctatgatcacctccctgcttggctggtatttaatgtacatctgtagcactaggcagcattttctctgccaactaattccaggaactagaacactcaatactgcatctcatgaaactgctggaactttccctcctttcctcaggtcatctgagtaactcttaatgggccatccccttccttcccttgatgtcaagagaggaagcacgtgtgctactgtggttgaaccttggaagggtcgggcaagctttcagtcttgtgccggctgagttgctgctgttgcttgggactgaatgttgctggtgatgtgacctgagggaaggtgctctgttgtagaggaactgccgcagagagaatgagtctgagttgagggattcccatggagcaccctagaagtctgtaaaaattgttgcggtggctgggtcagctgagcctgagatggttgctgaactgaagtgannnnnnnnnnnnnnnnnnnnnnnnnnnnnnnnnnnnnngttactgacaatgtctgtgactgttgctgttgtgtagcaaaagtaggatatgcagtcaccacctggcccataagcatagtactaggtaccatgactgccccacaagctacaggagcagtcactaatttggtcacaagttgttgaccttgagaaaatcttatctgcctgtcctgagtgaatgtagttactgcagcactctgggtgctgttttgtggcatactagatggaatctggaccatgcttccggctgcaggctgagaaatcaccatagtgttatacagtggggctgtaagagtgctctgtgtctgactgggtagagatgtttgctgactgtgcccactcagtacattttgttgactctgagttgatgtactctgtaaagtctgttgttgtatcatgtgctgagttgtgccaatgtgtccagtattcattccactttgaatctggttagtaggaacaacttggccttgcatatttataggtgcaagttgctggatgttagatgaatttccagaagaaagttgaacggaaccaaaattcaacccaggatttgattgttgcaaaaacatctgcagcccctgaccatggaccatctgaagttgntcttgaatgtttcttagttcttcttggtgccgatgaatatttgcttctatcat

SEQ ID NO: 444629 - DNA, 881 bp, Homo Sapiens
  misc_feature (44)..(44): n is a, c, g, or t
  misc_feature (152)..(181): n is a, c, g, or t
atctcgcgtctgtcggagattttctttgtgttttctttttcttnttgaaatgaaaggcctttttattgaaaaattttgtgcagccaaccccccatggcccacgtttacttatgtaccaaacctgcccatcctgcacatgtatccgggaactnnnnnnnnnnnnnnnnnnnnnnnnnnnnnnctcagattcctctcaattttcagtccttgcatttaataatttcttaatcatttcccttccaacttttagcctgcacgagcatgtgtgaagcacagaaatcataccacatgcaaaaatctctaaaatatcttatcatctgaaggtactgggggatttcctatcccatctgaaatccgagctaataaacaccaaaccctaagtggcaaaaaccctactttcagatggtattgtttcctcaatcccagaggtagactcaaaactaatttgaaacctccctggatagaagagaattggcagtcctttccagctgggagcacctgctagtaatggaggggcctctgctgacagtgcttttatgaagcaggatggtttgtgaatttaccaacagtgaggtctcagacttgaccagtttaggattaccgtagacccaggagtagttctagactggaatctagatagttttcaggatggggaagatagattcaaaaccacctaagggcattctgggtacaaagcattgtgcaaggctttggtgatacagagaataaggtcttttttcccatacttcctcatctgccaaggttatctccaattgtacctttctctccagttccaagcttgcatcatgaagatggtgtgtgggaaggccatgacagatgaatccgacacatgcagctcccagaaaacagaagtttctact

SEQ ID NO: 444630 - DNA, 1333 bp, Homo Sapiens
  misc_feature (54)..(62): n is a, c, g, or t
  misc_feature (174)..(174): n is a, c, g, or t
ttttttgaaaggacccgaaagggggggtccaaggggtttcccccaaaaagtttnnnnnnnnnttttggcataaaggggtttaataagccccaagggttgaagccaaggcatgggggggcgaattcttggggcccatgttccccgccacccaaaatcccccaaggggaatgtggnccagttccactttggagaagcgctttccagggtaaaccaggcttggatgaacctggtcccggggaccggctcgatcttgggacagggagacaccaccggggcttgccaatgaggtcttcatggtggaggacagcgtcgctccaggcgatgccgaggaagtcgaggatgagcttgagtgagcgcctggggtgcagcaccagctgctcgtagtacacaggcaggcacttctccttgcctacctccatgcactgggcgtacatcacctcgatggccttgttccacttggtgaggcagtcacggtagctgctgaggtcaaagcccgcaatggtgactttgcgcgtgatcatggagtgcacggaggcccggccgtcccgcaccatcagcaggaacttggagttggggaacaggcgcgacaggtagaccgaggacttgagcgtaaatgggtccttgttgcagagcacgcgggccggctctccgtgcttggcaatcacctccaggatgaaggcctgcatggcggcgtccagcacctcatccgtcacccccgcctcatccagccgcagcttctcacggccagacttggaccaggcctggcgcatggccagcacgcgcgggatgatgcgggtctcctcgccgcagcgcacctcggggtgggcgtccagcatggcgcgcatcaacgtggtgccactgcgaggcacgccacccacgaagatgagcggcatggccttgccatagcggtattccacgtggttggtgcccaccatcaccagctcctcctgctcaggccgcatggccccccgggggctccgcaggcccgccagcaccgcccggcactctagcacctgctgtcccagctgaaccgccagcaccaggaccagggcgcagccggctgccagcagcaccctccgcaccgacaggcgcatgctgggccggaggcagggtaggcctggcctgagggcccgcttctggggcttcagcgacaggttagcgggcagcccgccaggctcacatctcccttgggcactctcatctctgggctccagcccttgtgcctgtgtgccaaggctgtctgctggcagagcccgtggcgagacgcggcgaggcagccccacgcacccagcgactcccggctctccagccgccccagccgatcccgggaatt

SEQ ID NO: 444631 - DNA, 582 bp, Homo Sapiens
  misc_feature (519)..(519): n is a, c, g, or t
agagccgggagtcgctgggtgcgtggggctgccttgccgcgtctcgccacgatgtgagcctggcgggctgcccgctaacctgtcgctgaagccccagaagcgggccctcaggccaggcctaccctgcctccggcccagcatgcgcctgtcggtgcggagggtgctgctggcagccggctgcgccctggtcctggtgctggcggttcagctgggacagcaggtgctagagtgccgggcggtgctggcgggcctgcggagcccccggggggccatgcggcctgagcaggaggagctggtgatggtgggcaccaaccacgtggaataccgctatggcaaggccatgccgctcatcttcgtgggtggcgtgcctcgcagtggcaccacgttgatgcgcgccatgctggacgcccaccccgaggtgcgctgcggcgaggagacccgcatcatcccgcgcgtgctggccatgcgccaggcctggtccaagtctggccgtgagaagctgcggctggatgaggcggnggtgacggatgaggtgctggacgccgccatgcaggccttcatcctggaggtgattgccaagca

SEQ ID NO: 444632 - DNA, 1435 bp, Homo Sapiens
  misc_feature (30)..(30): n is a, c, g, or t
  misc_feature (56)..(56): n is a, c, g, or t
ttacagtcatttatttaaaacataaacttnccaatttctgcagctttttatttggnctatactaatgcctcacaaaggcaaactcaggttgctagagttcctcctgcctggtcctcagagcaataccacatctattttctgaactcttcaggaaggattcaggactgctggccaagacttccaatggcagtatgactgttcttccactgttatggccttgaagagagaaatcccctcctcctctgaatgatagtctcatggccaacattcttctgagaggactcttccatgctcacaggcacatcatgctgattttaaaaaaggaaagttggagagaaagaaagcagagcttctcctctgtggggaacagcttcttcatcacagtgcagttatggatatgttccctccttatccccctgaagccaaggcaatagatctgaaggatggtgtcagacatcataatcgggagccttgccctgggcttgccttagccagatctgtagtgtaacaaatgctcccacagtcacatgaaagaaaagctgccagaggttgcgcagttcatagagatacatgttgcatagacagattaagccaaaagtcataaaaagatttgacattccgccagccggtgtagtagacaagtaaataacactggtaaaggcaggctgctgttccaaggaaaaatgcaatgatgtaattgaaaatcatcaccatcactctgcaggagactttctatagcatgaaagcctcgaattaaattcagagctccacataaaagactaagggataaatcctacaatccctgacagagttgctggttccagtcgctggtgagcagaagaaatcttaccagcacctttacagtcaacagaaaatgctgatgtgactccattggctgaccccagttcgcacatggaaatttgataaggaggcctcagcttgatttccgtctgcatgtcagaaagatttatctttgttgaaagagacctgggattattatatcgctgcttggtcctctgaatgaagttatcaaattcaatgaaacagtatggtctgacagcagtatttgtcttcatcatgttataagtagtaatgaactccttctgaagctcatccaggaaagagaaggcgagaacatttgggtaattttcagtgcacaacatcatgtagctcactcccagagagctaataaaattaatgttataatgtccagttttcagtgtacatctatcaggaagttgagcaagtttcctcgaaagcattttaaaatactttctgcactcctgcattcctgtgctttgttcataatcagtagaagcagaaagtggcagtccatctctgacacgaatgactgaggcagataaaatcatagacatttcaaccaacagagaagacctgtcgagacgggacccgccgctccgagtgacgcgccccg

SEQ ID NO: 444633 - DNA, 541 bp, Homo Sapiens
  misc_feature (18)..(18): n is a, c, g, or t
  misc_feature (467)..(467): n is a, c, g, or t
  misc_feature (506)..(506): n is a, c, g, or t
ccccccaagcttggaacnaggggcttttatcgttatgtcagaacttttccccagtggttttcctcttttgagtggaatgaaattgatgggggtggccaaaatgaagaggaacacttgtacctctacctcacactctttaggtcttagaatgtgctttatgttttcattttaggactcttgagaatttctatataccagtgtgtgacaattttgactgtttgtaaatattgttacatcctatcttgatggattgtttctggaaatgggctcccaccggaaacaaaaataatcttttattttgcttttgcagagtgatggtgatgattttaattacatcattgcatttttccttgggaacagcagcctgcctttaccagtgttatttacttgtctactacaccggctgggcggaatgtcaaatcttttttgacttttgggcttaatctgtcctatggcaacatgtatcntctatggaactgcggcaacccctgggcagcttttccttncaggtgaccgtggggagccattgtttacactacag

SEQ ID NO: 444634 - DNA, 1017 bp, Homo Sapiens
  misc_feature (467)..(467): n is a, c, g, or t
caatcatcatcggtttaatgaccacgtggcatgactctctggctatgtacatatatacacatattcacatatataatatgtaaataacttttgtgtcatttacacacccaaaaagtgtgcaagatgtgagaggctggcagcccacattattactatcgagaaagaacatttcaaaagccgagttctcctaacacacacgttctctgctcgcgcctcctaggctccgcagggtgggcaacttggcctcgcaggcacagcccgttttcccgctgctctctaatcctccagcagcagctccagctcctccagcggcaggcgcacccggagctccttctcagtcatcaggtccaggatctcctgcatctcatcgggggaaatacttcacgggcgtccgggtacaacacctttgcccaaggggaattctgaagtgctttgtagaatacacctttgcttctttctttatttcntaaggaaaccagaaagttcaaatacatcctccacagcaaggggcactggctgccactgtcgctgcgcatggcattttcaaacagggcttggatccgatgcattaagccggtctcaggaattgtggcgtggatctctctaccgtctaacctctggacagtttccaccagtctcttcctcagtttctcagcttcaattgcaaacaaccaaggctccaagggtttggcagacctggtgattgtgtcaaaaaatctcctggttttgctggcactgtgggacttattctgaatctgtacataggacctccaaagaacctggttgcctggatacaactttaaagcctgtgagagtgcctctcgcagaggggccagcgggtaaacactcactttcatgtggaatctcagcaggctcgtgtgcatcagtgtgatggcttcgagaacactggtccaactctgggagctggcactgtccccctcgccagagccttctgggaaaacagaactgttcagttttgcaaacacctgttcgtatatctgcacagcagcatcaatc

SEQ ID NO: 444635 - DNA, 1328 bp, Homo Sapiens
  misc_feature (1037)..(1038): n is a, c, g, or t
  misc_feature (1313)..(1313): n is a, c, g, or t
ggcctgggtggcgattccggcacgaggctctgtcctggaaacatgcttcaagcgggcttccccgaaaaccttccccgcttctggatatgaaattcaagctgcttgctgagtcctattgccggctgctgggagccaggagagccctgaggagtagtcactcagtagcagctgacgcgtgggtccaccatgaactggagtatctttgagggactcctgagtggggtcaacaagtactccacagcctttgggcgcatctggctgtctctggtcttcatcttccgcgtgctggtgtacctggtgacggccgagcgtgtgtggagtgatgaccacaaggacttcgactgcaatactcgccagcccggctgctccaacgtctgctttgatgagttcttccctgtgtcccatgtgcgcctctgggccctgcagcttatcctggtgacatgcccctcactgctcgtggtcatgcacgtggcctaccgggaggttcaggagaagaggcaccgagaagcccatggggagaacagtgggcgcctctacctgaaccccggcaagaagcggggtgggctctggtggacatatgtctgcagcctagtgttcaaggcgagcgtggacatcgcctttctctatgtgttccactcattctaccccaaatatatcctccctcctgtggtcaagtgccacgcagatccatgtcccaatatagtggactgcttcatctccaagccctcagagaagaacattttcaccctcttcatggtggccacagctgccatctgcatcctgctcaacctcgtggagctcatctacctggtgagcaagagatgccacgagtgcctggcagcaaggaaagctcaagccatgtgcacaggtcatcacccccccgggtaccacctctttcctgcaaacaagacgacctccctttcgggtgacctcatctttctgggctcagacagtcatcgtcctctcttaccagaccgcccccgagaccatgtgaagaaaaccatcttgtgaggggctgcctaggacatggtctggcnnaggttgggcctggatggggaggctctagcatctctcataggtgcaacctgagagtgggggagctaagccatgaggtaggggcaggcaagagagaggattcagacgctctgggagccagttcctagtcctcaactccagccacctgccccagctcgacggcactgggccagttccccctctgctctgcagctcggtttccttttctagaatggaaatagtgagggccaatgcccagggttggagggaggagggcgttcatagaagaatacacaggngggcaccttcatcgt

SEQ ID NO: 444636 - DNA, 1179 bp, Homo Sapiens
  misc_feature (100)..(100): n is a, c, g, or t
  misc_feature (166)..(215): n is a, c, g, or t
  misc_feature (332)..(332): n is a, c, g, or t
  misc_feature (398)..(398): n is a, c, g, or t
  misc_feature (982)..(990): n is a, c, g, or t
cacaccaggaaaagttttgtttgcccctgtaaaatttataccacttttggggtccattccaagttccaaaggttttttgggttggtcaaaccacaatagnttttgtgggcccatggaaaatccatggctgcaggaaaccagccttttgaaacatcgcatccagggnnnnnnnnnnnnnnnnnnnnnnnnnnnnnnnnnnnnnnnnnnnnnnnnnncttgtttaaaatatttcggttgcactccactaggcacaaaagttcatattttggggggactgtagagagctttaagtatacagaggggactttacgacatgacatctctaagggaanccgttctcttttgacctcattagcatgacgtgtcctgcactatgctgaggaaagaatgtgcagagnagagctccaagttctctccacagaactccagggcagtcttcctctggtttgccatatctgggtcctccacacactcgggagctttggtggccatggtctgggtcactgctaggctagagggggtggtctctttgcccttgatgtgctccctgggggacatctctgttttctccttcctgggctttgtgttcccaaatagagtggagctgactagcttaagactggattctggaaaatcctttctgcacactctggttttcacagctgtcttggaatatctacagatgtctttctgtgagcgcagattccgggcaacttgtttccaatagactctctcatccttgagctttaggcatgaggttggattgccagcaaagacacaggaaaattcatggtccaattgagtgcactcaaccttgagagagatgccctcctcctgctcagtagcagcccatctgcagttggcttggtctttggtgacaaacttgcctttgttcccgggcctgcttttctgcttaatctgggtgttgcccagagtgtccttttgttctgagaccactttgctgtgaagtccattcttcacnnnnnnnnncccctccaccaggagcacctgagcagccagtaggaggaaggagagcagggtgaggctacagatcttcatggctgcagctgggcgttcaccttgttctgagcacacggatccagtgcaatcccaggcagtgggagtgaattgcaggctgcagctgtgtcaggtagagtgcagaagggcgccacccaggcc

SEQ ID NO: 444637 - DNA, 2007 bp, Homo Sapiens
  misc_feature (217)..(226): n is a, c, g, or t
  misc_feature (500)..(508): n is a, c, g, or t
  misc_feature (648)..(744): n is a, c, g, or t
cggcggcgggggggaagaaaatagtttatagtgtggttccggccaccaactcccacggggggggatgtattcgccccctctgttggagttcatagcgcggcgcgcaatataggggaaaaatcgtgttgttgttaccacggggtttttcgccgcggggaaaaagagaaattatattggcgcgaggggggcgacaaggggggtgtggatatccgccccnnnnnnnnnnttgaaggtttcaactcaatcggggggcttcgtgaaaataaaactttacccacggcgggcggccgggaatgcgctttaaggggacgttttcccccgcgttgggctgcacatataaattttcccacgctggggcgggcgggcgtaatttttgtattttcggaggtctgcgcctgggggatcccccggtcggtttaggatccccgggaaatggcccccgggaaacccccctctgggaatttttttccaaaaggccctcgtttgccgcgccggggggnnnnnnnnngggggaaaggccccaaccccttattttgggtcccgggtttccggggaaaaaaattgggaccatgtttccttcccttatgggcccgggccgcaaaagaagggtttgaaaaattttttgagggcggagggggcccccaaaannnnnnnnnnnnnnnnnnnnnnnnnnnnnnnnnnnnnnnnnnnnnnnnnnnnnnnnnnnnnnnnnnnnnnnnnnnnnnnnnnnnnnnnnnnnnnnnnaaatataagaaatttattaatattattaattgattaataattgatcactgccatatgacttggattttacatttccaccacttcttcgtgttacttctttctaccctattatatcagcgtcccatcccaagtctgacacacctggaagtattgaatgttgtattttgattgtggatgacttgtttatttggttatatcttttgaacgcctcaggtgattctgtctgtctttggaggatgggccataggcttcctgccccaactccattatctgttttccacaaagatagataaacattcacttatcagactaattcagcaaagcatacacgttcttaggttcttagcaaaccaagtactttgtccacctctcctctccatctcccctccctcaaatcttcagtgggcagatgtgggagaagaaaggagctgtcactccaaaccttctggtgtttcagttggggagtctggcttcacagtgagctgaaactttcccttgccagcctccatcaatccagccccttctgacggggctggagagtaattaacatcgccgtccacctgtgcacaggaagatgcctacagccacaccagcaatgatgaaactgcccaccaggacgcccaggaccagcgaagtgtaggagcggcttgtttggctccctttcgtgttttccgcggaaatatgtttctgcacatactgcacacaggtgtcctccaggaattcccgcagttcataccgagtgcggttgtaggcattgagctgctgcagggtgaaggtgaccactccggaggtgacctgggtgtctgcctgccacaaggctctctccggccggaaactcacaaaggagctcccattcacagccactttgaagaagacatgggctctagagccctcgggaggcagctcacagcccaggaagcagcggatggtcagaggaaaggccaaggtccgctcctggtgcaccaggcgcacgaggccgtggaactggagcaggtaggactgcaggccactctgcgtgcgcgcccagctctcgggctcctgcaagggctgcagctgaatgatcgtggtgttggtgtctgggccttccagcacgtgcgttaggtgtccccccagcgacgcgttgccctggtaccacacgtgataggggtcgcggaagtaggagatctggagcatatgaagtctttggaggccatctgaggcgtcttggctacaaaaggcccagccagacagcagcagtatcggcagcaatgttgtcaacatcct

SEQ ID NO: 444638 - DNA, 943 bp, Homo Sapiens
tcttggtgttttcagttgggggagttcttggcttccccagtgaggctgaaactttcccctttgcccagccttccatcaattccagcccctttctgaggggggctggagagtaattaacatcgccgtcccacctgtgcacaggaagatgcctacagcccacaccagcaatgatgaaacctgcccaccaggacgcccaggaccagcgaagtgtaggagcggcttgtttggctccctttcgtgttttccgcggaaatatgtttctgcacatactgcacacaggtgtcctccaggaattcccgcagttcataccgagtgcggttgtaggcattgagctgctgcagggtgaaggtgaccactccggaggtgacctgggtgtctgcctgccacaaggctctctccggccggaaactcacaaaggagctcccattcacagccacttcgaagaagacatgggctctagagccctcgggaggcagctcacagcccaggaagcagcggatggtcagaggaaaggccaaggtccgctcctggtgcaccaggcgcacgaggccgtggaactggagcaggtaggactgcaggccactctgcgtgcgcgcccagctctcgggctcctgcaagggctgcagctgaatgatcgtggtgttggtgtctgggccttccagcacgtgcgttaggtgtccccccagcgacgcgttgccctggtaccacacgtgataggggtcgcggaagtaggagatctggagcatatgaagtctttggaggccatctgaggcgtcttggctacaaaaggcccagccagacagcagcagtatcggcagcaatgttgtcaacatcctgaagttgaggctccggacctgggttcctggctcgggccggctgcgggctccgctggctgcagtctagggaaaagagaagtgaggaccgtctgggaggggcggagtct

SEQ ID NO: 444639 - DNA, 1385 bp, Homo Sapiens
  misc_feature (171)..(171): n is a, c, g, or t
  misc_feature (177)..(177): n is a, c, g, or t
ttttttcagaaacccttccggggtgtgggaaccccggccccatttcccccggggagtttcattcaggctgggattccgattccagaggctgaatgtttatttccaaagttgaagtataaagttggtccaccttttggtgtaaaaaactgagcttcccgaagctgggcttcngatgcnccagggtgaacaaagggcggagggcttcactggagggaaacacttccagcacgatcagttgggccaccttggcatggccttggtctataaaaaactcgggagtgtcctgagttaggatcttcacgatctgggtagatcccaggttattctgcagccttttcatgtgatcagcccgatgcttgacttcagccgatgggcactctcaggaggcacagagtccaacaggaccatgaattcttctggagagagcacagcagccactgcagctttcaccacgtcctgactcacgatgaggctgaacgggatgttgtccagggtgggcattgtcagggaagctgcagagttattgaaccacttggtcacctttccctgtgagtcccacaacttggcccccaggtagagctgaatggtgtcacccttgatggcaggatacagaaggtcaaacttccagacggtcaatgctgagggaaatgggcaccttcaccagctgcaggaggtctgcatacatgccattgaaggaagcctcgatcacgggacacagctggtttttcactagattgggcagggatggcactaggaggttcatgacctgcttagctaaggcgttcaccaggaaggagagcttatgcagcagttggatgcgcaggctcccatggctggtggcacagtcactgaggaccaggcgggtggggccacttgcactggtgtccatgcggatggtggcttgggcctcagtcgtcatgtggaactccacgatggtcttgaccaggggcgtgttgaatccagccaccatgtccagggggatcttgactagcagctcctggtcattggccgagggcttcacctgcagctggaggatgttagctgtgatgaccttcagccagatgatgtgcttcaggacggtgttcaccaggctgcccagcacagggatgcctccggctggcttttcccgcatggcactgagcagcggcagctgctgcaggatgctggtggcgttgtggtccttcagctcctgtgtcagcttttctttgatgacttttgggccgaggatgagaactgcagtgggactgagggtggcttggatcaaggtggctgccagcaaaccacagagaagggtgaaggtccacgggccggccatcttcccaggtgtcagagggcagcaagtgcaggatgccagacctgggcacgctggagtcctcggcccgctc

SEQ ID NO: 444640 - DNA, 2261 bp, Homo Sapiens
ttcagtgtacaggagtggtcctcaccccacccagtgaggattggatgaactaggctaaaaggaagggataactggccaagaaagggacatctatgtgaaagtgaaactgagacagtgctggtcacaggtcatgctgcagaataatacattcccaggcactgtcacgtgggggacccaagaggccccaggagtgacctataacctctccagaaagaccactctgtgtggcatcacagtccacacagtttaaggaaatatttagacttaacaatcagacaccagctcttactcacacttacactcacagcccacacacaagtgtgcaaacatacaccacacatatatatttcctgatacattcatggaatatcagagccctgccctgaagtcgttagtgtctctgctccccaaaccgctgctcccacattggctaagctccctcaagagacttcagctgttacacttcctaattgggaaattattcatttctcaaccatgggcctcacaaatgcccaccgtcgggggagctggctctcccttcacccatgcacaggagatgccctgccctttttaactcctgcaggcttcagtccagaaaaagacaagttgctggtcagtaacatgttgagtcaggaccacccctcccatcctggccagaggggtctgggcagccagcacccaggcctatgcctgagggtaaagctattgtcgttcgccctggtgggtggcacaggcaaatccatctgtgcagagcctatcttcccagtctcttcttacagctgatggagatgactctactgcaaaaatgacaaccagcaagaaagcgggtggtgcccgtttcctccctggggaccctcagagggccaggccattctcttccttggtgtgactgcggatccagggtaagaagtgtgagactctcgtgtagacgcctggcttgtccttcagggcacatccacggccccagctcacaattccagtcaaagtcatgcggccttggagggaacagacgaggggtccccctgagtctccctggcaggaatctgttttccactgtgggtcagcagcacacagcattttggtggtgacttcagagccgtagtagtggggctgctgacactcccggtgggaaatcagcttcacaacagtcattttcagctgctccggatagagatagtcggtagaattctctttttccaaagcccagtgatctcaccagcttgtgccaaactggggatcgttatacatcgagggcaggcagatggtctgtatagtccgggatggctgcgcacacctgccctccttggaacggatcttcagcaaggcaatgtcgttgtggtgagcaagcgtgtcagcgctgtagtccttgtgtaggatgaggttttccacctcaaacttcatctccccttgcgtgttggagttaagccttgagcgacccaggtagacgatgtagtcctccttctttgggtaatcaatgaagcagtgtgtggcgctgatcacccagcaagggctgatgaggctgcctccacacacgtaggtgacagagcccccccggtgcctcttgtagatggccgcaaaccagggctggttctcgatggtggtgaattctccctcaataatcttaaagcggggcctcagagtcttttggccacactgaaattttaattcttctggaggagaggagggcttttttccatctgcgcagtcatgcaccatgcactcttggacaagcagctttaggcccacctgcacatagcaccagggtcgcctccggttgtctgggttcctgcagtaattatgtttccccaggcccagctgaagagcatcagatctgtgggcatggtacgtttgctgaaggacagtggcagagttccagggcaggcagggccggcccatggtgtcagtgctggcctttcctcggtaaaagtgaccattcccctcatagcaggtttttgacttatctatttcacagtgctgccctccgaatttctttgggcagttgcaccagtgaatgttggagaagtacttgttggacacacatgttcctccatttagacagtcacagttcgatggaacttgatgaagttcattgctgcctttggagtcgctcacgaccaggacgcagagaagcaggcgcgccagcagggctctcatggtggcgaggtcggggcgctagacggcggctcggtggctgcggcaggagggcgcgagccggcgctgcggggacaggtggaccctggcccgggctccggggctgcggt

SEQ ID NO: 444641 - DNA, 1546 bp, Homo Sapiens
  misc_feature (463)..(463): n is a, c, g, or t
  misc_feature (492)..(492): n is a, c, g, or t
ggataggtcgtggcctcttcctttgtttagctcataacgctgcatcctcggttcctttcgtttctctcgctagtgcgcgtggtcgcagcatattataggggttttcacaagtactccgtcctcccgcccccaccactcgttcatcatagttcgccgcggtgtatataaatggctatctgtgcggccccctagctgcctttttgagaggtcctccctatgagcttcggctcattgcaagcccttctgcccaacaatcgctgcggctcggcggtgagttccctcatctggttgtgttgcttcttcaccaagtgcgtttcgtacttcctcccctgcccgcacaaaagtgggtctgccacgccggcctttgtccccttcctgacgaccccccgttggaatattccgcgttccccccacttcccgctccggggtaccaatgtgtactactaggggtcggtctccgttngtgaatctgctacctacaccttccgcttnaacaaagcccagggttcctccttaccattaattcgccccaaccccgtcggctttgggcggctcgctgcgccccccgtccttgttatgggcataggtgtaggtctcctcttgtccctttttctcaattggtcccatcatattctctcaggggtgggaggcgtcccttctcctcttttgtctcaatcgcggtgcgctctccctcgtggcctcttcccgcgcgctccctgcgtcgtgcctctctgcgggtggtgaattgctctccgtgggagaaattttttgtcaaatgcctttccttggatcttcgctacggttcccaacaccgccagtcagtggtcccccttcgcgcctgaagattcggcgcttcccccccaaacaccttcttgcgaggctctgtcggaagcaacgtcgggtgccgggtccgttgaggcgcctgctagacaggggaggtatccggtcgggagagggagggtcggcgccgggtcgggccctgaatatagagcaggcgccgcgggtcgcagcacagtgcggagaccgcagccccggagcccgggccagggtccacctgtccccgcagcgccggctcgcgccctcgtgccgcagccaccggtgagtgccgcggtcctgagatccccgggccggatgcgcggcggccccagctcccgagcgtctgcctcccccgccctgggctgcccgggctccctgggctccccggcggctgcacggagtcaaggcgccccgtcccgggcgtcccccgcgggtgccgatccaggctgcccggagtccggagcccagagaggagagagacagctggggagcctggtcaccgcgggcatctcccctgcgctgcagtcgcccgcctggcctgccttcccgttcctccgcctcttggcctgacttctccttcctttgcagagccgccgtctagcgccccgacctcgccaccatgagagccctgctggcgcgcctgcttctctgcgtcctggtcgtgagcgatcccgggaattccggaccggtaccagcttttttttgtggatttttggctttgtagtgctat

SEQ ID NO: 444642 - DNA, 1697 bp, Homo Sapiens
  misc_feature (108)..(128): n is a, c, g, or t
  misc_feature (250)..(250): n is a, c, g, or t
  misc_feature (318)..(318): n is a, c, g, or t
  misc_feature (327)..(328): n is a, c, g, or t
  misc_feature (372)..(372): n is a, c, g, or t
gagactgggggggaaaatggtaacaagggggggcacaatttttccaggcgccttttttaaaagggtttatcaaaatatttttttaagggccccggagggggaatttannnnnnnnnnnnnnnnnnnnnagtttggttttcatttgccaggggtttaagggaagggtttccgagggttccagggaggggttttttgtccccacacacccggggaaagggggaaggccagaccaaggcaaataaattgaganccccgggggccccagctgctttggttacatgtgcccttggccagcaatttgcttcccgggccctttancccttccanncaggagtcaggagggtggggcccaggcagctggtgcaggcaggncccagatgtgcagccccaaagttccctcccaaatagcccttggagcccctgcaggggcacgaggtaagaaaggggggcagatgcagcagaccctagctgtccacgtctgaggggcacagtctttttcctcgtcccgaaccttcagggagcgcgaggtgccctcccgcaccggtggcttcctcttgaccacacgcaggctctggctgcggattaggggcttctctcggggccgggctggcgcccgggggactgcctcagtatctgaccaacactcatcctcggtgtcgctgtcctgcaggcccccggcccggtacccaatgggtggcctccggtgggacacctggtcctccaggtagagggggtcatggtaggcaggggcaggtgcgtcagagatggagcgcaggtcctgcatggagaagctccgcagcctgccggccagcgccccctgactcttggtggcagcctgcacagcagcggaggcggcaatgttgaggccccgcttcccgaagctgagcacggtctcgtagctgcgctccttggcctgcacgatgtacgcgtcgatctccttctcatggcgggacagggacgggtggacaaacttgcggtaaagcaggctggcgcccttggtgtagggtgagagcagccacagcacgaaggccatcttgatctcatagtagaaagggaaccaggagataaaaatgtctgtaacgatctctgctgccatgaagagtgcaaaaacaatccagtacatcatccaccgcacatattcacgaatgttcttggtcttcacagccttataggaagcataagctggacacagcatcccaaacaccagcaccaccaggcgacagatcatccaggacaccatcttgccggcctttgggacgtggggaggaccccaggaagccgctcagaaggacgttcactcaagggctgggacggggggtgatcagggcagttgcgggaagcagaggggcgatccggctgtccctcggcggaggcagagcccgccgcccacggcctccgactgtgcagttcaggggacctggagaatggggagacccgaggcaaagcggccccggcggggaggaagccgacttgggagcgggcgcgccccgcggccggggcagttacagctcccacccgccctttctgccgcggagaacctggcgctcggcccttgctgctggtcccgcgctggagcgggtcgccgcggttccagcgcgccgggccaccagcaccggcctacagggcggagttcgcaactcacttgaaagttgcacggaaccgagtgctgcccaatcccgggaattccggaccggtcc

SEQ ID NO: 444643 - DNA, 936 bp, Homo Sapiens
tttgcgactttggttctggtttattgcccctcagcaggcagcgggagtcaaggcctaggctggggctgcccggctcagccagcgggtctaaacagtgtgtgcaggggcgccgttcgcgccctccaggaaaatgcgcgatcgggaatgtctcgaagtcagtccaggaaagagtcggcccctagtcgtgggggattagggcagggaagggcagggcggggcggggccacgccgccgggccagtcggtcccgccaggcagcgatcaaacgtcgagggaggaggcgggggacagggagggggttcgagagggcgtggcgggcgccggccccgcgcccccagcgcccagcactcgccactggaagatgctggcgtccttgccgcccagcgagacgaggtgcgagtcgtcgtgcgtgaatcggacgctggtcacgtggctgccgtggcccccgtacatgcggctcggcgccttggcacgagcgcacgggtactggaagacgtgcatgcagcagtcgttggccaccggctcccacgccctcgttgcgtgcggctcgtcgccttggcacgagcgcacgggtactggaagagatgcactttgcagaagtcgtcggccaccgccaccacgcgctcgttgtgggagcggcacagggagttgatgtcggtcccatcggagccgtccggccagacgcctagcacagcggccggcctcagcccgacctcctacccaccgccacccacggcccagagctacaccatttcaggcgctccggcagccgctggcagccactgccgcgtaccaggcaagccttcccggtccctaggggcctcctgggctggatcttcaggctccctggactctcacccaccgacacacgcccagcgtaccaagccccaactgggctccacctagtcccccatccttccagcaggtttccatcggc

SEQ ID NO: 444644 - DNA, 843 bp, Homo Sapiens
  misc_feature (37)..(37): n is a, c, g, or t
  misc_feature (123)..(123): n is a, c, g, or t
agtaaaagatcctggcttttaaaaattgctttgatgnctgtggcagtatcattaccaaaaccaattttttcagccttcaaaagcaggctgatgcaccttttttcagagattctgtttgtctgnattaacagtctgctgccttggtgggcctttggtcttggtcactttcggtcattcgatggttttaatgaattctactgctgctgtgaactgcatccacccaataggactccctctccagacagacagctagcataaaagctactgatatactgcacagtagacagcaaacagggtggatttgcctttatcaacacaaacacccaacacaggaacaaagtcatccgctccagggacagagtcctcattggccaggctcaggaggttcataatcgtagagcacattctcaggatgcactgcactttgtcccggggggttttataagcacttattgtcctgatttctgattgtgcagatggccatggtgcttctcgaagataaccctttggtatctgaaggagctctgtgatttgcagtcactactttagacaatctctggatatgttcatgaagaccctgttcgcgaagtatgtccccatcttgattagggtagaaggcgagcttgaaaatccggttcatcacgcttcgctcaatggccagctgtgcatcttgaagctgttcttcactcgcgttttgccatatgacatcctgggccattgcaccataaagaaactgcagaaaatcttctacctgagcagttttatcgtcagctgcggtgagtttctgaaagtcttgaatgaattccctgatcttcttttctttgctctcaagcagtaatctca

SEQ ID NO: 444645 - DNA, 1015 bp, Homo Sapiens
cgatgagatgtgcgcgaactccgactcatacagcatcagcgccgtacatgatggtgctcccttgatagatgctaatcaaaacccatattaagaatgtcttgtaggacaacggccgtcccttgagaagatcctcgtagagctcaggatacagcatggcaacttccgatttgacatctttgtccaggaccagagaaaacacaggaaacatggtgtaaattgtggagtacccaatgatgaggaatccttgatagagagggacggaggcaaagtaaaacacggaggaaaagacagcctgcatggtgctgatacagaggctcctgtgaatcacgaactggctgagggcggctgaccgcttgtagctgttccggccatgcaccataagcaaccggccaagatgcttaaattgagtgatggagaagtctgcagccaacgaagcctgttttccttcctttccttccactcccacgccgcagtcagattcctgaatcatgctgacgtcattgcctccgtcccctactgcacaggtgagcttgcccgtgcgctcctgaagcaggcgcacgatctgggccttctgggtgggggcacatcggcagcagactacggccgggcactggcaggccagctccatgaactcgtactcatagtacttgaggcaaacctccagggagtctcccgagatgaccagggcacaatcatgcttcctgcggaaggcgttcagctcgaggtgagcctccccgcggttggtcaccagccgaaaaacgtggatgtcttggtttctggtcaccagatgtgcattcttcgctgtgcacgtagctgtctccagcttgtcccctgtcagcatccaaaccttgatgccagcattcctcagggtctccagcgtgggccgcacatctgcctgcagctggtcctccacgcccgtcaggcacagcagttccatctccatctccaggctctcgatcaccgtggccactttgagggagcggtcgtgcacagtcagcttggcctggacgtagcg

SEQ ID NO: 444646 - DNA, 1395 bp, Homo Sapiens
  misc_feature (232)..(273): n is a, c, g, or t
  misc_feature (970)..(971): n is a, c, g, or t
gtaggtgcgtgcccgggactctgccgatgcgggccgcgccccctggggccaagagactccacgtcccgctcagggcaaagggtgtggggagaagcggtcacgcccctcggctggaatccgtgaggaccaggtctttttcagtgtgctcaatatggtcaccaagcctggaaacatagagtctcaccctgttgcttaggcagatggcgcgatctcggctcctgggttcaagcannnnnnnnnnnnnnnnnnnnnnnnnnnnnnnnnnnnnnnnnntccagcatgctctgcccaccccacgccgaggtgcactgaccatgagcctcaactcctccctcagctgcaggaaggagctgagtaatctcactgaggaggagggtggcgaagggggcgtcatcatcacccagttcatcgccatcattgtcatcaccatttttgtctgcctgggaaacctggtcatcgtggtcaccttgtacaagaagtcctacctcctcaccctcagcaacaagttcgtcttcagcctgactctgtccaacttcctgctgtccgtgttggtgctgccttttgtggtgacgagctccatccgcagggaatggatctttggtgtagtgtggtgcaacttctctgccctcctctacctgctgatcagctctgccagcatgctaaccctcggggtcattgccatcgaccgctactatgctgtcctgtaccccatggtgtaccccatgaagatcacagggaaccgggctgtgatggcacttggtctacaatctggcttcactcgctcatcggctgcctgtcacccctgtttggttggtcatccgttggagtttgacgagttcaaatggatgtgtgtggctgcttggtacccggagactggctacacagccttctggcagaacaggtgtggcgtcttctcctctctggccatgatcggggtggtatggcgtatgtcttcctcctacggcgttcnnctatgcacgcggccaagggctgtgtgggaaacgtgcatcttgggggaggatgactccgatggaccaggagggaagaaaaaaatttacatacaacctcctccttcatgatagaagggagggaatgacgatccacgggaggaggggcgattccgggccggcaaccgccatagcccgccctcgcgcatcccttgttgggccctcccggggggcttaaatggtccacctttgggggccccgctaacaggggggtggccccttaccctctttaagggccccccccgcggggaaaaaacgcataagaggtttccccccatcccccgggaaaaattttggggccccccaagggggtgggggccaatttgtgccacaggcctttttttgtggccaaaccccccggggggaccatattggggactcttgggag

SEQ ID NO: 444647 - DNA, 900 bp, Homo Sapiens
tccatggaagccctgtcttcaggcacttccaggttttaccgtctccctgcacacaccggggagcctggtaggcttcgagcagaagccgaggtcccatcaagggtccagactttccgtgcctcctttgttttcatcgagtctgggccgctttagctctgggggactgccctgagcgtctccaggcgtctctgactgaatttcttctgtagaaggggtggaaatcacactggttggtacagaacttggtggagtgtccgtctttaagggtgttaagtttattctccggggtgttgtcttgctccaggcttgcagtgtgttcagagtgaccctccgggatgggtgggcttttgtgttttgactactgggctgcagggtcttctcctccgaaggccccggcaaggggcttttgacagcaggagtgatggagggagggtccctgatgactgttggggctggggcctgtctggcctgagggggagtcgtgccggggctgctggggtcttgggttctgctggccggggttccctctaccggtctgggtcctggcgaagaccctcgatgtgtctgactcttggttttctttgctgtatcaggagttctcatgttcacaactggcttctctttcaaaggaattccaagttcatctttctcaaatgtcacaaatgagcagtaaccgtccgtggaagaaatggccaggaaggcaccatcgctggaccatgaaatgtcactgagggtgtggtaatgtatattagacacgtaaccaaaagggaaggactgctgggtgtcatacagaagcacggaatcctccgaggccacagcaaacaccaggcggtagggcagactcatcagctccacacctgttccaccactggatcccgggaatccggaccggtccagcct

SEQ ID NO: 444648 - DNA, 1218 bp, Homo Sapiens
  misc_feature (1119)..(1119): n is a, c, g, or t
  misc_feature (1126)..(1126): n is a, c, g, or t
  misc_feature (1143)..(1143): n is a, c, g, or t
  misc_feature (1159)..(1159): n is a, c, g, or t
  misc_feature (1207)..(1207): n is a, c, g, or t
gtgacggtgcctctgactgtccgggtccctccagcattttgcagctttctcctgtcttgaagaagtagaacggtgcccgagaaacgtttttccccttcgagactcaggaggatgaaagtcatcacttgtgaaatagcctggcacaacaaggagcccgtgtacagcctggacttccagcatgggacggctgggaggatccacagactggcgtctgccggcgtggacaccaatgtcaggatctggaaggtagaaaagggaccagatggaaaagccatcgtggaatttttgtccaatcttgctcgtcataccaaagccgtcaatgttgtgcgtttttctccaactggggaaattttagcatcgggaggagatgatgctgtcatcctattgtggaaggtgaatgataacaaggagccggagcagatcgcttttcaggatgaggacgaggcccagctgaacaaggagaactggacggttgtgaagactctgcggggccacttagaagatgtgtatgatatttgctgggcaactgatgggaatttaatggcttctgcctctgtggataacacagccatcatatgggatgtcagcaaaggacaaaagatatcaatttttaatgaacataaaagttatgtccaaggagtaacctgggaccctttgggtcaatatgttgctactctgagctgtgacagggtgctgcgagtatacagtatacagaagaagcgtgtggctttcaatgtttcgaagatgctgtctggaataggggctgaaggagaggcaagaagctaccggatgtttcacgacgacagcatgaagtctttcttccgtagactgagtttcactcccgacggatctttgcttctcacgccaggtgtggagctgatgagtctgccctaccgcctggtgtttgctgtggcctcggaggattccgtgcttctgtatgacacccagcagtccttcccttttggttacgtgtctaatatacattaccacaccctcagtgacatttcatgttgtatcttttcccgggtttttgccttcaaacaagcttgtggatttttgctcgaacttccctcttctaagtagatgtgagagttttggtaaggtctgttaacttttccncgttttnggggacgaaggtccagncgatgggtgcccttcngggccatttctttccacggacggttactgctcatttgtgacattgagnaaggtgaactt

SEQ ID NO: 444649 - DNA, 485 bp, Homo Sapiens
ttttaccttccaaagtttaatcaatcaactccttagaagtgaaatctaacaatcacttcaaatactctaaaattcgacagagtaaaatctcaaattactttctcatcttcctaattcttattgaaaaggagtccctccatgaagtgtgtgcactttcacgaggatgccagggaggactcactgattttcacactggataacgttgaaccgctccagtttcagaaactcatcaaaaagaggatttactacgttaaaacgttcatgtcccaagttaaaaatggatactgaatacaacagcatccatatttctgggaggaaaaatcaggtacacatggtcacttctgttataggaaatcccttttacagtgtgtcccgctccatggaagccctggtctcaggcacctccagctttaccgtctccctgcacacaccgggagcctggtaggcttcgagcagaagccgaggtcccatcaagggtccagact

SEQ ID NO: 444650 - DNA, 1497 bp, Homo Sapiens
  misc_feature (1480)..(1480): n is a, c, g, or t
ggtgagatcggagataggatcgctgatgtcagtgagcataggagatatgctgcgtctcctgactgtgagcgcaagatcttgtttcacgcagggaacagaaatacgggttagggcgaaaaccgacatagcgcgagggatgtgagttcgcgccgtgcgctcgtacgagcggaccgcacgctttgtgcactgtccaaggtcgtgataaacatgacgtggactctcgggtgcggttgaagccgcgcaggtcgctgcgtcccgacgaacttcctttgatggagaagctgcgcatcctaggcgcacttgtgagggggcggcagttcgagcgagatatggagccgagcggtaatgcggggaactggagtggtacggcgcggaggatcaggaaccgtggggtgcgtagtcatgtgcgggctcatgtggaggagtcgcggcggtggtgatggttaggtttgtcaggggtggctgcagcgtgcgctgattaacgatcggggcagacgcaggggaggtcggcgggggcgccacatgttgcgcatacttcgtatccgagctgtgtctcccacggggatgggtgtgttggagagtggtggtgcttagggggtgcgcggacaggggcgggcgctaggaggggatgtgatgcgggacgctgggatggagcccatcgcagagtctgtgcgaacgaagcatgtgcgtcgaggttgtctgtgcgcactccgggggcgtggggtcgccgagtgcctcgtcagggttggtattgccggggcgcggaaactcagaagatctccagcgcagagacgcgagcggatgagctgtggtgtccttacgttgatggaaccgcactggtcgtcgcctatgcttataaaagagagagaatttgattgctgtggttgtaatgtctcaattgtcactgttgagttcaccagtgcaagaacaagagtccgcaccttctccccaatctcaggggagatgtcattgccaaactgttgcagagtggtaagaaagcgtttcaacttgctgagttgtcgagcaccacaagtggctggcaattgctgatttgtgagtgcagatgatgtggaggaggcaggaccattgctgaatctctgtggcggtgatggggcaccattcagggtaggaggagaatggttgatgccattgcttaatgcagtaggagtgaaggacactggcctcggtcctccaggatttattggtgggaggggtggcatggtgggaggtgaggatctggactgtatcttcacttccacaggcgatccaggcatcgctggcacccttttctcaggaccaacccaaatgcccaaattataaacaatccagattcttaaatacaccaaatttatttgaaatagatattccagaagctcctgtttttctcctcgtaatcttcaaagctcaaaaggagaccagccttcctcctccatcccaagaattccggaccggtgccagccgagtgggggtatgggaggtnggaggggtggggtggga

SEQ ID NO: 444651 - DNA, 1539 bp, Homo Sapiens
  misc_feature (194)..(194): n is a, c, g, or t
  misc_feature (470)..(470): n is a, c, g, or t
ggcgacaataacgcaaggaaagccccgcatttttccctgggggtccccaccatggggaaaaagcgctttaaaggccttggggaggaggcgtacccggtggctccgcgaatttttgcggggcttcttccgaagggtaccctgggaagatttcgcgggatggccaagacataggaattgtccatgtggagtccctngccgattccgcgcggggaattattttgtggaaccggtcccttgctgccagaacccttgggcttacccaccccctaggcatgtttcaaatcataggggggcttcctccacaggtttgagttggagattttggcatgtcccacaaaatgtgatgtgtctcacgccccgaccgcatcaacgtcgctaggttcattgcaacccagggtgccggctccaagcagcagacatttgacagacacaacccttgtccaagtctaaagtaggaaccaatctcctancacatcagtttgagatttagatccactgatgactcagctaaccttttagggtccaatacattcactgaggttcaccatccttggtcccatgcctcctttctggttctgtttcccatccaactgctttaggacaatctgggctaaatgccatttctggaagcttcacttcgaagatgatgctgtgggcaacgtctctcgccccctgcatggtacggtcacggaagcaaacaacttcaacagactggaaactgctactccatctgtgggctgctaggaccaaaaaattcctcaaaggccatcccagggtactgggctaagttacagggatcatatacaccaattgttatcttcgtcctttgaccttggaagaaatcactgtagtgtttaagcaaggaaaccagcaccatgttctcatcatacttgattaagaagtaaggaagagctgtgactccttctgtttgacaaagattatcatatgcacactctagtgcttcaatctgttttagtgaaaacctttgatccaaacccactggcccctgaatgagaggtaaactctctggaagacagagggcaggatagcaaaaccaatagtagaagtggtacttctttagatctgcaaatgtcaagaggaggaacttgttgaggagtacagggttttcaagagcagtgcctgattttatggattcccatatctcatttgctgcttgttccaaaaggagcttcttatctgcagtcttgaaagactcgagtgtgttggtgttatacagtgttccaatagctgggcagcaacgggctggggtgggagcactcatgtcaaaagcactgaactccaatgttaagcgagctggcagcccagcagagtcaccattgtagtaataacccttaatgtccttgggagcttcatccagccgatactcgttcagcttcttctgggtcaactcatgccaaaacccaacatccaaggcactactaaaaggggcaaactgcagtttagagagtccaggatcccccgtagctgccgccattatttcttgccgccgctcaacttccggcaaccacagctctcccc

SEQ ID NO: 444652 - DNA, 2196 bp, Homo Sapiens
  misc_feature (398)..(478): n is a, c, g, or t
cttcgtgcttccgccgtcttccccctttctctcgtcccccagtcggtcgtgcgcgtgttgtgttcgttcctgctagtcatcgttatgtttggtttttgctcgctcgcggcgtgtgcttttcgttttgttctctgtgtgttgttccgcctttttttgtctgctccccgcggggttgttgtgttcgttcctctctcacatgaggtggtccgcttctctcgttttttggttctctccgtcttccgccgcttgtgtgtattcctcgcgcgcgctctgcttgtttctgtgttgtcttggtctccttgtgttgtgtcgacttctttttagtacattttggtgtgtgctcgtgtttttttcgcgccctcttgtgggctattttggttgctcctccgctctgttgnnnnnnnnnnnnnnnnnnnnnnnnnnnnnnnnnnnnnnnnnnnnnnnnnnnnnnnnnnnnnnnnnnnnnnnnnnnnnnnnnggctctgaatgttctgtttattggggtgttgtcatgggtaggaggctcagcagagccattctgcctcctgcttcccagtactaccccgtccagcaactgcctctcgtataaataagtatcaagatggtcagtagaaaaggagagcatctcctcagccctggaagacagtgtgggagcttcagcttaaggaagaggtaggtgcctgtccgccagcccagcctcaagggccaggaagacctggctatgggtgctggaggggccgttagccacaccccagggttctacagtctttggtttggatcaggctgcaggccagggtcctggctggcagccccacccaccctgcgcctctgacacacacccagcgcttttccctgcaggggccggggattggatggggccctcctgagtgcagcagctctgagttgcaaggggaggcccactttcccagcctctgaacctcctttctgccactgcagtttgctgggagaaaggagagagaagcctgggggtcaggcaggaggtgtaagtcctgaggccggatctggtgcacagaggagcgaggtactgtcacagtgctggcacagaagctgggatgtggctgtggtttgggtctgcaggaggtcagcagagtccgccgaggaacacggaggatcccacagggccacagcagggcaggataccgcccagcggtatcagccctcaggccgcatccagtcccatggggtcatgccctctgagcctcttgtcgctcagcactcaaatggctccctggtgaagacatggactgtcactctccccagatggtccagcagcgcctgcatctgttcaccaatgatgctgaccctctgaggcgccacagatgagcctgacccagtccctggcctcagccagctggcagcctggaggctgacagggaggcaggttagaagtgattcatgtgtccacaggcaccctgtcacaccataccctgtgacatgtgaactgaatgctctcagggcagcccctcagaagccttcccggcagatccggggaccccgttctggtttttctgactcactgcctcatcaccttccttccaggtccccaaaacccctgcatcatgatggggccaggtgctacctggtctcccaaggcccttcagacttttccacgttggtctcgtgtggcacatgacacaatctctcccgtccctggaggccagctcccccgtggccaacctcaggcctcccatggcatctcagggctcctccagccagactggcgccatccaattaacctgatggtggctgagcagctcagctctgtgccagcccctgcaggaggcagatcatgttgtccaggccccagaggtagccgtcctcacggttgccctcagcccagggcagcctgtggctgagcgtctggtggtcgggcaaggccaccgtcttgccgaagtctatcatccagaccttggccaggccggtgtggtcgtgcacgaagaggagggagctgcctaccacctcgtgggtcttgaagaagggggagatctccagagcttcacgaagttcttctaggcatgccacgtacttttgcaggatgacgtggtctccatccacgaagtcctccagcacttttgtcacctgctccagtgcctgcgtcttcttgaagttggtgttacaggtcccatctgccttcttgatgccctcgatccggaagcccagggtagaggtggagct

SEQ ID NO: 444653 - DNA, 1275 bp, Homo Sapiens
gttcccgggaggagaactcttcaggaggggggggtttgggcgtggttcccgggggaacccaaaagggggatttaaaagcgcccccttttaaaaatataagcccaaatggaaaaaatcccttaggtgcggaacacttccagaaagccagattgggtgggctttgaggggggcccaaggggttgggaggccagatgcttccgattgaggagctgggtgccgctttttgggaaagccgagtggagacagaagcatcgggacaggaagccttgttggagaaggctcagttccttccttgctgttccctgggggaccagggacagcacggcccctgcatttctacttctcagggccgaagacccgacctctgaccctccacccactccggtgacctgcacgctaagttgggtggtctctgactaaaacaggcttaagccaagaattgggactcgactcccaggagacctgtccgcaggccgggcagtggtgcttggagagcttgatgctgaactccttccgggcagttgtggcagtggaggatttcgtggtcaggcacccagtacgcaggcctggccgcgtcctttacccagacctagtggtatgtcaatggctgtcaccacggctcccagagtgttctgcacggcctcgcccaccttccgagcaatgagcgttccaccttcatcgtccacttgtgcctcggtaacagctaactggacgttcctggcttcgtagcagttgtcacagacccgcactggcgcagggccccagccccgctcaggcactggccgagtctttgatgaacagctgtcacagaagccctccccacaggctcggcagtgatgcttagtgtcgttatctttaaaggacgtcgcacacttgttgcagctcagaatctgggagttgggcctccagtaggcaggggcgatctggtctgtcagccaggaagtcacagccttggtgggtccaaggctaagctcggacaccgactgagccatgaagttcatcccgtccaacaggcgctgggcagcattgttgttgtccttcagaaacccatcagtctgaaatgaaaacgcaggcttccatcatgctctgagaagggagtgaaaggaaggaggaagagggatgtttggtgagttgcacactcaccgtggccaactcagaaccactaactccctggcagggaagaacggagacacaccaggaatccctctggctttattctcttcaaagtgaccataagacttgatgtgtagctgttcaattcaggacttactaagc

SEQ ID NO: 444654 - DNA, 972 bp, Homo Sapiens
  misc_feature (525)..(525): n is a, c, g, or t
  misc_feature (947)..(947): n is a, c, g, or t
ctcccatgaccgccgggctgttccttctcgtggctgggaccatcccgtccgagtctgcttcaactgcaataaaaagcccggtgacctttaaccccagccccctctccgagtccttcacaattccttaggttctcagggttagaaacagtcttgcgaggtaggccctcctcccagtcacctgctgtggtgtgtgtcctctcctctccgcatccagggccactttccctcagtgggggtgagcctggcggcaggcccgaaggtgtggacccctcagggcaggggaccttgcaacttatcgcaaaggggaatgaacctgaatccgttgcatttatttcagttaaaaataatgaatatatatgtgtatatctctctctcatatatacatatggaaaggcactcggggcgtatcgaggctgctgctggctgtgaagacttcgcacagtctcctccgcacagggtgaggtggcagtggcagcacgtcttcctcatgagccgagccaggtccatggccaccacgtggttggnccccttcctctgctgctcttggagccttggaagcctctcctgtccttggctcttccctccatgcctgtcagctgcctggggagtgagcctccctggtccttcctgcctgaaacagcctgaagggaattctccctaggtctcctggggagtcgagtcccaattcttggcttaagcctgttttagtcagagaccacccaacttaggcgtgcaggtcaccggagtgggtggagggtcagaggtcgggtcttcggccctgagaagtagaaatgcaggggccgtgctgtccctggtcccccagggaacagcaaggaaggaactgagccttctccagcagggcttcctgtcccgatgcttctgtctccactcggctttcccaaaaggcggcacccagctcctcaatcgaagcatctgcctcccacccntcgggcccctcaaagcccacatctg

SEQ ID NO: 444655 - DNA, 1839 bp, Homo Sapiens
  misc_feature (469)..(469): n is a, c, g, or t
ctttccccccccacttcctaccttaccggatcgggtgcctcccccagggcccaaccaacttcccctccctgtacccgcccccgctatacccccttggcccctgacaaaaccggaccgtaactggcccccggaactttgcccccccctttttttcgtgcttgttgttaaaacaaccaccagttttactgttgaatacaactgttggggaaggcaagaataagacatgcgggaaataccagcttgattagtcagaaactcctgtgatctgtaccaaaaaatgaatgttcccaaaatcacgtaaaaaaactaggctcaaggaacagccgcccttgcaagagggctcaaggcacctgggaggctgagaagaggccaacctggccatgggcgtggctgcatggacagctcttccctcctgcccttccccagatgcccttccctcctgccccgaggggcacactccctctccccnaattacaggtgctacaaaactgccttgaataccaccgccaaggcactgccagagatgaaatgggccctgagcagagcctcaggctctccctcccctgtagcccaggcctggagaaaggagggccttgttccccaggccccaggtgggcacagattccagagctgcctcggggaaagcctcttaggggaggcccaggctctgctccctggggaggcagaggccgtgggacctacacacaggcacacacagccctggctttggtcagtactgagtgtgggcagaggggccgcagccctgtccagccccacgatgttgactgagaggtgctatcccagacggtccttgttggagctgccatggcaggctgggccctaattggggtagcacaagcagcatcccgtgcctgccgcctccacgctgggcttggcaccgggccccaggagcccatcagtgacagagtgctccatgatgatgtcctccacccgggtgatgtacagcagcgtcagcagcacccccaggaactggggaagcaggatgcccaggaggatgcccgccatgatggtgtagttgtccatgaaccagatgatcacggcgttggtgcagccccgcacgtagatgacatcctgcacactgaaacgctccttgtcgatagttttgtagccacacatggtgttgacaacttctgtcgtgttcctgatgcagcaggtgtagggcaccccacaggccaggggtccaggggcactgcagtcgtggtactgattcttgctccaatctcggtagtcctccccgccacagcacttgaactttttctgaacaaagtccatgatgtttttgaagtccagatcatcatagtagttctcaattcctcttcgaatgttgtcgttcaggaagtcaatggtctggttccggaaggtcaaggccaccacgccaccaatgagctccatgatgaggcagatcccaaggatgtacatgaatgcttggagaaggtacaggttgtcacggagggacgccagcacaccaatgaaggagaccatgaacatgacgacgcccaggaggatgaggatgatggctggagccaggaaggcactttcaagggttttatatttctgccgctcaacctctgcatagatgcccacagacaggaccagggccccaatcagccagaacacggtggaatagatgataagtgaaaacttgagccagaggtaggagaagcgcgcgcagtagcgcacctgctccgagtccccgcgcggcatcctgggcgctccccgcgcgggttacgggggctccggggctctccggctcggtccctcagccagcgctcgtggccccacctgcggctgccgggctaccagcatcccaggaattcc

SEQ ID NO: 444656 - DNA, 408 bp, Homo Sapiens
  misc_feature (234)..(234): n is a, c, g, or t
  misc_feature (303)..(303): n is a, c, g, or t
  misc_feature (340)..(340): n is a, c, g, or t
taaacaaaacaaaacatgtttttattgtttgattaacaaactggttgggggaagggcaagaataagacatgcggggaaataccagctttgattagtcagaaactcctgttatctgtacaaaaaatgaatgttacaaaaatcacgtaataaataactaggctcaaggaagcagccgcccttgcaagagggctcaaggcacctgggaggctgagaagaggccaacctggcatcggncgtcggctgcatggacagctcttccctcctgcccttccccagatgcccttccctcctgccccgagggancaactccctctccccaattacaggtgctacaaaactngccttgaataccaccgccaaggcactgccaggagattgaaatggggccctgagcagagcctcaggtct

SEQ ID NO: 444657 - DNA, 1510 bp, Homo Sapiens
tttgaatcaataaatttattttctgcttaagcaggttgagttgggttttctatttgcaatagcaaaagtcctgactggcaaggtttaaaagtttgaagactctcacaggtaagtgcagctcaggatcctgtgagtggagcagaaagtcttaagaaatggcaggggctggttgaacccagattttccattggctgagcagatatccccagaggcgtagaaaattaaatttgttttatgttgttccaaaagaggagaactgaggccagaggagcacacttctgagacactcatttttgctgggtagaggaactctctggcaagcaggaccatcgatattagagcagctggcctcaggagggagtaagagccccatccctgaaggtacacaagttgtggcagcaaccatctggcctgcagtttccagaggggagtcaggcgtggggtgggactggagtgaacgggtagatgcttccacatgcggcagttggcactgacggcaggaacacgggggtggcttaatgggtcctggggctcccctctggccctcaggaagcgcaggagcatgaggggcttgggatgcagcacctgcaaatttgcacgttcctggcctcaggaggcctccagtacagaaaagaccatcaacgaagctctgcagccatctgttaagaaacgccacagggaggggacagcatggccagccggggtgccatcaggctttgggtggggatcctggaggatcagacccatctaggtgggagcgctggggtgcaacccctagaggaggctgcaggcgcgcttctgctgccgcgtgggctgagggcacagcacggcccggatggcctcgtcgaacacggttttcaggcctctctgggtgagagctgagcactccaggtatttcaccgagtcaatctccttggccagtgccaggccctgcgggtaggtgatgggagccagcttcttctccttcagtttctcgatggtgtccttgtcgtcccgcaggtccagcttggtgcccaccaggatgatgggtgtgctggggcagtggtgccgcacttctgggaaccacttggcgcggacgttctcataagaggctgggctgacgagggagaagcagatgaggaagacgtccgtctgtggataggagagcggccggagacggtcgtagtcctcctgcccagcagtgtcccacagccccaggttcactggcttgctgtccaccatcacattggctgaatagttgtcaaacacggtggggatgtactctccgggaaacgcgttggtggtgtagctgatgagaaggcaggtcttgcccacggccccatctcccaccaccacacacttgatggcctgcatcgtgtccggagcctggagagtgtcggtggtgacagctcagggccaggcgcgtttctgcgggcgcaaggggtgtggaggctggtgaggcgcctgctgaggagcagcggtggtggggcaaagaggcctcgtgccgattcacacccgcctctactagccg

SEQ ID NO: 444658 - DNA, 1167 bp, Homo Sapiens
  misc_feature (1124)..(1124): n is a, c, g, or t
ctttgaatgtttactaagcagtcagaaggtgacttactccattccccagttgcagcccctgaagcatagagggtttagggttaggaggagtaccacagactgaaagaggaagtaagaagttaagggcttggcaaagttgcccactcctatccctggtctagctgcctcagaactaaaggaggcctggaactaacaagtcactcccttccagattagatgaggccagctggcttttggatgccccaggaagaggtggtggcagcagtggcatgagggatccctctgtaacctccacatgcccaggtcatctgcactggattagatgtccatttcaaattgtgcgtcatcgggtatctcttcctctgtctcctgctccttcagctcctccagcttggagagaggggctgttggaggagttgtgaccccgggaatctgagggaggcagcaggggggtgtccgggcaatgggtgagttcttgcactccagcaggaactttcggtcgtagatgatcctggtgcctctggttaggagaggccaccatcggccgtccaattctcttcttcggtctggttagctgaggtgatgggatttcccctttgagagcagggactgaaggaagcagactggcctgctgggcatcagtgcattcagttgaattttggataacttttatcatagggttccaagcaggatctggattgtgaagtccattaaacagagggcctcctggaacatcagcaagctgaggatgagagggtattatggtgcctccatacatggaaattggcagacccataggctgatgaaaaatgttagagggggctaccattccagaatcatctctctccattggctgatgttgggagaatgtgcttgggtctgataattgttgatgcattggatggttccccatcacagattgcgaccaacctgataagccttctgacacagcattgacaccaaatgaccagattccactgtgtccaacgggagcgacaaaactggtccccgccggggcttgtgcaacagaccctccttgccgaattcgggccagtctctctgttccaattgggggaggtatctttcgatcttgactggcactgactccttttggttggcccaancgttggtggggcagaagtggcattcccgggaatttccggaccg

SEQ ID NO: 444659 - DNA, 446 bp, Homo Sapiens
  misc_feature (375)..(375): n is a, c, g, or t
  misc_feature (408)..(408): n is a, c, g, or t
tttttttctaaagactgttcatctttttattgaatattctggtaaatatttcacattaatacaggctacattacgtagagccactatatgacaagaaatttactcaactttttccttttaagtatgtaaacaattatacatgtatttatcaccctaaaaggttgaaacatgtaatcaactaattctcttctgcatacaagtagtattctgtatgtttagccaaaagcactaaggtcatatgatcttaagttcaaaatggctaaactaaccagagaacataatcaggtggataggaaatcaatttgttcttatacaatgggcaatcaaatttccattgctaaagcctcagagaaaatttcttagggcacattaaanaaaaatccccatgggttcttccaggtcataggnttcttaaacaggctaaagggtaaaggcctctaacttag

SEQ ID NO: 444660 - DNA, 538 bp, Homo Sapiens
aaggaagcaacaaggggttgtccgggcaaagggtgaattccttgcaactcccagcaggaaactttcggtcctaaatgaacctggtgccctctggttaggaagagcccaccatcggcccgtcccaattctcttccttcggtcctggttaagctgaaggtgaatgggatttcccctttgaagagcagggactgaaggaagcagactggcctgctgggcatcagtgcattcagttgaattttggataacttttatcatagggttccaagcaggatctggattgtgaagtccattaaacagagggcctcctggaacatcagcaagctgaggatgagagggtattatggtgcctccatacatggaaattggcagacctttagaaaaatccacaaaaccacttccataggctgatgaaaaatgttagagggggctaccattccagaatcatctctctccattggctgatgttgggagaatgtgcttgggtctgataattgttgatgcattggatggttccccatcacagattgcgaccaacctg

SEQ ID NO: 444661 - DNA, 620 bp, Homo Sapiens
taatggttgtagtggagcaaattttcctcattatgtacctacagggaattagcacactcttaacggttcttgaatacaacaaagaatgtggtattgatgagtacacactatatataaattcagccaaacatccacatccaaacatccaagctgtaagactgacttttaacttaaaattttgaaaataaatttaaaaatgccctccaaactactggtaacacactcctttatggttttacgcagcaggttccaggaattacagttttctgtgcttccttaaatctttctcttggggtagccatcaatcatcttctttctcaatataggtctttgcattaacccgcgccatctgcctggccaagtacctgtctctagctgacattacagtttcttcattgttccgctttgcaaacttgctcactgcctcaggtggtctctcttgttctttacccttctcttgcccttcctctgtgagtctgtgttttgctcccagtgatgattcagaattagagggtttctcttggtttctttctttgtcctttgccatgtttctcattttgttggatctttcttggtcaagaaatttatcctttgccctagaatttgggctgctttccttt

SEQ ID NO: 444662 - DNA, 941 bp, Homo Sapiens
  misc_feature (106)..(150): n is a, c, g, or t
  misc_feature (374)..(374): n is a, c, g, or t
  misc_feature (407)..(407): n is a, c, g, or t
  misc_feature (429)..(471): n is a, c, g, or t
  misc_feature (516)..(516): n is a, c, g, or t
  misc_feature (598)..(599): n is a, c, g, or t
  misc_feature (615)..(615): n is a, c, g, or t
  misc_feature (621)..(621): n is a, c, g, or t
agacgcggcgccgggcgtgaagccgacggcgcgccgcggcgaaaataaaagggcggaagaggcgcgagggggggtaacgcgggcgagagggcgggcgccgcatagnnnnnnnnnnnnnnnnnnnnnnnnnnnnnnnnnnnnnnnnnnnnnaaaaggaccgcggagggcaagcgcagcgcgtcgtagggggggcggcgcgaaaagagaccgcagcgggcgcggcgccgagcggtggaaaggggggagaaggggtcgaacaccaccgcggctgggccggccaaggaaggtcggccttcgtcccccgggacgccggggggggcggtatgggaaggcgccgacggtgcgaaggacgggcgagcgggcacgtggtaggncggggggcggttgacacggagcagggacggggnggcgaagagaagcgacggttcnnnnnnnnnnnnnnnnnnnnnnnnnnnnnnnnnnnnnnnnnnncgcgtggtcctagctagtggggcggtaggtgccctgcgtctaccncttctggcggagggtcggcaccagcagtgccagcctcacagccaggagcaaggcagccaagagggagaagaccacgatgatnnagcagtgatggcttcntggacngcaggttgccatcggagctggagctggtggatgaaggcaaaacagtgctattctcatttgcagaagtggtctgtatttgcccccaggctcggccccagcgggccagcaggaacggcaggcccagcgccagaagcagccccagcccggggttcgccatgggctgggtggcgggttggcagcgccgaggaaggggcttctcgcgctcgcccctcctaccgcatctccggccaggggcacctgcgacggggcacctggcccgggcgtctttgacctagctcaggttcctggtccgtgtccctccctcgaaccctcggtccgtc

SEQ ID NO: 444663 - DNA, 1207 bp, Homo Sapiens
  misc_feature (16)..(16): n is a, c, g, or t
  misc_feature (911)..(945): n is a, c, g, or t
ggggctcagcgttaanacatcctgcagcacgttgaaggggaagccatcgtcgggccgtgagcacagcagctgggccttgaggaaggaggtccagcgctgctgtagcacccgctctccaccctcatcgcccttgcagatgcgggcaatgcgggacacagtgggtgttcctcaaaggactcgaattgccctggccagtctcgctgaagagtaggtagatcttgtcatcatcgccttgcaagctgcccaggctctgcaggaagtgtaggctgaggcccacctaagcctgggtcttgcagccagttgagggagctctgcggtcttggtgggtgcgaaggctttggctccggcgagatgggccgggtcagttcccttggaagctgcttgactgttgccagtgtagagctcgccatcgaccaccagggcagtggacttggaatgtcgggtcgaagggacaacggcccttgccatcttgccaggaggacagttccccttctcggtcccttgccagggtgaagttctctatgttgatgtaggtacacatggggctgaaggctggctgtgccacaggtgaacaggtgactgccgctgagcggcaggaggatcttgatgtagttttgacagtcgcgctgtgggtccttgcccttgaagcgtgcactgctgtttcgttctcgtgcgtctgcaccccgaagcagctcctggtactccccgcctggcaggaagctgaggtttggctactgagtgcaaagagggcctctcgagcacccagcgtacagggtcctgccatccctgctcagcagaagggctgtgtagttggagatgtgttcagcttcgaatctgaggaatggccgctcttcagagcccagaggtaggctgatccgggggctgagcgcccaggtcggaggcggcggctnnnnnnnnnnnnnnnnnnnnnnnnnnnnnnnnnnnggtggccgaggcggcagcgcgccccatggggcggcgagccagctcctcaggcccatcgcggtgcgcagcattcggagagcaggagcgacggtgtcccgcggctcgggctcaggtggctcggccggactcacgggcggcagctccgccccgcggtccgcccccgagtcgccccgggggcccccgcctccggacctggggggcgggaggtgggaaacagggtcaagtgggccctggcaaactcagcccctccgcggggcaccgc

SEQ ID NO: 444664 - DNA, 884 bp, Homo Sapiens
tcaggcatggccaccatccgccatcccacaccactggccctgggccatttccacaccgtgaccctgctgcgcagcctcacccagggctccctgattgtgggtgacctggccccggtcaatgggacctcccagggcaagttccagggcctggatctgaacgaggaactctacctgggtggctatcctgactatggtgccatccccaaggcggggctgagcagcggcttcataggctgtgtccgggagctgcgcatccagggcgaggagatcgtcttccatgacctcaacctcacggcgcacggcatctcccactgccccacctgtcgggaccggccctgccagaatggcggtcagtgccatgactctgagagcagcagctacgtgtgcgtctgcccagctggcttcaccgggagccgctgtgagcactcgcaggccctgcactgccatccagaggcctgtgggcccgacgccacctgtgtgaaccggcctgacggtcgaggctacacctgccgctgccacctgggccgctcggggttgcggtgtgaggaaggtgtgacagtgaccaccccctcgctgtcgggtgctggctcctacctggcactgcccgccctcaccaacacacaccacgagctacgcctggacgtggagttcaagccactcgcccctgacggggtcctgctggtcacccgagggaacaacggggctgccggaggacctcctgtccccggccataggcgacggcccccctggagccctactatgacgctcggacaagtgtgggcgcttctacaggaccgcccagccgattgccctcggttcgctgtacccttcgcccccggcaccaccgtcttcaccatgaggaccgatacccccaccgccgcccc

SEQ ID NO: 444665 - DNA, 884 bp, Homo Sapiens
tggtagttcttgccctaggagtgttttcaaggctacattgctcctaatataacaaagtattttggaatttattttctccaattcccagttttgctttcaagagggcattttgcctgtttttcatttttttccaccggaagactctcctgtgtttccggtctcattatgatctacacttgtgtcttgagtttcctctgtatcactctcaattttgtgatctatggcattctggctatcatcctttgcctgtgaaatcttccttcgcttttttatggtgcctaagtaccagtttgactttttgcgaattttcctcttcaactgagcaggagtgctgcaagccacaggagtactcggtgtctttagcttttcattctgctctgggtctgatcttttatcaccaacaagagtggaattttgctttggcatcacatggtagtaagacggggcatatttggaggagctacaacctcttttctttatagattcctgaatttcttcacagagctgctcaaagtcttcatcaagttcttctttaattatggcataggcagtatctcttaaagcacaggctctatgcgtaataagacgatctccaggatctctatctggattgtattctaaggcattactacagattagatcaatatctctcaaatagtctttcacagtcagatacttgtgtagatcaattttactgattacagatgaaaggtccattggttgctttattacagtgacataatcaggaacctcatcagggtcaacaggcttagtaaacactcggaatcgcttgtcaatagcaagcctatgtgtaacatttcttaagaaaatcctcagttctctaaatgtatcttcttctggtgaatatagtcgtttcacttctt

SEQ ID NO: 444666 - DNA, 454 bp, Homo Sapiens
  misc_feature (170)..(225): n is a, c, g, or t
aacctcttcaggatttattgggtcagggaagggcctggccagagaatctgtcctgaggtgtccctggtactgcactcctgagtttctccctgagttgtctgccgctccttgttcagccataccaccatggggtgactctgtcaagcacctgggggtcctgggtgcccagnnnnnnnnnnnnnnnnnnnnnnnnnnnnnnnnnnnnnnnnnnnnnnnnnnnnnnnnctccatgggaggatgtaattttcctgaaaaagacagggccgggcccacccagggtccacttccactcagcatcttggattccagggaagcagacagcgttcaggtcctgcccttctgtgactccctgcagccactgcttcttgaagcctttgtctctaagcttctgtccagctcaaacccacccaggtgccagggtctttggacaccagggagccaggtgtccacattc

SEQ ID NO: 444667 - DNA, 1102 bp, Homo Sapiens
  misc_feature (173)..(228): n is a, c, g, or t
tttaacctcttcaggatttattgggtcagggaagggcctggccagagaatctgtcctgaggtgtccctggtactgcactcctgagtttctccctgagttgtctgccgctccttgttcagccataccaccatggggtgactctgtcaagcacctgggggtcctgggtgcccagnnnnnnnnnnnnnnnnnnnnnnnnnnnnnnnnnnnnnnnnnnnnnnnnnnnnnnnnctccatgggaagatgtaattttcctgaaaaagacagggccgggccccacccagggtccaccttccactcagcatcttggattccagggaagcaagacagcgttcaggtcctgcccttctgtgactccctgcagccactgcttcttgaagcctttgtctctaagcttctgtccagctcaaacccacccaggtgccagggtctttggacaccagggagccaggtgtccacattccctggcaggagtaggaggttgacatgaagcaggaggccgatgcacaggccaggtaccagagtatgatcaggaggagctgtgcttccccactgttgggtagagcttgcgcaggctggagtccatgaggaaatccaccgacctgtcaatggggtggataatgatggggatggttaacatctcaagcgcggtggtggtccacttgcggacagccaggggccagcgggtggcagtgcccaggacatagagagaggcagcacacacgcggttgatggtgaagcccggaatggccacagaggctagagcctctccagccttcttgcctttgtcaatggcatccgccagcacgtaggagctggccacgccatagctcagccacaccaccgccgctggcacaagagagcggaaagcctcgcccacctcattggcatagcccaggtatcgcacccacgtgtcccggtagagatcgcgctctgcgccccgcggctgcggctctgacatgactctcccgccacggccccggccactacagccggtactggctccactgcagtctccgccgccggcacgtgggtgtgcccggcctcgtgccgagttaacacccgagcctcgctacctagccgtaggttttgtgtttttgttgtt

SEQ ID NO: 444668 - DNA, 1569 bp, Homo Sapiens
  misc_feature (265)..(273): n is a, c, g, or t
  misc_feature (1428)..(1484): n is a, c, g, or t
tccgaaggtattccccggggtgactcgcctctcccgaatttttctccgcgagatttttctgcccgtctccttggtgaagccatatcccgccaagggggggaattcgttccaagccccttgggggttctttgggaggcccgggctttcccaaggtgatttttgggccctatttccctgcgcccttccccggagcctgcaattgttttcattccttccagggggaaggaagtaatttttccgggaaaaaagaccagggggccggggnnnnnnnnnagggtgtccgcttttcccgttcaggcatctttggatttcccggggaaaggcggaccaggcggttccaggttccttgccctttctgtgacttccctggcaggccatgggttcttgaagccctttgtctttaagctttttgtccagctccaaccccacccaggtgccagggtctttggaccccaggggagccaggtgtccacattctctggcaggagttggaggttggcatgaagcaggaggtcgatgcacaggccaggtagcagagtatgatcaggaggaggtgggcttcccccctgttgggtagagcttgcgcaggctggagtccaggaggaaatccaccgacctgtcaatggggtggataatgatggggatggtcaacagcccaagcgcggtggtggtccacttgcggacagccaggggccagcgggtggcagtgcccaggacatagagagaggcagcacacacgcggttgatggtgaagcccggaatggccacagaggctagagcctgccatacaaaggtgtccaccacagccacggtcaccctggcgctgcggcctgcttcagggctgggcacctctccagccttcttgcctttgtcaatggcatccgccagcacgtaggagctggccacgccatagctcagccacaccaccgccgctggcacaagagagcggaaagcctcgcccacctcattggcatagcccaggtatcgcacccacgtgtcccggtagagatcgcgctctgcgccccgcggctgcggctctgacatgactctcccgccacggccccggccactacagccggtactggctccactgcagtctccgccgccggcacttgggtctgcccggccgggacccgccgaaagtcccgcgccgaaggacaggtcaggaaatctccgccagcagggagcgtctgcaaattccccccgcgcaccgaagcccctctcccaggctcgggttttacagactggttttcgtcacgttttctctgagctgttggcgctaatcgctcccaggactgagtgtaggttttggagccaaagagacaggggatcaagttgggggatgctacactgcaaagcttgtgacctcgggcttatccagcatctctttattcatttgtaaaaacgaggggagggacacagggctgnnnnnnnnnnnnnnnnnnnnnnnnnnnnnnnnnnnnnnnnnnnnnnnnnnnnnnnnngaaaaatctccttgagccccaaggggttcgaaaaacagcctgggacaaaataacggaagaccttcggtctcttactattagaaaa

SEQ ID NO: 444669 - DNA, 618 bp, Homo Sapiens
  misc_feature (55)..(55): n is a, c, g, or t
  misc_feature (221)..(221): n is a, c, g, or t
  misc_feature (368)..(368): n is a, c, g, or t
  misc_feature (391)..(391): n is a, c, g, or t
  misc_feature (394)..(394): n is a, c, g, or t
gacacttaatccagctggggcagaggcagaaaatcctgcgacaaggggcacgagnctagaccgggaggggcaagtggccagtggacttgtccgcacccaggagtggggtacagtctgccacatccagttcggggagtgggagtgtgggggcaggggtacactgtcctacaaacaggactgtctatggactgcactaggcaaggttgtagggactggaggtnccacagggactttatcacatgcaaggctgtggactgaaccacacaagaagagagctagggttgggggttggaaaataggctaacacttcacctctccagccttcttgcctttgtcaaaatgcatccgccagcacgtaggagctgccnacgccatagctcagccacaccanccncgctggcacaagagagcggaaagcctcgcccacctcattgcatagcctgggggagggaacatttaattcctaggctcgcaactgttccacgagggggcgttggagcaggctggttctcatcctagccagctaagcagtccctgggtgaccttaggcaagtgacttgacctctctgagcctccctttccgagatgtaaactggtgccatgatgcccacctcggac

SEQ ID NO: 444670 - DNA, 999 bp, Homo Sapiens
aagtcataaaacaaatttattttaaaaatcaatatcttgcatttcagatatacagatgtatcttttaccagcaggtgaaagcaccttttccagaatctgcttccagcagaatcaatactgatttcgaaactggttgcttaggtcttggagctctgtcactaaggtgtccatagctgttatgtcatcagctaattccctggacatttctccagttgccacatctgtaaaaagttgctttgctttagataacaagccccgtaaattgagtcgaacagaagaaagcatttgtacagcttcttgggaactggatttgtttttactgcattttatggccacatgtgcaagtcctaaggctctttgaacaacttccttaaatgatgtaatatctttctcccaacaattggactgggtgtcacacttgtatgcctttgagaggcactggaatgccttttcattttcatcaggcttttcactctgcccatttccatatacgtgggcatacagcctccagatttctccatcatttgtcactcttgaagtcactctgccaaataactcctgcagctttcctttgaggccagttgcaacatctccacttcgatcagtcatcccatcaatcactgccctgactagaattttaaggacctgaacatctttgtatttgtcacgtaagtccaagagccggtgataagctttaatggcttctgaaaattccccaacgtcagtgctggtgaggatgtagttttcccaaatctgccagtgttcatagttacacttgagagcttcttgtaaagttctaaaagcttttactttttgttttaatcggatataggaagttgacaaattgttccaagcttcagcattatcgggttctagagtcacacagcgctgaaatgcctttgctgaaccttgatagtcttccaaggccaaataggcacaaccgagagaaaaccacaccccgagctgcatgggattaatcttaaccgagcgttcgaagca

SEQ ID NO: 444671 - DNA, 581 bp, Homo Sapiens
  misc_feature (525)..(525): n is a, c, g, or t
tgccaattcaacataaatttatttttgtgtttattttacaaaaagactttagaacacatgaggaacactagatgatgagagtgagcagccttttcagcctttgtttctttcttctttaaatacagatgttgacagtaaagatggattagatgcagtccactttttcctcagttggctgatttttttcggaattataaaccatgaaactaaactgagtaaatgttgaaagtttattgcaagcagcaccgtaacttccagtcacattggcacatataacagccccaaagaattctggaaaatgcttctggattcttgaaatcactttttggcaagctatggttggatcttctcctcttctcatgtattctacagcttggtagcttggcaggaagcgcatcaattatatcaccattcccagtggctgcggctgcccctgcagtatcgtcagcataggctccagctccaggtattgggtgagtctcctacacggcttttgagagggtattaacaattttagggcagggnaatcgagtgtaaaacacattaagtcataaagccggttccaaaataaggggatagtt

SEQ ID NO: 444672 - DNA, 1103 bp, Homo Sapiens
  misc_feature (30)..(30): n is a, c, g, or t
  misc_feature (44)..(44): n is a, c, g, or t
  misc_feature (49)..(49): n is a, c, g, or t
  misc_feature (57)..(57): n is a, c, g, or t
ggctgaattttttcgggaaataaaaacccngaaaacaaaatgantaaangttgaaantttaatgcaaagcagccaccgtaaacttcccaatccaccatggccacataataacagcccccaaagaattctggaaaatgccttcctggattccttgaaaatcactttttgggcaaagctatggttggatcttctccctcttcttcatgtattctacagcttggtagcttggcaggaagcgcatcaatatatcaccattccccagtggctgcggctgcccctgcagtatcgtcagcataggctccagctcccaggtattggtgagtctcctacacggccatgtattttgaattttataccatttgtagatgtaccagcagcaatatgtcctgtcttatggattacaaccatgccaatagtgtcatgaccacgatcatcttctgtttctttatggataggaatatcctgctttaagataccaggtggtttgtagggtccgcagtattttgagggatctggtataacattcctccaataatttggctggcaattccgagcaagccaatctgaatgaagagcttgagaagcactggtagataagtcttcattgataaaccccatactttgagcaaatgtggtggctgactctcctactaaaagtgtgtgtgttgtatgttccagtactttccgtgccacaccaatagcatttttaattcgtctgagatctcctactgctcctacatccatagtagtgccatccatgatcatggcatctagtgtggtttctccaagttcatcaggacttcctccaaagcctacagagccgtcacactgctctctctcacacatggcacagccgctctccactgcatccagggcagagcctccagatgctaatgccctccacgctgcttcggttgcattcttaaagggccaagtgttgacgaccaggggcagagggctggagcagcgcactagggcctggcagagcagaaacggcacgagaagcacaggcaagttcgacttccgcgccatccctgaccaccgaagagaccagcgcgagaaaagtcccggcagccagcgatcgccgaacaattaatcccccc

SEQ ID NO: 444673 - DNA, 1317 bp, Homo Sapiens
ctaaaaaatattttaatacttgaaaacttctaaaacaaaaggtaaggtaacatgttctttcaaaagtgaatttcacatgcaaaccattaattatatttattttactgtgagataaaagcaaaacataacattcggagaaagagaccagtaactgacctatttattttatattatattaatgtgaatcctcattagaaatgtgataacgttattgcacaaacaaaaccgtgggcagaaacatcccagcaatgcaggggcgcccataccgggttacaagggatgtccagcatgtgtttccctggaacactcagagtctgcacttttcctgcaaatgggaccatgtctgattatttattatgaaagaacactttaccgaccatttttttctcagttggtataatgtagaaataggcttttttacatccattaaatagtcttgaaaacatttttgcactaaatcaaacgagctgatatcagaaagcaattgccaccttccacctggagtaatgtgtgcatttttaatgctatgattatatgcttctttagggtgacacagtttctcttctggcttctataacacctgcattaatcttccttttttgctgttaaacaaaacttgctggcattatgcatcccatccactgggggtgggctgggaacaaacaggtttcgatggttcttcacaaggagacaaacaatctgaattatcttttacaaacagtgaaaatgacaagatgtttgtctctcagtatgcattttaaaacaacataaatagaatacacttcttttaacaaagcctggccttggtggctttctagcttgcagtctaagtaacgtttggtttgcagaagggattccctgggagacggctgtgtggggcaacctcacttactggttgtgtgttctccatgggaaaagcaccagatggggaagcccaggatcagatgtaagctgcaagcttctttctctcttcaaactgcttgtccactgccagagacagggcctggaggaacccctctatggtgacggtgggggcctggacatacagcgcatgagccagaaaggggagttttctcaggacccggccgctgaggccctcgctcttccttgaaatgtcattcaaaagaaggctcaattttgacacgttgttttcaatgaagccaatcatctctagctctcggagggtcagcagctgctggcgagggtatatgatctgacacgcacgtcactgtgcccgtggcgacggccctcctgactcacacacgctccccgcacgcgtcgctctgcccgtggcgacggccttcctgactcacacac

SEQ ID NO: 444674 - DNA, 1185 bp, Homo Sapiens
cacaaaaagatgtattttcattcatgagtatttacattttccatatttgtttaaagaatatcatataactgataccttctgaaatgtttcatgcttttaaactcttctatttacacttatctgacatggaattaaaactaaaatggtcaaataccatgataatagaaagcaaccagccaacatagctaggtcttctcttaaatttgctgatcaacattagcagtagttaccttaataataaattattcattttaaaatcagtagtaactttagacaattcataaataagtgtgctctgtgcaatttacacgtttaatatcctgtggatactaaaagcttgtatattgtcagatttgcacattattactttatcaaaaacagtaagctttcccaaagatgaagctggggaaacttgaaaagatattctaaaggttctctggagagttatcaaagctctgcctgctttacaggaggaggttccaatttacgcgagagggcagttaaaatctggttgaatttctcatatctctctgtctgattgacttgtgcacctttgctgccccatagcaatcgcatttgaaattcagtcttgcagatttcattcatttcttcatctggttgaaaacctgccaggatcctctcagcattcatccggtagctgtctgcagcctcggccatgaatcgcgctgttgccaaatggttcagcatgatttcacagctctggtcgtttttttcccacatgtcggttccttcaaaagtcacagcctggcgctccattaacgtcacaagcggcatcagcagtgggactgatacattgtttgggggaacacatgtggactctctgccttcatgcaggagtttgctgaagggcttcagctgtttctcatagagaatggcagtttgggtgtactggtgccgcagagcagtccacgtcttttctaaccttgtgatctgtggcatttccaggtctttcatgagagctgagaaggaatagaggtcccccatggaatccttcagttccaccgccacctggatgatcttactcagagtggccgctcggtcctcccaagtgcccgtgcatcccagaatgtccactgcaatgccgatggccattgtgttgtgtctttcaattatgtccaggcgcagctggtgtccgtgataccaacggcagtgagttccaacctg

SEQ ID NO: 444675 - DNA, 1926 bp, Homo Sapiens
ggtacctgctgcagacaacagcaaggcacttcagaatctccaggtacccagtctcagttgccgttcagtggggacaagagtggtgctgagggcatggtcacacccttctgtgctgcatgcagaggggtgcaaggccagggcagctgacctggtcagccaccaggggagcccacgcctcttataacacagtgtccttgggtcaggaatttgtagtttattttgttattaagatggcgagagaatttttcgtccatttagagcctaacatttttagatgaatgttaatggcatctcggttgggatggattcgtgttcgtttctcagctgctgaaggatgtgtgttctaaaacaaaagggctcccagccagctctccggctgcatgatagagaagtgttttgtaagacgcttgttaaaaacccatattccctggcccctcttgtggagaccctgtttcagtagatgggaatggggctggggtctgtataacctgtgcccaggagactctgtgaccagcttgggaagctcctgcagggaggaaggaatgatccacaagtccccaagcccttcatgctgaggcatctgtctggctggagaaacactaaggttggcattgtgctcacactgggaaatgacctggaggaagttgggaagaggagtccaggccggttccaccctctgggtcagaaacccggctggaaagcactggaaatagggaaatagaagaccgaaaggctgggacccccctcacacccaacctgcgtccatggccgaggttgagtgaggagtcctggagactctggcttcatggtctttgctcttgttcttctgtgcctcaggggtcgctgcccaccaggctcagcagggcgttcttgtagtcaccgctggtgtcttccatgatcatgctgctgagggtcttgccgtacatcttcttgaagtgacatttgataagatttaagtcaatctcgctccttgaaacgatgtttcttatcagggtcccatcacgcgtccctgctcccttcatggcatagtagagtctctctgcaaagtagctgtggaggttttgggtgcatttcaccacagtgagcatggcctcctccagtgagccatgggtctcactcttgatgctgtcctcaatgctcttgttggcaattttctcatactcttcaaacactctcagcaggtgagtggcactgcgcgtgcacaggatggtgatgaatttcatctcatcagtcccacgaatcttctcgcctgccgcatacagatcctgtgcgtcttggagggccagtgcctgggtccacaaagctgctcacatcatccctgctgccctgcaggaggcacaccaggatcctctccaggtagccacttgtgtctgcttggatgtcctcctccaggctggacccatagtcttcctcatacgccttcattatctcccgcagctggttcttggtccgagaggccaggatctcaatgatgacaccctccttggttcctaagcccttcatggcgtcatgcagctccttggcttcgtatctgtatggcgggtacataagggccacaatgagcctctcaaacttgccactgagctcagacttcaaggtctcagtgaggtccttgccgaactgagccttgaaggacttggcgatctgctgccgctgcgtgttgcttctcttggtgagcacatcgatgatagcctgctcgttggtcccgatccccttcatggctttgtagagggtctctgcatcagggtctgggttgaagtgggagctgctcttcactgtgacaccctcctgttcaatccaggatttccaccaggccatctctttcacctcgggggcacctttcccagggagatgaagagacacaggttggcctctgctgggactccacacgtctggctcccctcgtgccgaattcgccacccaggc

SEQ ID NO: 444676 - DNA, 456 bp, Homo Sapiens
aatgaaggcaccagtgtgctcagaagaccaggggcccacccgggaggtcatagcccagttgctggaggatgctctgcaggttgagagccaagagcagccggagcaagcatttgttaaacctcatcttgtcagtgaatatgatatttatgggttcaggactgtacctgaggatgatgaggaagagaaattggttgccaaggtccgcgcgttggatctgaagactctctacctcacagaagccagagtctccaggactcctcactcaacctcggccatggacgcaggttgggtgtgaggggggtcccagcctttcggtcttctatttccctatttccagtgctttccagccgggtttctgacccagagggtggaaccggcctgactcctcttcccaacttcctccagtcatttcccgtgtgagcacaatgccaaccttagtgtttctccagcacgtac

SEQ ID NO: 444677 - DNA, 922 bp, Homo Sapiens
  misc_feature (66)..(74): n is a, c, g, or t
  misc_feature (116)..(126): n is a, c, g, or t
  misc_feature (289)..(289): n is a, c, g, or t
  misc_feature (383)..(383): n is a, c, g, or t
tggggagcggagggttctctctgacagaaggggttcccctcctccagcccctcttttttgtttctnnnnnnnnnacaaaaagaggccccctttttttggggttttggaaaatgggnnnnnnnnnnnatttcacggccaaccagggtttcccttccttccctccacggggattttggggggggacttctgggcttctttgggaaagaaaagggaaagtttttcctttggctccccagaattttgccggaagccggaagaattcagaagccagcaggtattagcagagggnagaggggggctggaagtgtccccccctcgccaccctgatgttccactttctccagggctcccaacaggatgggctgactcagacttcttctccntgcagcagacagacacctggagcctcaagcactggccagaactctctggagtgggcaccgagatgtagtagtaagtctctccaggtaagaactcaaagccgagggagaagggtgtgaagcgctgaatcttctctgagaattgaacatggccaaagggcagggagcacacccagcgcttgtaggcccgggggccctctgcctggcaggactcatagcctggccagtccaccatgtacaaagcaaacgtctcggggccctcagggggccctgggccttcgtagtgggggcagacaatgtctaggtaatcgttgaggcccagctccaccacggcgtctcctcgaagcaacctggggttactggagttccagtagactacgtggcggaggctggagcccccgcgcagaggggagccgaggaacgcggcccagaggacagtccgcagcaggggcagcagccgcatcgcccccgaggtccggtttggtctggcctggcaggtcccggcccgcttcacagtcgaggagagaaaggtacaaagtgaa

SEQ ID NO: 444678 - DNA, 1006 bp, Homo Sapiens
  misc_feature (789)..(789): n is a, c, g, or t
  misc_feature (803)..(803): n is a, c, g, or t
  misc_feature (823)..(823): n is a, c, g, or t
  misc_feature (825)..(825): n is a, c, g, or t
  misc_feature (864)..(864): n is a, c, g, or t
  misc_feature (994)..(994): n is a, c, g, or t
tatcgccttatctcttttctccctaattccccacttactcttctgtgctggcgccggttcggaattcccggcacgtttccgctggcggcggcggcggcggtgccggagcgcgagcagagcggagacccccaggtcctgcgggcgcgaatttaagaagtgcaacatggccaggggctgcctctgctgcttgaagtacatgatgttcctcttcaatttgatattctggctctgtggctgtgggctgctgggagtgggcatctggctctccgtgtcccaaggtaactttgccaccttctcccccagcttcccttcgttgtctgcagccaacctggtcattgccataggcaccattgtcatggtgacgggcttcctcggctgcctgggggccatcaaggaaaacaagtgcctcctcctcagctttttcatcgtcctgttggtcatcctcctagcagagctgatcttactcatcctcttctttgtctacatggacaaggtgaacgagaacgccaagaatgacctgaatgaaggcctcgctgctgtaccacaccgataacaacgtggggctgaagaacgcctggaacctcatccaggctgagatgcgatgctgtggtgtcactgactaccccgacttgtacccattgctggtggagaacacgcgttcccgaccgctgctgcctggagaacttccagggctgcgggcgcaacgccaccacgcctttgtggagaacgggctgctatgaaaaggtgaagatgtggttcgatgacaataagcacgtgctgggcaccggntgggggatgtgcantcctcatcatgcagatcctngngcatgggccttctccatgacccctcttccagcacatccnaccggacttggtaagaagtacgaacgccatgaacgggcctggcccggggagtgccccaccccgccccctgctggccctggtggaaggggaagaagggatttgaagccttttgtgggtcgccctgccctgncggcttctccac

SEQ ID NO: 444679 - DNA, 791 bp, Homo Sapiens
  misc_feature (20)..(20): n is a, c, g, or t
ggacggtcgcgaatgcgtanatggcggggcggtgccggagcgcgagcagagcggagacccccaggtcctgcgggcgcggaatatcctggaaccttcttttgtttgtcagcagccaaggtgtttccaggaagttcagagagaacagaatttaagaagtgcaacatggccaggggctgcctctgctgcttgaagtacatgatgttcctcttcaatttgatattctggctctgtggctgtgggctgctgggagtgggcatctggctctccgtgtcccaaggcaactttgccaccttctcccccagcttcccttcgttgtctgcagccaacctggtcattgccataggcaccattgtcatggtgacgggcttcctcggctgcctgggggccatcaaggaaaacaagtgcctcctcctcagctttttcatcgtcctgttggtcatcctcctagcagagctgatcttactcatcctcttctttgtctacatggacaaggtgaacgagaacgccaagaaggacctgaacggaaggcctgctgctgtaccacaccgagaacaacgtggggctgaagaacgcctgtgaacatcatccaggctgagatgcgatgctgtggtgtcactgactacacagactggtacccagtgctgggggagaacacggttcccgaccgctgctgcatggagaactcccagggctgcgggccgcaacgccaccacgcctttgtggagaacgggctgctatgaaaaggtgaagatgtggttcgatgacaataagcacgtgctgggcacggagga

SEQ ID NO: 444680 - DNA, 1706 bp, Homo Sapiens
  misc_feature (570)..(631): n is a, c, g, or t
  misc_feature (646)..(735): n is a, c, g, or t
  misc_feature (1294)..(1294): n is a, c, g, or t
caaaaaaggattttgggggcgggtattaaggttgggaaaaattctgagcccttaattctcccttaaaagaggttttaatccgagaggtaaaaagtttttgaggggtgccggaaaagtacccccagggtggaggtttcgggccgcgttttttaaatgttgagagtgggcgccaaatatgggagaaaaagtttcttttcggcgcccgcgattttcccccttggggccaaaattttttattaccccagggtgctccaaaggggtttgtaaagtcggtgggcggtttccggtgttaattaattcccctttttgtaacgggtttccctggcgggccgggaaggtattagggggattacaaccgcttctggggatcagtgggcaagggcggcggggaaaaactaataaagagactcccctgagggttccttgagatagatgccaaaagagtgccgtgaagactttcctttggggaatgttgagagaaattcggatgcccggccggcgttttttaatactggaaaaccaaactgtaatctatgaccgggtttcttgggaaacaagtaatgaccaagnnnnnnnnnnnnnnnnnnnnnnnnnnnnnnnnnnnnnnnnnnnnnnnnnnnnnnnnnnnnnnggcgggcggacaagnnnnnnnnnnnnnnnnnnnnnnnnnnnnnnnnnnnnnnnnnnnnnnnnnnnnnnnnnnnnnnnnnnnnnnnnnnnnnnnnnnnnnnnnnnagaagtaaccacccagaggccaccatttactgcaagggtttttctgggaccaggagaggaagaggctgctctggcctgggacacccccactgctctcaaggagctggcatctcagtggcctctgagcccagcctgagccctgtgggagtgcgggggcagtgactggaatgtgctgctgggcaggctgcagcagccgaggtggccccagggcagaggagtgcagcgcagcctcatgggtgccctatgccacccctggtgctcactgggctgctgatgccgtcctgggtcactgcaccggtgaggtggagcggcccaggccaccaccttgactgggaagggggtggggggacgaggacacagctcactgtcagggtgggggagcgcagggctggctgggcagaggctgcagtggggtcaggctcaaagggtgggatccagggtcaacaggagtgcggctgtgctcgggagctggctgttcccagaggaccagctggctggtccgagaggatgacggctgctggccaggagctccctcgtggatgccttcctgggctcccanggaggatggctgtcagagggggcacgggcagccgcgggcctcaggcccacgtctctgtctggaagcgccgtgtctgctggagcctggctagatacgcggctgcgtccgggctgcagagtccaccctcctcctggaagatggacatcagggcttccgagacgtccgctggcatggacttggcgttgcctgccaggtagaagtatgcaccctggcggtccagcagttcccacacaagcgaccccagctcccggagccggtgctgcacatatattttctgctcctgttcccgggagaaggcagggatgagggtcagacagtcccgcttctccagctcctgccactcagcctcccagtagaagtcttggtcccgccagcggcagccaaaaaacaagaagtttccagtctggccctg

SEQ ID NO: 444681 - DNA, 796 bp, Homo Sapiens
agcgaggcctgggtggcgaattcggcacgagggccagacggccccggagacgcctggagggctgtggcccgggatgtctgggacactgtaggcgaggaggaaggaggtggagctggcagtggtggtggcagtgaggagggagcccgaggggcggaggtggaggacctccgggcccacatcgacaagctgacggggattctgcaggaggtgaagctgcagaacagcagcaaggaccgggagctgcaggccctgcgggaccgcatgctccgcatggagagggtcatccccctggcccaggatcatgaggatgagaatgaagaaggtggtgaggtcccctgggccccgcctgaaggatcagaggcagcagaggaggcagcccccagtgaccgcatgccgtcagcccggcccccctcgccaccactgtcaagctgggagcgggtgtcacggctcatggaggaggaccctgccttccgtcgtggtcgtcttcgctggctcaagcaggagcagctacggctgcagggactgcagggctctgggggcctggggcggggggctgacgcaaggcccccagacccgattaagtgccccctcaggacatgcaaggctacgcttccccttcaaagagcaagccaccagcaccggagggagtcatttgggcccaagggatgggggacgcgggcgaaggctccaacatccgatccgaagaccacctgaagggaggtcaagtcccccaatcaatgacgcaccgctggacagagagggacttcacgaatccaccgagaggaccgagccatcc

SEQ ID NO: 444682 - DNA, 906 bp, Homo Sapiens
tacttcctgtttggacttcccggcacatctccgtggggacctttgctgtcatgtctgtgatggtgggcagtgtgacagaatccctggccccgcaggccttgaacgactccatgatcaatgagacagccagagatgctgcccgggtacaggtggcctccacactcagtgtcctggttggcctcttccaggtggggctgggcctgatccacttcggcttcgtggtcacctacctgtcagaacctcttgtccgaggctataccacagctgcagctgtgcaggtcttcgtctcacagctcaagtatgtgtttggcctccatctgagcagccactctgggccactgtccctcatctatacagtgctggaggtctgctggaagctgccccagagcaaggttggcaccgtggtcactgcagctgtggctggggtggtgctcgtggtggtgaagctgttgaatgacaagctgcagcagcagctgcccatgccgatacccggggagctgctcacgctcatcggggccacaggcatctcctatggcatgggtctaaagcacagatttgaggtagatgtcgtgggcaacatccctgcagggctggtgcccccagtggcccccaacacccagctgttctcaaagctcgtgggcagcgccttcaccatcgctgtggttgggtttgccattgccatctcactggggaagatcttcgccctgaggcacggctaccgggtggacagcaaccaggagctggtggccctgggcctcagtaaccttatcggaggcatcttccagtgcttccccgtgagttgctctatgtctcggagcctggtacaggaaaagcaccggggggcaaactccgcaggttggctggaagccattctcttccccttttttcatcccttcctccatcata

SEQ ID NO: 444683 - DNA, 869 bp, Homo Sapiens
gggtaagaatgccaaggccttattccgtgacccgggtgttccttagggaaacaagtagggcccaggttccacttaccttactggacccgcgcgcccaaaggaatggtgtagaaagcttttgaggggcccgaggcgggccgacaggaatggattagggatgggtgggtgtggggatcaaaaacctttattctggtcctcatcattcaggaagccacttatgcagaacactttcttcatctctgctctaagcagcagcagctgcatccaggcttgatatggaagacagacagaaatagtggaagaccttgcagagaagagctaattgatgagatctctgcttatcccggcataggtgaaggcagaacaggaagagtgtgtgtaagtgcaaagactccgttcttcaaagctgaggcctgtgcagaggggtgaactgaaggcttcagatgaaggctcacaaaactgccccgctcggcaatcaatctaaagtaccttccagaaaagcaaattcatccacagcttctattgcattatccaagtctctcctctgaagggttttcctttttccctgctgagcgcaacagtaggcatcttttgcaatggtctccacaaacagttccgcggctcgtgccagaatgaagatggcttcctgtcccgctagcgtcacgtcgggatctgccttcaccaaggccttcactcgcgccagaggcaacctcgagagacgagccccaggcacactcgttggggcctggggctgcgaggccgctgcctccccagcaggtccctcctcctctcggggcgtcccgcttcctgccgccgccgccgccgccatcccggccttgagcgtgctgcgcgcggccgcccactccgct

SEQ ID NO: 444684 - DNA, 1165 bp, Homo Sapiens
  misc_feature (1041)..(1100): n is a, c, g, or t
gctggtaccgggtccgggaattccctgggatctcatccagggcttacagtcactgcctgtggccggcacagacacagcccctgtcctcctaggcgggtccaggcaccgcgctcaccagaggccctggctacgagtcccaggcttcttggggaagctgcccaaccacactggcttctttctgcgacgcttcgccgtatgcctcacagcgtttcctccgtatgcctcacagtttgctccgtacacccgcgtttcctccgtatgccccagtttcctccatatgcctcaatttcctccgtacgccccacagtttcctccgtatgccccagtttcctccatacgccccggtttcctccatacaccccacagtttcctccatacgccccacagtttcctccatatgcccagtttcctccatacaccccacagtttcctccatatgcctcaatttcctccatacgccccccagtttcttccatacaccccacagtttcctccatatgcccagtttcctccatacaccccacagtttcctccatatgcccagtttcctccatacgccccccagtttcctccatacgccccacagtttcctccatacgccccacagtttcctccatacgccccacagtttcttccatacgccccacagtttcctccatatgcccagtttcctccatacaccccacagtttcctccatatgcctcaatttcctccatacgccccccagttttcttccatacaccccacagtttcctccatacgccctcaaattttctctgtacagccccacaattttcctccatatgccttcagttttcctccatacgcccccagttttcctccataccgcctcaattttccttttgtacgcccccaagttttcctccatacgccccaagtttcctccataccgccccagttttcctccataccgcctcaatttcctcctggatgctttcaagtttccctccataacaccctcaagttttccttccgttcttggccttcacaagtgtttccctcttaataaagccctccannnnnnnnnnnnnnnnnnnnnnnnnnnnnnnnnnnnnnnnnnnnnnnnnnnnnnnnnnnngatttgggcttggggtttttggccccccaaagggggcacgggacacaaaacggaaaacccctttt

SEQ ID NO: 444685 - DNA, 1647 bp, Homo Sapiens
tttttttgagttagaaaattgtatttgtctctttattggtctagaaaggggtggagacttggaatggtgaggcctgggcccatgtgggagtggggtgtgcacaggtcagcaggtcagcagaggagtggggctgggctggggctgcaggagcgattctcccagggccaggagagccagtgagggtggtccgcactccgatgggacacagtatggccaggccaggcggagcaacccctcctcagtgctgggtcatcttggccgggctcggggggtatctgaccttcaggccttcatcattcatcagaggcctcaccaggcaagagcggcggtgagagaaagtctcgaagctcttcttgccatggtaggatcccatgccggtgttccccacgcccccgaagggcagagagtgcaaggtgatgtggacgatgacatcgttggccgccaccccaccactggatgtctctgcaatcatcttcttaatcaccttgtcgttgctggagaacatgtagagggccaggggcttctcacgctggttgatgaactggatggcctcctccaggctgcgcacgcacacgatgggcagcacaggcccgaagatctcctcttgcatcaccggggactgggggtccacgtccgtgaggatggtgggggctatgtagcgagtggcggcatccccggtgcccccataagccaccttctggccctcaatcaggcccatcaccctctggaagtgccgggcactaatgattcttccatagtcccgggatttcttagcatcttccccgtagaactctttcagtgacttcttgagcttctccacaatttggttctggatcgaggggtcacagaggatgtagtcaggggccacgcaggtctggccactgttcatgaatttcccccaggcgatgcgtcggcaggccacgtccaggtcacagttcttgtccacgtagcagggactcttccctcccagctccagcgtgacaggggtcaggtgcttggcagcagccgtcatgatgatcttccccacccccgtgctgcccgtgtacaggatatggtcgaacctctccttgagcagctccgtggtctcagggacacccccattgattactgggtacagatccttgtccaggtactgggggatgatggtagccagcaggctcgccatgttctcactcagctccgagggcttgaggaccactgcgttccctgcagcgatggcgcccaccatgggctggatggtgaggttgaaggggtagttccaggtgccaatgacgaggaccacgcccagtggctccgagtggatgtagagctcgtcctgctgagtctggggcgtcttctccacgggctcatccgcggcccactcagggagcttctggatcatgtactcgatctcctctaggacgtacaccacctcctcatagtaggcgttccattcattcttgtgcaggtctgcggccagcgcgcccaccagctcctgctcctgctcctggatcaggcgctgcagcgcctccagctgctggatccggaactgcagcggacgggtcctgcccgagctgaaggcggcgcgggcgcgcttcacggcctcgctgatcttgctcatggcgcctttgacacagcctctcccggtatcccgggaattccggaccc

SEQ ID NO: 444686 - DNA, 706 bp, Homo Sapiens
aagggatgggcgcgctcgtgcccctcagccagctgcaggtgctctctgtccccaggcgccatgagcaagatcagcgaggccgtgaagcgcgcccgcgccgccttcagctcgggcaggacccgtccgctgcagttccggatccagcagctggaggcgctgtagttcctgatccaggagcaggagcaggagctggtgggcgcgctggccgcagacctgcacaagaatgaatggaacgcctactatgaggaggtggtgtacgtcctagaggagatcgagtacatgatccagaagctccctgagtgggccgcggatgagcccgtggagaagacgccccagactcagcaggacgagctctacatccactcggagccactgggcgtggtcctcgtcattggcacctggaactaccccttcaacctcaccatccagcccatggtgggcgccatcgctgcagggaacgcagtggtcctcaagccctcggagctgagtgagaacatggcgagcctgctggataacatcatcccccagtacctggacaaggatctgtacccagtaatcaatgggggtgtacctgagaccacggagctgctcaaggagaggttcgaccatatcctgtacacgggcagcacgggggtgggagaagatcatcatgaccgctgctgacaagcacctgaaccctgtaacgcatggagcctgggagggaaga

SEQ ID NO: 444687 - DNA, 920 bp, Homo Sapiens
agcatttttccccggtaggacctctttccagggggacttcttgaaggcttctcccacaaattgggttccggatcggaggggtcaccagagggatgtagtctgggggccccgcagggtctggcccctgttcatgaatttccccccaggcgatgcgtcggcaggcccacgtccaggtcaacagttcttgtccacgtagcagggactcttccctcccagctccagcgtgacaggggtcaggtgcttggcagcagccgtcatgatgatcttccccacccccgtgctgcccgtgtacaggatatggtcgaacctctccttgagcagctccgtggtctcagggacacccccattgattactgggtacagatccttgtccaggtactgggggatgatggtagccagcaggctcgccatgttctcactcagctccgagggcttgaggaccactgcgttccctgcagcgatggcgcccaccatgggctggatggtgaggttgaaggggtagttccaggtgccaatgacgaggaccacgcccagtggctccgagtggatgtagagctcgtcctgctgagtctggggcgtcttctccacgggctcatccgcggcccactcagggagcttctggatcatgtactcgatctcctctaggacgtacaccacctcctcatagtaggcgttccattcattcttgtgcaggtctgcggccagcgcgcccaccagctcctgctcctgctcctggatcaggcgctgcagcgcctccagctgctggatccggaactgcagcggacgggtcctgcccgagctgaaggcggcgcgggcgcgcttcacggcctcgctgatcttgctcatggcgcttgcttgcaaagctgatggcacaatcccagaccaaccctcgtgccgaattcgccacccaggcctcgctt

SEQ ID NO: 444688 - DNA, 1330 bp, Homo Sapiens
ttttttttgtgtacacatatacatgttatcccaggatccacaaagcaaacagaagtggtaattgagcctagcaagcagtttagatggactacattcctcattccagctgaggagagatctcacaaggagaaaggagtgctaaggaagagcaagaccccacagccttccaaagatcccctatggtccaaagtcctttgaccatctcagtcagctgctttgttttctgttggcagtggagggacaaggtgagaggagccaggggtagtcatgaacaccagtgggttctgccctgggcagcttccccaccttctttaagagagtactgtgtctcagctccagcattctcaactgggaagacccaggactcctgctcttttctctagtccctgggagacgaggtccagctagggtagagtaagcagtcagtgaccaggcaggctggtttgggaggtcactgcctggagggacgggatcttgtattcttcggaagatggctgggaaattcttccctcccattacgtagaactttcttcccctcctcagttgaggtgcctagatgtcccacaacggggtcttcactcaggtcctccagaggcacacgctcaaacagtgggtgctcttcgaaatgagtgcacatccagtcgtgtagctccagcccatcggttatggtatacaccagccccccaactcttagcacgtaggcatattctgctagcagggtgggactgatgattcgccacttgtgctttgtccgcttgaaatgtgggtcggggaagaggaagaacatctttgtcagctggcccttgtagaagaagttaggaaggtgcttcatggcattgctacggagacaggcgatgttctggaagccacctgcaggagctgcgcgtagggcccgaatccggtcttgtacatagtctgagaccttcacccggatctccagacccagaataagtgtgtctgggaacagcggtgacagttccactaacaggccaccatagccacagcctatgtctgcaaactccacttgggcctgagctctcttttctttcttatcctttgggtcatcgtggctctgattttgagtgagtggagcgaagaactctgggtatagctcagaccagtccatctcctctggcttcacagggtagcgcagcgtgtggtccgccatggggttggagtgagcacgttgccggtagtagcgcttctggggcggtggggcctctgctccggccacgttccgagtctcggctgccatgatcccagtccggggtttctcctcgtgccgaattctgcacccagcctcgctaccttaaaccctagatactgcctg

SEQ ID NO: 444689 - DNA, 343 bp, Homo Sapiens
  misc_feature (30)..(30): n is a, c, g, or t
tccttatcctttgggtccatcgtggctctnaattttgagtgagtggaagcgaaagaactctgggtatagctcagaccagtccatctcctctggcttcacagggctgcccaactccacttctggcggttgatgtgaacctggccgggtaactgccctttctggggcacaagttccccttctcccgagactggctgcctaatgcactgggatcctactttgtgtttgtcttagcgcagcgtgtggtccgccatggggttggagtgagcacgttgccggtagtagcgcttctggggcggtggggcctctgctccggccacgttccgagtctcggctgccatgaagt

SEQ ID NO: 444690 - DNA, 662 bp, Homo Sapiens
  misc_feature (149)..(149): n is a, c, g, or t
  misc_feature (442)..(496): n is a, c, g, or t
agtagggggctgcaggggcactgagggctggggctggcctggaaagctggggagctgaggctgtattgggtagggaggttttcctccgtgttgcggggtatggggactgttgaggataaccaggactgggggccctgcctccccgcaanggggtacccaggcccagaggcacccattggggtcccaggatagcccggccggggtggcatgctcctctgtggggaccaggagtaacccgcagcacccctgggtccaagctgggctgccgggtaagtggggcccagaggcccgctgtagaaggagggctgggacactactgggaaaggggccggtggcagggctccatgggcagtggggcccacaggcaggctgggggatgggctgtagggcaaagggtagggaggcatggctgatggtggctgcggctgctcttcaaccacannnnnnnnnnnnnnnnnnnnnnnnnnnnnnnnnnnnnnnnnnnnnnnnnnnnnnncatcgccggccagctcctgggaagccctgggcttcctcaccacttcctggagcttttccacgcgaacccggcgcaggtgggacagcatcctcatggaggaaaaattctccaggaacgtttccaggggcacctcgccctccaggaacttctcagccatggcctggaa

SEQ ID NO: 444691 - DNA, 1077 bp, Homo Sapiens
tttgggaagcctaaaggcttgtattggggtagggagggtttttcttcccgttggggggggttatggggacctgttgaaggaataacccaggatcgggggggccctggcttccccggcaaagggggttccccaggcccggagggcccccattggggttccccaggatagccccgggccggggtgggcatgctcctctgtggggaccaggagtaacccggcagcaccccttgggtcccaagctgggctgccgggtaagtggggccccagagggcccgctgtagaaggaggggctgggacactactgggaaaaggggccggtggcagggctccatgggcagtggggcccacaggcaggctgggggatgggctgtagggcaaagggtagggaggcatggctgatggtggctgcggctgctcttcaaccacagggggtgttccctgggggactgggcgcaccgggggtggtggacggggtggaggggcatcgccggccagctcctgggaagccctgggcttcctcaccacttcctggagcttttccacgcgaacccggcgcaggtgggacagcatcctcatggaggaaaaattctccaggaacgtttccaggggcacctcgccctccaggaacttctcagccatggcctcggactcttcttcgatcttcatgccttccacctgcagaaggtctaacaaggtccctggctgcagtgctgaagaaaatttctccagctttgccttctgctcctggcaccgctccacgagcttccggagctcctggtatctatccgagaggtttgagcggctgatctccaggggaccctggaactccaagttccgctctgccaggctccggttggtggccagtgccatctcccgttccagctgtaggtcctggacctcaggggactccagggccagctggtcaatcgcctccgagtcattctgcaactcctccagctcctgcagggtcttatccttcagcgtctccatccttccctgccagggccgccgtcgccgccgccaccgcgggttaaaccgcagcctcgtgccgaattcgccacccaggcctcgcttcct

SEQ ID NO: 444692 - DNA, 885 bp, Homo Sapiens
gggtttttgggggccctggacctgattccagtacagggaagagcccgaagtgctgctcctcagagacattcagaaccagatgcaccttgtcaccatctgctgacacgttgagccagggcaggcaggcagctgctgtgtgtggttgagttccttctcgtacctgggctgagtataggaccagattcgtacctcactccctagggcagcctcgaagcagtcatataccacagagcccacagactgaccaaactgcacaagggcagcaggcacttgcacctccagcaggacgcagcgggcagtagggtaggcctggaaggagagcacgacttgggcctggagagaggcattcctaggctcctccacccctgagtcagctgctcctccaaacttttcctcatcttcaggctcttcccagtgcccatgcacggccaagtggacagccacacgcagacagaggtcacagtcggtctccttctggcacctcagcaccagctctgtctgcaggtgcgtaggcgccagcacggggcccggagcaggcacgatgtccccaggcaggcagagtatgtcactgtcccagaggcggcaggagaggcccggagagcagtgggtagcgtcctgaggccccacaagcctctccagagaaaggaccactgggcttcggcccagtgccaaggacagcaagaaccagggcacaggcatcttctaggtgccaggtggcacccaggcctgaggccctgtgctgcccacccccaaggggggcagacaccccagtcagcccgtgtctgtgggtggcaggggctggaatccctcttcagcctccagagggggcggagggggctgtgctgggtagtttgtgcactctctgtcctgggagtcctgactctc

SEQ ID NO: 444693 - DNA, 1061 bp, Homo Sapiens
  misc_feature (902)..(910): n is a, c, g, or t
attttccccagggggggcgccggggaaacccagggttcggtgtggggttccaaagggttaatggattttggcgggttcccagtcaaggttttttggtgcccaccggggttttttgggggggcccctggaccctgaattccagttccagggagaggcccgaagtgctgctcttcagagacattcagacaccagatgcacgttgtcaccatctgctgacacgttgagccagggcagggcccagcagctcgggatgctgttccagacttcgagccccctgcagtcaggcagctgctgtgtgtggttgagttccttctcgtacctgggctgagtataggaccagattcgtacctcactccctagggcagcctcgaagcagtcatataccacagagcccacagactgaccaaactgcacaagggcagcaggcacttgcacctccagcaggacgcagcgggcagtagggtaggcctggaaggagagcacgacttgggcctggagagaggcattcctaggctcctccacccctgagtcagctgctcctccaaacttttcctcatcttcaggctcttcccagtgcccatgcacggccaagtggacagccacacgcagacagaggtcacagtcggtctccttctggcacctcagcaccagctctgtctgcaggtgcgtaggcgccagcacggggcccggagcaggcacgatgtccccaggcaggcagagtatgtcactgtcccagaggcggcaggagaggcccggagagcagtgggtagcgtcctgaggccccacaagcctctccagagaaaggaccactgggcttcggcccagtgccaaggacagcaagaaccagggcacaggcatcttctaggtgccaggtggcacccaggcctgaggccctgtgctgnnnnnnnnnaaggggggcagacaccccagtcagcccgtgtctgtgggtggcaggggctggaatccctcttcagcctccagagggggcggagggggctgtgctgggtagtttgtgcactctctgtcctgggagtcctgactctcctcctacttccagcacg

SEQ ID NO: 444694 - DNA, 1144 bp, Homo Sapiens
  misc_feature (954)..(961): n is a, c, g, or t
gtgtggtttcaaaggtaaatgattttgggggttccagtttctggggaacaattaaagggaaaggggggttggagaaagataaggaggaaaagaggaagaagcccaaaagttcaagggaaacccgaaagggcagaagttcccccaccaaatttttcccttggttggggtgagtccttttcaagaatccttttttgatatggcactgcgtcctttgcacaggcatcggcctacagtgggaatggactggggaaggggggaggcctcaccaggtttttgtgcccaccggggttttggggggcccctggacctgattccagtacagggagaggccgaagtgctgctcttcagagacattcagaaccagatgcacgttgtcaccatctgctgacacgttgagccagggcagggcaggcagctgctgtgtgtggttgagttccttctcgtacctgggctgagtataggaccagattcgtacctcactccctagggcagcctcgaagcagtcatataccacagagcccacagactgaccaaactgcacaagggcagcaggcacttgcacctccagcaggacgcagcgggcagtagggtaggcctggaaggagagcacgacttgggcctggagagaggcatgcacggccaagtggacagccacacgcagacagaggtcacagtcggtctccttctggcacctcagcaccagctctgtctgcaggtgcgtaggcgccagcacggggcccggagcaggcacgatgtccccaggcaggcagagtatgtcactgtcccagaggcggcaggagaggcccggagagcagtgggtagcgtcctgaggccccacaagcctctccagagaaaggaccactgggcttcggcccagtgccaaggacagcaagaaccagggcacaggcatcttctaggtgccaggtggcacccaggcctgaggccctgtgctgnnnnnnnnacaaggggggcagacaccccagtcagcccgtgtctgtgggtggcaggggctggaatccctcttcagcctccagagggggcggagggggctgtgctgggtagtttgtgcactctctgtcctgggagtcctgactctcctcctacttccagcacggagatcgcaggaattccggaccggtccagc

SEQ ID NO: 444695 - DNA, 2075 bp, Homo Sapiens
  misc_feature (58)..(58): n is a, c, g, or t
  misc_feature (71)..(71): n is a, c, g, or t
  misc_feature (75)..(75): n is a, c, g, or t
  misc_feature (79)..(79): n is a, c, g, or t
  misc_feature (91)..(91): n is a, c, g, or t
  misc_feature (228)..(243): n is a, c, g, or t
cgccttggcaggcctcgagagggtcacgctccttgttgggcacaaacaccccaagacnatgatcccgggtngagnttgngcccccattagncaggaggcctttcaagagggatagagggggggacgggtccccttgaacccccggatctcggggtgtgtacaggggaacccttgagggggccacaggcttttcaaacattggccaacgggaccgagacccctgtcttnnnnnnnnnnnnnnnngaattccagggattggggtggggtagtggggctggagaccttgaggtgtcctggcttggtaatcttgagggggggcgccagaggcctgggatctgcagctgtgtcttcccaggccaggccctgccccgtccccactgggaggtctgggggctccgccagtctcgcctgcccgcggctcccaggcggggcgctgcgtcagcggaacccgcgccgggattagcgccctggcgcccgcctgcgccccgggctctgtcgggcgaggctggggtcaccgccccattggggcctcttccgccggcccttagcctggatcccaggccggaccccgcgtggtgcccgcagcctcagtgatgacccatgtcctccatgcccacgcggccccagacgcccagcacgaagctctcgatgtcgcactcattgacgccgcgcacgatgcggaagtggcccctctcgccccaggctgggccccaggagttggccgcagtccagtatttgagcgtccttccatctggcagcgtctcctctccccatcctgtgatcttgactgagtgggtcccatgccggcggtatctctctggcctcccaaggctcactggcgtgtggctgtagatgcctcccttgtataggaagaagtcctcatgcacctccatgagggcttggacagggccattctccatcagctccttcatgatctccttgtcgttggagccgaggcggtagacaggagtgacctggtagatgtcattgttattaacatagctgttggggcagtgggcagtggcctggcgcttgccccgacccatggctcggctgtgcatcatacaggggggcgcagggccagcctcgtctcgttcacggcccgagaaggggtagcagtggtcagacaccacccctcggcgacgcaggaaccaccaggcaccatcgagacgcccaccgcggcagccctgctgctggtgggtgtcacaagacagcaggttctggggcgacaggacaggcgtcatgtgtcccagagaatggattgagacacgatcggatgccacagctgctgtggagaaggcccaggagcctgcacagttgccttggtcaagaggctcatgaatcaggttgggccacttctcagaggcctcgaaggctgtgggaagcacctcccctgggttcagcactgtataaatttcatgcatgttcatgaccgaggaagatgggcggatggtgcccaggcggtagcgaatgccctcatccagggtcatgccccagaaggcgctgtggttcccagcctgccagccatagttgccctggttgatggctttgatcatgtctggatccaccaggcatggttcttggtcacactgccactgcctgttctcctggcaggtgcaacggttacagttgtcccagtacgttcccaagactggatagatacgacctccatgcatacatccttggatcgggggaaaagggggtggcacgccgaggcagaagtcccagaagtcagggcagcagtcggagaccgtgcggttgcagaagaggtcacagtaacagatggcgcccaggtagggcagggcacagtcgtcggcacggccgcggcagcacaggtcctgctcctggcagtaccggcctcccgcgtcccggatgccccgcaggtgcagacccggtgctagctcccggcgcccacgaccctgctgggcacccagagccaagtggccagccagcggcagcaacagcagtagccccagtggacatcgccacatggtggctcctgggccctggtgaaggtgtgggctggggcccaggctggcccgcgcgcctccgcctcctggctctgcgaccgccgg

SEQ ID NO: 444696 - DNA, 1166 bp, Homo Sapiens
  misc_feature (1124)..(1124): n is a, c, g, or t
ttagagaaaaatatttttaatgtagaaaagatgaatagctgtaatgaaatacaaaccgttcctatacacagtaaacttactaagaactgctaatccttctccaggttcttagaatctgggtacagcattatagaaagtaaccacgctatgaaaacacacacccaaaacccgatgggtggcaattgtgatagattaggaagacaaaacagattcagaagtagcagagaatactgcacattttcttggaaaatttcttaattgttcagtgctttctgaacaagtttccccagccccaatttatctcttagctattctctggctacttagtcctgtcttctgacaatcatcatacggggacgatcatctgccttacagtgtaacatgtttttcctaacacagccgcattttatctgccctaagagaatagcaactaatggctttcaatgaagtcaccatgatttagaaagtttaaaaccacaaattttccatgtggtaaaacttctaattactaacattgcacattcaccagtccgtttaaaagtttggtttaaaaatgcattaaatagagttcaatttaatattcaggagaggaaaaggcacttaatactgcaatttccagaatataatttgtctgtcttcccctcctgtgatgatactgctacactgttcattcatccatatacatgtcacagcacctgtgtggccctgtattctctcactgatttttgctccaaggaggtcccaaacgagcagttcaccagactgactgccagataaaacggaatttccatcccagacaaagcacctgcaagaatgatttagaaatagtcctttcttcatcatgaaggaaggatatgttgaactggccaatgtaagcccaaatgaagtgatcatgaacatgtctgtaaatgtcttcgcccccagtaactcacaaactatacctctggggctcatctgatgtcatggaggagatgagcattcctgtctgcacatcaatgacattaagacagccatctgttcctgtgctgaggacatggcgactatctgggctaaaagcagtgtcacatacaatccctgaatggcatggaatctggtgcattaaggtggccgttgtgaggtcccanaatattcactgtgccttctttggtgccggaaactaacagtgt

SEQ ID NO: 444697 - DNA, 1435 bp, Homo Sapiens
  misc_feature (211)..(232): n is a, c, g, or t
  misc_feature (338)..(404): n is a, c, g, or t
  misc_feature (473)..(481): n is a, c, g, or t
gtctgtcgttagtatatatagcttgtcgttctagtccgcgttcgttgatgtgtcagcttgtgcgttacgtcaggaggtcgcgccggtctactgggtgggcggggcgtgtgctgcatgaggagtgcggggtcgggcgcggggttaggtcttggtgtaggggcggtatgtgtcgtctctttgctgcgttgtggcggggctggtgagttgtgtnnnnnnnnnnnnnnnnnnnnnncatggaagctggccgtgcgggtgtgtgggtagtgtgtttggagtgttgtctgaaagtgctggctagttgctgattcacgagtcggctgggcgcctgtcgatgtccnnnnnnnnnnnnnnnnnnnnnnnnnnnnnnnnnnnnnnnnnnnnnnnnnnnnnnnnnnnnnnnnnnnagattccgtggtttgctcgtatattggggtcgtctagacttgcttctcccttctgttatgtggcgtgcnnnnnnnnncttccgggcctggatgcttgtgtgagtcgggccggcgttttgggggcggctagtggaatggagctggggtggttgaatgaaggggccagggtgttggaaggggatagccgcaaattttccatggggtgaaacttgtaattactaacattgcacattcaccagtccgtttaaaagtttggtttaaaaatgcattaaatagagttcaatttaataattcaggagaggaaaaaggccacttaaatactgcaatttccagaatataatttgtctgtcttcccctcctgtgatgatactgctacactgttcattcatccatatacatgtcacagcacttgtgtggccctgtattctctcactgatttttgctccaaggaggtccccaaacgagcagttcaccagactgactgccagataaaacggaatttccatcccagacaaagcacctctggggctcatctgatgtcatggaggagatgagcattcctgtctgcacatcaatgacattaagacagccatctgttcctgtgctgaggacatggcgactatctgggctaaaagcagtgtcacatacaatccctgaatggcatggaatctggtgcattaaggtggccgttgtgaggtcccaaatattcactgtgccttctttggtgccggaaactaacagtgtcttgcagcatttaaactgattgtatctacactgacatcatgttccagctcggccagcaagtcaaagtggtgtcttttggtgcctggcatctctgcaggaacaccagaccacaccttcactgtagagtcccacgatgcagaatatagcctgttgtcatgccaacagatcttactaacagcatcatcatgtcccattaacgtgtcctggcgtcttccaaatgctatggaataaaaatagacattattatcccatgaagaagttatgacagtggcatctcctggtaaaag

SEQ ID NO: 444698 - DNA, 475 bp, Homo Sapiens
tagagaaaaatatttttaatgtagaaaagatgaatagctgtaatgaaatacaaaccgttcctatacacagtaaacttactaagaactgctaatccttctccaggttcttagaatctgggtacagcattatagaaagtaaccacgctatgaaaacacacacccaaaacccgatgggtgggcaattgtgatagattaggaagacaaaacagattcagaagtagcagagaatactgcacattttcttggaaaatttcttaattgttcagtgctttctgacaagtttccccagcccaatttatctcttaggctattctctggctacttaggtcctgtcttctgacaatcatcatacgggggacggttcatctggccttacagtgtaacatgttttttccctaacacaggccgcatttttatccggccctaaggggattgggcaactaatgggcttccatggaagtcccctggatttgga

SEQ ID NO: 444699 - DNA, 826 bp, Homo Sapiens
  misc_feature (678)..(678): n is a, c, g, or t
  misc_feature (711)..(711): n is a, c, g, or t
gtttgccagtcccaggaaagcacttctcaactcaccaactccagtagaaagaagggtgttaaggggcaccagtggaggttttctgagcatggatccaaccaccccggcctggggaacagaaagtacaacagtgaatggaaatgaccaagcccttcttctgctttgtggcaaggagaccctgatcccggtcttcctgatccttttcattgccctggtcgggctggtaggaaacgggtttgtgctctggctcctgggcttccgcatgcgcaggaacgccttctctgtctacgtcctcagcctggccggggccgacttcctcttcctctgcttccagattataaattgcctggtgtacctcagtaacttcttctgttccatctccatcaatttccctagcttcttcaccactgtgatgacctgtgcctaccttgcaggcctgagcatgctgagcaccgtcagcaccgagcgctgcctgtccgtcctgtggcccatctggtatcgctgccgccgccccagatacctgtcatcggtcgtgtgtgtcctgctctgggccctgtccctgctgctgagtatcttggagtggatgttctgtggcttcttgtttagtggtgctgattctgtttggtgtgaaacgtcagatttcattacaatcgcgtggctggtttttttatgtgtggntctctgtgggtccagcctggtcctgctggtcangattctctgtggatcccggaagatgccgctgaccaggctgtacgtgaccatcctcctcacagtgctggtcttccttcctctgtggcctgcccttttggcatttcagggggccctt

SEQ ID NO: 444700 - DNA, 1325 bp, Homo Sapiens
  misc_feature (70)..(95): n is a, c, g, or t
  misc_feature (307)..(307): n is a, c, g, or t
ggacgtggggtttttttcttcttcccggagggccccggggccagctgccatttttggaaacccgggaatnnnnnnnnnnnnnnnnnnnnnnnnnntgtgcaccggccttctccggttgggggcagggacccccccgaaagggcccatcagtagtagtgtgtgctcatcgcgcagctgggacgttcagcccactcactttcccgccattggtgaggctgcaccccacggcgggctcgatgtgaacgccagttgccgctcctgcacaggcaaagacaggggagtcatggcctcagggacctccactctncagcgctcccctgagccctctggcagagcctcgggcccaccccagctggcctgggcggtgcctcacccgcggtctccctccagtgtgctctggatttccttcaggactctctcatcactgagcagagcgcgctccatcaccaggccgggctgcttctcctcgccatcactctgagtccctgagttcctggctcggctcggggctttcttggggcccgcaccgttaccagggcggtggttcttggtttctgctgaatccaccagacaccggggctccaccagccacttggtggagagagagaagcgctcaaactccgagggtgagatcaggtagaagccttggccatatttggtgaagacgcaggaggcgatgccactgacgtcctcccggcggatgcagctgtagcgcacctggggcttgagcaggggcagcgagaccacctggatgtcgcccaggttggtaaggactgccaggtggtgctccccgtagtcctcggctcgacgactgccgaagtgggccacgctgacccgccgcactcttgagccctccagggccgtcagcttcaacttcagcttggcactcaccttgggcagcgtgaacaccttgaactgctcctctgatacgacgagcagctggtggcttccctgcatgtcagggctcttcgacagatcatgggccacttcgaggggctcgggaaggggtacgctgtgtccgtcgagcaccaggatgcccaccaccggcgcccggtgcatcagctggatctccttggcctgctctgcccgcacaggctcatccattctccgctcggcgggaggcacacgcagggagaaggcatagatggtgcccccattggtgccagcccacagcgaggggcagtgccgggagctgtccttcaggtaggtgtcagcaaagtacagggtccggacgaagcctgtgaaggagtcctctgccgagcgagcctcgatcttgcgctgcacaggcgccagctccatgttctggaggcctggccgctcagcct

SEQ ID NO: 444701 - DNA, 1467 bp, Homo Sapiens
  misc_feature (254)..(254): n is a, c, g, or t
tctgtgccctgggtgggctggccccgggccagcagctatgctcccgggaccagtaaagatgttcccggaacccagggaagctccaagggtcataacacaggctggtccacaccagggacttccagcaaacctttctcacacagaggcccgggaggtcccgggcacttcagcccagggcaactggcttctgaggtagcagccccgccagcatccaggacagactaaggggaccgtgaccaagggctctccaagcntagtcacccaggacagtcagagacggaaccctcgcccctcttgagagagctcatgggctttgggggccccaataccaaaaggtgctggaggaaggcagtggtggcagggacccaagttagggctgcgcaccacggcgcatgctactcagaggttgcactaccttcagctgtccctcaaaccaacggttcctggtggcgtcgtagaagtacagatcgttgaagaactcgcccgacaggctctcctcctcttcctcgtcacagacacccccgaagaacagtgtctggtgattcggggccatggccacggaaaagccagaccgtgggttgggcttgacccccgaaggggttcatccgagtccaaaacccacttggtcttctcttccgtcctctggcttcagcaggaacatgtctgagtgccgtgtgcccttgtccacgtctttcttaactctctgtttcgagtagcccccatagacgacgatgccgccctggggagtgacggacatctggcagcctgatctgggtgtgggccccgtccctgacggggacagcttgctccatgtgaaggtgtccagattaaaggcatacacgtcgttgtagtagatgtaatccttgacttgttcccaggtcttggtggccaaatgcaggacccagagatccttgtagtggtagaactgctctccgttgggagaggcaaactcccctccaaagacccacagctgtccgccaccttgaggcactaccaccgcctggtgagcacagcgcctcggaggtggactggggatgtcaactttggtccaggtgtcctttctgatattgtagacatagagctcgttatacaaaaaagttttttggccgttgaaatattcacctccaaaaaggattaactcatctttctcaggatgaaccgagagggaggcatttaaccttggtgagggtggggggcacggaagttccacagtctgagtcctcttggcatcgagtgtctggaaatgggctatgagcgcttccaggtcttcctcctccttccgcgagcgcttagacaccttcttctccatcttggcggccgtcttctccgcgccgcggcccttcttctccttcttgcccttcttgcccatcttgccgggtcccaagccgcgacgggacaccaggaaagaaaacggcccgcgctctccgctcggaaacaggtgctcgtggggcggagatcccgggaatt

SEQ ID NO: 444702 - DNA, 1133 bp, Homo Sapiens
tgactggcagtactacccccggtaaatggtagcgaggcctgggtgccgaattcggcacgagggagagcgcgggccgttttctttcctggtgtcccgtcgcggcttgggacccggcaagatgggcaagaagggcaagaaggagaagaagggccgcggcgcggagaagacggccgccaagatggagaagaaggtgtctaagcgctcgcggaaggaggaggaagacctggaagcgctcatagcccatttccagacactcgatgccaagaggactcagactgtggaacttccgtgccccccaccctcaccaaggttaaatgcctccctctcggttcatcctgagaaagatgagttaatcctttttggaggtgaatatttcaacggccaaaaaacttttttgtataacgagctctatgtctacaataccagaaaggacacctggaccaaagttgacatccccagtccacctccgaggcgctgtgctcaccaggcggtggtagtgcctcaaggtggcggacagctgtgggtctttggaggggagtttgcctctcccaacggagagcagttctaccactacaaggatctctgggtcctgcatttggccaccaagacctgggaacaagtcaaatcaacaggcggtccttcgggtcggagtggacatcggatggtggcctggaagagacaattgatcctgtttggtggcttccatgaaagtacacgggattacatctactacaacgacgtgtatgcctttaatctggacaccttcacatggagcaagctgtccccgtcagggacggggcccacacccagatcaggctgccagatgtccgtcactccccagggcgggatcgtcgtctatgggggctactccaaacgagagttaagaaagacgtggaccaggggcaccggcactcagacatgtccctgctgaaccccgaggaaggaagaaaagaccagtgggcttggactccgaagaaccccttcgggggtcaagcccaccccaccgggctggctttttccggggccagggccccgaatccccaaaccctggttccttcgggggtggctgtgccgcagcaaacagaggaaacccgttctgcgcagtttctttacgaatcggctcttctacgacg

SEQ ID NO: 444703 - DNA, 1014 bp, Homo Sapiens
ttacatcaagcaagtgcttttttaatcaatacatcaaatgatatttttgctagcctgaggaagcttctctttgcctgtcctatcattcccacccattgcctcacagggatggaaagaaattccttcttggacccaacattagataaacataaccaagtctttacatgtggctttggagaaggctgctaggatgcttgcgaacacgacatcgggggtctgggatgcatcgatggcggagtggatcccccgtttcctgtagtactctatgagtggggtggtttgagtgtggtaggcttgcaggcggattttcaaggccttttcattatcatctgatcgacggatcaagggttccccggtgatgtcatctttcatgggctcttttggagggttgaactcctcgtggtaggaacggccactcttggggtgaatcagccttcctgtgattcttcggatcagcagagagtctgggatgctgaattcaatcacagaatcaagcttctctttcctcttctccatgaggtcatcgagcatttctgcctgcctcacagtccgagggaagccatccagaagaaaaccatttttgcacaagggggtctccaaattcttctcaatgagctccactaccatttcatcactcaccagtttcccagcatccatagttgccttcagcttttttcctagctctgagccagaagccaccatggccctcagcatgtccccagtagctaaatggcagacacagaagttttcagccaatctgggtgcctggggcagtagatagcagcagaaagagcaggagctttggagtcattcagatgcaagctctgtaaattacttgctatgtagcctagagaacaagccattcaaacttcagtttctccaactgggtccctttaccggccccgggaggccccagcagcacggcccggatgcctttaggatactcgggttctgccgctggcacgctgggagccatgtccgccgaagtctccctcgtgccgaattcgccaccca

SEQ ID NO: 444704 - DNA, 1212 bp, Homo Sapiens
  misc_feature (200)..(209): n is a, c, g, or t
  misc_feature (224)..(262): n is a, c, g, or t
cccggtttcaaaagtttatggccgggccggggcaccaaattgggatctcccgggactcttggtggggaaccccccaggggtttcgaaaataaaaatggggggtcttaaagccctgggctttaaaaaaattttttcccccgttcccggggtaaatgaaaaccccgtttccttaggaaataaaaaggggggtaatttcttannnnnnnnnntcccaagcagggtgnnnnnnnnnnnnnnnnnnnnnnnnnnnnnnnnnnnnnnnctctcccctagggataaaaggaactgccccactccaataccctggtggtgtttccaagtattcctctgagcccttcaccagccttccttcaccatcctcaccctgaccaccctttcccctctgcccagcacctaagagcagggatcacgccgcggggtgatgagcagtgttgcagtctcgcctggccttctgatactaggatgtggctttggagaaggctgctaggatgcttgcgaacacgacatcgggggtctgggatgcatcgatggcggagtggatcccccgtttcctgtagtactctatgagtgggttggtttgagtgtggtaggcttgcaggcggattttcaaggccttttcattatcatctgatcgacggatcaagggttccccggtgatgtcatctttcatgggctcttttggagggttgaactcctcgtggtaggaacggccactcttggggtgaatcagccttcctgtgattcttcggatcagcagagagtctgggatgctgaattcaatcacagaatcaagcttctctttcctcttctccatgaggtcatcgagcatttctgcctgcctcacagtccgagggaagccatccagaagaaaaccatttttgcacaagggggtctccaaattcttctcaatgagctccactaccatttcatcactcaccagtttcccagcatccatagttgccttcagcttttttcctagctctgagccagaagccaccatggccctcagcatgtccccagtagctaaatggcagacacagaagttttcagccaatctgggtgcctgggtccctttaccggccccgggaggccccagcagcacggcccggatgcctttaggatactcgggttctgccgctggcacgctgggagccatgtccgccgaagtctctcactgccaccagttcgcacgcctcacaggtccaccccgct

SEQ ID NO: 444705 - DNA, 1131 bp, Homo Sapiens
  misc_feature (167)..(167): n is a, c, g, or t
  misc_feature (205)..(205): n is a, c, g, or t
  misc_feature (207)..(207): n is a, c, g, or t
  misc_feature (213)..(213): n is a, c, g, or t
  misc_feature (221)..(222): n is a, c, g, or t
  misc_feature (231)..(232): n is a, c, g, or t
  misc_feature (234)..(234): n is a, c, g, or t
aagaagttaaggttcccttcccacaaagatccccaagcttaggcggtttttcccatttccggaaggtttaaaaaaggacgggccaggtcctaaggcttataattgggacccacttttaggggccccctttgtaccaagaaaggctgggtacgggttaagctttgggnccctcggaggggatatcctagagggggccgcccccctngnggttgntgttgttnntgggggttnntnttttacatcaaagccaagtgcttttttaatcaatacatcaaaatgatatttttgctagctggaggaagcttctctttgcctgtcctatcattcccacccattgctcacaggggatggaaagaaattcctctttggacccaacattagataaacataaccaagtctttacatgtggctttggagaaggctgctaggatgcttgcgaacacgacatcgggggtctgggatgcatcgatggcggagtggatcccccgtttcgctgtagtactctatgaggtggggtggtttgagtgtggtaggcttgcaggcggattttcaaggccttttcattatcatctgatcggcggatcaagggttccccggtgatgtcatctttcatgggctcttttggagggttgaactcctcgtggtaggaacggccactcttggggtggatcagccatttctgcctgcctcacagtccgagggaagccatccagaagaaaaccatttttgcacaagggggtctccaaattcttctcaatgagctccactaccatttcatcactcaccagtttcccagcatccatagttgccttcagcttttttcctagctctgagccagaagccaccatggccctcagcatgtccccagtagctaaatggcagacacagaagttttcagccaatctgggtgcctgggtccctttaccggccccgggaggccccagcagcacggcccggatgcctttaggatactcgggtctctccgctggcacgctgggagccatgtccgccgaagtctctcactgccaccagttcgcacgcctcacaggtccaatcgggaaaatccagggccggcacgcgggggaaagcgcggggtcaagcgtgcgggttgtggagggagagcgaaagtgg

SEQ ID NO: 444706 - DNA, 1274 bp, Homo Sapiens
  misc_feature (149)..(149): n is a, c, g, or t
  misc_feature (154)..(154): n is a, c, g, or t
  misc_feature (156)..(177): n is a, c, g, or t
  misc_feature (179)..(186): n is a, c, g, or t
  misc_feature (188)..(236): n is a, c, g, or t
  misc_feature (238)..(243): n is a, c, g, or t
  misc_feature (271)..(271): n is a, c, g, or t
gtggggggaatccccagcccttttgtttttggcccgggttttctttttggggaaaacagtttaggcccccttttccctttccccctatggggccccggggcccaaaagaaatgtttttgaaaaatttttttagggcccgaggccgcccnacaantnnnnnnnnnnnnnnnnnnnnnntnnnnnnnntnnnnnnnnnnnnnnnnnnnnnnnnnnnnnnnnnnnnnnnnnnnnnnnnntnnnnnnttaaataatcattttaatgtgtaaatcntgaatatatcatgttagaagatgaagtcgatgtatttagcataatctgtcttgggatatttgacgtgtagatgactaaaaatacacttgtggtcgtttcttcactttgtattttagtgacccgtaccgcacctctttgcggcctttggtggtttttcacagatttcatgctttgcgatcttcgaagccctttgtgtgttaacatctcattatctgaatatggcccctctgcttcttcatctgttttctcatctccgtctttcaagtggaattccataacctgctgattcactgggggctggtttacttttcttttttgcttctggtagaggttggtatggtctttgtcccacaggctcatcaccttggatagttgttaaatcatgcatactgaagcttcttaaacgttcagttattgctccttggctctttactgctgcagtaacagcagcagtagctgcaaggtttaaaccttgccgtccaaagtttaccatggtttcatagcctcgttcctttgcttgtacaatataatcatcaatctccctttcctttgaagaaagaagtggatgaaggaattttctatatattaaacttgctcctttggtatagggagaaagcagccatatgacaaaagcaatcttcagctcatagtacaggggaaaccaagcaactgtttgatcggctactgtttcaatcacagtatagagagcaaaaacaatccagtacatcatccatcgaacatattccttcacgttttttgttttcacagctttgtatgaataatatgcaggataaagcattccaaacaccagcaccacggctctggagatcatccaggacaccatcttcacgggggcttgggccccacgtccggggcgggtgggcgcagggcgctgcggaccaggccgccaacggcaggccgcgcgcttcgccggctcctcgcgctccccggggccgcgctggcgccctcaggagccgggcccggtgtgtgcgcgcggcggcct

SEQ ID NO: 444707 - DNA, 1512 bp, Homo Sapiens
cacgcggcgaaggagcgcgccatggagcatgtgacagagggctcctgggagtcgctgcctgtgcgcgctgcacccgcaggtgttgggcgcgctgcgggagctgggcttcccgtacatgacgccggtgcagtccgcaaccatccctctgttcatgcgaaacaaagatgtcgctgcagaagcggtcacaggtagtggcaaaacactcgcttttgtcatccccatcctggaaattcttctgagaagagaagagaagttaaaaaagagtcaggttggagccataatcatcacccccactcgagagctggccattcaaatagacgaggtcctgtcgcatttcacgaagcacttccccgagttcagccagattctttggatcggaggcaggaatcctggagaagatgttgagaggtttaagcaacaaggtgggaacatcattgtggccactccaggccgcttggaggacatgttccggaggaaggccgaaggcttggatctggccagctgtgtgcgatccctggatgtcctggtgttggctgacggcagacagacttctggacatggggtttgaggcaagcatcaacaccatatctggagtttttgccaaagcagaggagaacaggccttttctctgccactcagacgcaggaagtggagaacctggtgagagcgggcctccggaaccctgtccgggtctcagtgaaggagaagggcgtggcagccagcagtgcccagaagaccccctcccgcctggaaaactactacatggtatgcaaggcagatgagaaatttaatcagctggtccattttcttcgcaatcataagcaggagaaacacctggtcttcttcagcacctgtgcctgtgtggaatactatgggaaggctctggaagtgctggtgaagggcgtgaagattatgtgcattcacggaaagatgaaatataaacgcaataagatcttcatggagttccgcaaattgcaaagtgggattttagtgtgcactgatgtgatggcccggggaattgatattcctgaagtcaactgggttttgcagtatgaccctcccagcaatgcaagtgccttcgtgcatcgctgcggtcgcacagctcgcattggccacgggggcagcgctctggtgttcctcctgcccatggaagagtcatacatcaatttccttgcaattaaccaaaaatgccccctgcaggagatgaagccccagagaaacacagcggaccttctgccaaaactcaagtccatggccctggctgacagagctgtgtttgaaaagggcatgaaagcttttgtgtcatatgtccaagcttatgcaaagcatgaatgcaacctgattttcagattaaaggccttgctcgaggttttgccctgctgaggatgcccaagatgccagaattgagagggaagcagtttccagattttgtgcccgtggacgttaataccgacccgattccatttaaagataaaatcagagaaaagcagaggcagaaactcctggagcaac

SEQ ID NO: 444708 - DNA, 962 bp, Homo Sapiens
  misc_feature (582)..(618): n is a, c, g, or t
  misc_feature (848)..(848): n is a, c, g, or t
atgtgaaatctgatttttaaattttcttttaaaaatttaacatactttacagagcatgtgaaatatttgggttggagttgggcttcagacctcaacagttgaaaaggaattgtttcgcttttgtttttcttggttgtgatggggagccctggggatatgatgccagccagggaaggtgagaatgtggtatgtgtgtgtgtgtagtgccccctgcaggagatgaagccccagagaaacacagcggaccttctgccaaaactcaagtccatggccctggctgacagagctgtgtttgaaaagggcatgaaagcttttgtgtcatatgtccaagcttatgcaaagcatgaatgcaacctgattttcagattaaagggtaagttggacttcttcatgtgataatgtctccatcttaactatgtggtggtcttacaagtatgagattgcttggtctcataaaaggaagtgttcccaggttttgagtagacaccagaataaactggccactggctgctgagtattccttttaacctttgtaaaaatgtaatttttttaatttttgtgacagagtgagactccatctcnnnnnnnnnnnnnnnnnnnnnnnnnnnnnnnnnnnnntgtctgtggcttattaggcttgtgactatacagcaggcaacttgtgtctaccaatgaccataacttgtatctgcttgtgctgacaaataatagttttctgtttttcttaatcattgaacatctgactatattaaaagtcttcttttggacaaagtgatatacctgactgctaggcctcgagttatggagtgaattgtccgttgtttttcagatggctacaaaggattagncccatacagttttggttttcaaatggcagtgctgtaatttttaaaatccctttgctgtctctcacctccctccaatttttattggaatttatgaagtcccgagagatttgtaga

SEQ ID NO: 444709 - DNA, 899 bp, Homo Sapiens
  misc_feature (14)..(14): n is a, c, g, or t
  misc_feature (446)..(446): n is a, c, g, or t
gcccgcttgccagnctggttggttcaaccagctgggtggctggggccaaggggccacacagcctcctttgtagcacacattgactttcgccctcccatggcccgaatgttgtcatcgttgctgttggttttctcccctttccagttcaaacagagctggaaaacaggtgggatggaggagtagccagggttcaacaccacagcggccctgcagtttggctgtgcccctttcgatgagcgccatgtagtagagattggtgtccccagccagtcccgcatccacaatgtctttggtgaagtgcagctccatgtaatcctcatgggcaactgtcacccatttcaccaggcgagagacaaccttggcagggaagaggtactggcaatcactggtaactgggcacaatgccatgttctagggatgcaaactgtttgtggagggcccaggcngggactgcaccctggtcttcagaagtttcatggtggtctccatgtggctggcgctcagcgagtggtcagcaatcactgtttgctggggctgctctttggggaagtggaggccacccagcttctgcacccacaaataggggtgacctagctcaagtacatagtcgctcaaagtcaggatgccaactttatcaaactgatactgattggctggattcggagttttctttccatgatccccaggatacaagcaactcaggactgagtcaggagacagcaagtcacctgcactgatgggggtgatcagctccatggcagttgtcactttggcttttactgtcatgatgttgaggttcatgaggtagtagaaagtcaggtgaagcacactgtcatctttgcacttcaggtcgagcatgacagacagtgggtgcctcttcagcatctccttgcgtttgt

SEQ ID NO: 444710 - DNA, 2189 bp, Homo Sapiens
  misc_feature (319)..(343): n is a, c, g, or t
  misc_feature (953)..(986): n is a, c, g, or t
ttttttttgagatttaacattgtacattttattaaatactggactttattacaacaaattaatttacttccgatagaagtttcattttaaaaaatgtggttgtgttcaaattcttaattgacacttgttttggggtaaacatcctatttttactggtggtatcatcaatcattatgagcagaaagattaattttgtataacagaacaaaggaatttctcaagtggtacaatactcaatatatataaagggaatatactcccaaagagtgggcatgaccacagcagagtatatgatcagagaacatattgcttttatggnnnnnnnnnnnnnnnnnnnnnnnnnctctacatataacatcaagtcatgcacattaagtctttactacctactgaaggcttctaccttacacatgaaaattgttcatgtcccagggtttggcatccagccaaaatttaaacaatgatgaagaatggctgtcaaactggcttttcagaccacccctgaaaagctgtcagctgtaatatccatcctggaatcgtggcggaaagttcctgggagttgccttttcctgtgttttgatcaagtctataatagctgacagtactgcacagtctctggatttagtgtcattccagtctacaggatgaggactttcaatcttctcttgcagaagaatatctagttcctttcttaattccttaacaagatgggcaattcttgctggagactgaaatacaatccactcatctacagcaatagtttcctgatcgttatccttctggatggaaatgtcacctccaaaaaacaagagacagtatggggaaacctctgtgcagtcatacaagtatatactgcttgttctcatctttaggtgatagataagccagttgtagtgaaagtctgtttgctccacattaacagatttaggatgaacagcaaccaggccatcggnnnnnnnnnnnnnnnnnnnnnnnnnnnnnnnnnnacccaaatttagtcgaattttagcaactttgggatataaaccagcacagatgacagctttaattatcttctcattatctgaatttatattagattctggatctttaggatttctactgcttacaaatccagctccaagaagatgctcagcaaactgtcctttcatgttatgcagcatctgcagtgtgtttgaagacagaaaatattcccagcaatagtccttttcgtatctgaaaccacgtcgcctagcctcttcccagccctcaaacgcattcacaactgttaagtgatcacttctagtatcctttgccaattcctttcttcttgcatctgcaatcttttcttttcccagtggaatgacaaatggatctttgaaactgagactagcagcaatagtgagtactgggtctaagcagcagaacagtgctccaaaaagaatcatttttccaatatgtggctcaacgggtaatcgtgccaagtggactccaagaggtgtcaattcttcttgtttatccaaagcgttcaagctccatcaggtgtcttatggagagtaacactgcctcatttgatggtgggtccattaatctactcagaaaataagcaattccacctagccttaaaatctttatttgtaaacaaagttcttccaaaggagttctcaaaatttctggcagttgatagtcatctagaagacttgctctaagaccattatacagatgatagcaatgaccaggttgaactcttccagctcgaccttttctctgtttggcattagctttactaacccactcagcggacattgtactgatattgttctgagtatcaaaatgcgtctcttttatttttcctccatctatcacataaacgacatcatctatggtaatgctagtctccgcaatgttggtagcaattactattttccgaacaccaggaggggttcttttaaacacctgtgtctggttaactgtaggcatcagtgaatgtaaaggtataattaaaaatttatctgatttaaacattacttgtgacatcaagagatcatgtaaagtgctgatattgtcccagcctggcagaaagaccagtatcgcaccatcctcttcttccaaaacaatgtatcggatgagggccacaatcaaattcagatcaactttatcatcctccatcatttctataacatctacagtacttgcagaataccttcttc

SEQ ID NO: 444711 - DNA, 373 bp, Homo Sapiens
ttttttttacctcaaacgcattcacaactgttaagtgatcacttctagtatcctttgccaattcctttcttcttgcatctgcaatcttttcttttcccttaaaaatagcagacatagccaatttaaattgctctgatgctataatggagaatgacattctaataaaacgctaatgaaaaatatatctaagcaactcctgttcacatctaaaataactcggttttatttccatttttcttaccagtggaatgacaaatgggtctttgaaactgagactagcagcaatagtgagtactgggtctaagcagcagaacagtgctccaaaaagaatcatttttccaatatgtggctcaacgggtaatcgtgccaagtg

SEQ ID NO: 444712 - DNA, 2178 bp, Homo Sapiens
  misc_feature (1785)..(1785): n is a, c, g, or t
agcgggtggaaaaccgcgactcttgcaagtgggcaaacttgacgttttcgctatgggcaaacgcgggagccggagccagagccagctactcaacaccctaactaaaaagcagaagaaacatcttcgagatttcggcgaggagcatcccttctatgacagggtttccagaaaggaagcaaagccacagatttgtcaactgtcagagagttcagattcttcagattctgaaagcgactcagagagtgaaccacaacaagtttctggctaccacagactacttgctacattaaagaatgtttctgaggaagaagaggaacgatgaggaggaggaagaggaagaagacagtattgtagatgatgcagaaatgaacgatgaagatggtggtagcgatgtcagtgtggaagaagagatggctgcagagtctactgaaagtccagagaatgtagctttatctgctgaccctgagggaaaagaagatggggaagagccaccgggcacatcacaaacatcccccgaagagttcacagatgcaaaacacgagtcactgttcagcctggaaaccaattttctggaagaggacagttggagacaactcttcttttgaaagcctctcaagatccatttcttcaacatgtgaacaaagaactgaaagaaaaagcaattcaggctgttgccacaaatcccaaaactacccacgagcttaaatggcctattctgggccagcttttcttttcctctaagtttcagaagttggaaacatttaaacccccaaaggatattgacttaaagtcacttcatctccagaagcctctggaatccccctggactaagaccaacagccagttcctatctggtccccaaaaatcaagcagcccattcacccccctccagaaggaactcttcttaattatgaaattcttaccgggacctgttctacccggaaaggactgttctgaagaacggggaagagatccgccatgtgtattgcctgcatgtgataaatcacatcctcaaagccaatgcccaggtgcttggcaacaatagcagacgccgaagccagaagtttggagtgggtgatgatgatgacttcagagaccaagggttaacaaggcccaaggtactgatagtggtgccattccgggaagctgctttgcgggtggtgcagctcttcatcagcctcctcgagggtgacagcaagaagaaaatcattgtgagcaacaaaaagaggtttcagggagaatatggatcagatcccgaggagagaccacccaacttgaagaggcctgaggattatgaagccgtatttgtgggcaatattgatgaccacttcaggattggagtggcaatacttcagagaagcatccgactctatgccccgttttactcctcggatatcctcattgcttcccccctgggcttgaggaccatcattggtggagaaggagagaagaagagagattttgactttctgtcttctatcgagcttctcatcattgatcaagctgacatttacctgatgcagaactgggagcatgtcctgcatttgatgaatcacatgaacctactacccctggactcacatggggtagacttttctcgagtgcggatgtggagcctcaataattggtccaagtactatcgccagacactgctattttggggcccttcaggatgcccagatcaactcagtgttcaacaagtactgtgtcaacatgcaaggccaggtggccgtgaggaatgtcccaattgacaggctctatcagtcatgtcctggttgcagttcncacatgtcttccagagggattggaagctgaaaaacctagcttcagtgatttgatgccaggttaactttttgtggaaccaagattttgccaacagatcgtgattgcagtcatgtctccacacaggcttcattatatattccccctcctaatttggaactttcgagcagtcttcggaaatttacttcacagaacgcagcgactcgactcttacccacattttgcgaggtacacccgcagaaagatttgggtgttcaccagaggccagacacttccttccctcacagagaagaagaacacagtgccaccatttcaaaaagaaggtccaatttcaacaaaggttttcaccataagggatccggcagccgaatcaatagaagcgggccaattttcacg

SEQ ID NO: 444713 - DNA, 969 bp, Homo Sapiens
  misc_feature (581)..(599): n is a, c, g, or t
  misc_feature (603)..(703): n is a, c, g, or t
ggtccttgcagagaccagtgagtagagggctacacccgcgccaggaggacgctttctggtgggacacaaggcttggcgagcggtcacggggacacagctgatggggtccaagggagaacacgggggggcccaatagttgccgcaaacggggggcagcccacgcacccacggaatgtgacctgcccggtagggcccggacaacaccacctggggtgggggaccccggcacacgccacctccgtcttctgcctcgaggatccgccacggcgtgttttaccactggcggggcttttcaagtggcacgccttaaattaaggttaaaagaaaagggggaaaaaaaggaggtccatccatacacgtacacgccctggggctccccaaaaagttgcaccggggcacattgagaagcgggaacgccaaggagggcccacttccaaagaaaggggccacgggcccggtggctacaagcccgtcaatcccggcacctttgggaaggccgagacacggagcgagtcgcttgaaggccacaggaaattcgagaccccgcctggccaacaaagcgagacccccatctcgacccnnnnnnnnnnnnnnnnnnnccannnnnnnnnnnnnnnnnnnnnnnnnnnnnnnnnnnnnnnnnnnnnnnnnnnnnnnnnnnnnnnnnnnnnnnnnnnnnnnnnnnnnnnnnnnnnnnnnnnnnattacaacccgggcggtagagcgagaccctgtccgtaaaaaaataaaacagaagcaggagcggggccgcccatagagaccgcgcctggggctttctgggttaggggatcgacttgcacgttcacactgccaggccgggcagtggcttcccgcccctcggcctcgccgccgccccggccctgcagccgcggcccgggacccccacgacacgcggtgccgaggccggccgggctactggggacgcagccgcccggggaagcccgcggg

SEQ ID NO: 444714 - DNA, 1037 bp, Homo Sapiens
  misc_feature (88)..(114): n is a, c, g, or t
  misc_feature (178)..(213): n is a, c, g, or t
tttttcttggacaagcccggaaacccaccccaaattggggggccccttggaagaaaggggaatgggtttcccgggacttttttgtggnnnnnnnnnnnnnnnnnnnnnnnnnnnaattcgcctttttagggatccctttacaaaggcagcccgctgcaggcaggtccttgcgcccacnnnnnnnnnnnnnnnnnnnnnnnnnnnnnnnnnnnncacttcaggatccggtcgagacacctcaggcctgcgtgttcctctcgccctccagggtgaagggcgaggcccccgtcagcagctcgaagagcaagatgcccaggctccaccagtccacagccttgccatgccccgtcttggtacgggatgatttggggggccatgtactcgatggtgccacagaaggagaaggtccgctctttctcctccgtcaggaactccttgctcagcccgaagtccgtgaggacaatgtggccctcggagtccagcagcacattctccagtttcaggtctcggtaaatgatgccgagcttgtgcaggtgttccagggccagcacgatctcacccccatacacgcgcacctcagcctccttgaagtactggcgctggtagaggtgggtgaacatctccccgccgctcacatagtccaggatgaggtgcagcttggcatccgtctggaaagcgtagtgcagcgtgaccaggaagggcgcctggcgcaccagctccagcaccgagcgctcggtgcgcgtgtgctcttgcgtcttggcgcgctgcaccagcgccgccttgcgcagcaccttcatggcgtacagcttccccgcgtcgtgcccgcccgccttccgcaccaggaacaccttgccgtaggcttctcctcgtgcccggtcaggttggcttctgtgatccgcagctccacggcgcagctctcatcgtcgtcctcgtcccccatggcgggcgggtcgctggggcccgcgcggctcgggctccgggcggcgccggttacatggcggctccggccggatcccaggaattccggaccggtccac

SEQ ID NO: 444715 - DNA, 1651 bp, Homo Sapiens
  misc_feature (305)..(313): n is a, c, g, or t
ttgctcgctatttgttctgcggggggtgcaggtacagaatggcatcttattcgtacgtgacgtccgctggatagagtctcgtggggggcgtgaatttattccacacgcgtgtcggactggactggctttagattctgtcatcacgacttcagcctgtgagcacagctcgggggcaggaggaccaggggatggtagtgtcgcagccgggagtcactgtctataatcatcgagtgggatatgagggtcgcggggggtttgctttcagggaataggagggagggggttgtgtatacagaattcgcgcnnnnnnnnnttgagtggctcttgccaggggcagcttctttgtgctgcagcaatggggaggtcggggatcctagggggccttggcccacctctgcccgacctggccggtgtccaggcaccaggcggttccagccccttggtcatccccgcgttgttgtggtcaaagagaatggagggtgccacaaaggagtatccctgaaagattcgggggtccccaggtggggggctgccagggggtgagtagacaggctccagccgagtgaattcctccgcaaagttgcccacatccagctctgagcggatttggggccggaatggggctggaatcttcctggcagccagagccacccaatcgaggccctggaagaagggatggttccggacttcttgtgccccctggggccccgcgcccaatcgcttcttaggatccttacaaagcagccgctgcagcaggtcctgcgccacggggcccgatccgaggggggaagggaggggagcacttcaggatccgtcgagacacctcagcctgcgtgttcctctcgccctcccagggtgaagggcgaggcccccgtcagcagctcgaagagcaagatgcccaggctccaccagtccacagccttgccatgccccgtcttgctacggatgatttcgggggccatgtactcgatggtgccacagaaggagaaggtccgctctttctcctccgtcaggaactccttgctcagcccgaagtccgtgaggacaatgtggccctcggagtccagcagcacattctccagtttcaggtctcggtaaatgatgccgagcttgtgcaggtgttccagggccagcacgatctcacccccatacacgcgcacctcagcctccttgaagtactggcgctggtagaggtgggtgaacatctccccgccgctcacatagtccaggatgaggtgcagcttggcatccgtctggaaagcgtagtgcagcgtgaccaggaagggcgcctggcgcaccagctccagcaccgagcgctcggtgcgcgtgtgctcctgcgtcttggcgcgctgcaccagcgccgccttgcgcagcaccttcatggcgtacagcttccccgcgtcgtgcccgcccgccttccgcaccaggaacaccttgccgtaggctcccgtgcccagcaccttgagcagctcgaagttctccacgctcaccttctcctcgtgcccggtcaggttggcttctgtgatccgcagctccacggcgcagctctcatcgtcgtcctcgtcccccatggcgggcgggtcgctggggcccgcgcggctcgggctccgggcggcgccggttacatggcggctccggcatcccgagaatc

SEQ ID NO: 444716 - DNA, 1108 bp, Homo Sapiens
  misc_feature (55)..(55): n is a, c, g, or t
  misc_feature (160)..(160): n is a, c, g, or t
agccggccacaaaagacatttcttaaaacaggaaggcgatgcccatcagtgcagntaaaatagaaatcctcggatttggtgtccacatgaatgcattagaaattctgaggcatatagatggccctcagcagcctgtcaagcatttcaatcttgtgatganccactattagaaatatgctattggaaactccgcctcttctttactaaggggttctacaatatatttgcgtctcttgatgaaagaagaacagtcactggtcatgtttatatagtcgtcaggtgtccaccgagggcgctttttaaatttcactgttaggatctcaagctttaccttttggatttcatttacatcaccctgtaaaactttggtgcaattaatatcactactaggattctccccagcaagctccaagtgtctgacacttacaaattcaggcttttgatgaatccttaaaacggagaaggtgattagggataaaacaagaaccataaagtagtatttggtgggataagaaaaaagtctccttcgcagcaacgtcctcagcatttcaaacaataatcagggatttcctttgtgaagggcagtcttctatgctccaagcaccaatgattttccctccgtcgtggccttgaaggttgtcagtttgcatttatcagagctgcaacggcatcttgaaatgaagagcagcacatttaaaagtaaggaaagtctgaatcacttagtgctgattccaggtgacatcctgccccattctgagcacttcacatgctgtcaggtgtattacatgtccgggcatccagcgataatgatgtgctgcacgagtctttaaagaaatctcggcctaggcggtccgtgccctagccgggatctgcaggcgccctcatccacgctgggagacgggaagaggagagggaggcgtgacaggcgagggtgcctgtgctgcgcagaaagcgctggagtgggcgtctgaccccggagtctcaggaggatgcccagccgctcctgctccaccaagctcccgccccgcgccgcgctctaggcgctccggagctgcgcctgcagccctcacaccagcgtggcccgccccggggccgcccccagaggccc

SEQ ID NO: 444717 - DNA, 1754 bp, Homo Sapiens
  misc_feature (34)..(34): n is a, c, g, or t
  misc_feature (1714)..(1714): n is a, c, g, or t
acccacccaacacaaaaagcaacgtgcaggttcntcaataagcaggctaggtaccgagtccgggaattccgcgaaataaaggagctgcaaccatggtgccttccctcctctccctgagcttctcctccttgggcctgtgggcttctgggctgatcttggtcttaggctttctcaagctcatccacctgctgctgcggaggcagacgttggctaaggctatggacaaattcccagggcctcccacccactggctttttggacatgccctcgagatccaggagacggggagcctggacaaagtggtgtcctgggcccaccagttcccgtatgcccacccactctggttcggacagttcattggcttcctgaacatctatgagcctgactatgccaaagctgtgtacagccgtggggaccctaaggcccctgatgtgtatgacttcttcctccagtggattgggagaggcctgctggttcttgaggggcccaagtggttgcagcaccgcaagctgctcacacctggctttcattatgatgtgctgaagccctatgtggccgtgttcactgagtctacacgtatcatgctggacaagtgggaagagaaagctcgggagggtaagtcctttgacatcttctgcgatgtgggtcacatggcgctgaacacactcatgaagtgcacctttggaagaggagacaccggcctgggccacagcagggacagcagctactaccttgcagtcagcgatctcactctgttgatgcagcagcgccttgtgtccttccagtaccataatgacttcatctactggctcaccccacatggccgccgcttcctgcgggcctgccaggtggcccatgaccatacagaccaggtcatcagggagcggaaggcagccctgcaggatgagaaggtgcggaagaagatccagaaccggaggcacctggacttcctggacattctcctgggtgcccgggatgaagatgacatcaaactgtcagatgcagacctccggggctgaagtggacacattcatgtttgaaggccatgacaccaccaccagtggtatctcctggtttctctactgcatggccctgtaccctgagcaccagcatcgttgtaaagaggaggtccgcgagatcctagggggaccagggacttcttccagtgggatgatctggggcaaaatgacttatctgaccatgtgcatcaaggagagcttccgcctctacccacctgtgccccaggtgtaccgccagctcagcaagcctgtcacctttgtggatggccggtctctacctgcaggaagcctgatctctatgcatatctatgccctccataggaacagtgctgtatggcccgaccctgaggtctttgactctctgcgcttttccactgagaatgcatccaaacgccatccctttgcctttatgcccttctctgctgggcccaggaactgcattgggcagcagtttgccatgagtgagatgaaggtggtcacagccatgtgcttgctccgctttgagttctctctggacccctcacggctgcccatcaagatgccccagcttgtcctgcgctccaagaatggctttcacctccacctgaagccactggggccctgggtctggggaagtagctctgaatgagaatggggtccccagaatggctcaaggctgtgaacctcccctggggccaccaccccttcccccaagnccttgggttgttggaaggaaattttggggggcccccccct

SEQ ID NO: 444718 - DNA, 944 bp, Homo Sapiens
taaggctaggtacgaggccgggtggtgcacaccgtgctcagcgccttcactgccatccccgctgtccttgccgccccgccatgggcctagagctgtttcttgacctggtgtcccagcccagccgcgccgtctacatcttcgccaagaagaatggcatccccttagagctgcgcaccgtggatttggtcaaagggcagcacaagagcaaggagttcttgcagatcaacagcctggggaaactgccgacgctcaaggatggtgatttcatcttgaccgaaagctcggccatcctgatttacctgagctgtaagtaccagacgccggaccactggtatccatctgacctgcaggctcgtgcccgtgttcatgagtacctgggctggcatgccgactgcatccgtggcacctttggtatacccctgtgggtccaggtgttggggccactcattggggtccaggtgcccgaggagaaggtggaacgcaacaggactgccatggaccaggccctgcaattggctggaggacaagttcctgggggacaggcccttcctcgctggccagcaggtgacactggctgatctcatggccctggaggagctgatgcagccggtggctctcggtatgaactgtttgagggacggcacgactggcagcatggcgtggacgagtggaggctttcctgggtgctgagctatgccaggaggcccacagcatcatcttgagcatcctggaacaggcggcaagaaaaaaccctcccaaacctcaccagaggcctatcaggctatgctgttcgaatcgccaggatcccctgaagggtctgggctgggggccaggagattagcaacaaggattcatcctgtgacttacttgcccttttttatttttccctcttgccccagtcctttcttcacgtttcatgggaaagtctgccgacaagaacctcg

SEQ ID NO: 444719 - DNA, 706 bp, Homo Sapiens
  misc_feature (301)..(433): n is a, c, g, or t
  misc_feature (437)..(450): n is a, c, g, or t
  misc_feature (505)..(556): n is a, c, g, or t
gttcactggagtctgcattgtcttggctgttgggtgaagaaaaagagcaggaagtcattacatggtaagcatggggctaatggaggagggaggagtggaagcagaggctggtctaccaggcagctccactgcacctgccccagactgatccaccctcctaaaatctgtgccatcgtcccccaatggcttggatcagaaacaaaagtgtcacatgcacaaaaacatgagccccgtgaaggcaaggacctttgtctgcttttataatgtttttatctcaacttataggcaataaatatttgcnnnnnnnnnnnnnnnnnnnnnnnnnnnnnnnnnnnnnnnnnnnnnnnnnnnnnnnnnnnnnnnnnnnnnnnnnnnnnnnnnnnnnnnnnnnnnnnnnnnnnnnnnnnnnnnnnnnnnnnnnnnnnnnnnnnnnaaannnnnnnnnnnnnntttacattagctgggctactcaggaggctgagggagaaggattagttgagcccannnnnnnnnnnnnnnnnnnnnnnnnnnnnnnnnnnnnnnnnnnnnnnnnnnntgacagagtgagacactgtctctaaaaaaaagaataaaccccagctttctctcacacacaacccacccaatccatcaggaaattctatcttctagatagattcccactcacacatgagctagcttgaaagggctcccagtggccaaatct

SEQ ID NO: 444720 - DNA, 827 bp, Homo Sapiens
  misc_feature (797)..(797): n is a, c, g, or t
  misc_feature (809)..(809): n is a, c, g, or t
tcctcatcaaatcctcacctaagctttcagtgtatccagatccacatcttcactcaagccaggagagggaaagaggaaaggggggcaggaaaaaaaataaacccaacaacttagcggaaacttctcagagaatgctccaaaactcagcagtgcttctggtgctggtgatcagtgcttctgcaacccatgaggcggagcagaatgactctgtgagccccaggaaatcccgagtggcggctcaaaactcagctgaagtggttcgttgcctcaacagtgctctacaggtcggctgcggggcttttgcatgcctggaaaactccacctgtgacacagatgggatgtatgacatctgtaaatccttcttgtacagcgctgctaaatttgacactcagggaaaagcattcgtcaaagagagcttaaaatgcatcgccaacggggtcacctccaaggtcttcctcgccattcggaggtgctccactttccaaaggatgattgctgaggtgcaggaagagtgctacagcaagctgaatgtgtgcagcatcgccaagcggaaccctgaagccatcactgaggtcgtccagctgcccaatcacttctccaacagatactataacagacttgtccgaagcctgctggaatgtgatgaagacacagtcagcacaatcagagacagccttgatggagaaaattgggcctaacatggccagcctcttccacatcctgcagacagaccactgtgcccaaacacacccacgagctgacttcaacagggagacgcaccaatgagccgcagaaangctgaaagtccntcctcagggaaccctccg

SEQ ID NO: 444721 - DNA, 1343 bp, Homo Sapiens
  misc_feature (71)..(71): n is a, c, g, or t
  misc_feature (73)..(74): n is a, c, g, or t
  misc_feature (163)..(163): n is a, c, g, or t
  misc_feature (173)..(173): n is a, c, g, or t
  misc_feature (336)..(336): n is a, c, g, or t
  misc_feature (348)..(348): n is a, c, g, or t
tggttgagaggagagacgtaatcgtcgtgtcgtagaggcgatctgggtatttcgttgtgctgagaattggntnnatacttaatttgtggagttgcacccgagcgatgtgtctgtctaagactcagactttgtgcttgtgtgatcttctgtatatgcatcgggngcggtgtgcngtggtagtgtggcttcctatcacagatgtgactgtatatctatatgggtgtgcagcggtctgtctttctgtccgttcctcttgttgtgctgtggtgctggtgttgatctatggaggggtaaagggctattttctgtgactcgtatcctagtgcgggttacgtnttgattcgacgnttgtatgctgttgcggatacctttccggtggctccccccagttttacgaagttttcgctgaccatccacttctcttaggttttgccgtcgcgctggtgcatttagcagagcttggaggtggtataacagttccgttctttgtagtaaagctttttatgccggggtgtcggcccagggatgttccaattgggtccaaatttcgcatctccggggtttgattggggcgccacctccccgcaatttcccgttaagtttgggggggtgggtgaccaaggccaggcgagggtggtgaaggaggcggaacatttagaatggggttagccccagccggctggtcacagggaggcattgctccctgtttgcgaagccccttgctgggcgttctgaatgcttcccccgctcggggttgcggttgcgcaggaaccccagctcttgctgctgcccggcccacaggccgcgcacgcactcccggttcaccttgatgactcggaagctgaggtggcgccggttgagcatgatgatcttgtactcgtcggaggcatcatccaggacatggcgcagcgccagcagggagggcgtgttgctgaggatggcgctgcgccatgctgggtcaccctcatgtgagatgaccagccgctcctcgttggccgcaatggcatcgtatagggctgctggctcctcatattcatctggggacgtgaagtggtcctggtgaagcttgagggccatgcgaaccccaggcgccacaacgcggtgaagcaggtccatgtcggcaaagacccactcgtcacgtggggaggtgatgcgaaaatcccccttgaacagggcgtgcaggccgtagaggaagggctccaggcttgcagacatgctgtgagaggctgtccccagggcccggcggcccagcacacacaggccaaaacacagcgtgaccagcggggagttccaatccaggtccacgggctggctgcgccatcccgagaattccggaccggtcc

SEQ ID NO: 444722 - DNA, 1415 bp, Homo Sapiens
gcaaaatatttaggggccaggagggttttaaggaaattaaaaggatgttatgaagtgaagtgagttgtgaaccagaacctggggtgccttcctcatccaaggtgcctcagtcgcccttcgtgcctgacccggctttgccaatggagcctggaccctcaagcacgggtcagctgtgggtgcgaacatggtgttctgggtcaggcctctttcaagtccccacaacaggcctgacttgtgcgtgagacgctttcacctttaaaccccacgccatcctgggggttcatggtcaggtataaaaccctgcagagaagtcaggctgtctgatcccaactctccccttctcagcctggtcacaagtcagttcccagatgcagcattgcaggtttctactttccgccggtctccttgggaacaaaacgttaagtgtgtgcggcctgtgcagggaggacagagggaaggagaggccggagccctcaggatcgagtgatcttgtcgggaggcatgaaccccgtgtccccgagggtcctgagcgcaactcggccgttgggtcggatcaccaggtgggtgatgctgccattattgagggagagccggagccagccttcaggaggaaactgcagtgctctgcacacgatgtagcggatgacgttggcgtgacagatgaagatctcgtaactgtcctcctcctgcctggcatctgcgcggtggatgtagttccggaaggcggcctcgatccgggctccgtcttcgtaatacacagcttccggcttccaatgagacacgggcgggtctggctcgatgggggcgccttcccgcagcagatctgtgctgactttgcagacgcctggcaggtgccggctgatgatatcggtggtctctatggcgcgcgtcatagacgaatggacgattttattaaacttcaaccccaagcttgccaggcggagcccagtgagttcagcctgctcccgacccagcggggtcagagtgcggtccttctccagggagccatccacgtggtactgggaatgcctgatgaggaagatgtgccgcgtggccttggctttgtagtggtccagcttggacgccagctcttcttccccagattccacgttcctcttccgcacgttgatcagagacagtggttctcgcctgtcccagttggggtcccagacaccggggcccggccgcgcgccccccgcccaggccggcggctcagccgggcgtggctccgcgtccccgcctgcgcgcggcttccctaccgccacggccgagaagagcacggcggccgagcccccggccagcccgcaggccgccagctgcagcgcctgccggaacgccatgccgccctcgtgccgaattcgccacccaggcctcgctccgtaggggtgatgggagatatacaatcttaattgaaa

SEQ ID NO: 444723 - DNA, 1019 bp, Homo Sapiens
  misc_feature (888)..(888): n is a, c, g, or t
  misc_feature (916)..(916): n is a, c, g, or t
  misc_feature (954)..(954): n is a, c, g, or t
  misc_feature (994)..(994): n is a, c, g, or t
tgggtggcgaattcggcacgaggctgaagtttgtgaggtgtagtattgagtcctgtttgagctattgttctctttttcctgaaaaatggcactgtcaaagagggagctggatgagctgaaaccatggatagagaagacagtgaagagggtcctgggtttctcagagcctacggtggtcacagcagcattgaactgtgtggggaagggcatggacaagaagaaggcagccgatcatctgaaaccttttcttgatgattctactctccgatttgtggacaaactgtttgaggctgtggaggaaggccgaagctctaggcattccaagtctagcagtgacaggagcagaaaacgagagctaaaggagttccaggaagcgctcgcccctggccgaggatatgtccttgcaaaacacgagccctcctagtgaagaggggatgtcacccaaagcctaccaccggaggtgtttggtgatgactctgagatctctaaagaatcatcaggagtaaagaagcgacgaataccccgttttgaggaggtggaagaagagccagaggtgatccctgggcctccatcagagagccctggcatgctgactaagctccagatcaaacagatgatggaggcagcaacacgacaaatcggggagaggaaaaaacagctgagcttcattagcccccctacacctcagccaaagactccttcttcctcccaaccagaacgacttcctattggcaacactattcagccctcccaggctgccactttcatgaatgatgccattgagaagggcagggaaagcagctgaactggcaagctcgaatccaagcccagctggcactgaagccaggactcatcggcatggcccaacattggtgggcctggctaatnctcatgccatgggcttgcttcccccccnaaggttggagttaaaagaccaaacgaaacctacacacntgatccctggatgagcaagggcgcactgtaaatgcaacanggcaagggagattgagctgaccccc

SEQ ID NO: 444724 - DNA, 1164 bp, Homo Sapiens
gttttttggcggctgtggaaaaggggcaaaagggagaccttggggggccaaaaaaagggtattggattccacaggtgttttgaaagggtttttcccttaagttggtggctggaaatggttcccttttcaccagccaggatatttgggctttcagagtagggcatgcggttgtgtcagctcaatctcctttgcctggttgcattctacaggtgcgcccttgctcatccaggatcagtggtgtaggtttcgtttggtcttttaactccaccttcgggggagcaatgcccatggcatggagattagccaggcccaccatgttggcattgccgatgagtcctggcttcagtgccagctgggcttggattcgagcttgcagttcagctgctttccttgccttctcaatggcatcattcatgaaagtggcagcctgggagggctgaatagtgttgccaataggaagtcgttctggttgggaggaagaaggagtctttggctgaggtgtaggggggctaatgaagctcagctgttttttcctctcctcgatttgtcgtgttgctgcctccatcatctgtttgatctggagcttagtcagcatgccagggctctctgatggaggcccagggatcacctctggctcttcttccacctcctcaaaacggggtattcgtcgcttctttactcctgatgattctttagagatctcagagtcatcaccaaacacctcctttagctctcgttttctgctcctgtcactgctagacttggaatgcctagagcttcggccttcctccacagcctcaaacagtttgtccacaaatcggagagtagaatcatcaagaaaaggtttcagatgatcggctgccttcttcttgtccatgcccttccccacacagttcaatgctgctgtgaccaccgtaggctctgagaaacccaggaccctcttcactgtcttctctatccatggtttcagctcatccagctccctctttgacagtgccatttttcaggaaaaagagaacaatagctcaaacaggactcaatactacacctcacaaacttcagcccctgagacggagcccgaacgttacaccggaaccggaaaccttctgaccgccctacggcgtgccgtcgctaccgccaccgccgccgcatcccgaaaattcc

SEQ ID NO: 444725 - DNA, 1190 bp, Homo Sapiens
  misc_feature (1006)..(1017): n is a, c, g, or t
  misc_feature (1019)..(1027): n is a, c, g, or t
tttcagagactcctccactctctgggaatgacacggactccctctcctgcgacagtggcagttcggcaactagcactccgtgtgtgtcccgcctggtcactggccaccacctgtgggccagcaagaatggccgccatgtcctgggcctgattgaggactatgaggccctgctcaaacagatcagccagggacagaggctccttgctgaaatggacattcaaacccaagaggctcccagctccacaagtcaagagctgggaacaaagggtccacacccagcaccactgagcaagtttgtgagcagtgtgagcacggccaagctgaccctggaagaggcctacaggcggctgaagcttctctggagagtctcactccccgaggatggccagtgcccccttcactgtgagcagattggagaaatgaaggcagaggtcaccaaactacataaaaaattgtttgaacaagaaaagaagttgcaaaacaccatgaagcttttgcagctgagcaagcgccaggaaaaagtcatctttgatcaattggtcgtaacccacaaaatccttcggaaggccagaggaaacctggagcttaggcctgggggagcccatccaggaacatgcagtcccagcagaccaggctcctgagaagaactttcagccaataaagcttgtgcttcccccaccgagctcacgctgtctctttgttccaagtgtggttcctatttattgaggaagaaagagctgtctggccaaaggaaatctattttttcccttcatgttttctctctgaaagttggcttgagagttgttgtcagaaaggtgcaggtgctccacaaacgggtggtaaaaaggcctcgagctcttggatgttgtatttcagatcaggggcaggcaccggagttgaggctgtgcgccttggtgggcttcacgtcttcccctggatttgcttagtactcagccagtgccacagtttgaagattctcattaaatgattcatttcatttcaaaannnnnnnnnnnnannnnnnnnnaaacatgtcggcccggcctcggccctcggagaagcttttctagaaccattcggttttggcgcgccgggccccagtcagggtaagtgaaccatgggtcataagctggtttccctagggagatccctgggccatggactaagtgcttgggaattcctcaccaaat

SEQ ID NO: 444726 - DNA, 895 bp, Homo Sapiens
  misc_feature (50)..(50): n is a, c, g, or t
ttgaaccagttgaatttggctgtggtatccaagaaggggtgggtaggtgntaaagccagtctgtagctttggtttaaatacacgcatacttttcacaggctgttgattaggagctggtgtaattgcagtgactgttgtagcgggaagggctgagatttagcagagtgacttgctctatttcctaatgggttattaaaagaatttgacctcactggtatgttaggttgccatgtagggatttcatgcccactgctcggggatgactgggctggagcagaagatgactgaggccaatttgtttgcagtccaggtacactaatgttatatagttccatgttatgactatttctgtttggcaccatcatagactgaggaatacttccatttgtatatgacgaaggagcagcagatccccctgtttgtaaagcagaagggctttgtccattagctgctgtcagaggatatggaggtggtggctgccgattcacagtgccagcagggacaacattttggtgtatcatgaaatcagtttgtccagtaccattctgcattccaggtctccctgatggaaagttaaatttgctagaactctgcatgatgattggttgtctgccaacaggaacagaactaatgcctctctgtccttgattaggaggattcatgggggaagtgttgagaggtggtggaggatagccctcttgccatgccccaggtgggacaggagagattcgggagattacgtattccatgtttccagaatagcgctttgtttgagagtttggttcccatgaagggggaggtggagttgtacctcttggagggggagtctggcctcttggaggtggtggaggagtaacactccttacttgaggtggtggtggggggttcactctct

SEQ ID NO: 444727 - DNA, 1179 bp, Homo Sapiens
  misc_feature (1077)..(1077): n is a, c, g, or t
tggtccgcagttctccaggtgagtagagaccgttattcttctgtcggcacctgtgggtcccgccagggaggactgggtccaggaaggctgctgcgtgttggtgggagtcttatgtcagcggtcatcgggattgcagatgttatgagaaagattcaaggagatggagcgttcagaaggtatatcattgttgtgatactgctgtctccggccggcagcaagtgctgggcctccgccatgggcttcttatccccgtcggagctcgctggttctgctccagctccgcccagctgccccggctggcacgcacgctgccagaggagctcccacagtcagagctggaatcgggagcagaccttgtgtccacacatgttcttcctcaggcttctggtagttaccttgctgcttctctctgggcagcaggtaaactgcttgccatttcggcatctgctttaccgacctccctagtgctttcctgtatacaccagcttcttacattgatgtcactgctcagctcagacctctcaaagtcactgcacacaagctttagatcactctgttcaggaggccttgagactggagcaacaccccttttcttgttctttctacatgttcgacttttactccaatttaaattttgtaaatttccttctcttttctcctgaagctttttcttcctataaggatcttcttgctctacgaaaggtatgtcctgtttctcagaaaacatgtcttctctagatgttttgtgaatcttcttttctgaagaaggctttgtgtccaccttcttcaaattttcacaatgatctacttcattcttgacaggtacttgctggttattcccattatttttcctggaaatttctggcaagtctggctggtggtactgaggtgagtttcttggtaaatggttttcaggtagtttcttggaggtcttcagtggacagagctcccgttccttgaactcggctgtgttctctgaagttttaatgtcagtttccttaggaaacatacatgtctgtattccctccttcatactacattctgaagaaggattactgaaaacaattgtgtttttcnagtgtgttttcttctttattcagtaagtttttgggaagggttaaattcttctgcaggttgacatttatgccacttgcatatctgaggctgatccagttctca

SEQ ID NO: 444728 - DNA, 2327 bp, Homo Sapiens
tataacccagaaaataaaacaccacgtttattccagagaagtttgtatttgggccttaagcttttgaaaataaagtttagagacatagcatatgaataccactgtaatacacatgaaatattctatcagaccctaaaaattaacataaacttttaactttctcatagtcaacaaaatagtggctggttgccaattttattagataagttggttacagcattttaattatcattttacgtctatctaggtgtagctgaaattcaaaatgcacatcaaagtaaaactatatcacaactcaatgccatactaaatgtacttggcctctgcaatagaattctagtcagacttcattttttactcccttcttatgacccaagtggctttaacaggaatgcaggacttagtgctgatcatcacacaacataccactttctttttagaacctctacaaaattttgaggggagatggtggcattagccctgtggaacagatcttgatcacctcaataacactggcccattatctgtccagcagaacccattgtgaaatagtacaaggtgcacagcccttcactgattacaggcaagtgttacagtagcctagccataaggaaggggagttacatcatagtacaaaatacagtataaaagcgttatttaacattccacactgaagattactctgatgccttcaaacagtcgtttggatgttagccacttaaacaaatacatcactaaggtaaacgatataaacataccaaaaccctgtatggttaaatacaatttccatggtacaaaaatcaaagcctggagatgtttttacagattgctttttacacaatgtcttaaattgccaaatatttacaacattaaagaggaaatacattgtgatgcagagtaaaattctgaaatgattattataaaacctcaatctatctacgtgaggcactcctgaagcaagtggcattagccatgaggtcctttggtacaaggcccattgcttgaagaaccacagtagctgctgtggctttagcatgcttcttattagggctggcaaagctgggctggtaagcgcttccatttatcaataccctaaagagaaaatgtttgcgatgatcagggccactatcatggaccaatagaaattcaggtggttgccaccttcttttattacagatctccatcaaagcagacacaggatgtttgcctgacagatctttcattgcagcagagaagttcccagacctcttttgtgctctttctcctactgcaacaagaccttttcggtctgtcttaaaatcaactaggatgggttccttattgccttctttgttttttcctaatccttctccttctctccagcccatttttctcatcaaaacggctcccattcctccagttaccggggctgctcttaagaactgatcctgcaggcctgtgtttgtagtgaggatggggggttggtcattgacaggcaggacagtgacagtgaaggccacaggatggctctggcgatccatctcggaggcattagccatcaggacaaaactgtctgtcagtgtctcgctcccgtcatgcacgtagcggatcagctgctcttccaccattctccaggagaaggcgctgagggtcctggcttgaggtccgtcctccttctgcagggctccatgctggggtggctccagcacctgcaggctgaggcccaggagagtggggaagtagggcccggagacacggagcagtggaggggccagggtgaggctgccaccctcagggacgctgaagttttgcgcctctagtgggatggcagcgggcagcacctccagctccacaaggacgccctcgaggggagcacccaggcttgaggccacatccagcgagaaggcatcggtccaggcctcagggcgggagtgcaggtacaggaccctgcctgtgtccactgcctcctgggagaagctctgcacggggtccaggctgggtggctcatctgccaaggcgccacgcgacaccatcaccaggtagccggcactcggtgggctcttcactgagaatacgatgtctgcaggtggcactgcctcctgggctgcctccagctggtcccttctgatctcagctgcctctccctggaagacgtagatcttcttgtgccggaccagcttcagtggggccagtgggccctctagggcaatggtcacttgtagggtggcatccgtgtgcactggccctgcttccacggagaaggccatggtgtctcgggggctgaggctgccattgtggctatagagaacggccccatccagcaggtcctgctgggagaaggctgtggc

SEQ ID NO: 444729 - DNA, 1005 bp, Homo Sapiens
cataagtcccaaaaattccggttttaaaaaggcgttattttaacctttccccccatggaaaggatttacttgggatccccttcaaaacagttgttttgggaaggttaaccccacttaaaccaaattccttccgttaagggtaagccaatataaaccattcccaaaacccctggtatggttaaatacaattttccatggtacaaaaatcaaaggcttggagatgtttttacagattgctttttccacaatgtcttaaattgccaaatatttacaacattaaagaggaaatacattgtgatgcagagtaaaattctgaaatgattattataaaacttcaatctatctacgtgaggcactcctgaagcaagtggcattagccatgaggtcctttggtacaaggcccattgcttgaagaaccacagtagctgctgtggctttagcatgcttcttattagggctggcaaagctgggctggtaagcgcttccatttatcaatacctattcaagaaaaacatacaattgggctggtaagggcttccatttctcaataccctaaagagaaaatgtttgcgatgatcagggccactatcatggaccaatagaaattcaggtggttgccaccttcttttattacagatctccatcaaagcagacacaggatgtttgcctgacagatctttcattgcagcagagaagttcccagacctcttttgtgctctttctcctactgcaacaagaccttttcggtctgtcttaaaatcaactaggatgggttccttattgccttctttgttttttcctaatccttctccttctctccagcccatttttctcatcaaaacggctcccattcctccagttaccggggctgctcttaagaactgatcctttttaatccaggcttgggcaccagtattggccaactgttcttgtgtcaaaacctgtactcctgtacttcctgtgaactgtccaggaatagagttcagctgagcccaggctatcaat

SEQ ID NO: 444730 - DNA, 1427 bp, Homo Sapiens
ctggtaccggtccggaattcccgggatgggatggctgggggaagggacccggactagaacaactgctgactaatccgcgggccgcggggaatgggtggcgcgccagccggtcggcaggggtcacgcggccgggtgtgcgcggaatggattcagggttctcgggtcgcgcccgggagctagagtcctgactcccagccggggtccccgaccggcctttcggggttgccgggcgcgctctgcaaaggggaaactgaggcccaaggaaattgagtatctctgcaaagtcaccagctgagttcgaaccagacagatcctgggaccccctactctatccgccaccggaagaatctccgtccttgtctttccattctgccctcccggcttcccagtaagcacacagccccaggaccacccttgaccgtcctcaaccaagcgatgcatgccaggggcccccatggccaactgtccccagcactgcctctggcctcctcagtcctgatgctgctgatgagcaccctgtggctggtgggggccggccccggcctggtcctggccccggagctgttgctggacccctggcaggtgcaccggctgctgacccatgccctgggccacacggccctgccaggcctgctcctgagcctgctgctcctgcccactgtgggctggcagcaggagtgccacctgggcacgctgagattcctgcatgcctcagccctgctcgccctggcttctgggctgctggcagtgctgctggcaggccttgggctgtccagtgcagccggcagctgtggatacatgcctgtccacctggccatgctggctggggagggacaccgccctagacggccccgtggggcactgccaccgtggctgtcgccgtggctgctgcttgccctgaccccactgctcagctctgagccacccttcctgcagctcctttgcggcctccttgccggcctggcctatgcagctaggggccttccggtggctggaacccttcagagcgacggctgcaggtgctgcaggagggcgtcttgtgcaggaccttggcggggtgctggcccctgaggctcctttgccaccccgggtaacctggcggaactgcctgtcacccatccggcccgaatgagggcccccatcccgggaccgcccttaggggccctcccccgacctagggccccaccgggaagaactcccccctgcccaccaccaagcccgtggcgcccggggaatccccccttcggcgaggaccccctagacagacaggctaggaattggcttagggtgcccgcgtctccccccagacgcccccccaacgtggcgccgcacgttatcagcaacacaaacctccgggcaggaccatccagccaacccctcgattgcaccgggccgacccacaagagcaccccccggtgagcgcgagt

SEQ ID NO: 444731 - DNA, 986 bp, Homo Sapiens; identical to SEQ ID NO: 155056
  misc_feature (20)..(20): n is a, c, g, or t
  misc_feature (971)..(971): n is a, c, g, or t

SEQ ID NO: 444732 - DNA, 957 bp, Homo Sapiens
  misc_feature (119)..(119): n is a, c, g, or t
tccggtcctgttttggcctgctgtttcaggtttccaagtttcggaaacaacccgttcaaaggtctggcgagtccctgttttaggttccctcacctttggaagaaacctcccgcccaaanatctcagagctttctcctgtgtaggctgccactggttctggactgctctgcgttttctccatggccatttgtttcttggcctggagctgctcaaaggctccccggagttggtgtccgtttcctctgggtttcctccatctgagtcaggggccttggtgaggccaattttgatggcctctaggtgctccctgtaggtggccttcagctctttccattgttccttagctgcaattgccttctgtcctgagatgagccaccaggaatgagtacatgagtgagggtggcctgctagcctgcctccctgcaacactgggcctccttcccatcagccaaatgggagacctaactgaaatcctccttccttccccactcaggtcagctgctactacaatcccctgcctactcacggctcgtgtcttcagaagccaaggggtcgagacccttagcagtgtcctcctgagccaggatgttctgcaggaaatccgctacctgaagctggctgcagagcagcttgtctttcttctgagagtcctgctcagagggagggcagagacagggaacatccttacctccttacaggtttccttaagtctgctctctgccaatgctgccctgtatctcagtaagaggagccaggaccagaccctggcttctgaaaggctcgctctcatcttgtacataccaccacaaactcaaccaggatcttggctggcagttctgcctcctcctgcaggcctacaggttccaagatgcctgccacctcagccaggacctctagggctgcagcttccgcctctgtctccgctgcctccaatcccgggaattccggaccggtcca

SEQ ID NO: 444733 - DNA, 1118 bp, Homo Sapiens
  misc_feature (291)..(291): n is a, c, g, or t
aagttttttcccgccccgcccttgggaagatggaccaaattcccccaccggaggggggatccccggggatttttaatcccccaaatgcccaaaacttgctggggaggttagtccgaaatccaaggtggaactcaggagtttcgcagttctttccggtaatgatgggttgggaggtgaagggaattcacgaggcctttttttaggatctttctccaaggcggctgtcctccaggaagtcatggcaaattttccatctcccagccaggttgtagaccccaacagccttgaagngaccacaccaggggtctcttcccccatggtgtctccctgtactctgctcctgggggtcgagtcggctgctggggtttatcatctggaagattctctgcctcagcctcagctcaggggaacaacagcttaccctgcagggtatacagaagctggaggaaggtctgatacctctgcagcttgtcccgctcctgttctgcctgctgcttcaggtttccaagtttctgaaacaccccgtcaagctcctgctgagtccctgtcttacgctccctcacctctgcagaaacctccgccagatgctgcagatgcttctcctgttgtagctgccactggttctggactgctctgcgtttctccatggccatttgtttcttggcctggagctgctcaaaggcttcccggagttgtgtccgtttcctctgggcttcctccatctgagtcagggccttggtgaggccaattttgatggcctctacgtgctccctgtaggtggccttcagctctttccattgttccttagctgcaattgccttctgtcggctcgtgtcttcagaagccaaggggtcgagacccttagcagtgtcctcctgagccaggatgttctgcaggaaatccgctacctgaagctggctgcagagcagcttgtctttcttctgagagtccaccacaaactcaaccaggatcttggctggcagttctgcctcctcctgcaggcctacaggttccaagatgcctgccacctcagccaggacctctagggctgcagcttccgcctctgtctccgctgcctccatctttccaggcgccgagttcagctgccttcccacccc

SEQ ID NO: 444734 - DNA, 895 bp, Homo Sapiens; identical to SEQ ID NO: 322919
  misc_feature (96)..(96): n is a, c, g, or t

SEQ ID NO: 444735 - DNA, 973 bp, Homo Sapiens
gaatgacggttctcccttctttccatccaaacctcggatccttccaggataggcctaggttatttgcccaaaaagcattagggcctggactaacaggaaacctttccgccccatcatcaggaaagtgactatgaatggggtacttcccaggcaggcacctcttttgaagggtggattgcctgtgtaaagaaatgtgttggagtgtcctcccaccaaggacgtccacaccccctcactttctgagcgatgagtttatccatttcaaaacccgaatgtcccagtgcaataattttgttcacatttagagtttttaacttatctacttcaggttgtaatgcagtgatttcatcttcaaacactaaatttgtccctggatttgagagaaaaggggtttctttggaagtgtatccaacgattcccacaacttcatcaccaacaggaagaactttatatggcaaataaagtcctgatatttgagatgctagtggcccctttgctttaatgtttgcactcagaattggaaatttggcctctttgaggagtggctcgatcagtccttccacaccattatcaaattcatgatttcccagtgccatggcatcgtagcgcagggcgttcatgaagtgcgccacctcggcgcccttgtacacggtgaaccagatagtgccctggtactggtcgccggcgtccagcagcagcacgttgggttcggcgcggcggatctgctgaaccttggtgaagagccgagccacgccacccatgcagcggctggcgttgacgcacttgctggagtcctcgctggtctgctccagccggctgtgcacgtcgttggtgtgcaaaatcgtaagctcccaggcgccagccgcaggccacagcaccgcgcccagggcgaggagtagcgtcgcgggcgcccgcgcggctcggggacacatagctgtggcgcgtgaactgggtgcgaaagcgggcgagccgg

SEQ ID NO: 444736 - DNA, 524 bp, Homo Sapiens; identical to SEQ ID NO: 322923
  misc_feature (140)..(153): n is a, c, g, or t

SEQ ID NO: 444737 - DNA, 1171 bp, Homo Sapiens
  misc_feature (251)..(273): n is a, c, g, or t
  misc_feature (676)..(676): n is a, c, g, or t
  misc_feature (814)..(814): n is a, c, g, or t
  misc_feature (839)..(839): n is a, c, g, or t
  misc_feature (1056)..(1056): n is a, c, g, or t
  misc_feature (1156)..(1156): n is a, c, g, or t
gggatagaaatttttgcaataatgaaaataactaccattattgagtacttaatagatagctggctttgcaaaaccccctgtgtattatctcttgtaatcctcctttaagtcaggtactcttactgtccccatcttacagtgaggaagctgcatttgacaaggtcacacagctaatgggtgggagtttggagagtggagttgtggatctcacactcaggacactatctcctttggttcactcagttcaacannnnnnnnnnnnnnnnnnnnnnnatctaattgtcattgaatctacaaatctgtcttataggaacaagtggtgatgaacttggacagcaggcttctgatcttccctttatatatctgctgtaacttcttgtatatatcaccagaaaaaaagaattgaaaataatcgtcacccagaaaatccagaaaactgaagatttcatcagttggaaacagtagcactttgaaaactttttaggccagctttgatttaatggccctactgatattcacatcgaaggtgactaacaatgacaaaggccttatgaactgtacggacaatacagacgattattcttatcctcattgcatttctatgcatatgcgtcagagcattttaaagtccagtaaatatctgtcaaaccatttctgttagaacgatgtcaattcnatgcttttaatttagcatcaatagaaaattgctgtaggtaaatctcacatttatctgcaacaaaatatagattttatttttagcttaaactttgtttctaccttatgttagtggacctcagttatccatctgtaaatntctttttatttggctaaaataatcnaaaagaataatttggttggccaattagaaatgcctttttcagttggtgtattgaaagctttcctttaacattttcacctgctcattgtgattcctccttttagtctaatatctttccaggtcatacttgtttttaatcattaaatattttcttcctggttttggagactaagctgataaactttttttaaaacttaagcattgtcattgctattttntttaatttgactttcctaggagtttaagaacagtgaaagttagctttgcaccttcaaatgatcttgaatgagggaaaaatcagtttgatccaaggatatntcctgccttacatgg

SEQ ID NO: 444738 - DNA, 897 bp, Homo Sapiens
gccagatggctttgccttgcatttctttttgggactccgagaactaatttgaaaggggtgggggtagccccagggagaaccccctttcattggtcaatctgagtccaaagaaaaccagaagtctgtcttctgctgggggtcagcaaggttctcgtccagacccctgagggtgctggggccttccagctggaggtcactggactcactgctgctgtcatccagctctcgggaggacgagttttcggcatctgagtcttccgagctgctgatcaccacaacgcgttcctctgcctccccggcgccactggccacgtggttgctgttgggcaggaagacctcacttcctatgacggggctcctggggctaggcggtccatccacggtggggtggtgagactgccttggaggtgctgggcctgggctgctccggggagctccgagccaaccttgcctccttcccctcctcagactccatcttgatgaccttcctggggcactgggtctggctgcacttcctcttctgggctgtacgttgtattggagacatccaggtccaacgtcaatagggtccctgggagtgctggcagcctctgggctggctttcttggatacagctgcatctttcccctgggtgatgcaagagctgaggtcctgcaggcgcaccttgaactcgtcgaagccatcggtgcgcacggcagcttgcaggctctggggctcctcctggcgcaggcggcagagcgcctggcgcaggaaaccgtgcatgtccagcacctcctggtccgaggcgtagcacttcatcctctgcaccagcgcgctgcccgtgcggatgcgctgcagcacagcatccaggcggcccagccgactggccatctcctcgtagtcgcgctggtaccgcgc

SEQ ID NO: 444739 - DNA, 469 bp, Homo Sapiens
aaggcggacatctttattcaagccagcaaatgacacgccaggagcccaggtgagccggagtgctctgcccagcctggctgcagttgttggccagagctcagagctctcctgggcctggcagatggctctgcctgcacttctttttgggactcagagactaaattagaaaggggtgggggtagccccaggagaacccactttcattgtcaatcttgaggtcaaagaaaaccagaggtctgtcttctgcttgggggtcagcaaggttctcgtccaggaccctgagggtgctggggccttccagctggaggtcactggactcactgctgctgtcatccagctctcgggaggacgagttttcggcatctgagtcttccgagctgctgatcaccacaacgcgttcctcaggtcaacgtcaatagggtccctgggagtgctggcagcctctgggctggctttcttggatacagct

SEQ ID NO: 444740 - DNA, 1421 bp, Homo Sapiens
gggctgagagattttaaaagagcaggggggtccggtgtccctggagaggagaatttttcccaaagaggggggcaaatacgtggctccgacgcgggagtggtcgcccacatttccattgttccccctggagggggtttccccaagttgggagctgggccagatggtgagtcacaaaaattgggaggggttgttttgctttttggggcccaccgttcttattattacgggtccctttttttattaggggagccagttagaaagtggggggatgttcattcctggggtggcggtgctggattttgggccaggcgcttcttctggggtgaatcaagttcccccgagggtactggttaaccaaatttttccctttcggagggtccctcttggggggaccaggcacccccccctttggccatcggtcttgatgttctggttcttctgggtactggcgcttggggaagccactgttttgggcagaactcgccccgcggggacaccccttgatgtgactgttatggtgggggcttgcgctcgctctccctgtgtttctcgggctttccctctgaagcttaatttcacgaaaacgagcttcagcttcttgcagtgcgttttttgaagactcttccgatccctctgaccccctggtagcggctgccccggtccccctccatgtacgggaacactcgcgcctgatgcgtccagtaataatctttagacccaaagaaaaacacagggaattctccaatctcgtgcttcattttctgaatatttgggggaacatttttgggatggcaaacttctgccggccaccatctgtagttcccaagtttcacccaaatgatatcctggaagtgcagcttcttcccagccctgcagtcattgcagaaccagctgccgtcaggcatctcgatgttcaggcagtcagggtggaaggccgctgggcaggactcacagcacagaaggctcccccctttggagcacacgaagcaccagctcacgttgacgtgggcgtggtgtcgcttccccttccgagcagtgaagtgggcagtgcagatgatgctgttggaggcgatcactgagcatcctgctgccagacaagcatccccgctgtgataggcaacggggcagcggacacaccgcatcattttaccttttgacggccttgggtttgaagggttggaagcatggcagctcacacagctgtggagggggcagcggaaacctcggctctcaaatacagtcagagggtattttttcacacaagcctcatggtaaaattttccacactgagttaccacacagcgcttaacatctgtcttgctctctttacacacgaaacatgagtgaatcccttgctcactagtccaagcattctccagcaaaaagatccagccatcaaggattaccttgctgcgatctga

SEQ ID NO: 444741 - DNA, 776 bp, Homo Sapiens
gtacccccccctccggataaacgggatattcaacatggcggcgggagtgtccgcggtggtggcggtgcaagagagctgagggagtgggcgagggcgcggagttccagtgtcgagcagttaggccgcgagcgactgcggcgccgagccgatgagtaacccgaagcccctagaggagtggtcacctgcctgagggcacttctgtcccaccagcatcagaccaggtgtgtgcaggccgcacctgagtccccggcaccatgtttgggaagaggaagaagcgggtggagatctccgcgccgtccaacttcgagcaccgcgtgcacacgggcttcgaccagcacgagcagaagttcacggggctgccccgccagtggcagagcctgatcgaggagtcggctcgccggcccaagcccctcgtcgaccccgcctgcatcacctccatccagcccggggcccccaagggggagcctcatgacgtggccctaacgggccatcagcggggggcctggccatcccccagtcctcctcctcctcctcccggcctccccaccgagcccgaggtgcccccagtccctggagtgctgggaccccacgcctcagagccccaggttgactcgctccagcttgataaccaccgtcccacccattattctcctcttcccacccacttatcaccccatctcaaccacccttcatcaactacacctcatattctcctctacatactctccaactacacctcaaaaattatacacccaatcctcatcaccatatcacac

SEQ ID NO: 444742 - DNA, 1803 bp, Homo Sapiens
tgttcacctcttagtgttctctccacctccagcgacccccacttgcagacttccaagtgattggagggccgcttgcccttcctggagacagaagaacatgggggagggcctgtcccagaggttgggggtcctgggagcctcgcttgcttcccacgagtccctgtgtttttctaaaagtcacgagatcaaaactggagttcagtagtagggtctcatctacccccagcaaggaggttggtgccacgcggagcatctcccgggctgcggaggagtcgggaggcctggccccctactggcctcagtggcgtcctggggtgacccgcgccggctcttttgccttgacgcggaagggcgctgggcctcatctggtgcggttctggcgcatgaggggcacgatgctggcaggcggccctgccttggccaggaatgggtgcttcagcagctcggctgccgtggcccgctgggcagggtctcgcaccagcaggcggtccaggaagcccttcagggatggcgacaccttgtgcaggttcttcagtcggggtggcaggttgtcccgaatcatcttcatggctttgaggggtggctcgttgaagtaggggggctctccgtccaccatctcaatcaccattatccccagcgaccagatgtctacctctggcccgtagggaaggcgggagatgagctctggggccatccagtagggcgtgccgaccagcgacttccttcggggcacttccttgctcacctgggcgcagaacccaaagtctgacagcttcaccctgccatcatgggtcagcaggatcgagtcgctcttgatgtcccggtggatgacgccctgggcgtggagcaccgacagggcctgcagcactgcaaggcacacggccgcgatctgctcctcgttcatcctggtgtgggtgacgatatcggtgagggcgcctccttccaggaactccatgaccacccagagctcgtcccccaccaggtagctgttgtacatctccaccacattctcgtgctggtagtccctcatgattaccacctcgttgaagagcagctcgcgcctctgctgcttgcgcaggtccatcttcttgacggccaccagcttgcccgagctgcgcacggtggcgatgcacacgatgcccgtggagccctcgccaatcttgatgaagttgtccaggtaggagcgggggtcgcctgggtccaccaccagctgcagggcagcccggaactgctcatgggatactcgctgtggctcccgctgtggtgagcgggggccagggggcccaggaacagcaggggcggcgggggtgcaggctggaggggccagctggggctctgaggcgtggggtcccagcactccagggctgggggcacctcgggctcgggtgggaggccgggaggaggaggaggaggactgggggatggccaggccccccgctgatggcccgttaggggccacgtcatgaggctcccccttgggggccccgggctggatggaggtgatgcaggcggggtcgacgaggggcttgggccggcgagccgactcctcgatcaggctctgccactggcggggcagccccgtgaacttctgctcgtgctggtcgaagcccgtgtgcacgcggtgctcgaagttggacggcgcggagatctccacccgcttcttcctcttcccaaacatggtgccggggactcggtgcggccggctcggcgccgcagtcgctcgcggcctaactgctcgacctggaactccgcgccctcgcgcctccctcagctctcttgcaccgccaccaccgcggacactcc

SEQ ID NO: 444743 - DNA, 741 bp, Homo Sapiens
ggtccggaatttccgggatcgggagtgtccgcggtggtggcggtgcatgagatctgagggaggcgcgagggcgcggagttccaggtcgagcagttaggccgcgagcgactgcggcgccgagccgatgagtaacccgaagcccctagaggagtggtcacctgcctgagggcacttctgtcccaccagcatcagaccaggccgcaccgagtccccggcaccatgtttgggaagaggaagaagcgggtggagatctccgcgccgtccaacttcgagcaccgcgtgcacacgggcttcgaccagcacgagcagaagttcacggggctgccccgccagtggcaagagcctgatcgaggagtcggctcgcctggcccaagcccctctgtctgaccccgcctgcatcacctccatccagcccggggcccccaagaccatcgtgcgggggcagcaaagtgtgccaaagatggggccctcacgctgctgctggacgagtttgagaacatgtcggtgacacgctccaactccctgcggagagacagcccgccgcggcccgcccgtgcccgccaggaaactgggatgccagaggagccggccacctacggccagagggggcccagggaaggcaggcagccgaggccggttcgccggtcacagcggaggcgggtggcggcagtggtgacagggcgacgggcggggccctgagaaagaggcccaagtcttccaggaggggctcaggggggtccc

SEQ ID NO: 444744 - DNA, 469 bp, Homo Sapiens
cgttaggtgattttctttttgaggtattgatgactttattattctgcaggtacatgtccaggggcccagcctctgggcccagtaactcagctactctttgtggctttcttcatggctttttttgtgggctgccacgcccatctttatcaccagaatgaggaactcctggaagttaactgcaccatcagtgttgatatccaactctttgaaccagacgtctgcaccctttttcctgatatactgaggacactcggtctctagcaatttcttcaggtcatccctgtagacggcatggaaattcccctttatcagggagtacttgtggtagacgtcgatgatagagttcaaggctttctccagctcggtcaacatgatgcccacggacttgccccaccaggtcttctgaaagacagctgacaagagacatccccggccgtaatgggccctctgcgttgataccactgcttcc

SEQ ID NO: 444745 - DNA, 1516 bp, Homo Sapiens
  misc_feature (174)..(174): n is a, c, g, or t
aagggccactgcgggtttttccaggccaatggaagattccccagggttctagaaaatcggttggtaatcctacaggggttcaggaggcgccttgatttcccctttccacagcaagtttgcccgagcacgagtaggtgtgtcaaatgaaggggcaggagacctccgcctccctgngctgtgcgatggtgccctgcaggcactccctgctggttctgacgcagcgcttcttcctcgcccgccaggcgcgctcgctcctccttgtcggggctggtatgaggcggggacctggtaggcctcggggcgcgcccggcagcacatctcacagccaggccgcgtgggcttgttgatgaaggtgcacccggggcactgccagcccaccggtgggggctcaggcactgcatctggctgcccccgtccgggttcctgggggaccccgggctttggggggcctggctccagagggccccgcggctgcagcgtgaggtccttgaagcccagatcttccagcatccgcagctgccgctcccgctgcagctcctgagggttgagggaggtgttgcgggctgacagcagatagaggtaggcactgtccccattctgccgcaccccatgggagtgcagggtctcctggtctcgtgccagccgctgcccaatcacccactgctgcaagactggtgggaagccatagtccagaaaaaccatgtccttgagagacgccactgtcatatcagggcgcactgtgagccagatggtgacggtgtgcatctgagcatcctccacgctcacccacagcctgatgtcctgcgttggggagacctcaggcttcagttgcacactcaggggcacccgttgctctgccagccagatggcacacttcattgccacctgttcatccccgcccgccactgctcgggtgaggctcagggccatttcctctgctttcttggtcttctcgtccatctggcgtggctgtgcccatccccctgggggggaccgtgcctcctgggaaatgctacctccgggtcgcctgggagaggcgggagaccaggagcaactcagccaggccgtgtggcctccggcgcggcccaagccctgtgtgtgcctcgctgtccccgcggcagtcgggaagcatcacactgcccggtgaccaggccgggatcctgcgtggggcggtgagagggcagcgggcgccgagacaggtccgcactgggcgcaggaggaaacgggaccagccgaggtgggaagaagcggggaaaggacgcccggacaccacccagccggggcgttccaagtcccggaggacccccacttgcgggagcgcccctggcgtcccgggtttcaaggcaaagccctctctcctcccgggaggccccagttcttcgcaaggggagcggcatcccggaaattccggaccggttccaactgcttgggtgagggggtgtaaagtcgtaccattatggggcgcggtgccggacgcccgccggccgtcctcctccctctttatagggtgttaggt

SEQ ID NO: 444746 - DNA, 1392 bp, Homo Sapiens
tcgacgttcgttctacataccgctgcctctcgtgtcgtagctcttgtgagcaccgtcttgatcgcgatgcgaggccttgttttataccccccgccacaccatgccccttagggtgtcccaaacgtcggatgtgcgtgttgcgccgtgggtgcttagttctgaccgcggtttttcttcacttgcttcttccgaagcgttttccaccatgccgttctagttttcgcgggggcggcgccgccagtatccttgtttttccccttccttgaccaagggtgaccccgtaattttagggtggaatttctgtgctatcccggtcccccctccagctgaactggaagctggggaatccgtttcggtcccacaggaattaaccggaagaagtgtgtccaatttttgaggtatgctttttagaagagtgtggaggggtgtcttttttcccttcctcctttgatgtgatggctggatggagctggaatggccattttgcaccatgaggaatctgatgtcctgcgttggggagacctcaggcttcagttgcacactcaggggcacccgttgctctgccagccagatggcacacttcattgccacctgttcatccccgcccgccactgctcgggtgaggctcagggccatttcctctgctttcttggtcttctcgtccatctggcgtggctgtgcccatccccctgggggggaccgtgcctcctgggaaatgctacctccgggtcgcctgggagaggcgggagaccaggagcaactcagccaggccgtgtggcctccggcgcggcccaagccctgtgtgtgcctcgctgtccccgcggcagtcgggaagcatcacactgcccggtgaccaggccgggatcctgcttggggcggtgagagggcagcgggcgccgagacaggtccgcactgggcgcaggaggaaacgggaccagccgaggtgggaagaagcggggaaaggacgcccggacaccacccagccggggcgttccaagtcccggaggacccccacttgcgggagcgcccctggcgtcccgggtttcaaggcaaagccctctctcctcccgggaggccccagttcttcgcaaggggagcggcttcggcggaagagaaagtgaaagtggcggccccggaagtggggcgggactgggatggtgggggccaggaaaaattgtcgcctcatccgggacctccactgcccggctacccggcggcggcggacgccgagtgcggggtcccagcggtcccggcgctcctgtttggggcgaccccaccccgtcctccggggctgatcgcgggtccccggactcccgcccctcggctgaatcccacccaggccctctcccacggattggacgttctatgccccaacaaactcaccaacaacac

SEQ ID NO: 444747 - DNA, 916 bp, Homo Sapiens; identical to SEQ ID NO: 322937

SEQ ID NO: 444748 - DNA, 839 bp, Homo Sapiens
  misc_feature (47)..(47): n is a, c, g, or t
  misc_feature (89)..(89): n is a, c, g, or t
  misc_feature (98)..(98): n is a, c, g, or t
gtcaggtgcggtgagatatgcgacagatggagagagagatctctggngggtgagcccaggggacatttgaagttgcaggtagctctcanccaggaacntgccccctgccaggagagcactgtgttctcaccctcgtaggtacaggaggccgacaatttggtaccagtgatggcaggccactcagctttgagtagccatgtccgcaacaggccctgcgggccatctcagctccctgggtgcagaattctgacatcatggccttcatgcccgtgctcagtgcgtggagctcaggcaggaagctgaagtcttggttcagaatggcagtgtaggagtgctggaagaactccaagagggctgactgccaggaaagtggaaggcatatactgatggccatctgaggaaatgagtttcttgctgttgtgtctggtagtccaggacctttgcctctgtggtcactgggccggagtccgggattggcggcggatgatccgagtagcgcatgtgcgatgacacaggccttctgcagtatagggaggatctcccctgacatcagctccaccctgcaccaccaccatgggaaggtagttgctctgtgctgtaccgagtttgacgtaggtgccatctggcaagacctgtgctaagcgactcagcatgttcttccctggggacccgcacatggttcagctgcaggaagccattgtctgtttgatcaaagtccatcttgggtccgatgtccccaatgcgacagcgtgggtcgactgatatgcccgagaattcccggaccggtaccagcctgcttttaataccacgtttcatagcactaatgtgctctttgtttc

SEQ ID NO: 444749 - DNA, 1413 bp, Homo Sapiens
  misc_feature (66)..(108): n is a, c, g, or t
  misc_feature (134)..(171): n is a, c, g, or t
  misc_feature (177)..(177): n is a, c, g, or t
  misc_feature (179)..(179): n is a, c, g, or t
  misc_feature (184)..(185): n is a, c, g, or t
  misc_feature (187)..(265): n is a, c, g, or t
  misc_feature (277)..(277): n is a, c, g, or t
  misc_feature (281)..(349): n is a, c, g, or t
gtgggggaaaaaaaccaccccttctttttgtggccgcgttgttttttggagaaacgacaaagatgnnnnnnnnnnnnnnnnnnnnnnnnnnnnnnnnnnnnnnnnnnnagagaggggttaaaaaaagttttttnnnnnnnnnnnnnnnnnnnnnnnnnnnnnnnnnnnnnntttgtntntgggnntnnnnnnnnnnnnnnnnnnnnnnnnnnnnnnnnnnnnnnnnnnnnnnnnnnnnnnnnnnnnnnnnnnnnnnnnnnnnnnnttggtgttgttntttnnnnnnnnnnnnnnnnnnnnnnnnnnnnnnnnnnnnnnnnnnnnnnnnnnnnnnnnnnnnnnnnnnnnnctaatttaaaattttaatgttgcatatatgccatagtaccattatcacatgatggtgctggttgcttcttgaatactgttggttatttcatagcttggatctccaactttgtaaaagtggtcttatatattcctcataggcaggttctcctgagtattggttggtgacttctgagcccactggaacaggcgttcgtagacgtttccatcataacagccaagtgctgaatttaaacactgatcggtgaagtcaaaagcatcagttaacaggatggcatccttccggatcaggcggagcaggtccaggtaggctgttcttgccatgtccacttgggcaccagacaggaaggcgtcatggagaaagtcacccgagttagtcaagattccatgtatggcatggaggtcacagaggcgcttgagcacctgctgaatcgctggttcattttctagtttctccagagcttctgtaaaacccttcacagtgacatagtagcagtgcaccttagcagcctggaggtgtatgacagtggtctggttccaagcctcgtgctggtcagctccggattgcgtcagggtctgtaaatgctgcactgagtcctttatgagccttactgccacatgtgcccaggccgtggtgtagagctccgggcagaggaagtcggctgccctctgggctggacacctggccaggtcaggtgcggtgagatatgcgacagatggagagagagatctctgtggcgtggagccaggggacatctgagtctgcaggtagctcttcaccaggaacctggccacctgcaggtagagcactgtgttctcaccctcgtaggtacaggaggccgacaatttggtgaccagtgatggcaggccactcagctttgagtagccatgtccgccacaggccctgcggcacatctcagctccctgggtgcagaattctgacatcatggccttcatgcccgtgctcagtgcgtggagctgtgagaacatggaggggggttgggcggtgttagggggcctccaccatagggaccaaccctgtgcaccacttactgagcatctccc

SEQ ID NO: 444750 - DNA, 1563 bp, Homo Sapiens
  misc_feature (824)..(824): n is a, c, g, or t
  misc_feature (1129)..(1233): n is a, c, g, or t
acaaaacccatttattgctatttggcccctgcgttcgtgcctccatttgccagaaaatgagccaccggcgacacgaggagaggcaggagacccccagcccttgcacaaaacccactcccttggatgctgtcctcagcgagggtggctgggggccaaccagggggcccacccgcagagtggcagaggaggcaggttgaccctgcggacgttgagctctgtggcgaaggtcctggccttctggtagaagaagagcgacttctcacggtccaggaggaagttgtggtagatggtggccagccgcgtgtagatcttcagctgtgccttcttgttgcccaggtccacggcggccgccagcgccagctggtagtacccggctgcatcaaacgggtccttcaggtcgtagaagatgatgtcaccgagcaccaggtacaccttcacgtagtagagggtctcctcgtcaaactccagcggcgagttgcagagcgacagggccttgaggtagaagtgctctgccagctcgccatggcccagtcggtgttgcagggcggccagccggtggtaggccacgcgctcgttcagccggtccccccagggtgatgctgagtgctagggccatgtgggcaaactccaagcccttctggtggctcttccagcgtggccagcagtgccaccagcttgttgcacagccgcagctccgctttgcgggttgcccgtagtcactgccaggggcagggcccggttcccggtagaaggacacagctttctcccgctcccaggccccgtcgaagaagatgtctccagccgcctcaaaacagctccagccnccaggttggggtcgcctgtgtacagggccacgttctgtgccacctggatgtagaggtccaccagctcgctctgccgcaagatgtaatagatcttccctgcttgcagccaggcatgcgcctccttctctttcttctggaggtcaatgaaaatccccagacttcgtttggtgtagtccagtgcggatttgtaggcccaggagccatcagtgttcagatgctatccaggccgatggttctcaaggtgcgcaggcatcacagtcatccagaggcctgtccatatagcttgctggcctgcccccagagcnnnnnnnnnnnnnnnnnnnnnnnnnnnnnnnnnnnnnnnnnnnnnnnnnnnnnnnnnnnnnnnnnnnnnnnnnnnnnnnnnnnnnnnnnnnnnnnnnnnnnnnnnatggctctaacacactggcccattttcctgctgtgaacctgaggccaaggctggagccgatctcccgggtccctgtggaatccggctccttccctgctctcttggtgagtcgaaggggtgtgagtgcagcaatgtcactgggcccgctcggtgcccagggacaggtagagctggctgatggtctccaggagctgcccctccagcaccttgtcggccaccttgcaggccagggagagctggagctcatggtagatgacacactgggcctcgctgggcatgacggcgctgtagaagtggcacagccgctggacggcccgcagctggctctcc

SEQ ID NO: 444751 - DNA, 307 bp, Homo Sapiens
cacgggaggaggcagactggttccaggaggatgacagcccttgttctgacacctgtgtctgataccagggcctacaaatccgcactggactacaccaaacgaagtctggggattttcattgacctccagaagaaagagaaggaggcgcatgcctggctgcaagcagggaagatctattacatcttgcggcagagcgagctggtggacctctacatccaggtgagtgatgagggatgcaggagggcctctgcacatgttcactctccatccatccatccgtccattgatgatgatgatagatgatctt

SEQ ID NO: 444752 - DNA, 937 bp, Homo Sapiens
aaggagattgtgaccctcgtggaagattttcacagagcatccaagaaaccaaagcagtgggtggccgtttgtatgcaggggcaaaaggtgctcttggagaaaactggatctcagcttggagaacaggaactgccagactttcaaccgcagactcctaggagagatctcagggagagctctccagcagagccttcccaggcaggagcttatgaccggctgagcccccatcattgggagaaatccccactcctccaagaaccaacccccaaattggctgggacagaggcccccagaatgagaagtgacaacaaggaaaatccacaacaggaaggggctaaaggagcaaagccatgtgcagtgtcagctggcagatccaaagggaatggtctgcagaatcctgaaccaagaggggcaaatatgagtgaacctcggttgtcacggaggcaggtcagctccccaaatgctcaaaagccatttgctcactaccagagacattgcagggtggaatacatcagcagccccctaaaaagccacccactgagagagctaaagaaaagcaaaggaggtaaacggagtctgagcagccgtttgcagcgtcttggtcaccagccggcccgctcggccaagaaaccttacaaatgtgatgactgtgggaaaagcttcacgtggaattccgagctgaagaggcacaagcgagtgcacacaggggagaggccctacacgtgcgtggagtgtggcaactgctttgggcggcagtctaccctgaagctgcaccagaggatccacacctgggagagagccctaccagtgtgggcagtgtggggaaagctttcggcagagctcaaaccttcacagcatcaccggacttcacatggggactaaaaggagcactccatgctttaaattcccccggaaaggggttggggtttctcctccc

SEQ ID NO: 444753 - DNA, 1294 bp, Homo Sapiens
tatgcgcccctgcttaccacgaaaaaaataaaggggcgcccttcgttggagacccctttccgggttctttggaatttttcagacaggggcccccaaattccgggagatggcccaaattccaagatcctgggttgatttattccccagaaccccccttttatggcaaatccagggttccctgaacggttccaatgtccagccatgcaagtggggaatggttggggcctgattcgggggaggtgtttcatttaggagataaaaggtaggcagatcttctggttgagaaaggtgtatcatggtctggcccaggcagtgaaattcagatgggaaatatgggcgcacctctctggtctgaatatcttcaggggttcattgccctcaccacaaagcctttcagctgctgcattctcacaagagccagtcgaagtctgttgctgaccattgttgttttgcctaggatgttgggccaaatagcgctggcatttgattttttctccttctacttcttgagtcatcatggctatcactgtggatttttgctcccaaatcatctgccagaagtctccaacagttgtaggcagtggtccttggcaggcaatgtaaacgaactcttctttccccaactggtatcttaatgaagctggcattgatatagccaccttcatctccaagaggcactcttgtagcatcatagggaagtatatttttatatctgttcttccttctgttttccttagtttgcccaattagacactgatccaaaggttttaattcttgaagattctccagctccttagaaggaattccttgatctagcaaaccccgcaggactcgaatgactgattttaagttggcacccgtgtatttaccagagggaagcactttgacgacagggagtacagcgagctcatcgtttgtcagaaaggaatgatctttatcagaatcttcatggtttgttctctctattggcaactcatcatttccccatgttatttcatcatcatcagtcttcttttcttgtggcttctgaattaagctttcactttttactttttcttcacaatattcttcacagccattcattttggtggcctcagtaaaatactcaggtaaaggtgaaccatcgcagtctgtatcttctgttctctcttctgataacttcccattcatctttaatgtacctggaccacaggagtctcctgctgcattattttcgtttaaaagattctgggcttcctcatccacaacatccagcagagactggataacttcagcttcttgggaatcatcatcc

SEQ ID NO: 444754 - DNA, 1036 bp, Homo Sapiens
  misc_feature (685)..(685): n is a, c, g, or t
tttaccaacctgagggagttataaaaaatatagcactcagttacaatgaattactgcatttaatattcaaacacttaaggcacatttctcacagtttacatgtgataatttagcatgatccaaactcaaatatccatttctcgctatctttcaatgtctgcagcagacactgacttacgaaaccttttttaaagcccatctcgaaatcctccatagttgtaggcatgtgcatttcttcttcggaaagatttcggatttcctctggagtcaaaccttcaatgcgccttctcattgccatcaaggacgcatccctgcacacgttggtcaatgtccgcacctgaataaccttccatgttttctgctatacttgcaaggtcaacatcatcagccaattccaactcacgtagacttattcgtaatagctcctccctgccttttgctgacggcaaaggaatatagattcgtttctcaaggcgtcgtcttaaagcctcatctatatcccatggcaaaattagtagctgccagaaccataaccattttggaagggtcatcatttgcagaagtacctccaacaccatccatctgaaccagcagctccgctttcacccttctgcttgcttcatgttcttcagaagtccctcggcgactacagatggagtctatctcatctaattcaaatatggtnggctggagacatcaaatcgagccatttcaaacagaagacgaacaagcttctcagattctcctctgtatttggaagtcagagttcgatgaagagcacgttgaagaatgttgtcttgcattctgtagcctactgctttagcctaggagcgtctgtcgccgtgccaggtggggccgaccatccgtactcctttccatggtctcctaatgcccttaaagaattcgggcatccacattggtaacactacggcttccttaagcaactttttagcttctactaaatcagcgatatcatcccatcgaacattgggattctgggaaattatatctctttccaaagcttctactaagtctt

SEQ ID NO: 444755 - DNA, 1211 bp, Homo Sapiens
  misc_feature (1132)..(1168): n is a, c, g, or t
atctatctcatccaattaaatatggtgggcgggagattaaatcggagccatttcaaacggaagacgaccagctttctcagatctccctctgtatttggaagtcaaagttgatgaagagacattgaagaatgttgtcttgcattctgtagctactgcttagcaaaggagcgtcttccccgtgccaggtgggccgaccatcagtactcccatcgaacattgggattctgggaaattatatctctttccaaagcttctaactaagtctttatcatatccggtactatcaaatttatttgtctctggttctgttactgcacgcaggtgatttgttcttttcctctcttcctttattctgttctttcttttcacgacaacgaacagctttccctctgtcattgtgaacattctgtgcagatgaacggtgaactctgacagttgtacttggacgattaccatgtgatttagggtcactgtactgagaagattggcgttttctaggtcctggtgagggtcttcgttcaacaggtacaggcatggaccagacttctccctcagaagctggaaggtcatgctgtgccgctttcaagggagtgctgtccagtttaaagctctctagtgttttcatgatatctttaacatgtttagcttccacatttatttcctgccaaacctgttgccatttctgctggaggtatgtatctttgactgagtacagatacttgttcatttggtcaagaactccctgataatagaccatcgcagagtcatagtttcccagcaatgcatattcacgagccaattttacattctcactaatcataagaagactcatgttcaactgtaagctgcggcggcccaagctcctcgggaaaccgcccaacgccaggcacaggggattggcggagtggagatcccggcagcgaggaaggagggcctgacccagtccagcccactttgctctccgctcacggccccagtactgcccagttcaatcgtcaacaccacctgccggcgcggctcctgctcgccgagaatttgaagacaaacccgccagggtcacttccggtgccggggacgacctcggcgactcaccgctctcgacgaattcgagctcggccgatttggcctgatnnnnnnnnnnnnnnnnnnnnnnnnnnnnnnnnnnnnncgccgccaccgcgtgaatccagtcgccctatatgatctataca

SEQ ID NO: 444756 - DNA, 1129 bp, Homo Sapiens
  misc_feature (124)..(124): n is a, c, g, or t
  misc_feature (165)..(165): n is a, c, g, or t
aaaggggagcacgcttttttccttccccccctggggtggggcatcccggtcccctttcccccaaaagccccatcccaggtgcaaccatttccagtgggaggaagggggaccaactcccgccttntggcacctggtttgtgctctgagttcaactttcttcatcgntaaatggacaaggcagcagaactcaccttcaggagacccgcaactcctctgcccacgttagctgggattttagtacctgggtctctccattccagttcccccaagtagaccgcactcctggccaccagcagtgctcaataaagatttattacattaaaaattccattgccaaaccctgaggcactcagggctctgaccggtgcagccatgacctctgaacccagaacacatggaagcaagcagcagctgagttgcccactcaagtcttggcctgcctggctttgctggcgaactcctgcacacccttcaaggccctgttcaaatgtctctgtcttaggctgacgcagctgctgcccttctgtggccatacagtgctccttttcacagatgatggctcctgcagggagtgcccccagtgcccagcacagggccaggcacacagtggtgcacgggaacgtctgctgatgcccaccctaaggccaatcaaggagccacggggctgggtcctggtcctcacatcctcttccgcatcttgcccttcttggagcgggcaccccggccgaaggcgccctgctgcagctcctggacgcggcggcggttgcgggcagagagctgcttgaggccaccacgctgcaggaagtgcagcttctgggcccggcgccgctgcttcaggatctgctgcttggtcttgagttccgggcggactcggcctgcaggggtgcctggggcgtggggccgggatgcaccttggccacggtctcgcttcccacctcttcgctctgggcctcgccggtcagatgccccttcttcgtccgagtcacgatcatcattttctgtttctgtttccacttctgatagctgggaaacctcgttaaggaagctgcgtgaagccctgggatgggagaaggctcctccccacctgccccagcagacagagttccgttatcccagccgcagctgaagc

SEQ ID NO: 444757 - DNA, 980 bp, Homo Sapiens
  misc_feature (927)..(927): n is a, c, g, or t
ggtccggaattcccgggatgcgcgcggcccgaatggcggccgacaagggcccggcggctggacctcggtcgcgagctgccatggcccagtggaggaagaagaaagggctccggaagcgccgaggcgcggcctcccaggcccgcggcagcgactcggaggacggcgagtttgagatccaggcggaagatgacgcccgggcccggaagctgggacctggaagacccctgcccaccttccccacctcggaatgcacctcggatgtggagccggacacccgggagatggtgcgtgcccagaacaagaagaagaagaagtctggaggcttccagtccatgggcctgagctacccggtgttcaaaggcatcatgaagaaggggtacaaggtgccaacacccatccagaggaagaccatcccggtgatcttggatggcaaggacgtggtggccatggcccggacgggcagtggcaagacagcctgcttcctcctcccaatgttcgagcggctcaagacccacagtgcccagaccggggcccgcgccctcatcctctcgccgacccgagagctggccctgcagaccctgaagttcactaaggagctaggcaagttcactggcctcaagactgccctgatcctgggtggagacaggatggaagaccagtttgcagccctgcacgaaaatcccgacataattattgccacgcccggacggttggtgcatgtggctgtggaaaatgagcctgaagctgcagagtgtggaatacgtggtgttcgatgaagctgaccggctttttgtgaatgggtttcgcagagcagctgcaggagatcatcgccccgcctccccgggggccacccagacggtgctggttctccgccacgctgcccaaactgtggttggtgggatttttggcccggggctgggcttcacnggaggcccgtgctcatttccggggtttggacggtgggataccaaagctcaaac

SEQ ID NO: 444758 - DNA, 2753 bp, Homo Sapiens
  misc_feature (764)..(800): n is a, c, g, or t
ctgatgctcaccctaagcccaatcaaggagccacgggggctgggtcctggtcctcacatcctcgtccgcatcttgcccttcttggagcgggcacccccggccgaaggcgccctgctgcagctcctggacgcggcggcggttgcgggcagagagctgcttgaggccaccacgctgcaggaagtgcagcttctgggcccggcgccgctgcttcaggatctgctgcttggtcttgagttccgggcggactcggcctgcaggggtgcctggggcgtggggccgggatgcacctgcttggccacggtctcgcttcccacctcttcgctctgggcctcgccggtcagatgccccttcttcgtccgagtcacgatcatcaattttctgtttctgtttccacttctgatagaggtctcgcttgtaggagctgctgatgtagcggccgctctctgtcttaatcttcttcttgtcttcctgtcctgactgtcccacaaaccgcttcttcttacggtcccacttgagctgctgccggcccctcgtcaggttctgggcttcatcccccatcaagtccaggacagcgccagctgcctgctgctcaaaggctcccccttccccgctgatgctcaggccccgctcgctgtcaaagtccttgggccggtaggggatgtagaattcctggtcccgctgccgggcctcctccctccgcctcttggctcccctgttgggtcctgaccgctgccgcttccggcccacgacctctgagaaaatgnnnnnnnnnnnnnnnnnnnnnnnnnnnnnnnnnnnnntctcaggctgcttctcctgcagtgctgggcggctcggggctgggcccactgggccctcctgctgctcctgccgcccctgctgtccctgctggaagcgggcgatggccttgcggtccttctgccgcttggcgcgcgatcacctggctgcacaggtctcggctggaggcgttgatctcaaagatagtcgcccgggagcggtagttctttatgctgtccaccagcctcagccgctgcagctcctcctcctcaaaacgcgagctgaagagggggtgcaggcccagccccacaaggtccatctccttggccctcttgatggactcaggcgagggcgccgggcgtgagcgcacatactgctgctgggcgttatcagcaacgcgggccaggccccgtagctcccagcgatgcctcccagggtgctctgcaagaccactgtcctcctcgtcccacccacactctgtggcacccgacccagcatgccatcccacaccgggccacacctgagggctccttgaggggtcgggcgagggtgagggagcggcccaggaacaggtgcagatccagcaggtaggggatttcatcaggggccaccaaggagtaggctgtgccacttcggccagcccgagccacacggcccacgcggtgcaggaagagtttgcccttggcggggaagctgtagttgatgacattgtccagcagcgggatgtccagcctcgggcggccaggtcagtcacaatgagagtggagcacttgccaagcgtgaatttggcgagattgatcttgcgggctgtcgggtctagggcactgtagatgtgggcgcagctcacccgctgggtcgtcagcagctcagtgaggtactcggcgtggtgcttcgtggccacaaacacccacggtctggtcctggggccgcaccacgttgtgcagcaggtggagcagcacggcagccttggtgtcctcccgcacgaggaagaaggaggtcttcagctgctcgttgagcttggtatccacgtcaagccggatgagcacgggctccgtgaggccagcccgggcaaattccaccagcagtttgggcagcgtggcggagaacagcaccgtctggtggcccccggggaggcgggcgatgatctcctgcagctgctctgcgaaacccatttcaaaaagccggtcagcttcatcgaacaccacgtattccacactctgcagcttcaggctcatttccacagccacatgcaccaaccgtccgggcgtggcaataattatgtcgggattttcgtgcagggctgcaaactggtcttccatcctgtctccacccaggatcagggcagtcttgaggccagtgaacttgcctagctccttagtgaacttcagggtctgcagggccagctctcgggtcggcgagaggatgagggcgcgggccccggtctgggcactgtgggtcttgagccgctcgaacattgggaggaggaagcaggctgtcttgccactgcccgtccgggccatggccaccacgtccttgccatccaagatcaccgggatggtcttcctctggatgggtgttggcaccttgtaccccttcttcatgatgcctttgaacaccgggtagctcaggcccatggactggaagcctccagacttcttcttcttcttcttgttctgggcacgcaccatctcccgggtgtccggctccacatccgaggtgcattccgaggtggggaaggtgggcaggggtcttccaggtcccagcttccgggcccgggcgtcatcttccgcctggatctcaaactcgccgtcctccgagtcgctgccgcgggcctgggaggccgcgcctcggcgcttccggagccctttcttcttcctccactgggccatggcagctcgcgaccgaggtccagccgccgggcgcttgtcggccgccattcgggccgcgatcccgggaattccggaccggtaccagcc

SEQ ID NO: 444759 - DNA, 1064 bp, Homo Sapiens
ctgtttaccatagatttattgacagctactactcgccaggtgtgctggagtcaggtggggctggggctcacagctctctacctgtttaagaggggctggcagtgaggatttctgcctacctcatgggtggggcaggcaaggctaatagacagctcatttcctgcatctgccactccgacgcaccttcttccctcggttccacccctcattcagccaaagcgctctgactgagtcccagaggcctcccgtttgcatttctggctcaaagtctgcagctggccctttccatgcagctggagttctgcagtccatggaacctgccaccatgatagtccagatcaggccacagtaatggtggctgggctgggagcctgagatgttagcaggaagagagctgctggggcagaaaggttgctgagggtgagcgtagagtctcctgtgctaaatccccgcagctgaacagcacttgaaggttacaaaactctttcactcttgttctcttattgtgatccatgaggtagctgttatccccataagagaggaggaagctaaggccagagaggggaagtgctaggtccatccgctcactgccagcacttcatggcccaggggcttcctggaggcagcagagctggaagtgggttcggcccactcaaagggtagactgttgcccctgggtcttactcactgagcttgtgatgcagagtgaaattcctatcacggtgagcaccatgccagcaactgctcgttttccaccaatatcttctccaagggccttcccaacaatcagtgtgaagatgatagccagagagttacagatgggcacagccagggtcagatctgtcgatgccaaggtgaggtaatagagaagggatccacactggttgaggagaaagggcatcaggtactcagtattcaagaagagggtcttcatctcctgtagcaactgctgggcccaggtcggctcatgaacccgctgcaggccggcggaggcccgcttcagcagcggctgcgtgccaccccacagagcggccaccagcaccagagccaacacctgccccaga

SEQ ID NO: 444760 - DNA, 1062 bp, Homo Sapiens
tgtggagttagacgggcgaccgccagacggggagcagcaggtagacgaggagtgaagtgggagcgcctggatttatggtgtaggggaaatgatcacgggggaggggaggggttttttaaatgggcggtagaacaaggcaataaagggggcccgggagtgtatgggggggtgcctaggagcaggagggggtcaggacacaaaagcgggcacctcttcatagcttttcccagctaccccgttcggaagtccggtaccttttttcacagggcctcttcccaggaaagaaggcccttgttaaatgaggaagcagttcctattttccagtttctccttcctgggggttggggacctcctggctgagagctggaggctgggccatactctgcggctccattctgtatggccttccacctcctcttgtctgtttaccatagatttattgacagctactactcgccaggtgtgctggagtcaggtggggctggggctcacagctctctaccttcttccctcggttccacccctcattcagccaaagcgctctgactgagtcccagaggcctcccgtttgcatttctggctcaaagtctgcagctggccctttccatgcagctggagttctgcagtccatggaactgagcttgtgatgcagagtgaaattcctatcacggtgagcaccatgccagcaactgctcgttttccaccaatatcttctccaagggccttcccaacaatcagtgtgaagatgatagccagagagttacagatgggcacagccagggtcagatctgtcgatgccaaggtgaggtaatagagaagggatccacactggttgaggagaaagggcatcaggtactcagtattcaagaagagggtcttcatctcctgtagcaactgctgggcccaggtcggctcatgaacccgctgcaggccggcggaggcccgcttcagcagcggctgcgtgccaccccacagagcggccaccagcaccagagccaacacctgccccagagacgccgccatggcaacgccgcttcttctacttccgatcccgggaattcc

SEQ ID NO: 444761 - DNA, 717 bp, Homo Sapiens
tggggctggggctcacagctctctaccttcttccatcggttccacccctcattcagccaaagcgctctgactgagtcccagaggcctcccgtttgcatttctggctcaaagtctgcagctggccctttccatgcagctggagttctgcagtccatggaactgagcttgtgatgcagagtgaaattcctatcacggtgagcaccatgccagcaactgctcgttttccaccaatatcttctccaagggccttcccaacaatcagtgtgaagatgatagccagagagttacagatgggcacagccagggccagatctttaaaaaaaggtatcaaaaccccatcttccagatgaagtcacagcaaatctcaggactcaaacccacatctcctgactccacgttcagtgcttcccaggattccagcatgaagacctgaactctgaggtctgggaccagcctgtcgatgccaaggtgaggtaatagagaagggatccacactggttgaggagaaagggcatcaggtactcagtattcaagaagagggtcttcatctcctgtagcaactgctgggcccaggtcggctcatgaacccgctgcaggccggcggaggcccgcttcagcagcggctgcgtgccaccccacagagcggccaccagcaccagagccaacacctgccccagagacgccgccatggcaacgccgctgtcttcaacttccgct

SEQ ID NO: 444762 - DNA, 1853 bp, Homo Sapiens
  misc_feature (1032)..(1032): n is a, c, g, or t
  misc_feature (1058)..(1058): n is a, c, g, or t
tgaagtgggggtaaaaggggtagtggtggtggcgattgtccgctcaatgtgactattaagcgggcgtgggtgtagctaacggaggagtatttgtgggtggggagtgcagatgtcttgggcttggcgtattggcggataaggtagtaagtagctatggcattgctgggcttgtgggcattatatacaggggccaggcggcgcgcggcgaccaaaacgcgggcccgcatggaggagaggacgcacgtcctggtggccaggggataagctggacttcccgggaagaacctgtttccagggagaactgccaaagtgggagacttggttctcccttctggagtcagcctgtcacatgtgaggtgggggatgcgcccagtacctgtcgggccagagggaagcgggagagcttctgcacagtggcgggcgggcgggggtgccggccggtggagcgcctgcccctcgatacagcctggccagcagcagggaagcacagccaaggccagggagcccgacgcgtacaggatgatgtccgtatacctggcctcgggcgctgctgcggtccatgtgggggtcctcctctggcagccccgtgagccaggcagactggtaggagaggccgatggaattgcctgcgaggcaggtgtactcgcctgcgtcctcggctgacacgttccgcaggtacaggacctccacctctgagctattgatgtctgcagtctttaggacttgcacataggggaaaccgtcggctccgaagctgctgccgttgatgacgatgtgcttcagccactggatgtggggctgggcatcgctgtacaccttgcacagcagctccacgtcgctgcccaccacggctgtggtgttggccgggagcccggcctgcaggatgggccggtgcggggaccgctccagcacgtctagcaggtagttataacggatgctgcccacagcgttctctaccaggcaggtgtatgtgccgcggtccgagggcaccacgctctccatcacgagactccagtgctgatggcgcagccngaatgcctccaaatggcggttctccnccatgaaaaggcctgtccatccttaagcccagcggatggtgggcgtggggttgcctgcagctggacagcggaacttgacggtgttccccgcaggtactgcatgcagtttcttctccatgcgctgggggtgtgtccagtagggtgcttgctgggggtaactgtgcctattcgagaggtccctatgggacttggggtcctcatcatcgttgctggaggtcaaggagtcacctgtaatcaaggtgagattctgcaggacgatcatggagcctcgtgccaggcagaggtagcggccagcatcctcaggtaggaagctggcaatctctaggcggcccctccagccccgtacacggccagcaggtgccaggcgactgccctccttgtaccagtggccaccacgctcagcccgcccacagcacagccgcacaggctgcccaagggctactgtcagctcctgctcttgctgctccaggctgggagccaggcagggctcaagctccacttcctcagaggcctccagggacaagactggaggcccaggcacactcagcaggacccccaacagggccagcagcagccgcatctccttctcacagctctcagggacccaagctggacttcccaccaactgccttcctcgagcctgcgtgactccgcgcccagcacagggtcctgctcacctggctcctcctcacctggctcctccgccgcctcactcccagctccagccggccgcgacccctgcacgcggcagggtccgcagacagcccgagcgctcatcccgggaattccggaccc

SEQ ID NO: 444763 - DNA, 2141 bp, Homo Sapiens
  misc_feature (2117)..(2117): n is a, c, g, or t
ccagctctgcctccaaatgcaacgtgtgctccctcacctggtccgaactttcaagttctccttttagcttctctacaatctcttcgagatgcttcactgtgacccgggacttctggagctcctcctctgcggcgcccaccttggccctccacacctgctcctcctcctccacgctcttctgcaggtctctgagcatgccctccgtctccgccaggatgctgcggtactggtcacactcggcctgcagtgtgctctgcgtctcctcggcctccctcaacttggaggccaggtccgaggagggctccgcgggagctggcgggtgcttcagcagcgtggggcctttctctttgagatcctgcagccactcggtgtaattctgttgtgccaagacagagagttctgggagcagagccagcagggcctccatggtctgcgcctcaatcagacagagctgcttctccgattcctccttggcctgggtcagggagtgcagcttctccttgcaggcctgctcgccgtggccagtgcctccatggccttccagttcttctcccggaggtcattgttcttcactttctgctgctcgacggcctccctgagctcgatggcctccttctccagacccgacacctgggactccagctccttgaggcgagtctgctgctggtcagcctccgcctggctggcctggacgtcctgggcatcccgcgcctggcccgcctccagcagggcctcaatggaacggattctctctgtgagctgggagttctccgccctggcctcctggagctgcccgtggaggccactcagctcctcgcatttgctgcgcacctccgcctcggaggactgtaacttgctgtgcagctcggccatctgctgctgttgctcctgggccttctcggcatccgcccggaggctggcgtggctgctctgcgtgtggcacagctcccggctgacctcgtccaggcgcttctgcagggcctcctcactctccctgtgggacgcctgcagctgcaggacctgcttctcgaaggcagctgccttggcttccagagctttccgctgctgctcatcttgccgcacagcctctgacttctccaccagctctttgctgaccttgctgagctcctgccgaagcttggccagctctgcgttctgcttgctctccacctggctcgtggcctggttcaaggcatcccgcaggatggagttctcctgctgcaggcgggccagctgcgtgttggggccattctccagctgctcctgaagagtccggatcttgccctgcagctgctgcacctccttcacgtgctcccggtagctggcctgcatgcgtgcctgcacagccgtgatctcctgctcccgggccaccagctgctttttcactttggcctccccggctgctgctttggccttttctgctgccatctccttgttgagctccctcagtttgctcttggcgacagccgcatcttcctgttctgtggccagcagtttttccttctcttccagctggcgtttcagaatcgccacagggtcacccttctgagtggccttgtgccaggtgtcctgaatgatgccagccttctcagacaggatctcgatgagccgctgggcctcgccctcgttgaacaccatgctcccaaccgtggagaccagcgtcttgtaggggaggtagagagggccgtcggcatctgggggcccaggctcaccttttttctttgaaccagacttcttcttggcaggagcctcttgctttggtgcctctgggctctgggccacatctgtatttctgccctggacagaagctgactctgtctttttaccctgattggcagctgcgtctgcctttttgccttggttgggggacccttctgcctttttgccttcactgggggacccttctgcttttttcccctggtttgtaataccctctacctttgtgccctgattagcaaccgaatctgcctttttgcctggatgggagctccctctccttttttgccttggttgggactcctttctgcctttttgacctgagccccttctgtctttttaccccgattctgggctccctctccctcgtgccgaattcggcacccaggcctcgctacctntaacgccgatggtactgccagtca

SEQ ID NO: 444764 - DNA, 1146 bp, Homo Sapiens
  misc_feature (188)..(188): n is a, c, g, or t
aggggggcccagttgggttttggggcctttttccaagtggtccctgaagagttcggattcttgccctgcaggtgttcccctccttcccgtgtttttcccgtagctggcttgcatgcgtgcctgcacagccgtgatttccctgctcccgggcccaccggctgttttttcactttggcctccccggctgnctgctttggccttttctgctgccatctccttgttgagctcccctcagtttgctcttggcgacagccgcatctttctgttctgtggccagcagtttttccttctctttccagctggcgtttcagaatcgccacagggtcacccttctgagtggccttgtgccaggtgtcctgaatgatgccagccttctcagacaggatctcgatgagccgctgggcctcgccctcgttgaacaccatgctcccaaccgtggagaccagcgtcttgtaggggaggtagagagggccgtcggcatctgggggcccaggctcaccttttttctttgaaccagacttcttcttggcaggagcctcttgctttggtgcctctgggctctgggccacatctgtatttctgccctggacagaagctgactctgtctttttaccctgattggcagctgcgtctgcctttttgccttggttgggggacccttctgcctttttgccttcactgggggacccttctgcttttttcccctggtttgtaataccctctacctttgtgccctgattagcaaccgaatctgcctttttgccctggatgggagctccctctccttttttgccttggttgggactcctttctgcctttttgccctgagccccttctgtctttttaccctgattctgggctccctctcctttttggccctggttctgggctccctcggcctttttgccctggttctgagccccctcggccttcttgccctggttctgggccccctcagccttcttgccctggttctgggccccttctacttttttgccctggttctgagcaccctcggccttcttgccctggttctgggccccctcggccttcttgccctggttctgggccccctcggcatcccgggaattccggaccggtaccagcaaggggagttaggtttttattataaggaataggattata

SEQ ID NO: 444765 - DNA, 1636 bp, Homo Sapiens
tttactaatcaaatctattgcttttattgtttttaagtaagtggtggtatatgtcatctttttaaatgtttcttttgggaagatcttatagaaaatggcaccctgaaactttcagctctatgtcccaaaaattatctttcaacaatctgatgaagtttcttaaagaaactcttaaaaatgaagataatatacctggcctaaatcaaaacaatctgaaaaatggatgtgtcccagtggaaagactcaagtcttttcaagtttatcagaaatgccactatacaccactgtactataagtcgaggaggatggatatccaaaggtatcatttgttgacagttcctgatggtctcaggtatatcctataatcactggttactatgcatcatttcttgtagataaatggtattcatgtgataagctgccatccaacttggatgtctctgagcattccaataatatgaatgagaagcggcagcataatattcttgccatgccctgtagtaagctctccagtactcctcataatcctgataggtatcagaaaaactcagacgtatttccctatgacagtcataccaatcatcttcctgggcttcagtctgcaatctgaaggaagaccgcctgggtaggtttctccggctctgcttagctctctggctagccccctctttaagtcttgtcttcatctggattccaggtgattcttgatatttctctggattgggggtgtcacttccatttggtggttgttccaaagaaatacgatcatccacaggcgtagattcagagtctttcagctgattatcagaagagccttccaagtatgacttatttcctttgctctgggaagaggttcttgagctgtaagaatcactgtcactctcagagtctccagattggctactacttgccaatacagggactctctgttcagtaactttatttctcacaaaaccattttgaggattcacagtctgatccccagggcctgtgtagtgcctgatgatttccacaggtttctctaacccctctttaatataatgttcataatcctctaccaattcagcaaaagtcaacgtgtatggctgatggattttaaaggaagacagacaaggaatctgggggagtgacacaggtaaagcttctttgacctggtgctgactgttggtggagttttcaacgggagtctgaacagaattcttcatttgctcttcggattgcctgtcacagcccagttcttttggtgacgttgctttttctatgattccacattctgagtggcttttcacaggaagcttttgtttggtattattttttgatttgactgatagtccagatacagaattatttctagaggaagccatgtggtcaccatgagctttctgaatttgaagggttctctctattttctgaatttgcttttttaagggttggttaggtacacttgctataccatatgtatgcacagcagctttaacttccacatcccaatccacacattcttccatcagaccagaaggaatgggatctggtaaaaggagaaggttgatattacatttctgggcaattctcatcatcatattttcttcctctccccggcaacagtaggtcactgtcagccccaatgtacctaaaa

SEQ ID NO: 444766 - DNA, 902 bp, Homo Sapiens
  misc_feature (154)..(154): n is a, c, g, or t
tttttccttctggaaaaactttccccataattctggcaaattacaattttccccagaggccattggatttttcatgtcccgtttccaatttaaaagaagtcttccagtttcgtgcatagttaacataccactagatcgccctctggcattcccntgaggagagaaagcactgaaaaggtggtacaatatccgaaacattttcatatcctggaggaggtggttcaaataatgatgtgtgaaaaatctcatttccatcttcattaattattgagatgtagttgggatgagtcttatttgggtaggacaacaggacatcataatgtgctagctcaacagaatccaggccaaattctttccactgggattgaatttgctttgcaagctgaaagttttgttctgttcctgctaaatgtggtatctgtgtaaaattatataagaacttcttgatgttctcagctttcaattcatccaagaatgctttcatattatgctttggagtaatgttagtagcttctttggaggattttataaaccacccgaagaggaagccgaggagaaagaagccacccgccagcaccagcgccccagcgcacagccagcgcgggcggcgcgcggtggccacagccgagtcggtttcgtgaaggagattccacatctcggcgcgagcagagccggcctcccgggacccgcgcctgtgctgctgctatactgcgcgccctccaaccaccacggcggggtaaagtctctctcaatctcactaatgcctcgcttatcagccctgcaggctggaattcgctccagacctggggtccagtttctccaccacagcagtgtttctagagtgcactgaaccaatccgagcgagagagagaggcaacatctgcctccaggagaaggaaatc

SEQ ID NO: 444767 - DNA, 1004 bp, Homo Sapiens
  misc_feature (794)..(794): n is a, c, g, or t
  misc_feature (927)..(927): n is a, c, g, or t
cggggcgcaaagttattctacccagcgtccgggagtgaagagaaatggttcccctttgggccccctggcccaagttgggcccttttttacccctttatttccctggggaaacctttcccccattttgggcaaattccaatttttccccggacgcaaatgatttttcaggttcccggttcccattttaaagaaagtttttcagtttgggcccatagttacccttcccttagatcgcccctttggccattccttgggggagagaacgccctgaaagggtggtacaatatccggaaccattttcatattccgggaggggggggtccaaataatgatgtgtggaaaatctcatttccatcttcattaattatggagatgtagtggggatgagtcttatttgggtaggccaacagggcatcataatgtgctagctcaacagaatccaggccaaattctttccactgggattgaatttgctttgcaagctgaaagttttgttctgttcctgctaaatgtggtatctgtgtaaaattatataagaacttcttgatgttctcagctttcaattcatccaaaaatgctttcatattatgctttggagtaatgttagtagcttcattggaggattttataaaccaccctctgacattaggtgagatatttctgaattttaatttctcttgcctactttcacgaagaggaagccgaggagaaagaagccacccgccagcaccagcgccccagcgcacagccagcgcgggcggcgcgcggtggccacagccgagtcggtttcgtgnaaggagattccacatctcggcgcgagcagagccggcgtcccgggacccgcgcctgtgctgctgctctactgcgcgccctccaaccaccacggcggggtaaagtctctctcaatctcactaatgccgtcgcttnattagccctgcaggctggaattcgctcggagacctggggtccagttactccaccacagcaggtctgtatcgcaagaa

SEQ ID NO: 444768 - DNA, 1636 bp, Homo Sapiens
  misc_feature (41)..(41): n is a, c, g, or t
  misc_feature (112)..(120): n is a, c, g, or t
tggagggggagttgggtgtgatgacacgaggactcttggcnggcgtggtttttaggggggggtttttgtctgtaaagaaactgccccccttcctttgtggggagcaacaaannnnnnnnncacaacctcttccactcgtggggctcttccacaagggaatttggggttggaaggctcccccggaggggggtccctccccggttaaccccccgtttcggccaggaggggctgacccacctcttctttttttgaaggaaattgcccctttggcgcaagccttggaggtttgtttcttggcccgggggcgattgggccagggttcattcaacccggtgtcccctgttggagggagaatggggcccaatgtccatttctcctttgcgggaactttctggagcgaaaaggttggcgcttcccaggcccagggggtgggtgcttcccccccacccagggtgcatgctgcttgaagaaagctggcacacccttggccccatttctccagggagggggcgggaggaacggccggagcccagtcagccatggaggcgcgggcagagtcactgtccagggtgcccaccctcatgcggagcctcctgctctcccactcgggtggcgtagccccagttgacccaccagtgactggccacatcctccagggtggcccggcgggtggggttcaccatcaacagccaccggatcaggccacaggcatcaggggtttaggtggctcccggtaggccccgttgctgatctgtttcactaggatcttatggtcatgcccatcaaagggcatggtgccatgcaccaggatgtagaggagaacacccagggaccagctgtccacctctgggcctgtgtagggcttcccattgacaatctctggcgaggcatagagggggctcccacagaatgtctgcaggaacttgccttgatggtagaggttggagaggccgaagtcagcaatcttgatattcccattggcatccaagaggatgttctccagcttgagatctcggtggacaactctgttctgatggcaatagtgcacggcagagacgatctgccggaagaaatgcctagcttcgcgctcactgagctgctgccgctcgctgatgtagtcataaaggtcgccccggctggcatactccatgacgatcacgatcttgctgctgttctcaaacacttcatggatggcagatgatgtgagggtggttgagtgatgacatgatctcaatctccctccgtatgtgcatcagatcttgctcatctttgattttgtccttccggattgacttgatggccaccaggcgccccgagctctcccgcgccttcttcaccttcccgtaggtgcctttgcccagggtctccaggaactcgtagcggtgccgcaggttgtgcttgtggtggtgccgcttcaccgcctgcttcttcattaggggcttgggcgacttgatcagcccttccgccagcggccgggctagctctgcggccgagggagtggggccggagcgccgcgcgaaaaccagcgactccatggcgagcaggaggtgagcaagggcggcaggggaatcaataggctgtgcggggagggctgaagcgcggggcacaggtcccgcaccaggacggggagccacag

SEQ ID NO: 444769 - DNA, 1077 bp, Homo Sapiens
  misc_feature (832)..(832): n is a, c, g, or t
gcggaatccatgtggtgtatgatctttcccgaaaacctggagacagagtagtcaaattagatgttctttgcaccaagtgtcgagtgcccagttatgaccctctcaaaatggacgaggtatataaggtgatcctcccaaacttcctggccaatggtggagatgggttccagatgataaaagatgaattattaagatatgactctggtgaccaagatatcaacgtggtttctacatatatctccaaaatgaaagtaatttatccagcagttgaaggtcggatcaagttttccacaggaagtcactgccatggaagcttttctttaatatttctttcactttgggcagtgatctttgttttataccaatagccaaaaattctccttgcctttaatgtgtgaaactgcattttttcaagtgagattcaaatctgccttttaggacctggctttgtgacagcaaaaaccatctttacaggctcctagaagctgaaggttagagcattataaaatgaagagacagacatgattactcagggtcagcaacctagtgagttagaaaaaaaattaacatagggccctataaggagaaagccaactatgttaagtttacgtgtccaaattttaatgaaattttactaacaattttaaaccatatttttcttcttcatatccatttctaatccatcaaacagcttatgtttacataaaattttatcattcacaaggaagttttaagcacactgtctcatttgatatccacaacttatttttggtaggaaagagagatgtttttcccacctgtcagatggaaaaactggagcctcaaaaagggntgacttggaccatacagctaaatgctgacagattccaagaccctagacctaaggtcttttggacctccagtccagcattcctcaacttatatccaaggtacttgttccagaataacttaaaaatctccctctcctcctaaattatccaataagcccccaagcttcatgggatggacaaatcccccggcctttatttccctgggcccccattttttttccactttaataccctccgcggtatatac

SEQ ID NO: 444770 - DNA, 927 bp, Homo Sapiens
ggaagtcactgccatggaagctttcctttaatatttcttacacttgtggcgcagctcgatctttgttttataccacatagccaaaacatatctccttgccttctaatgtgtgaaactgcgattttctctaacgtgagattcaagatctgcctttgtaggacctgcgctttgtgacacgcagaaaaccgatcattctactacgagctacctaggaacgcctcgaaggttgagacgcagttcataaacatcgatcgcatgcaccagaccatgattcactcagcggtcgagcgaaccgtagctgagttagtaaaacacaaattcaccatatggccctatcaatggagcacagccaactatgttacttttacctgttgtccaaattttagatgcacattttactaacaattttaaaccatatttcttccttcttcatactccactttctaactccatcataacctagcttattgtttaccatataatactttgtatacaattcagcgaaggaaagttttcaaagcatcactgtctcatttgatatccacaacttatttttggtaggaaagagagatgtttttcccacctgtcagatgaaaaaactgaagctcaaaaagggttgacttgaccatacagctaatgctgacagatccaagacctagacctaggtcttttgaactcaagtccagcattctcaactatatcaagttactgttcagaatacttaatatctcctctcttcataattatcaatagccccaagctcatgggatgacaaatctctgctttatttcttgtctctattttttcactttatagctcctgttataatagcaagtttaatgggtataaacacagggataccatcctctcttggcaacacccatgtggcctttggtggggtcgggtggccaggtgtaggtgggatat

SEQ ID NO: 444771 - DNA, 1061 bp, Homo Sapiens
  misc_feature (54)..(54): n is a, c, g, or t
  misc_feature (115)..(115): n is a, c, g, or t
  misc_feature (131)..(131): n is a, c, g, or t
  misc_feature (144)..(145): n is a, c, g, or t
ttgtgggtccgtatgctgctgcagatttgggcgagacggttggaggaccttctnaatgtttcccaaggcctctgggatccagctgggcaatactgtgcctctgcaagtcactggnccataatcgcaggctntttcgccgcccanntggcacagtgaggaagatctctttgctgtcagcaagagggcctgccattccctgagatgttgtaaattccgctctcctgctgctggagtacgcaggccaggggtcttgaagacccttgagtcaaaacttgggtgtcaggcctggagttggtttgaccatggacacctcccaatcggcccacggctggggtaacagtgttagcacggcttgaccttttcccttttccttttcccttgtatggactgagttctcttcttggatggaggacaccttttgactcttgcagtttgaagattcttacgttcattttcttcttcttcttcctcttccactatcatttcatctacctgtattacctttcgtgttttggcagatttcaggggtgtctgaatagcttctgctgttagtttgtttatttcggtgatatccaggtcagctgttgccgcctcttccagggcctgtttgtttcctccaagggcgaagtagtcaagccagttcatctcgcgcagagccttggggagccgcaggatctcgatgttgtagaggttatccacctccttgaggaggttctgcctgtctgactcaatttgcttgattcgtatttccacttcacggtcgaagtctttcagaaaggaggcgagcttccgcctccgtaaggagttggtcttggccacccgactactgcccttcctaggagccatggcgctcggcggaggctgcggggagcggcggagatggggcagggaagcaagaaactgggtagggacgaggagggcggacggggaccacccgaagaagtcgccaggcacgtacctgcggtcccgagacaagggctgagcaaaacctcgctgtaccagtgagagagagcggctctacagtcaaccgccacccacctcgtccgaattcgccacccagc

SEQ ID NO: 444772 - DNA, 1269 bp, Homo Sapiens
ctgggaggcgcggcggacgaagagagtgtgggtctattctctctctgtctgttattttgatgtctccgtctacgtagcttgttttgtttgtgttacttgtgttctcactacgtttcctctttagttgtgtagctcttcgtatcatcgttgctgctctccttttgtttcgtgttctccctagtgtaactgttccccgcttcttgtcctatacccacatccattgtcctatgtgcaattttttcaggggcgccgtgatcgtcccctatctacggtcacttcccgtccacctggtgtctcccattgtgggtccgtatgcgtctcaaattgggcgacccgttggatgagctttcttaatgtgttccctaggcctctgggattccactgggccaacggtgccctctgcaagtcactgcccaataattcgcaggctcttctccgccggcccactgggcacagttgaggaagatctctttgcctttcagcaagagggcttccattccctgagatgttgtaaatccgctttcctgctgcttggagtacgcaggccaggggctcttgaagccccttgagtcaaccctgggtgtcaggcctggagttggtttgaccatggacacctccaatcggcccacggctggggtaacagtgttagcacggcttgaccttttcccttttccttttccttgtatggactgagttctcttcttggatggaggacaccttttgactcttgcagtttgaagattcttacgttcattttcttcttcttcttcctcttccactatcatttcatctacctgtattacctttcgtgttttggcagatttcaggggtgtctgaatagcttctgctgttagtttgtttatttcggtgatatccaggtcagctgttgccgcctcttccagggcctgtttgtttcctccaagggcgaagtagtcaagccagttcatctcgcgcagagccttggggagccgcaggatctcgatgttgtagaggttatccacctccttgaggaggttctgcctgtctgactcaatttgcttgattcgtatttccacttcacggtcgaagtctttcagaaaggaggcgagcttccgcctccgtaaggagttggtcttggccacccgactactgcccttcctaggagccatggcgctcggcggaggctgcggtcccgagacaagggctgagcaaaacctcgctgtgccagtgagagagagcggctctacagtcaaccgccacccaattcaaactccacatgcagggaattcc

SEQ ID NO: 444773 - DNA, 472 bp, Homo Sapiens
cttaaatttagaacgatgcttttttaggaatgtatgacttaaaaacctgcaacttgaggccagagtaaggttaaaatggcctatagagtttggtgtcatccaattgccaagctatcttcacagagattttccccttctagggtcttcaagacccctggcctgcgtactccagcagcaggagagcggatttacaacatctcagggaatggcagccctcttgctgacaggaaagagatcttcctcactgtgccagtgggcggcggagaggtgaagtatttccaagggaagccaggccacagtgtgctgcttagtcaagcatttcttttccctgggccctcagccacgcttcaccctcagagtcctttcagtgcgtgggtcctgatctccacacttctgcgggactcagaacccagttttctctcccaggttagaggcccagactgcaaagatcgttgctcagctctgggttctg

SEQ ID NO: 444774 - DNA, 1115 bp, Homo Sapiens; identical to SEQ ID NO: 322261

SEQ ID NO: 444775 - DNA, 1146 bp, Homo Sapiens; identical to SEQ ID NO: 322262

SEQ ID NO: 444776 - DNA, 1410 bp, Homo Sapiens
  misc_feature (50)..(86): n is a, c, g, or t
  misc_feature (1314)..(1314): n is a, c, g, or t
ggatgtataatcactataggcggaacctggagcttcacgcggggcggcgnnnnnnnnnnnnnnnnnnnnnnnnnnnnnnnnnnnnnatcaggccaaatcggccgagctcgaattcgtcgagagcggggttatcatggcggctcccttggtcctggtgctggtggtggctgtgacagtgcgggcggccttgttccgctccagtctggccgagttcatttccgagcgggtggaggtggtgtccccactgagctcttggaagagagtggttgaaggcctttcactgttggacttgggagtatctccgtattctggagcagtatttcatgaaactccattaataatatacctctttcatttcctaattgactatgctgaattggtgtttatgataactgatgcactcactgctattgccctgtattttgcaatccaggacttcaataaagttgtgtttaaaaagcagaaactcctcctagaactggaccagtatgccccagatgtggccgaactcatccggacccctatggaaatgcgttacatccctttgaaagtggccctgttctatctcttaaatccttacacgattttgtcttgtgttgccaagtctacctgtgccatcaacaacaccctcattgctttcttcattttgactacgataaaaggcagtgctttcctcagtgctatttttcttgccttagcgacataccagtctctgtacccactcaccttgtttgtcccaggactcctctatctcctccagcggcagtacatacctgtgaaaatgaagagcaaagccttctggatcttttcttgggagtatgccatgatgtatgtgggaagcctagtggtaatcatttgcctctccttcttccttctcagctcttgggatttcatccccgcagtctatggctttatactttctgttccagatctcactccaaacattggtcttttctggtacttctttgcagagatgtttgagcacttcagcctcttctttgtatgtgtgtttcagatcaacgtcttcttctacaccatccccttagccataaagctaaaggagcaccccatcttcttcatgtttatccagatcgctgtcatcgccatctttaagtcctacccgacagtgggggacgtggcgctctacatggccttcttccccgtgtggaaccatctctacagattcctgagaaacatctttgtccctcactgcatcatcatcgtctggtccctgctctttcctgtcctgtggcacctctggatttatgcaggaagtgcaactctattttcttttatgcatcacactgacttcancggtgggcagatctgctcatctctgattacttctatgccttcccggcggcggggatactacctcaccatgggctctactttgacgcccaggaatgg

SEQ ID NO: 444777 - DNA, 1950 bp, Homo Sapiens
tacaatattgaaaactaataagatgatcgtttattggaagaacagcaacacaaaccaaaataaacctataagaaaacaatggacataatgaaacagaaaacaaagctcagtggggaggacacatatttactcaaacatcctggcaattcatatctagggcactccctctgtgtgtcagacgcccttgcatgtgtcaaatgtcatctgataacattgatgaaaaatatcattcacttcttcttggtgcaggaaggcatagaccggattatgcaatcactgagaagtagcttctggatgtgttttctggtggcgtcttaacaatttcagccgactgaaggctcttgggacacttggaacatttgtagggtttctctccggagtggatgcgctggtgctccttcaggctccccctgtaggtgaaaactttcttgcagtctttacattcgaagggcttctcccctgtgtggcttctcttgtgacacttcaagtaggacttctgggtgaactgcttctggcagacgtcacacgtgtagggcctctcgccagtgtgggttcgctggtgaaattggaggctaataagctgcatgaagcgcttcccacagagattacattgaaagagtctctcgcctgtgtgtgatctcttgtggatgactagcttggaattacacgtaagcctcttctcgcacacgtcacatgcaaagggcggcagtgccttggcttcttggccatccgggtgactgactgggctcgcagggcctggggacatgacttgaattcatcccagcttgtcccggggattctctgtttggcccacaggtgtggcttctccttgaggctcttcttgggaaatggaggaggcatctggtttgcttcttttgggactgctcagattcagagcgtctcctctgttcccgctgtgagtcgaagcttctctctccacaacgcaggcagaaggtgtgtcagcatccacattttccacagaggctattttttggggggtccttcccctcctttgctctcaccagatctgttgggactctttggaagcttgaggctctggggatgtcagtcctgggttctcttccctgttttccttcagatccttctccaaggtctgcttgggtctcagagactttgggtcacctgttacgtcaatactcttgtgtagcagaaagtcctctccctgcctcctggacaatgcagggaccctgggcaggatctgcagctctcggtgggcctggccttcccctggacgcatctggttcaccgaggaggcccgttggctggacacgtctttcagatcatctctgacactggagggggcttcagccatctcgatatctgagtcctgcacaatatattcctttccgtggaaggtgaccacagaccatttcttgggtcttctgttatttcgtagcaggtcctccaggtctttgcagctctgcacaccgttcatcatgactaagacctggagctcctggggcatggagatcatgaactgctccatcaccagcatgtccaggatctgctctttggtgtggaggtcgggcctcagccacagatggcacagctcagtgagtttcctcagagcctggatggggtccgactccttcgggcagctgaacatcctgaagttcacgtgagaaatctcagggtccacgtcgtgatttccaagttgagtttctgaggatgccatagaccgtggcagctccaacccaggtctgttgcaggattctcctagactccatgaggatgtgcaatttgcagccatatctagtggagaattttttaatcagtctctgagaaagctcttccagtagctggtatctaattgatacctatctacacaggcttcctctggttttcctcagtaatagattcactgttcattcagaagtctccttcccggcttctgcctccgaccttctcgatcccgggaattccggaccg

SEQ ID NO: 444778 - DNA, 1282 bp, Homo Sapiens; identical to SEQ ID NO: 322946
  misc_feature (299)..(495): n is a, c, g, or t

SEQ ID NO: 444779 - DNA, 521 bp, Homo Sapiens
  misc_feature (289)..(289): n is a, c, g, or t
aaggttcaaaagcatttattcaaatatcaacgagagggactggagtaggaaagatgtcatacttagtacaggtgtttttaacttgaatcaaaaccagcaggtaatagcacccttgggtatctgaggcctggttatgagttacttaatcccctgctgtctgctcaacaagcctgatacctgggaaagtagtcctctttgatgagaattagcatcttccagaactgaacctggtattgcttcatgaggggcattcccacacacctccaggggaggtcaaagagggagggtnggctgtcacatctggacaaggggctcccatgtttaagatctgtgccaaccagcgccatccatgatttaagccatgagggtgaatctcctgtcggtttccatatggccaccggagctggatgatagcagcgtagagacggatcatccctgacatgcgttttagaaagttgtcttgctgctccactttggaatcctttacttggtaaccaagcatcctctgatagtcttccaaa

SEQ ID NO: 444780 - DNA, 2075 bp, Homo Sapiens
  misc_feature (294)..(368): n is a, c, g, or t
  misc_feature (1990)..(2026): n is a, c, g, or t
taagttaattgttactttattgtagaggaaaaatatcctgaaatatttattaaataacaataattcctgacaaaatcattcttcgggatgtgttagccaaacaatctggtcaaatggagtaagctgtccctcaccccagtaataagctccattcatattgccataaaccacaggaaaatccaaaagattttctaaatggcttccaaatttctgcacagatgcccttattgagcccagaggtaaatataaacaaattgaaattagagagaaattagaaggatagctgagaggaannnnnnnnnnnnnnnnnnnnnnnnnnnnnnnnnnnnnnnnnnnnnnnnnnnnnnnnnnnnnnnnnnnnnnnnnnnagctacttaatttctgagtaacttaatttctgagttacagttgcttttgggtgaccatgttctctttctgacttgcctaaaaaatatgttcagttatttcttttcaaacctgaaatacaaaatcagctctttctcagggtgatgcccccctttctactatctacaaaaacttccaaagctttctagaaagcttaaattaaggggctacagtacactgatatggttttgttgttcttggaaggtgttggactcaaacgctcatcgaaggtctgtgatggtcactgctctgtccacaacagtcacgtggctgcagctacagaacagaggtggatccttgctgtgtggatgaaatcctttctggcgacaggaagaaatctcctctagtccatggtcagttagtttaaagaatccagtttcctggaacttgggggagcaaacaatggctactgactctggcaacatcatctggtaagagcagtgagtgtgtaggtcgacactggagagaaacgcggtctgtgtggggtgagtatgaatccagcccagtgtgatgaggccctgctgatcctgtatgaggaaaagttcttcttcgttctctgtgttgcagtaatcagaaccagcactttgcttggggatgagaacatgggtaatggtaaattcattcctcatcagttttccacagagaattccacatgtctccactccccgggcagtgttggcactggctaactggagaaactgtgggcacagccgcccaggcaccaccacatggcgcaatccatcgattgtgggaatactttctgagttgctcagtgctccaggtttcaaggacctgtccaccacaggtggcttagctggccttacagttgtgtgacagtctgaaggctgtatggatgagactgttaaggtggggaacacatctaaggagggcttctccaagtcaggcactagcgggccacctaggccagggtctaccttcccaaactcctgtacaattttcagtcgctctttttctagctcctggttccggatcatctcctcgaaggcatggaactgttcctgttccaattgctgctgcttctgttgtgctaccctctgtttttccttttccagctcttgctggatggccatgttccgggccaattcctctgcttccttcttcttttcttcattatattctgtatattctttggtatatcgttttaacagctctgccttcagctcttctgctttgggaaatgcaatctcctttaatttctttactgtgtctttcttttcaggaatgacagcagatttgtaatctcgatgttttggtagtttctcaataaagagcgtgatatacttgttatagaggatgaaggcatgttcaatgttgccttcctcagagtaaatggatgccattcggataatctcaactccagagcggaagtaccgacggggtggaatgtcttcattcacctctaccgcactacccagctgggagagagccctcacccggtcttcgggcgggaggctcacatctccatggtcagacatcaggaccaagttctttccccgcggatgacacccggaggttccggaaacccgctctcgacgaattcgagctcggccgatttggcctgatnnnnnnnnnnnnnnnnnnnnnnnnnnnnnnnnnnnnncgccgccaccgcggtgagctccagtcgccctatatgagtcgtatcatcc

SEQ ID NO: 444781 - DNA, 475 bp, Homo Sapiens
  misc_feature (440)..(440): n is a, c, g, or t
gctgcatcccctttttggaattgctcaaccaggtggtaaccggcgccgcttcctggccttgggaggtggttcctttcttaacccacaagaacctctcccaagagaacttggtcctgatgtctgaccatggagatgtgagcctcccgcccgaagaccgggtgagggctctctcccagctgggtagtgcggtagaggtgaatgaagacattccaccccgtcggtacttccgctctggagttgagattatccgaatggcatccatttactctgaggaaggcaacattgaacatgccttcatcctctataacaagtatatcacgctctttattgagaaactaccaaaacatcgagattacaaatctgctgttcattcctggaaaagaaagacacagtaaaggaaatttaaagggagatttgcattttcccaaagcaggaagagnttgaaggcagagctgtttaaaacggttttaccaaa

SEQ ID NO: 444782 - DNA, 438 bp, Homo Sapiens
  misc_feature (408)..(408): n is a, c, g, or t
  misc_feature (419)..(419): n is a, c, g, or t
taagttaattgttactttattgtagaggaaaaatatcctgaaatatttattaaataacaataattcctgacaaaatcattcttcgggatgtgttagccaaacaatctggtcaaatggagtaagctgtccctcaccccagtaataagctccattcatattgccataaaccacaggaaaatccaaaagattttctaaatgggcttccaaatttctgcacagatgcccttattgagcccagagggtaaatataaacaaattgaaattaggagaggaaattaggaagggatagctgaggagggaaaaaaatgtttaacaattgggtggaatccaggagggaaggggtattatgggggggttccatttattcccattcctttccttaatttctggaggctcctttaattttcnggaggtaaacntcaatttcccgaggttaac

SEQ ID NO: 444783 - DNA, 1659 bp, Homo Sapiens
acccagaggccctgactctctaccgagaaaccaaggaatgctttcgaaccttcctcagcagcccccgccacaaagagtggctctttgccagccgggcctctatccatgagctgctcgccagtcatggggacacagaacacatggtgtactttgcagtgatcatgcaggactatgagcgggtggtggcttaccactgtcagcacgaggcctacgaggaggccctggccgtgctcgcccgccaccgtgacccccagctcttctacaagttctcacccatcctcatccgtcacatcccccgccagcttgtagatgcctggattgagatgggcagccggctggatgctcgtcagctcattcctgccctggtgaactacagccagggtggtgaggtccagcaggtgagccaggccatccgctacatggagttctgcgtgaacgtgctgggggagactgagcaggccatccacaactacctgctgtcactgtatgcccgtggccggccggactcactactggcctatctggagcaggctggggccagcccccaccgggtgcattacgacctcaagtatgcgctgcggctctgcgccgagcatggccaccaccgcgcttgtgtccatgtctacaaggtcctagagctgtatgaggaggccgtggacctggccctgcaggtggatgtggacctggccaagcagtgtgcagacctgcctgaggaggatgaggaattgcgcaagaagctgtggctgaagatcgcacggcacgtggtgcaggaagaggaagatgtacagacagccatggcttgcctggctagctgccccttgctcaagattgaggatgtgctgcccttctttcctgatttcgtcaccatcgaccacttcaaggaggcgatctgcagctcacttaaggcctacaaccaccacatccaggagctgcagcgggagatggaagaggctacagccagtgcccagcgcatccggcgagacctgcaggagctgcggggccgctacggcactgtggagccccaggacaaatgtgccacctgcgacttccccctgctcaaccgccctttttacctcttcctctgtggccatatgttccatgctgacttgcctgctgcaggctgtgcgacctggcctgccagcctacaagcaggcccggctggaggagctgcagaggaagctgggggcttgctccacccccagccaagggctctgcccgggccaaggaggccgagggtggggctgccacggcagggcccagccgggaacagctcaaggctgacctggatgagttggtggccgctgagtgtgtgtactgtggggagctgatgatccgctctatcgaccggccgttcatcgacccccagcgctacgaggaggagcagctcagttggctgtaggagggtgtcacctttgatggggggtgggcaatggggagcagtggcttgaacccacttgagaaggctgcctcctaggctctgctcagtcatcttgcaattgccacactgtgaccacgttgacgggagtagagtaccgctgttgggcaagaggtgtcaagtgtgagtgtattctgccagcttttcatgctgttcttcagagctgcagttatgcccagaccatccagccctggcctccccagtagaaggcccctttccacctt

SEQ ID NO: 444784 - DNA, 838 bp, Homo Sapiens
  misc_feature (139)..(139): n is a, c, g, or t
cccttttggaaatttaaaccagggaggtaattttgaggaagctggcgatttttaacacagtggtgggcatccctgggaaggtttttattccatcaagtcaatttttaatatcctcacaatcgtggaaaaaggagtttcncgagcaggaccgagcaatatcgatggggaagccgatacttgggccatctcttggagattcctgctgtaaggacggcaagtgttttctccagagaaagcacttgcctgggtatgactcagggccgggcaggaattcacactatgaatccgggtggtggagaggcggagaagtatgcccagtgagaccacgttcccataattctctaacatcacttctctgtagaggtccctctgaacagggtccaggtatccccattcctctcgagtaaggtgcacagccacatcctcgaatgtcacaaactcctggtacctggctgtcaagagcgcagctgcctggtctcctgggcttccctcacggggaagagcaggcacctgaggaacaggtggagccccagtgagtccctgttccatgtcggtgtcctgcacaaactgaggctctggggacagacactcagactgggtctccaaagactgaaactggacccttggtgaccctgctgcttcctgggctggtatttcctccatcactgctctggaggacaatgaccatcacgaggggaggggcgggcctggccgctgtcctgtcacctacacactcgcgctcggggccaccacagcctctcccgggccgctgtagacagccccgaggccggcgcttctcggtggcacttccggccgacgcgtgggtcgacgaatatcc

SEQ ID NO: 444785 - DNA, 1159 bp, Homo Sapiens
ggtccggaattcctccgatgactccgtcgccggaagtgtctccgagaagcgccggcctcggggctgtctacagcggcccgggagaggctgtggtggccccgagcgcgagtgtgtaggtgacaggacagcggccaggcccgcccctcccctcgtgatggtcattgtcctccagagcagtgatggaggaaataccagcccaggaagcagcagggtcaccaagggtccagtttcagtctttggagacccagtctgagtgtctgtccccagagcctcagtttgtgcaggacaccgacatggaacagggactcactgggggcatacttctccgccttcccaccacccggattcatagtgtgaattcctgcccggccctgagtcatacccaggcaagtgctttctctggagaaacacttgccgtccttacagcaggaatctccaagagatggcccaagtatcggcttcccatcgatattgctcgtccctgctcggaaactccttttccacgattgtgagatattaaaattgactgatggaatagaagctccccaggatgccaccactgtgtaaaatcgcagctcctcaaattacctctgtttaatttcaaatgttagggtccaaggaagccctctgttgcaaccagatatgttttgaacccagttcattcagaaaccatggttggtggtcatcatctacttgtattgtgaaaaaccagaaattccaaattcagctcttcagttatggtcttttcatattattttagaatgtgaaacttatgctgtgtgcccctccttttatgtggcgaacacaacctgccccgtatggtgcctaactctcctgtgaaccctgggcttccctcatgtttaacattctggtttcctccttccttgaagtccctgtggccctcttcaaggtcctaccttcctaccctttattctttgtggttctgtacagattgatgcaattatattgcctttcctgattaagtgttccttactctgtccttgatggaggggagaagggagggcaaagaagttaaatttatttcagggcatcaaattgaatatctacttaataactttgtaaactgtaaagtgacatacatataattgtaaagtactgttaattttatctaataattacagagtttccaacagttaaa

SEQ ID NO: 444786 - DNA, 1774 bp, Homo Sapiens
  misc_feature (14)..(14): n is a, c, g, or t
ccacccttacccancgccccagtgtgggggccccagcccatgggtggactgaggctcagactacgggggcacctggttcatgacggagacatcaagctgcgtgagtccagtaacagtcgtgcacagagacgaaggtcaggcccttcctgtggcagagcggaggactcctgaagggaggggagctcacagggccacccagtgaccagcatcctggccctgcgctcagccccctccacttgaggtccagggaagcccaccctcctgcaggcctcgccccacccctcgccccgcccctccccaaacatcctgggttaggtatcagtacagggggaggaaatgttcccagaagcctcctcgccccacccctgccgccccccacgctgctgtgggagcctcagctccgagggcggctacgaggtcccctcctgccagggccaccaccccgcatcctgagcattcccagctcccgtggccggtagattctgctggaacgacctccacgtgctccagatctaaccacacatcgcggtgccaagaaatgcccagcaggaaggggcagcgcccatgctcgggctctcccttgtcgggccaacaggagggggagctgcccaggaccacctacattcgggggcacacagcttcagggcctctacacaggccccacagacacagcagatccactctgcccagtccctgcccccagctagacccagcctggccagctgtgccctgctagccagaagacgcccccgggaggcgagcggcacccacgccgtccggagacgcccacctgtagcagtgcagggcggtgagcatcatgtgggaggagtccagcgagtggatgaagttgggcgggaagccgttcttctgcttacgtgtgttgggttttcggctgatgtctcccgttgtgggtgtaggtgatgctctgaattcccacctccctatttggcttgaccttggagtccaggcgatacggctggatgacggggacgcccaggggtgtgacccactccacccacagagcccatgtgggagatgaggcgggcactctcggtcagccagtgctggatggcccgggtccccgagaacatctcctgtagactcttgaagacctggcgtacgagatagtgagaggcctcccacacgaactcctggggaaagtcgctcagctcccggaggcgcttctcaatctgcaggcgcccgccatagcgcgtgaccccgtacaccaccgtcatcaccgtctgcttcaccaccttgcgggtgatgaaaccttccagcacctgtgccacccgcatgccccgctgggcgtcctgcctacggaacacctccacctgcgcggccacgccgctgtacacgtcctgcggcacatccgagggctccaggttgacggaggcggcgcccacgctgtcgcggcccagagcagcataatgctgcaggccgttgcaagagccgtcctgatggacggggaggtgggagacataggcggcagggtcggaggcgcgcacagcgttcgccacctccatacagcaggccagcgtctgccagggttcctccgcgcccatccaccactttcggcccgtcaagggttggtccgcggagtccaggatgtcatccatcacctcctccgcaaaggccaggcgcttccgcagcggctcccgcttcttcaaccccgtgagattgaccaggtggatcttgagccaatccaggccgtgcgggccgagcgggcggccctgggcgaactccagcagggcccgcgccacgtcgctgcccaggt

SEQ ID NO: 444787 - DNA, 1579 bp, Homo Sapiens
  misc_feature (152)..(152): n is a, c, g, or t
  misc_feature (154)..(154): n is a, c, g, or t
  misc_feature (196)..(196): n is a, c, g, or t
  misc_feature (203)..(204): n is a, c, g, or t
  misc_feature (208)..(209): n is a, c, g, or t
  misc_feature (211)..(211): n is a, c, g, or t
agccctttagtttcttggcccccgggttttcttttggggaaaccagctttgggcccccgtttccctttccttacggggggccccggcccccaaaacgaaatgtttttagaaaagtttttttagggggccgaagcgcgcccgacaattttttntnttatctcttctcccttgtgtggttttccattttggcacagtnatggtanngtgnngngggggggctcaaaccattttaatccattttctgcccctgttactccccacccccagatccaagccgccagccccagttccggtggggggctcagtcctccggagtccaggagtcagggctcgggggcgttcagcggccagtgggcaagattggggcttttcctgtcctcgaagctgccacaaaggtggcccccagcccagaacacagggagagggcagagagatgtgctcatcagtctgggcaggcgggccgggagcagtcttccagaaacaggtgggagccagggctcattttcatagcccaagggtccccaggagctcccccaggagcttcggccaatgggctggtccatggtgggtgaggggccagaggctctggccattgctacaggcagtaaaactcctgactctcagtgatggtcccaaaaagcacacccagaagaatgggctcaaagatcaagatggggccccagcctcccgcagagtcctgaaggaaggagtggctcaagtcaggccctgggtccaaaggccatcagggaaggaccaggctcctgtccttgagtgtgatgcatccatcctggaagtagggccagctcagtgctcgctgagccatggggagaggaggcccagagccaggcccagaggcaggaaaaggatgggcctcagcaaggccctgggctggggcagagctgaaggccaggtggctgccacagaggttgctgtcgggctgggactcctgggtttggggcaccacacgaggctggagttctgtcaccttgctttggatccaggaggcatagctggaggccagagtgtacacaccaggcctgttgcgggccccacaggcatctccccagctcacaatgcccgtcaggtaccagagaccctccacagggcaggagagtgggcccccagagtcaccctggcaggcgtccttgcccccctccacatagccagcacacaccatgtcctcttggacaaagtgcggctcctcaggcttggcgtcgatgttgtacaggcagttacacgtctcacgactgatcagaggcacctcgagttgctgcagtggcttgggcgtcaggaggctcactgagggggccacatgaccccagccagtgacagtgcagtggaggccgttggggaaggaggcgttggctgcagggaggcagatgggccggatgtagcgggagaaggtgatgggtctgctgagttggaggagtgcaatgtcgccctgggagccctcctggaggtagctggggtgggggatgatgtccttcagggtgctgaccttggcgtcctcggagtaggagtctagctggtgggcccccagcttgacctcataggcttccttgtggtgctcgctggggaa

SEQ ID NO: 444788 - DNA, 1480 bp, Homo Sapiens
  misc_feature (62)..(73): n is a, c, g, or t
  misc_feature (115)..(127): n is a, c, g, or t
  misc_feature (1393)..(1429): n is a, c, g, or t
agtgggccctttgtgggggggaaacaccacaaaaagccccccaccaggaaaaaagggggggnnnnnnnnnnnngggtttagagggggccctttttttgtttgccaaaaccaaaannnnnnnnnnnnnccctttaccccaggggggcccccccgggttatggggcaagaaaccctgccaggctattccccacaagcccaccatggggggcccccactgaggcatctttatttctctgggtcacacagagcttggcctgggagcctcttctgcatgggggctgcagctgccaagggagcggctgagaccagaacaagcgctcgggtgggccccagtgcaggttgggatgtgcccggtggagtaaggtgtgagaacccccagcctcactctctgcctggtcctgaagcagacagcagcaggctggcccagcctcccctttatgagactatcctagggtttgacagcaagtcccagatgaagggtgacaggcagctggggtccacctggtctctcctcagcagggggaaccccctgcgggcagctgggaaggcagtggccaaaggtcaagaagatgaactctgcccagacttctgctgcctgtggctatggtgggacagggctgcctttctggtcacactgggcagcaggcgactgccagggacctcctagccccagggctgcattccctgcccggcagcccctctgctgcagcttccggatgagttccagcaggttcatctgcagcatcagctcctgtgggttggtggtcacgtagaagccagccacccccgccttctccagtgtgctctgctggtcagccaccttccggtccagctccaggacgatcttctggtccatcgcccgctgctcctcacggatccggtgttccaccgcctctagttctcgctgctgagccgcctgaagcacaggcaggttgtggggccggcaggcctgctgggcttcctggtgcttctgccgcagcgcctgcctgagcactcgatgctcgttctgtaggcgcaggcgctggttgtacaggctcttttcggtgaggtgctggatctccagtagcccctgcacgatttcgaacacggtgccgtcgagaagcgccagggccaggtcgctgagcgtggtgtaggacaggcgctgctggaatgagctgggcaactccttcaccaggctctgtagcgccgacagcagctggtagtgtcgctcctgctgccgggcaccgtccgccacctcctccaaggcggccgcgtagcgctccatggcgcggacgcccgctagccgccggctgcggcgacgagctcccccagcttcacgtcatcccgaccgcggcgcgtcccgccccttttatccgctctcgacgaattcgagctcggccgatttggcctgatnnnnnnnnnnnnnnnnnnnnnnnnnnnnnnnnnnnnncgccgccaccgcggagaccccggagtcgccctatagtgagtctatacatcc

SEQ ID NO: 444789 - DNA, 1356 bp, Homo Sapiens
  misc_feature (170)..(170): n is a, c, g, or t
  misc_feature (209)..(209): n is a, c, g, or t
  misc_feature (1264)..(1300): n is a, c, g, or t
ggcctattagggccccggttccccttccccttggaggaggtttccccggttttggttaaggaaaggccataaggggggaccccgattcccccaaaagattccggggaattaggggaagggcagtgctttggatttggggagccaattgttcccacccaccccccaagttncaaagtccaggctggctaggagaaaagtgagtaggaagnttaagcatcctcttttctcaccttcccccgtgacagctgacttctctcactctgtcttaacatcacaagaggacaaacggagagacaaggatgagaaggatacaggagctgtcctcaaaaagctagaacacccctggcagaatatatacaacggtattttatttcccaaagccgcaaaccagcgcagcagaagctggggatactggggaatgttggaaaaacaggggctgggccagcccagtccagtggtgggaacaggaagtgatgagaagaggggtacccagggccagagaagtaggtgagagggaaatttccaggtggagaagctcacagtaggacaccagcagccacggccaacagaagggctgccaatccagctgtgggagccacacagcctttattatggggctgctggggccccccttttgcaggatactgccctgaattgctgcggtcctggtggccagcggcgcctccagtcaacctgggctcctcatcccgggaggcctcgtgttctactccctgtctcggagtctgactggttggcgctggcatgggtttggtggtggatgtgggtctcactggggccgaggtagaagtggtgacagatgtggttgaggccacagtcgtgggctctggagggggcagccggacaaggggtgggattcgaggggagaagtaggtcttgttgcggaggtcagagttacagcgggacccctggcaacaggagccactgagcgtgaaccctgggcctgttactccatcccgagtgcagaattcatcctggacacagccccggacaggcaaggacacagtcacattagctgccgtcaaggtgacgttgccgtcgaagcagcccttgtagacatgatcgctggcgttgtagcagctcacgaccggcggcgatgtaccctggcacgcctcccggctcaggcccacacagctgtagcactccacgccgttgggcgggtatgcactctcattacctgcgaggggagccgagaggaagaaaagccgctctcgacgaattcgagctcggccgatttggcctgatnnnnnnnnnnnnnnnnnnnnnnnnnnnnnnnnnnnnncggccgccaccgcgtgacgctcccaattcgccctatatgatctatcatcgtccccc

SEQ ID NO: 444790 - DNA, 1015 bp, Homo Sapiens
  misc_feature (142)..(142): n is a, c, g, or t
gcttggctcaactgtaataatcccaattgtcatactctgtatctttgttcattatttaagtataactatattaaaggcaaaatatgaagcaattaacatagaaatttaatttataacctattaccaaagtatttcatatganttccacttacgttgactcctcaataggagaaatggatccatcatcatccaaaaatttgtatctacggactgtcaaaatcttcattttctaaatcttcatcaacattcatttgcttcaatgattctttcaggtggtgttcgatacttcagtttttcaatatagttaaaaaatcctcttgcaacagcttgctcaaacgttaaaatttttctccaaggtgcgtttttttcattctctgattctaaaaatgggaagccagatcctctgcttctaaattgtttcttcttatctattagtgagtatataggatttctccgttccttctggtcttccccgtggtcttcctgttggctggtacctcctcttgtttctctttttttatatctctttttcctgttcttgaatctttcaaaaatagcttttatagtcaatggtattggttcaaaagatgagtcacttgatgaatcacttgcgtgaacactttcaggtgtacgaacaaattttcgaatggggtttcttttctcccctttaggtgagtaagggatacactgagttttaaataagctgctatcagaagagttatcacttcgatttgcaagttccacagcatcagatgtcacatggtcaagagaatctattcctgatttatccatcaattgctctttgttttaaacagttttctaaaacggcctcgcagtggccccaaccgcgcacttgctgcttgtaacccaggcctcggcccaaaacccgcgactggcctggtgcgtgagtcctagagctctgtacacaccaccctcccgacctcagccctccaactcccgataaccagccgacctcctccaaccgtgcggaagaaaagggttggctatttccgtg

SEQ ID NO: 444791 - DNA, 1545 bp, Homo Sapiens
  misc_feature (30)..(30): n is a, c, g, or t
tcttttctaacttggccacccatgggactnccagtggtcagccataaagaaaagccagatagttgcattctatttagtttatagctgctttgttcttttgtgtttcactaagcagaggctcaaaaattcccttgataacttcagctgcccctgttcttttcctcaaactccaggatgagacctttaatgtgggacaatttctggtgaaggtactcacagcgacgcttttcttctctgtaacttgggtactgcttcctgaactttttatattcctggattatcttgtcttccaggaccttgtattctggagttcctcgccgaactcttttaatctctgctcccagctctatgaacctttggcttgcagtcccaacacgggcatgcaggatgcggtattcagcataatctgtctcaaagtcctgctcataggcatgttgctgttctgcactgtggatggccctgtattgcaggaggtagtctggtatatcttcaggacttggggattcagaatcttcttgaactgaggaactgtgttctaatctggggtccatgtcctcatcttcttgctcccaatcttctccctcttgtaaatcctgattggtcaggccttgtagggggcttggcactaaaggcagagttctgaacctcttttcttccagttctacagtggctacaggcactgaacgtttcttgtccagacgtttccggctggcagaggaaggcagtgcctgaacaggttctctgtttggaacatgggtctggcttctaggatattttaagggaatgggaccgattgaagaccaggttaggaggctggaactggatcttttattacaacatttaagagtggagattagaaaggaagacaatgccaaagcctgcccatgttaagtcgcaccgccattccaaagtacctcacttcccactgtgccatgtgctcccttgaggatcctgggagtgactgtccttggttgcttgccagtggatctgacacgtgacacctcctctagtgccatctgtggctgtgatactgcatctccttcagaatagcctcctgtgttctgccaactcctcaggatgtctggcatcttcagtcaggttgtgtccctgaactgatgatggggctggaatagaatccatggctgcccaaataatgaggcgctccactgagtgagcccaggcagtggaggctgttaggcccagacctgaggaagcgttggcacacaaggtccaagctaccaccagcgccctcctgacaacactgggacactatgaaggagaagaggcaggaccaaccagggcactgggagtctcagataccctcggtggccttggaaagcaatcaccggccgtacctgttgccgctgacactcttgcagcgcccgcagggcagcgtcgttgagcctgagcagtaagaggctagtccgggcagcttgcgtgaagcagagccggagctgtcctctcagaggctcactggagctcctccatggcgacgagttcgagtgcaagcagcacgggggccacaggcgagggccacaccccgct

SEQ ID NO: 444792 - DNA, 1054 bp, Homo Sapiens
  misc_feature (965)..(965): n is a, c, g, or t
gggagaggaggtggcggtggtggccctcgcctgtggcccccgtgctgcttgcactcgaactcgtcgccatggaggagctccaggagcctctgagaggacagctccggctctgcttcacgcaagctgcccggactagcctcttactgctcaggctcaacgacgctgccctgcgggcgctgcaagagtgtcagcggcaacaggtacggccggtgattgctttccaaggccaccgagggtatctgagactcccaggccctggttggtcctgcctcttctccttcatagtgtcccagtgttgtcaggagggcgctggtggtagcttggaccttgtgtgccaacgcttcctcaggtctgggcctaacagcctccactgcctgggctcactcagggagcgcctcattatttgggcagccatggattctatcccagccccatcatcagttcagggacacaacctgactgaagatgccagacatcctgagagttggcagaacacaggaggctattctgaaggagatgcagtatcacagccacagatggcactagaggaggtgtcagtgtcagatccactggcaagcaaccaaggacagtcactcccaggatcctcaagggagcacatggcacagtgggaagtgagaagccagacccatgttccaaacagagaacctgttcaggcactgccttcctctgccagccggaaacgtctggacaagaaacgttcagtgcctgtagccactgtagaactggaagaaaagaggttcagaactctgcctttagtgcccagccccctacaaggcctgaccaatcaggatttacaagagggagaagattggggagcaagaagatgaggacattggacccccagattaaaacacagtttcctcagttcaaggaagattcttgaatccccaagtcctgaaaatataccagaactacctccctgcaaatacaggcccatccacagntgccagaacagcaacattgccttatgaccaggaattttgagaacgaattatgctgaaaaccgcattcctgcatgccccctggttgggaa

SEQ ID NO: 444793 - DNA, 528 bp, Homo Sapiens
tcaaggtagaatgagaatttttactttttgacatggatgctttttctctgcagcagtacccaagttacagagaagaaaagcgtcgctgtgagtaccttcaccagaaattgtcccacattaaaggtctcatcctggggtttgaggaaaagaacaggggcagctgaagttatcaagggaatttttgagcctctgcttagtgaaacacaaaggaacaaagcagctataaactaaatagaatgcaactatctgcttttcttatgctgaccactggagtccatggtggcaagtagagagctgctctaggttcttgaggtttggttttcattattaatttttaggggtatggggcactgtggcaaaggacttccataggctgtgcctagggagtctagggaaaagttgacagaggcttggcttttttacctttagttcagccaagtcattttcaagtcctgaggaaatgacatcatcttcagggtaaaaataatgagggcattaggacaaaccaaactaaggtgaattttagcc

SEQ ID NO: 444794 - DNA, 1751 bp, Homo Sapiens
ttttctcagttcactgatatcaaaagaaaggactttggcattatgttcctgcaccaccttgtatctattttcttgattaccttttcatatgtcaacaatatggcccgagtaggaacgctggtcctttgtcttcatgattcagctgatgctcttctggaggctgccaaaatggcaaattatgccaagtttcagaaaatgtgtgatctcctgtttgttatgtttgccgtggtttttatcaccacacgactgggtatatttcctctctgggtgttaaataccacattatttgaaagctgggagatcgttggaccttacccttcctggtgggtttttaacctactgctattgctagtacaagggttgaactgcttctggtcttacttgattgtgaaaatagcttgcaaagctgtttcaagaggcaaggtgtccaaggatgatcgaagtgatattgagtctagctcagatgaggaggactcagaacctccgggaaagaatccccacactgcgacaaccaccaatgggaccagtggtaccaacgggtatctcctgactggctcctgctccatggatgattaattactcaaaactacaagtcccaagcaaagtgaactatttgttcctggaagtatttaataagttgcaaatgcagttcctttcataatatctcagcaccagaaacaaaaattaagattatcaaagcattttgaatagtgcactgccatgtgtcctgtctgtgaatgaagaagaattaccattctctctttgtaggcatgctgtatgtaattgacacaagggaacagtatttgcatttgtactgtcttagaatattatttatttttttgtatttgtaaatctgtggacaaaagagggtttcctcactccttttactcactgggctcatgacagtgaaggagatgctccatctgcttctccccctttctcttgctgtagtccaatgtgctatgagcatcagcttactttgtcacttagagcaagcaaaacccagtgcaagagtctcgttcagctctaaataggtttgctttcttttagttacagtgcccattttgaaattgcctatacagtcttagtgaccatttaaaccggacgaactaggtgtttaattttcactcttcatgttcaattagcagttcaaattaaagaagatggttattggagaacttttttgaatgggtttgtattaaattgctttgaaatagatttcatttcttgtgcacacagccaagatttcttcaatgggtgtgagctagttgagggttaaccttgtacgttgcagagtgaatttgcttgtttgcttgtttttctctgtgatgaggtcagtgcctctgattttgaaggaggatattcactgaagctcatagttataaacaaggaaatcactgttaagaatgggaatttgtcctgtgttctgggaataacataaagagagcgactgatttcagcccaggttttgccactaccctataattagtggcagtcttatgtttataaaagaaaagaaagttaacctatattttgggggaccaaaaaaaatattttcaaggagtttggataaaagatttacccctgagggccagtggcaaaaagctaccttttaaatggaaaagccaggcctttttcaaaggaaaaagaaccccccctattcttaagttaaacttggaatgggctcgaaagggttttctttaactttttggccctggaaccccaaaaatataaaagcccccaattggggg

SEQ ID NO: 444795 - DNA, 1204 bp, Homo Sapiens
agcggggtttcctcggcgccttttccggcagcggcggcggctgaactgggaggaggagttggaggccggagggagcccgcgctcggggcggcggctggaggcagcgcaccgagttcccgcgaggatccatgacctgacggggccccggagccgcgctgcctctcgggtgtcctgggtcggtggggagcccagtgctcgcaggccggcgggcgggccggagggctgcagtctccctcgcggtgagaggaaggcggaggagcgggaaccgcggcggcgctcgcgcggcgcctgcggggggaagggcagttccgggccgggccgcgcctcagcagggcggcggctcccagcgcagtctcagggcccgggtggcggcggcgactggagaaatcaagttgtgcggtcggtgatgcccgagtgagcggggggcctgggcctctgcccttaggaggcaactcccacgcaggccgcaaaggcgctctcgcggccgagaggcttcgtttcggtttcgcggcggcggcggcgttgttggctgaggggacccgggacacctgaatgcccccggccccggctcctccgacgcgatggggaaggtgctatccaaaatcttcgggaacaaggaaatgcggatcctcatgttgggcctggacgcggccggcaagacaacaatcctgtacaagttgaagctgggccagtcggtgaccaccattcccactgtgggtttcaacgtggagacggtgacttacaaaaatgtcaagttcaacgtatgggatgtgggcggccaggacaagatccggccgctctggcggcattactacactgggacccaaggtctcatcttcgtagtggactgcgccgaccgcgaccgcatcgatgaggctcgccaggagctgcaccgcattatcaatgaccgggagatgagggacgccataatcctcatcttcgccaacaagcaggacctgcccgatgccatgaaaccccacgagatccaggagaaactgggcctgacccggattcgggacaggaactggtatgtgcagccctcttgtgccacctcaggggacggactctatgaggggctcacatggttaacctctaactacaaatcttaatgagcattctccacccatccccctggaaggagagaaatcacaaaccccatttcatagggattaaccgcccacccattcacctctttttcaatttt

SEQ ID NO: 444796 - DNA, 1750 bp, Homo Sapiens
  misc_feature (1035)..(1035): n is a, c, g, or t
  misc_feature (1189)..(1189): n is a, c, g, or t
  misc_feature (1264)..(1272): n is a, c, g, or t
  misc_feature (1312)..(1312): n is a, c, g, or t
  misc_feature (1405)..(1405): n is a, c, g, or t
  misc_feature (1503)..(1513): n is a, c, g, or t
cgctctcgtgcccggttgcttctgtcgcttcctggttgcggtccggaattttttccatcttaaagtgaacccaatactagtgtccacaaatgtttcaaccgattttaccctatgttttcaagggtattatagaaggggagaggtatcctgtagtgatgtccacgtatcttggcgtcatgggtcgagttctactacaaaacactagttttttttcttcactacttaatgagatggcccataaatttaatcaggagatggaccagcttttgtgaaatatgattgaaatgtgggttgatcgaatggacaacattacccagcctgaaagaagaaaactttcagctttggctttgctctctcttctgccatctgataatcagtgttatcccagataaattctgtgggattataaagctttcggtataatgcctgcatgatgtcatgacggacgatcctgacacaggaacttttaacgactgtatgttgatgtctcatcttgaggaccccaaatgcacccgtaatatcagcatccaccctcagcaccttatacgacggcaaacgatgctgggccatgaaggcaccctgcttcataccagtggtcacttgcctgaagcctcattctaccgaccaaggctccatggctccggcccggcacttcgcactgcgcagcaaccgcgcgttttttccactgtcaccgttaattggaaaaaccagccggacaacacggcggtcacggaaggtcctccccccaggctttatctcgaggcatgttcttgtgagcgcctccgtgccctcttatgacactcgaaggcgcactaaatgtgaacaaatagtatggtgctattgggcttattccccacccttcttctcaggataaagacccaatcgccgtgtcgaagttattaaactccgcctagcctcctattgaccatacacttcgtatctttcacactctccgttctggacaaaaaccaaagtcacccccacagatcgatttacggccactaaattggccgtagattgtaccacctaagatgnccttaaaatcaattactattgagataatggtgagaaaaaaaccaaagcaggtttaaaaaacgggttcggaaattggaaggagaagtaacatccgtatgtggttctaaagcgcgttattattgcaacgcccctgatctccctccccgccaaaacncctacaacaaaaacaaagtggagcgcgaaagtacccgtggggcgggcaccttttaaaaccggtattatgtggcgnnnnnnnnntgactcaccttaactcggccgtaacgcttctttctccccncaccctccttcgccccccccttcttccctcaccactacgctccccccactccctctacacttgatgtgctccgctccgggcggccctccttgnaaggttcgagctttttacttagcaaatacacgagcgcatgagacatcaaccgccgccgtcttatgatggtccaccatgaccggcgggcgacttctcgnnnnnnnnnnnttcacaccttcctcaaaaagcatcacacctaccccaccaccacacccgcgtcagggcgaacgactgcgagctcagtcaaataaaacttcgacgtaccagcgctgcccgcttactcttcccgctccctgctcaaggctcaaaatcaatacgaatcgacccaaccgcacgacttttttttcattccctaatctcaacccacgcacgccgcgtaatcgtcgcccatccctccctccactc

SEQ ID NO: 444797 - DNA, 2067 bp, Homo Sapiens
  misc_feature (620)..(652): n is a, c, g, or t
  misc_feature (1601)..(1601): n is a, c, g, or t
tttgtttggtagatggccccccgtggtggtaaaaatagtatttcctgtgggctagttgactggttgcagcttggacgggcgcaaaaccttgctcatatagactctgccggagtgtcgtaggtactggcggtgggggtggttactacacccgctttgtatagacacgccgtgtcgacagaggggtttgcatggatgtattccccccccatccggggccgtctgtataatcgctctcgtttgtgtggaggtggtcgttgccgccagcggggtgtgtcgttcccctccctgcctgtgcgatgggttgtgtggggctgccctctcctctcccagctgaggtgtgcgcccccgtgcgtttctgctcgcgtggtgtgtcgtccgcccggcgtctcgtggcggcgcgttgtctgtcgttcgtatcctaccgcgctcgctcgtggcttccctctctgttatattctctggctcctcccctatatggtggggccaccctctgtgtatcctccattatgcttcgggtggtgcgtgctcgctgatcgcttggggtccccctcgtcggagagaatattctcttcgtgagcgcgcgccgcctccctctcttgttttcgtctgttgtcttgtcnnnnnnnnnnnnnnnnnnnnnnnnnnnnnnnnncaagtcatatgcactgtgttctttattgagatagaagtggggtggggagggtagcccataggcagagaagtgaaaggagggaggagtgggagccatctatttcccaactctgcctttcctcccagctgatgatggtgggggcgtggccaccagccatgggattaagaaggaagaccccccacccttagatacaagcacagtgctgcgtgagaaggttgggcactgtctcatacttgaaagagtaacctccatccgaggtggtgcggacatgtaggggcctcatggtccctgggagagcagcacagcagggctgggcccctggcagcaaggattagggctgggctggggtagggggagccccagggactggaagggacaggtttggtgggatgtgcagcccacaaccaccatgacattattggaagatgaaactgggagggtacacgatccaccgttcccagcccagctcctggaaggagatgttcagtgctactctgtggcagttggcatgggcagccggttcctcccggaggcctctgcagcaggcgcagagcagagggagaccaagggccaggacatcaggggagttgagcgtcgggctctctcccctccactgggtggtctggtccgagtgtgggccaccaggaagggcgtggcctcaggccgggctgagcaggtacagaggggacagcgcagcaagcagcaccaggacggggtgggtcagcagagagagagcagaggtggccaggtgcagcacggcccagtgagggggagcatggcccaaagacatgggcacagccacgggtcctcccggtgacagtgccagcaggcctagcaggggctcagagctattggaggctgctgtgccctgcctgtccagcccggtgtggaaccacagctgggctgaagtcacctggcggctgcgtgtatgctgggatggccggaacantgtatctgaagaaggccctcctcagcactcactgggccagccctctggcagctgacttgtcctcacagctggcatctgtggctgggaaaaggatggcttgggagacatcctcctcttcctcgggctcagagcccctgtgtgtgaagcccccacagggcatgtcttcggggcagccgcctgactccagggtccccaccttccctggtcaccgcggggggccccaaggcatccaagaacagggccctcaccttggccagaacaagttcccgggccagctccagcccctggcagctgtgcccaccctgtggggtcagcagcaagaagagcagtaggtgcagcaccatagctcacctggccctgctagtggggaactcacaccctgccccgtgccccttctgccagggtctgcccagggcctttccactctcccctccccatcccacacccaccctcttctacccttctc

SEQ ID NO: 444798 - DNA, 1465 bp, Homo Sapiens
  misc_feature (98)..(98): n is a, c, g, or t
  misc_feature (202)..(202): n is a, c, g, or t
  misc_feature (241)..(241): n is a, c, g, or t
gttcccctggtaaggaaatattaggatatttggcccctgggctcccctggcttgccagggaacaatgttctttccaaaaaggcctgccaggtgccctngaatagggtgctccatggctccgtttggcccaagcttagagtgggccagggggcttgggaatggtgagacaacgggagcccgaagttccttggtgcagcccagnggccaggtcaggatgtcaaaggccagtgttaacagccancaggggcagtgggttctccgaggcagaggcagcagcaatggcagcaaccatctccaggcagctcaggtttccaccactcggatgacaggcatgggcttcgggctaggcggcttggatatcctaatactgcccgggttctctgtcttggcccgggcctgggtgctgaagttgccatgactgatttgtttttctatcaggtgttccatccggtcatgcatctctaaattctctgcctccagataggcgattttctccttgagctcctggatggtggcgtcctttgactggatcacagcttttgaattctggagctgctctatcatttgccggactttccgctgctggctcttgagcatgtcatccaagtggtggatcttctcccgcaacccggccacctccttttccagggtagcagccttttctcgttctggcttggcagtcagcattgttgctccgaagttcttctagggccacttccccttccctcactttcgccagtaaggcctgatgctccgtctccatccctagcaagcgcctctgcagctctccgacttttgcctcttttctgctccactctgtcctcctctctctgaagggggcccacattactttgttctgcttccctctggtacccgggctgagtgtgacctcaaaagccacacagtctgactggtgttgccgcttggcctcctgaagcttggccagcaagtcctgcaccgtcttcctcaagctctcaacatcctcatttatacaggtgtccacctcaggtgggctgctgtacagggctgtgggactctgactaaagccatttggcttttctagcaccacctgtatctcctgtcgatggagagaatctcctaggttcctgtcaagcttgctacttatatcctcccggagcttctgtaggcagttcctggcctcctggatgtactggacctcactcttcagctggttaatattcttctcgtgaatcatcttgtctccagacctccccttcaagtacaccttaatgatctcctcatgtccatcatgggactccaccagttctgaagccagagaatgaccagctgagtggctggacaccatggcataggtcttcctgcccgccgccgcctggtcctctgggtgcacgtccaccagggtacaccagttccgcgtcccgttcatcttccctcggggtcgcagcacacacgccaccctcgtgccgaattcgccacccaggcc

SEQ ID NO: 444799 - DNA, 1061 bp, Homo Sapiens
  misc_feature (60)..(72): n is a, c, g, or t
  misc_feature (111)..(194): n is a, c, g, or t
  misc_feature (453)..(453): n is a, c, g, or t
  misc_feature (480)..(480): n is a, c, g, or t
aaaaaaaaggggtatagggcccctcccccctttaaaaaaaagtttttggggggggggaannnnnnnnnnnnngtgggttttttacacaagggggggcccacagaccatttnnnnnnnnnnnnnnnnnnnnnnnnnnnnnnnnnnnnnnnnnnnnnnnnnnnnnnnnnnnnnnnnnnnnnnnnnnnnnnnnnnnnaattcccaacccctcaatttgtttggtgggcaaactttttaataattcccttttaccaagccattgggtgggtggccttcaagcaaaagggggttgtccaaagcgggtcacacctgaccgcccggatggacacctgggcttgccatggacaacggggcattcctcagggtcacaagacttctggacaaggagccctgtggggtagcagtcacacaagaggcaggtgggctggcttggggcccggtagtggttctcctgncagtggcactcgccgcttgtcttgtgncatgtctgggtcaaagcctttgctgacatcacagttgcatgggccacatgtgggatgtccccaccagccacggggacaaggctggtcaatcctggtctcacagtatggcccaaggtaatttgggggacactcgcaggtatagccatggggggcactgggcttgcgggtacacacagactggtgctcacacgggttcaggtcacacacattagtacagttgtcaccatagtaacctggatcacagctgcaggaatagctgtcccagtcgttgctgcaatagctgttagcaggacacgggtttgagtcacaagggtcaggcaggctacagccttgctccacgttgatgctctccccatggctgggatccaggctgttaaccccctctggcgtatcgctcacccgcacaccctgcaaacagccccgaaagccacgggccacaccgccggctggcccaggtattccgcccactgttatgttgctcaggtgcagaccatgcagccgggggcccaggttgccctctgctctctgctgcccataatcgaaggacagaatggcatggccaggccccccgctggctccca

SEQ ID NO: 444800 - DNA, 1672 bp, Homo Sapiens
ttttttttaaagtgcaaaaagctctctgctgccctagagagaggatctttggacaggccgttcaatgcaaagtaaaagggggcagctgatggggctcaacaaagggcggtggagcgggagacaccatgctcccctccctccctccctccacacacacgcgcagaatacactcagccacacacacagaggcacgtgcacacccccttccatggctgcaggcagagggctggtgactggcttctaagcaggaccccctgactgccctgaaagttcagtgagccactggggctagacacaggcctgggctcagggggctccgctaaaccagaggcctggaggagcctggctgggaggcaggttggggcttggcccagtcctctgccgcctccagcttgggggagataggctgctccctctgaggacgtgcatcctgggaaagccttcttcaggcagaatgaagacacatggaaaagggcagtcagtgggaggcaaaagagagagggggaacaaggagatggtgcctgtctcagaatccacttgggtagcaacgaaatgggtgtgtccctggggtagacagttccagctcctctgaagagcttcaaccccaataagtgcaataaggacctcatagagactagcaagtaagtcgggtaggctggggtgggaaacctaattatgtgaacaagcacgagtgctgggcagaaccaagctcaagggagaggaaaggagggagagcacagttaaggacgtgaggtttgggagatctcaacagcaccagtgtgatcggcacgggtctgggactcctggggctgctggcccctcctgcgcaagccgggagagtgtgatggaggagagacgcgcactggacaccacaagaacctggccatggagacagggccgttttcttccctgggagtttgctcagaaccaggcactgctggggaccatggatggggaggaggggcacagggcccagtgcagatgaaggttgcacaaacaccccaaactgagagcccggcctcctggcaggcgagtaagcgagcaggcgcctcgacagcacagcctgtgctttcccctcagatcaatctgctactcccttttccttaggagggagaggagcaggcagataagcctggtgtccaccaccctctctgccccacctgtagaggaagggctcaagggacaggagagcagagagggagtgtgacgctggcctcagagcccgtgcagggtcgaggagaggctctcctcggtggggagtcaggggaagatcggtttcctgttgaatctgggctgggtgtgtcttagctgatcttctgtatcagcttctcgtcagacaggcagtagaggctgttgatggacaagtctgagatgaagtgctcgcaggcttttcgagtgatctgcttgcatcctcgaaggtcgatcaaggtgacgttggcaatgcgccgtaggtagatcagggtctggtctgtcaatttattgcaacctgccatattgagctctgtgagagagtagcgagtggaagacccgacagcagtgagtagattggaggactgatctgtaaggtggctgcagtgactgaggtcgagtcgagacaggaggggcatgtggcgaattatgaggcgaagcgtggcatctgtgatgtcaaggcctgccagccggaagtcggtca

SEQ ID NO: 444801 - DNA, 1552 bp, Homo Sapiens
gtttccaccacccaggttttagggggggaacccacggttaggaaaaatggggatgtttttctaattccaaggccaatggcttcgtgggagtttcccccgggagggcccccctgggcctcctagttttccgtggttgtccagggaaggatgttgaatcaacgcccccttgggaagtaaaaaaagcaatgttcctcatacctgttcccgtggattcttttctctttagaccctgtcaccttgaagaaagcatgatcgattccaaacatcactgtaggcaaatcaccatagtacttgaactcagttactgtgaagaaagcatgtcatccttgacaatggattaaatgaaagtgagctaatgcatgccattctcaatccttgcagctacaccagttcccaggcactgtccttacaagtgatccatccatattccatacaagatccaacacttgctccaatgatatatccttgttttcaacttcagaaattcaacagacatttacatttagattatccctgaacagcctgtgagaccaaatacacactttccctaatatactctaatacaaaatccttattaagaaacagaacagaagtcaaatccagagacagaaataaatactgaaagcaatgtcaatgaagatgctctctccttggccatgttgtctttggacaattttttttctgaacagagtcatagttttgacatttaatgatatctttatcatcttatattttctataccatgaaattaacatttacatacaacaaaatcacctcaagaggaaaaacatagattttttctaaaaggaggtctgaacatcatcagtgtttttggaatcctggattattttctcctttgctaatatcgatggaggcataaggattttctgtacttcttgctttatttttcttcttccgatctctgatcccagtgaagatcaggatgacaatgccaaccactatcactcccatcacaactccaaaacatcagccatatggaaacagggggctggttaggaggtccaagtgttggctgtatccccagaaactctaggctgttgtcattcagacggaaagcatcattgatacggctccgggacatcctgatggccttttcaacttcagttctaggaatgatatcagacacatttttaggtgcagtgacaaagaaattaaaggagattcttggtttcaaattagccactcgcacatcctcctccctgtagagaaacaaacaacatcttcacttgtggcacagaggacacaatcaagagaatgaagacttcccctgctggtgaaaaggagattagagagagaatcacaggatagagagacatgggggagggcaacatgagaggatgtaattgtcaaaaaaaacattaatgctgcccaagcacatgaaatcaactacataaaaattgtgatatcaagttttggcactatttgttctgcctttatataaacccacatctttttcaattatagaaaatttcccaactgaaaacagcaggagaatcacaggaataatcggtggcccaggattgtggcaaac

SEQ ID NO: 444802 - DNA, 679 bp, Homo Sapiens
ttttaaacccttgttttaattccggaaatttttgggtagaaattaaagtaggcctaggaaaatttcatttctatttttaaaataaatttaattcaatggggacatcatttttaattataagaaacttgtgaaaagaacatattttcttgttagtctcatggagcatgcttataatgctacgtactttaaaacaatcttttaaaatgtcattttagcttatactgcaaaaggaacttcatgtagtctatgctttatcacatgtatgtggacaagaccgaacactactggccagcatcctactgaggatttttcttcacgaaaagcttgaatcgttgttgttatgcacactaaatgacagagaaataagcatggaaggtatggtatggccatgttagtgtgatacaagaaactgggtttagattttatatcaaggatatatggactctatctctgaatatactaaattgttaaattatattgcaaaataagttattctgttttccctccttaaaaattgcagttggatgtcagttctgattatgttggttactatgggaagctgatatttctaatgtaggttttggcagataagtactagaagccacaagaaggtggtatctgtgtctacatcaatggcttgactgtttggcatatttatctgtattctcttgttttttat

SEQ ID NO: 444803 - DNA, 956 bp, Homo Sapiens
tttttagaagcagaggctcaggctgagcccaggtttattatccaaaatcaaaatgaaatgcagtgattaaaggacacaaggcctcagtgtgcatcattctcattgtggctttcaggcggctgtggaagacagggtggggatggtggcttcgggaggtgaggtgctctgggacttgggcaagtcttaagcaagccattcctgctttctgggcctggctcccatgggccattagaaatgaaaatgctttgtggactgctgaggacggtgcaagggtgaggtttcccagctcaccggatcatggccagcacccagggcatcagcttctgctttatggtggggtctgcaggtgggaagtccttggccttcagaatgacctcatgggcctcctggaagaggtcctcccccactgctgcctccacgcgctgccgccatgtggccagcttggggtcggcctttcgaagactttggcagccagcacccccgggatgcatcagctccgtgatggctacgaggtcagctaaggagatgtgaggaccagtaaggaaggccttgttctggaggaacttgtcctcgagcaactgcagggtcacatccaactctgccagggtggctgccagtgtctggggagatactggctcacccaggaaaacagggaacatcaccttatgccacaaggcccggaggcagcttctccgcagagtcgtgtgctgccatgccaggtactcatccacacgggcacgggcctgcaggtcctgagggtaccagtagtcagggaccttatatttgcgcgtcaggtagagcaggatggccacactttaatcagatccacgatgcgcagctcgaagggaatgtcgttcttcttggcaaagatgtaaacagcgcggcagggctgggacagcaggtccaggtacagctccaggcccatagtggggaccgaccgacctgaccggaaaccc

SEQ ID NO: 444804 - DNA, 944 bp, Homo Sapiens
aatgagttccttccgggaaggatcagggttctcggggggctttgggccaagttcctgaggcaaggccggttcctgcctttccgggacctggcgtcccatgggcccggtagaaaatgaaaatgctttgtggacgtgctgaggacggtgcagggggaggttttcccagctcccccggatcatggccagcacccagggcatcagtttttgcttttatgttgggtcctgcaggtgggaagtccttggccttcaggaatgacctcatgggcctccctggaagaggtcctccccccactgctgcctccacgcggctgccggcatgtggccagcttgggtcggccttcgaagacttggcagccagcacccacgggatgcatcagctccgtgatggctacgaggtcagctaaggagatgtgaggaccagtaaggaaggccttgttctggaggaacttgtcctcgagcaactgcagggtcacatccaactctgccagggtggctgccagtgtctggggagatactggctcacccaggaaaacagggaacatcaccttatgccacaaggcccggaggcagcttctccgcagagtcgtgtgctgccatgccaggtactcatccacacgggcacgggcctgcaggtcctgagggtaccagtagtcagggaccttatatttgcgcgtcaggtagagcaggatggccacactctccgtcaaggtgaagtccccgtccttcaaggctggcaccttcttgagggggttcacctgggcaaaggcatcgcttaagtgctgacctttaatcagatccacgatgcgcagctcgaagggaatgtcgttcttcttggcaaagatgtaaacagcgcggcagggctgggacagcaggtccaggtacagctccaggcccatagtggggaccgaccgacctgaccggaaaccagagggagtccgcccgct

SEQ ID NO: 444805 - DNA, 870 bp, Homo Sapiens
  misc_feature (846)..(846): n is a, c, g, or t
agcggaggaagatggtggcgagcgcgcgagtgcagaagctggtgcggcgctacaagctggcgattgccacggcgctggccatcctgctgctgcagggcctggtagtgtggagcttcagcggcctggaggaggacgaggcgggcgagaaaggaaggcagaggaagccacggccactggaccctggcgaaggttccaaggacacagacagttcagcagggcgacggggcagcacaggcagaaggcatgggcgctggcggggccgtgctgagagcccaggagtgcccgtggccaaggtggtacgggcagtaaccagccggcagagagccagccggcgggtcccacctgccccacctccggaagccccaggccgccagaacctgagtggggcagcagctggggaggcgctggtaggggcagctggcttcccaccacacggagatacagggagcgtggagggcgccccccagcccacggacaatggcttcacccccaagtgcgagatcgtgggcaaggacgcactgtctgcactggcccgggccagcaccaagcagtgccagcaggagatcgccaatgtggtgtgcctgcaccaggctgggagcctcatgcccaaggctgtgccccggcacttgtcagctgactggggaagatgaggcccggcaatccagtgggatgagagccaaggcccagcaaggcccatggatgggcccccgggtgcgaatctgctacatgctggtggttcacgggcgcgccatccgccagctgaagcgtctcctcaaggccgtttatcacgagcagcacttcttttacatccatgtgggacaagcgttccgactacttgccaccggnagggtgggtggaaactggcccccg

SEQ ID NO: 444806 - DNA, 1123 bp, Homo Sapiens
  misc_feature (813)..(839): n is a, c, g, or t
  misc_feature (901)..(901): n is a, c, g, or t
  misc_feature (938)..(1010): n is a, c, g, or t
cggctggtaccggtccggaagtcccgggatatcgtcgaccacgcgtccgggttggccaaccagcttaggaagggggggctgtatgtgctgggccacgtcaccctgggagacctcgactccctgccctcggaccctgtacagccgcagtatggtggcatggctcatgcctggtggaccgtgcccaggtgaaggcttttgtggatctaaccctctcaccctccgtgcgccagggggctcagcatctgctgcgaatctccggcctcggtggcatgaagcccaacacgttggtcctaggtttctacgatgacgctccaccgcaggaccatttcctgacggacccggctttctctgagcctgcagacagcaccagggagggcagttccccagctctgagcaccctgttccctcctccccgggctcctgggagcccccgggccctcaatccccaggactatgtggccacggtggccgacgccctcaagatgaacaagaatgtggtgctggcccgggccagcggggccttgccccctgagcggctgagccgggggtctgggggcacctctcagctgcaccatgtggacgtgtggcccctcaacctgctgcggcccggggtgggcccggctatgtggatgtctgcggcctcttcctgctgcagatggcaaccatcttgggcatggtgcccgcttggcatagcgcccggctccggatcttcctgtgcctggggcctcgggaggcgcctggggcggccgaggggcggctgcgggcactgctgagccaactgaggatccgggctgaggtgcaggaggtggtgtnnnnnnnnnnnnnnnnnnnnnnnnnnnaaaccgaagcgggaggaagaaagggggactttgttgaaacattggggcgggggagacgccanaaggcagaaggcccctgggcacgccagccggcaaacnnnnnnnnnnnnnnnnnnnnnnnnnnnnnnnnnnnnnnnnnnnnnnnnnnnnnnnnnnnnnnnnnnnnnnnnngcaagggttggggcaaattctttaaggggtcccccatattaacaggcccctcccacccttttccgtggaaccctagggccccgcggggccggccccagaacccgatatccccg

SEQ ID NO: 444807 - DNA, 1680 bp, Homo Sapiens
  misc_feature (167)..(236): n is a, c, g, or t
  misc_feature (320)..(328): n is a, c, g, or t
agccagagcgcgctagtagggggcaggggccaggagaagggagcgccggtgccacagcggacggcgctcggagggcgggggcgggaatgacgagcaaggaggggcgtcgtaaccggggatgccaaggggcgacaaggaccttgccccggagaacgccaggccgccannnnnnnnnnnnnnnnnnnnnnnnnnnnnnnnnnnnnnnnnnnnnnnnnnnnnnnnnnnnnnnnnnnnnnaaggccccaaagagacccgtttctgaaaacccaccgttgccgggattattccagaggccagggtccccgcgtggagttgactcnnnnnnnnntggaggaaccccaggggtgacccagaggggggctctggagcgggtccctaacatctgaaaaagtcctcccagggaactcggagctggaacttccaggcagcttcgggggtgacatttgtatccggccagccgagcggggaaaggagaccttgtgtcctggcaacagggagagccgggactgggatggccacagctcagcctccaggtgaggagcccagggccctgctcgagctgtgacctccacggtcacggagtcctcggaaaaagagaagttgagcttgttcccctggtagaagatgccggagacgctcactctggagatccccgacagacacacagggtcaaaggtcacacccgctcgggtgaccctgaaccccgtgcacccgaagaccaccgcctgcaggaagccccccatgcctgtcaggaagttcacagcgcctgacccgtctgcattctccgtccacaccttgaagggttcagccatgttggcaaagctcctgtccaggaggccccgggcccgcactgcgtccttcagctccatccagcccacagcaaacatgctccaggtcatggcggggccctggggggacgtcacagcctcgtaaatctccagatttttcctgcgaacatcaggactcagggagaaggggactgggtatcccaggagcacgacgtctgcctgcttcaccacctctccaggctcatacccatcgaactccgggtggaagttctgctccacgtcaaagggtaccttgatcttgtcagtcaccgccagccactggctggggatgggaagacccaggtcctgggccagggcagcagcaaagcgcaggctgttctggaccaggacgttggtgtacacagagttgttgacccctgaatggtactcgtcgggggacatgactcccctcaggtggtacttttcctccctggggctccactcaacacgactgcaccaaaactcggccacagccctgaccacgtcccagccaccagcctctcgaaatagctgcaggtcctgggtggtatggtagtacagctcgaaggccaacaccacggccccgttgacgtggacctcctggactccgtaaatgtcctcagggcaaacctctaggccggagtctgcactctcccaggcaaacttggctccctggtagcccaggttctgggcgttctccagggccccgtccagcgtgcggatgcggtactccaggatggccctggcggcttctgggtggaacatcaggatactcgggaacatccagaggtcctggtcccagaagacgtggccccagtagcattcctcacggctcccattggagaggcccccaggactgaggccatggcggaaa

SEQ ID NO: 444808 - DNA, 1249 bp, Homo Sapiens
  misc_feature (12)..(12): n is a, c, g, or t
  misc_feature (141)..(141): n is a, c, g, or t
  misc_feature (1233)..(1233): n is a, c, g, or t
ttccaagggagnctccccagaaaccttgcttgcaagccaccagccctcgcttcaggggcccccgggcggaatgctccagggcgagcaccagggccaaagatgtgcagggaagtgacagcccttctcccatgtgatttggtntctggcagtcctgctgaatgatccggtggatctttctgtgcaggtctttgtcttctctggttacatagtataggttatcaaaaccatcatctttctggaaaacaagtcctttttcctgcagcagttgtatagcattcttaaatatactatgaattgccttggaagtggtgtccttcttaaagttcacttggtcggagcaggcactgtgaatcacaggctgattggcaagggacagcaaagactccaccatttccagctcctgctggtaaaagctctgcactctgttctccatgaggaattctttggctttttcactcagcaaactcgtgagactggggaggtccagggcgcctggattgcttagtgcctcttctttctctagggctgagctgtgaaaaggctggtcataaactttcctgtagatagtgggcagctcaagcatccttgcaatttgaatgttccacactgggtcgtccactttatagtaagcggtggcatgaatctctcgctcttctctgtatgtgcggatactgcctctgactcggatcgtgtccccgatctctatctttgttttctgctcaatggtctcttgtagcttcttaagttgtgaggttaagctgagctctcttgctgcacttggagcagctgatacagactcagtattcaactttttccagcagatgcagtttataactccagtgctgtcatccactccataactgtagaaagcatctctttctctcactccaatgacagttcccaagacatctacctgttttattggatgtccattgtacaaaaatacacctggcacctggcgggactccttcatgtccaggatatccctgatgtagagttttgcaaaggctagaaacacaggatccaaaccccacaagagggaaggggtctcctcttcacaccggctggatccaggctgcatcaagaggcagggctgtggcttccagctaactctgaaaggttctgcatcactgagtcaagcatttgtagcccctcccgccgcctgcagctccaggagccctgcgacctggcccttcggaaactcggagccgctggcgccgatcccgaatttcncggaccggtaccagcc

SEQ ID NO: 444809 - DNA, 1445 bp, Homo Sapiens; identical to SEQ ID NO: 322972
  misc_feature (475)..(475): n is a, c, g, or t
  misc_feature (481)..(481): n is a, c, g, or t

SEQ ID NO: 444810 - DNA, 1155 bp, Homo Sapiens
gcagcaaccaataatcaccgttattattaagagcagtttctagtacagagcgcctcagggcacttacaatccccacagaggccagctacccaacatcagagtctgaccagctgggtggtcctgccctgcatccgagagggtgtcgggacactcatccagatggctctgagacagcagcagagctgacaaggaggccccacaagtgagattcctttggcttcaaggtcgcaagtcctgtccttgggcctcctggcctgctgagcctcccaccggctttaccctcagagattgctgcagaagcctgtgtgctggaatgggctgccacatttctaggaaggaacccgggggcacatgtagcctggttattcaatgttatcatagacgtgaatcacatcctcgtggttgctgagagcctgaatgagatgtgcggcctgttccaggtcgggctcagccagctgcacctttgagttggggatgaactctagtgcacaggacacagaacacaggcccagggagtccagcttcttcctcacttggtgcagtgaagaggcatcacaaataaatttaaaaacgttcctttcttcttcatcttcagtttccttgacatcctcagctcctgcttcgattgccatctccagggcacgctctaggttcacagccttcttctctctgtcctccacttcaaccacaatcaccccctttttgtcaaaagagtgacgagctcctacagccatcactcctccattcttattcaggatatgtctaatgtctgcttggcacttgtggctactgttagataatgcctcgatgagcagagaagagccaccagggcctcgaccctcatacagcaaataagtgtccttggatttctccattttcagtgctgtctcaatcgttgacttgggcatatgtttgctgcgacacacctctaagatattggccaggttgctgttgtgctcagggttggggcctccttctttcactgccaggcggatgttcaaacagagtttggagaagatgcgactcctttcgacgtccttcggacccttgatgtgcctgactttggaccacttgttgtgcccggcggggacagccgcggtaaagtgcagcagcggccaacgccggcgcgtctcttccactgccggaacaagcagt

SEQ ID NO: 444811 - DNA, 732 bp, Homo Sapiens
tccagtcttattcagcatatgtctcatgtctgcttgccacttgtggtaactgttatataatgcttcgatgagcagagaagagccatcagggcctcgaccctcatacagcaaataagtgtccttggatttctccattttcagtgctgtctcaatcgttgacttgggcatatgtttgctgcgacacacctctaagatattggccaggttgctgttgtgctcagggttggggcctccttctttcactgccaggcggatgttcaaacagagtttggagaagatgcgactcctttcgacgtccttcggacccttgatgtgcctgactttggaccacttgttgtgcccggcggggacagccgcggtaaagtgcagcgtcctgcccggagcggcaccgcagccccaggggctcggggtgggagggcccggggtcgcgcggaggagccgccctgaccccggggcctcgtgccagcaagcatcgggcagcggccctgcttaggctggcagcagcccaagccgacatcggtcccgaccctggggttcaagctgctagcagcagcggccaacgccggcgcgtctcttccactgccggaacaagcagttccggaccccgcggccgcctgtgccggtcacctgagatccaaaggcttgggcccgcccggggcggctcaacagctaatgaccctacactgtccccgcctcgtgccgattcaacacccaggcctcgtacctagccga

SEQ ID NO: 444812 - DNA, 2052 bp, Homo Sapiens
tttctgggtgaaggcaaaagtgtttattcaagactttctaccacactgtgggaagcatcgataaacagtcataataattatcattctgagtcactgcaagcgtggggttggatgctggctctcacagtagcctgtgttgggaccatgagcagccatgcgcacctccacgcacggccgagctcaaccccgaagaccactgcgtgctccctgggcaggagcaggaggcctggaccacagacgcagcagctccccagcctgagcctgggagtgcaccagccagctcgcagcggaggccgtttctcctcacaggctggagtgagctcagatctagaggtcagaggacctcagactaagagctgcaacagaacgacagcaagaacattctggaaacgatgccacagtgaatcttgtatactgtcactcacacttggtgagggcctcagacatgaaaccctggggagaaggcgagtgtgacctccagagtttggctgggatgcggctgagacagacctgctgctggccgaggaggggcagtggctggcgtggccctcatggccagcaggtgctaggactcctctggaggcccaggcgcctgtctaagctgccggctgtggaccacctgcagagctccccccgcagcctggcggagctgggcatccagggcgccacggaggtcgttcacctggacatcaggcagggggttaaggccaatgaccccatccctcggggccagctgaccctctgcatgagggccaaggtcccgccgtcgcctccggaggtcggagccagcctgcagtttcaggtcccggttgggcttggcattgtccggcctctggccccccgggacagctcgtttgagccccagctctggctctggcctctgcctgggctcctggacagcagcgtcctccccgcctctcggctgctcgtgggacacaggcacatggtcccccccgcgggcctttctcatctccaggtgaccgccatggtccagccggtggccctgctgtccaccctgctcgccatcagagatgacccgcagttccggctggcgtaacacagcctggggctgtgcagctgctccttccgccccaccgggcaggtccgctgcaaggcccaggtctcggctcacttgcttgggcttcatgcgagggtcccccgtctctgctcctggccctgccacgagccagttggcttccttcagaatgctggtgccagtggctgccacctccttcccaggttttttcctgtcttgggaaccgccagtaacgtcctgactttgcccagggaattcctctgcgaggcgctcctctgggcccccggcttcctggcggggtctggcacgggcacctgctccgggcccttggggagctccttcacagtgccagctgcctgggggcggcatctttctggccatctctcagcttgccctgggctgcccgaggctctgtgtcagggccgccgtcaggagggccagcagggtctctgcccacaggcccctcagagtgctccagggagcgctggttaaggtcctgggatggagcagggcggcccccaggagctctgaggacagggtccaaaggcaggggaggcagattctccaccgtctccctggccttgccttcaggggcctcctggcctctgggcaccgctgccccgggctcttgatgcacctccacctgcctgggtttatcctcctcgtcctcctgcctctgctggtggatctccttgtgctgctcctcgatcaccgccagcagcttctcctgctggtccagcaagcgcttttgctgcacctgctgttctttgatcacctgaagcaggacggcgtggtccagcatctccgccctgccagcttcctccagctggctggccgcctggtttccacccgctcgctccacgtccctctgctcgcgaggctcgggcggcagcccaggccctggagccggcttctccgctgggaggggaggcttcccaccgtggtcgctgtcctctgcgggctgcaatgtgtccccggcggcgtcccatccgaagaattccggaccggtccagccg

SEQ ID NO: 444813 - DNA, 842 bp, Homo Sapiens
tttggctatttattatgctgtattctctgagagtttttagctataattagtcaaagatctattaaagatgagatgcctggagagaagtcaaagtagagggagaaaaggtttgtatgcaagaaaagctcttaaaagggcccacattggagcttcatagcgtctccaaagagtcttaggactcaaaggattaagcagctaatgaaatagcacacctaattaataacaacacagtgactcataataaaattattgtttttatcattttggagagagaaaatagggggaaaatcacatacattaacagtccatgatgccaagctcctgaagagtaaaagtttcccagctaagagggatgtttccctcagtttgttttatcagtactaataaaaagcatctgcccctttaccagcaagtcctctactcagaaagaactgacccacgcaagtctgggagagtgactagttcaaatgtgcagggctgaagcttccaaacacagccactattttctgttgtatatcttcatctcaatggtgacatggccactgcccaaggaacttgtggcagggatcccaaggtgaggcagcaacagatgtctgtgaacattgtgcgttaacagtggctcagagcctctagattcacagctctgcatggtgggcttctgccttcaacaactcactgggcttcatgaagatgccttccatggctttccagtagttgttctgacttggctgggccatgccatgcacctctttttgcccactgataggtcgaccatattgttctcctgtgacagacagcagtacctcagtggaagagtgtttgaaaccgaccttaccatcttt

SEQ ID NO: 444814 - DNA, 1328 bp, Homo Sapiens
gttctctctcccgctctcggaagctttcgtctcgtgggtgcgaaaggtaaccgaagcggctcaggaaggcagctgtcactgagcccctggaacagagcgagagtatcgtaagtaaccaggctcagccggtttctcaggccgctctagtcaaataaaccataaagatcagactcgggcttcttcacttccttctctccgtggtttcgccattagcttccggttccggggaggggccgagttttcttcgaagatttggggctccgcgatacagttaggatggctgtagtacctctgctgttgttggggggtttgtggagcgctgtgggagcgtccagcctgggtgtcgttacttgcggctccgtggtgaagctactcaatacgcgccacaacgtccgactgcactcacacgacgtgcgctatgggtcaggtagtgggcagcagtcagtgacaggtgtaacctctgtggatgacagcaacagttactggaggatacgggggaagagtgccacagtgtgtgagaggggaacccccatcaagtgtggccagcccatccggctgacacatgtcaacactggccgaaacctccatagtcaccacttcacttcacctctttctggaaaccaggaagtgagtgcttttggtgaggaaggtgaaggtgattatctggatgactggacagtgctctgtaatggaccctactgggtgagagatggtgaggtgcggttcaaacactcttccactgaggtactgctgtctgtcacaggagaacaatatggtcgacctatcagtgggcaaaaagaggtgcatggcatggcccagccaagtcagaacaactactggaaagccatggaaggcatcttcatgaagcccagtgagttgttgaaggcagaagcccaccatgcagagctgtgaatctagaggctctgagccactgttaacgcacaatgttcacagacatctgttgctgcctcaccttgggatccctgccacaagttccttgggcagtggccatgtcaccattgagatgaagatatacaacagaaaatagtggctgtgtttggaagcttcagccctgcacatttgaactagtcactctcccagacttgcgtgggtcagttctttctgagtagaggacttgctgggtaaaggggcagatggctttttattagtactgataaaacaaactgaagggaaacatcccctctttagctgggggaaactttttacctctttcaggagctttggcatcatgggactggttaatggaatggggattttctccccctatttttctctctcccaaaatggataaaaaccattaatttttt

SEQ ID NO: 444815 - DNA, 500 bp, Homo Sapiens
ggagaaagacaaaacaggagaaatcacaaattaagaatccatgatgcccagttcctgcggagttacacttcccagctaagacaggcaagctcctcaacttcttttaccagcatgaagaaagctatctccaccttcacagacgaagtgagtccttttccccgaagagaactgactaaagcctgggagagcaaccaaattcaaagtgtgaagggctgcaggtcccaaggcagcacgctcagaggacctggagcagggatcccgcagtaaagcagcagcagatgtctacaaacactgtgtggcgacagtgggctcagagtatttagagtcacagctctgcatgatgggacctctgccctcagcaactcactgggcttcatgaagatgccttccatggccttccagtagttgttctgacttggctgggccataccatgtacctctttttgtccacttatgggtcgtccgtactgttctcctgtgacagacagcagtacgtcagt

SEQ ID NO: 444816 - DNA, 1259 bp, Homo Sapiens
ttttttgcctgacaaagagcgtgggctttattgttcattcatgattagaaaagtgggtgctgggacccccgtggagggggttgggctctgcccggtcactgctggtgcagggtatatacaaggtctacggccctcacaggcctgactggctccctcttgatggccaccaagcccaggcactttagaccagagccagtggccatccgtagggccaaaggcagttctggctgtgcagggtccctgggttaggaagtggacagaggctggggtcaccagggcaacccggacagggcccacgggaggcagggacgctggtgctttgggagagggagagacatctccttgtccttctggaatgtcctgagacagaggctggccctggtcactcatccagcccatccacggacctgctgtgtgtccttgagtgggtcgagacccttctctgggcacaggtctctgcagctgtccagttctgaccctctgggctattgtggccagccccccatgtgccaggagggagctgcctcctgggaacagctgctgagagacaagagtggcctcctgcgtggtgcttggccgcagtcagagcaagggctggtccggggacatggtgcagatgaggccagcctgggctctggcagtctgggtagtgccatgtgcagggaggtggacacctcacaggtatggcgactcctggggtcgggcagctgagttgcagggcaggcagcatccagggtcctgggtgtcctactgctggggtgccatgtccatcaagggcttctggaccccgaaggccgtgatgaagatgttgactaccacgatgatgaacaccaggcccgtggccaggttgttgaggaagtccagcttggcgtgcttgtccgggttgttaaggtcgtacttgacaaggaagatgagcagcacccccacgccgatctgcagcacaagggagatggagatgaggaccaccaggggcacatagaaggcgaagctggggccctgttccacgacggccttcagctgggacgcgttggccatcagcagcgcgatgtccagcatgctctcggctgcgctcttcttgctggcgtaatggttcacgttgatgggcccgtgcctccagccccagcgggccggcgaggcgtccggggagccgggtgtgcccggaggcaggccgccgttgagctcgtactcctcggttcccgagtccatggtgcggccgcccaggccgccctcgtgccgaattcgccacccaggcctcgcac

SEQ ID NO: 444817 - DNA, 3514 bp, Homo Sapiens
  misc_feature (75)..(86): n is a, c, g, or t
gaacccactaccggaatcctagtatcggtgtggctgggcgctgcggtgcgagttgtgggtgggatggggtggatnnnnnnnnnnnntttcccctttctctttgatgctgtttcccatagttttccaggcggagaaggccctctcaggaagatggacccgggagaagaggttcagggcctcagttggcccccccagctgtagctgttgtaggcagacttgttggtctggggtttctgcgggatggagctggtctggctacgttgcccgctgcccgtctggccatcctgctgcaggtgatggtgaaggatctgagaatgcggctgctgatggggggtcagaatgtgcataaagggggcaggtgggtaggcagcagctgtggccggattgatggggcccccacttcctagggctgaaggcaagttgaaggaagcagcaggagtaccggaatgaaaaccttgtttctcaaaggactgctgggttttggagtacacagaacccgagatatctggcacgcccgtgttactggaggtgactgaaacaccagtgttgtatccatgagacccatatccactcggctgttggaaaggggtggccgatgcattcacactgacattcacaccatgctgcttggaagaggtaggagccacagggaacacagcaggcccatactggaaggtgctggggaggcccgggacccctgtatagtatggcaggctggtgtaactgtagccaggaggcagcgccgggttcaggaatgtctgctgcgtggtatggtgagtctgcgtctggttctgttggggttgggccaaggttgtggccggggctggggaggaggcatccccacggccgaactttgtgaggtcaccagaataagggttgctggccaggctaccatccctcccagtcagcggagtagtgggtgtgggaaatgggatgctgtagtaatccaatggaaatcttgtctgaagcatctgcaagtcatcataaccatatacttgtggcgggtaggcatgtaacagccctggagccataatatacggattaggcaacaacggcgggaccccaggagggaggttgggaggagcttttcctgaagtcgtagcaactgagcttcgagtcgaggctgtgacagtggagttgctgcctaggctgaggcccaggctactgccactattgagactggaggagacactgaccactgggggaggtgcagagactgtgctggatgtggtggaaaaagtgctggaggaagaatggagattcgcctcactctccacacttgtgtgcaaaagagtggatgtcgaagtgcgcccagaagatgttgatgatgaaagggtattctgctgcgtagataacgtgctgctgtgttgtgtggtggtagtatttggaatctcctcactgtggctcaagccacccaaggaggatgaatgctgattggttgtcgtcagtaaggaagctgcagataccgtttcattgagaggggggatgctagaagtggaaggtgaatcagatttcactgcagagcctgtagcaccttcaacagattgtgtggtctgtaactgcgtggcctgcacagaactgaagccattctttgcctgagtcaggtccttttggggtgatgaagagatggagctggggtaccgccgagtctgtgtggatctctgttcataaagagggccctgagcattattttgggaggtataggttgtcgactgaattgggccgctctgataaccagacttcctgactcctggttagatgaaattgtagaggatgattcactggccgtgctggtatacaggctacttggagcctggcttgaaagaggcgctcgtggtgggggtggactcataatcagaaaggacaggctctgacccaaactgcaatgccccaaactgcaggtttagccctgagatatctgctgagccaggcatctccacagccagagcaggaatcttagaagtcaaggaggcttttttcttctgctgtttcagtttctgctgagccggctgagggctagaggactggttgtctgaagatccaggcgacatctgtggagccgatgtggatttgcttggcagaggagaagacggaggtggaggtgcagctgtggaggtagccactgcaggtgacttctcctgaaggaacacctccatcatggttgaagatggggtaaaagcctggcgctttgtaaaggggctgtgcactgctgaatcacttgggttcttcaaatcatactgcaccagtgatggggattgtgtcgtcgagcccatgtcccaagaggaggtggtggtgcttccagactgagaatgctgagctgccaactgagccagggcttgggcagtcttgaattgctccaagaactgggagcctgtagtactgccgcctttagcttcaccgacatcaccaaatcctttccctaacatgctcaccatactgtgatgagaaaatgtgttccctgaagcaggctgtgatatggcagtctgcttcgaattactgaacaccagaggctgggccagagaaggagcctgagacggatccagattagatgaatcattctccattgtagatggtgtcttccccagcagaacagcaaggtcaattctctgaccagcagtgattgtcacattctccgcaggcagaggcactgaagacacattagaggcagtgaagatcttggtctcagaaagatcttcattccaatcttcagtcccccactcctctgttgcagtcctccatgcactcgtcccatcatctggttcaaagtggccagtgttgttccacgtattgccgctgctattgccatagttatcatcagtattggctggctctgcataatcagctgggttaaaggttcccattccttgagcagaaaaccttcctcctcgcctaccagagccacctctgcctcggccacggccccttctgcctctttctgttcctcttccagaaggccctccactcttggtgccatccaatccattttcctgacctcgaaactctcgtccacggctggcacctctcccccgtcttggtggcccaccacgtcgccgactatagtctctgtcccggtctcgattttctttgccttcctcattggattccgtctggccaccatccttctggcctgagactcccttcttcttcccgaccatctcccaggaatgcgtgtctgggtttccttccagaagaacattgatagctctgttgacatctccattgcagtcatgcaaagcaatcacacattcatcctggttcttgcctgtaatatcaatcaattgtttcaccttctcctcaaagtcagcatcattatggtccgaaatcatctgtgcaagtctaatttgttctgcagtggcctgtggccgctgcttgtgctgtgtctggttttggttttgaggttgttcccagtttccccgggctcggttagtgcccaccgatgtcatcatttacagtatatacaaataacagtatttacaaggtagaatactcagtctcctccacactgacaccccgg

SEQ ID NO: 444818 - DNA, 1208 bp, Homo Sapiens
  misc_feature (174)..(187): n is a, c, g, or t
aattgggggagaaattccaaggccctttaggtccaggcccaaggattcccctagggagaccagctatgggccatgttccatttaccctatctgggccccgcgccgccaaacgaaatggtttaggaaagcttcttggagggccgaggcgggccgaacatggtttggtttacggtnnnnnnnnnnnnnnggagctaaagaaataccacagtttattgaagactacaaatatttttgttacaagttgaaactacatgccttccagaaatcaaaagcaacagcaggtgtgtgcattgatgcttcgaaggtgctgcaccgcttgaacttgaaatgggtaagacagggtcagacacatgggggagagggaaatgggggaggggcaagttcaaaagcccagaaggtatccaccaactcatttccccaagccacgcaggccatggcctcagctcagcaggctctcctcagtggtctggtttctgaaacaagacttcagtgcaaatttatacacacacacaaaacacagcccccagccttgggccaaattagctctcagccgtccagaaatgcttgtaagggggtggatattttcttccagtgttgtatccatgagacccatatccactcggctgttggaaaggggtggccgatgcattcacactgacattcacaccatgctgcttggaagaggtaggagccacagggaacacagcaggcccatactggaaggtgctggggaggcccgggacccctgtatagtatggcaggctggtgtaactgtagccaggaggcagcgccgggttcaggaatgtctgctgcgtggtatggtgagtctgcgtctggttctgttggggttgggccaaggttgtggccggggctggggaggaggcatccccacggccgaactttgtgaggtcaccagaataagggttgctggccaggctaccatccctcccagtcagcggagtagtgggtgtgggaaatgggatgctgtagtaatcctagaaaagaggggaaaaaagagcagagattcaatgtcactcattccccagcatgagtactatttccacggaggaaaaaacagaagaatgtgagagttgtgcaatttatccagtcactaattaagctggctagagttagcacaaactccacattactcttgcatacactgtcccccctgcctggccatgagcacagtcagacaaggtctacgc

SEQ ID NO: 444819 - DNA, 876 bp, Homo Sapiens
aaaaaccacccccccttaaataaggaggcaaaggaaggtaatgaccagatccctccccaaaagccagtaaataggtccagctaattactatcccaacttccagagctttcacaggcatcgtccccttagcgtaagattatacttcattttacaatttcagagatccaaccatcttttgaaacctgtctgaaactagcccacatgccatataccagattacaacatttaggccagcttcactattacttttcctccttttacgaccaccaagacccagtgttcagatccgatggggaaagggatcaggaggattaagctgatcaactttaccttaaagcacagctccagaaacaagctcacctcctcagtatcacacactgccaggaaacttgggggcaaccaggtcccgtgcatttcatcactgtcattaccccggaagtcctcgatcaccagaaaaatcaccttctgtcatcttaagagtcttcatctgcttaagtacgccgggatctctgtagactaagtcagtcatcctgtaggccccactgcccacgctgtgccaatagctggtgtgctttttctcagtcttgatgggaccgttttatccgcctgtcagcccagagcgcagcgttgcgcagtccgaagcgagagaagggcgcggcccccgcgggctcccgcccctctcactgccgagggggcctttcggagctcgggcccaccgggttggaaggcccggctcctccgtgccacattcaccaccatctcgaggccgtgggaggaaaaacccggcgagtgcgcgccagcagcagcgactagcggggaacggcgcgcaggaaggcaggcagaggcttgcagctagtaagtcgacaccgggaatgc

SEQ ID NO: 444820 - DNA, 995 bp, Homo Sapiens
  misc_feature (911)..(947): n is a, c, g, or t
  misc_feature (962)..(962): n is a, c, g, or t
cccttattagagccagaactttgcagtccctccaaaccataatagttcactattactatccacctccagatcttcacacgcatccttccttagcctaagattatacttcatttggacaatttcagagatccaaccatctttgaaacctgtctgaaactagcgccacatgccatataccagattacaacatttaggccagcttcactattacttgttcctccttttacgaccaccaagaccagtgttcagatccgatgggaaagggatcaggaggattaagctgatcaactttaccttaaagcacagctccagaaacaagctcacctcctcagtatcacacactgccaggaaacttgggggcaaccaggtcccctgcatttcatcactgtcattaccccggaagtcctcgatcaccagaaaaatcaccttctgtcatcttaagagtcttcatctgtccatcattactacctgcttaagtacgccgggatctctgtagactaagtcagtcatcctgtaggccccactgcccacgctgtgccaatagctggtgtgctttttctcagtcttgatgggaccgttttatccgcctgtcagcccagagcgcagcgttgcgcagtccgaagcgagagaagggcgcggcccccgcgggctcccgcccctctcactgccgagggggcctttcggagctcgggcccaccgggttggaaggcccggctcctccgtgccacattcaccaccatctcgaggccgtgggaggaaaaacccggcgagtgcgcgccagcagcagcgactagcggggaacggcgcgcaggaaggcaggcagaggcttgcagctagtaagtcgacaccgggaatgcggcggggagaaagccgctctcgacgaattcgagctcggccgatttggcctgatnnnnnnnnnnnnnnnnnnnnnnnnnnnnnnnnnnnnncgccgccaccgcgtngagcccagtcgccctatatgatctatacatcct

SEQ ID NO: 444821 - DNA, 957 bp, Homo Sapiens
  misc_feature (42)..(42): n is a, c, g, or t
  misc_feature (205)..(260): n is a, c, g, or t
tccgggcgctctcgtttgggccgtctccacgccatgcgagancacggggcgcggagcgcctctgaggtgagcaattcatgttgtcgatgtgtttgtaatactatgggtggcggctgcgagggcccgcgcgctcgagagagcggagcggcgttggcgtcagttgtgaccctgccaggcgtcgccgccctacggcagccctcccgtnnnnnnnnnnnnnnnnnnnnnnnnnnnnnnnnnnnnnnnnnnnnnnnnnnnnnnnngcccgggtcgagcccgtagtcgccccgttgcgtcccccgcacctatgcggtgccccgtagggcctgattgtcccgcccaccacggcgtgtgtgccccgctgtctcatggcccacgtgatctgccacacgtgcagcccacgggtatacccgactttgcccctgatagcgtccgtgctctgggccaccggatgccggtgaaagatgagcttgtcgtcctcctttacaaagacattgagcgatcggtcgttgttgttccatgaatgcagcagctggacatcataggacacagggggcatgtccagtagcagatccagccgggtgggcttgcagtaatccagaccctggagctcctgcttcaggggcctgtacgtggggtccctcatgtccacagtcttgatcgctccagtgaccttctgacccatgttcgcccctggcttcaccttcttaccgactcccaaggctaactcatcagtctcgtggtctcgtctccagtattctgatcggggccagacagaattcctaatgagggctgccaggagacctctgcaagctgcgcagtgttcagtattgccgcgcccggggtgccgccgccgccgctgctctccaaggccgaggaggctcgggcgcccgggccgcgcccgccgcagggagcgaagtcgcctcctccccgcggccccggcgccggcgcctggagcct

SEQ ID NO: 444822 - DNA, 1173 bp, Homo Sapiens
ttcacccttgactcagactttttattgtactcaagtaaaaacctgctggacccacagcaggtggcacagaaaagaggtaggagggggtaaggacactgaggatcaggtctccagcaggtctgtccagtgtgcctcttctaattctgagtcttctacttctttctcagtgtccatctggcacagccagatcaggtctccccaaagcagtgacttctcacagcaagggcattggccctctaggggcagaagctgccctggttcttcctgaagaaactcctctgccaggcagatcacatgggcccttagcaggcagccagggtgggggcaacacaagggcccctcttcatcctggatggtctgggcgcacagggagcagcaggcccctggatccccctggtctggctcaggctccgcgtcatcaaagggacctgcgcggcgccttggggccggggcctggggcggtggaggcccgaaggccagaggcacgtgcggcggcggcgggaggcagaggtcctggcggaggtctgggcgcacccagcgcagcgtgagcgggaggcgagcccagggcggtgcgcgcagcatgtgcgccagcacgcgcaggtggaaagcgaaggctgtctctcctcgcaggcgaggccccacgtgcgccaggcggcgcgaggcgtgcgggtgctgccaagcccactcaaaccgaagggcggccacggaggacgggaagccgtgcacgacgagcaccatctcccagggccctcgcccgctggtccgccaggccccgccttttttgcggcccccattgtgctgctggacccgacgagcagtgttgacagtgaaccccacgtagacgcggccccggtaccgggggttcaggcagtagagcaggtagacgccgaaaaagcgccctggcctcgccgcgacccccgcgggacccatcgggccttggggttcgggaaccacagcagggggttgattgccgtgacctagggtccaggggagggctggatcgctagggctgcagggtgcttgcttcggaacaagctctcggggactatccggaggcagcctgcaggaagccgtagcgccggtacgtgcccctctcctgtctggaggcgggtgtagaagtccgaccgcggaagccagactgctgtccagtcggcgagcgcgtaccattcagcg

SEQ ID NO: 444823 - DNA, 941 bp, Homo Sapiens
  misc_feature (45)..(77): n is a, c, g, or t
ttgtataatcatataggggactggagtcacgcggggcggcgcatnnnnnnnnnnnnnnnnnnnnnnnnnnnnnnnnnatcaggccaaatcggccgagctcgaattcgtcgagagcgggagtggtacgcgctcgccgactggacagcagtctggcttccgcggtcggacttctacacccgcctccagacaggagaggggcacgtaccggcgctacggcttcctgcaggctgcctccggatagtccccgagagcttgttccgaagcaagcaccctgcagccctagcgatccagccctcccctggaccctaggtcacggcaatcaaccccctgctgtggttcccgaaccccaaggcccgatgggtcccgcgggggtcgcggcgaggccaggcgctttttcggcgtctacctgctctactgcctgaacccccggtaccggggccgcgtctacgtggggttcactgtcaacactgctcgtcgggtccagcagcacaatgggggccgcaaaaaaggcggggcctggcggaccagcgggcgagggccctggtgagagggggaggccttctgtgccgggaggaaggcgtcccagaggaggcggaccccgcggggcacaggcctgttgagaaggaccggccaggactgtgacagaggcggggcgtctgtggtggggacggggcctgtcgcaggggaggagcgtgacggggaggcggtgcccggggcatctccgcggcggaactcagggaaagagctagcaggcggcaggagtgatgaatccacgcagggatccagcataacggctctggagggcacgctgaggtcgggtggaatgcacgagacagaggacgcggagcacaggaggggaacctgagctgaaggcaaggcccgacgtgggccaagagcacaagggcacgccctcacgagctgcacgcggggaatgacgaccc

SEQ ID NO: 444824 - DNA, 1147 bp, Homo Sapiens
atattacccggggagagggggggtcttgctgtgtggcccggactggtttcgagctcctggcctcaagctaccctcccacgtcggcttcccagtgactgggattacaggtgcgatccactgcgcccagcccaacaacaattcttttctaattaaacaataaaaaatatctcacagtgacagttcagtcagccctgcactgtggtaaaggtaaaggtaaaggagagagtagtacatctccatttctcagctagagaaactgaggctcaaagggaaaagtcggtcatctgaggttgcccggcagctcagcagcagcaaagcaaggactccagcccaggctaggcacatcccatccgccctccaacaggtgtcccggggcttagggtggcgaggacccaggtgctgtctggaggcagcgggaagcccttgctacttgcccaggctcattgtggcagtggcggggagactccagtcactcagttccccgtagtctgtgaggtcctgagccgccacttggacgtagtacctggctcggggccgcacagccttgaggatgaaggacgtggcttcaatgggccccacccggtggaagcgcgcagctccctgacgcttgtaacggatccagtacttcagtgagaagatctctgggaagggccaggacccgggaggctcccactgcacctgtagctggcgctcagcgagggggcttaggcgcacgccttctggagggtcgggcttgatgatgtgctctgttatgaaaggcacgaagctgctgctggagccccaggggtggacggcggtgacattgagcacgtagggagccatggagaacagctggacatccgtgatggtgcagctggtggacgttggcgtctgctgcaggcagggccagctgtggccccgggcagccatgccgagcctgtacgtggcaatgaaggacacggggctggtggagtttggagcaggcggcagggtccaggagcaatccacggcgatcgggtaccgagaggctcggcattgcacccggggcagtgtcagagctgctgggggccctttccttccactgcagggcgggcagctggcccagaggacaagggccaggagaagctgcggggtcatggctgcggccagctctgctctcaggagtccc

SEQ ID NO: 444825 - DNA, 1362 bp, Homo Sapiens
  misc_feature (267)..(267): n is a, c, g, or t
ttttccttgggtagagtcttttaatgttgtcagaatatttccatccaacactttataaacacatttgattatcatgtctgatcctcgtgtcgggataggctaggttaggctccgtaacaaccaacacaatctcagtggattagcacaacacatatggactttttgtttgctctctcatgagtccgctgggggatccactcatctgccctgccggatccatgttgacagagcagccgtcacctgcagcatggctgttcattgtggcanagggaaagggcactgggtggtgttctgcatgagcaatccaatgctgtgctccaaagcctcgttctcatttcctctcatgttactggcaggatctgtcacaaggtcaggaagttgatcctaccatgtacctgaatatagtgaaattctctccatgtcaaagagtcactcacagatggaatagatgtcacagccaacagagccagtattgccagtcccacaattcccagagacacataaatctccattctccaacatcatgctcaatccaggcatcttcttaattttgttggacctgttgatatgccccagtttagcaacttgtatctgtaggatcgcctcattgggtaagacagactataaattgcatgcagtacagcaaaaaagaaactgagaagcccaaactgctttcttgttaacatccacttatccaaccaatgtggaaacttcttatacttggttccattatgaagttggacaattgctgctatcacacctggcaggtaaaccaatgccaagagagtgatggaaaccattggcaagactttgttgatgaccaggattggaattttataaaaatattgttgatgggaagttgctaaagggtgaattacttccctcagaagagtgtaaagaaaagtcagagatgctataatagcagctattttaattggcaagtgccactgtggaaagagttcctgtgtgtgctgaagttctgaagggcagtcaaattcatcagcatgggctgtttggtgcaaatgcaaaagcacaggtctttttagcatgctggtctctcccgtgtccttatgcaaataatcgtcttcttctaaatttctcctaggcttcattttccaaagttcttcttggtttgtgatgtcttttctgctttccattaattctataaaatagtatggcttcagccacccactcttcgccttagcttgaccgtgagtctcggctgccgctgctgcccagaggtgcgggccccacgcggcgcctgagcctccagagcgcggagcctccaagccagctgcaggccccgcctccttgtccgttgcgcgtccagcgccacctgctggcgccccgcgtccgcccgct

SEQ ID NO: 444826 - DNA, 1114 bp, Homo Sapiens
gcccttggtgtggggacccccccgcttgggcaggaccaaggaaggcaccgccccctggcatgaccttgcattttaaacattgtttccagctttgcccgaaaccccaggcagtttctgggctggtgctcatggtgcagggtgttccctgactgcctggccaggagggtctggctcatcccaggccttctgcaactggatcttgggcctccagcttgtctgacacctaaatgggttgtcgcgacagaagcgccccatctcccatctcagcgactgcaaaggtgacacagatgtcatcccatctgcttgtatcccacaccctgctgcccccggtgctgtgactgaagagcctgggatgactgcccatatgaatggtccaggctctgctccatcgccactgagtgggtgttgggaggtacagtgagtgacgtgatttcagttcttggtgagcaaagagcatgcccctgtcctgaccgtggcctcattacctctccacatggtccacgttgcctgccacgccaagtcccccgagggtgtaaatcttcccatcgtagacgaggctattgtgccgacagcgggggactgtcattctggagacgaggttccagttatcaagcagggacatgtagcaccagacatcagccagcgtcacccctgattccatcccacctgagaggtagatgttgtcccctgcactcactacactgaagaactcgcggtcatagaagggcagcgaggccaaggggtaccacttgttgttctgcgggttccagcaggtgacggccaccagcgagcgctgggtcatccccaccatctgacggcccccaaccaagacgatgacctcagccacacctgcagagaggcgcggccgggttcggggcgtctgcatctcctggcgggcgtggggcagcatatggtagcgtttggcctcgttcaccaggtcccggcaggcttctgatgacttgatcagctcttcattgtcaaccacattgagcaggtagctggggtggatgaaggggaggcggaccacggccaggagctcagccgcgtactgtgcgcgtgtcgcggggtccttcttgatccacttgatgacagtcaaccgggtaccgagctgatt

SEQ ID NO: 444827 - DNA, 1045 bp, Homo Sapiens
cggtccggaattcccgggatcgacgtgaacccagaggacccgggcgcagatggcgtgctggccggtatcaccctggtgggctgtgccacccgctgcaacgtgccgcggagcaactgctcctcccgaggggacaccccagtgctagacaaggggcagggggaggtggccaccatcgccaacgggaaggtcaacccgtcccagtccacagaggaggccacagaggccacggaggtgccagaccctgggcccagcgagccagagacagccacattgcggcccgggcctctcacagagcacgtctttactgacccagccccgaccccgtcctctggcccccagcctggcagcgagaacgggccagagcctgacagcagcagcacacggccagagccagagcccagcggggaccccacgggagcaggcagcagtgctgcacccaccatgtggctgggagcccagaacggctggctctatgtgcactcggctgtggccaactggaagaagtgcctgcactccatcaagctgaaggattctgtgctgagcctggtgcatgtcaaaggccgtgtgctggtggctctggcggacgggaccctggccatcttccaccgtggtgaagatggccagtgggatctgagcaactatcacctaatggacctgggccacccgcaccactccatccgctgcatggctgttgtgtacgaccgcgtgtggtgtggctacaagaacaaggtgcacgtcatccagcccaagaccatgcagatagagaagtcatttgacgcccacacgcggcgggagagccaggtgcggcagctggcgtggatcggcgatggcgtatgggtgtccatccgcctggactccaccctgaggctctaccatgcacacacgcaccagcatctacaggacgtggacattgagccctacgtcagcaagatgctaggcactggcaagctgggtttctccttcgtacgcatcacggccctgcttgtcgcgggcagacggctctgggtgggcaccggcaacggagtggtcatctccatacccctga

SEQ ID NO: 444828 - DNA, 2260 bp, Homo Sapiens
  misc_feature (123)..(134): n is a, c, g, or t
tgagttaatctctaaatatatgtacacagcaatgtacacctttgaataaattaataccaatttgcatattctgggaaccttaaagcttatttacacaaattaccatttatttcataaatatcnnnnnnnnnnnncccctggggactcaaggcagaagtgccactccctccgttgaccacggctgggaggggtgcctgtctcttcagggaagaggtggggagactaacaggttccctcccagctcaggtctacactgacttcagtcgtaactggttccagcatccctcaacccagttttatcacgcggtctaggcccaaggtccagggctctgggactccctccgatgctcccacccctggcccctgcaccttctggcttctgcagggaccgctgggccctggatgaggcctctcccacctcgctggaagaccagagacaccttcggatgccaccttgacgctggagcggatctggacctagcccagcagctcccaagtgactgtgtttccagcagcctgatccttgttgaggcccagggaagtgtcccaggccccgacttgccaggacgaggctctattccgggctgctgcagcccacttttctcctttatttaaataaatactcattctgtgctgtacacgtcccaagcagcaggggcaggcagcccgggtggcctgcgtggcaggggagcagctgggcagcccctcacttgggcgactcccggcctggggagagggctcgctggctctccagcccactcaccagtctctggatgctctgcagttcattggccgcctccttggccgagccactgggcgacagggcaccgcgggatggggcccctactttgcggagagccagctcgggcagggggctaggctcccggctgtttccaccagcggccttggagccctcagaggccagcccggtggtgaggaggctagtgctaggcgggatggtgaccgggatctgataggggctgaaacgcagtcggggccgggcactgcccaggaagggactccgggagagggagccggcggctgcggcggcggcagctgcagcactagtggcgggcaaagccgaggcggctgcggctgctgctgctcatgtaggtgtaggggtaggggaagaggcctccgaaagtgggcattggaattccctgagatgccagcatgtgctgggagaggtggaacgggaagggcgcggcggtgcttgctgcgctggccgcgggacccagcccgcctgcgtccagccccgcggcggtcccaggcccgccacctccgccgttgccgccgcctgccaccgaggccagtaggtgacccatgcccatggcggagaaggcgccagggcccatggtgaactgtccagggtgcaggaagagcggctcgtgccggctcccagcggcccaaagaactgctgcccgtgcaagtggctggaaaaggccaggccgggcaggtgtccggcgcccaggggggacgcactgtctgtctgcaccaccagcggcgccaggccctgctccttgccctcggccgcctccttgcgcccctcgtccttcctccgagcttgggcgcgctcgttgtccaggctcctcaggccgaaacgggccttccccgccggtctcggccggctccttgcccctctggggactacgccgctcccgggcgcgttcgggttcggtcaagcgagtgggtctggcgctgtctggagccgggctgcggcctagcggcgccgccgcacgctcctggctcaaccgctcaggctcggggtcgctgtccgcggcgcacggcttctcctcagctcgggcccggtgcaggcgcagcggactgggcgctgcgcccggggaggtgggtggttcccgcgcggggggagggtcgcacgacgaggcgtctgactccgcgccatcgcgctcgggtttgcagtgctcctcgtacaagcgtagagacggcagcgtcagctgcttccttttctcccgccggccgttcccggtgtcccggaagcccttggcaaacgggttgttgtcgatcttcagctgtgtgatcttgtcgattctggtaggcagtgacggcgatgaagtcggtctccgggaacacgtaggtgcggaaggtgctgtaaggcagcttcaggatgtcgttggctcgcactatgtggaagcgcggctggtacttgtgcatggagtttaggatggtctcagaatgggcagttccttttaccctatgaaacaccacccccgttcgctggggccttgcatcccgggaattc

SEQ ID NO: 444829 - DNA, 910 bp, Homo Sapiens
  misc_feature (714)..(714): n is a, c, g, or t
gacgcctgggtggcgaattcggcacgaggcgaccccaaggtgacgctggaggccaaggagctgtgggaccagttccacaagctaggcacggagatggtcatcaccaagtccgggaggcggatgttcccccccttcaaggtgcgagtcagcggcctggacaagaaggccaagtatatcctgctgatggacattgtagccgctgacgattgccgctataagttccacaactcgcgctggatggtggcgggcaaggccgaccctgagatgcccaaacgcatgtacatccacccagacagcccagccacgggggagcagtggatggctaagcctgtggccttccacaagctgaagctgaccaacaacatctctgacaagcacggcttcaccatcctagactccatgcacaagtaccagccgccgcttccacatagtgcgagccaaccgacatccctgaagctgccttacagcaccttccgcacctacgtgttcccggagaccgacttcatcgccgtcactgcctaccagaatgacaagatcacacagctgaagatcgacaacaacccgtttgccaagggcttccgggacaccgggaacggccggcgggagaaaaggaagcagctgacgctgccgtctctacgcttgtacgaggagcactgcaaacccgaacgcgatggcgcggagtcagacgcctcgtcgtgcgaccctccccccgcngggggaacacccacctccccgggcgcagcgcccagtccgctgcgcctgcaccgggcccgagctgaggagaagtctgcggcgcggaacagcgacccggaacctggacggttgaacgaaggaacctgccgggggccccccctagggccccaacccggcttccaaacaagggccagcccccactcgctttgaccgaaac

SEQ ID NO: 444830 - DNA, 981 bp, Homo Sapiens
tttaacatgcacaacctgccacttttaatcagaagtccatgtatgaaatccaggctggttttggatgttaacatggagcgaatgggatacatcaaagaatggttggctgcttgttttaaagaggtcccactggtgacaggatggtagtggcgatggcagtgaggacagactggtaaagggaaaacccagaggcttgtggggagaaagggcttttgtagttaggaagagacagaggtaggcccctcagccagctccagcaggatagagacaacaacatacagcgcacagagaattcgtgcctcagggtcatagtccatgtcaggaggactgctggccagctcatcccagttctgctccatgacagatttcacctggtccttcaacagaggaagggtccccttctccagggcctcagccacaaactgctgctcttcagacagctctagcagggcatccaggaagtccagaatggcttttgcacgcgcttctaccaagaccccagcagcattaaaaaggctgcttaggagaggcttgtctgggtcctccatgtgtagctccccggaaatcaggacctcagatactctttgctctagatcctgccgaatatcctccttgccgaggcacttagcgagggagtttagcacatcttttctcttctcctctgtcaggtccttgaggacactctccatgtcctccaacttctccttcatgtttctggaatcctccgaacccaaagactttcctaaacaggatgaagcaccatccttctcttgtgtttatagctgagatggccctgagagatctggctccaaaatttatattgccggtcgcttttcagggtttcctcctttaccgtctccagagtttctgtcaccagatacaggttttctctcgtattaattgatcggaatgaaaagggtagttccctcttcagcttccgataaacttgaagcgactcatgactgcgcatggaggacctcc

SEQ ID NO: 444831 - DNA, 1372 bp, Homo Sapiens
gggtactgcttcctcgtcaagaacaaagaggttaacttcaggggtcacaaaatgtttgcagaagggatgaatacctccaagggctttgcaaccagctgcggatgcctggacgtctaattgctcaaaggtgttatctgagagctgaagaaacagactgtttcaccctggattctttgaaaatccccctctcttattctctagcagaataaaaactccctgctttttcctttttacacacggatttgagagatcttgttctcccatccttctggcttttactaaattgaatgtctttctctatccccaagcaccagtatgtcagtgtttgacatcaactgcaccactgatacacgagtcggaatttgagcttctacaagtacattccttcctaggccaaacactgacgctaagaaatacgagaacagatcatcgctaaacagcagctgaaggtcaggcgaactgactcgctgcggaatctgcctttgcacgtgatcagtcggacgtctacacccgcagccgtcttctgtctccgcctcaccctcaggcctgacggtccgagtggagctgcgggacagcccgaacctccaggtcagccccgcggccctccatggcgctggtgcgcgcactcgtctgctgcctgctgactgcctggcactgccgctccggcctcgggctgcccgtggcgcccgcaggcggcaggaatcctcctccggcgataggacagttttggcatgtgactgacttacacttagaccctacttaccacatcacagatgaccacacaaaagtgtgtgcttcatctaaaggtgcaaatgcctccaaccctggcccttttggagatgttctgtgtgattctccatatcaacttattttgtcagcatttgattttattaaaaattctggacaagaagcatctttcatgatatggacaggggatagcccacctcatgttcctgtacctgaactctcaacagacactgttataaatgtgatcactaatatgacaaccaccatccagagtctctttccaaatctccaggttttccctgcgctgggtaatcatgactattggccacaggatcaactgcctgtagtcaccagtaaagtgtacaatgcagtagcaaacctctggaaaccatggctagatgaagaagctattagtactttaaggaaaggtggtttttattcacagaaagttacaactaatccaaaccttaggatcatcaagtctaaacacaaacttgtactacggcccaaatataatgacactgaacaacgactgacccagccaaccagtttcgaatggctacgaaagtacattgaacaactctcagcagaactacggcgacacgtgtctatcatagcacatgtc

SEQ ID NO: 444832 - DNA, 1221 bp, Homo Sapiens
cccccatggaagtttccatttgtttccccggaaactttgccgggggtttcaacccggcatttggggggaaacgcttttaatggcgggcccagcaggcttgccgttgatgccttgggggcagccaggagactccttcctggggagtatgtttgtagaacatcccgggtttcttgtagcactcgggcagcggattccttcatctcttgggtatactggatatccatcatgaagttgtgcacgtgcttctctgccttgttaaactccagcttccgggccaccacggccaccagcagggctgtgcagcagacacccatgactccagtgcacaggcagacgatcttgccccacatggtgcccggcaccacgtcaccatagccgatggtcaggaaatgtgatggggatcagcccaaattgtgtctgaaaggtgcccagtgggcattaacagcctgcctctcgggccacggacagcacccaggcggtggtcagccagaggccaagcgtgaggccgagcagcaggcggccagggtgcgtgttcatgtaaagcttggccacgaaccagtggcggaagcggacttgattgagagcgccgatgctgcggtaggaagcgttgagcaggacgccgctgcgcaggagcacggcgcggggcaccaggtagagacgcagcagcatggccagggacagcagcgcttccccttggcccaggaatcccggccagggctgcggggaggtcagcggcgcccctaaatcctgcacgcacggcgggccccgcacgggcgccgggtgcagcccacacaccaccagctccagcacgatctgcgccgcctgccgcccggtcagcgccacgcgccagtcccgcagcccgttgtcggtcatgaacagctggacctctttggcatgaaaggccacgatgaggcagaggagtaagaaggtggaaatgctgatcgtgcatttaaccaggaacaggtagagcgcccacgagcaccccccgaaccacagcatctctgcatgcagcaccatgagtccaatgccagttcctgccagcaccagtgcccagccggccagagacttctcctgctccagcaagcgctttcggcgtctcaaggcccccaggccaagcaccagatccccgcccatggcccccggggtcttggggctcagccagcttcctgcccagggtcccccacctcgcagcacgcacagggcagccactgtggcttgcag

SEQ ID NO: 444833 - DNA, 628 bp, Homo Sapiens; identical to SEQ ID NO: 322987

SEQ ID NO: 444834 - DNA, 1661 bp, Homo Sapiens
  misc_feature (17)..(17): n is a, c, g, or t
  misc_feature (64)..(64): n is a, c, g, or t
  misc_feature (308)..(348): n is a, c, g, or t
cctgtcggtccaccctncgcagcctcgagcccagtggaaagacctgttgccaaatcacagatgnaaaagttaacagatgggagccacgtggggaagaggggctcacccaattccccacacatttcccggagtcgcagtgagcagtgctggtgtgaagccctcctactaatatacatgccaaggatggggggctggagggaagcggggacatctgccaacaaaagagcaagatggcacactctatttcccattctaacactgatcctttctgggaggatgaaagaatcacagataatgtgctcagagannnnnnnnnnnnnnnnnnnnnnnnnnnnnnnnnnnnnnnnnaatgatgactcctaaacaaaggtgtgggaaggaccctcctccacccaaacggactggttcacaggcccccttaacactctgactcatggtaaggcttaggaatgagaaatagaggctcatggctgcaagactgaaattctgttcccatctttccatatgctcattaaaatgagaaatgcaactcttcttattccagcatggtaatcaaacgcccaagatatgcagggccaggctactgtgctcagacaaaaactctaataagcattttgctggaagaacttggtgaggtgttaaccctaggaaaatgtgggacaaacacttccttataacagcaaaaatgtcttaagacctactctattataacatttgcaaacacacattaatttacatactaaaatagtaaatgaaatttcttggaagttcaaaaaaagatctttcaaatcttttcatcacaatagagtggaaatccgtctgtcttcagagttgtcgaacttttctttctgtgctttttatgttgacatctaacttgtccactttggttgtcagccggtcaagaatgtcatcttgctcctcaatttctgtctgcatccccagggctatgtccttcagacgacccagtcccatggacagctcatctaggttgctgtcgatcttctggtgataggctcgaaggtgtgggttctttgggtaagcatcagtactcatggcagaaccagcccctctggggacagggtctgtatcatccagctttctaaggtttgggtggctggcctggtactttgcttcctgttctttacttgtacttatagcttctttcaatctgttgttgggctgggaggtgagggtgccattctgttcaggtggggtctctactggtttggatttgaagtaattgaccagccccccaaacacgctcttaatgctattgatgtgtttctggctgatcttcaaatcttggtccatcttgtccaccatcttctctgtgcgctccaggactcctcgctgacgggcgagctcctcggaagaggcgaccccaaccttctcggactcgtacatgagggccagggacctgctggtgctggcggccgtggcctcagccctgcggaggacctcctgccgcaagtactgctgcctgtccgcgggcgcgtcgggcccgtcggggaggtctcgggcgtccctccaaggggccggccgggcgccttcgtcctccccgtcgtcgtcgaacggattgtagctcttagggtaagctgacatggtgccggcgcggctctcagcctcgtgccgaattcgccacccaggcctcgctaccttag

SEQ ID NO: 444835 - DNA, 872 bp, Homo Sapiens
  misc_feature (90)..(90): n is a, c, g, or t
  misc_feature (95)..(95): n is a, c, g, or t
  misc_feature (97)..(97): n is a, c, g, or t
  misc_feature (99)..(99): n is a, c, g, or t
caaggggtcccaccggcggagaatttggttgccagcccgctgctgtgccagggaatgactggggcatggggcaggcgccccgctcctccnccagntngntgctgcaaggccatgcccatattataccaggcactgatgagcagcttttcttcctgctcccgctgacttcgctttttctcaaagtccatctccaggtgtcggatgcggacatcccgttctcggagctgtgtcctcagggaatggatttctggaggtgcccccgcagctggcccgcttgcttgggttccatggtcttgcatgaccatgcgggccttgtccacgtagcggcggtatcgctcctccatggcccgcaagtccgcgtccttcttctgcaagttatgctgcagctcctcgatccgccgggctgtgctgctgtcagtgggtggctccagctcctcaatgtactcccgcttcctctgcaactccagatctgcctcatgaagcttctgcaaatgttcctccagcttccttttcagcaaaatggaatcttcagtcttgcccccctgctcctgcagggctttctgcaggtcctccacctgggcccgcagctcggatagctgctgctggttcagccggtgctgcgtctccaacccgtggcgcgcgcggttggcatcctccaggtggcgctgcagctcctcctgccgctcccggtcggccgcctcctgcctgcacagccgcttgttctccagctgaagccgcaggagcgtctccctgcagacccgggaggagagagcagggccagggtcgagtcacctcgcaggctcgctggggctcagggagagtggagctaggggcgggacagagccctggggaagagcccagccagaccatgg

SEQ ID NO: 444836 - DNA, 1488 bp, Homo Sapiens
acatttttagtacagtcaacttttatttttccattgcctctaagttaaaaagtatttgcattataatagttcacactgtttcacagtaaaatagtttcagtaattttccaccataaacaaggcagacttttaaaaacaaaagagtctgttagaatccattcaagctgttggcataatccacacagtaaaagcagctgaatagatcataaatatatttgtcaatccttggagcctactactgacacatacatattagctagatacgtggtagctccagggaagtgctcaagagaggcagtccatttccttgtgaggtgtagctatctttcacaatgaaaaccagccgtgtcctctttgtttcttgtggatttgtatcttctcctggaagaggcgagagcctagatcataggcccacaccgagagcaggctgtaccccagcctgaccattcccactcttgacatctgcttggcagagaagatacctggagataattttgtgaaaagtgtagcggaagtctcggttccggtaagcatagacaatgggattgacaactgaattggcatgtgacagaagaatggccatattcattgcccacttgggcttatttttaccctgagctggctggaaaagagtgacacagttaacagcatgcacaggtaaccagcacagggcaaaattccccacaatcatggccagtgacttggctgcatggatctcccgctggaggttggtcctcgagtggtccatcagctcagtgcgctgaagctgcctgcaggccaccaggaagatcttaatgtagatcaccagcattataagcagtgggggcagaacacacccaaagaaattgaaatataccatgtagctcatggggaccacattctcaaagagacacttcacaaggcagcagctttcattcgtggttccatcccagggttctgtgcagttgttggtggcactgtctttactgttccaccccaggaatggagtcaatccgatgccaaaggcaaggacccagaggacagcaatgacccctcttgctcgggtccccgtgaccaaacttttatacctgagcgggacacagatggccaggtatctgtcgactgccacggccagaaggctgaagatggagctctgcgtgagcaccagcacgaagcaggcgaggaagaggcagccgtagaagtcagtgcagaagcccaggctgatggtgatggcaaaggggatggcgaagagccccacggccacgtcggccgcagccagggacaccaggaagtagttggtgggcgtctgcagagtgttcgccgtgcccaccgcggcgcacaccagcacgttgcccgccaccgaaagcgcggcgatgaccagctccagcgccacgtacagcgcgtcctgtgtctccagcagcatggccgggccagctgggccccgggcgccccctaccgaagggcgccgggcgaggggcagccgcgtgagacccgccgggcatggccata

SEQ ID NO: 444837 - DNA, 1506 bp, Homo Sapiens
  misc_feature (736)..(744): n is a, c, g, or t
  misc_feature (841)..(856): n is a, c, g, or t
  misc_feature (877)..(933): n is a, c, g, or t
  misc_feature (1002)..(1112): n is a, c, g, or t
  misc_feature (1233)..(1281): n is a, c, g, or t
  misc_feature (1398)..(1458): n is a, c, g, or t
ataaaaatgagtctgtgggtagccctagtgtttattttaactgtgagcttgtaacagaatgtgacaaagatgcaaagatgggagaggaaaaaagggtaaagggaaaggagaattaaggaaataataggagttaaaaacacaagtagaaatctcaaagatttgcagtgcaagtaatagtaatgcaagttggaattctagttctcaagaaagagtattgagaagacttttaaaaaggcaagtagctttgtaaatgatttctgtggaaatacagatgaggatttaaagatttcacatatttgcttcaatttttattaatatatgaagccatatgtttaaagagatacttgaataattggaattttaagatactggtgtaaaagtgtttacagaaacatctttgttcaaagaagaacctgagagatctcatttagttttatgttttaaatttatttttataatgctttattaacttacctaatgctcagaggggggaaatatgtatcaaattaaatgaaggtagagcaataaaacccactggattaaagagctctggtttgtcatcaggattataattcatatcttactttgagaagatctttgagtaagaaaatgcagtgtttgaacctgaggaaaagttaaagtgtagaaaatattgtcttgccgaaggattttgcagtcctctgtcagtaacttccattgattaggcagacatattcaggtaaaaccctaatcattnnnnnnnnnttatcaatgtagaaagtaattcccttttttctctctgagatatacctcaatcacacacttccccacccccacttgaaacagacctcttcacttgtgnnnnnnnnnnnnnnnncctgaggtggagtcttccccnnnnnnnnnnnnnnnnnnnnnnnnnnnnnnnnnnnnnnnnnnnnnnnnnnnnnnnnntgggttcaagggattctcgtgccctcaacctcctgagtagctgggactgcaggcacgcgccacctgtannnnnnnnnnnnnnnnnnnnnnnnnnnnnnnnnnnnnnnnnnnnnnnnnnnnnnnnnnnnnnnnnnnnnnnnnnnnnnnnnnnnnnnnnnnnnnnnnnnnnnnnnnnnnnngtgtgagccaccgcacctggccagaccgcttcacttgtaaaagaaattaggctaataagaaggtgtagtttttgagaaatgaaatttaactttagccttttcactagtaaatagtcacatnnnnnnnnnnnnnnnnnnnnnnnnnnnnnnnnnnnnnnnnnnnnnnnnnttctatgagaatgagtttgtagctgtttcaaatcatgaagggcatagtatcccatgtgatagaatatttataactttttattagatgcctaatgttcaattaaggaatttggatgtnnnnnnnnnnnnnnnnnnnnnnnnnnnnnnnnnnnnnnnnnnnnnnnnnnnnnnnnnnnnnaagggcaatttttgaaacccccttaaaaattaaatacaacctggcccc

SEQ ID NO: 444838 - DNA, 980 bp, Homo Sapiens
ggggaaggccaggtttttttccccaaagggggactcaggggggcccatttctaaaagtgccctttaagttgagcccatttaaaaaggttgtttcaaaggggggttgggggaattgtgccaaaattttaaggccagccaaaaagggatttatttatccttggttttggcctttaaggggaaaagttaataaggggttcagagggggcccagtttcccaaggggttggttccaaaggggggccgctggttcttggtactcccgccacatgcccatttccggggggggccatattcaaacttgatccgcagctcgccaatctagattggggaaggatatctgggatccactcgatgatgaaaggtgttggctccttttgatctggggaagtgttgccaactttgagaaaagtttttagttccaagggtcgcagcactggttgtttttctatacgaccgtaggtttctgctatgctttctacttccactttagggcatttaaatagctcataagtcccatctcggttctggataaagctacgggtgatttccaagggcatctctggggtatctaagatttgtttaacttgcaggatattagtgatatgccaagtatacttggaaaaggttcccagtggcaaggcatctttccgaacaaaagctgtggtggagttggggagccgtttttttgcacttcctatagatattctttgttgcagggcatcaaaaaatgactgaggaatgtggaacaccaatggttctggtttgccatcaaactgatagtgcatggtttgatggatgcgttctgtgacactggccagccagtcttggaaggataaagtcacttgtgcctcatctaacagctgaccacaggcctgcctttttaacgaggaagcaaccacaggctttttcaggccacttttccttagattactgctcactgcatcttgaggcagtggtgaactgttcatctgtgcaccagat

SEQ ID NO: 444839 - DNA, 832 bp, Homo Sapiens
  misc_feature (221)..(307): n is a, c, g, or t
  misc_feature (393)..(444): n is a, c, g, or t
  misc_feature (784)..(784): n is a, c, g, or t
ggcaagaggcgttagtgtagcgccggtcatagaaagctctcaataagtgttgattacatttaattctcagagctcccttccaaggggatactgccaagaggtaaagctccaaacctctactcttactgagagcagaatttcttagaatttccagaaccatctcctatgcttaagtataaattcttgtcagacacagtggctcacacctgtaatcccgctannnnnnnnnnnnnnnnnnnnnnnnnnnnnnnnnnnnnnnnnnnnnnnnnnnnnnnnnnnnnnnnnnnnnnnnnnnnnnnnnnnnnnntgtttaaaaattagctaggcatgctggcacacacctgtagtcccagccatttcagaggctgatgcaggaggatcgtttaagtccannnnnnnnnnnnnnnnnnnnnnnnnnnnnnnnnnnnnnnnnnnnnnnnnnnnagacagctggaatccatgtcttataaacaataataattaatttttaaaaaaagtatttatcatccacaccaatcctggggaagctaacaatccacccttaacacatttcagttttaaaacctggctgatctggaatagaactttgtccaaattaaattgtagaaatgctatggattcaagagtaaacctgcttgattaatcaaacaagctggaaaactactgttaatttctttgttgtaaattgatcactgtaattttaccttacatgtcatttatattttgtatatacatgaacattttaatttccatagcttttaacaggttgacataatacttctcncatgcagtaagtcagtcattttttccacttgtaactgtaattcaataa

SEQ ID NO: 444840 - DNA, 1080 bp, Homo Sapiens
aagattctccttaaagagtctctattatagttacacaatatcaagacatgcatgtaggtctcgatcacaagttaaacattttaaactcatttttaattgacaatcttggaatgagaggtcacaaaagggcactaatttctatttttcaactgcagccaagcaaaataaacatgtgttgtggctctatataccccactctttaagctacctgccaggaagaagaatttcctcataaatactaagcaactttttcattacactgaaataaattgaagaaaacggagatttatttattcaatcagtttactttctgcaaaggtggtcattgtcattggtcatcttaaacctaaactgttgtattgaaaaatatttaaaatcaattaaaacttgaggattgtaagtaaaataaatattctgaaggataaggaggccaggcacttaagaccatatatacaatgctgatgcaggatcagccattacttcaagagtctcaggatcaacttcaaacagtcaaagttcttgtgaatggcggtggtcattgatggtggtgctcattgtcgatgtgtcttggcttactttacacaaaacaaactggcccaatttcaacgccgaattcctggtctgtgccgccaacatccacaggagcaagatctatgatgggcaagcgtgccacattctgtgttctatattcaaagacagtcttgcccacatttccattccgcttagagcaagtgtcttgaagaacgatataccggaatctaatatttccctctgctttgatatctaagtcatttgcccctttgagaaccacagcttttttgaggttcttagcttgatcgtccatgtatcctacactgtttttacagatgtaagtgatgttctgggaggcttcttttgataaaaggcgcaaaaaagtcatctgagtaatggctgtattaggtgattggtggtctccataagcgaactgagaccctctgttcatatcaagaccataccaaacaggtttattgtcaggagatttactggcccaccaggttttacgtggtacatccccgggaattcccggacccggtaccagcc

SEQ ID NO: 444841 - DNA, 1109 bp, Homo Sapiens
  misc_feature (315)..(315): n is a, c, g, or t
  misc_feature (1057)..(1057): n is a, c, g, or t
ctctagagtatgccccgagcctgcccatgtttcacttagccagctcctgtgtcctctagcgcgccgaatactgaatcctatgactacctaatggactcgcaccgtgcttcctcctggtcgtgagctggcgatgagcctccgttgtttatcccagcttgggcgcagcattgccttcttgtgatggtagatatctatgtgttgtacacaggtagctactgatactcatcttctactagtcgatacaatatagctgtggcccgatgatttgtcgtcttaaagctagatgattaatggatcgtgtctttcataccttcnttgcttccctcgagctgatgagtgtctagtgaagacacttattgagtcagatgaagcgacggcgtagggtgactacctgaggccacgggacagtgacttcccaagtatcctgcgccgcgtcttctaccgtccctacctgcagatcttcgggcagattccccaggaggacatggacgtggccctcatggagcacagcaactgctcgtcggagcccggcttctgggcacaccctcctggggcccaggcgggcacctgcgtctcccagtatgccaactggctggtggtgctgctcctcgtcatcttcctgctcgtggccaacatcctgctggtcaacttgctcattgccatgttcagttacacattcggcaaagtacagggcaacagcgatctctactggaaggcgcagcgttaccgcctcatccgggaattccactctcggcccgcgctggccccgccctttatcgtcatctcccacttgcgcctcctgctcaggcaattgtgcaggcgaccccggagcccccagccgtcctccccggccctcgagcatttccgggtttacctttctaaggaagccgagcggaagctgctaacgtgggaatcggtgcataaggagaactttctgctggcacgcgctagggacaagcgggagagcgactccgagcgtctgaagcgcacgtcccagaaggtggacttggcactgaaacagctgggacacatccgcgagtacgaacagcgccctganagtgctgggagcgggaggtccagcagtgtacgcgggcctccggggggtggtt

SEQ ID NO: 444842 - DNA, 1145 bp, Homo Sapiens
aaagtgaatgacaagcggttttatccagagtcttcctagtaaatccacgccggtcctgaagtggttcaggagcttccattaacttcgcctgtggatgacttcaggcagcctcgttacagcagcggtggtaactttgcgacaccttcaaaaagagcacctgcaaagggaagagcaggaaggtcaaagagaacagagcaagatcactatgagacagactacacaactggcggcgagtcctgtgatgagctggaggaggactggatcagggaatatccacctatcacttcagatcaacaaagacaactgtacaagaggaattttgacactggcctacaggaatacaagagcttacaatcagaacttgatgagatcaataaagaactctcccgtttggataaagaattggatgactatagagaagaaagtgaagagtacatggctgctgctgatgaatacaatagactgaagcaagtgaagggatctgcagattacaaaagtaagaagaatcattgcaagcagttaaagagcaaattgtcacacatcaagaagatggttggagactatgatagacagaaaacatagaaggctgatgccaagttgtttgagaaattaagtatctgacatctctgcaatcttctcagaaggcaaatgactttggaccataaccccggaagccaaacctctgtgagcatcacaaagttttggttgctttaacatcatcagtattgaagccttttataaatcgcttttgataatcaaactgggctgaacactccaattaaggattttatgcttttaacattggttcttgtattaagaatgaaatactgtttgaggtttttaagccttaaaggaaggttctggtgtgaactaaactttcacaccccagacgatgtcttcatacctacatgtatttgtttgcataggtgatctcatttaatcctctcaaccacctttcagataactgttatttataatcactttttttccccataagggaaacttgggttcctgcaatgaaagtctctgaaagtggaaacctgcttggtttccctaccacacacctttttggtttaagatcctgggttttatgaaccttcaataaaataaataaaatttcccctggggccctttcaataattttc

SEQ ID NO: 444843 - DNA, 1500 bp, Homo Sapiens
gcccgacgccaccacgccacaggccaagggcttccgcagggccgtgtctgagctggacgccaagcaggcagaggccatcatgggccaccaagccctcggcgctgtcccgagctgtgaaggtgtttgagacgtttgaagccaaaatccaccatctagagacccggcccgcccagaggccgcgagctgggggcccccacctggagtacttcgtgcgcctcgaggtgcgccgagggggacctggccgccctgctcagtggtgtgcgccaggtgtcagaggacgtgcgcagccccgcggggcccaaggtcccctggttcccaagaaaagtgtcagagctggacaagtggtcatcacctggtcaccaagttcgaccctgacctggactgggaccacccgggcttctcggagcaggtgtaccgccagcgcaggaagctgattgctgagatcgccttccagtacaaggcacgtggacccgattccccgtgttggagtacaccgccgaggagattgccacctggaaggaggtctacaccacgctgaagggcctctacgccacgcacgcctgcggtgagcacctggaggcctttgctttgcttggagcgcttcagtgtgtaccgggaagacaatattccccagcttggaggacgtctcctgcttcctgaaggagcgcacgggcttccagctgcggcctgtggccggcctgctgtccgcccgggacttcctggccagcctggccttccgcgtgttccagtgcacccagtatatccgccacgcgtcctcgcccatgcactcccctgagccggactgctgccactgagctgctggggcactgtgcccatgctggccgaccgcaccttcgcgcagttctcgcaggtacgcctgcggcctcggagggagcctggggtcacccagggctggcttggcgccgggggcgggcggggatcgatgtgcgggtgggtgaagtgtgctgcctgctcccgggccccgccaaggaggctcggcgccccgagggtcgcgcggcatagggcggggctggagcggagcctcccacggcctgtgctgccacctgccggctacctgggaacggcgcccacgggcttacgaatatggtcaaggagggctgcctggcggaggaggcccggtgtaggtgcggatcctgggcggccagggaaggtctctgccgcccgggaagtgtcccagagacccctggaggggctgctgacacccccggtgcccccacctcgagcattgacccagggcttgcctctcccccatccttcatcctccctgctccacaggacattggtctggcgtccctgggggcctcggatgaggaaattgagaagctgtccacggtgggttgacccctccctgcagggcctggggtgtgggttgggggtctgaatccaggcctcacctcttgccgtccaggctgaggcctctccttcacccacgaattgtgaccctcaacctggcctgcctgcatcctggcttggctcctg

SEQ ID NO: 444844 - DNA, 1048 bp, Homo Sapiens
gtcctgagtggcgccaagaattcaaacaaaaagacgccacagtgagagcaatcacgtcgggtgttcttgtcatccggtattttccaagcaaaacggtccacctgagtggataaatagatcatgaagagtcctagtatatactgtgtcgggacaagccaagatttgcgacgaccgaagttcttaacgtagaccgcatcaaccaacggggcccagagtaatttgagactgaagggccaaaagacaaaactgaagaaagcttggtctgtatagctaacatttttgctttgcaaaatgagtgggatgcttcccgccaagcccaggggaataccctgaagcacgtaaagaaagagtagtagcaaaatgctgcttagttcggcccggaagctctgtggggcttttaagaagtcgccagtgccggtatcccccagaagagcttctctgtccccttcccggcccgctgagtccaaatgactgtcatcccaaccgcctggcggcaggggaccgctcttcatatccagagagtgactgaaattccctggccgccgttgccggctgctgtccttgtgggagatggtgggtgacatatcagagacgatgcagagccccgtctgtggggggccgaggctgagcgttttggatccgtccagtcccaggtccaaggctgtcgcgctggaccagggtttcggtggttcacgggatggtggcagggctcagagcgataagggcacttcttactgcagcccggagtgctgaagccgggagccagtcctctggctagaggcccagaggatgcctggataggtgccccctggaacggcgtcaaagagcctgaaggagacccccgggcagcagcgccgggctcgaggctggaggtgtgtgccgtggtgccaggatggaaaccagctcctacctgcggcgggatcgaacggctggtctcccgacccaacacctccagctctcgctgctatcaatgcggcagagagcactttctctacaggactccagaaaaagcatataacttcctgcctcgcgcttcagaaagtccgct

SEQ ID NO: 444845 - DNA, 1228 bp, Homo Sapiens
ggcccggcattcccgggatctcacccgcaaggcggcacgagccggaatcttccagtctcaggctgtttgttcccccgcggggcaatgcgactgcgcgtcgcttcctgattggccgagagttgcgggctgcgtgcgcaggcgcctacctctgttacttagggcgggagcccggcgagggcgccggtgctttgttctgtctgaggccaggaagtttgaccgcgctgccatgccgaaccgtaaggccagccggaatgcttactatttcttcgtgcaggagaagatccccgaactacggcgacgaggcctgcctgtggctcgcgttgctgatgccatcccttactgctcctcagactgggcgcttctgagggaggaagaaaaggagaaatacgcagaaatggctcgagaatggagggccgctcagggaaaggaccctgggccctcagagaagcagaaacctgttttcacaccactgaggaggccaggcatgcttgtaccaaagcagaatgtttcacctccagatatgtcagctttgtctttaaaaggtgatcaagctctccttggaggcattttttattttttgaacatttttagccatggcgagctacctcctcattgtgaacagcgcttcctcccttgtgaaattggctgtgttaagtattctctccaagaaggtattatggcagatttccacagttttataaatcctggtgaaattccacgaggatttcgatttcattgtcaggctgcaagtgattctagtcacaagattcctatttcaaattttgaacgtgggcataaccaagcaactgtgttacaaaacctttatagatttattcatcccaacccagggaactggccacctatctactgcaagtctgatgatagaaccagagtcaactggtgtttgaagcatatggcaaaggcatcagaaatcaggcaagatctacaacttctcactgttagaggaccttgtagtggggatctacccaacaaaaatttctcaaggaggcctctaagacttggattccagccctcctagatgtggccatgtggggattattctaaccacccaagtggcagtgggcatgaagaaaaagaaattcctcttctgggcctttacctgcttgccagaaaaattgccgactgcatccagaattttcctggcccctctccttgggattccactcccaaaggcctttggaccccttacgaatttatgagccccccc

SEQ ID NO: 444846 - DNA, 1078 bp, Homo Sapiens
  misc_feature (92)..(92): n is a, c, g, or t
gaatacacttttgccaaaaaggttaatatttttccccaagggagttctcaggaacccctgggcaataattggggttttcagggttttgggtngagaagtttttaacccccgttggaaaatatttccaaggagtaacccgggtataaggaattctttccatgaaattaaaattcacatttggcttaaattcgataagtcctcttaatccaaaaaggtccaccatcaagttaaacaccctccagtttcattttgatgttcatagctgccagttcaggtacaaaattccggaaaaccatagggcacaggaacagtatcgatagtgtcactgcgactacacagagtacagttgtattttctgttgcgcatggcagaccaagaaggggggtgggcttctccaacagtggagagagtaaactgccacacttcacacacacatgggctaccgaccgatctgagcagttgaagaggcggtcatgaaggagaaaagatgtaccatgagctaaaagcgcatcccgttccatctccccaaaacggattccaccctggacatttcttcccccaataggctggttggtgactctgtctcgggctccagttgtccttacttgaaatttgtctgagaccatatggcgtaagcgctgataataaaccactcctatgaagatgtctgcttccagttctagcccactgatgccactatataacctctcggtgccatagaaattgtagccagcagcctttaacatctcaccaaagtattctaaggccgagttctcctctgagaagatgaagggtgtagcatcatggcagagaccatgcaaagctgcagacttcccggccatactctcaattaacatcccaatggtcatgcgggatggaaaaccatggggattgaacagaatgtctgggaccatcccactctcagtaaaaggcatgtcctcagccggccacaatctgcttaaaatgcccttctgcccatggcgactggcaaatttatctccgatagttgggttccgaggcactctcatagtgatgcaaacacacttgaattttccactcccagtgtcattactgcaca

SEQ ID NO: 444847 - DNA, 1138 bp, Homo Sapiens
  misc_feature (975)..(975): n is a, c, g, or t
tttttacctttttaaagtaacatttaaaattacttcctttaatataaaagaaacacacaagacacaaagaaagcccaataaagctgtgagtcccagtttggtagctgaggaggagtctaagaaaacaagccattcctcagtatccctgggaaagaaggggtgagaggacacagatatcaccaggccctgggtgactgcattgctggggccatgcagggcctagctctccaccaagggaaagtgctgattttccttgtcatggtcctggccttgctcccatgctcgtcctccagttttcagaagtcgtccagttccaagaatggctccttcctttagttcactaacattttcacttaggggtgaaggccgcttaccctgtcgtagtgtcagggtgccaggggagttgtcatcctgcaggatggtgaggggggatctccctagtaccttgctgctgtttggtttccatctattgcgcatagaacctgaagatctgggagtctcagggtcccttgagggcttgtcggagctctggctggccacaggggtttctgtgggctgtcttgcttcctccttggaaacacctgtttggaggggaactcagtctggttccaaggtggcatctgttcctcaacagataactgggtacccagaggcaagtccaattcagaagataaaggtgcctctgggggcagaacaggctctgggggaagatttgatttagagtcttcagtttcaaatacttcactcagctgtttcaccagtgggcttggggggtctccactgctggtcttcataggtgtccgtgcaataccaagagtaggagagcggggatctgagtcctgggcatgtttaagaccctccagttgctcccctgctggtaggcctggctgtggagagctctccacctggatgggagtgcgcaggatgccagcactaggtgaacgggggtccgccactcgagccagatgcttgttngtcggcggaggccgcgctggtgtgactgggacgctcttgctgagcccatctcaaccaggagttgcagggtgggggcaagggccagcccgggacgaggagggaatgccgggccccaattccacctctggatgcacaacagctcgtggctcaactcccgaagtta

SEQ ID NO: 444848 - DNA, 1137 bp, Homo Sapiens
  misc_feature (20)..(20): n is a, c, g, or t
  misc_feature (157)..(157): n is a, c, g, or t
  misc_feature (173)..(173): n is a, c, g, or t
ggattctcctttcttcttgnggtaccctggcagggggaaggcatacgcagggcccacggagggggaacagcatttccacgcagatgatgaaggtctgtagcccggcggccagggtgccagccccccaggttgttcccgccgctgggtctccccctcncgggatgaccccgccncgcttcaggatggccagcagcagcccttgccagaacgacaggaagatgacggctttgatggtgaggaacttgaggacgggctggaagggccgcaggagcttccctggtggtgaagtagaagaggaacagggcgtagagggcgaggctgacggaggcgttgtagatgagggtcacatagaggtagccgctgcggacattgaagtcccccgtcgtggtatttgccaaatgcctggaggatgatggtggtgacggccatgacgggcttcaccaggcagaactgcagagtggcctgcttacagaagcgcaggaacccgatggagtaggtcatgccccggaggcagcaggtgccgtacaagcagctggacttgatgggctttccacgaatctcagccatgatggcgccctcgcctcccaggtactggaaacacaggctcaggaagctgtaaatgacaaaggcttcgtagcagtcccgcacagagtcgaagtagacgtagtactggtggtctccgaggaggaggaggctgagccaggagtcgaaggcgtagatgggcacgatgaggagcaggcggatgatgtaacgttgctcctgtggcacggtgtaggagcgcaggtgcagatagatctggtggcaggtgagcaccagggcagtccacacgaagatccccgagacgcctcgggccagtgcggaggtgaggaagagccagggggccccctgggagctgttccccatgtggtccatctgcggcccagctggcacagccggtggggggctgggctgcggccagttcactgacaccagggggacgccggctgtctccaggatccctgagacattactcatctttgctggcaggaagcacctggcccagtccagggaggcctggcctccagggaagcctagctggtcattctcatggccacgtggccccagctggaggccccactgtgggtcggcaaggccagg

SEQ ID NO: 444849 - DNA, 892 bp, Homo Sapiens
  misc_feature (674)..(674): n is a, c, g, or t
  misc_feature (846)..(847): n is a, c, g, or t
cagcagaagcaggtaacagctcttgcacctgtttctcttgcacctgacgtgtagctgctcctacccacctctcctggctgagccttgcctgatacagcagcccggaggcaccacttgcttcccgagtctcaccctcccaggcagctcctacactcaactgcttctctaggaaaggtctcacctccagcctggagcagtcgggattacagaaagccccatccttggcttagggagcgccatgacgactgaaattggttggtggaagctgactttcctccggaaaaagaaatccactcccaaagtgctgtatgagatccctgacacctatgcccaaacagagggagatgcagaacccccgaggcctgacgctggaggccccaacagcgactttaacacccgcctggagaagattgtggacaagagcacaaagggcaagcacgtcaaggtctccaactcaggacgcttcaaggagaagaagaaagtgagagccacgctggcagagaaccctaacctctttgatgatcacgaggaaggacggtcatcaaagtgaagggctgaggagggtgctagcacctcttggctccctgccatcagccagatctgagacaggaccttgccacgctggcctctttggccatagctgaagctgtggggccagttgatacctgctggcnaggaaatggctgttttttaggtttgtatttatgtgccgccacttttgtaaggcctgggagatcccagggtcctcccccctccccctggacacatacaaaggcactctagttcaaagggtgaaaagtctcacccaggaggaacagccctccttgaagcaatggcaggcccaanncagggaaggtgggcatgggcagggaaatggagttgagcccagaca

SEQ ID NO: 444850 - DNA, 1145 bp, Homo Sapiens
  misc_feature (148)..(236): n is a, c, g, or t
gggaaacaaggtttgggcccagtttccctttaccttaggggggccgccgcccccaaacgaaaggttttgaaaaaattttttggggggcccagggggccccaccaatgagggttgggttttttgggggttcaatgggaccccgtggtcnnnnnnnnnnnnnnnnnnnnnnnnnnnnnnnnnnnnnnnnnnnnnnnnnnnnnnnnnnnnnnnnnnnnnnnnnnnnnnnnnnnnnnnnncacaggctgaaggagttttatttcaaatggttgcctgatgcctgtggttggggggagccattcccgtggtgatcggggtacaacatggaattgggaactggtagggggtgacagtctgaggcatggtcatgtgggcctgggggtccagtccagccatggcatcttgggaagcagaggcacggggagtgagcggctgtgacagggatgggacaccaagaccggcctctacagtgcggtgacatggaggccctggcccccagctgccctggcgctgtcatcccaggctgcgctgccagcaaaggcgtgcaggtcactcagcagggcctcagcactgccccctgcgctcgctggtcctggggaggccgaggaccaggtcgccctccgtgtcactgtctctggcttcctcagcccgcacggggacctgctctgggctggacgcctctccacattgctgctcgccttccccagggtcagcctgcaggccaccatccgcgacgtggtcatagtctgtgtcctgctcatcctcctgtcgctcaaggtcattgtctgtggaccccagctcagctcgggcctgcagccagcgacctggggggctggcccagagcaggcgccgcgtgcggccccacagcgcggcacctaggcgggccgggtggtagtagccccctgagtcacggctgaggcggcgccaggccagtgctaggccagtggccagcagtaggagcagcagcagcagcaggacaacggtgacagagctggagcccacgctgtcctccgcgctgccacccgagcccaaggcccctggcagggccagcagcatcccgagccctaaggtgcagggcagagccattggtccgcaggcccctccgtgccgggcacccacctccagctctggctgtgtcgagcgagccc

SEQ ID NO: 444851 - DNA, 1221 bp, Homo Sapiens
gcatccattgaacatttatttgtcaaaggcctggtctgtgccaggcagcatgtggaggcactccctgctgagattgtagcaggacccctgctctccgtatccagtcgccctcagtagctgactggtccatcctccacagtccccagaggccgtctgatccccaaggcacaccttcagcaagggtcctggcaggatgctttagccagaattccctcccctgccagttcctctcagtcactctccatcctctgaccccacctgctcctgtggtgtcatggggcttctcccacactcaccacatcggccacgtgctcgatgaagatctggctgccaaatcggagcttctgaagcagctctcctggaacgtcagtgcgcagccgcggctgctgggccatgagctgctgcaggcgcttgtgcgggaaggcgtcttccgtgcagatgtagacggctccagcctccaggcctccgtgctgccgcgggaactgcacagccaggcagagctgcagcgccagctgggtcttccctgccgagctgcgtccggccagctcagtgatgccgtccaggggcaggccaccgcggagcagcgcgtccagcaccgggcagcccaggctcaggcgctggtgctgcgtggggaaccgctccttctgctggtgcagctgcagtgctgtaaggatgctgcttccccgcaagtgtaaggaggccgttctcagcaagtgccagacctcggggctggagaggttggtcagtctcttcaagtctggtccagaaaagtgtaaaacctcctttaccgatttcagtttggctttcttaattgcagcaataattctgggattcaggtccagtagatccaaatccattttgtcggtgggctggccaccaggatgaataacttcccaggaaagacagaacaatggatgcaaattctgaggcactcgccttcaattcaaagcctgtgggaggcccgaaccagggaagtgacagcagccgaggtgtccgtgtcatcggggctctgtcactctctggggcttggggatgacccgcgtgtttttggctgacttgactgaggcatctcttgcactctgcagtttaatttcccttaagtgtctccctggggactcggttggccaacggcagtccggctcctgaggctcctcctgggccctctgtgcacatcctgctgagaacttggtttaaccctcgtgccgaattcgccacccaggc

SEQ ID NO: 444852 - DNA, 876 bp, Homo Sapiens
  misc_feature (60)..(60): n is a, c, g, or t
  misc_feature (144)..(144): n is a, c, g, or t
  misc_feature (154)..(154): n is a, c, g, or t
cggaaggcgggggaactttaggttcccacccttgaccgattgcggcgataggttctcgtntgtgtgatgcactctcaaaaggggtgggttccccacccagccaggctcatagcaaagcactccaatgcacccacagatccaccnttctcattgntgcatgcgcccctcaatcatctctgggggcaggtagtccagggtgccacacattgtcttcctcctcagggagggcgcatgcacagaccagccgaagtcagcaatcttcagctctcccttgagccctaagagcagattttctggctttatgtctctgtgaatcaccttcttcccatggcagtacattagagcatctgccaactcctccatgatcgtggctgttcgctgctcgtcaaatgtgcagctcttctgcagctccttgtagagctccccgcggggggcatactctagaatcaagtagatcctcctccggtcataaaaatagttgtagagacgcaggatgttgggatgactgggggaagagacagaggaggcctcaggccataggcataaatagagctttgtcccagaggacgcccaatgctcaaagtcatcacacttgtgacagttccgcgcttaagatgtcgggatgtcccactgctattctccatcaccttctggccaggggcagctgttgggctggacattggagcggctcatgaggacaagtgtcagtatggggtggacaggctccttcacggaggacctcactggggcagggtgctcacggccagatggagccgtctgtcggccgtagggccaggggtaggagttctccttatgggccatccttagagagaaagggggaggagagctggggtccaaggcactgctactctcccg

SEQ ID NO: 444853 - DNA, 1479 bp, Homo Sapiens
  misc_feature (181)..(189): n is a, c, g, or t
atgtggtctgcttacacaagtgttccatagtcacaactttttccacattgtcactgtgtatacatcggcacctggtcgatcgttttatatcgcggtcatcctaggggcaccgtctttctaacaaaaacgctggtagacgtaactctctgttccccctctcgggtataatttaagtgatggnnnnnnnnnattttttattatttttgatagatttcagctttttttcatgagtacaaaaagcttcagcctttattaaacaaaggaggaggtagaaaacagataagggaacagttagggatcccttctttcccctatacatacacagacatacaaacacacgcacccgagtgaatgacagggaccatcaggcgacagattgaagggcagagggaggcagcaccctccgagagttggcccggacccaagggtgggctgagacctgggccaggggcagccgttccgaggggttatgcctgagcagtttggagatgaggtcctgggctcccgtgggcacagaagcggggaactttaggtccaccttgacgatgcggcgataggtctcgttgtgtgatgcactctcaaagggtgggttccccaccagcagctcatagcaaagcactccaatgcaccacagatccaccttctcattgtgcatgcgcccctcaatcatctctgggggcaggtagtccagggtgccacacattgtcttcctcctcagggagggcgcatgcacagaccagccgaagtcagcaatcttcagctctcccttgagccctaagagcagattttctggctttatgtctctgtgaatcaccttcttcccatggcagtacattagagcatctgccaactcctccatgatcgtggctgttcgctgctcgtcaaatgtgcagctcttctgcagctccttgtagagctccccgcggggggcatactctagaatcaagtagatcctcctccggtcataaaaatagttgtagagacgcaggatgttgggatggtgcaggtgggcctggatttcgatctctctgcgcagctgatgctccacgccctccttctctatctgggacttgaagaggaccttgagcgccacgatgaaatggcttttcttctcccgagccaagtacacgtttccaaacttgcctttgcccagaggacgcccaatctcaaagtcatcaattgtgaagtgccgcgttaagatgtcgggtgtcccactgctattctccatcaccttctggccaggggcagctgtgggctggacattggagcggctcatgaggacaagtgcagatggggtgacaggctctttccggaggactcgctggggcagggtgctcaggccagatggagccgtctgtcggccgtagggccaggggtaggagttctccttctgggccatccttagagagaaagggggaggagagctggggtccaaggcactgctactctcccggccgcccgcaaacaactgaatctccc

SEQ ID NO: 444854 - DNA, 757 bp, Homo Sapiens
cttcttcttaatggccccagaagttgacagctttgcccgctcttggatcaccaagctccgatagtgttcgtcacatggatggtccccacatagactgcccgttggcggaagttgaaatagtaaatgtcacctgtgatgtcctggcatggtttccactctccaggcagtggggccacgatgccctctcgcgccagccacatcagttctggttccttgatgggatcaataccaatctcccgggcaaattcaagaatttcttgctcactaggaatgtaggtctcatcataatcttcttccagaaccagctgatctcctatgcggaggggtcgtccagccatgactcatctgggctcaaacacctctcctccttagcccaatatactctcaggtcctattctcattctccagctctcagtccaaataaagttatttctcccgccagacccccagcccgggcccggtggcccgctcaggagccggcgagatttcaaacggaggaactgtcgcctggcagtccgattttcacttcttccctcagtccccgcccacactcgagcgcatcacgctcgttggctcgagagcgtgcctcgggtcccccgccacgctcgctcccttccccgccgcccaacccctccctcgatgaggtcctcaactatcccccaccccggaaggctccgggcgaggctccgggcgaggctctgggcgaggcgcagctcccccaacgccacccaacacccacccgctcccccagcttccc

SEQ ID NO: 444855 - DNA, 1950 bp, Homo Sapiens
ctctgcaccattctctttctacgccacccctctgtcacgccccttcatgctccctccaatcgccccactctcgctcttgccacccaccccgctcaagcttatccattctcactcatgcatgaacgctaatgcacgttccctctcgagggcacaggttcataccctccgggatgggcacgttctccagctccagcagacgcagcttggtctccatggtcagcagctgctccaggttccagccgtgtctgctcgctgcccatgggactgcccagcaaggcactgagcccatctgtccacaggtagaactcccgcttggagggggcaatgaagttgaggtacgcttccctcctccccacggtcatagctgattgagaaggccaactcatagaggtccttgttctgcttcccggagcccttctcccggacatgggggcagtccttgcctgtcaggagtgccctcatgtcggccacagggagttgctcgggcagactctccagggtaggcgggctggcgccctcctccatgtctccgtactgcagcagcttgtggttgggggacaggcagcagaaccacagcttatcctggcgccgccggctgctgatcttgcggaagagcgtcccctcacagaggcggagcaagcgctgctggcggatcaggcccatgagctctggcttcagcttctcccgcagctccagtatggggggagccagtgtgccctcctggtgcagccgttcagtctgccgcagccgcagcacttccccataagtgagcgcattcaccttggttcggaagagctccagggaagtgggcttcagggccagagtgcgggccagctgctcccgcaccacctgcatgaccttgtcgaagtcctcctgtgtagcccgcatctccttccaggtcttattcaacagctggatgcccacacagaagagctcgtggaagctctggtcttggccgaagaacatgggtgagaagtcctgggctgtctcagagcagggctccccaacacggagcagctcacacagcagcaccgtcagttggatgctgccccgggcaaaggggccttcggtgcttgtcctcggcggctgctgttctccaccacaacccggctgtacgcgctgggcgcgtttctggagaagtacaacatgtgtcccaggcccagcagaccgggggggcacgcgctccaggtcctgtgctgggtgctgtttagaaaagcccagtttgcggaactctcgggcacagagggaacggcgacggtcagcacttagcccggcacccgaggactccccctccacctcgaaggcagcctggcgtaggacctgcagctgctcccgctgctcctggctgtaggggtccaggggcgtccgcatgcgcggctccagcagccccagcatgagagcctgcagtacgtacaggtgatgagccatctcgtcgcccattggtgctgcactgtggatgatgttcttatagatgaactggcgaaggttcctctgccaaagatagtcaagcatgtgcttgcgttccacagggctggccccctgcagcaaggctgtcagcagggccatggccttggtttgcagctgctggttcatcacctgtaggtgcaccagcagcctatccaggggcacctcgctcttgaccagctggcccagggctgggctgctcaaggtcacactctccagcagcccaagggccaggggaggcacggaggcatccatgaggttcatgttcacgtagcacaccacctggcaaagatcatgtccgaggccagcggaacaaggcgcctcagggcttcccggcgcccttcaggactgttactctgcagcccacccaagagctgctcagcctcaaggtctggggccgtgctgaggcacaggatgctgccattcttgatctccgcgcggttattctcggtgatgtatctccggtatcccgggaattccggaccc

SEQ ID NO: 444856 - DNA, 1384 bp, Homo Sapiens
tgtcctcgcgcttgctgttctccaccctccggctgtacgcgctgggcgcgtctctggagaagtacacatgtgtccaggccagcagaccgggggcacgcgctccaggtcctgtgctgggttgctgttagaaagcccagtttgcggaactttcgggcacagagggaacggcgacggtcagcaacttagcgcggcaccccgaggactccccctccacctcgaaggcagccctggcgttaggacctgcagctgctcccgctgctcctggctgtaggggtccaggggcgtccgcatgcgcggctccagcagccccagcatgagagcctgcagtacgtacaggtgatgagccatctcgtcgcccattggtgctgcactgtggatgatgttcttatagatgaactggcgaaggttcctctgccaaagatagtcaagcatgtgcttgcgttccacagggctggccccctgcagcaaggctgtcagcagggccatggccttggtttgcagctgctggttcatcacctgtaggtgcaccagcagcctatccaggggcacctcgctcttgaccagctggcccagggctgggctgctcaaggtcacactctccagcagcccaagggccaggggaggcacggaggcatccatgaggttcatgttcacgtagcacaccaccttcctcacaaaggggatgctcagagtctcccaggacaccacgccgtgctccatgagctctgagaaggccctcaggctgagggccagcacctctcctaggtcgtccccatcttcaatgatggtgcctagtatctggagcccattacggctgatgacctccctggcaaagatcatgtccgaggccagcggaacaaggcgcctcagggcttcccggcgcccttcaggactgttactctgcagcccaccacaagagctgctcagcctcaaggtctggggccgtgctgaggcacaggatgctgccattcttgatctccgcgcggttattctcggtgatgtatctccggtgcccatccgcaaactgcagggcgtaacgctcagagtgcgtcaggctccacgcgtcgcacacctccttcagcacagcggccaggggcttcgcctggtccagctggatgagctgcgggatggcgtcacgcatcttgatggcaatcttcaccacgttccgcggaggcgccatggtccagctgggacgtgggcgcctgcactttccggagaccgtgcacctgcggccaagggtgcacctggcctggggcccctggggacgaggaggtcctccctttccgagacctgacctcggtgtcccagcactcgcggcccagactgctgctcctggccatgcaacgcggccttcccaagggagccgaggttagttccgggttgc

SEQ ID NO: 444857 - DNA, 1127 bp, Homo Sapiens
  misc_feature (351)..(379): n is a, c, g, or t
  misc_feature (795)..(800): n is a, c, g, or t
cttatgtcgccagccccccccggatgaggacccgggcggggcgcgaaatacgagtcccccataacgccttagtcgccccctgccgagcccgttatttattagagtttgggccccgaggcacaagggtaagttaagcgctcccaaaaaaggacggttccacacaaggtgagatgtccaacgccagtaatcccggcccgggggccccggttccggggtcgctaggcccagtcaatccaggcgggagctccccggggttttccgcagtcaaggtccattgcccccccaagtagtcaaaaatccccattccacgtccagtacggaagaggatttcgcctaacatgaggcgccctnnnnnnnnnnnnnnnnnnnnnnnnnnnnncggcttcggcacagtaggcaaagagatgttccaagatgagaaaatgtcccagtgcccacaggtggagcccaggagcaggccacaggcctcagatgggctcagcactgagcgtctccacacctccaccatgtcatcctcaaagaggtggacaatggattggcacacggcaggtggtgctatcttcagcagattgcacagcttgatggccacggagcccacgcgagccacattgggttccttcttcagcccgaggttgatggcggtgaatagacctttgcagattgggcaggtgaggttcccccacccaaagacatctcggagccggggcactatgcgatgtaacctggcaggatggccttggggagaaagagggtgagcctctgccggagcccagagaacccgagagtcagacagannnnnngccagagccagcgccagcgccagcgccagcgccaggcccatccaaaggagtccgggggctccggcggtcccgtcttgtccctgctcccggccggacctggggcagctctggcggagtgacgctccgtagcggggcattgtcgcgcttcctacacggggctggttcgtctgtcccgtcccccccggcctggaccctagccagccctcagggccccgggcggcgccggggacacccgattacccttctctgtagtcggctgactgctccgcggccgtccgcaaagcagctccgccccttcctcttcctctgatctctgacagctccgct

SEQ ID NO: 444858 - DNA, 1240 bp, Homo Sapiens
gtgtaccatatataccaggggctatgtataatagaccgtttccctttctttgcagcccacggaaccatcacacacacgcacggttacgccgctttccccggatgcacgcaacccaggacgcgaacccacagctcgagggcttagactttcactactgagctgccgccactgtcctccgtggaggtgtcgctgaagtcactggcgtcactgcccaaggcgtcctgctcctggtcatccctgttgacccttcgtcgatacctcaggtctaaaatgctttcctccgagcccgagctcctcctgtcatgcaaactcagccctgcctgtgccttcctggttggccaggggccgccgtccttctttgccagcaagtgtgggcttccaaagacagggctgggtccggcctgggcctccctgaaggccgagaaggaggggccctgcagaggcagccccaggtgggggctgaagaggccagcctgcctgcccccccaggagacaccctttccaaagtggaagagctgggtggacagcagcggcgagaagcccgcaaggggcaggctgggcaggccccgggcggggccctcggaccccttgtctctctcgctcccgacgccccccctccacactgcatctctgccttcggagcgcagcacccacgggctgggcagccgactctggtgggcgaagtcgctccagggcggtgtgcggtcggcctgggctccagcgtccctctccgctcccgggctgggggtcaggaagctcgggctcccgcagcccatgtgaaaggtttcctctggcgcctcctgcctcggtgcccgctgtggcacagctgggcagctgaccaaaagcacttttggcagcaggctcagcccctcgtgggctctggtctttgtgaacgtaaacatttctcctgctcactgagagccccttggcggagacaccgccgctggtgctcctgggcggcaccggatcccctcgggcaggagcagcagggagccccttcccgccctggctgaacagaccagctgtgccctgtgctcctgcgctctctgtgcctcgaagcccttcggccagatgtgggacccccctggccctctggctgcgtgtgcacacgccaggcggtggggccggctccttcctgcacagcacctctggcctggctgggccccctgtcccaagagcggtggggccctctgcctgaacttctgaactgctccctcgtgccgaattcgccacccaggcc

SEQ ID NO: 444859 - DNA, 1148 bp, Homo Sapiens
accccaggtagctatgttgtaattttatttcatgacagcaccatcttctctttgcctgcgcctgggcctcctagtgtgctgcttacgtgatgcccacgtgccacagagttattgcccgaagtgccagtgggctgtgcaggggatgggctcttccttccagatggtctgcagcctctgggaccacgcagccaccatcccctttctttcttcttcggatgcaatttcaggagcaaagctgatctgaggggcaaggactttaaatccacagaagtgtaatgtgccatgctggagtggccacaggaagtatcgagaatctccattgactcctgtcttcgtgtacatctcggccgtgcctcccgtggttacggaaaggagcgctagtttaccctggagcaaaccggaatcgtagaatcctgggatgtcaaaggcaaagccctggcacagcaccctatccatccagcccttcaggatggccggcacgctgaaccagtacagcgggaactgaaatatcactaggtcagcctcccgaacctttttctgctcatcagtgatgtcgctagccagagacctttgcttgtaggcttcgtgggtttccactccataattgaaaacctcaggattagaaagagtaccagtgatatctttgtctgtggccctcggctcaaagttcatggcatacaaatcagacactgtgacggtgcagccctgcctgctcagttcatctacagccacattcttcaaggatccgttgaaagacttgggttcctggtgtgcatagacaatgagtactttcttacctgccatagcgtaagaaggtggattccttctctctgatttgatgggtggctggggctttcctgcgtagtctctcttcagcgagtccagcaatcttccgaccagcgcactccccagtaggagccgcaggactgggacccgcgtctccccaaggaccgctctaggagttgcgccaggttccggccgcactggaccgcgcactcgctgacgcctggagggcgggagcgctgcgactgcgcccccggggaccacggaccggtgccaacctaagcagcccggaacctgccccgcgccgcgggactgcaggcctctttacgcagcctcgtgccgaattcgccacccaggcctcgctt

SEQ ID NO: 444860 - DNA, 165 bp, Homo Sapiens
atcagatcggcctaactggctcaaggttcagtggcatacaaatcagacactgtgacggtgcagccctgcctgctcagttcatctacagccacattcttcaaggatccgttgaaagacttgggttccatgccatagcgtcagacggtgattccttctcactgattg

SEQ ID NO: 444861 - DNA, 453 bp, Homo Sapiens
  misc_feature (18)..(18): n is a, c, g, or t
  misc_feature (44)..(44): n is a, c, g, or t
  misc_feature (54)..(54): n is a, c, g, or t
  misc_feature (66)..(66): n is a, c, g, or t
ccccataaccaaccgcantttgttacacccttgaaccatttatnaggtttctanccttgaacccgnacaaaccccatgccctcctaatcccacttgtttcccttgtgttgccgtaataagagttgccattgaagtttcaagagtaggcacctgaagacggagtcagcatagaagtgacaggaaaaagcatgtgtagataagggaaactaaggttgaggaggtcggaccggtatgagagtgtgagaaaggggcattgggggagcaggagaggcagaagtgcactggtgattactggtatccatgtgtgaagaagggtacagagaagcagcctgagtggatggcaaagtgaccggttgaggaactgaaacgacaggagggcgaggggctgcagaggagggggaagggcctgcagaattataggtgaattgtagtttggccccggagccattagct

SEQ ID NO: 444862 - DNA, 1109 bp, Homo Sapiens
  misc_feature (36)..(36): n is a, c, g, or t
  misc_feature (942)..(960): n is a, c, g, or t
aacccaacccccggtaaccccttccctctgtgccgnaccatgctgtccctttgggctcccaaggaggcccctgaaccactgccccaccccccaacaccttggagggaacaagacggagggggtgaagtactgccacagagcctgccctggaggtgcagactcatgcactcagccctgaaagaggtgagagaggctggatcttaactgtggtccaatgggcatattatgagtggtccttgtccctgcctgctatggggtaaccctgacccagctagcgtccctgacaacatgatacaaaaacacagaactctagcgggatacagagatgtgtgcacagctggcaggagcactggccacctcccaacctgttccccatagcttactcctggatgtagcctggagggactgctgggctggggagggactggccatggagcagggagctggatgccagcgggacctcagacctggactgcagcatctctttggttatcggttgtgtgtgtgctcagaagggaggaggccttccccttgttacatctctctctccatatattctcccggactcatcagtttggggggcgaaaagtccaccacatggtcttggcgacaaaccactggggatgtcaccccagctgcagagctggaagcttgtgccggaggggaaactgggtgagcaagggaggggcgaggcctgcctgtgctctcctcaccactgctgggaccagaaaagatgggcacctgatagctcagctgggcagtcccaacgcattcccactcagccaagggcctgagccccaggccattctggttgtgtcttttcagagcagtgagacccagcctcaggcctcctggggggcagcagccacactgcccgtggcgctctgcgccaagcactgtccagggatagtcccgctgatgttgtggatggcaccataggtnnnnnnnnnnnnnnnnnnnggagacagtgctgtcctctccgaggccaagccgttcagaatccgaggcacgtagggtgtgaacggtgggggcatgtgggcctctgcctcacttcctttgtcacttgcaggctcttctgttttgtagttcagagggctgaggtgcttgaa

SEQ ID NO: 444863 - DNA, 899 bp, Homo Sapiens
cagggagaccagcggcgggtgagctccaggcacggtgcagatcaccccaactggaagacagcatagctgaggtagtccagcaccctgtgactttggttgtggtggcctcctcccccgggcatcaagctgctttagcacctgctcccatccacaacaccgtatgatagatagtccccttcattgtaggccgagcggcccatcccaaagcagtcatccacactcagcattgcctggtacttggttcctggaagttcccctctggaaattgtgcctgggtccagcctgtatgtgtcctgaagtctcatcagggctttggcagctcctatctcgtcctcatcagtggggaagaactgccgctgcacagagaggttggcgataaaacctgcagctgagtcctgcaggacaaggtcctccagcgcaggccagtctgtgtttagccgcttcaccagtttgtaggcattcacagggtgagccaggtagccctcagcatcagcagctgacttgctagtcaaggcttccattttgttggcccagctcttaatcttggaaagcttggcttcctccacaaggatgtactctttcagagactgcaccagctctttctctgcataaatcaggtcagtcatgtgcccaatagaggtgaagaattcggcctgcacacagctcaggacaccaaaccaggccatcagcaatgcagacacccagagtttcatggtcacagagggaagtgtcacactgctctgggccaggaccttcccgctcttccaatccgcctgtcccactgggttagcaactgcttgcggtttctggcacacagaagggtcccgtttgttgaattagttaacgaattatcacgggtctccgcagctgagcactcgcagctcccggcgtttccagac

SEQ ID NO: 444864 - DNA, 2114 bp, Homo Sapiens
caagatatattgttgggtagcctatttagattttcggcttctggtagggacattttattttttggtaaagccacaatagatagaaatgccataaaaacaaacatgtaaacaaggtatcagaactttggttcactgaaacatctcacacctaaaacacctgaggtacaaaggcaccttgctaggcgctagacagctaactctgctgcagccactttgatcctagccttggggccagggatggcacaggctgaatggaagggctgggacttcagtcacacaggagtcgccctagtatggtctccctctgctccagacaaacattcatttctccaaaaatcagcctgataggaacatacaaaggaacatacaaaggtgtctgtcacgttgacatgggctgaaggaccaggaaggggaaggacagaaaaggatgtcagtcaacttctgttgatccacaaggtctcaagaactcctgtcctcgttcatggaaccacttattggagacccacttgcagcccacaagcacagggcaggcagcatgtcttgttcggtagtcaccttccccgctccgcaagaggttgtaccagaacacagctgtacccttcttaggccaaattgcagcccccagatcagggaagacggtggcaccaccagcttctacatcactcatgtagttaagaaacgtcgctaacctattcccctctgttttgaggccgctgtcaaaaggtcgcctagagaagtcgaagtgcggttcatactgtcctcccactccataatttgcaacctgtaacaattctgcagtctttactgttaaccctgtgatatgctgcatccgacgatttactcgggccacaacagggtcatcatcttcctctagccaggagcttttggaaacccggtagctggcgacagtgaggactcctgtcttgggatcacgaacggtggctcgtgcaagtttaaggttttgcgatctccttgatcctctcgatttcctcatcagacatgacatcgtagtacctgacgatgtgcgggctgtcccactcgtcctcctctttgaagggggcaatgagcagctgtggggccctgttgcccatggtggtacctacagaaaagcctcttctgtctaacgggttgtcagtttgacaccctccccacgacagaggctctcgtaaacatccctctcaggcaggtagtccacaggcctctcatagatgccttctggggttgctagctcagcttctgtctgatttgttaacgttttttctctctcttcctccaataactgctcaaagtaccgcagattccctccagctcgttcgtggcttgggtcaagggagagcaggcggcgggtgagctccagggcacggtgcagatcacccaactggaagacagcatagctgaggtagtccagcacctgtgacttggttgtggtggcctcctccccggcatcaagctgctttagcacctgctccatccacaacaccgtatgataatagtccccttcattgtaggccgagcggcccatcccaaagcagtcatccacactcagcattgcctggtacttggttcctggaagttcccctctggaaattgtgcctgggtccagcctgtatgtgtcctgaagtctcatcagggctttggcagctcctatctcgtcctcatcagtggggaagaactgccgctgcacagagaggttggcgataaaacctgcagctgagtcctgcaggacaaggtcctccagcgcaggccagtctgtgtttagccgcttcaccagtttgtaggcattcacagggtgagccaggtagccctcagcatcagcagctgacttgctagtcaaggcttccattttgttggcccagctcttaatcttggaaagcttggcttcctccacaaggatgtactctttcagagactgcaccagctctttctctgcataaatcaggtcagtcatgtgcccaatagaggtgaagaattcggcctgcacacagctcaggacaccaaaccaggccatcagcaatgcagacacccagagtttcatggtcacagagggaagtgtctggacactcgcagctccgggcgtttccagaacctcccgcggcgtcgcccggtcagctccc

SEQ ID NO: 444865 - DNA, 1019 bp, Homo Sapiens
ttcacttgaattgtttattaggcatttagccacatgacaaaagacaatttgaagaccacagatataatttcaagttgcgtgaacattgattgccctggaaaatatatcagtgaggctttcctaccacttctgatgactgcaagaacatgaaaatctataatgttttaatcaacaaaaatcacagctaatgaataaaagctatggccatgaagattaactttttaattagcaaataatatttctttgttgatgagatactaagcagacaaaatcacaaccctctggataactttggagaaagacatgggaagccacagacagctgagttccatgaaggcaggatgatatttatttgcttcttattccagttttcagatatatctctcttcaatttttgattcctgcagctggcttcactcctactccctctctgctcgcagcacgtcggccgccagctctttgatgtgttcccaggcccgctgcacatggggagattccaccgtgcgagaacagatggcaaagcgcaggacaaacttgtccctgaggtgacatggaaccaagtggatttttttggcactgtttattctttgcagaagagcttcattcactttgttggaaccctttagccgaaagcagacaagccccagaatgacttccacacagatttcaaagcggggatcctggcgcaccagtgactcaaactcatgggacagctggacatgcttgcggatataagcctgcagtcctttgactccatacatcctaaatacaaaccacattttcaaagagcgaaatcttctgcccagtggtatctgccaatgccggtagtcagtgataagccctgaatcctgatggctgtgcttcaggtaagtggggtccagtctaaaggctcccgttaagtctgttctctttttcaccctggttttagagaacaaatgaaagggctgataaccaagtaccctagactggaccaacctctcccctctccccacctgcctcagctcaggcacctgctccca

SEQ ID NO: 444866 - DNA, 774 bp, Homo Sapiens
ggatgaagaagcacctgctgaagggcactgtcctgtgagctgggtccccaacatgaccatgcggcccacccagaacagcagaaggtcgctgcccgtttccaaaagtgacagggggtagaaacgagcaaggtctggggtctcttggggccagcccagggcagaaaaggggaacagggcagaagaaaaccatgtgtctaggacatcaggatccctctccagggtcagctctgcccctggcctccctgtcagttccgctgctacctctctggcctcagcctctgaccgcccaaccacccaacagtcctcttctccctgcgcatggtcctctacaaccaggtaggctggaatctgatggccccaccacagctgccgggagacacaccagtccccaatatgggaaaaccagtgctgccagttcttctggtggaaggagggactgagctccagggcccccgactccacagccttggcagctcgggcccccatttcctggcagcggacaaaccactggttcttcagcaggtattctatcacatccccagaacggctgcagatgggcagtaccatggggtggttctggaggccccggaacaggccccattcactcagcacagacattatcttttcccgggccacaaaccggtgaagaccctgcagccagtccccgcagagggaggtcatggtcccatcctccgcaatgacattcaaggggctcaagccatgtcgcggacgcgtgggtcgacgatatcccggaacttccggaccgtaccagcc

SEQ ID NO: 444867 - DNA, 2108 bp, Homo Sapiens
cagcaccgcgatctgcacctcactgatgatgtctcttgggtccaggcacattccgcagggacttgctcatcttccggccctgcctgtcccgaaccatgggatgaagaagcatccttgcctgaaggccacgctgccctgtgatctgggtcccctacatgaccatggcgtcccacccaggacagcagaaggtcgctgcccgtttccgaagtgacagggggttagtacggagcaaggtctggggtccctctccagggtcagctctgcccctggcctccctgtcagttccgctgctacctctctggcctcagcctctgaccgcccgaccaccctacagtcctcttctccctgcgcatggtcctctacaaccaggtaggctggaatctgatggccccaccacagctgccgggagacacaccagtcccccaatatgggaaaaccagtgctgccagttcttctggtggaaggagggactgagctccagggcccccgactccacagccttggcagctcgggcccccatttcctggcagcggacaaaccactggttcttcagcaggtattctatcacatccccagaacggctgcagatgggcagtaccatggggtggttctggaggccccggaataggccccgttcactcagcacagacattatcttttcccgggccacaaaccggtgaagaccctgcagccagtccccgcagagagaggtcatggtcccatcctccgcaatgacattcaaggggctcaagccatgtcgggcccccatctcagcatcggcaggactgtgagctggagtcaccttcactgcccccgtgcccacatgtggctgaacagcatagtctgtgatgaggggaagaggctgccccatcaaggggtgacgaagctgtcgcccgtgtagatgtgtgtatcgcgagtcgtctggatgaacggccacagccacatctccaggcagcgtctctggccttgtggttcctaccacaacctctgcatcaggctctccatccacggggaaggcaacagaaaataggaggccaaaagacacgggggtggggcagccaggcagtcgaagctgtgtgtggccaggcaggggccggttctccacctcaatgtccgagatggctgatcttaaagcacatgaccagttgacaagctgatggttccggtacagcaaccccgccttgtagagccgcacaaaagcttcagtcacagccactgaggagccaacatccatggtaaaacactctcgatcccagtccagggaggcacccagagctcgcagctgctcacagatctctccacctttcgcctccttccactgccacacctccctaaggaaggcctcccggctcagctcatgtctcactcactccccgttccttccacagttgtttctccaccacagcttgtgtagcaattcctgcatgatctgaaccagggacccacagcacttgatccccacgcatccggtgccagcgcacgagggcatcctgtatggccaccgtgagtgcgtggccaatgtgcagggagccagtgacattgggaggtgggatacacatggaaaaggtctcccctgtagcttggggcagccgggcctgatattctggtttgaagaagccctctcgtacccaccacgggtaccaggcagcctcaacatatcgggggctgtatgcaggaggcaggggcccagagacatctttcttttcaccgggtttcgtagggatttcatacaatactaactccttaggcctccaggccttaatggattctgcaggtgacttgctctcccctgctatctcagcctccagagtagcctgcttctctcgcaggcgcttctgtttggcttcacggttcctccgggagatgggagatccatggggctccgactgtgtagaaacggagtgaaacctggggaggccccgtgagtgcctcagcccccaaaatggtggtcgaaaagaagcgagaggcaaatgaggcatcaggagtgtttggaaaggggccgagatctgttcaggaggccccgccgctatcccagggcgccccgcggcggcagggactgagcctcgtgccgattcgacaacccaggcctcgctacctagcctaagtta

SEQ ID NO: 444868 - DNA, 1106 bp, Homo Sapiens; identical to SEQ ID NO: 155066
  misc_feature (45)..(135): n is a, c, g, or t
  misc_feature (144)..(152): n is a, c, g, or t
  misc_feature (184)..(192): n is a, c, g, or t

SEQ ID NO: 444869 - DNA, 842 bp, Homo Sapiens
  misc_feature (248)..(417): n is a, c, g, or t
  misc_feature (729)..(729): n is a, c, g, or t
ttcgggcacgaagtgccaatggtctttaggtcaaggtttccaacccaagatttcactgtggatacaattatttggcagctggcggtacaatccccagaactcctcggaagctgggcgtggcaggagtgatgggggtcatgggagtcatggggaggggatacagtggagtggtgcccggcaagggtgcagttgtgagagtctgtgagtggaagagctgtggtgcctggcctgaggttccctgtgttgcnnnnnnnnnnnnnnnnnnnnnnnnnnnnnnnnnnnnnnnnnnnnnnnnnnnnnnnnnnnnnnnnnnnnnnnnnnnnnnnnnnnnnnnnnnnnnnnnnnnnnnnnnnnnnnnnnnnnnnnnnnnnnnnnnnnnnnnnnnnnnnnnnnnnnnnnnnnnnnnnnnnnnnnnnncttccaaaatagacagactattggtgttctgaataggctgtggggtcagtccagtgccataaggcatcattggactaaagatagggattccgggagtcatggcaccctgaggggaggccaagccctgagcgttaggtggcagggctgttgttttgatccatgatgttcccttttttcttgggcaaaccagaaacctttgcgctggaacctcgtctcactattcaattttttcttagagcatctccagcacactcttctcagcaacttcctcaattccttgggttatcttcacacgccaagaaacagtgatgnctgggtcactgcaaagatcactatgggccagcggaagcgaagttaaacagccggcggcccaggcgcccgccacagcgaacctgcccgacctcacatcccaggaattccggacc

SEQ ID NO: 444870 - DNA, 1038 bp, Homo Sapiens
  misc_feature (104)..(104): n is a, c, g, or t
  misc_feature (176)..(176): n is a, c, g, or t
  misc_feature (463)..(622): n is a, c, g, or t
gggggaaaaaaccccaaatttttggtttaccaattttctagcataattttctttgctgcccagtctgggactgtttcttcacttctggggctcctggtgcacanccattttccccagaactgaaaatcagtgccgtggttccgtggctctcttatcttcatgattaccgcagcaanccgcttgggattatattcggcgtttcgggcacgaagtgcaatggtctttaggtcaagtttacaaccaagattcactgtggatacaatattttgcagctgcggtacaatcccagaactctccgaagctggcgtggcaggagtgatgggggtcatgggagtcatgggggagggatacagtggagtggtgcccggcaagggtgcagttgtgagagtctgtgagtggaagagctgtggtgcctggcctgaggttccctgtgttgcctgctgggacgttgactgctgaacgnnnnnnnnnnnnnnnnnnnnnnnnnnnnnnnnnnnnnnnnnnnnnnnnnnnnnnnnnnnnnnnnnnnnnnnnnnnnnnnnnnnnnnnnnnnnnnnnnnnnnnnnnnnnnnnnnnnnnnnnnnnnnnnnnnnnnnnnnnnnnnnnnnnnnnnnnnnnnnnncttccaaaatagacagactattggtgttctgaataggctgtggggtcagtccagtgccataaggcatcattggactaaagatagggattccgggagtcatggcaccctgaggggaggccaagccctgagcgtaaggtggcaggctgttgttctgatccatgatgttcactttcttcttggcaaaccagaaacccttgcgctggaactcgtctcactattcaattttttcctagagcatctccagcacactcttctcagcaacttcctcaattccttgggttatcttcacacgccaagaaacagtgatgctgctgggtcactgcaaagatcactatgggccagcggaagcgaagttaaacagccggcggcccaggcgcccgccacagcgaacatcccgggaattccggaccggtcca

SEQ ID NO: 444871 - DNA, 1657 bp, Homo Sapiens
  misc_feature (548)..(559): n is a, c, g, or t
  misc_feature (1315)..(1449): n is a, c, g, or t
taacacttttataaactgcatttattgtacagagtactctgaagaaagaaaaaaatatgtacagccattcattttcattaacacatatattctgtcctgcaatactggagaggtggaatgtgtctggcacagaaataacccctaggagttataaattagaaaaacaacacttttaaaaaagatttttacttttctggtagaaatataaaaactgtggttcatggggaaaaacattaaaattaaaaagtccaatcaattatagaggtggctttaacacttaaagttttctccctcaaaccaacttgtcaacagcagtgtttaaaatctacatataaataaatgggcagcgctgcccagatagcagcacggtatgagcaactcacagtcacgctgcgcggtgttctcagtgcacaaataatgccccttcccggcatcccgcggtgggcacttacagaagggcatcacctggtgccacaccctgcaactcaacatccatcttctcacaacaccaccatttaaaggtaccaaaacaaactgatttgtttacnnnnnnnnnnnngaaggggctgggggaggcaagggtacatgagagccattacggtcgtcttcctgaatccctttagaatagggtagatgttttcaaatgcttcataaatttctgctctgactttagcacctgttaatacaacttttccagaaacaaaataaggagaccaattctgggtttgatcattctgtagattaacccaggaaataactctggctcataactactaaattgttggtgggtgagcacaaggcctttctaaccttataggaaacttcacatcacagctcccccaccatattctgaatctgaagtccaagaacttagctggaaaacccaacttctgtacaactctagcatattttcttgctgccagtctggactgttcttcactcttggctcctgtgcacaccattttcccagaactgaaaatcagtgccgtggttcgtggctctcttatcctcatgattaccgcagcaaaccgcttgggattatattcggcgtttcgggcacgaagtgcaatggtctttaggtcaagtttacaaccaagattcactgtggatacaatattttgcagctgcggtacaatcccagaactctccgaagctggcgtggcaggagtgatgggggtcatgggagtcatgggggagggatacagtggagtggtgcccggcaagggtgcagttgtgagagtctgtgagtggaagagctgtggtgcctggcctgaggttccctgtgttgcctgctgggacgttgactgctgaacgnnnnnnnnnnnnnnnnnnnnnnnnnnnnnnnnnnnnnnnnnnnnnnnnnnnnnnnnnnnnnnnnnnnnnnnnnnnnnnnnnnnnnnnnnnnnnnnnnnnnnnnnnnnnnnnnnnnnnnnnnnnnnnnnnnnnnnnctttgttgctcttccaaaatagacagactattggtgttctgaataggctgtggggtcagtccagtgccataaggcatcattggactaaagatagggattccgggagtcatggcaccctgaggggaggccaagccctgagcgtaaggtggcaggctgttgttctgatccatgatgttcactttctatcccgggaattccggaccggtcc

SEQ ID NO: 444872 - DNA, 1397 bp, Homo Sapiens
ggagaataagtccctcagaattccctggtgcttcctgggtgggggggacaggactcccttaggccctgcttaaaggggcagcagatgtcatgagccaagattagtgggtagagaagacaatggggacagccgatcattcagaagacacccggtttgatcaggagcgggggaaatatctgaaggcttcttcgaaatttcacggcatgtgcttttattaacctggctgtttacaggagctgaagctcttgggtttgcggtgatgactcttgaacttctttttcaacgagcccaactgcttcttcccgcgcttctggaccagccctcggtacacggtcgtctctctcctgctctcatcagtggccttctctcttgggggctttgccttctcatcctctttgtctgtcaaaaagtcatcagtgccatccccatcctccgtgcttccaaggtcctttctggtgaatagctcaggtgggtacaggtctgtcatgctgtcatcacttgcagctcccccctcatcactggatgtgggctcccagaaggcttcccgcgggcgaggcccgtcaccgtccatctggtcctccctcctcctcctccggtgcaccaggcaggcaggcacgtactccaccccttgcttctgacattcttcatatttacacagagctcgctggtaccgccggccctgggtgtgcctcagcacgtgttctgggcacttgttgatgtgccgcagggtgagtttgcagaacaactggtgcgggttcttggtgctgggcacgatgtgcggctcgaactctgcatagtcgaaggccggggaggcgcggaccagccgctggtactttttgccgcgggtgtagacctggagctccggcaggcggcagggcagctcgtgacctgtcaggatgcacctcaccttgcgggcgtccgtctggagccgcaggctcgggtgctcccgcagaaacgcccgcacgtcgcccggcaactcgctcatggccgacgcgcccgcggagcagcccggcggaagccgctcgcagaacctggagccgggggcggggctctgggcgggactcagcggcgccccggatgcagatgcctcctgcgtcccggaagcgcccgcggggccgggtgcgatggcggcggtggctgcgttgcagctggggctgcgggcggcggggctgggacgggccccggccagcgccgcctggaggagcgtcctcagggtctccccgcgcccaggtgagggctgcaggccgggctgtgatccaggcgcctgggcagagccacctgctgtctgccctgcactttgaagggttgtcgtggggattgaaatgaaccaactgccggctgagcggaggctccctgggagtgacaagttccgtattaaaatgctttcagtggaaaaa

SEQ ID NO: 444873 - DNA, 1060 bp, Homo Sapiens
  misc_feature (1036)..(1036): n is a, c, g, or t
  misc_feature (1044)..(1044): n is a, c, g, or t
tttttaaggtagaaggccagaactttataccagtagcacatgatccagcataaaggcagtcttgaaatactgcattatccagggacagggcttcagcagctgatctgtcacacaccaggtgtcccacgtaggaatttcttaaaccacaggtaggatgtagctgcagagagtccataccaggtcacgatgtactgcagatgctcgttcctcagagtaactctggtttgccctccaatgggtcctccagggactgtgctctggaagttggcatcaatgaagatgggctctgcgcctgtgattctggccatagcttccaggtctcgataatgccagtggttcctttctggattgttctcagggacaaaaggctgcctggtttctgtcagcctcaccatcccaatgaggtccacttctccctcaatctggcctttctgccgggtttcaggattcactttcttcctgggaacgaaccctctatttaccaggatggtgactcccaggtcggtgcagtggaagggagtgaccacataggccccactctgagttgaggaggagatgaggcggccctcccgggcctcccggacagggtccaccatggtccggggcatcatatacagctccttggaatggtcaaagcaccccctgaccttcactggcctatactccagatttttcagttccattgggtcggctggcagagggacaggctcagccagaactctggactccaactctgcaatcaggttcagcttccacttccgacgctggacctgccatgtccccaagccaaaggcagtcacagggatgaggagcaggacccactgaagaaaggagtcatcttccgcttttgtggcagatgcttctgctgcagaactgccacatctgcttggcctccaggccacccctgggcgcggggagaccctgaggacgctcctccaggcggcgctggccggggcccgtcccagccccgccgcccgcagccccagctgcaacgcacgcctcgtgccgaattcgccacccaggcctcgctacctantacaccgnagattactgccgtcgg

SEQ ID NO: 444874 - DNA, 1213 bp, Homo Sapiens
  misc_feature (78)..(78): n is a, c, g, or t
cacatcagcagttttaggggcatcccaaaatgcccctttccaaattacccaaaatccattttcatatttcttttcttngtgttcatgagccacttttctcagtaaaagttggttgaggtatcaaagcaggtttttgtggaactgaattcatatgcttaaaccactcattaaaggtttcatgggcttccaaataagctctgatgcacaaatgttctcggatagcattatcatcttcagcaggaagtggactttccattccttgttcctcgcactgattatagatttctgctatagaatcctgaggaattttcacaaatacttccttttgcagcttccgtgcttttttgatgccaaagaattttctccataaattgcattgccttgtttcagtgcttctgccctctgcgctgggtcaaataccaaaccagtcaaattacatcaatttttaaacgatcctcctcagtagtgccagtatctagggctggggccaggtcatgatgactaaattcacccattatctttctttcgaatattctcaactacagtttttgttattgttgcaacatccaaatctgcttctttagccaactccaggcaatggtggcgctgttcaaattctgtaacactttccaaaaataatgcatactgggcaacagctaggtcttgaggcaaatgacaggtataaaatgctataagatttgtatgtttctctcttattaaaagctgtatgtatgtctttaaaacttcaatagaaacttcctccttggtctgtagtcccagagtacggaaaaacaaaataaggtgagtcataaagcgaagcaggtgtccaggtagattgtttctgcttttggaaagccatttgctaaactcatccatcaaaccatcaatgtctcccaggataagaaacttttgaactatatgataatgttcttgattctcttccagaactctctttttgtcagtagcttgaagttcctcaaaaaccttttctaacgtccagtttgctcccagatattctctagggagttcttcagtttcatccagagttgctactgatgtctggatctcctgttctaccagactgtccaccatcacccggaagtaggcccaaactgtgtcttcccaggtgtcacagacaggaagcagctgcttaagattcccacttaaagctgcataaattgctctctcgtatctattaaaaagctcatcttct

SEQ ID NO: 444875 - DNA, 1050 bp, Homo Sapiens; identical to SEQ ID NO: 323016
  misc_feature (159)..(159): n is a, c, g, or t
  misc_feature (161)..(161): n is a, c, g, or t
  misc_feature (277)..(277): n is a, c, g, or t
  misc_feature (381)..(381): n is a, c, g, or t

SEQ ID NO: 444876 - DNA, 1852 bp, Homo Sapiens
  misc_feature (518)..(518): n is a, c, g, or t
  misc_feature (523)..(523): n is a, c, g, or t
  misc_feature (527)..(527): n is a, c, g, or t
  misc_feature (530)..(530): n is a, c, g, or t
  misc_feature (535)..(564): n is a, c, g, or t
  misc_feature (912)..(912): n is a, c, g, or t
  misc_feature (991)..(991): n is a, c, g, or t
  misc_feature (1014)..(1014): n is a, c, g, or t
  misc_feature (1196)..(1196): n is a, c, g, or t
aggaaacccaagttaaaacccttttcccgaatttggggaacgaggggcgattagcgacacaaaaaatccgggggcgtagggactcgagggggcccgggaaatccacccttggagaccgtggaattttaggaattcccccaaacccgtccgggagtcccttaggttcccgtggttttcattctgtcaaaacttcccaaacccagtaaggcagaactttcgaaggcggcagggccttagccaagtttgcctttaccccattaatcccctttgaaaatgtaaatattgaaccctgggagctttagaatctcggtagggtaggttcggccccaatattaccgcgcccacaggaagtaaagggtccatcgtcgcaagcttccaaggtttaccagttttcgcaggtcccggaggcggtaaaccggtcggccagtgggctagttattaataccacctctctataggggacccctgggtacaagaaagctgggtacccgtaagcgtggacccatggaggcatactntaganccgnccnccctnnnnnnnnnnnnnnnnnnnnnnnnnnnnnnggaaggaggtaagaaaacatggtttttttaatacacttaacatgcttacagttttaaagctctgaaaattagctggataataacattgtaaactgttcattttcttagcaaactggaacttaaaagagtaatgattttctatcttcctttttgcttttaaactgaggtgacttttcatctctgaaacttttgagtgttcaccttctcgaagtcaaattgatactatataccattttctggattttttcttcattcttgaggatgttggccttcacagcacagatcttgtcttgctggtctttgatcagctgctccagctccgcgagttcagcctttaagggcctccancggcacagtctgtgatcctctgctcttgctgcagggcctcggcgtgctgcctgttctcgctgtgccacatctgcagctncattctgcatggcatccacgtcnttcctggatgtagtccatgatcttccccaggggaagtgcgctcttgcacagggtctggatggacgtgcggagcttctctatctccttggaaacgatgtccttctccttcttccatgccgactcaaagagagatcgctccttctccccaggtttgggtgactgctgcaatttctcataatctntcttcgtctccaaaatttttttcacaagtccaccatgcttctcctcttcttctagttccactgctgttaccatttcaatttctgacatttcagagagctgaggggcagcttccaccacaaattgatcatcctcttcattgtcagaattgtgtgactctgtaatcacatttgaaacggttttaccactccctgacctatccatttgtagcgcctccatgctgtcttgccgtttgacccggggaggggctggtcttgcactcccaggccgaggaattcttctgatgttggatgaaagctcattaggaatttctggagtctctggcacctcagacttatcttggccagcaggtccagcatctccttctgcatcactggtggagtcacctaaagaaaaagcacatcagaaaattagctttcgtgtagtcaacctcaatacattaaatgatgagaacagaattggagaaaaaacacactgtacataattttggatgtctgctaagaaaaaaagatcatttcctcatagccgcttttctaatgtccctattgccattttgttttattttcaaagatagaaaaacaaagagcaaacaaactgtgcatcataaaatggtactaaatagaaacaggacacagggatgtggagaaagcacatcgga

SEQ ID NO: 444877 - DNA, 1829 bp, Homo Sapiens
attggtggggggaagatagtgttgtttgcaaagagggcaccggggtcccccggggcttttctcccccccgccgcgggggcagcttctttttttctatgattcggggtgggaagggaagaactcccctaagtcgccgcctttaaggtcccaatttgaccccccgcgggaattcgtcgccttatggaggaaagagccaccgcgctcgttggcagccccagtggctccgcaaccttttacccccgagccgcgggggccgccccggggcgccgcgccccagaaccccggaatattgtttttcttacggagaacgctctttccttccggaggcgagccccgctggtggccgggcccggacgcacggatattctgaacttcccgggtccaccttccgttctgcgggtgtcccccttatctctgttcaattttattcagtaaagattttcctggtccccaccccatgttgccagggccaagtttgtatcaatatacccccaatccttttctaacgccctgagttctttcttccacatatctttctaattcgtggtctgggagggaaaagggtagtggagttctcaggtggatgacatctccaaaggggagaggacaaaggcctctggcttggcttcctgcttcagcactccagtcagcaggaactcaggcgagaggaggggcagcccaacccgtagtggaatggagcaatgagggaagtcctgagggcatgtgatcacaactctctgaggcttataggaccgaggcatgctgggtaggtatgtgcctccacagcagctaataatctctcccatctgaggtggtggtggctggactccaggggtcacatagatctcatagccctctagcagccttcgctcccgagccctgctcagtgcgtcttgaaggctaaagccaaagttcttctcttgctcagggtcggtcaccacatattcatccgggggtaagaagaaaccagccttgcgggactgatgcagccagtccagggacagaatgggggattccccgcccccagggcacacaggaacttgactgtccggcggatgcgatcagtgaccaggtgggaagcctctgccgctgaaccagccagacttccccccagtgccagcacagcccgctctccccgagcatccaccactcctgtgaagagcactttgggggctgttgattcttggttaagtttggtccgtcggaggctgcggcttggtattctgttgggctcctcctctgcctggtctctctttctcttgcctggttttggagtcacgacatcctgagattgagaaaaatcttggtgggagtttcagagccctgaagtcatttttcccagctttgtggtcccaaccctctcctcacctcttccttccctggcttctctgcagtatcttcttcctcttccttgataatcactgtcttctgggagacttcccctctttggggctgtttttgatgtggtggtgaatccatggtagctaaagacctcttgcggctttgagaggccttaggctggagctccggggtgaacctagatctacctgctggttccaccttttggatctgggaggcatgaattggtgtctcaagaagctggggagaggcaggctcaggaatggctgtaagggattcagctgctctcactgctccccatctttggttccttgaggcctgggatttaggttccaagggtgcagagcaaggcttatggtcaatgggagctgcgagggagccagggttcccagcggctctctgcctcttgatgcaactgggttgagtaataggctcaggggaaataggctggtctgtggtgacaggagatt

SEQ ID NO: 444878 - DNA, 969 bp, Homo Sapiens; identical to SEQ ID NO: 155068
  misc_feature (12)..(12): n is a, c, g, or t
  misc_feature (30)..(30): n is a, c, g, or t
  misc_feature (144)..(144): n is a, c, g, or t
  misc_feature (263)..(263): n is a, c, g, or t
  misc_feature (282)..(282): n is a, c, g, or t
  misc_feature (288)..(288): n is a, c, g, or t
  misc_feature (650)..(650): n is a, c, g, or t
  misc_feature (959)..(959): n is a, c, g, or t

SEQ ID NO: 444879 - DNA, 1581 bp, Homo Sapiens
ctggtccgggttagctttattggagcctcctagcaggccaggtgtttcaggcaccagtagtgctgcaggcacgggggcctgtggtgtggccagctgcaggtgatctcggtggtggactccgaagtgtactccagagaggtcccggaatggcaggggaccagctcgggcactgaggcgctgctggcaggctgtttcgacgattccttctggcgctgtccgctggtcttgggggctgcgtcctccggcttgccagaggacttgctggggggctgcgtggggatgttgctgctgctgggagactggaccatgggtgagaccgggctggaggtgacgttgggtggctgcaggggccccgaggaccgggagggctgactgggaggggctggaggaagtaccaggcggctgggtgtgttgccgagaccagtgggagctgccctgtgcccgacgctggccctgggccctgccggacaggcgggagccacagccagagccagagggcagctggccctgggatccagagctgggggtggccgaggactgggactgggacttgcccgaggtggcatttaaggagacccccagggccttgcctggacccgagggactggcaggggctgctgttgggggatgcgctgaagactctgtggaggcctgggagcctggcgcggccccctcctcaccagccaggaggtccttgtgaggctcagggggctgcttcacttgtccttcggctgcggggtctggcttggcttgacgttcctggttattccggccgccgcgtccagggctcgcccgctgaggtcgttcatgattctgtctacggccccgtggtgccttaggaacagcggacgcacgacgcgctgatacagcatgagagccccgttccagggcctgggagccatgcagaacaacaggaaggcgcacttgcccacgtagtagaaagggaaccaggacaggagtagatcgctgaagaactcggccagcccaaacagggcgtacaccacccagtaggtgagccacacagtgtcgtcgtccttgcttgggctctcgatagctttgattgaggcatatgcggggtacacaaatccgatgagattgcacagcagagacgctccgtagccgaacagcagatacaggcttagcagagtgacggctcctgcagccagataccgcttctccaccccggtcttggcctccagcgcccccagcacttcggtgaccaggttcctttgctccaggaagtgctccacgcgctgcctcaggccgtccatggccccgacgcgcccggggttggctgctcgagctcgcccgcggaccagggcacccaccccgctgcacgcgcaccgctttcccgcagcctgagccgcgatgctccggccccgcgccggtgtccgcccccggccccccgctaggaccaatgggagggcagggcggacaaaggaggaggggcctgccccgtctcccccgccgcatagccctccgccacggccgccgctgcccagaccccgccgggagagggcggggcgcggcggcccagggcaccgattggccgggccatcccgggaattccggaccggtcca

SEQ ID NO: 444880 - DNA, 999 bp, Homo Sapiens
tcgttgtttttatcagcatgtgggaagaggggtaaattgtgttggtgaggttgttgggaacactattctgtggtgtgggtttaatagaggggggaggtggttttgtgatgtcacgaaggtgttagaggtgggtataagggccaaatagaaggtgtggacgcagggtttcgtgtctaaagtgaagatcgttcccggagcccggtggcttcgaaagggtggggggtgtataaagggccttagggcgcctggttggtgtgtggggttggcccccagggggcccgggtttgccggtgtgggctggaaaggggaaagttccagtgtagagggcacgttgaatgttggcccccccaacaatgtttattccaagggggtgggagtccagtgatctttttggcataggaagattagccttttccctgtttaacaggcaccgtcaaggcccgcgtcccccagttccagtagggacgtggtgggcaagtgcccaggggggctgagggcgagcaccatttgcatatagagctgagtcatgttgggcaggagggccacagactggcctggggcgtggtcaggcagcagatggtggaggcagagacaggcgacttggcacagtgcgggcaccgcacacgggcttcggcgacgtccatttgtatgtaactcctccagggccccctcccgcgatggctgggcgctgaagaagtgattcacatattcttccacccgtggcccatcaaagcccaacatgtggtccatggctgcctctgcaggcaggcaggcaggcagcttccctggacgggaggtagccatctcccggcagccaggcaggagggtcccattgcagagatgggagaaaagggtgaggactgggcctgggccatcaggacccataggctggagggcttcatctagcccatcaaagatcagcaggacttggtcagcgttcttggggaaagtactggaagacagtgctcgatctttgtaattccggaccggtttaccagc

SEQ ID NO: 444881 - DNA, 688 bp, Homo Sapiens
cactccccactctcattcgcctcaattctcccaaggcagtcagtcgcttgggttcacaaggtcagatgctctaggttgtaggccgagtgactgctaccacctttcacctgtggctctccttagtttcatattctcataagcggctacacacggtatagagtttcgtcttagcacatcaggcctttcccttaaagaacctgaatttcccgtgcccggcacgactagcccagcccagaactgaacacttatctcaaattaatcttccaaccacacaccaaggaaagaaaatggattactgccacgtagagatttgaatcttgggtatttcaccgaattctgaactacgatgttgcaatgtaaccactgtccaaccagaaacagtaaaaagcaaagtgcttcgcgctatgacaaagtacttcacaggacattgttattaaatgccaaagcattgccaggtaagacacagctgcccgtttcctataggaagttgttgagattctgctctctaagaatacagtagtcctttctctctccactgactagtggcctgataagtctcagccaaccaggccattcgcgtgtttccacggtgcaatgcaaacacgagcctaactaccgctcacagcacgcagcgcacaaaggacaacctgcggccgatgcgccacccagcctcgtacctagccgtatg

SEQ ID NO: 444882 - DNA, 610 bp, Homo Sapiens
  misc_feature (77)..(77): n is a, c, g, or t
tctacgtggcagtaatccattttctttccttggtgtgtggttggaagattaatttgagataagtgttcagttctggnccgggcagtcgtgccgggcacgggaaattcaggttctttaagggaaaggcctgatgtgctaagacgaaatctataccgtgtgtagccgcttatgagaatatgaaactaaggagagccacaggtaagtatacgtctatgaatgcgaattaaaacgggtgacaatataaagagagattggtgtcacaaatggtggagtgacttttgtatttcagcagacctcagtgagaaatggtcaccaccactccctagatgtgtgaccttgagtgagttgcttaacctctctgatcctgttacctcatctgcaactggggatgagaatatatatcatagcatgccctgggagaagctgttcctgaccacctgggctatggtgattttgacttcctctgtgtcagaagtacccccgtctcatgcctgccatagttgtctttttgttttgttttgtgatttcagatggactcaccctgtcacccaggttggactgcactggcctcaacctcctgagttcaagtgatcgtcccgaaactgagaca

SEQ ID NO: 444883 - DNA, 1267 bp, Homo Sapiens
  misc_feature (55)..(55): n is a, c, g, or t
  misc_feature (262)..(262): n is a, c, g, or t
aaagctccttgaaaataagacccttaagaaggatcccttgggcttgccattaaanccactttgctgtccgtggaggtctgacaggaccccaatagttgttactacaaaagtgcgtttgcaaatagggcaagttagaagaaggaggtaatatgaatattctttagaaaaactcaaatccatcggcttatcaatacccaaagtctgaggctacccagggcacaatttggtccatggaatgctgagtggaggaggcagctggtgntgagtgcgcctgactcccaggagcatttagccatcctttttggcttggggattgtcaaagagccggactgccttcctgcacagcagacagaaccagtagatctgaggagctacgaggaaggcattggccacgttgcagtagaatgggatgctgaagggtacttggagcaggcttagtccctgctggcggccataggaccagtacatgaaggggaagagaaggatccggcaggaaaggaaggtggccagcgtgaggattccattcaccttgtacagaagggtgtgctgctgctttagctgaatcagaaccctgcccagcgacacaaacggagtgctcagttctgccgtgaagatgcagccgacaaagaagtccccaaggtctccccggagcctctgtgcgactggcacaaggacaaagagaatgaccgcatgatgtgtgatcatgaggcggtttcgacttaggaagtttcgaagagtgagggagggcgcacggttctggtctctggttcggcaccattcacagaggtacatggcgtacgagtcatagatcatgtatggaatcagaaaccacacatattcccgggcaagccagtgcctgccggtgatcacgtcgtcgcaggagcgaatgatgacgatccccgagccggtggccagcacggcgtgcaccgaggaaaccagcctggtgctgatcatcacgcagtcggtgcggctccatccgggctgggagcggcgcagcgcccaggtgcagagcgcgaagagccccgggaagaagagcgcgcccccggccagcgtcagcagcatcggggctgcgggtccggccgcctcgctggcgccgcgtggctgggttcggctcggcgcgccccggcccggccgcgcgatttcaaccctccgcccccgtccccgtcccgcctccgcccggcgctggccccgatcccgcggcgcggctctgcgcgtgaccaggcccagcgactgcgatagggcggggcggggagtcagttaattccgg

SEQ ID NO: 444884 - DNA, 1619 bp, Homo Sapiens
  misc_feature (1295)..(1326): n is a, c, g, or t
aaactctgcgcggaggtaccggtgacaaactgcagcagccggatcctcttctcgttgtccatctccttcaccacctgccagaaccactggatctgcttgctgttcttggtgtagtgccggtagatggtgctcttctgccagtcgctcatgtctatctcctgcatgccggcacagcatcagttccagctctttttggtcaaaagtagcgcagccactccaggggggggcacctcgttgaagccatccaggagggctttggtctgctcttccacggctcgggtgaaacgccagtcagtcagcagcatgatgtactcttccttgttctcctccgtgacccggatgctctcgccgccctcctttcagctcgtgggtcgtcaccttgcccagtatctccatgtcctggatgaagtacagctccaggccacattctttccaggttgttctctttgatccagacaatggagttgtagaactcagggtcaatggactccaggtctttcagggttggtctcttattgagcatccgcttgtagaaagggagggtgaagcccgtgtcgatgaactttccatggtacagcgccatggcgatgaatctgcctataaagcgaaagtaggtgaggtggtccgggttgatggaggaggcggggttgatctgcaggcagtaattgttctttccggcatattcaaataaacaatacatagggttgagcacctcgtgagacaggaggaaaaaccactctctggcgatgcccccatagtccaggccctcctcgccacgcatgatgatgtagagccggcggcgcaggtcatagggtttcatgttcatgatctgttggaaggaatcttcgaaaagcgtctgcctggaaacgctgatcttcacgtggctaggtagggcatttgaatggcagaggaaacggaactggtgatacttccaccgaaaactgcggtcataagcaccaggggaaccttgcttcgtccccgactcaaaccccgggcgaggatccttaaaggtggtggtgcgggtattgtggtccacaaagtatcgcaccccctcgctggtgtatttcatctcccatcctgggggcagagctggttcctggatcatcccctgggtccggggatcctcccactgggtcgtgcgagtgttatggttcacgtaatacacccgtccattgtcctgtcttttctcccagccaggagggagggggcccaggggatcatggtcagtcgaagcactcgaagactaggtagaggaaacacagcagaacacagaggttacaaaaagccactggtgnnnnnnnnnnnnnnnnnnnnnnnnnnnnnnnngccaatgactggcttccacatttgagtgctttgcagggaatgcagtgggactttaggtggcatctgctcctctcaaaagtctctgttttttgttttgatttttacagaaaaaccaaaaaagaaccctgcgcacggagggcccaagtgagttttggaaaaggcagagcgacggggaggaggcggtacgcgggtgaaggtgtgccagggtggcggaggcagggagcagcctggcatggtaggaaggcccgggaagcaggctcggcccagtgcctccgctcagctccggctcaagc

SEQ ID NO: 444885 - DNA, 1329 bp, Homo Sapiens
  misc_feature (101)..(101): n is a, c, g, or t
  misc_feature (505)..(505): n is a, c, g, or t
atccaatttttgccctcagattttttaaggggctaggaggaggtatttgcggccaggaactcaagtccccaccctttgcatttcaatacggacccggtttnttaggggagccaggggagcccagcccaggccaaagtttggagtccatgcgggtgctctcccatgtcccccggggtcccacttgcatgttgtaatcaaaggtgagcttcttcgcctgccccggatggttcttgtggcaaagaaagcgatgcggggcagccgctcgtcaaggttgtctatgaagacgttgtacacctgcaggttggggtcacaactgtggttgacaaagtgggagatgttgccatagtaggcggcatccacggtgtacacgtcctccacgtagtccaggtcaaagaggtaggtggcgccctgacggtcgtagatctggccccgccgctctgcctcctctgaggtaatgatctctcccacgtactcccatgacgaagctgttcttgcgaatcttctnccagggtgcggacgccccagcccacgcccatcatccgtgcggaagatgcagaggtcatatcggatacccttctgtaccacacgatttgggcagtcatagccgcagcggcagcgggagttgcactcgtagatgggcagcccggctcgaagccgcacctggccctggtcattgtaggcaaacttgtgcagtgacgcccccgggcagcagcctccagtgggtgcccacagacagtcctggcactcgcagcccacagccacctggttgagggtgatgccctcaccaacacggtactcattgatgtacacgaaggcccgcggagggccgtccaggtccacctcattctctacagtgatgcgtccccagattgctgcgcttggcattgagctccctgctccccagcgacggagcgcccgcctctgcttggccttctgcaccaggtagttggccaagcttgggtccaggtgccggggggtctttgaccggtggtgccgccggagcagctccctttctaagtccttgtggaactgcttgaggatacgcacacacttgagattctgccgtggctcccaggtgctctctgagtctggatatccacgccatttcaccaggtaatattcctgttcgcggatcttcttgtaatcgcacaggtactcgacttcaaagtcatagaggttcctcttagagataccgagggcagggcaggagagcttggccaggcggcacaggtcctgcagctgattccaagaagacttgcaacacacgctgcagccttttaaattttccgccatctttccccacggctaacgacattcgggatcccggga

SEQ ID NO: 444886 - DNA, 1601 bp, Homo Sapiens
  misc_feature (116)..(124): n is a, c, g, or t
  misc_feature (782)..(782): n is a, c, g, or t
  misc_feature (800)..(800): n is a, c, g, or t
ccttgaaaccaatcacatattaatttattccacctaaaaacatactaccattaaaagtataactgagcaaatgcagaagccagcttcgggattcttaatgatcactttaatatgannnnnnnnnattaatacttatgttacagactcactagtctgcaaaataattcaagagaagtcaatatttattagacaataaaataattgttccaaaggatatttctaaataacttcaaagaagttaccacaaagttaaaaaggaatatcttccatgttaagtttgtgataaaataatttaaacacatgattgactctacaaatcttttttacaaattacttcagaagttataagaggaaatgtttttctttttcctctgctatctcttattttttccttcctacttctgatccccttaatatacaatattattgatgtaaactcaagaattcatggtaaaaggcatctttttgcttcacagaaatcatgacctatagagaaaacaaggtaaaaaactaaggaaaactgaacattgaacttttttcaaaaaaattacaaaataggatgtataacattatctttggaaaacagacattttctttctactagaaatagcaaaaatcattctacattttttcttccccaaattgcatgttcaattagcatacatttccacagtgtgcatgaaaaaatttctaagcccagaggtatttaagtgatttcttcctaagtgttttggctaattcagtggccaagaaactatgatgtttattcttctgattggacnagagtcaagaaaacaaanccagatatattttaccaagggataaagctgatatgacccagcaacaatctgtcattacttcagctgttagtcggtcttctcccccccaacccagccccacaaaaaaagttctgctctgcttaagtgtacaagactccagtgaacttccaacagtttggcttcaagtgacctaggaatggagtgagtcatctgtaaagcctggagtggtccaaataacacagataacttcagtaacaactggaaacagctggctccaaatcagggagctacccaatcttcagtgacaaggaggaaacaaagtccaagcttctaaaacacgtaacgacaagtccaggaacgtggccggacataatccaaaaatgtgggatttttcagaggacagtgctgacgtgcataccattcttgagaataaaagcagagtaagactccattgcccaagaaaagagaagtccacatcagaacattccaaatcggctttttccgactatcattgacaatgaagttgaaagccattccaaagaacatgaagagcacgaagagcacgggatagaaaaagctcaagcaaacagccaaggcatattcgtgtactacagcagatacagcaaagacagctaacatggcagcagatttgaatctcttggagataaaccagagacaagtccttgtaagcatagtaatatagccagtcatggatcacaaccacattcccaggttctataatagttggagtatgacgtggagttccaccaatcctatatagaacaaatctgtcactcaagcgtgacattagcaaaggcactg

SEQ ID NO: 444887 - DNA, 1028 bp, Homo Sapiens
  misc_feature (804)..(804): n is a, c, g, or t
agggaagattgtctctgcgtatagtttgttttggggcctgcaatctcccaaggtttggttgggttgcccatgcctttgattgccagccactgtatttttcacctgtcggagtgcttttgccatgagcttttcttgccctgtggtatgaattgtgctcttgccatgtcagtaggggcccctaggaagctgccgtcaccgcggctgtcgggtttcaacctccacctgttttgcaagtcgatgagctaaggagttgacccccaagcatgctgtaagcagtctgcagccaccggcttggtggtgaggaagcggtccagagtgttcaccgtcaggcacatgcgactcgaaggagaggccgaattggcggtgcatccgggatcagccagctgagcagcttacagcgggattccgccgtcacttgtggctgcctgtgccagcgcctcccgcgggtggaagtggctctcctgcgccttgcggaaggcgtagcagctctggccgtagtcgcggaaggtctgtagatctagctgcgccacgggctgggccggtccgggcagggggctaccaccccgcgccgcagaggggctctctgcgccgtctgagccggagctgggggactcgaacaggtcgcaaatgccggagtctcccgggagcgggcacgggttcaggggatgcagcggctgcttcctccggaggcgcggaacgacactagctcgtttcgttccaccggggcgcgaaggttctggtcgttgtcccgcctccccgctcgggcggcggggctcgaggggctcggtgggacagcggggtcanccatgatgcggccgggtggccgctttactaccttcaacgcccgggctgcggcgggcagcaaacgcgcactcgaaagtgcgaaggaggccgggctcagaggctggcgcggtcctaagtacccggccggctccttctctctaccacacccccggcctctcactggctgagcccagagcggcaccggagccgcgattttccatcccgaactccgggcgtacagcctg

SEQ ID NO: 444888 - DNA, 949 bp, Homo Sapiens
ttttcagcgaccccaagcacagctttattgacaccccagccaacaccaacactttttccaaccagcggggaggggcccatggggcggggcctgaaggtggattgagggcctcggttttttgttgagtgatgacagctccatgttccttccagtggccctgcagcccctctatcccccagctttagccgctactcccagtggggcaggaggagcttccattgccatctggagaccctggcagggacttgcccatccgatccacacaccagcagggacctcggcgctgcccctgggaggagcggcactgccgcttccggtagaagcctcgatggtcacaattgggcacgtagagtgtttgagcccctcggtagacctcagtctggagttgctgcagcactgagtccagatgtctacggcatgggcccatctcagtgtcttggacacccgcagaattgggctgggagggcgtggtagaggtgcctggattcctctgttggtctctgcggttcacatcctgtgggcgggcagtgcctgcttggggtttactctccttaggattctcctctgcaacagcaggcgcgcgggccggaaggcagcggcctcggccgagcagcagcgcccgcaaaggcgcctcgtcgtccttgggcggatggcactgcagtcctggggcgcagttaggggtgtagaccccgcactcctgcccctccctcctgagacagccctcagcttccgcgcagccctcggctggcgaccccccatcctcctcctccacgcagccccctggacaacccgcctgcaccccttgcccgcagcctgggcaccgcgccaaggcgcctcctgggctggcagcgagcagcagagctagcagcagcagtagcggtggcagcagcctgtggggggtcatggtcagggtttgtgccccgtcctctatcccgggaattccggaccc

SEQ ID NO: 444889 - DNA, 1701 bp, Homo Sapiens
  misc_feature (484)..(492): n is a, c, g, or t
  misc_feature (1359)..(1399): n is a, c, g, or t
gctggatatttgttggcttttaataccccataaaattgcccaaccatctccccatacattttataggctatacgaaggtctcaaaagaattaataaccgttatccaaaaaatattataacatttaaggctgagtgaaatacagtaaagcctggtaatatatgttaaggaaaaaaacctagaccaacattttaaatattggtttcttaaatatgttaaattcccattaacagaacataatctaagcatcaaaacaaacagctaagcaaattaatttaaaaataaaacaatttctaagtagatgaatataatcacgatgtttatacagctataaagcataatttggaagctaagcctagtaaaagaatgacctgtaacagaatgacagaatcatttatcaaccgttgagctgtgtgatttaaaaacaattgttttctcctcctcccaccaaaatctccatttgagataagtttcaattattatttnnnnnnnnnttttttttaacttatctggcctactttgtggtgactgacacaatattgataaaactgccttcttgaccttccccttgctctccaaaagaagtggtttaaacaattaacaaattttacaagagcttctgccagggctcaggcaccacaatgcagggtcactaccttaggtaacatctgctccccagagtctttaggcattaagtggctcagtgagggcttcagccctagtggtattttcaggttttctcagctgggactcctgtcgtttttcatacagcatagtgataaagtcaagtaggaacataaaacttgctataaatccaaacacaattgcagcaatctcagctgaagtcctgtcatgtgtggaaacaaaaatgatggatgccaacaaaaacacacatcctgttcccaaagtaatataaaaatccgatgattttacttttgtggtatcaactctctcataaaatggagtgcaatacacaatcagtataaggagactcagaagaaaggcactgcagcttacaaactcaaaaaaataaagtcctccacataaagtacattgtgatacaacttcttcacagatgaaggccagcagagacagcaacagctgcaagcccttgagaacgcgccggagcaatgggagccggcccatgaaaaagtaggcagcgaggccgctccgggggcctctggcggggcccgggtcctcctccgtagtggggctgtacaccgctccgttctccatcgcctcgggccggggagcgcggcggccgcagcaaccgcgccgttgacttctcggactccagaagtccccggtagccgggaggcggccgtcacttcctgggccttctccccggcttccgcctgacnnnnnnnnnnnnnnnnnnnnnnnnnnnnnnnnnnnnnnnnntctcagcaaatttgcttgttagctgttgggattcttccgactttcatccaagaattgagttctttctgtgagcctttgatggatttctcacctccctccatctttcatcctcctgacattcattcacttagtatttttgcgtactttcggtgtgcagtgaaccccgttctaggtacttgggtgacagccaagtactacccaaaatcacaggatccctagtaacagagacagacaataaacaagaaaacagatggatagcaatttcagatagtgataagtgacgtgaaaatatgatacgaaaa

SEQ ID NO: 444890 - DNA, 804 bp, Homo Sapiens
  misc_feature (182)..(182): n is a, c, g, or t
tgcccctttgcttgccagttctcccggccggggttgatttttattggcccccagtttaatgtggaccagctccttgggatgggacctccttgtggtactccatgaaagggcctgcagtccaatgatgacaggggccctgactcggcaggtgactcttgctgcatttggtcatcttcttgccnaagtcatgggggtagattattttgatgctggctagctgcttgggggtccctgacacagggctgcccaccccacttgatggacttagagagcctgtattctcattattgttgaccatctggttagcagggcaggtggtagaggttccgatggcagtggtggtggtgccagcggcaatggcttgggtttgggcctgattgtccttgtcgtaggttgccacagtgcagcagctggcactgctgcatccacaattcagcgagcgggcagagccgctggatgagggcatatacgtcagattcgcagccttgagggacacaacggtggtggcgatgacaggagggtggctgttactgcctgggttggcagagccaaggtaactagagtctaaacaaaggttgagatcctgaggtcggacgggcctagatagtgccactactaccctgtcgtctaaaggagacggaggcatgaggaggctgaaaactggcaattcaagaagaactcaagacagtttcataaataagtgtattcctccaccatctggcgctcctcttcagctatggactcgcacattcagcccccattcactcggcttcattgatctccagcagcaacatagttctttct

SEQ ID NO: 444891 - DNA, 1145 bp, Homo Sapiens
ttttttttggagggttcagcaagtgtttattgagcagccacatttgccaggtcttgggatagccagtccctgtgctcatgggcttagatcctggcagaggcctagtggagaggcttggggtgggggtcggggcatggaaggctgtgctattggccagggactcagaatacaggagagtgcaagggtgacagaagtttctttcttgggcaaagaggcctggaatggtggcttgaatctcagccatgccttagccttcccctctcagccagagaagacccaggtctccctgcccagaggtccatgcatagccattcattcgttgattcattccttaaccaagaattaatgagtgctactctgtgcagggcctgtaagagcatgggctggaggaggcagctcaggggccgggcaggggtgttggctgcaaggttacaagagaagggtagcactctcagaggcctgcttgacgggcgcctgggactgggctgatggggggcctttctggggcacagggtggtgggaatgtaattggagaggcttccagaggcacttggacttgagaggcctccatggagcctctgacagagtccccagggggaacacctgctccaagagtctgggctctgctttcccctgcccccaccacggaagacatgtcaagctgggaagccatggaggagaaggggagggcaaaaaagttgttgagccactgggataaatgggaggagccccggagggagcggctgcgggatcgcacagcccctcgtatccggtggggtgggctgatgcccctttgcagctgggcaggatgttcctgggcattggcaggatggttgaggggccctgtgatggcaggagtgctggcttggaccacatggggagaccaagtccgaataggggcccgatgcaattgagggtgcaagcggagggcatggcgaaggcggatggctctctgtgctctgtacaacaggtagcggatcccgcggtggacggcagggcgctcctggtgatcaggaggctcgctgtgaggctcagcatcgggggtggcagcctgctcagcgggctggtggggaggccaagctggggggtggtatgtgccacagggcaggctggaggctcctgtgctctcagcagagactggactg

SEQ ID NO: 444892 - DNA, 729 bp, Homo Sapiens
ctcctcccgctcggaaggtcccaggtgtgacaccttcagcaggtctcaggaagatggcagccctaggggacattcaggagtccccttctgtcccgtcccctgtcagtctctcatcaccggggacacctggaacccagcaccacgagcctcagcttcacctccatgggcatcaacatggctcccctggctccagccctaaggtgctctcccagccgtccgacctggatctccaagacgtagaggaagtggagatcggcagagacaccttctggcccggtgagtgagcagaatcgggttactgggggaccagagctctgcgcgtgccaggctcctcacaatgcccacctctgtggcacccccaatgctggcaccacgcccgcttcctggggccccttttcttccctggcatcagctcacctctgccccgtggcccctcccccactctaatgccagtccagttactgatgcttcccgaggcggtgactgcagcccacagccacctgcgccagtggccccacgtggactcctgccggccccagctggacacagtgaatcaggaactcctccctcccctccacctgccttgcggctggggcttctgggctcagggcaccactgtccccccagatccacgagttatcctgtgtgcccgtcctcctcctgcatcccctagatggcctcccctcagcctggttggcagctgtgtccaggtcccctgcatctcccccg

SEQ ID NO: 444893 - DNA, 1013 bp, Homo Sapiens
ggatgggttgctggcctttcttggatgattcttgcatagggctcaagagtgtaactgtcgtgtaaaggtatagggggatctcctgcatgcgagagtagtgtagacatccacggtagagggcaggtagatggtgacggttcgatccgcagagccggtcatgggcgaggtcgagtacatagtgctgatgcgttctcagactccctacgttgacgtgcttcagcctctgttccaccgtctgggccgggtccaccatggcccgcgcgaagtcgcatgactcagtggtgcaggagcgcacggtctccgtcctcccctctcggaagagccgggtcatggaggcctcgtatgtgaggcaaaacttgcccatgtccttgtagtgcgccagctggagggccagctgcacaaaggcgtctgggctcgtgcgacatttcttgatgattcctttaccaaaggctacgaatgggaaggaatggaaatccacgtcgtttgccagaagatttgcggtgttcagggaggtctctataacctcttgacattcccccgggatgtcccactgcagcctggtggggtacggaatgttcggattgatgtcgcctttgcagtgcccatcctccgcatagcccagctggaggctgtcaatggacatgacgtactcccaaaggtgggccacgatcggcgcatctgcccaggagtgttcagcgttgaggcccatcttcccgtttttgaagacaacaaacgtgaacgacttgtcaaaccacctgtcgtaacatcggccgtgtagtagagatttggcgtagctgtccattgacgtatccgggtcttcacttctgtatccttcttcagtttcatctaacgtcacgaagaacgctgctttctccacagcatcaagagactgcttatttttcccacgtccaaaataggcctgacgacacctggcccagggaactctgtctcctgcggtgagggctgccagcctggcctccccgggctgaggctccgaggtattgtccaggatc

SEQ ID NO: 444894 - DNA, 1597 bp, Homo Sapiens
  misc_feature (923)..(923): n is a, c, g, or t
ggttccaggcatcaggttcggttttttaaggggctttgggttcttgccccaggccctagaaggggaaccacgtttggccagccagggggcacccatggcttcgcacggctggaggaccagaggcaaccgggcagacagcttggccaagaagtatcctgcgagacggtcagtcccgggctccccggaagcaagatagtattccctcaacccaccccccaataaataagcacaaagcctggccactgtagtctcagcccccaggaattcccagacaggccacagggagctctccagaaccctggcgacagctacactggccccatattctctttccttattgacctgggagctgcctgtaaggagggcagactcacgtcacaggattgcagagaaggttccaaagtgacctctcttccttgactgacaggtcccagccctagatcctcagtctgaagctgtggggccctccttcccagtgtggacatggtggggccctcatccttcctcccacccactgggcttgctgtcctgtctatcctgctgtcccatcctgtcctgtcctgggagcccaggctgaggaccggggtgcaggcaggaagggtccatccccatgtgcagagtccagctgggcagctaatcatcggagtagcggttccctgcaggggaggggaagaagaacagggagagaggcatcaggtgaggagcaggcagagtaggccgagggaccccacccctggtgctcacccaggacgttgaatttggcacagtgggcaggtctggtggagcatcagccaggggtccccacagtctcggtgaaactcgtgtttacagggcagcacccggagccactgtttgttgcagaagtagtccaggccacaccgcacaggtctcagcacccggatctggagggccctgcgctgccntgctcagccggcagcgccgtgtcttgagggatgccagtctccgcaccacgcggcgcttaaacagggtccacctggcctccgagctcccgctggctctgccgcgacgcctgccgctgggcctggaccacgaggcctgtgcacaggagcatggccaccagcaggatggcgttccacagctgctgcaggggtttctgctcctgggcacgactgcctccaaggcagaccaagtcctgccatcctccatagccatccttggagaggccacaggtggtccacaaggtcaacttccactcgatattggcagacagggactctccgctggtgatctcagccgtggcctgggtcctctgcagcaatgcatccaacagcttggtgacattggaggaataatggaggacgatcactggcctgagcagaagtctgggatatgtccagctctcggaccacgttgtggttcaggatgaggagaagcagggcagaggcacccaggaagagggcccgccgcatctgctggaccagggccttgggataggcctgcgggccactgcccttattctcctggtggaactgggccgcctgctccttgcccacgtatgccactgcaatccagccttccactggtgcctcctactcggcatccacgatgtccatcagcagcagacgaccgcccagca

SEQ ID NO: 444895 - DNA, 1037 bp, Homo Sapiens
  misc_feature (31)..(31): n is a, c, g, or t
  misc_feature (36)..(36): n is a, c, g, or t
  misc_feature (67)..(67): n is a, c, g, or t
  misc_feature (99)..(100): n is a, c, g, or t
  misc_feature (158)..(158): n is a, c, g, or t
  misc_feature (183)..(183): n is a, c, g, or t
  misc_feature (344)..(344): n is a, c, g, or t
ccagccaacttggcttttcatgggtggattnggtgnggtttcccacccacccccggaaacttcccanccccaggtttctgaagccatgtcccagtagannctctgtctgaacccactcccagggcagggataaccaccatttcagcggggggcgtcanccagcttcccagcacccccatcttngtgggtcccagtagacaaagatgttcatggggttccccacctcggtgagctggtggtcgggcccatacagccagaggacctgttcacagccccgcttgagtgcctcctgttgcactaacacggtgggcccataattcccacctaacttgtagttgccgacnccgcccacccaggcccggatgaaggctgggtcggccaggagggagaccggggtcacggagcctccagggaagtaggcacccactgggcagagaatgacgaacaggagcgcgcgcgtgggctggctgacacccagcgagggctcgttcccaatgagcacaggccgcacatagaggctggtgccggcggcatcggggacccagtccttgtccacttcgatgagccggcggatgcactccagcaactccagcttgtcgaaactcggcaggcacaggcgcatggctgagcgcagcatccggtccatgttgagccaggggcggaagaggcgcacctgctggtctttgcctttgaacgccttcatgccctcaaacagctgcagggagtagtggaggctggaggaggctgggtgcagcgtgaggttctggaagggctggattcggggctggccccagcccttgtcattccattccaccatcagcatgtggtcggtaaatgtcttcccaaacaccaggggctcgccggggccaggcttcttatgaggcttctgtgtcatttccagctgcaggtctgcagccttgaaactggaggaggcatatcttctgggaccacacagaagccaagggacagagagaagctttcgtgcccagatctgccccagagcggctgcggcatcccgggaattccggaccggtcca

SEQ ID NO: 444896 - DNA, 954 bp, Homo Sapiens
ggtgtttggaagcccatgttcccagtaagaatttgtttttggacccttcccaaggccagggataaccccatttcaagcgggggggcgtcaccaggctccaggcaaccccatctttggtgggtccagtagacaaaggatgttcatggttcccacctcgggtgagctgtggtcgggcctcatacagccagaggacctgttcacaggcccgcttgagtgcttcctgttgcactaacacggtgggcccataattcccacgtaacttgtagttgccgaccccgcccacccaggcccggatgaaggctgggtcggccaggagggagaccggggtcacggagcctccagggaagtaggcacccactgggcagagaatgacgaacaggagcgcgcgcgtgggctggctgacacccagcgagggctcgttcccaatgagcacaggccgcacatagaggctggtgccggcggcatcggggacccagtccttgtccacttcgatgagccggcggatgcactccagcaactccagcttgtcgaaactcggcaggcacaggcgcatggctgagcgcagcatccggtccatgttgagccaggggcggaagaggcgcacctgctggtctttgcctttgaacgccttcatgccctcaaacagctgcagggagtagtggaggctggaggaggctgggtgcagcgtgaggttctggaagggctggattcggggctggccccagcccttgtcattccattccaccatcagcatgtggtcggtaaatgtcttcccaaacaccaggggctcgccggggccaggcttcttatgaggcttctgtgtcatttccagctgcaggtctgcagccttgaaactggaggaggcatatcttctgggaccacacagaagccaagggacagagagaagctttcgtgcccagatctgccccagcctcgtgccgaattcgccaccca

SEQ ID NO: 444897 - DNA, 2020 bp, Homo Sapiens
tttttttctggaagacttagacaatgctaaggaaaaatttaatgatggaaatatcgacaaatattcaacatcatttaaaaacaaagtagcttctcttatttcacatagcttagtttgggatagaaatagaactaatgtttacaatgattcttacatttagcattaatcagaaacgagggtttgttaagtgcccttgctgggtcccaacccccagagattccgattcagcaagtctgggatgcggcttgagaatttgcatttctaacaagtttctaggtgatgctgatgccaatagtctgtgtaccgtttgagaaccgctggattgattctttgacagtttttgaagtccgctgctcaccatatcacttcatcctcttataaactttcactatgtgattgcctaagagcccctgcttgttggctgctccacattttcacacagttgtactatttctttctgaaatgacattgtttgagggacagtgggtggaacgtgtgagctcctcactgaaggctgcctccagaattccctgaatggactgccttgctttcttcctaaaatctttccccaagagggcataaaggaagggattaaagcaactattggcagatgctagagcaatgcatacatgatcccaggacatcagagttttccccaagggagtttctgggtcagtaagcaatgacaggactccaaaaatgtggtatggagtccagcagacaagaaagacagccaccaccaccacggccactcgaaaggttttgctctgagacttggcgaagcggcccctttgcattcggaagacaatgaagctgtaacaggctatcatgataacagagggcagcaggaaacccaccactagcctagtgatcgttattgccacgaggggtgttggcacttgatcgtcatctgtgaattggcctaaattgtaataatcctggaaaccttgtggtagctcagactcgtagaaggaattgctagaagcgctagggaacagctttaaatgagtagagagaaaagcatcagagttatccagtgggctggtttcgtgatcttcaataggaaacccactggggatttaggtgagaccacatcagcaggtttaaatacattagaatacagattttgacttgttaacctagcagaacccctagggagtgaatctgcagaaggtctttgaaatgtttgaggttggaagacagtggggactgtcccaaggatgatcagtttgtttggaaagagggaaggatctaaccctatcattcatttctccaggcggctgaacaatgttttcaagagacctgtttttctagtggatctccataaaagtctggataatctaatgagctggagagaccaaattttgtagccacatctattatggttgtctgtagtgaagatttcccggtacacgaacacaggaatgcacatcacaaaagccaccacccagatacatccacagatagagcaggccatccctacattgcgatgattctgacaccagattggcttgaataccacaagacagcgatccaggctaatggcagtaagcaggaagacactggcaaacatgttgaggacaatgatggaggggatgagcttgcataggaacctgccgtagggccactgtccctggagagccaagtgagccagcgagaagggcaaggagaggcagcagaggaggtccgccaaggtgaggtggaggaaccaaattgtgttcactgtccgctgcatcttcaggccagccacccacagcaccagcccattgcctggcaatcccagtaaaaaagtaaggctgagaatgaccatggagagaattactgggggctcattccatggctgtgagagtaggtcagttgaattggtctcagcagagaaagacgccattgctaaacttcaaaaaactgagacagtagctgaaggcttcagcacctggatgtctccacgagtcctgtctggtccccacacttagccacagtgaagtcatgaagtatggcaagaaaatttgctgagctttct

SEQ ID NO: 444898 - DNA, 1733 bp, Homo Sapiens
ggaattcccgggatggggtagggacagcgcggcttccgccgggagcccggaaccgagcccaggagccggggacggtgcgccagtgccccctccgcgagccccaaccagtagacggttccctgtctcccgcgccccaatttcgattttcaaacgcaactcctacaggattctgagaccccgtcccatctcccatatcccatttccagctgcaaattactgcagaatctgaacccaggaaagaaacccatttgccgaccccctcttccctctccagacaggtggagagcgggtgagggtctcgctcggctttccccctgcacctttcccaccctcccgcccgtccctgggggtcctccgtcaccgcggccatggcccagaagccgaaggtggacccccacgtcgggcggctgggatacctgcaggcgctggtcacggaattccaggagacccaaagccaagacgccaaggagcaagtcctcgccaacctcgccaacttcgcttatgaccccagcaactacgagtatctgcggcagctgcaggtcctggatttatttctcgattcgctgtcggaggagaatgagaccctggtggagtttgctattggaggcctgtgcaacctgtgcccagacagggccaacaaggagcacatcctgcacgcaggaagtgtcccactcatcatcaactgcctatccagccccaatgaggagacggtgctgtctgccatcaccacgctcatgcacctgagcccgccgggccgcagctttctcccagagctgaccgccacgcccgtggtgcagtgcatgcttcgcttctccctctcggccagcgccaggctccggaacctggcacagatcttcctggaggacttctgctccccccgccaggtggccgaggcccgcagccggcaggcgcactctgccctgggtatcccactgccgaggagcgtggccccacggcagcgctgatccatggagactgcgagaccgtggcacccctactgctggggaccacagtcctgatgtggacgcagggaacggggagcacatactgccccattggtgccttttcagccatctgaaaggcgggttctttcagcaggacaggcatttacactgatgaaacgccactgggagtgaggaagccagactccagagacacggagaagatcaaactggagctgcgttcataggctggcactctcaatcctacatcaggtgccaccaccaccagactcagggccctggtgtaaagaagcgggccagtgcctggacccagaggctttgcaggacagtgttctcaggagctgggcctgaggcttaggagagctgccttcgctgcaggaaatcagggattatcccttaacagaagtgtctggagtagttttcaggtataggaatgagatgcctcgtggtgaaaggatctcacccctgggaagatgtggtgccccctccagggctctggaggatggatgcctcccccagggggctctcccagcctgggcaatttggggcctggtgggaatggccaacctgggataaccctgtgggccccaagcatttggactgtgcccaccccaggcccttgcctggtttaggcacccatgggacttccaagaattggaaaaagggtgggctccccggcgccttttgaaatggaacagccccccaggggaccacttaaatggggagtcgcctccggtggcattcaaagaccaccaagggcccgatggccga

SEQ ID NO: 444899 - DNA, 982 bp, Homo Sapiens
ccggggacggtgcgccagtgccccctccgcgagccccaaccagtagacggttccctgtctcccgcgccccaatttcgattttcaaacgcaactcctacaggattctgagaccccgtcccatctcccatatcccatttccagctgcaaattactgcagaatctgaacccaggaaagaaacccatttgccgaccccctcttccctctccagacaggtggagagcgggtgagggtctcgctcggctttccccctgcacctttcccaccctcccgcccgtccctgggggtcctccgtcaccgcggccatggcccagaagccgaaggtggacccccacgtcgggcggctgggatacctgcaggcgctggtcacggaattccaggagacccaaagccaagacgccaaggagcaagtcctcgccaacctcgccaacttcgcttatgaccccagcaactacgagtatctgcggcagctgcaggtcctggatttatttctcgattcgctgtcggaggagaatgagaccctggtggagtttgctattgctgctgcagtctgaacggtgacggtggcccctgcagaagcatgtggctaaatctccaccagggggcgatagagctcctccaaatcaagctgctgcccctggagaaaaattggcggaagtcacagagcagtccccaccaaaagtgtttaccaagtggagtctttcctgctggcgtttcctcagggtcaggaagcaactttcccaggacaggggcaccctgaggtccgggtccactgagctatgggggcggcgtgggcctgggctgggttcttgccatcctgggcagcttcccggcgtgggtgactgagcccgggtcctggagtccgcggtcccagcgtctccacttctcagctgattcctagaagctgagtcccgtcccttctccgagcgtggtttcctctcccgccttgcctgcgtcgcaagcagttgtgggagcagaagtgtg

SEQ ID NO: 444900 - DNA, 488 bp, Homo Sapiens
  misc_feature (14)..(14): n is a, c, g, or t
  misc_feature (458)..(458): n is a, c, g, or t
  misc_feature (460)..(460): n is a, c, g, or t
acctgatgttagantgaaaatgccaaccttatgaagcaactccaaatttgatcttctccttgtctctgaaatctggcttcctaactcccagtggcgtttcatcagtgtaaaatgcttgtcctgctgaaagaacccgcctttcagatggctgaaaaggcacccaatggggcagtatgtgctccccgttccttgcgtccacatcaggactgtggtccccagcagtagggttgccacggtctcgcagtctccatggatcagcgctgccgtggggccacgctcctcggcagtgggatacccagggcagagttgctgccggctgcggcctcggccactggcggggggagcagaagtcctccaggaagatctgtgccaggttccggagcctggcgctggccgagagggagaagcgaagcatgcactgcacacgggcgtggcggtcagctctgggagaaagctgncngggcgggctcaggtgcatgagcgtggtg

SEQ ID NO: 444901 - DNA, 869 bp, Homo Sapiens
  misc_feature (168)..(168): n is a, c, g, or t
tcaggagatgttactgctgggcgtggcttgcgggggctcggaagtgatcggagccactgggtctagtttggggaaaccccgggggtgggtacaatcacatgctgggggtcagggcctgcagatgcgccagggcccgagttccgttgaaggtcacctcacagcctgacnttggctaggagccagttctccacctccgacctgagccacctggaggtctcttcggggcgagccttgagtgccgcctggccgccgggccaggaagctgtgagccagcagcgcctccttggtgtgctcgtcctgcgcgcgcaggccagggcgctgagcagctccgagttgttggacgtactgcgatagtacagcatgtgcgccagctcctacgcctgcgcgctgcgccgctgcccgaacatcttggaggcccgcaggcccatgaagatggcgaagagcagcagcagcagggaggtggccaccttgaggtcggttagcaccaccatgcccacgttgacgaagatcgccacgccggagactaccagcatgaggttgagcagggcgcgctgcagggtgggcgtgcgcaccttcagctccggcagcagctgctccaggccttccagcggcgtgtccttgaaactcttcagtaccaggtgtccccgtttggtccgggctgccaggaccacccgcttaaagtatctcctgagggacagagacagaggcaggagcaggatcgggactgcactgcccggggagccccctccaatcctaggacgctcactctggctctacagtcgcacaaccatcttaaaagcgactcagtaatcatggggaagaaaccagggatcagctgtgtccaaccacaggggatcggttcaatcgcg

SEQ ID NO: 444902 - DNA, 1811 bp, Homo Sapiens
gttgtttggaggtgtgatgtataggcgtgtctgcgtctgtgcgtcatctggtctatagtgcccggcgactagttctagtctcctgcttgtgatgtgtgcgttgcgtcttcatgttacacgctcatagcacgagacgctgtgagtcgacgtgcatgtcgcgcggaccggcgtatatcaggcgtatccgcgattctgtggtaccagtgacggagagaggtgacggcgtatactctcgcggctgcattcttccgtcgtctgtgctggtctggcagactcggtcgcgcgtggacggtgtgtctcgcactgcgttgatcgctgggccggtctatctgtggagtggtgcacacgctcgactaaaatagcgcataggtgtggaaatgcggcgtggagtgatgtgtgaaggtggcgagatggcgcgtgtgtgccggtgggcgttaagttaggttggggggttggtgctgctaatcttcgcgttctttgggacaagtgaagtttagtgcggggtgtcctactcgtttcgtgcggtgcgtcttcgcttacgtcttcgaatcagtatggaaaattggtggcatctttattgatacgccgcacattgcaccgtacttgtcgcggtgcgagacgacttggcgaagagacgagggagtcgaagtcggtcgtcggggttgaggagagggatggggtgtgaatatgtgtgacgcagtactcccgcgtgacccgccgccatcgtgttggttgttctaggagactggcgtgttgggccgcctggggggcgatgagctgcaccttgccgccgttgactgatgtttacctctgcggtcactaccagcatgaggttgagcagggcgcgttgcagggtcggcgtgcgcaccttcagctccggcagcagctgctccaggccttccagcggcgtgtccttgaaactcttcagtaccaggtgtccccgtttggtccgggctgccaggaccacccgcttaaagtatctcctctcccgcagggggcagcttggtgaagaagccacgcctggagcccacgctggacttcaggggcatctgcccgactcgctggcccagggcccagaagtgaatgtagacatactgatccaaatttactgtcacctggacctcatcctgagggtggtggaccaccagcgcgtaggccagggtgtcctcagacagcggggagaagttggcctgggccagcaggggctccagagcccgaagcacctcctgctcattagacagacgctggggatccgttagtgatggctgatcgagggtctccctgtcagggttgatggggtcatataaggcctgcagccgggccaggatttggtggtagtggaacagggtgcagaagtccacgtgggctgagaacgcctccaaagccgccttctctgccggactcgagtggaattcctgtattaggaggcggagcagctgctccttggagaagggaatgaagcgctcgcggtactgctgggcccagtcgcggggctccctggggttccacatcttgcgatactcccccattttggctgccagcgatgagagggcccgggggggcccgaggagcgcgggcaacagtggccatactcggaccctggacccccagaccccccgggtcacatgcagcatggctagaccctttccccggagccttagccaaagctcgactgtcattgagcctcctgcgcatgtgcaggagggcgtcctgggctcccgaggttcggcttcacccagcagtaaaacgcatgcgcaaagcttcggtcaatgcgggctgtccatttctcaccgccgactccctacatcaac

SEQ ID NO: 444903 - DNA, 1237 bp, Homo Sapiens
  misc_feature (1150)..(1186): n is a, c, g, or t
ccaagaataaagtcgtttattattttcagagcggcgggagtagggctggggaccctagggccgctccagtgggacttccctgaacccggttgtagaggatgatggcgcctttggccgaggggcagagttcagcccacatctccgtctcgggcaatctccgcacgttctgtgtctccacaaagaagattcctgtagactcgtgggcctcgggtcccccactcaggtagtgcttcctcacctgctcagaagtcaggctgcactggacatagaactcggcactggctcggccagcactggtctcatttcgggcgatgcccaacagcaggggctggctcagggtgagcagcggcaggttcacctcatcacagatctcctgaaggacactggaaaagagttcatgtaccaccagctgcccagcgaggtcctggtgctgggggctgccaccagggcacagggcctgaggctcagggtgcccaccaggtacgtccaccagcccaggggcctcagccacctgccgggagcggcgcaggaagacaaggaagtcatcggctgtggctagtgcagcgcccacccccagtgggtccgccagataggcctgcgtgtcaccccagtcggtggcaccctgctgtcgcagccaggcagctgagctggaccagttggtgcccaggaagtctcggtaggaagtaaggcccaggcgcaggagcagctgtggcccccgagagccaataggcgccagggtggctgagtgcaggcggaacttgggggcgtcgaagagccagggttgggcctttagccgggtctcccagatggcagtgatggcctcgtccccacctggcagtgggcgacggtcatgggcggggctcagctcggcctgtatctgctcctggggcaggcccccgccagggcactgcagcagcaaggtcacctcaggatccatggtctgaacggggcagctcatccagaggtcttgggttcaggcgccccaaatgcccatgtcccccaaacccaggggtctgcctccgacccggggcgcgcggggacccctttccagggcccggaagctccagcctccagcgggcgctcaccagccgccgggtccctcagactccccgctctcgacgaattcgagctcggccgatttggcctgatnnnnnnnnnnnnnnnnnnnnnnnnnnnnnnnnnnnnncgccgccaccgcgataagctccagttcgccctataggagtctatacatccc

SEQ ID NO: 444904 - DNA, 272 bp, Homo Sapiens
  misc_feature (123)..(123): n is a, c, g, or t
cactaccactccctggctgcgcagctagccccctctgtcgcagacctcctgagggtataccgcagcgcttctccacccccctgaccactccttgggcagtaaaacgtgccatcttccccgcanaagccccgagtcccgcagggtatccagaacgcccgggcatccctaccatccagaggtcttgggttcaggcgccccaaatgcccatgtcccccaaacccaggggtctgcctccgacccggggcgcgcggggacccctttccagggcccgg

SEQ ID NO: 444905 - DNA, 285 bp, Homo Sapiens
  misc_feature (21)..(21): n is a, c, g, or t
  misc_feature (27)..(27): n is a, c, g, or t
ccaagaataaagtcgtttatnattttnagagcggcgggagtagggctggggaccctagggccgctccagtgggacttccctgaacccggttgtagaggatgatggcgcctttggccgaggggcagagttcagcccacatctccgtctcgggcaatctccgcacgttctgtggggagacaacgagacccaggcattcaagcttgccacttctcctgccagggctgtgccagaattcctgagcctcagagacctctgcactgtccttagggaggcatgttaaggggc

SEQ ID NO: 444906 - DNA, 1503 bp, Homo Sapiens
  misc_feature (449)..(488): n is a, c, g, or t
  misc_feature (713)..(713): n is a, c, g, or t
  misc_feature (781)..(781): n is a, c, g, or t
  misc_feature (784)..(794): n is a, c, g, or t
tgcgaatagggttaaaaatggcgaaacagtgggtttgggtgtggattggattcgcgaatgtgtgggaaggcgtgaccacagcgagaggtggcgagtgggcagggggcggcgatacggggatgtatggtaagagatagcgtgggaggacggaaaggggcgaacacgcggtacatcgtaagtcgaggaggaaaggtgcgctaaagggagagcgaggaaagtcgcattcgacggcctcgtctcgttgtaagcgtggtcggtaagggagggcggaccagagcgtataggacaagcgtagggcggtgagaagtagtttgcgcacgaatacggtatagaaaaggcgtgggagaagcgaaacggagggggggaggggacgataaaggggccggcggagagggcgcacaggcggggaggggggaaatgtgagggggttgccgcgttcggagttggannnnnnnnnnnnnnnnnnnnnnnnnnnnnnnnnnnnnnnncattagcggcccgaccgctgtcaggtacgggtgaaacgggcgcccgcaaggggacggggagaagcagggtggaagggtcgggggggtcggccaagggtcaggaaaagagtagtttagcttccttgaatggacaatcggaagcctggatagaaaccagttgtccaagggcgaggagtgtccagaggccaacaatgactcatgctgggccagggggacactggggtncccatgtgcaaaatgcttacttaatagtattattctaaatacgaataaaatagtcattcaaatacacnttnnnnnnnnnnncaaccctctaccctcacacctttccaaacactgggaaagatgaggtggaaaaaactcaagtttgatgcatcaggaagtttcttgtgagatgaaggcaggggggagcccagggagtcagggccccgcaaccaccaaactgtccctgttccaccctgacccctccagcttttgaccagatcggtggttacgggcagctggaggcagcctacgcccaggccattccctccaggaccattgccaacaccacctgccacctgccacgtacagacgccatgcacatgtttcgagacccccacacaggggacctgccgtggaccgggatgacctttggcctgaccatcatggccacctggtactggtgcaccgaccaggtgagtgccaacgtctcccgcccatcccaccttcctgccgtcccagtgggctctggtaggcccaggcggcctgtctgccctccgcgtcatgagtctgggctggggcctcagaaggtgtggctccaggctgggacatgctgctaggggtctttgcggtcccggggggcttgagccctccgtttagaatccgatgaggcccactggctaccgcccgtcctggcctttaggtgcttcgactgagacagtttggagtatgggattccgaagggactcggatgctcctcggtggccctgccatcggcctcgtgccgaattcgccacccaggcctcgctaccta

SEQ ID NO: 444907 - DNA, 951 bp, Homo Sapiens
ttttcagagaagtaaaatatatttgctttattatgtacacactatatttacatcacccaccctgaaaacagcaggttctggcttttccgtgaacccccagatgaatataaattggagcctctgagaacagttccttccccagagcggggagtgtgcacgtgtgtgtgtaaccttctgattccatgggacctggccagctcctctggagccacacagcacctccttgccttacaccctggctccagcttcactggtccgggggacgcctcagcctggggcagctgtgatgtaaaccagtcactccacctccatcttcctcttctgcaaagaatcgaggaagtcttgccactctgctgggtaaaagcgtttatagacgttgatcttactccgaatctgttttggggtatcttgatagtaattcttctcatcacgggccatggccttatagtcctccccgtggttctctaccatgtagcgtacatagtcaatgaggtcccgagacagagtatttcctttcttttctggaaggctggcttctgcctccaggtcattcagcacatagggcttccgtacaagctctttaggcctctcctctatgtccacctccatggccttcacctttctcttacggaggggcaccgccctgttggggtccacagccaaccccatctcggccaggttctgccgtaccgatttagcgtggtcccaggcatgtcggatgtgggagcattcgatccgcggcgctgccttccgtcgagcattccggttcagacgctttcggttgacactgtaaccaaacttctgcctccgggttttgcccttggccttgggcatcgcgctgaccaccgcaccagcagctcaaacacgctgcctctgtctctcagacctccctcgtgccgaattcgccacccaggcctcgctaccttataccgctagattactggccagtca

SEQ ID NO: 444908 - DNA, 1369 bp, Homo Sapiens
ttccctttcaatcttaccccaccacccaaaatcccaaaaccccagagcgcaaagggctgtgatcccaaatatggaaattaatctgaaggtctgtatatcaaatcaaatgtacactgggccattagtgtttctcttttccttaaagcagtgtttgagatgactctcacggaaatgtccttccttgtttccagtcatctgcagccaggggccctagaactgtgaggtctgggtgaatgagatggtgtcagacttgtctactgcaaagcctccattgacataagacttcttggtgtctgagtcttcgttgtcaaggattgtggattccaaggcaaagggattcacaatgttgacttcagatgaaacatccatctgctccagctccttcttggagagcttttccacaatgcccgtcccaaaagcatcaccaaggacgttgaccatggtcctgaaccggtccaggagccagtcgacagcaatgatcagggtgacatcctcggcgggcaggcccacggcactcagcacaatcaccatggtcaccaggccagcctggggcacgccagcagctccgatgctggcagatgtggccgtgatactgatggtgatgatctgcccaatgcccaagtccaggtcattcaactgtgcaataaacaccgctgccactgcttcatagagcgcagtcccatccatgttgattgttgcaccaacgggtaacacgaatcgagtgatcctcttgtccacctggttattttcttcagcacagcggaaggtgacaggcagtgttagtctgaactggaagagatcatgagagctgtcaggagagcctgggccattcccctggcaagatcggaaacgggttctttcgtacgactatgaaatatatcagtgggagaattacaatggagtggattgcaagcccagtcaggactgtggccatgtcaaggcccagcttgcggaatatttcccagtcttcaacttctagtgatcttcccagcaatcaggaccaatatacctagtggcatataacacatgatgatctgaacgattttcatggttgcatcactcaaagcattgaagacatccaccagaatttgtcccttttctcccatttttccattgacaagtccacagacaaggcaaacgacaatcaagcccaggacgtttatgccatctgaatacatgccaacaattttgtattccttctagttttgcttcttggcaattgcagttgtcatcgacagctgtgaaggactcttctgtcatgttcatctctggatcgctgggaggcttcacttcttcacgcttagttctgtactgctgaaaacaggcctggacaagattctcagggaacatattcctgatgagatccgct

SEQ ID NO: 444909 - DNA, 1894 bp, Homo Sapiens
  misc_feature (261)..(261): n is a, c, g, or t
  misc_feature (449)..(449): n is a, c, g, or t
  misc_feature (458)..(458): n is a, c, g, or t
  misc_feature (516)..(516): n is a, c, g, or t
  misc_feature (627)..(710): n is a, c, g, or t
acagggggacggaagaggtgaggggacgcgttgttcccgcgaagtactctgtttggattatctgcatggccggaccggtgttgtggtatcactcaccgtcttggttccggagtacgcgatcacgccgggccgggtgcactgggggcgcgtgttacatacacgggaggtgccgtgagcggtggaaacaagttgagtcgggctagagaaaagagggagcatcgccatggtgtcactggccggctccccaccgcgaggcatgangggttttgttgcggtgtcagattcgggggtcgcgatagaggtcacggagttggccgccccgaccgtctttccatcctcgatggacagggcgtaccgcgggggggtggctgcattcactcgtgatgggcgggggcacgcggacgggggcgggtcgctggcgcgcacagatgatggcgtagcttcacggnggaccatgnagcggggggggagaaacgcgcgccggcggggggcatttggtggggcgcatattcacgnggcggttcgtagcctataaagatgatattgtgtttagagagagagtgataggggcgaggggtgcggcctctgttcgaagcggtatcatcgcacgggcgggtagttccattnnnnnnnnnnnnnnnnnnnnnnnnnnnnnnnnnnnnnnnnnnnnnnnnnnnnnnnnnnnnnnnnnnnnnnnnnnnnnnnnnnnnctgggccttgcctgcggacgggggggcaggcagtccggggagggcatacgcgttaattaagaatttattagacttgaaatagtcaaaagatgagagataatttgtttcatttctattcccttttctgtaaccaagatgaaggccaaagtggtcttaggaaccttttgtcttcctgatgagttcttctatggtgtcccactgctccttggtgacctttctcaggtcgttgaattcccctgaaataagtacttcctctccaccgtcaaatttaatgactgctccattaatccaagaagcataatcactacaaaggaaagcagcaagatttgcgagttcttctacagtccccaggcgaccacagggaattctgccaatcatttctttctcaaatgttccagttgggtccagacggctaaaggcacctttggtttttataggccctggttgaatcacattgaatcgcattccatatttaccccattcagctgcaagagacttgctcatggcttccacacctgctttggcagaagcacttggtactacaaaacctgaaccagtctcagcatagatagtagtaatagaaagaaatgctgctcctttctgtgctttaattagttgttttccaatttctagtgtcacgaaggctgtgccatttagaactatgtcagttatggttttccaagcattaggagaaagtctttcagtaggagaaataaaattccctgctgcattgtttatcacaatattaggatgtcctgcaactttgatcagttctgacacagtgttttgaaccatatcaggatccctcacatcacactgaattgcatgaaccttatttccagtttgagaagaaatttgttctgcggtagctttcaaaacatccatcttccggctggctatcacgcactgagcacctaggctggacagaagagttgtcattcctttaccaaggccagtacctcccccagtaatgaatgccacttttccttgaaaactattaggtggtagcatcgctttttgaagaggtgaaaagaatttagattgcaaagcttcagtgttttgatataatatttttgtcccataactgaaaaacctccgaggagcgaggccacagggcagccgggaccccagagtaaagaaaaccctggccggtagcttcatgttgagtctccagaactcccgct

SEQ ID NO: 444910 - DNA, 977 bp, Homo Sapiens
  misc_feature (124)..(124): n is a, c, g, or t
cccgtcgggaagatttttttgtgtgttgcgtaattaaagaattttactagaccgtggaactagcgtccaaacgattgcggagagataatttggcttcaagttgcaatccccttcgtccgctacncccaagaatgaaggtcccaagtggtcttaggacattgtgtcttcgggaggagttcttctatgggtcccactggctccttgggacctttctcagggtcgttgaattcccctgaataagtacttcttctcccaccgtcaaaatttaaatgactgctccattaatccaagaagcataatcactacaaaggaaagcagcaagattgccgagttcttctacagtcccaggcgaccacagggaattctgccaatcatttctgttctcaaatgttccagttgtgtccagacggctaaaggcacctttggtttttataggccctggttgaatcacattgaatcgcattccatatgtaccccattcagctgcaagagacttgctcatggcttccacacctgctttggcagaagcacttggtactacaaaacctgaaccagtctcagcatagatagtagtaatagaaagaaatgctgctcctttctgtgctttaattagttgttttccaatttctagtgtcacgaaggctgtgccatttagaactatgtcagttatggttttccaagcattaggagaaagtctttcagtaggagaaataaaattccctgctgcattgtttatcacaatattaggatgtcctgcaactttgatcagttctgacacagtgttttgaaccatatcaggatccctcacatcacactgaattgcatgaaccttatttccagtttgagaagaaatttgttctcgcggtagctttcaaaacatccatcttccctccgaggagcgaggccacagggcagccgggaccccagagtaaagaaaacctggccggtagcttcatgttgagtctccagaccccgct

SEQ ID NO: 444911 - DNA, 1520 bp, Homo Sapiens
  misc_feature (1174)..(1175): n is a, c, g, or t
  misc_feature (1186)..(1186): n is a, c, g, or t
gtgaagtagagtgagcattagcctggcagacagctagggtaatagatgacttccagtggaagtcaaagcacaaatgttggaagaagaagaatggtatagaagccttaagcattttaactatgatgtctgccagagttgtttcttttcgggtcgaacagcaaaaggtcacaaattacattacccaatggtggaatattgtatacctacaacatctggggaagatgtacgagacttcacaaaggtacttaagaacaagttcaggtcgaagaagtactttgccaaacaccctcgacttggttacctgcctgtccagacagttcttgaaggtgacaacttagagaccccctcacaatctcctcaactgtttcatgatgacacccattcaagaatagaacaatatgccacacgactggcccagatggaaaggactaatgggtcttttctcactgatagcagctccaccacaggaagtgtggaagacgagcacgccctcatccagcagtattgccaaacactcggaggagagtccccagtgagccagccgcagagcccagctcagatcctgaagtcagtagagagggaagaacgtggagaactggagaggatcattgctgacctggaggaagaacaaagaaatctacaggtggagtatgagcagctgaaggaccagcacctccgaagggggctccctgtcggttcaccgccagagtcgattatatctccccatcacacgtctgaggattcagaacttatagcagaagcaaaactcctcaggcagcacaaaggtcggctggaggctaggatgcagattttagaagatcacaataaacagctggagtctcagctccaccgcctccgacagctgctggagcagcctgaatctgattcccgaatcaatggtgtttccccatgggcttctcctcagcattctgcactgagctactcgcttgatccagatgcctccggcccacagttccaccaggcagcgggagaggacctgctggccccaccgcacgacaccagcacggatctcacggaggtcatggagcagattcacagcacgtttccatcttgctgcccaaatgttcccagcaggccacaggcaatgtgaagtattcatccggccaaccaatgtttcctgacgtacagtgttgcccttttcagcaaatgccannattccaagttnccattaaatcagaagctccatggctccttggcccacgatgttgagtgctgactgtgtgttctactgaaagagtaaaacactgactatccaaagagaaatggatattctgtttttataataaccatatattattgttttcttcttccctttctatgcaagtgtaaattaatgaacagagaggtatttggaaatggtaatacattttgtcacggatttgtataatgtatacagcattgggaaagtgggtgggggctttctaatatgataccgtctttttaataactatgacaaagcttacataacgaattagaagaccactttacattttttacac

SEQ ID NO: 444912 - DNA, 852 bp, Homo Sapiens; identical to SEQ ID NO: 323048

SEQ ID NO: 444913 - DNA, 831 bp, Homo Sapiens
  misc_feature (58)..(58): n is a, c, g, or t
  misc_feature (719)..(729): n is a, c, g, or t
ggcagcgagagtcacagacaagacagcaagcaggatggagcactaccggaaagctggntctgtagagctcccagcgccttccccaatgccccagctacctcctgatacccttgagatgcgggtccgagatggcagcaaaattcgcaacctgctggggttggctctgggtcggttggagggcggcagtgctcggcatgtagtgttctcaggttctggcagggctgcaggaaaggctgtcagctgcgctgagattgtcaagcggcgggtcccaggcctgcaccagctcaccaagctacgtttccttcagactgaggacagctgggtcccagcctcacctgacacagggctagaccccctcacagtgcgccgccatgtgcctgcagtgtgggtgctgctcagccgggaccccctggaccccaatgagtgtggttaccaaccccaggagcacccctggcctggtttcatgccagctcagctgtggcctcgttccgaagaaggctcgagacacccgatcgtgaagaactgctgagccagcctgttctccgggcctgaatgtctgggggtgcttgtgccttttctgagaaagcgtgtgactgctcaacatcccaatcagggtttgagtcccccaaaaggggaacctcccctatcatggcttccccctttcccccctaaaatgggggggaagggaaacttgcctggggaaaaaaatgaaccaaaannnnnnnnnnncctccttggcccaagtttcttggccttttgcaaaataagggggttttcctccttggcttttttaacctaaaggggggatttttgaaaacgcgcctttccttg

SEQ ID NO: 444914 - DNA, 1100 bp, Homo Sapiens
agaggctcatcaaataggtagaaactttatttcctaaatccctccctggacctctttcagaaggcagttcaaatgcactgtaggtagaaggcagaggaagcccttatttagcaatgcagaacttggcagaggccccacatctgtcattcttcacagcagtcccttcccacatgctagagggaaggggaagcatgatagggaggtccacttttgtggactcaaaccttgatggggatgttgagcagtcacaacgcttctcagaaaaggcacaagcaccccagacattcaggcccggagaacaggctggctcagcaggtcttcacgatcgggtgtctcgagcccttcttcgggaacgagggccacagctggagctgggcatggaacccaggccagggggtgctcctgggggttggtaaccacactcattggggtccagggggtcccggctgagcagcacccacactgcaggcacatggcggcgcactgtgagggggtctagccctgtgtcaggtgaggctgggacccagctgtcctcagtctgaaggaaacgtagcttggtgagctggtgcaggcctgggacccgccgcttgacaatctcagcgcagctgacagcctttcctgcagccctgccagaacctgagaacactacatgccgagcactgccgccctccaaccgacccagagccaaccccagcaggttgcgaattttgctgccatctcggacccgcatctcaagggtatcaggaggtagctggggcattggggaaggcgctgggagctctacagagccagctttccggtagtgctccatcctgcttgctgtcttgtctgtgactctcgctgcccacaaggtcaatctatatcaacccaggtcactcagaaactcgggggcagaggctcgactcggagggctgctcaggacattccaagacagccttggccgtttccatagccacggtctcttccagggtcttgccggccgctgcagccaagccacaggcgtcccccaaccctacgagcgcccctctgcccgcccggttccggctctcaccgaagccgcctcacgcctcgtgccgaattcgccacccaggcctcgctcc

SEQ ID NO: 444915 - DNA, 933 bp, Homo Sapiens
  misc_feature (156)..(156): n is a, c, g, or t
  misc_feature (260)..(260): n is a, c, g, or t
  misc_feature (417)..(417): n is a, c, g, or t
ctccccaacaggtggggtccttctgggggccgtgcttgctctttcttgcccttcgagaccagttcccagtaactttttgctcagctttcgggggccgggcttcgtttccgctttccccgtgcttggggatccccccttttttgcagtcacgaaaanccatccgctggggaagagcttgccatccagtgggatccagggtcccacgtcactttcccaccgggagtctgaggagtgggagctccgagaagcacccagtcccntgcggtggagacgtcagagctggccaggggagggggctcctgcgccacaaagctgccggggtggtaggggctggcttgctgaccgtcgtccagcagcttcctgggcaaaggggctgccctggtcaaagggccctgggtctagggcctcctggaaggnccatgccatccttctccagcagctcaatgatccaactgagctcatcagaagagctggaagtgaggtttcgcagctgggcatggagttggtcccccaggaggcccaaaagaccagacgcagctcttcaagggcaccattgcagagggttggcgccatccatgtcacatcgtgagaagtcaatggcgcttgcgtcgtacttgttcttctccacttggtagctgatccagtccagaacctgcgtcttcgaccagaactggggctgttcccccaaccagctggccttctctgtaccctccaatgacatctgggggttgctcagggtcagtaccaagtcatcggccccaaaggtggcagcagggggaacagaggccagggtggagtcctccgagctgtacatcgcactgaagtagttgctaaaaatgttgctaatctcacaggttgcagccatgaggctaccggagtggcggagtccggctgtggcaggcaggccggcaggcgggagagaaatccagttcc

SEQ ID NO: 444916 - DNA, 1138 bp, Homo Sapiens
  misc_feature (869)..(938): n is a, c, g, or t
aagttgaaaaataccttgtttaagacctccctgggacccacaggggcacgtgtggccgtaagcctgtggcagcccaatcgttagcctttttcttctttgagcctctctaagtacatctgcagggacttctggatggagtctttggagatgaagctgacgaagttctgcacgtccgcatcgcgctgcgtgaccaggcggctggccgtggcctttcgcatcatggccttggtcagctgtcgagcatggtctggaatggccatccactgggctatcgctgacagcgcagtgctctgcacctgctcctccgggaccacctggtccactatgcccacctgcagggcctccgccggcgggaagagcagccccagctgcagggcacgctccgccgcccggtgcccgatggtgttctccagggtgtctttcaaccagaaaggggcgatgatgcccagctgggtctcattgagtcctatgcagtacctggggttgtccgccaggatgcggtagtcacaggtcagggccaccaggcagcctccagcggggcaggctccgttgatggcggagaccagcaccaggttggactggtacaaccgcagccacagctcctgaacggccttccagtacccagcgtagtgggcggggctcctcccacacatctccgtcaggtccaggccggccgagaagacacccgggcggtccgaggtcagaatgacaccgcggaagctcttgtcattctccagcttctccaggctgatgaccagctccgtcagaaactccaggctcaggctgttcactggggggttcttgaatttcatcacagcgacccctgcgcccgcgtccggctccaccagcacccgctggctcccgaagcnnnnnnnnnnnnnnnnnnnnnnnnnnnnnnnnnnnnnnnnnnnnnnnnnnnnnnnnnnnnnnnnnnnnnntgcgaaggcagcgtgggggagcccgttagttcccggtcctggccccggccccggcccgatccctgcccaccccgggtttcgcacccgcgcggagcagaacgcgcgccgggactagcacagaagccaccagcgccatcccgaaaattccggaccggtgccgggtagggagttgcggggggagagagggaaggccaccacgg

SEQ ID NO: 444917 - DNA, 1582 bp, Homo Sapiens
  misc_feature (249)..(249): n is a, c, g, or t
  misc_feature (439)..(450): n is a, c, g, or t
  misc_feature (594)..(602): n is a, c, g, or t
  misc_feature (749)..(835): n is a, c, g, or t
  misc_feature (905)..(959): n is a, c, g, or t
  misc_feature (1097)..(1192): n is a, c, g, or t
tgtataaataggcgaaagcggcgggcgcggctagccgtctagttctcaggagtgcgtgtgcaataggtaggggtggtgagatagccatatagcgacgtgggatataaggcaatagtgattgagtctgacgtggggggcgtagtagggcgcagaggctatatgagcgcgcgctggtatctattcgaggcatgcgcggcgactatggggcgggtaacgggcacgcgatatgcgaggggcgtgcatagcggngggaacggagagcactgatggcgggcagttccgggtctacttcgtgtgcctgtatacataccgactgttagcgcaagccgggcggggagagcatatcggagagatggggcgcgtcatatacggtaggtgatcagtggtgggggatataggaggaacggggaggcgataagtgtgattaggctatagggtnnnnnnnnnnnntaatgaagatagagacactcgcgcggagttgactatgcgcggagtgtggcgggactatattagtgggggccataaactagagggtggggatatagtatggcggggagactgaatagggggtgcagcgcgggggcggatatatannnnnnnnntaaaatatatacgcgcggtgaggacgcggcaatagcgcgcaattattaatgggcgtaggttggagggtggcggagaatgggcaggaggggagatggcgagtcggggtagcgcatgcgggggacggcgctacatggtcaggtatagcnnnnnnnnnnnnnnnnnnnnnnnnnnnnnnnnnnnnnnnnnnnnnnnnnnnnnnnnnnnnnnnnnnnnnnnnnnnnnnnnnnnnnnncgataagagggtggggataaggggaggtaggaaaggcgtgcgtagggtggcgggagtacgccgataatcnnnnnnnnnnnnnnnnnnnnnnnnnnnnnnnnnnnnnnnnnnnnnnnnnnnnnnngtgaataaatttgcggatccaagctggtgtctatgggggacggggggtagggtatacgggtggctggggcagcgagtaagggtggtatggattcagggtcagggtggcaagcacggatgggggaatagggaatataannnnnnnnnnnnnnnnnnnnnnnnnnnnnnnnnnnnnnnnnnnnnnnnnnnnnnnnnnnnnnnnnnnnnnnnnnnnnnnnnnnnnnnnnnnnnnnnagcggcctggggcgacaccgccaggtgcggcgcgagtaggcccacggagcgccgccgcggcatcacctggaccagccgttacgtcagccgctgcagctcggacccgcctagctgcgcccgctccaccggggccgccacgccgcgcagcaccgggtccccgacttggcacacgtgcgagaacggcggttcgggaggacccagcaccagacgcctcaggtggcgccaataggagcgccgcagcgccgggccctcgacgccgtccggggcggccgtggagctgcaagcccggacaccgacggctgccgccccgccccacggcacggccgcccacagtggccaaagactcagcgcgccccacagccgggccatggcggcccccttaacagtgac

SEQ ID NO: 444918 - DNA, 1089 bp, Homo Sapiens
gggaagggtgaacccgcccagtagggaacccccctgccatttttttggcattccttgggggcctggaggagctcaaaaacagcggtgacggccattgtagagcttgccaagaaatggcccacagaaggaggaagggccaggagaaaaggtgaggccccgcccacatccaggactgggaacccttcccactgtgagatccaggtgggttcctctccccccagggcccgcagccggtagaggcagcccctcgggtaataatattgcaggaactggacgcagctctgaaaaatggaaaatgctaagaactggttgcgaaacttctgataaatgggtccattaggccaggtcagcatcactccggacaggaatgtggagacgtagtggtgagacacccaccagcctttaattcttgagccgttgctgatgagaatgctctcccgaatggtcagggtgcagtaataccacaccagcaggaagttgaagacttcgtcagtcaccctgtagtgaaggacaaatcgacatgccacggcacccaggagcaggatgatggtcaggtagagcttgaacttctcatattcgtccttgtaggcgaacttggcctggttgctgaggagggtcacgttcacattgccgaggaccaggtttcaagtagagcccgttcttcttgggcaggtaggcctccatgtggaagaagacgtcctgccgctccttgatgttcgctgccatctgctgaacgagctccgcctcctcccgactggcatggcgtttgcacctctggagtgtaagcttcaagtccttgaggtgcttcttctgcttactgatggaactgctacacagcgtctgcagcgcagccagctcctccagcttctgcttgtagatcctgtgcgtctcctgcagttcttgaaattctccctccagctcgtgccattcgcgctcgcaacgctccagctgcccggacatgatgcgatggtgcaaggcggcggtgccggcggctgctcccgcagcgctgcccgaccggccccccagcgccccacgcccgcgcgctcgccgaccgccctcggaggcaccagctgttcctgcgcagccaga

SEQ ID NO: 444919 - DNA, 891 bp, Homo Sapiens
cacgggcttgagagggctgctggggaaggagcccgggagcccccctgcagtctgaagtccggcccgagggcacaggagcccgaggctcacggctgctttgtcttgcctctgttcttctggagcttggcatgcacgacttttgagcgtggtcaggaagttgccgaggaagaggatgaggaaggtgaacgccagtacgaacacctgccattctctggcattcctcgtcggctggagagctcaaacagcgtgacggcatatgtagagactgccagaaatggccacagaagaggaagggcaggagaaaggctgaggccccgccacatgccaggactggcacccttccaactgtgagatccagctgcgttcctctcccccagggcccgcagccggtagaggcagcccctctggtaataatattgcaggaactggacgcagctctgaaaaatggaaaatgctaagaactggttgcgaaacttctgataaatgggtaccattaggccaggtcagcatcactccggacaggaatgtggagacgtagtggtgagacacccaccagcctttaattcttgagccgttgctgatcgagaatgctctcccgaatggtcagggtgcagtaataccacaccagcaggaagttgaagacttcgtcagtcaccctgtagtgaaggacaaatcgacatgccacggcacccaggagcaggactgatggtcaggtagagcttgaacttctcatattcgtaccttgtaggcgaacttggccctggttgctgaggagggtcacgttcacattgcgcgaggaccaggttcaagtagagcctggtaaggaaacacccgttcttcttgggcaggtaggcctccatgttgaagaagacgtcctgccgctccttgatg

SEQ ID NO: 444920 - DNA, 919 bp, Homo Sapiens
agcggagtttcccgcatgctcagtagctgaggtagggatgccatccttctcaaaagacttattgacagtgccaaagctcggtactggacacaacgagggacctgggtctacgataacgcgcttttgctcctcctgaagtgtctttggtccaacgttgttccagagtgtaccatggcttccagtaacactgtgttgatgcggttggtagcctccgcatattctattgctcaaaaggcaggaatgatagtcagacgtgttattgctgaaggagacctgggtattgtggagaagacctgtgcaacagacctgcagaccaaagctgaccgattggcacagatgagcatatgttcttcattggcccggaaattccccaaactcacaattataggggaagaggatctgccttctgaggaagtggatcaagagctgattgaagacagtcagtgggaagaaatactgaagcaaccatgcccatcgcagtacagtgctattaaagaagaagatctcgtggtctgggttgatcctctggatggaaccaaggaatataccgaaggtcttcttgacaatgtaacagttcttattggaattgcttatgaaggaaaagccatagcaggagttattaaccagccatattacaactatgaggcaggaccagatgctgtgttggggaggacaatctggggagttttaggtttaggcgcctttgggtttcagctgaaagaagtctctgctgggaaacacattatcacaactactcgatcccatagcaacaagttgggttactggactgtgttggctgctattgaaccccgatgctgtgctgcgagttaagaggagccggaaaataagaatttttcagcttgatttgaagggaaaagccttctgccttaatgtatttttgcaagtccccggggtttgt

SEQ ID NO: 444921 - DNA, 846 bp, Homo Sapiens
agcgggcggtttcccgcatgctcagtagctgaggtagggatgccatccttctcaaaagacttattgacagtgccaaagctcggtactggacacaacgagggacctgggtctacgataacgcgcttttgctcctcctgaagtgtctttggtccaacgttgttccagagtgtaccatggcttccagtaacactgtgttgatgcggttggtagcctccgcatattctattgctcaaaaggcaggaatgatagtcagacgtgttattgctgaaggagacctgggtattgtggagaagacctgtgcaacagacctgcagaccaaagctgaccgattggcacagatgagcatatgttcttcattggcccggaaattccccaaactcacaattatagggggaagaggatctgccttctgaggaagtggatcaagagctgattgaagacagtcagtgggaagatatactgaagcaaccatgcccatcgcagtacagtgctattaaagaagaatatctcgtggtctgggttgatcctctggatggaaccaaggtatataccggaggtcttcttgactatgtaacagttcttattgggattgcttatgaaggaaaggccatagcaggagttattaacccgccatattaccactatgagattattcagctgattgaagggaaagccccctgcttatggaattgcaaggtcctggttggaaagaagtggggatacttggggcgtccccaaggtaattttaaatggctggggggagggcaagtttaacccgatatccccttgggaatgggccttcccgggacccacaagggatgggtaaagccttattggaaatcctgc

SEQ ID NO: 444922 - DNA, 1518 bp, Homo Sapiens
ccctctcctgggtcaacgggggttgattcaaggaatttcttacctgggaaaggccgtttgaaaggggaccatgtttggaaatccgcccggggtgttatgaaattgagggggcacggtggggggttcccggttgaaaatactttgtgcgggggaagggcccccgtggtccccccgcatagcggtggcacccccaggggctggcccactaaaataggccaccacccatgaggaaagagagaggaggatgattccaaggacgggcccgatggcactgctgtggcccgggctgtcgtatgagggcggcttggtgatttcacacatgagctcgtcggagcggtcgatacagtcggggaaggagtcgcactgctgtttgatgaggacacactggccgctcgcacaccggaactggttgggcaggcagatggcgtcacagtccgcctcgtctgagcggtcctgacagtctgcctcgccgtcgcagcgcaggcgcaggtccacacactgaccccgcgcgcaggggaactgggcggcggagcacacggggcagccctcctcgtcgctttggtcatcgcactcgggaaagccgtcacagcgccaggccccggggatacagtcgatctcccctgtggcacatgcaaactggtccggggagcaggtgggcggctctccacaggtcagcaggttctgcaggagcacgaggtggactgggcatgagcaccgtggtgtcccatcacccttggcaatacagatgtgggagcagccaccattgtcacgggcacatgggtgggctgagaactcctccaggctgacttcctccactgcatggatgccagtgaggtgggcgacacggccctggatgcgagtccgcttgtccccggtggtcttctccacacgctcgatcatctgctgctggcggtcgatccagtagagatgcttgccaaggatggtcaggcccagaggctgcacgatgttggcgtcctccagggtcaggcggttggcccctgacaggtcacagctctcaatgcgcttcaggtccgcgtccacccagaacagcttgcccagtgtgttgtctacccaccagggccacagggcggatgaggccggtggtgaagaggacctcgcgctcggtgccgtccagggctgcgcgttcgatcttggctgcccggtcctgcatgttggtgaagtacaggtaccctcgctccgcgttgacgacgatggccctgggcttgtcgcggtccccacgcagcaccacccccatggcttccccgctcagcctgtggacgttgatggtattggtggcctcgcacgtccagaacagtgtccggctgtagatgtcgatgctgaggtcgtggggctgcctgtctgggttttggccttggctcagagaggtcaaaacaaagggctgggtcccgtcgtccttggctcgcttgatgttctggcgcccatccacccagtagatgaacttgtccagtgggtcatagtcgatggctttgaatccagggaattccggaccggtccagc

SEQ ID NO: 444923 - DNA, 1002 bp, Homo Sapiens
gagtcttagtagtagcgttttaatggcagcagccccaagaggagagtcagagtctggtctgcccccggagcaggaggcttgggcttggagggcccatcccagcagacctaaccatccacctccttccattgaactgaggccaggaaagtgcggatttccatgggttccagcgtgatgttggccgggtccagctggtacggagtttggtggggtgtggggcctgtgtttgttgtccacttgagcctggaggctgcctcgcggagctggttggccaccagcgtggtctcctgcaggcgggtgatggtgaaggtggagaacaggtccctcaagttcaaggtaacgggggcgctcaggttacgtccggaatcctctcctacggcaaactggtgctccaagcgcagcagcaccatttcggggccccagctggccagcgtgagcaggtgcaccgagggcggcaggtccctgcgcagccctgagaactgcgtgcgcggaggagccccgagattgtaggcggcgccgccacccggggccagcaccacctgaggggccaggacctcctgctccgccaggagccggtgtccggcggctgcagcctgggctgtgtccagcagcaccaggtggcgccctcgcacccacgcccccgacccgttctccattagtggctccgatactccgcgtccatcgtccttcagcagccttcggtgcaccatgagctccagcgagccatctctcaggctgctgcccccctgggagcggtcagtcagcacagtcagctgcatgtttccatccgtgatgtaaatccgggtgttgactggatagtagtttcctgccacgggctccgtctggttcagtttccaggtgggtcgataatcccgcctcctctccaggatctcccggccattgctgtctgtgtagaagcgtccctttgtctccagcggtgtgtcaaaacggctgattgcgccacccaggcctcgctaccttataacccgagagttactggcc

SEQ ID NO: 444924 - DNA, 1917 bp, Homo Sapiens
tagcgaggcctgggtggcgaattcggcacgaggcgcttgttacctctgggagctgaacaaggccaacctcacctggtcagtgaaacatgacgacttcttcccttacgcggatggcccccaccagttctggaccggttacttttccagtcggccggccctcaaacgctacgagcgcctcagctacaacttcctgcaggtgtgcaaccagctggaggcgctggtgggcctggcggccaacgtgggaccctatggctccggagacagtgcacccctcaatgaggcgatggctgtgctccagcatcacgacgccgtcagcggcacctcccgccagcacgtggccaacgactacgcgcgccagcttgcggcaggctgggggccttgcgaggttcttctgagcaacgcgctggcgcggctcagaggcttcaaagatcacttcaccttttgccaacagctaaacatcagcatctgcccgctcagccagacggcggcgcgcttccaggtcatcgtttataatcccctggggcggaaggtgaattggatggtacggctgccggtcagcgaaggcgttttcgttgtgaaggaccccaatggcaggacagtgcccagcgatgtggtaatatttcccagctcagacagccaggcgcaccctccggagctgctgttctcagcctcactgcccgccctgggcttcagcacctattcagtagcccaggtgcctcgctggaagccccaggcccgcgcaccacagcccatccccagaagatcctggtcccctgctttaaccatcgaaaatgagcacatccgggcaacgtttgatcctgacacagggctgttgatggagattatgaacatgaatcagcaactcctgctgcctgttcgccagaccttcttctggtacaacgccagtataggtgacaacgaaagtgaccaggcctcaggtgcctacatcttcagacccaaccaacagaaaccgctgcctgtgagccgctgggctcagatccacctggtgaagacacccttggtgcaggaggtgcaccagaacttctcagcttggtgttcccaggtggttctgcctgtacccaggacagcggcacctggagctagagtggtcggtggggccgatacctgtgggcgacacctgggggaaggaggtcatcagccgttttgacacaccgctggagacaaagggacgcttctacacagacagcaatggccgggcagatcctggagaggaggcgggattatcgacccacctggaaactgaaccagacggagcccgtggcaggaaactactatccagtcaacacccggatttacatcacggatggaaacatgcagctgactgtgctgactgaccgctcccaggggggcagcagcctgagagatggctcgctggagctcatggtgcaccgaaggctgctgaatggacgatggacgcggagtatcggagccactaatggagaacgggtcgggggcgtgggtgcgaagggctgccacctggtgctgctggacacagcccagggctgcagccggcggacaccggctcctggcggagcaggaggtccttggccctcaggtggtgctggcccgggtggcggctgccgctacaatctcggggctcctccgagcacgcagttctcagggctgcgccaggacctgccgccttggtgtacctgctcacgctggccagatggggccccgaaaatggtgctgcatcgccttggatgcaccagtgtgccgtagaaaaggattccggacggtacaccagaagcggcccccgataccttgaaacttgcagcgaacaggatacttcaccctcaccaatcaacacgccgtgaggaaaccacacgctgcgatgacaaccaagtacgccagagcagctccagctcacgctggacacaaacacaggcgcaaacc

SEQ ID NO: 444925 - DNA, 530 bp, Homo Sapiens
  misc_feature (167)..(167): n is a, c, g, or t
  misc_feature (171)..(171): n is a, c, g, or t
tttgtcctggaaccactggctgcctccatcaaccccctgaatgaccactggactctgcgggatggggctgccctcctgctcagccacatcttctggtagccactgggccttaaactgcgggtgggattgctgcagagccaagtgggttggggtaaggaaatggggcngaanctctggctttgagagtctatgagaagatggggaaccttttccctaggagcgtcctagctggtgtgctgtgacacactgggattctgaaaatggattacaaatacgccaaggtattggttcttcagccctcaggtcctaggccagtcacccctggcagccttcttcacttaaccccagcactcccgagtgtgctgtacagatgctattctctttgtgttgtcttgtgccctgttgggtggcaccatgcctcattcccctccctaactgaatggtgctcccacaggactcatggggaccttgtaagtggcctctatcagcatatcctgctatccctgcagaagatcctggcagatcctgtg

SEQ ID NO: 444926 - DNA, 995 bp, Homo Sapiens
agcgggagtgggaatgagtgtgagctcgtgagtgggcgccgccgccaccgcccccgccgccgtcgtctcggtagcagccttcgccacgccggggtcttcagctccactggggccatgtcagagcgagaagagcggcggtttgtggagatccctcgggagtctgtccggctcatggcggagagcacgggcctggagctgagcgatgaggtggcggcgctgctcgcagaggacgtgtgctatcgtctgagagaggccacgcagaatagctctcagttcatgaagcacaccaaacgccggaagctgacggttgaggacttcaacagggccctcagatggagcagcgtggaggctgtgtgtggttacggatcacaggaggcactgcccatgaccgccccgccagggagggtgaactctactttcctgaggatcgagaggtgaacctggtggagctggccctggctaccaacatccccaaaggctgtgctgagacagctgtcagagttcatgtctcctacctggatggcaaagggaacctggcacctcaaggatcggtgcccagtgctgtgtcttcactgacagatgaccttctcaagtactatcaccaggtgactcgtgctgtgctaggggatgatccgcaactgatgaaggttgcactccaggacttgcagacgaactccaagattggggcactcctgccttactttgtttatgtggtcagtggggtgaaatctgtaagccatgacctggagcaactgcaccggctgctgcaggtggcacggagcctatttcgtaatccgcacctgtgcttggggccctatgtccgctgtctggtgggcagtgtcctctactgtgtcctggagccactggctgcctccatcaaccccctgaatgaccactggactctgcgggatggggctgccctcctgctcagccacatcttctggactcatggggaccttgtaagtggcctctatcagcatatacaactatccctg

SEQ ID NO: 444927 - DNA, 1029 bp, Homo Sapiens
tatgcttattaaacgtgtgttaaaacaatacacacctactcgcaaacgtagcaagagaggttgctttaagaagcgggaatcttcagcgtcacgtgaccgccggtctctacagtctgttcacactggccaatcaagagccaggaagcctcctggagggccggaaactttccaaggcgcccgccgactggctgtattggggagggcggggccggggccccgggagagggaatgagtgtgagctcgtgagtgggcgccgccgccaccgcccccgccgccgtcgtctcggtagcagccttcgccacgccggggtcttcagctccactggggccatgtcagagcgagaagagcggcggtttgtggagatccctcgggagtctgtccggctcatggcggagagcacgggcctggagctgagcgatgaggtggcggcgctgctcgcagaggacgtgtgctatcgtctgagagaggccacgcagaatagctctcagttcatgaagcacaccaaacgccggaagctgacggttgaggacttcaacagggccctcagatggagcagcgtggaggctgtgtgtggttacggatcacaggaggcactgcccatgcgccccgccagggagggtgaactctactttcctgaggatcgagaggtgaacctggtggagctggccctggctaccaacatccccaaaggctgtgctgagacagctgtcagagttcatgtctcctacctggatggcaaagggaacctggcacctcaaggatcgggtaaggggtgatgtaggaaacaggctctttggatgaattttctcccttaggttctgagggtggtgcctatgtgcccccgagtctgcgtctaacatgtgtttacccatgcctgccttgtggcatggtctgagtgggcgctgggctctgcatggagggctcagagttggagatgggggcccagacctgtaactagtcataatgcagcatgttggatgctaagaccgaagtctgggcacagcctgctggggcggtgtttcaccccaa

SEQ ID NO: 444928 - DNA, 1170 bp, Homo Sapiens
  misc_feature (189)..(197): n is a, c, g, or t
ggaggacgcacgagagcgagcctgcgccgcacgggggcagggggacaggccgaccatgacacgtctatgtagtccggccgacggctgcagcaccttgcgacgaggctagctcgacccaggccggagggtaatctcggcgagcaccgcggggggttttccacggtggggttccggaaggaactcgtattnnnnnnnnnccatggtattgggttcagacccactcttttggggggtgaaaaggccagggggccgggtgggtatttcgcacagggccccttaaatggccaggccacccatggccccggccaaaggcaagagaaggctgcgggtggctggaggctcagatcccatagggactttagcccgtttaaggggctcggggtgggcccggctccccaggcctcctcccttggaaccccccaaagttccgacatctggctctccagggagccaatgcccgagtccaggcaatcctgggagacgtacgggagtgagtccagcgtctgtgatgggcacgtcgggccgaggctgctccttcctccaggatggcacaaacactgtgatgtctgtgtggccccgctccagaaaccagttcactgccagcaggatgccccggcaggagaagacctccttgttcccatggctcatggccacgttgctcccatcaatgaccactggtctcaggtcgctgccctccttttcctcttctgggagtggaggctccaggttgggagccttaggggtgccaccaccccgcgggactagagggagctgagggcaggggtccggtgaggtctggcgctcccgctcggtggctgtcccgtgtttcaccagctcacccagcaccgtgttggtgtctgcctggacgcccagcttctgcaggacgctgtggatctccgtggatgaatagcccagcttccggaagaagtccaccttcatctgcagttccagggccgaggcctcctcagcggccagctcttgacccggccttggggtgccctgacggctgtggctgtcctcaaattcccacagactcatggtggggctggcttccaggacaggcttctctccacaggggccactcatagctcagactcctggaaggccccgcgccacagctccccgccatgcgccagcggcggccggcggcatcccgggaattccggaccc

SEQ ID NO: 444929 - DNA, 1312 bp, Homo Sapiens
  misc_feature (576)..(648): n is a, c, g, or t
tttttccttttaaaatatatttattgaaatacaaagagtcaatataaagaaaaatagaggtcaccatacttggccacagttagaccgctcataggcccatggctgctgcaaccatgggcaggacacagagggagtccagcctctactgataaatctgggcaggttcaccttcgcaggccaagccaggggccatccctggtatgcgaaacctggaggttttccaggaagccggctgctccagagctagctgtcaagtctttagccccacaggctggtgcccagagccacttccacaggagcagcctcgggcttcacccacacccaaggagcttccgaggcaggaggcaagcaaggtgaagggagggttcagggtcccacaacagcagtgagcagggtccagccatcaggcctcagagcctctgtcatgccacctgcgagacgggctcctcctgtccccactgtgtccccgcttcctcctcttacagcagggggagttggagtcggagtcatggtggtggtgcctgggcctctcaggagatgtgggagaggaggtggcctcagctggccgcctgtgcnnnnnnnnnnnnnnnnnnnnnnnnnnnnnnnnnnnnnnnnnnnnnnnnnnnnnnnnnnnnnnnnnnnnnnnnntgtggctctcacaactgctttccgtctgatcctccgcccgcggcttcctcctggccgaggctgccgaggtcccgggcccgccgctctctacgcggtgatgcgtgaacacagacagccccagtttggcggcctccttgtcctctcgggacatcgccacgcggcccacggagccacttgcgctccccagccccagcagccggtccacgcccttctcctcggggtcgcctccttcccgcttgcagacctccgcgaagtcctccttgctcaggcccgtgggctgcttcttcacgttcttgtagccaagggcggccagcagcgcctcgcgctccgcctcccgcacggctgccagttcctcctcgcggctcgggcccgcgcatggcgcccggcccttggcgtaccaggtgaggtcgcggcccttctgccagcggcctaccggcgccatcagcgagttgcccaggtagttctcccgctgcttgtcagtcttcacgtcctcccagttgaactggtcctgcccgccgcgcacgcctccacgactggagccgaacatggcgccgggaaggcagttgcctggggcctgcggcttgcaacctgcaacccgcaacccgagacccgctacccactaccgtcggacccaggcccgaccccgatcgcgaggaattccgga

SEQ ID NO: 444930 - DNA, 212 bp, Homo Sapiens
acccccccgactagcccgacaggggaggcggggtcgggcctgggtccgacggtagtgggtagcgggtctcgggttgcgggttgcaggttgcaagccgcaggccccaggcaactgccttcccggcgccatgttcaggctccagtcgtggagcgtgcgcggcggcagtaccagttcaactgtgagacagtgaggactgtcgggctagtcgggaa

SEQ ID NO: 444931 - DNA, 1467 bp, Homo Sapiens
ggctggaccggtccggattctcgggatctaaggtcttcaaggataattgggccttttcagcagcagctgtactcactgatgtactcataaagaggaatcactacttggagaaattcttcaggatacaatacagtacagttttaatgtatctgaaagccacagacatttacgtgcaaaccagccagaatggggtaggagagtagtcacattgtgagacctgtgaaagctgcttttgtgtatttagctgattgtttgcctctgtctacagccaatgatgtgcactcgtcctcaggacccaaggagtaccttggaatgctgcaatacaagagagaagacgaggccaagctcattcagaacctcattcttgacttgaagccccgtggcgtggtggtgaacatgatccccgggctgccggctcatatcctgttcatgtgtgtgcgctacgcagactctctgaatgatgccaacatgctgaagtccctcatgaacagcaccattaatggcatcaagcaggtggttaaggaacatttagaagactttgaaatgctgtccttttggctttccaacacttgtcattttctcaattgcctgaagcagtacagcggagaagaggaattcatgaagcataatagtccacagcagaataagaattgcttgaacaattttgacctttcagaatacagacagattctcagtgatgtggctatacgaatatatcatcaatttattatcataatggaaaagaatatcccaccgataatagttcccgggaatgctggagtatgagagcctgccgggcatttcccggcctgaagcccacaggcttccggaagcgctcctctagcatagacgacacggacggctacaccatgacctccgtcctgcaacagctgagctacttttacaccaccatgtgccagaacggcctggaccccgagcttgtgaggcaggcggtgaagcagctcttcttcttgatcggggcggtcacgctgaacagcctcttcctgcgcaaggacatgtgctcctgcagaaaagggatgcagatcaggtgcaatatcagctacttagaagaatggcttaaagataagaacttgcagaacagcttagcaaaggaaactttggagcccctctctcaggcagcctggttgcttcaggtcaagaagaccacagacagtgatgccaaggagatctacgaacgctgcacctcactgtctgctgtgcagatcataaagatccttaattcatacacacctatagatgactttgagaagagagtgactccatcctttgttcgcaaagtacaggctctcctaaatagccggggaggattcatcacagctgatgttggataccaaatatctctttcaagtcacatttccttttaccccctctccacaatgctctggaaatgaatcagatcccccagcagtttcaagctaggcctttcctgataaggtatagcaggag

SEQ ID NO: 444932 - DNA, 1363 bp, Homo Sapiens
tggaggagtagccccagcggcacaggtggaagcccaggccccagtatggcggcatgaacgggtatcccacaacgtccaggtactgctgcaccacgctcttgggctctgggcccaggaagatgtagacatccaggatcccacctgtcgacctccagctaagggcagggctcggctgcaggaccacatccatggcattgcttgtttagcagggaacacccccttgtgccgacccgccgtcctccagcgccaggtagaaagggtgagacccgtagaggttcgcccggggcgtgggcgcaaggtcccggttccacagggtgatcctggtccagctggtgctgagcatcaggggactgaggtgctcggcgaggcctgtgatatactgcgagggcagcgaggtggacagctgaaggaactggtccgcaaagaacaggggcgccaccgtcgtgttcagcagcacgcggccgtccagctgccggtgcacgatcaccccgaagggctcctcggagaactccacgctgtagagtggggacggtgcccggctgtggacatgcggggtctccaagggcacctcgtagcgcctgttagctggatctttgatcgtgaagtggaggcggttctcagtctccatcatcacgtccagccgcagggtcaggatgtccttggggaagaaggtgggggtggtacgggtcagggtggccgtgtagcccatttcagaggagctcaggttctccagcttgtagctggggtagctgggtgggaagaagcaccagggctgccccatctgggctccctgcagcccctgctttgcagggatgtagcaacagccgcgggcctcgcactgttcctgggtgatggccttgtcaggggcgcaatcgaagcggctgttgggggggacgtcgcactgtgtgggcactgctctgggacggccggggtgtgcctgggcatcccggggccctggtctgctggctccctgctggtgagctgggtgagtctcctccaggactggggaggagccactcagctctcggggaaccagcaggaaatcatggagtaggatgtgccccaggagtgcagcggttgccaaggacacgagggcgcagacggccaggagccggtgggagcagggcgggtgcctcactcccatggttggagatggcctggacagctcctacaggcccagctccgtgcactcagtttccccgtcagctgcggcacgcgcagagcctcaccatcagcatgaacaaacgggcaggaacgaggagaacctccgcgcacgcgcagccctggccgcccgcggagactcacggggtcgtgccacgggggcgcgatccataaatcccagaccagtaccagcctggccttc

SEQ ID NO: 444933 - DNA, 1121 bp, Homo Sapiens
  misc_feature (892)..(892): n is a, c, g, or t
  misc_feature (948)..(948): n is a, c, g, or t
  misc_feature (1027)..(1027): n is a, c, g, or t
aaggtagcgaggcctgggtggcgaattcggcacgaggctccacttcacgatcaaagatccagctaacaggcgctacgaggtgcccttggagaccccgcgtgtccacagccgggcaccgtccccactctacagcgtggagttctccgaggagcccttcggggtgatcgtgcaccggcagctggacggccgcgtgctgctgaacacgacggtggcgcccctgttctttgcggaccagttccttcagctgtccacctcgctgccctcgcagtatatcacaggcctcgccgagcacctcagtcccctgatgctcagcaccagctggaccaggatcaccctgtggaaccgggaccttgcgcccacgcccggtgcgaacctctacgggtctcaccctttctacctggcgctggaggacggcgggtcggcacacggggtgttcctgctaaacagcaatgccatggatgtggtcctgcagccgagccctgcccttagctggaggtcgacaggtgggatcctggatgtctacatcttcctgggcccagagcccaagagcgtggtgcagcagtacctggacgttgtgggatacccgttcatgccgccatactggggcctgggcttccacctgtgccgctggggctactcctccaccgctatcacccgccaggtggtggagaacatgaccagggcccacttccccctggacgtccaatggaacgacctggactacatggactccccggagggacttcacgttcaacaaggatggcttccggggacttcccgggccatggtgcaggaagctgcaccaggggcgggcgggcgctacatggatgattcgtgggatcctggccatcaacaggctcggggccctgccggggagctacagggccctacnacaagggtcttgcgggaagggggggtttttcatccaccaacgaaaaacgggccaanccgctttaatttgggaaagggtatgggccccggggtccactttgcccttttccccgaaattcaccacaacccccacaancccctggtgttttgggtgggaaaagagcaattggggggctttaaaaattcccctggacacaaggggggcccctttctagagcgcgggctgtggc

SEQ ID NO: 444934 - DNA, 1170 bp, Homo Sapiens
  misc_feature (505)..(505): n is a, c, g, or t
tttttaataactgttcagctacaaaattttattggtatctttttatgttccctctagaggatgtaatgcacaaaagcattgccacggaacatataaaattacaaatgaaatttattgtaaaaagtagaatgtcttctagactggtgtcagtatttatgtcattcataaaccaaaactgctgtataatatattcattgtcagcaagttcatgtgtgtaaattgccatccaatgttattgactgatataagacagatattgaaaagacaatttaaatttactcttccaaacataaactgttccacaaaagcactgtaaaaactccttcaagattttgggttgtgcttgacatttatggttaactacataatttggtcgtgtcataatccattgtgtttggcaatttggcattaaacgcctgcagagcagattggatcctcaccacccttcactaggtagacagcttgagtctatgacgaagcaagcaagagaaaagatctagacgancgctgacccaggtggggagagtttatttacacggtctctgatctctagtagttgcaaaagtgctgaatcctgggatccctgagtataggggtagtccagctgcaaaatcaggtcccgaattgcttcagggtcaaagtgcatgctgtagccaaacacttgaatgttattgattttcatatagcccaggttccgggaagggtcaataaactccagaggttcatagtaaatgctctcattaccattgggaccattggacttgatgcgacttctcaggtagatgtgtactgtctcaaaaaatgtcttccatttgttccccagagttaatgtccagttataacactgcaggggtaggtccaacttagtccgctcccagtctggaaagctgttttcattcacaggcataaaccagctctcagagtggctgcctccgaagggattgacataaacagccaacactggctccaaggtgctgtttttagttaagcaaatctgtaaagagagacccaaaatcatatggaccagacttgacttgtacttattgctcttcaaggtgaggagcatccgcttacgccaggagggatcaaaccagctattgaggcgcatgtcattgctgataaaaatggcatggacttctattcgtctgtccgttttctgcagcagatatt

SEQ ID NO: 444935 - DNA, 1543 bp, Homo Sapiens
ctccggaggtactggactccagaagcgctggccagcctcatcgggagccattttctttcactgcctctgctgctgacatcttcttctttccccttcacacccttcgaagccctatgaaggctttctgagcaggcttcagcctggtggccatgtcttggtcaatcacaccctgggagactgcgtcctgaagtgacagcttctggcccgtggttgggtggatgatgccacctgtgcaggcctgagcctccagaagcctctgacccgtgatgctgtcaacgatgccccgctctataccttctgtaatggagattttctccaggttttctgtgtcaaagatggctgcaatggggctcgattcttccagggtgtctgaaaaagagctgctccttatggttaaattcctgacgctggatatggtggaaatcttacttactgattcatgtcgggagctgctaaaaacatcatcgctgacaccactgcccatgctgctgctggtgccgacaccatttttcaaggagatcatgtcagcaaattgagtgaggctgaggctgccggatcggtactgatcaaagaacttcctgtcaacaaggcccttgtcaatagcatcttgaatatcatactgactgcctgtctttctatctaccaggaccaccctggtggagccatctgatcccgtgatggttatttcttcccattcacattcctgctcacacagttctttgaaggtttcataatcaattaggcccttcttgtaggcctcctgaacagacatttctttattggtttctgggtcaactatgacctctctacgcttcctgagggtattcttttgtgatgtctgcacctgtttcttcttttctttcagaggcagaagacagagccctgtttcctcatccttaatgcatctttcttttagttgcagataggtaagattttcttcagtgttggggtcaaaaaatcctttggtatcatcacttggatctgagagaatctcactgagttcctcattgaaatagcccctcttatatgctatgtcaactggtaaacgatggctctcctttgggtcaatgatccccccggttgcgatctgtcgcttctaataagcgaataccgtggcccttttcgatgagttccttattcatggcttggaacaaagagatgagtttcctgtttcaggatcattatacccagtgacagctcgttctgcagacaggagcttctctttgaactcaatgcccaccagacctctcttgtaggcttcctccactggtaacctcaagttgctaacaggatccactataaagccagtagctgcttgggcttccagcaactccagagcagtaccaggtcggactaagccaattttcatggcctcataaatgccaagcttctgttttgtggtctcattgtatatgcctgctatgcagcttgaaccctggaggaagtccttaattctctcaccaacctcgtcataagaaatctgaccagattccagttcattgacagtggacggtctcaatataccagaatatactagctcagt

SEQ ID NO: 444936 - DNA, 421 bp, Homo Sapiens
ccctaccaagaacaaaccctggtcaatgagaaatcaatgcttcctctgaaagccagcaacagccggtgctgtcacaccctagaagtacaggtacctcagatccaaacatcaggtctcgaatattcttctgtggtccaaactggcattcaacaagttgctggtctgtgtgggctccaattattagcacagaccactgttaccactggatatctcgctgcctatgcccactaccacagcccagccacccccacagcctcaggaaagttacatatcctcaacactccatttgtaggcaagttcctccactgccttcttgctggcaagcctggcaaagcgcttctgttcaaatccattggatctgtccactccgtcccagcgatatccaggccagatattaaatctgttgggaggaggtgctgga

SEQ ID NO: 444937 - DNA, 1445 bp, Homo Sapiens
  misc_feature (1165)..(1165): n is a, c, g, or t
  misc_feature (1202)..(1202): n is a, c, g, or t
gtagcgaggcctgggtggcgaattcggcacgaggatggtgcagggtagagggattatgacaacaggctctggccaggaaccagggcagtcagggacctctctgaggacaggtcccatggggtctctgggacaggcagagcaagtcagctcgatgcccatggggtctctggaacatgaggggctggtaagcctgaggcctgtggggttgcaggaccaggaggggcccatgagcctggggcctgtggggtctgcaggcccagtggagacctctaaggggttgctggggcaggagggcctggtggaaattgccatggactcaccagagcaagaggggctggtgggtcccatggagatcaccatggggtctctggagaaggcagggcctgtgagcccaggatgtgtgaagctggcagggcaggagggcctggtggagatggtgctattgatggagccaggggcgatgcgcttcctgcagctctaccatgaggaccttcttgcgggcctgggagacgtcgctctcttgccacttgaaggaccggatatgactggctttcggctctgtggagcccaggcttcctgccaggcggctgaggagtttctgcggagcctgctgggcagcattagctgccatgtgttgtgcctggagcacccgggcagcgccaggtttctcctgggcccagaagggcagcaccttctccaggggctggaggctcagttccagtgtgtctttgggacagagcgcctggccacagccacgttggacacaggccttgaagaggtggaccctaccgaggccctcccagtgctccctggcaacgcccacaccctgtggaccccagacagtacaggtggtgaccaggaggacgtgagccctgggtagggctccctgggagccctcagcacatcctgtggccctcacttgacctcaccccctgccctgctctgtgctcccatctgtctactgacccatcttaggcccaccctgtaccctaaaaacttgctccccatctttcatccattccaactcctcctgggtccagcccctgacccaatggcctctccctgccccccagaggaggtccgagaactgctggccaccctggagggcctagacctagacggggaggactggctgcctcgggagctggaggaggaagggcctcangagcagccagaaggaggaggtgaccccagggcatgangaggaggagcctgtggcccccagcactgtggcacccaagtggcttggaaagaaggaggcccgctctgcagctggccctcccacgggtcactggaagcctcaaggtcaggtggctgaaacaggaggaaggctgctggccctgcggcaagccctaaaccctctcccctgctggagcagccccccggtggaaaggagaaaaagcccccaaaatggggggggaatgatgggcaaaggcccaacctgc

SEQ ID NO: 444938 - DNA, 1832 bp, Homo Sapiens
tgtatttcagtaaatttatttttttcaatcttcagatataagaaggcttttccatgaaaaacactctatttatgtctcactatttaattatctaatgttatataaatagtcacatacagaatgaagaatcagagccaggcacattatagaaaagaatctgtgacttcctaatcttgccatgagtagcaagttattctaacagtttaatcatggaattattcaaatttgctctgttaacaaattgaagactttcaatcaaatatgtaacattgctgaaatgaagaaatatttccagtataaattggactgaactgataaatcaatgctttctcctcttcagattcagatttaaaatgatggttgtttttccgagcttcattaacaaaaaactctgctaaataaaatgcggttttcacagcattaggtgcatgggaaatgccatccaaattcttccactcataaggtgctttctctggatgccactggacaccatatactggatacttatatcctgtccattgttgaaataaactcaatcttgccatctgtatttgtagttaagacattgaaaaacttctttaacttttcattcattgtaaaattcttcacggagaggctccacttatggaaattggcagtcagaggttctactgctaatgacagcaacaactcagtaggaaaattctggaacattctgctgtgcaattgacctccagtgaagttcagcggcattgccacgtcaacagtatctgtggcagttaataagcactctccactaatcagcagtgaaagctcttcaaatccaaggcatgtgccccacacaggaaaatagtctccatcatcaaaactctgtatggacaagttataaaatattttggccactttagcataatctgagcgtctgaggtcaacacttcctccagggaaaaggattccattaatagatttgaaaagtatttcatagtctttctctgtaagatccagccttactggtacaactctcgcacctgcagactccaagtactttacataggacgcagcaatatagtatcttccatagtttttcatgactttattacggcatttttgcattaatattccgatgatgggcttcttggtggtgtcgccgtggggtctagacagctcgaggctcgccgccccgcagagtagcaggcccagcacgcacagcaggcggcccggactggccatggcgctcgccgcctcccgccgcctttcaaaagctctgcgggcgggcgggggctgcggcagggacacctcgcggcagcgcactcgcgtgagactcgggtgggcggttgctccgcagcgtgggcctatgggaaatgcagtcccggcgcgctgctaggcggccgtgggtgcggcggtgggaggctctgggagttgcagccggcgctgcgcgcccgccccattgctctgtccccggtccgcgaccgcgaccgcgaccccgacccccacgggccgcctaagcggagactctggaaacgcctggggcgggtaccgggtggtctccgcgtccttccctttcaactgttacgtcgatgtggacttcagtcacccgtacaaagctgggctggccaacccaggtcctcgagaggggaaggtttgggtgtccccggccgagtttggtaaccaggcagcggggaggctggcaggggattctagaaggcgcctgagaactgcgcgccaaccgcaccgcccccttgaaggtcggggccctatctccgggaatggtgacaacgttcgctgtacggacagcctgtgcacctgaatgtgaatgtccacacttgctatttggggggtcgcggcatctgtag

SEQ ID NO: 444939 - DNA, 1368 bp, Homo Sapiens
agccgtttcgtttcccgtggggaacggggccgagtccaagaaccccaggatgttcttgaaaccaggaaaaaggtaaaggtttatgtccccttctggctccggcagctcccccatggcaccagcagcactttgctcggctcgattttggggttccctctgcttttcatccaggtactccagctgtcggatgtaatactggcactcggattccactttttttcaagttgatatcagagaggactccctgtattatcaatatagcatcctccagaagctgaacatcagggtgctcttttggagtgtgtttaagaatttcttttaacagtaaagggtatttgactaggcgacttcgagggatatctaggaaactccaaagatctagttttcgactgaagggagactcgagacatcgctggaggaagtcttggactcttggatcctgtttcttttgatcaagaagagctttggctgccagctggttactacagtaacctctgtaggcattcaagcgcggtaaccagctcacgagaatgtgaccaatctgctccactgttccatcaggcttggttgcttcgtcctattcttgtcaacaaatcttcatgcagaggtatgtaagagtccagatcaccaaatatatgtgtgagttcctcttctgacatgatggacaactttaacatggggtcatggtaggcctttcttgcaagtttgagatcctcaattaaatcctgttcacctcgggacatttcatatattgcctcctgccgtctgatctccctggtggtgagagactccttcatggtgatgtccagcatctctgaccacagtgcactgctccttctcttggcgggtgttgggactgttgacctgctagaaaacttctgggcagaggctggggatctgtggtcaccacgaagggtaaatgactgtattgtttgaccaaaacgtctgacagctccatttcttacaggagagattaaatttgccaaggacgtgacacgagccagaggtcgaactcttttattgcttggctccttcagatcaaggctgctaaggcttacaacatcatcatctttctctctgcgttttcttttcaaagtgaagtcccagttggggccaggtgttaagaatgtgaaggagctgcctctccgaagggaacatctcccgtccagctccgacccggaggtgtcggccgaaggccccgtcgctccctccgtgctgagcccagaggcccggcggcttcgcctccgcggtcgaggctgcttctgagccgccagctcgggctccatggcacggaggagggggtggggcggtggccgggtgcccgggagaccggcagggacgggcacgatgcccgccagcctctccgct

SEQ ID NO: 444940 - DNA, 740 bp, Homo Sapiens
ttccatcaggcttgcttgcttctgcctattcttgtcaacaaatcttcatgcagaggtatgtaagagtccagatccccaatatatgtgtgagttcctcttctgacatgatggacactttaacatggggtcatggtaggcctttcttggcaagttttgagatcctcaattaaatcctgttcacctcgggacatttcatatattgcgtcctgccgtctgatctccctggtggtgatagactccttcatggtgatgtccagcatcttctgaccacagtgcactgctccttctcttggcgggtgttgggactgttgacctgctagtaaaacttctgggcagaggctgtggatctgtggtcaccacgaagggttaatgactgtattgtttgaccaaacacgtcctgacagctccactttcttatcaggagagattaaatttgccaaggacgtgacacgagccagaggtcgaactcttttattgcttggctcctcttgttctctgaaggactggttattgacatctaggactcgtatggtccttttaataggtaggagacctccagtctcatcatgtgccaccatgcttcccaagtactccctcaaacctttccaatcaatccacaccgagtcagcgctgtagcgacgctatgcagaggcacacgggcttttcttcccagagctcggccaccctcggcagccacgtgcccatgcctctcgccgcggtggagcagaggctactccgct

SEQ ID NO: 444941 - DNA, 1585 bp, Homo Sapiens
ttccaataaagccgctggctcttcctaccggggaaatgcgcccgtgggaaccagaattggggtgcggtggatggctgcactgagggctcgtgcccggaggctggcatgggcaggctgagggcggtggtttgtctttttccttccaggccttgggcttctcccagggccccactcagagcctcccgggggttctcaatgacacgccccagcatggccagagaagtccatggccaccagggtattatctgaggcacttctcaagggtggggagcccaaacaagatggatgcagatggcgagactgtgcctgctgttaattcttgtacagctgccaccccgtacttgaagaggcggaaggcagccagccagccaggttgcggctctgctcatcttcactgcagaagatccgaagcccccttgtggccatttcgaagcttgttggggcttgacacagaaaccgaagtcagtgggcatcccgtagagcttgcggccctgcgtcaccacgtacacgttggactcgttcacatctgccacgtactgcaggtgcctcggatccttagaggtgcccttggtggagtaatagaggccagatcggcgcaagaagcagaaaaagcgtttccaaagcttccgtcctgaaccccgcagctgcagaaagccctggatctcaggaaagctgccagcattcaggaagttctggatgaggtcttcatgggatataccagtgtgtgcatcgagacagctggagaccattttttctgggaacagggagtgtggggagctcttgaacagttcgtacttggcgaagtttttccggaagacgaagcggctatctccgcccacgggccaggcagcctgcacttccaccacggactcgtggtcctccaaaccccgctccagtgctaggtgggggtggcactccaccagcccccaggtctcgtcgctcaaggcgtgagctcgctgcaccagcatttcacacacgtggcgagctgtggcacctgctgccacctccacagacctgcaggccccatcctcactgtacacctttactacatgggggcggctggcatcgcgggggagcagcccccttgcactggaggggcccccgagaattgggctctgtgagggaggactgcagagctcagggaaggggttggggatagaggggagggaggtggcacgcctctcctcctctcgaagtttcctgccggtggttgggatgaggagaggctgggacctctttacctcctcaggcagaggggtatcagggggccggggagtcccaggaggggtcccaggggctgggcaaaggtcttccggagagctgctaagatgaggtggagacagatccagctccatggcgtctgagcgagagaggggcttaacggaaccagttgtgtgcccttgtcctggaggagccccagcaggagtagcaggacacccgttccgaagtctggctccgtctaggaacccccagattcctggattttatttcagatccactcccgcttctctacaggtggtaggagggtgtcccgacttcggacagagaagtcagaggcgggggggatcccgggaattccggaccg

SEQ ID NO: 444942 - DNA, 1176 bp, Homo Sapiens
  misc_feature (86)..(86): n is a, c, g, or t
  misc_feature (97)..(97): n is a, c, g, or t
gcaatgttttaaatccataggaattccccggcaaacaatcaggttgaatacctcatgccgtttgcctgaataaaaaccttaatgancccactccccnggaacggattcctcccttctggatgcggagaagccccatgagctattttaggaactataatgaagactcctactgtgaaaagcaaaatctgtcctaatcttattccttatcacttacatttgtgtaatctgtcctatttaagctacctttgggagtaggggtaaaatgttactgaaagcaactctaagtgcatggaatgaaatcaacgttaatctaagctgctacggaaagtctgtctttgttgttgctgttaggctgggggcgtggatctgagagtcgtgtcgtcagaactcctgaagccctgtcctgctactgctgccagcccctggtggctttcaggccgagcaggcgaggtggagggaagagatgaaagtgagaggaggtgagtggcagggagcggagagcgagaggtcccagtgctgaggcagctcacgggtcccagctcccgcggtcagtgctctccagggagaggctcttggtttttcggggtgaaactgggcttggggggctgcttaggttggaactgttggaagctgtggaatgcctcggagagtcagagtcctctccgtcaaagtccctcgctggggcatcacttccttggtccatgcctccggaggacaaagagccctctgacggggagggcatgggctgccgcttggcactgtagcttcctccagagaattccctctttaatgcgctgccattctgtgcggatgacccatgggcagatctttcaggatctgtattccatctccaggacccatgtgtgctatgtgattaaaattagttggattagaaattaatttatttctcatttctggatctcgtagcatttccctcctctgctgcatcctttcctcttctgggactctgaaggaataacgccgcttattgttaatgtttctaaccatttgtttccgactattatctgatgtttcaggtactaccagttcgtccccttctgccatcttatttttgaaatatattaatctaatggtctccaaccctaaaagatttaatgatccttcatgtttaagggtcgaaccttttgatcccgggaatccggaccggtccagcct

SEQ ID NO: 444943 - DNA, 617 bp, Homo Sapiens
gattggtacagagtcggagaggaggaagggatggagcagaggagggaaatgctacgagatcgagaagtgagagataaatgacttgggaagtgaactaattttagtcagatagcagacatgggtccgggagatggaatacagagtcctgaaagatctgcccatgccaggtttcccttatccatcccctcatcatcactccggtctgatctcctctccgatcaactttgaacacatctatcacatgactgtttaattctgctgaaaaatttctctctcctgattccataaaccctgaatattccccgtctctgcgctctgtccactgaaccctcgggcctcaggaatagtcggacaagtattcagtggctcagtcagtattccatctatcaccaaagtcccgccctgagccaggctgctccatgagtgctagcattggcttgtctgcataggttatccgcacagaatggctagtgcattatagagggtattctctggaggtagctacagtggcatgcgggagcccatgccctccccgtcagagggctctttgtcctccggtggcatggtccacggatgtgatgcctcagcgtgggactttgccggcgcggactcctgtt

SEQ ID NO: 444944 - DNA, 599 bp, Homo Sapiens
aggatcccccccgctggggccgaactggtagtacctgacacatcagataatagtcggaaacaaatggttagaaacattaacaataagcggcgttattccttcagagtcccagaagaggaaaggatgcagcagaggagggaaatgctacgagatccagaaatgagaaataaattgatttctaatccaactaattttaatcacatagcacacatgggtcctggagatggaatacagatcctgaaagatctgcccatgccaggtttcccttatccatcccctcatcatcactccggtctgatctcctctccgatcaactttgcacacatctatcacatgactgttaattctgctgacaaaatttctctctcctgattccataaatcctgaatattccccgtctctgcgctctgtccctggtacaccaagctttatgactctgaggaaccctcggcctcaggaaagtcggacagtattcagtggctcagtcagtattccatctatcaccaaatcccgccctgagccaggccgctccatgagtgcgagcagtggcttgtcagcaaggtcatccgcacagaatggcagcgcattacagagggaat

SEQ ID NO: 444945 - DNA, 966 bp, Homo Sapiens
  misc_feature (198)..(198): n is a, c, g, or t
accacttaagcccttttatcccctggaattaagagggggttgcccagcagccattcttcaaccttcatcagatttcagcccatggacctcttataaagcgtccagtatggccatctgcttcttcatggcagggaggtaaaggctgaggtccctctgcatcccaatactgaaagcttctttccggtggtcaccttcctntacggttaacgcggccacaaaatcttcataggatggagttgcccttaaagctaacgcaaaaacccctcgaactacccagccatggtgttgccgcaatgttttaccatatgcgttattcagggctgtctgggatatccttttccccatttttcacttctgtcaaaaatcccttcaaaaatttgagacctctcttcagccacaaagagggcttcagtcgctgagttcctaacttgggctacatccgcttccacttcgtgcagcactatcttctggagagtggtaaactcttctttgttggttatatacttctgatttactttcttaatattttcaacaagatccatcttaacaggagcaaacactgtagggccaagtttgtctaatactggaaccacagcacaacatgatgccaagaatgcttctgtgggaatgccactgtcttccagaagttcaatgtcactaaagcttgtgttcatggtactaaagaaagttgggataacttctttgccttcctcccagaggcattctggagagcaacttgagtctgatccagactgagacaagttattgtcatgatttttcaggttttccattctatcttccttcattatttcaccttggacggttatattatcatctgtattttcctcacttgatatgctgcagtctatctctgcagatttcaaatataaggaattcttatttttcattaggatttcttcctcaccatttatttccatatttaaagatccattttcacaagtgccc

SEQ ID NO: 444946 - DNA, 1130 bp, Homo Sapiens; identical to SEQ ID NO: 323075
  misc_feature (173)..(192): n is a, c, g, or t
  misc_feature (245)..(245): n is a, c, g, or t
  misc_feature (532)..(532): n is a, c, g, or t

SEQ ID NO: 444947 - DNA, 877 bp, Homo Sapiens
cagctatgaagatttttgtaacaactaaaaactcaaaaaaccaaggcatagaggaagctttaaaaaatcgcaattttactgtagaaaaaatgagtgctgaaattaatgagataattcgtgtgttacaactcacctcttgggatgaagatgcctgggccagcaaggacactgaagccatgaagagagcattggcctccatagactccaaactgaaccaggccaaaggttggctccgtgaccctagtgcctccccaggggatgctggtgagcaggccatcagacagatcttagatgaagctggaaaagttggtgaactctgtgcaggcaaagaacgcagggagattctgggaacttgcaaaatgctagggcagatgactgatcaagtggctgacctccgtgccagaggacaaggatcctcaccggtggccatgcagaaagctcagcaggtatctcagggtctggatgtgctcacagcaaaagtggaaaatgcagctcgcaagctggaagccatgaccaactcaaagcagagcattgcaaagaagatcgatgctgctcagaactggcttgcagatccaaatggtggaccggaaggagaagagcagattcgaggtgctttggctgaagctcggaaaatagcagaattatgtgatgatcctaaagaaagagatgacattctacgttcccttggggaaatatctgctctgacttctaattagcagatctacgaagaacgggggaaagggagattctcccagaggctcgaggcttggcccaaccaggtgggcaccgggcccttgcaaaacctgcagaacaaaacccaaccggggctgggggccaacagcagaccgggccaaagcaactgtgacacctttgaggg

SEQ ID NO: 444948 - DNA, 1389 bp, Homo Sapiens
  misc_feature (284)..(284): n is a, c, g, or t
tttgtccattcatctttattcctttatttaatcctccccatgtattatataagcttaggtatataacttctattacataaagaagtagtaaaggcacaatgtttacttacacaattacatgtagtgaattagcacttttgtaactcagagacatgaatgtcaacaattttagagcagagctcatttgcacggtcataaggttttcatggctgctgtgactctgcagacaagcatttcaaagcaggccccccagccagtggcatcggaaccagtggcatcagggngaagtataaacaaagaaaattacagattattgtgcccacaccccagaaattttgattcaagtttgagatagggctgacaaatctttatttttccaaagctccctgagtgatctatatgtataaccaggcttctgaaccactgatgcagagcaccatcatttcttgatggaatgggatgcctgaggatagtaaaacaacaaagttaaaaacatgctgactttttttagaccctgaaattaccgattttggtgatgggtgttaaggtttgacaataaaaaccatttttcccagtgtggtcatggcttgagagagccatgcgctttccccaggtcatggatggccttgttctccagcagttccatctgcttgtctcttggtctcaccacattgttcagcattgctctaaccacggtcaccacaggcacagaatgccccctggcccaagagtctggtaaggagccaaagaactttctaaccagccattcacctgggcgagattcttgcctatcacataacagaactccaggcctaaatacagagtaacgatcaaattttaattcttcaaccttggcttctacttctcccttaacttgtagatataaaaaattgcttgatttatcagctcctttagaggatagcaagttgaaatgtttgcaccctccagcttttgccagctctgcagacttcagcacataatctcggtcaacacgaacaaatccctccgccccagctttccctctggtggtacccaggcaacagaatccaacatcatgaccttgaaaggcagaggcgtagtcatccaacttttcaaagtccaccacttcttgattcacatttttataagcttcctcgtcgaaggtgagcttcctccggccaatgagcgtgactttggaaaacaggccctgctccaggatttcctttaagagcactctgccggtttctccgctggcgcccaaaataaagacggatttattctgcatcctgaagtcttcccgaagcttcgacagggcttctgtttcggccatgctggggaaataacatcgacagatgccggtcttagggtgtcaggggactgccagtccttatccacgaggaacaagccgct

SEQ ID NO: 444949 - DNA, 1567 bp, Homo Sapiens
gagcgaggcctgggtggcgtattcggcacgagggccgcctgccgtgtccgtggccagctcccacaacagctccccctatctcagcagccagcaacaggccgctgtaatgaagcagcatcagttgcttttggaccaacagaaacaaagggagcagcagcaaaagcatttacagcaacagcagttccttcagaggcaacagcaccttctcgcggaacaggagaagcaacagtttcagcgccatctgacccgcccaccaccccagtaccaagacccgacacaaggcagcttcccacagcaggttggacagttcacagggtcctctgctgccgtgcccggcatgaacaccttgggtccatccaactccagctgtcctcgagtgttccctcaggctgggaatctgatgccaatgggccctggacatgcttcagtttcctctctccccacaaactcaggccaacaggaccggggtgtggctcagttccctggctcccaaaacatgcctcagagcagcctctatggcatggcttctggcataacccagatagttgcccagcccccgccacaggccaccaatggacatgcccacattccacggcagaccaacgtgggccagaacacctccgtctcagctgcctatgggcagaactctctgggaagctctggcctctcccagcagcacaataaggggaccctgaaccctggtttaacaaagccaccggtcccaagggtgtcaccagccatgggaggccagaattcctcctggcagcatcagggaatgccgaacctcagtggccagaccccaggggaacagcaacgtgagtcccttcactgcagcctccagtttccacatgcagcagcaggccccacctgaaaattgtctagcccgcaattctcccaggcagtgcccaacaggcccatggctcccatgagctcagcagctgccgtggggtccttgctacccccagtgagtgcacagcagaggaccagcgcccctggccccagcaccacccccaacagcccctcagcagggcttgcctggcctgagcccagcagggcctgagctgggggccttcagccagagccctgcctcacagatgggcggtcgggcggggctgcactgcacccagggcctaccctgggcggaccgcgggccaagaagctgccttttgcctatagcgggcagccaggtgggcaatggggctctctagtgtgggctgggaccccccgaatctgatcgactcccctgcctggaggaacagggaacttcgaaggaattggaataaatggatttttgaacgaacctggttaaggggcctccagaaagggaaagggaatttgaaaggggttttttaaggggtccatttcccccccaaaaattttttaatttctcccgaatttccaagaaaaaggcgccaccttctcttttgggaaccaaaaagccccttgggcctttggggggaaaattgggggcccgggtaaaaaaccccaaaagtttcccacgtggagagccctgggccccctgggggaaaagaggggttctttggggggttggcccccccctctaagg

SEQ ID NO: 444950 - DNA, 905 bp, Homo Sapiens
ccgttatctagtcctaaggtatattccgggctttttctcccccctttattatgggacccgaagttagcctttttcattttcttagaaaggctcttaagaggtgtccctggagtccttgaatcactttagcatctggggtaggatgtgccaccaggagtatttgggctggagcgtgtgtgtttgcctttgacctggactgctgtctgatcttgctgaacactccaccgacatttcctaaagttgctcagtgccaatccagcaaagcagtccattttcccttggccaagattgagatgtattgttttagatacagaagagttcttggatgagccaaggacaagctggggtgtcctatattgaacagacctcgatgaaaatcttgaattcaccccagtgccctctgttggcaagggaaggtgaagattgaaaagttaaaaaagcttttggccacttgagaggatcagggccgcaactcttgaagaagcaaagggctcagtgcattggggtcagcgctggtacagctgaaggatgccggccttgtgcaggtccctccacagggcagcttccagggacagatcgtggtttgcataaaatatcaatggcttcatttttcgttcgaaatagtggtcggaaaatttccagtagttgcttgtgatgcatccataggcactgacctggtcacaggtatgcaaagctgtcagcagcatgagagcgccggtactaggcatatataggtctccaaaatgtgtgttaatcaactttgatttcaagaacctttctgtcaggtagctgatgaagtccggatgtagcagcttgaatttactggcagaggcttctggtccaaaataggcgtgcggcctaggacccatgatagaagtggacagagcgcccagagccgtcgtatt

SEQ ID NO: 444951 - DNA, 1461 bp, Homo Sapiens
ctcaccggagccttccttcatcaacccgctgagcgctttgcagtccatcatgaacacccacctgggcaaggtgtccaagcccgtgagtccctcgctggacccgctggcgatgctgtacaagatcagcaacagcatgctggacaagccggtgtaccccgccacccctgtgaagcaggccgatgccatcgaccgctactattatgaaaacagcgaccagcccattgacttaaccaagtccaagaacaagccgctggtgtccagcgtggctgattcggtggcatcacctctgcgggagagcgcactcatggacatctccgacatggtgaaaaacctcacaggccgcctgacgcccaagtcctccacgccctccacagtttcagagaagtccgatgctgatggcagcagctttgaggaggcgttggacgagctgtcaccggtccacaagaggaagggccggcagtccaactggaacccgcagcaccttctcatcctgcaggcccagttcgcctcgagcttgcgggagaccacagagggcaagtacatcatgtcggacttgggcccgcaggagagggtgcacatctcgaagtttactgggctctccatgaccaccatcagccactggctggccaatgtgaagtaccagttgaggaggacagggggaacgaaattcctaaagaacctggacacagggcatcctgttttcttttgcaacgattgtgcctctcagttcagaactgcttctacatacataagtcatttggagacacacttgggcttcagcctgaaggatctctccaagctgccactcaatcagattcaagaacagcagaatgtttcgaaagtcctcaccaacaaaactctgggcccactgggggccaccgaggaagacttgggctccacattccaatgtaagctctgcaaccggacttttgcgagcaagcacgcagtcaaactgcaccttagtaagacccacggcaagtctcccgaggaccacctgatctatgtgactgagttggagaaacagtagcgtccaggtatgcaagagaccgcggaacattgcactaaacgtcgtcgagctgcactaggcctggcctgagcctctgaaatcagtctttcctttgttgctggcccgcctctctggaccttggttttcttacacatattttgtatatttatatgctctctgtccgatctgtgcatgttatttttctttttccgtgagtcaaagtctgacctttattttcaacatctgttcttggtgttaagctatcttttgtaggaaatagtggggcacactactcagagacattatttagcagtaaagaaagacacaaataacaatgataaaaagacatcctaaaatggtgaagttgccatgacaataaaggtcatagaacctggtagtgtcaaatttaaccctttgaggactgtaattgcatttctgtgcctttcacttgaaaa

SEQ ID NO: 444952 - DNA, 912 bp, Homo Sapiens
acagggtaatccttggggcgccgcccgagggattcctggtcaccgggggaaccgcccaggttagggggggaaagaagaatgttagtctttcttgccagttttgatagcaagacccagattttgtagttcaggcaaactggtacaaaaagtgatggaaagggaatatgcactgttattaggcacagtgctttttttaatataaaataaagcagcttacattttcactgtaaatataggctatgtacagaattatatatagatatagctacacgtataaagcttcattataggcctctgatacaattataataacggttccctgaaccttttagagtgcaattaagaacaaaaactaaattttgtttacatgaatatggaataaatacaataatcaaaatatgactctccctaaaagtgaaacacacaagccaatccggaactgctgtgcgaaagataaaatcgagaaaggcaaggtttcggtaggaggacgcgatgaggggcccgccccaggcagggaatggcaatgctctaaagaaaagagacttcgtcaacagggaggagtcagcccttgacagcgaccttgttctctgcagcagcaaacatggcatagaatcgggaactgtcgttggacagaaggaccgatggggtgtcaaactccaccacctgtccctgggccagcaccataattctatcggagcctagaaccgtgtgcaggcgatgggcaatggtcagcatggtacagtctgcaaatgcttctcggatggtctcttgaatcaataagtctgtctctgtgtccatggcagctgtggcttcatctaaaatcagaatcttacagtggcggagcagggctctagctatgcacaagagctgccgttcccccactgagaagttatccccattctccatcacttc

SEQ ID NO: 444953 - DNA, 1547 bp, Homo Sapiens
  misc_feature (249)..(249): n is a, c, g, or t
gggggatttggaatgcccccaggggaccttgcccgggcccccgttaaggcaaccaccccaaccaggtggtggaagatgccctggaatggggcggggaattccagccagccgggtttatgccaggctgggccttcagcccaagccttcagcccctgggaggccacgttcacccagacagggatccggcatgacctgcacgctccctgccccagggcgaaaggcttgggtgccccagctgctccaggggcntgaaacacctcagccgggcgtctctgccaactgccctgagggccccagggagtagagtggcagcacggtgggatccaggctgggcacctcaggtacaggttgtggtgaaggaaccagtggctcaggcccaacagcatctgtgtcttcctcacttgctggccggggacactgggctgcccagtgatcgaactgctcgttcaggaaacaagactccttggttgtgactgtggcaccaccacccccaaaacactcccctttcttccgccacttctgcttccatgcctgcttgcggaggagcctgctacggagtgcccggccccgcacgtagtgtttctgcttcatgttgagccgtacgtaattgcccctgtcatggcgggccagccgagggaagatgtgcaggggggctgtgccctcagccttcccagccctagcttgactggaggggctgagtccgtggtacctggggttcgatgggctgctgcagggctgaggtggctgttcctgtccaggttccccctggggggttttcctcaactggtacagcccccagccccctccgatggggggtccagcttggctgctctcctgctggacctgtgcggggctctcccaggggtcctcgttccatctccgcttctcgcctccactgctgctgggctgggggctccccacacggatgctgacttcttggaaggctgaagcttctgggccctggggagccagcaccaggaccaaggacagccgactcaccagggatcagaagttgtgattcctctgagcctagatcaggcctgcaggctttgggggcccccagaaaatctgggacctcactgtgacatcgctgtaaccagccaggatctagggagcccagccgctggctcagggatgcctgcagatgctggagccggcctggccttggctggggctcagggagctgtggaggctcatcactgactttttctgcaaaggaggggacaggccctgtacctgggggctttggggtggatgccttagatgaggctcttcctagaggccacggtctgcggcccagggctggtccggcctgcagggtgcctttcagattggccttgagccgctgcccgtagtccggcaccgagccctggcggctccgccctggcgtaggctgtggactcttggtcgcagcccgattcagatggggcccccagcagcggggctctggcgcctcttcggccgccgcggggagcgactcggagctgcggagcccgccgccggcctggcccgtggtacgccctcgtgccgaattcgccacccaggcc

SEQ ID NO: 444954 - DNA, 1393 bp, Homo Sapiens
ctgctatgagtttctcgatgcttggccgtatggacgcctctgtctcccagcagtttcgtcatgagttgataggccttcacagggacattccgtccggggccgtggcagcctctcccctcggttccagccactcagtgatgtctcagacttgtcatctgaccctgcgcctatgcctatgaggctcaagggaattttcctggtgggtgctcttgtctggagtcccaggtgcgtcacccagctcataccagcgtcacccccgaagggaccagacatctgacgcatagtagaactttatactcctttcaggcactctggggcatacctagggggaggtggtcactcagccacggggtgctgcactgagggcttggggatcagaccaggctgaagccctcacctgagactgaaggaccctctgggctcagttgggacccacccttaagagcgcagcctgagcggggtgatatgctcattggctaggccgctcattggctaggccgggttaaccccgcccaccaggccaagccgcactctatacaccgccccttgcctccataggccccacccccgcaccgctaggccccgccgcgcttcactgggatcatgccctatcatgatacccagcatccgtctactccaccctgcctgttccaagtgaccccagcaccccctcagactgcaccccgcctggtcaccagaacacggtggctgtccccatcctcgcgcacgcggtagtactcgtggccttcgggcacggccttggctaggccaaagtccccgatcttgaccagcctgtcgttgtccagcagcacgttgcgcgcggctaggtctcggtggatgtagtgctgcgcgtgcagataggccatgccctcgcagatctgctggtcgaagagcagcagctgggccagcctgatgctgtgccggggcaggtagtctcggaggctgcccaggggcacgtactccatgaccagctgcagcgacttctcgcctgccgcggagaggggcggccccggtgggggacgatagagggcgggccggggaccgcctaccttgagcccagcagagcccctccaaggtcgggagggaaggccaagacccgcgcacactagacccagttctcaggtgggatggacccatccagaaccccattctcacttgagggagctgctggtggctcccgtccatcctggccccagcaggtagcaccccccagatgggaaggaggcagcccagccacgctcacccagatgccaagaaccgcgtactgcagcctggggttgagagtctgtaattggctaggccagactggccccgcccacaaggccacacccacgctctaaccacgccccctcgagtctctaggactcgccgggtcccgcccaccttggtcctc

SEQ ID NO: 444955 - DNA, 213 bp, Homo Sapiens
tgagccaccgcgcctggcccagcctatgcctttctaattgctctagcaaactcccggtggggctgcgggcctggctctcaccgtgggggggctctggctggagtcacagtgcgtcagcagctcatacagggtcaccccgaaggaccagacatctgacgcatagtagaacttatactccttcaggcactctggggcatacctatggggaggggg

SEQ ID NO: 444956 - DNA, 1121 bp, Homo Sapiens
  misc_feature (732)..(871): n is a, c, g, or t
  misc_feature (1078)..(1078): n is a, c, g, or t
  misc_feature (1110)..(1110): n is a, c, g, or t
gcagctggtacggtccggaattccgggatatcgtcgacccacgcgttcggtgaggccctgtctctaaaaaagtaaaaagaagaaacccagtgcccattggctgtcactcggtttcccctcccctggcccctagtaaccccttgtctaggtcctggttctatgagatttgcctacagtggatatttcatgaaaacaggctcagacagcgtttgtccttttgtaatcagctggccttgctcagcatggtgtctctgaggtccacccacgtggcagtatggccttcctgtttatgggcaaatgatattctgtggcatggatggaccacaacatgctcatctgttgatgggctgttgcccgtgatgctgccaggcacgccggtgtacacgtctgtgtgcccgtgcccctggtcctgtggctgcacgccagggccggaagtgctggtggtggtttccatcatgaggagctgctggttttccatagcagctccaccatctaaggttcccaccaccaacacgaggttgcggtttctccacatcctcaacaacctgttactatgtcttttttgttctggccatgctgctgaacgggtggcttgctgtgggctcttctcagttccctgttgaccgacgctgagcgtcttttcatgtgcttggccatttgtgtatcttctctggggaaatgtcttattcaaatcctttctccatagtttagttgggcttttgggataggatnnnnnnnnnnnnnnnnnnnnnnnnnnnnnnnnnnnnnnnnnnnnnnnnnnnnnnnnnnnnnnnnnnnnnnnnnnnnnnnnnnnnnnnnnnnnnnnnnnnnnnnnnnnnnnnnnnnnnnnnnnnnnnnnnnnnnnnnnnnntggccaggttcgtctcaaactcctgacctcaaagtgctgggatgacaagtgtgagccgccacacccagcagttgggttgttttttattagagttttttctgtttttctgcagatacattggctagaaatgactgaattggaagaattctctgtattctctggttgctagaaccttatcaattaaaatttgcagaaaatttctcccanttctatggactgtctcttaaaattttcttggnggtctttggaa

SEQ ID NO: 444957 - DNA, 1299 bp, Homo Sapiens
  misc_feature (55)..(55): n is a, c, g, or t
  misc_feature (185)..(185): n is a, c, g, or t
  misc_feature (479)..(528): n is a, c, g, or t
  misc_feature (571)..(592): n is a, c, g, or t
  misc_feature (623)..(631): n is a, c, g, or t
  misc_feature (945)..(946): n is a, c, g, or t
gggagatattattgcgttatgcgagggggtcgggcgggtatttgcgtgttggcgncccccctcgtatatagctgggtgagggcgaggcgtatgaccacgcgggttgctccgtacctcaagccgtggacgcggaggcggcgcctgtctgtgttgcatatcatagccgcgtgttataatccggcggngggcggacttggggggagtaccctcaccggatgggttctcgcgtaccgggccaatgatttaatccgcgggcggcgtactatatcggaggtaccgagttctccgttgcgtgctatggactcatatagtgggcgcgcgggttcgagctgccgatttttctcgctccgattttatattcgcggggggccggcctttattatttgcggcggccggggcgggcggcgttctatgggcgttaaatggttcgaacgagtggtgttatttcgggtcgcgcggtctccgcggtattttattgnnnnnnnnnnnnnnnnnnnnnnnnnnnnnnnnnnnnnnnnnnnnnnnnnnagggtagtgcacgggttcgtgggggttgcttctgcgtcttgcnnnnnnnnnnnnnnnnnnnnnnaccggatggtttcgcggcggggcggcgttcnnnnnnnnntttagggtgggagatacgagtgtgtcgatttcgtggcagccgttattggggctgcgctgggtcgtttgggaatttaggggggaaggggtatctcggggtaggggtccactagtccgcgtgggtgggttggacggttttggtcgcagatcgccgcagggcagatgggtgggggatggcggtgccgtacgccgggatggggtccttgggcatgcctgtggtgccgggatgtgtagatgtagaacagtttatctgtgaagcccttgtcagggcaactgggaaggtgcttgggagcatctttcagcagagggtccagnngtgttctgtgcttggaggcaccgcaccgggctcccaggagccagagcagaagaggctgagcgaggggtccaggctggcatggacctcacagatggctgaggccatttcgctgccaaagacaagggcccgtgcgcgcgaggtggtgaggcagtggagcagagcatcccgccgcaggttggtgttgatgagggctgcctccacaccgagcttggccatgcccagccataggcccacgaactcattgcggttctccatgaagatggcagccacatcgcccgaggccaggccccgggcctgcaggaagttggctacactgcttgagtactcatccagctggcgatcccgggaattcc

SEQ ID NO: 444958 - DNA, 1879 bp, Homo Sapiens
  misc_feature (202)..(202): n is a, c, g, or t
  misc_feature (625)..(635): n is a, c, g, or t
  misc_feature (650)..(700): n is a, c, g, or t
  misc_feature (717)..(782): n is a, c, g, or t
ggagtgttgttgtccaagcgccattgttgtggattatatataagaaatggtgagacagattattgggaggcaatgttgcttttgtttcactcccgacctgtgttttgcaccactcgggggcggagatattgttttatggacacagcgagggacatccagtaaggttggtttttttggccaccgggcggcggttttttaggtntttttgtaacgtgaccgtggctagtgcttagacgctgtgccgcatgttgtcggaagagagaggcttttttatgagattatgtcaaccaatgtatttctccgtgttcggtggtgaccaggatccagggggtgtttaaacttttataagtgtggaggtttgtggttcgggaggttactctcgggggagaagggtcccacggaatataaacccctccgggagcgctccttctgggaagatgtttgtcaagaaacgaattggggtttgcccccgcgggggttttgttgtattgtgggagggttaccgacgcgtgtattctagtggagaggattttcttgagggaaaacaactttagggagacatttgtctatttccttagggggggcccgggcgacaaaaagaaagtgttataaaagatttatttannnnnnnnnnnaggcgggacaaagannnnnnnnnnnnnnnnnnnnnnnnnnnnnnnnnnnnnnnnnnnnnnnnnnngttgtttgtatggttgnnnnnnnnnnnnnnnnnnnnnnnnnnnnnnnnnnnnnnnnnnnnnnnnnnnnnnnnnnnnnnnnnngggtagggaaacaagattcatgttttatttccacagagaaactcaaaagtaggaagctcctccttcctggagaactgtcacagtgacttcaggtcaccaaagggaggaggtacagaaagatgctggtgtatgtgacgaggctggtggccactgaagcaccacagtgcagtgggaagaaacaaggagagacaagctgggtccccagcctaggaaacagaggtgtggcagccgggccagggctggcacaggctgggggccaaggggaggagctccctgacgaccagtgcttttcggggcctcggtggtggttgcaagaaattgcctacctaactttcacccactgcagcaggccaggttgcacccgggaagccgaggaagaaggtgagactccccccttttgcaggggtcttgactgagtacttcccaccataggcagtgggatacgcatgctggttgtaattgtagttcttggaagttacagctgccacctcctgccatcctgcacccggctgatcggctctgcctgcacgtttctgcagtgatgacgcgtccgcaccctcaataattgctttccagttgaggaaaggagtgttctgtttgaaatcctcccagagtcggctgaagtagaggagggctcgggtgctggggggcgggacctggttcttgtttatggcatcccagttgatgaaacccagcttggatttaaaattcttccagaaagtgtcaaagttaaacatcccaggagacgtctcagagttcacagtattgactccaccaacagcgtcacctcctccactgccccagctcgacccttgcccccgataattgtctccagagcctccaaggaggcgattgccctctttgcttatttccctcatgttgctggaaactccctgtcctctgaagccctgaatcccagattccccgctcccgcgggcttcattccctggcttttcacacccgggtttatgtccatttcctccgccgctcccaccgtggttgccggaggaggagccggtgctggatccctccagaccttccccctctttagcctgttggtcgctgcaggaagttattccgagcatggagaaggccag

SEQ ID NO: 444959 - DNA, 868 bp, Homo Sapiens
  misc_feature (65)..(73): n is a, c, g, or t
  misc_feature (113)..(185): n is a, c, g, or t
  misc_feature (232)..(270): n is a, c, g, or t
  misc_feature (279)..(303): n is a, c, g, or t
gccagccaggcagatttactcgccggaaaaaaaaggatctccaagaagttccctttggattcacnnnnnnnnngcccgctccttaggcgggttaaattcccgggtactgcacnnnnnnnnnnnnnnnnnnnnnnnnnnnnnnnnnnnnnnnnnnnnnnnnnnnnnnnnnnnnnnnnnnnnnnnnnaccactttgtacaagaaagctgggtcaggaaacagctatgaccatgnnnnnnnnnnnnnnnnnnnnnnnnnnnnnnnnnnnnnnngcctcgagnnnnnnnnnnnnnnnnnnnnnnnnngtggggcagctaaggtttatttcaagggcaagggctgagattagtgatgagagggtggtgttttaaggagggagtgtgggggctcccatccaatctggtggctccttgtctggaggtcacgggatgcgagagcttctctggtccttgtttatggcatcccagttgatgaaacccagcttggatttaaaattcttccagaaagtgtcaaagttaaacatcccaggagacgtctcagagttctgaatcccagattccccgctcccgcgggcttcattccctggcttttcacacccgggtttatgtccatttcctccgccgctcccaccgtggttgccggaggaggagccggtgctggatccctgcaggggaaagcaagatttcaaacgctgtcctaaaggacctaaaggggacccagtcgttcccagcggtgttacagatttgttggaaccccaatcagattccagtcctctttccaacctccagaccttccccctctttagcctgttggtcgctgcaggaagttattccgagcatggagcctcgtgccgaattcgccacccaggcc

SEQ ID NO: 444960 - DNA, 1348 bp, Homo Sapiens
  misc_feature (17)..(17): n is a, c, g, or t
taatggtgaggtctccnatcaaaagggctgaaaggaattgtcaagggaaggctgaagtcgtggtccctcatccctggaagtcctcgcacatcctgcccctctgccctcctgtgcacagcccatagtcccatcccactccctggcgatagcggtcaaagccactggagcatctctggaggacatggcacccagctgcagttgaaggtcaggtctgaggacatgcaggcgtcacagctcctatgctgcaggcaggtcggcaatggggtgaactccacggccgacatgctggtgaccttgctggggtccagctctatgcggtggtattcaaagatgctccttcgccgagattctggcacatccggggatggattgagaatcatgaaggcatccgataggccggttttgacaggatgctgggaggagctgatttccgggacagacatagggatctctttataggcaaagacaatgcggccgtcatggtgcagagctgcctggaaggtgaaactgcccttgtcttcccagccttggagataaacgtggtcccactgaaccacaaagactgtcccattgtcaaaagtaaacaacttgtggagtttgtcggagtagccagggtttgaagtttggccaatcaggggcgccacatactgagtagctgtgagcatccgatggatcacgtcccccatgaagatgaagcctccagttgctatggtgatctgccgcagaggatgcccgtagaaagggaaatcaaaggacaagaccactctcgaagcctgccggtgggtgttggagagtattgtgtggatcttcacttggctccggttggcctcggccacatctacccacagttcccggctgtggggctcgctggggccatagagacgggacacataatagctgtggttgtcctccaccaccctggtcctgttatctggcagcgtgtccatggccagggtgcccccacccaggtcctggctcagcttggtcctgtccggctctgacacatgcccagggctctctcgggctctccggttccagccccgcacggtccctttggcagcccatccagagcctgggccctcatcgtgacctgctccgggctgggggctcagcgcccgggcagcctccctgagcaccagcaccaggagccagagctcgcctcgcatggtgggtgcccggacctgcccccggcctgcttgctgccccggtcctgacgagggatggggcctggctcaggctgcggccgcgcggtccccggggctggcggaggggcgggtggcgaggagacggcggagcgcggggccgggcgagccggcaggagcggcgagagcgcgagcggagctccgct

SEQ ID NO: 444961 - DNA, 803 bp, Homo Sapiens
agcggggtcactcggttcaaggcagcgcgactgcgggtggcgcacgaccagggcgcagaccttggggcgcgcggcccatggagtcggggctgctgcggccggcgccggtgagcgaggtcatcgtcctgcattacaactacaccggcaagctccgcggtgcgcgctaccagccgggtgccggcctgcgcgccgacgccgtggtgtgcctggcggtgtgcgccttcatcgtgctagagaatctagccgtgttgttggtgctcggacgccacccgcgcttccacgctcccatgttcctgctcctgggcagcctcacgttgtcggatctgctggcaggcgccgcctacgccgccaacatcctactgtcggggccgctcacgctgaaactgtcccccgcgctctggttcgcacgggagggaggcgtcttcgtggcactcactgcgtccgtgctgagcctcctggccatcgcgctggagcgcagcctcaccatggcgcgcagggggcccgcgcccgtctccagtcgggggcgcacgctggcgatggcagccgcggcctggggcgtgtcgctgctcctcgggctcctgccagcgctgggctggaattgcctgggtcgcctggacgcttgctccactgtcttgccgctctacgccaaggcctacgtgctcttctgcgtgctcgccttcgtgggcatcctggccgcgatctgtgcactctacgcgcgcatcttactgccaggtacgccgccaacgcgcggcgccttgcggaccgggcccgggacctgcgggggaccaaccttctgaaccggg

SEQ ID NO: 444962 - DNA, 919 bp, Homo Sapiens
  misc_feature (145)..(145): n is a, c, g, or t
aaaggcccctgggaaaaaccaacttttcggaggttagttatccaggcgttagaccatggatgccagaggccggccctgctgcccagggtactgccctcaacaattggggggaccatgcagaagtactttttaaaaacggttgcanccattcacaggcagggcagctgggagcagaggctgcggggaccctcagggcttacctgggctagggggctgctgggctgagcaagacgggcgctcctctcccatcacttccctcagttggtgacaatctggcacacaaaagctttcctgatgttggcgggcacaggctcgggaacgtgcacgggtacgggcatgggcacggctattgatacgaggatggcggagtttaggagaagcatgggcttttgtctggttgtagatcaggaagcttgagcacagcaaactccaacagagcgcagaagcagaagacgaagcagatggcgatatagaaatccaaggctgtgatataggagacacgcgggaaattcttacgagaaaatgtgcccagcgtggtcatggtcagaacagaggtgatccctagagaggtccgggctggagcagactctgtcttgatccaaaaggaaacccaggagagcatcgtggtcacggaagaagggacatagttttgaaaggcaacatagccaaaccgcctgctcacattgaagaaaatcgtcatgaccatgaagtcactgcaagaccaatggccagttgagagctaagccaaggccagaatcttaatagcttccttctcagttcactgtcctacacccaatgtctgtctctgcaggttggcaagagagtcaggtgaaagtgaaaaaatcaattagccttctagatatcatgcccacgcagctgatatccagatgcatcccgggaatccggaccggtccagcct

SEQ ID NO: 444963 - DNA, 1898 bp, Homo Sapiens
  misc_feature (466)..(474): n is a, c, g, or t
  misc_feature (1677)..(1727): n is a, c, g, or t
ttgatatccccccccaaatataggagagtagagaggctaccagagttcatttaatgcaatgaggaaacaggtcacagagatgttatcaagctaatcaggtaatatagttaattggtggttaaattgttttgttacactgaatagaatgtaacaattcatcagatgcacctgaatcttaattatgaaatgtgtaatgcatagcacattaagaatacttagaaaatgaaaggctgttccaactgtacaactgcaagacttttggcatatttatgcattctatttctagaacctttctgaatatattaatgtgtttttattaagtgttttataacctggtgctacatattacacgttactgacagcattatctacagaattgcatatcacctttaccactgcccaaatacagtccaatatggtaggcagtggctacagggagacgatgaaactaccggatgctataggnnnnnnnnntttcctttcttaaataaagataaatatcattgatatttatgttttcagattcactgcaccaactacattattattaagagtagtttcttcaaaaacaaaaacagccctttgaagaatggcagttgaaatgctttaaaaaatctggcaaaacataatgaaaggcatcgccttctatttaataatttcttcacacacattttttaatgtaccttcacattagcttctttcaaactgatgactttatctaaatctggtttggctgcattggcattgccaataagcaggtagaaggtagctcgtagtagcaatgcttctgccatgtatttgcctttcagcatgtatttcttttgagctattcacttatgattttatcgtagttttcttcttcctatatactgtttggcctttaagtatccagaattttctttcacttctaaagcctccccttccttgtctttatcttcatcagatttctctcctttaagcatgggctgggaaatgatatcatccgtgaaagaactgaagtaagatttgataaactgtggagatggcatcagaggttcacgattcttatatttttctttggctttctcttttccaaggagtttaagaactttattcggctaacagcatgctttgttgattttggaaccctttcttatatacacacagcagtgacatcttctaaacattcccttcttattgtctagcttctcatgggcttttgcacgtctaaagagagctttcacatatttgggattaagttcaacagcttttgtacagtcttgtgccacttctttccatttttgccaactgttcaaaggcagcagctctgttttgataaaatgtagaaaggtcaacattcttctctgtagggcacaagctaatagcctcagtatagcactgaatagcttgttcatattttcctgctttaaaatatttattgcctttattcttggctgcttgggctctatcaagagagttcatgtccaagtgagcaccgggaccttcagggtgtccgctgcccggggccggactggccctgccctccggggtcttccgctcgctgttgcgcttcaggccgctggcgtcgccccggcctctggcctcccggcgccgttgctgccgactccacaggtatatggcacccgcgcccagcagcaggggtgccccgaccgccagagccagctgccatcgcggcannnnnnnnnnnnnnnnnnnnnnnnnnnnnnnnnnnnnnnnnnnnnnnnnnnagctcggtacagcggctgcgaccaccgctgcctccacaggtttagaggcggccatgacaagtgtcctctgccaccgcctccctgtctgtcgcgagcgccacaatcaccaaacagcgtgcgaaggaagaccgagggagggaaggaaagcaatgagcgagcgagcacgctagg

SEQ ID NO: 444964 - DNA, 1196 bp, Homo Sapiens; identical to SEQ ID NO: 323093
  misc_feature (102)..(152): n is a, c, g, or t
  misc_feature (181)..(181): n is a, c, g, or t

SEQ ID NO: 444965 - DNA, 831 bp, Homo Sapiens
aacatcgtcggtccaagccagggttcagataaccaccgtccagggaaatgaggtgagaaaaggaggaggaaacaaattgtttaattctgtaccagactttgtatatagcttcaaaattgcttaaaaaaaatttcttaaaaggcattttgctcccgttgtgaggcaatgaacattggggggtcttttcaaggaccaaccccgggcaagcaggtggcgcctgtgaaatggaaaacattcggaaaacagcagcccctccttcagctccctgtaacaggagactttctgatttcccaatcttggctcaggtcagaagaaaaagggggaaaggttacatctcctggaaagaaaatacagcctatttgaagggcatgcctgactttcagtccatgcactagtcctcttggctcgtagagttttcagtgccctgaagccatgatccctctgcctccatggtcctctgagtgtagttattatgtctgcaaaccagtaatgtcacaagtcaaagggtctggggcttcccagggaaccactatgactgagtatattctgatttgagaaacctgtgacaagtcttctcagcactcgccttctaatttttggagccgatgcctgggttcccagcatccaggtcacagtagctggaaatcatgcaggaagggcaaaaagccagcagcccagaatggactgtctctgcagctctggcacattctctacacatcgccacaccactcaaatgtcctataaaatatcaaaaccaataacctggacatggccgattaatctgtacaaaaaggctttataaaaatactcccggccgggcgcggtggctca

SEQ ID NO: 444966 - DNA, 1207 bp, Homo Sapiens
tttcgagtttaaataatattattttccttagtagttctctttctctctaacaagcactcaagggcaaggatatgataaatatttaggtacacccctccccaccaagagattggggggtgaagagctgggcacgcatctgacatttcttcctctattcctataaaaataaaaggaagcagaaatctgcttcaatgagtaaacaagtcacctacactccaaaataacccatgcacactgtttctggggagggagatggccaggccaggagagttgggccacatgatgggggacattcactctgccacctgcagcacccctgtactggggaggggtggccagtgccacagtggactctgagatgaaagggtgtttcttccactggcctttggcctgtcaccagcctcctccgcggtggcaggcagtacaagagtgatggcaatgtgactggaacagaaatagtttctaccaggcacacaaaagctcctgtaagccccgtagttccatcctgcaaagggcctcagtgggaaccaggtctgcagacccgagtgggcagagagacgggtggaagcaggtgccccagatggtcccgcaggcgtcaccgtctggtttggagacctttaagggagtttgtggcgttcaaacttgtctcccagggtcctcaggtggagaactagggaggtttgacctataaggtcctccaaggagaggccaaggtcttggagacagatctggtttaccatctgtttaacaaaaggcacatgtcttctctgtcctgtcagaaagagtcattaacactaaaattctttttgtcttcggagtttcttctttcccgatgcatctccagttttgtcccagatgaaggcgtctttccccagggtcagggttccatcacttggcccatgaaaaggactgttcctgtggggttgtgccggaccacaaagaggaagggtctgtccatgatgatctcctcgggggccatgcgggctgagactatgacagctgtggatgaggaggccaccgtgccactctcgttcacctcgatcttcactttctgcagcgcctgcgcgacgtggagaggctcttggtctgaaagactcgtgaagtcagcctgaaactgtctgaacatgtcggtcattcccaggttctctaggggcttcctgagctcgaccgacgcgtgggtcgacgatatcccggaattccggggccg

SEQ ID NO: 444967 - DNA, 866 bp, Homo Sapiens
  misc_feature (118)..(118): n is a, c, g, or t
cagatttaccatttatcaagaggtcttcacactatcaattgtgcaattatcattctacacacaggcagtgataaagggagtaaaaaaaccacagcccatggatcgggagaccaaggtnccctccagaggagtcccagtgggtcccagaagccctttggatgttggtcagaggctcctcttgggcagagatcacagcagcagccaacaggtctggtgaaatccttaagagttctcatggacaaagcttgtgaaggcatcttagacaagatcttgtctttgctggttttatgatcctctgcagatgggtctattctcattatctcagccacctttcacttcctatcagttcagttcaggtctctcatgatcccaggcagcagtagttgttatcacgtgagttcattcatatatgtttatctctttggggatggggggacaacttcactgtggacttaattctactggagatgagtgaccccattttaagacaataggatcacaaattattaccacatatcatcagggcagacaatagctacaacctggggctgaaagcaggtaactccatttattctgcaaacattctgtcttgattatggtgccagttgctgtgagggatttcctttccaccacctgtttttcacaaggtttgagtctgaactgttaacattctactgatttctgggtgaagggactgactgcaccatcctagcctgtcagagcacttgccccaatacttccactttaagagttttccaccttgtccagaactacagtccattaatcccctcattttcttttttaagagaataaacaggccaggtgcggtggctcacgcctgtaatcccgcaggttgtcccagtcac

SEQ ID NO: 444968 - DNA, 826 bp, Homo Sapiens
  misc_feature (40)..(40): n is a, c, g, or t
  misc_feature (66)..(66): n is a, c, g, or t
  misc_feature (155)..(155): n is a, c, g, or t
  misc_feature (157)..(158): n is a, c, g, or t
  misc_feature (163)..(163): n is a, c, g, or t
  misc_feature (205)..(205): n is a, c, g, or t
  misc_feature (262)..(262): n is a, c, g, or t
  misc_feature (275)..(275): n is a, c, g, or t
catcctattctcatccttgctgaccaacttgcaccagtcnttcccccagggatccgcaagacttgnctgcacttctggtggcttttggcttctctgggcctgttcatcttctgtagtctgcttgccattgcaaagctttacagttgtgagaaacngnngatgntctctattctctccactatctgtgtcactgtgatcatcattntgaggtgaccgatcaatgttagcattactaaactgctctggtaccagggttactgtntgaggttcacttnccaaaagctgctccgtgtgtttcccttcattttgccacttacacattgctgcagtctgatgctggttcaaatactgtgtacttttttcagtgggtgacttatcaagacttagctgagaaacattttctaatttttctacattatgttggtaaaagttatctttttgtacagaactcatcatggattctattcttgtattgttgttttctttactatccaaactttctgattccgctgtcttgattcctttagtgtccatccaactggtaatagtcttttgtttgaaaacaagcgaggtggcgctgcctctgtgctgtcccgcccgccctgggacgcaggctggcgaggacggtgggagcctgaactgcacgtgagcgtccttggggtcgaggacgcgcctctgcctgctgggaaagctccgggcgtccgaagcagccggcgaagttgtagcggcgccccagcggggtcgcttggtgcagggttcacagccggggcccgcattcatgctgggaccagcagcgcactgcctcaatgcgccgctttgattcccc

SEQ ID NO: 444969 - DNA, 1991 bp, Homo Sapiens
  misc_feature (26)..(26): n is a, c, g, or t
  misc_feature (32)..(32): n is a, c, g, or t
aattccccaaaatgctgttggcctangtccantgcccaaaatagatgaacataaccttccctgagctcaaactggccaatccatcccagctcccaaagatcgcaacacgggaaaaggcgggtgcccaagactgcggtggatacctgagcaattcaatacacatgaggactcccaagttcaaactggcccacttaaggattctgggtctcacagtccacacagtgggcgttcccacgcatgttttggatcgactgcagggccatggcctcgctctggctggtcagctgggacttgcttttactgctctcgcatgactgcaggctggccaggatctggctctggatggcttggacccaggcatcccgctcctcatacgtcgtggcttcaaagtgccacgtttggccagtggcagacacaatcataaagttgttggtgcttttcttctttaggtgtttctttttattggcatgaggagagggggtcgggttgagcttggggctggtggtgctggagatactggggctgaagcatatggagtcacccagcccggtgtccatgtccttggataggccattgcttttagagctggagatgggtgcacaggccgatgtggctagggatggccactttcctgggactttgatggtagatgtctgaaggtcaatctcttttttatgaatattcttcatataatcacctaagcttgaataataggtgagcacgccattggaacacagggtgacgtatttctttttccatgtcttcagccatttcccacttcgctttaagagcatgccctgtttaatggggatggctctgccgctcccgatggtgtcagcatgattctccggggctttcctctctttgtctgggtcactccctttctcagatgtaaacaggttggaccagcgcatggaccgcttgcaaacgggggtgggtgtgttggcagtgggaggaacactgaactgagggtcctcctggctggtgctgggagtcgatggaatggaggaggaatagttatttaaactcccacctccatttcttttcttcataatgtgcacggtggaaaccgcaaatgagtgtaactgttcatcaggtatgctcaaagatctatctgcatctctttgtgtgatatgatgaggtatctccaaggtcacagatattattgtcattgtaagataatgctggatggctgtgctgtcatcaaggaatattgtcgaacacgagctgtattgttgactgaaacgcacagtagatacatggtttgtacatttgcttcttcttatgcagaagggttaaactccaaagcatctgtttgagagttcctctggaatattgtgcttgcctctggattggcagaaaggttaaactccaaagcttcaggcatctcccggtcacgaacgtggtgcatgtggaggtcctcaccaacttcaacagtcacctcagcaggctgtacagcagcagccatgggcgctcctgccatcctgtccccagctcctgcctcatagatctcagattcagagggacacaccgacccctgctgctggtcaaactcgaggctgacgcctgtggcttatgatgctgctgctctcctggcccctcgtgcagtgccattgggactaaggttttcattcatcaccagcttcctgagattttagtcaatcatggcagaagggcaggtccgacttccatggtggccgcacagagagtgggaacatgtgaaggagcaactccagaggagtccagtgggtccagaagccctttggatgttggtcagaagctcctcttgggcagagatcacagcagcagccaacaggtctggagaagaccttacagttctcatggacaaagtttgtgaaggcatcttagacaagatcttgtctttgctggttttatgatcctctgcagatgggtctattctcattacctcagccacctttcacttcctatcagcctcgtgccgaattcgccacccaggcctcgctacctta

SEQ ID NO: 444970 - DNA, 947 bp, Homo Sapiens
ctgttcatcaggtatgctcaaagatctatctgcatctctttgtgtgatatgatgaggtatctccaaggtcacaatggtttgtacagttgcttcttcttatttctacaacatctgtctgagagttcctctggaatattgtgcttgcctatggattggcagaagggttaaactccaaagcatctgtttgagagttcctctggaatattgtgcttgcctctggattggcagaaaggttaaactccaaagcttcaggcatctcccggtcacgaacgtggtgcatcgtggaggtccttcaccaacttcaacagtcacctcagcaggctgtacagcagcagccatgggcgctcctgccatcctgtcctcagctcctgcctcatagatctcagattcagagggacacaccgacccctgctgctggtcaaactcgaggctgacgcaagcgaggtggctctgcctctgtgctgtcccgcctgccctgggacgcaggctggcgaggacggtgggaccctgaactgcacgtgagcgtccttgggctcgaggacgcgcctctgcctgctcggaaagctccgggcgtccgaagcagccggcgaagttgtagcggcgcccccagcggggtcgcttggtgcagggttcacagccgggcccgcattcatgctgggaccaacagcgccctgtccccgggccggccccgggcggagagcctcatttcactaacctgagagagatggactgcgcgtccttctcagcgcctgcctgcaccattccctctctgccgctgcctgcttctgcaattgctgatccgccggcctcccaagtcaggccgtatacactcgcctgctttctctcttccactggcaccccacctgcctcaatacgccgctttgattcgggattcgttcactttttcccgctctcgacgaattcgagctcggccgatttggcctgat

SEQ ID NO: 444971 - DNA, 608 bp, Homo Sapiens
ccaatgccccctcgtgcagtgccagtgggactaaggttttcattcatcaccagcttcctgagattttagtcctaagaaaagcacagggtagttcattccttgaagccagcttcctctatgagttctatacaaagcctcagtagagtgggtcccattagcaaccaagttgaacaacttttatttgctgtctgaatatagatacacctgaattgttgactgcttttgtaactaaacactcctctcctgtcttccaacgagtggtcatttttgtccgcaacttgaccacagcaatccctggggccctagctctactctcaataaagagttatggctgtgtgttttgaatgacaccttaggacccatcctgcctccacctccttctccataaaatagaaacctaacttgtcacctccaagctctgaaatgctgaaacttaccaactcccttttctccccgctatttcttccttccatggcagggactttcaggttttctttcttttactaaccaggcactaagcatgattttctcatacagaatcgagagccataaagtggcttaccacagtcctatttcaataaagatgaatacttgacatctggcaagta

SEQ ID NO: 444972 - DNA, 901 bp, Homo Sapiens
  misc_feature (838)..(838): n is a, c, g, or t
gagcgagagccgacggcgggcgggcgcagctgctgccggagcgccggcgcgtgctggtgggccacacacctttcctcctcttcactcgcgagccctcggacatggtggcccccggctccgtgaccagccggctgggctcggtattccccttcctgctagtcctggtggatctgcagtacgaaggtgctgaatgtggagtaaatgcagatgttgagaaacatcttgaattgggcaagaaattacttgcagctggacagctagctgatgctttatctcagtttcatgctgccgtagatggtgaccctgataactatattgcttattatcggagggctactgtctttttagctatgggcaaatcaaaagctgcacttcctgatttaactaaagtgattcaattgaagatggacttcactgcagcaagattacagagaggtcacttattactcaaacaaggaaaacttgatgaagcagaagatgattttaaaaaagtgctcaaatctaatccaagtgaaaatgaagaaaaggaagcacagtctcaacttataaaatctgatgaaatgcagcgtttgcgttcacaagcacttaacgcttttggaagtggagattatactgctgctatagccttccttgataagattttagaggtttgtgtttgggatgcagaactacgggaacttcgagctgaatgttttataaaagaaggagaacctaggaaagctataagtgacttaaaagctgcgtcaaagttgaagaatgataatactgaagcgttttataaaataagcacactgtactacccacctaggagaacacgaactgtcccctcagtggaagntccgggaatgtccttaactttgacccggatcctttaaaaggtgggtttgcccactataaaccc

SEQ ID NO: 444973 - DNA, 1535 bp, Homo Sapiens
  misc_feature (20)..(20): n is a, c, g, or t
  misc_feature (102)..(102): n is a, c, g, or t
  misc_feature (1069)..(1069): n is a, c, g, or t
ggcccttttcccttggcctnaatttcgggtttccctaatcccatccaacttccagggtgcctcaaggcctttccctcaaaagcccttccttaaatctcccangaatgaatctcggtggctaatgctccttgcctgtccctcggcgaaaggttgcctttgaacaaacatggggcccaacgcaaagccccaggttgttttctgtgtcactcacgcaaaacttccagcgaggaagacaggtcttcttggtcccgtacatgactttccatgaactttctcatccggcgtcctgaaagcgctggtcagggaaggagcttgttttccgcaccaggttccagatcatgtagttgttgagcaggcatctgtcggtggtgttgatgagagtggagatctgctccaaggtattccttgtcatagaccacaataggctcgggattcattgatctccacggggtagaagatggtgttgagaaaaggcaaccagttgatggcgggtgccaaggtctgcagctcggctgccgtcactttgtggtagatgagctcctcatcacggcgcttctcctgtgggatggtgatgttggccagtgccgtctcaaagtccaagatctgctgcatctggggccggatggcctcctcgtccccgccgcccagcagcttccccagctggaccatgtagttcagatatccggtcagcaccttctcgttttcagttttgttcaggtaatagtctctcgagggcaagcccaggccagactggtccacctggatcacgttgctgttggagttcttggaatcggcactgacatagacagagaagaagggtgaggtgcggtagtggggcggtgcccacttgcagggtgtcctggaagttgtccttggcccagggacctgtgatgttccagcccccgagcctctcaatcaactccattagaggtttggccctgagctcctcgatcctggtctcgttcatgcacgcacggtagtatacttgcgcctttctctctgcctcgctcacgctggccgtggagttttcgaggaggtgcttgatgattgcttggttgtgttcccaganggttgctgaaggtcccccagcgtgagtggccatcagggacatgggttggccttgatccagcccccacaggcgtagctgaagaagtcatggcaggggtccactgtggggtccatggagctcaagatggagctggtcactgagacacaagcttcgctcaggcacacagagggggatcttgtctggtactggatgcccagtgctgccaagcaggccaccagtcctgccgccagaagtaccaccaacaccaccagccgcttctccacctgggtccgtgcagcccagcacctctggccactccgggggctgtggaagttcacctgcagggaaggaggcaggaggggcggggaagacgtgagccccgggccccgcttcccttggaggaaggggttccgctgcaggcccaggccctggagaggcatcagggctgcctcctgtctcaggggtggtctggttcccacagattcag

SEQ ID NO: 444974 - DNA, 1580 bp, Homo Sapiens
  misc_feature (1491)..(1527): n is a, c, g, or t
cgagagtcccaggtacccgtttcgcagtcaccgacgtttaaaacaacgccaggccctagcttataaacgctcaccaatagggccccctttgtacaaagaaaagctgggtacgcgtaaagcttggccccctccgagggatacttcttgaccggcccgcccggtttgtgtgttcgtggtctcaattcagaaagtgtttattggccggagttgtcggagagccaaaagaagcagtccaggagggcttccttcaggaggcagccagcacagttgcacagggcagcttccactgccatctgccagcactgagtcctcctcatccagacacaggactgtccatgggcctctcaggggtctttggggccaggatgggacccctcagacctggcccaggtgggttttcaaagcctgcagctctcggctgttgatgttgttgcctccacacacgattaccacaactgaagtcagggaagggggcaggcagccctcggcctggagcctccgcaggaggcctgagtagatggctgctaaggctgccccacaggcaggctccaccagcatacgctcatcatccaggagctgctgcacagcgctcacagcctcggtgtcctccaccacttcagagtgaatcttgcacacctgcatgcactccagggcccgagcggccaccgtcttggcacccaggctcttggccacactggtgatgtctggaagtgtgaccagcttgccggctgtgatggccgcattgaagcagtgtgccccatgggtctccatggcaatgatgggtacatgctgccagcccacctccagcaggccagccaccaccccggccaggagacccccacccccaactgccagcaccagggcacctggtggggtcctcagcactgctttcagctcctgcaccaggctggcgtggcctttccatattagggggtggtcaaacggggggacattctcccagccgtccctcttggccaactcttgcgccctcagattggcctcgtcccagacctttccagtcagctgaacctcggccccctccccctgcagcctctgcaccacctgcagggaggtgctctcggggagcacgatggtggcaggaatgcccagcttcctagcagcataggcagcagcgatgcccgcattaccccctgaggagcacaccaggtgtctgcatcccttcttggccatctcctggcagaaatgcccaatgccccgaatcttgaaggagccgctgggctgcacattctcacacttgaggaagacaggcatgcccgccacctgggacagcgcccagctctccaacagaggtgtgaccacgtgaaagggctcctgcttggcatgctctgccacagggccgtccattctggagaccaggtagacagcctccctgcccaactatcccagaccagcgtggccccagctcctgccctccagcctgccagggaacccgctctcgacgaattcgagctcggccgatttggcctgatnnnnnnnnnnnnnnnnnnnnnnnnnnnnnnnnnnnnncgccgccaccgcggtgtaatccggttcccctatagtgagtctatacttttcca

SEQ ID NO: 444975 - DNA, 927 bp, Homo Sapiens
  misc_feature (656)..(656): n is a, c, g, or t
tttttttcatggcacagagtttaatgtgaatcatgagatgagacaaaagcctcctccagggcgatgggaagacccagccccaaaccagactcttgagcacgcagccctaaaccagactccgggaaggggctgcgtggtcatgcaccgcctaagactcagaggtgaagatgggaagacccagccctaaaccagactcctggaaggggctgcgtggtcacgcatcgcctaagactcagaggtgaagatgggaagacccagccctaaaccagactcttggaataggctctgtggccacccatcgccgtaaggctccgggatggagacagcatggacagggacctcgcacaaaggcatgtcgggagggcctcctttccaaggcacagccccacctgctccttctcagcccacgacgggagcagagccatgtcgaagccgtgccccacacagggtggacaaggacatggcctgacagctcctcagaaatccttagagatttttccaaacgcaggttaccagggcttctgcagagagaggggcagcaggacgtgctgctgacagtccctggggacttacactgacttgcagtgagagcccacatctgccaccaggatggctcccagcaccaccgcgtcacaagcaccacactctccaccgtngggacgcccagatggctcggcaggcaggccgggctggggagctgacagcagacgcctgggactctgcccagcgtcctcacccacaaccttttaactgtaactggcagaggagacagcagggagggcagaaggtacagtgatggctaggatgcagttctaggttttgccagacatactttcaggggccactcctggctacctaattaatctacctgtgtataagaattttttagcttattaaatattccaagaggccaggcatggtggctca

SEQ ID NO: 444976 - DNA, 1189 bp, Homo Sapiens
tttagggattttccagccgggatgcgctcggagcccggggggcccccgggccggcttcgcttcctgctgcaggccctcctggcaactcccggcaggggacgccgtcagcccgctgttttccagcagcaggctcagagacaaggtcccacattttctggctccttctcctttctcctttcccttctccttctcctctgccccagggggcgggccccctggcccttcgaagcagtgcacactcttcctcccagccgactcactttgagcttgagctgatccaccgccagctgcaggtcacggctgcgaagtacagccgagttcttctcctcactgagctgtgccaggcgcatggcgatcatgtagttctcatccttgagccgcagcagctccaggctgcccgcctcccagtcctcccgcagcctttgtcagcgctcctgagcctgctgctggtccctgcagccgctgctccagccctgcccgctcctcctcgagcacccggccccgggcactgcagttgctgctcaccgctgcagctggctcttgcagagcttcccagcaagccagtcgcacctctcgtcatcaacgaattagggtcaggccctcacggcccactcctcatcgaggatcattggacgcagcgctagcgcgcgggttcctcggcccagtgagcagcgtgaagtgttcggggctagtacgaactccagggccttccaggaaggcctcactagcccctcttgccaccggcagcgcaagatgtccatcaggcgcccgcgatcgcggttgacgcggcacgggaagcggtaggtgctcagcacctccatcctcgctcctgctcgtcgatgacccggcactggcgcagatacggcgtgagacttggaccgggctatcagggcgcagagccagaccgaatgccggaacgccctacgattcgcatcccacagcgcgtcctcctccgcactcacgaccccgagccggccccaggcactcactcctcggcctcacccacgcctccgcccggcccaggcatgaccgtcgtcctacaagggtcaacgggacaagaggcgacacgggggtcgaccagggactccctagggctagatggcgccaagcacccccggggcgtcgtccgcagacacccgtcgggcgcgccccgagctccccgcgactcacccccacgcacagtcctcgg

SEQ ID NO: 444977 - DNA, 1190 bp, Homo Sapiens
  misc_feature (115)..(115): n is a, c, g, or t
  misc_feature (266)..(266): n is a, c, g, or t
gtttccttccgagttgtaagggttccaggtcccccccatgacagggtgcctcccccagtggttttggggcctccccagaaggggaggggaactcgctcaggcttccaagtgctgntgaggttggaagcacaggggattgggaggaggcacaggctttgaggcaggtgccaccctggggcccgctgcagctgaactcccagcagagctttggtgccctccaggctggtgagcgttgtcagcagctcatcccgctccgcctccaggcnccgcacctgcttgcggtactggtccttctcgatgaggctctgtgagtactgcaactggatccggtcacggctctggatggcctggtctcgctccttctcaatctcctccagttgggccaggacagtggccatgcggtgcttgtacaggtcacagtccttctgcagcgtgcgcgtgcttgagccgcaggtcttccatctcctgcaggtactggtcgcgcagctcctcggcccactgcagctccccctgcacggcatgcagcttctggcacagctcctgcctgctgtcctgcgcctcccgccagtcatgctctaggatgtccagcaggatgcgctcggagcccggggcccccggccggctcgcctcctgctgcaggccctcctgcaactcccgcagtgacgccgtcagccgctggttctcagcacgcagctcagagacaaggtccacattgtctggctccttctccttctccgttctccttctccttctcctctgccccagggggcgggcccctggcccttcgaagcagtgcacactcttcctccagccgactcactttgagcttgagctgatccacctcctctgggcctcagtttcctcatcagtaaaatgggcccagtcaatcccctggccccatcatttgcctcccaaaggtgttgcaagaatcaaacaagacagcaagtgggcagaggcctctaaactatgaagggctacagagctgccacagtgtgaccgtggctgtcttcacagcttcaaataaaatcccatgcccctaaccaatcaccagttcggagtgtgcagccagaagttggcctggtatggggggtgggcagctgtggggtgaccaccaagctgggagcagacgtgcatggccagatttgctggactatgagtgcactatcccgtaacccgggccgtacagcctt

SEQ ID NO: 444978 - DNA, 867 bp, Homo Sapiens
cggatgataaaggagaccttaggctaggtacgaggctgggtggtgaatcggcacgaggccctgctctttctccttcattccgcagcctcctttgccctgtgacctgcaggtactggacggtccctagagaggataccgggacgctcctgaagccgcgagatggatgggtcttccatgatactgaagggagagccacatgttgatgcccaggaccagctgcctccttggtctgaaaggcctgatcgaggccaggattggctatgagagctgggaaatgggaccatctttgaagccatgggagagggtgagagccaccatcactcatgttcttgaatgggaactgcctggagaccctgaagaagaaggagcctgaaggaggaaggaggaggctgagccatcccgggaacatgggctggatgaggccaagccaggagacgacaccaccagatagaagtcaccattcaggatttggacttttctgtggagatcctggccccgagatcgaacccttctccctgtgggtgttcccgcaggagatggtgctggagatccaccagctgttcatggaccatgaatacccatgtcaccacatcacttctcactgcacctgggtggcagcacactggaccacgtctcagagctgcgcagccatggcagggcctgcaggcgggcttgctgctccacgttggtggaagagccctggcacaaatgcaccaaggcccacggtgatgaattgccacatttgagaacttgctcagcgagcctggaacccagctgcatggcagctccctggggcctcctgcaccgtcttccaccgacagctggcccgcaaagacggcgcaacaagacagcacaccgcgaaaggcc

SEQ ID NO: 444979 - DNA, 1409 bp, Homo Sapiens
  misc_feature (389)..(442): n is a, c, g, or t
  misc_feature (466)..(479): n is a, c, g, or t
  misc_feature (720)..(731): n is a, c, g, or t
tacctttagaacccccccagagttttttgggggttctccccgtgtagggcttttgaattcccctttccaatgtgctttccccacgcgccctgggcccgattgggaggcaaaaaactttttcttctataaaaaaaacgaccacagggaagtttggggaaggctggggccaagggccaatgggattaaggttcgggaaatccccaatatttcggggaggccccaagatcgggggattccactttaccccccaggaagtttggagccccaggcctggggtaacacaagggggacccccgtctcaaattttgtaaaaaattagtcatgcgtagtggggcagccctgtggtcccagctacttggagggctgaggtgcaaggatagctttgagcnnnnnnnnnnnnnnnnnnnnnnnnnnnnnnnnnnnnnnnnnnnnnnnnnnnnnnccgatagaatgagaccctgtcttnnnnnnnnnnnnnnggcagagggacacaccagtgtagtaatgagcagaagcacacaaattttttttaaaaaattatatacacaaaacaacagaactagagtagctgacttctccccttctttttaaaagtgagacaaaattccttaagaaaatctgcaaggtgctgggtgaaccttctgatgctaaagttgttcttctggaatattaaaatttgggtatcttttggacatcaccaccatgtaaagagtgatgggnnnnnnnnnnnngctttaagaaataagtcgaaacttttctaacacaacttattagagctataaagtggagagagtataaagctatactaactgcatcactaaccagtctcttttttttccccagaaactcatctcaagggaagggagctgaaaaaccaccagcaacgtgatttctgcatttcccagcacatgggtctggggcccgcctctctcgagtcccctagtcgtcctcgccgcctccgtacatgtcagccagcttcttgaagcgattgccccattcgttcaagtagtcatagtcctggtctttgtctgactctgaggagttcagggagctcagactagcagcttcggaaccgcttccttcatagtcaaacacgagcagagaatcataaggcggggctgtggggtcagtatcagccgctttcagattttcatcaataaaatttccaatttcatcgggattggcagggcggggaagataccgggggacactcatgagggttggtgcaacgtcgttacgagtcacttcaggccgagcgtccaggcccctgtgcagctggctcaagtcaaagtcctggtcctcttctccgcctccttcttcatcatagtaataaacgttgtcccgggtgtcatcctctgggggcagtaagggctctttgaccaccgctctcctccgaagaaacagcaaga

SEQ ID NO: 444980 - DNA, 970 bp, Homo Sapiens
tgtctcagtttcgggacgccccagcccccagctgtgcagctacgcacctcagcagcacagggtggcagcagagagccacattactttggcagcaacagaaactggcggccagcccggcagccccatggggctaacaggagcggggagctgggacccagtgaggcaggccctccaccccaatgtgctggaagttttctacgctgagtttttggtccaagtcgtttttgttaaatagtacctgtgtagcaaagtaaattggcgaccagacccagggcttgccggcagacaccatataggcagtgacaggctggttgagctggacaatggagcccataaacagggatggggccacctgggacagcaggaaggcactatccaggatggcgaggtccaggcagatgccccgtcccggaaccaccctggcctcggtgggctcacccaccaccacacgtacggagacatcacaggcagaggccccgcagagcgcgggtggaggtgggagcaggccactgcctccagcacccacgtgtccattagggaagggagctccaggcttagggcctggcaggaagctggtcatcaggctgtcctcactgctagcacctccagtgtcccctcggtatttgggcaggaacacctgcttctcccggtggtagagggaggccagtgtgtagggcaggatctgcagggctgagaaggtgaacccggtgaggtcggctgaagctgtcaccacggccacactgtgggacaggcatgtggcaccggcagccacagggaaagctgccacactggccaaatagactgctcgagtgccgaatcgctgcaccagccggtccatgaccagagagaagaccagggagatggcgcactgcaggaacagccccaggctgcccatccgaacgccttcatcatagtgtctccgggcctcggtgcccggctcagctctgggcacgccctggtacagcccctc

SEQ ID NO: 444981 - DNA, 901 bp, Homo Sapiens
tgtgtttcctatctttcccactctcttgctagtctaccccttacagttccccctcctatagccagaccctggctcacagactcaagcacgccacacgttctgctcccaaaggcaccttgggagccacttgccaagcagctccccttgaaggattttgtctcttaagattaacttttggtttctgttcctccctttcttatgatctaataatatatataaatagctcttcatttaaaaatacagttccccaggttgaggtatgtggtggcctgttgtcacggcagcatgagcacggcggcgcccagggcgggggcggaagggcctagctggagactgccatcacgtagttcttggaggggctgctccggcccagcagcacttggttcttgcaggtgaggagcccacaggaggcggccagtggggcctcctcgtacaagacgcagatggagccgtcctccccaatgcggtaggacacctcataggggtccacccacagggtcagctcgctgggcagcagctggtgcagctggggctggctgagtccgatctggctggccaccctgctgatgatggggtccatcttgtggttgatgcgaatgcagcggtagccggagcccttggacggcttttcgggaaaccagtggtgtttgtagtgctctgtgagtgcctcctggagcgccccgctgaagaccttaagcctctgctcgctcacgcagccccgggtcctcaggaggctggagaggaagcccacggcggcggcgatctccgggagcatgtcggttcccttcccgtggctcatgtcgcgcgcggctcgggctcagtgagaggtctcgggtgggaagtgcgggtccacaagacagcgttacctggccgctgcctcgtgccgaattcgccacccagc

SEQ ID NO: 444982 - DNA, 1204 bp, Homo Sapiens
  misc_feature (495)..(495): n is a, c, g, or t
aaaggggagggctgcttttattccgattgaagattcagctcccccccaccccgcacccctacctttccaacacactgagaggctggaacccgggagaaggcagctgttggaggagcgagggaggcagaggtgaggactgcctccaggaccatctcgccttccacgggaggcttgaggcagaggtgagggctccccctgatgagtctgatctgcataacgacatgcagcggcccaaggctccctcaaatgtttggcaaagataagttaaccgcttccctggcttagttttcggatacccactttcgagtggggaggtgcaggatctagggcacgaagttgggagttccccagccccagggatcctgagctcctgggccaaggaggagagccaggcaagactgggaagcccaagggggctcctctgacccagggcagacggggaagggataagaggcactacagcagggtacggcctgctctggggactgaatcccnccatggaggctgtcatgagggatccacccagggagtcccctttggtggggaggctgccggcagtggctgcgtctggctggcgactggcccagtagcggtgttaggtgtcctggaagaggtccctgcaggcgatgtgggctcggaggtgggcacaggccaggaaagcccctgccagcttgcggtgcagggcataggtctcctcgggtgggggacacagccggtgccgcagcagcaccgggatgaggtcctgtaatgcggcgggccgtttcccccgacccaaagtcataagggccctgggtggcgaaaggctcccccaggatcatcactgcctccacgtgggcgtcggagaatgccttggtttcaaagcctgtgaggaatttgaggtccctggacttctgcaggacacagtctctgtctccatcagctgcagccttcaccacctcgatgtaatggtctgtgaactctgtcccaaactcccggcttgcaccaaagtccagcagggtcagctggtggctggaggcatcatacaggaagttggcccagttggggtcagtctgcatgaatcggaactcaaacagctcccgcagacacagcgtcaggagctggaagcaaatctggttccgcaggtcctggcttaggccctggcactggtccagggggacccctccagccagctccatgatcccgggaatccggaccggtccagcct

SEQ ID NO: 444983 - DNA, 1518 bp, Homo Sapiens
  misc_feature (54)..(67): n is a, c, g, or t
  misc_feature (1199)..(1276): n is a, c, g, or t
acagtaagaaaagaactttattgtttattaatgtttctgtgtaaaacttaagcnnnnnnnnnnnnnnaaagaaacaccaccaaaaggggattagcttagtccatcccttcctcagtcatctgcttcccaccttcctccaaatgttatcccagaacattctggaggcagggagaaggggaggcagctaatcagagtctgagagcacgatgatctcttctggatcgcattgtgtggccacacttgtcttgcaagtaccaggccgaggaggctgtgaatggggggtttgggacagccgggctggagaagggatgcagagggagctggtcaccaggccatggctgggagagtccaccctcgtggaggaatcagcaactggggccaaggaagccaagggggaaggtgggctgggcagggtacatatctttttcccattcttctcatgcactgacctttgcctttccacatagcttgggacagccgggctggagaagggatgcagagggagctggtcaccaggccatggctgggagagtccaccctcgtggaggaatcagcaactggggccaaggaagccaagggggaaggtgggctgggcagggtacatatctttttcccattcttctcatgcactgacctttgcctttccacatagctgtttcctaatggccctgatcctgtttgcttcttctccttccgagattttttgcaggggggaccagaatctccccagttgtgaggagagacgcctccattgaaggaagtagaagagaccatgcctgctccattctctaagacagtggtgaagggctcctctgattgcttcctggaagaggaaatgtccgtctccacagaggaaggggtatccaggggcaaagcttcaatctctagctcaaagagctgagacacagggctttcttcctccagggtcagctcctcaggctgttctccattgctttcagcatctatgctggagggggccaggggttcttctgacagtaacgatggtgacactatgcgtcctttgttttgctgctcccctgaagatctgctgatctgtttgccaggttccaggttcttttcattggagatctgtagtggaggacatgggggctcttgtcttcatctttacctgctgctgcttcttcctcttcgtcctcctcttcatcatcctcctgaccctcctgcatctgttccagatnnnnnnnnnnnnnnnnnnnnnnnnnnnnnnnnnnnnnnnnnnnnnnnnnnnnnnnnnnnnnnnnnnnnnnnnnnnnnncgtcttcgtcatctgtctcagctctggaggcagaagggcaccctgggatgccattccactagggccctcaccagaatccaaggaggcttcgggggtgtctgcagagtgggaagaggtgccttggagccgagctcttctcttttttctctcgccctcctcacttttgtcttgcaacattgcgtatttggagatgacctcatccacgccgactcatggccaactccggttttcccgaaggcgcc

SEQ ID NO: 444984 - DNA, 729 bp, Homo Sapiens
  misc_feature (186)..(242): n is a, c, g, or t
gctctcgtgagatcgctgatctgttgccaggtccaggttcttttcattggagatctgtagtgaggacatggggctcttgtctccatcgttacctgctgctgcttcttcctcttcgtcctcctcttcatcatcctcctgaccctcctgcatctgttccagatcctcctcctcttcagaatctgtggnnnnnnnnnnnnnnnnnnnnnnnnnnnnnnnnnnnnnnnnnnnnnnnnnnnnnnnnntcttcgtcatctgtctcagctctggaggcagaagggcacccctgggatgccattccactagggccctcaccagaatccaaggaggcttcgggggtgtctgcagagtgggaagaggtgccttggagccgagctcttctcttttttctctcgccctcctcacttttgtcttgcaacattgcatatttggagatgacctcatccagccgactcatggccaaactccggttttcccgaaggcgccgggccaacacaggatctgatagtgcagggtcaacgcctggcctatagtcatctgtgaggtggcagccaaagttgtagatgagatcgaggtgacgtcgctcctgtaacctgatgcccacatctcggaaggcatcctgagccatgagctggagctgctgtcgggggaggccaaggctgtgtcgggcagctgccttctctacagcccgaagcaccctcgtgccgattcaccccccggcctcgtacctaa

SEQ ID NO: 444985 - DNA, 904 bp, Homo Sapiens
gggaaggttttttctaagtggaaggaaaaacccctcggaggattgtccagggattgggccaccgaaattcccaagggcgcttggcttttggggggattcgttggcgcccccggccgaggccttgggcatggggctgagcccccgggttttcagactgtagtctcccccttgtttgctgttggtgagcttcgtgtagaacttccttcagggagttgagggtcttgccggaccagatccagaagcccgacgtgatgcccacgatcagcgtcataaggtacttaatcatgaagaccgtgaagtccgggctcatgggcgggtgcggcggggcgcctccgcccgcctggaggtgagggcaggggatagcgtagctcttgcagctctgggccacccagctgcgttcccactggtcccggaaggcctgctcgtagaagtagcaggcgatgacgatggtggctggcacagtgtacagcacgctgaagacgccaatgcgcaccatgagcttctccagcttctcggtcttggtgccatcgtgcttcatgatggtgcggatgcggaagagcgacacaaagccggccagcagaaaggacgtgccgataaacaggtacacgaagaggggcgccagcacgaagccacgcagcgcgtccacgttgttaagccccacgaagcacactccgctcagcacatcgccgtccacctggcccagcgccaggatggtgatggtcttgatggccggcacagcccaggcggccaggtgaaaatactgtgagttggcttcgatggcctcgtggccccacttcatgccagccgccaggaaccaggtgagcgacaggatcacccaccagatggagctggccatgctgaagaagtagagcatcatgaagaggatggtgcagccctccttctt

SEQ ID NO: 444986 - DNA, 975 bp, Homo Sapiens
gactatttacagttttaattacaaaccttgtgggggtgttgggcagagagttctcttttaaaaagcaacctaaaagtgaaatggtttcgatcgttttttatttaaaaaaataaaatacggagtctgtaggggccccaccccgggcggaggaaagcgccgcgcggttccggcctgggggcgtccctcacacggtggtctcaccgtgtcggctgttggtgaggcgagtgtagaacttcctccacgagtgcagcgtcttgcccgaccagatccagaagcccgacgtgatgcccacgatgagcgtcatgaggtatttgatcatgtagaccgtgaagtcgggcgacatgcgcggcgtgtagtgcgccgggcacgggatggccaggctcttgcagtgctggctcacccacgagcgctcccagtgctcgcggaaggcctgctcgtagaagtagcaagcgatgacgatggtggcgggcactgtgtagagcacggagaagacgccgatgcgcaccatgagccgctccagctttttggtcttggtgccgtcgtgcttcatgatggtgcggatgcggaagagggacacgaagccggccaggaggaaggacgtgccgatgaacaggtacacgaagagcggcgctagcacgaagccccgcagcgggtccaggctgttgaggcctacgaagcacacgccgctcagcaggtcgccggcgatctggcccatggccaggatggtgatggtcttgacggccggacgggccaggacggccaggtggaagtactgagagtaggcctcgatggcctcgaggaacccacttcatgccggctgccaggaaccaggtgagcgacagggatgaccaccagatggcagctggccatgctgacgaagtcgagcgcgtatgaagaggatggtgcaggcctcctccagggagacctggaccaccgtgcggtaacccggctcggcgcaagcgcccgtgcaccacg

SEQ ID NO: 444987 - DNA, 2241 bp, Homo Sapiens
  misc_feature (301)..(333): n is a, c, g, or t
  misc_feature (468)..(489): n is a, c, g, or t
aggacaagttcaatagaaatccattcccacccggaaaagattcccaagaagcctttactgggtatggagaagaggaaaggattttcctgttttataataccccagaaaagaaaatggaattgtctaataacccatcaaattgagtatgagcctagttgagtttgagtatgagtctagtatggggatgctaatcttctggggtgggggaagtccttgtgagctaaccaaaacctccctgttctctggtgaggtccacaagtagcagtttcctggttgcctggtgacaagggaccgtacttannnnnnnnnnnnnnnnnnnnnnnnnnnnnnnnnccttcacttggcaagtgaaataacacaattctcagaagctgtagaagaggcaatcttcaaacagtgctgagtagtcctcttactttttccacattaggggaatgcaaactggtttaacctcacatgacatttccnnnnnnnnnnnnnnnnnnnnnncatttgattggtttaaaaattatcctggatccaggaaagtgatgccttttcttattctccttttatcatcaaaacaaacagccaatatgtctctagaaacattgcgttctaaactggaagtgctgacaagccttcatcccagaccctgagtggcagattttcatgaaaatcagcttctgggccagttaagtcttcatgaagttatcttttcataactcagccctcattcccctctgggtcagtagcagtggaaccaggaaacccaagggccagatttccttcctcaatgaaggcactccaggaagaaggggagttcctggcacctgcctgccaaactctgctctacttgctgaactttgctcagcatgaacagggcattctggctacaagttcccccaaactatcccagattgtatctttaaggcacaccaattcctctgcttaaggacttctgttcacaatgaattgtattagttattcttaacattcaaaagagaaagttctgcatcagagcccacccatgtccagccattgtgccctgagatcccaagactgtggggatgagggcagagcccattaacatcagggattctggtcactggggtcacacttgagcatgattttcaaccccaatccctttttaaatgtttcaaaggcctccagagctttctccagaggaaacctatgggtgacgaggggttttacattcacagacttggacgcaagcatcgaaatcgccactggccacgtgttgcagtatcgaaacacgcccttgatatccacctcccggatggctgcatgcagtaggggtacggtggtcatctcagagcccagccccacaagcacgagggtcccaccagagcgagtggcgtagatgcccgcctggatggaggcctctgccccccgtgcactcgatggtgacttcccggcttgcaccccagctgaccttctactttcctggcgatttcctgagggctctccttggagatctggaggactaaatcagccccaatctccttggctttggacaatcgggtagcagacagatcagtcaccactacttgagctgctcccattgctttggccacgagcaaagtgaccatcccgattggcccagctccacacacaaggaccttgtgtcccagggtaactccgcctctcctgcaggcatggatccccacagaaagtggctcgatcagggcgccttcctcaaaggtgacattgtcaggaagcttgtaacaaaaggctgcattgtgcttatagaaccggcagaggttcccgtcatcggggggcgtggcacagaagaagatggaaggtgacagattgtatcggcccatcttgcagaattcatcattttctcggggagcaccaggctcgatggcaacacgatcacctggttttaggtgctttaccgatgatcccactttttcgactgttcccgaagcttcatgtcccagcaccatgggctttttcacaataaaattcccaattcgaccatactcccagtagtggacatctgagccacagattccaacagaatgcatcctcagcaagacctcatttgggcctggttcagggataggatagttctccaggcgcaagtcccccggtccgtgcaccaccagggaaaggttgttgggcttggccgccgccgccatggagctcttttggctctggagtgcggcctggaaggcgcgggacgtttggtcgctctggtggcgctacccagcctcgtccgaatcgccacccagc

SEQ ID NO: 444988 - DNA, 928 bp, Homo Sapiens
ggggtaccggtggtcattttaggagcccagcccccccaaagcacgaggggtcccccccagagcgaagtggcgtagatgcccgcttggatgggaggcttctgcccccggtgcactcgatggtgattttccggcttgcacccccagctgactttttacttttcctggcgatttcctgaggggctctccttggaagatctggagggactaaatcagccccaatctcctttggctttggacaaatcgggtagcagacagatcagtcaccactacttgagctgctcccattgctttggccacgagcaaagtgaccatcccgattggcccagctccacacacaaggaccttgtgtcccagggtaactccgcctctcctgcaggcatggatccccacagaaagtggctcgatcagggcgccttcctcaaaggtgacattgtcaggaagcttgtaacaaaaggctgcattgtgcttatagaaccggcagaggttcccgtcatcggggggcgtggcacagaagaagatggaaggtgacagattgtatcggcccatcttgcagaattcatcattttctcggggagcaccaggctcgatggcaacacgatcacctggttttaggtgctttaccgatgatcccactttttcgactgttcccgaagcttcatgtcccagcaccatgggctttttcacaataaaattcccaattcgaccatactcccagtagtggacatctgagccacagattccaacagaatgcatcctcagcaagacctcatttgggcctggttcagggataggatagttctccaggcgcaagtcccccggtccgtgcaccaccagggaaaggttgttgggcttggccgccgccgccatggagctcttttggctctggagtgcggcctggaaggcgcgggacgtttggtcgctctggtgg

SEQ ID NO: 444989 - DNA, 1363 bp, Homo Sapiens
ttttttttgacagaagtaaaaatatttattttatcttaaaaatctggtcccgcaaaaaggccaacacttttttcagttcacggtcttgacctttcaaagaagaaatctttcaactgagaggtgagttaataaaaggaatgtcagaggtgctttcagatttcttataaaccagtaaaccaagcaaccctggacttctagtttactgagctccttcttctagccattcacagttcctgaaggagaaaagaagttgtttgcagataaggcactttagaaaccaccaaagagaaaacccaagtctgccaggagctgcactgtgaacatgtgagccgagagggccaccagcagacagagtgccaactcccacagctccatgacaacagcatccaccttcctgccccaacactgttccgtctggcttccagcacccgccttggctctgtgttgcctacctggcctagaatacatggaaaccagacaactggccagagatgaacactgctgcctgaagctcagggcagctgcccacagtgaggaatcccttcagaggccccagctggggcacgccgaagggagcagttccttttgcaaagatgagttagtgcggatcagcacattagcaaagcaaaatatttaaacatttttaaaagctgctaatccttccaatttccctcctgattgtagctcaagctgcagcctctaaacctgctaaaaatcaggaagaaacccctcctctggagggcagatggactgaagtggctacagccagtgtgggtacggaaagcctcccgctgaactgtgatcatgtgacacctgcagaccctgggaagggctgatctgaatcctggcagcaaaactcaacctcttcttttgccttggggggcttgtgtttaatacaggtcattgcgatggaagaagtctcagagtctctctcacatcaagaggacagatggggacagggatcctggagcttttcttctcctgtgttctggttgcatacttgaatcccaggaaacagtgtgacacggtgccaatttactgccaaacatgcccggtttgtcaacagagccagacaaggaggagaggagagattcatgccccaaacacaggccagctgaggagggcttcgtcctccttcctttggcccagatgagggagcgccttcccagaagtcacatgaggaaaaaccgtgctcaggtcagaactggacccagcctgtgcctggctgggtctggctggaagttgatcctgtagatttggtaaagtctccccagatgtcagcagtggcaggattgggctgtggccagggtacaggagcacctcctattgatgttcccgagtccgacccgtaggaagagaagat

SEQ ID NO: 444990 - DNA, 918 bp, Homo Sapiens
agaagtccaccatgaggaaaaaaaccgtgcttcagggtcagaaactgacccccagccctgtgcctggctgggtctggctggaaatttgatcctgtagattttggtaaagtctccccagatgtcagcagtggcaggattgggctgtggccagggtacaggagcacctcctgaactgggagcaactgctggctggacgagggatccccccacagccaactgctccccagggggagggatcagggtggaggttttcccccctgggggagggggaagcaggctcagccctcctgtgctggcaggccggactcggggattcccagctgctccttccttcttcttcatgtttgcgatgttgagcttgatggtctggccctccttgaagcccaggtccagtttagggccttggtctgggttctgggcttgttttgcaaattcacactgctgtttcacccacttgaaatggtcctgcaatgcaacattgaagtcaaaggcatcacctcggtccccgaagccaattccaataaacgcccgtcgcccatttccatcttcgatgcggatcacgaagtacctgctggaatccgtcacactctccacagctgtgccaggaaactgatccaccggggcctgagcaaagagctcccctgacgtcctgtcctccagcttgatgtaggccatctgtccctttgcagtgatcctcagccggccactccatgatggctggtccagctgccactccgcagccctgtagccacggttggtagcccgcggagggatgcggtagacgtggacgtcaggcttgacacagagcaccgactcgtacccgctctcctccatcgcgacgcctggagcccaccgaacttccggcgacttccaccgttcctctgtccgacggacggaagcggtgcgactccctccgct

SEQ ID NO: 444991 - DNA, 703 bp, Homo Sapiens
  misc_feature (136)..(136): n is a, c, g, or t
  misc_feature (139)..(139): n is a, c, g, or t
atgtggacgttccatcattcttggggtgcagaccaatcctgtatttccgaaaaacttggacaaccatcgccttcaagagccacccaggcccccgcaaatacgagcactccccaccaccacttcagtggcacaaaantancataggccaggttgtctgtatgaagtgtatcttttttcttttaatatttttcgtcgttttgatagataacgcatacaaagagtagtaaaacgcaaacagcacaaaagggaaaggaagtttccttccaagggcggttcccctcccctagggcagtttcctgtgttcctttgcagagatactcagtatgtttacaagcgtgtgtgtttattcgtctcaggtagagaccagagaaatatagaaggggtcctcccaactgctccaggctgtgatcaagggtgaaattcgtgcgaagggatctgggtaggaaggggtccctgggcttcgaccgtcaccttaaagctccccgggaccggtcctttcagccggctctgggctccctcccctcctctcggggatttccgtctgtgatagggcacctccccgcttaaggcttttcgaggatcccttcaaggccaccggttagcgctgtagccacggttggtagcccgcggagggatgcggtagacgtggacgtcaggcttgacacagagcaccgactcgtacccgctctcctccatcgcgacc

SEQ ID NO: 444992 - DNA, 461 bp, Homo Sapiens
  misc_feature (436)..(436): n is a, c, g, or t
  misc_feature (451)..(451): n is a, c, g, or t
ttttttttgacagaagtaaaaatatttattttatcttaaaaatctggtcccgcaaaaaggccaacacttttttcagttcacggtcttgacctttcaaagaagaaatctttcaactgagaggtgagttaataaaaggaatgtcagaggtgctttcagatttcttataaaccagtaaaccaagcaaccctgggacttctagtttactgagctccttcttctaggccattcacagttcctgaaggagaaaagaagttgtttgcagataagggcactttaggaaaccaccaaagaggaaaacccaagtctgccgggggctggcactgtggaacatgtgaggccgagagggcccaccaggcaggacagagtgccaactcccacagttccctggacaacaggcatccacctttcctggccccaacattgtttccgtttgggntttccaggcacccgncttgggtttt

SEQ ID NO: 444993 - DNA, 428 bp, Homo Sapiens
  misc_feature (17)..(17): n is a, c, g, or t
  misc_feature (26)..(26): n is a, c, g, or t
  misc_feature (304)..(304): n is a, c, g, or t
  misc_feature (387)..(387): n is a, c, g, or t
  misc_feature (398)..(398): n is a, c, g, or t
  misc_feature (406)..(406): n is a, c, g, or t
tggaaagggctaatctnaaccctggnagaaaactcaacctccttcttttgcttggggggcttgtgtttaatacaggtcattgcgatggaagaagtctcagagtctctctcacatcaagaggacagatggggacagggatccctggagcttttcttctcctgtgttctggttgccatacttgaatcccaggaaacagtgtgaacacggtgcccaatttactgcccaaacatgtcccggtttgtcaacagagcccagacaaggaggaagaaggaagagaattcatgtccccaaacacaggtccagnctgaaggaagggtcttacgtgcctgccttgcctttggccccagaatgaagggaagcgccttgcccagaaagtgcacatgaggnaaaaaccgtgnctcaggtncagaactggaacccagcctgtg

SEQ ID NO: 444994 - DNA, 1428 bp, Homo Sapiens
  misc_feature (1394)..(1394): n is a, c, g, or t
tttttttaatgtaaacgtggttttatttaatgccttttatccatcacaaagcacccattccttcccagcatccccctcttcctagaaaacaagatgtagcgtaaggcacgtgcactgtccacatgacgtcaagtaggtctttaaaaacaaaaataagcaatagtcttttcaacagcttgaactgccttcctctctaatgttcaaagaatgattgtccccacaaagcacaacttggagaagagagtgcttacattagaactgtgaaccaccctacataccagttcaaaaaaccaaaccaaaccaacgactaagaaacccagccacacaggtacaagagcataattctggagtaatgagactagtccataaattaaaaagaagacaagacaaacccatcccctcctcatcaccaggcaccccccaaattggcaattccttgcttttgttctgtgagtcttacagaagagtctagactccgagccagcccttttccccaaagtcaaatactccgaagccaatgttgggtactttcccttttcagaacccccatttggactgatggacggcttctgagatggtcactggacacgtcgtctcggctgtggggccccttccctggtgtccaacatctgggtctctggagttctcggtggggaggtggggaaggcgagggggtctgagggtgagatggcaggtggagatgctgctgatcctgctataaatactccagctccagggcgtgcctcagtgcctccaggtctgcgtggcaggatatccgccagaaaggcatgttgtgctttttcgctccttgctcctcttccacaccatcaccgatcaccacgtagacagcttttctgccgaatctctgcattatcctctcgaagcagctctccttccctgtcttggttgcactgtagatgttctcaataggaaacacagaccccaggccatatagcaggactttggccagggcaggaattagttgagtggtggtgaccagcacattgacacagttgggccgggagttgatgaggtttagtgccttcagggagtgggtcagccagaggtctgtgagagcttccagctcagctcggagctgtagccaggtctcccttttgggagtgcctatcaacccaccaacgttgttcttgtaggtattgtacatctccttcacccgccggtagcggaaggccagcttcctcatccagtccacgccgccgtgcacgccagagcccaggcacaggttggctcctggggccgaactgtggaagccgtcagcggagaagttgtatgtgcttaaatcttggccattgtcatctgatgagacgtcatcaacgtggatctggttacaatcctccaggtcattgaagaaaagatgtgtatctgcaaggttnaagatcatctcttccatcataaggccaatgcgca

SEQ ID NO: 444995 - DNA, 911 bp, Homo Sapiens; identical to SEQ ID NO: 323120
  misc_feature (62)..(62): n is a, c, g, or t
  misc_feature (64)..(64): n is a, c, g, or t

SEQ ID NO: 444996 - DNA, 1092 bp, Homo Sapiens
aatcgccccacttattttttatggcttagggaatttttttcaaatcctttaaaacacattttggaggggggtaaacatggttttcccaaaagggaaccgtgggtcttgggctcaaattttcttttcaaaccctcgcggccttgtcccatttcctggcacccctaggaaagggacagccacagtgatcgtgtttcatttacaaacgtgagtgtaaaacatctgtgtacaagcctgtgttcttcaaattcatgcaaacgcggcagccacatctccgcgtggatgggcaggactgtcctcagggccggctctgctcatccgccctggctggctgctccgctgaacagagctgcggctgtgatgctgaggctgggttgcgtgtgctctgcagcgggtgaagcaaccacaggcttagaaaggtgcgggatccgacaggggcttgtcaccactccccgctgaggaagggaggttgtcactgccgttctctctgtcacccacaaccttagactttatggtcccaactcggtcctcaaacgacttgaaggtcgcagagttcctcatgtctccaagcttcctgctgatggcagagcccactgtggacagggcagctgaagtcttctgtcctgcctgtgaaagagtttcctgagtcttcttgtaggcgctagagacctgcacgtcatgccagctcctggacaggttctgtttcagctcccccagggtggagaggcccagcctcctcttgagctctccacagtgcctctccttggctgccaggacctggcgcagagtgacaatttcctcttccaccttggtaagctcagccctgagctcctcctcctcagcctctgtcagaccctcaacagcaggagtccgggcagccacacctgtgtcgacaggaacatccgtcatggagtcagacagcagacctttgttaggagaattcaggttgatatcttggccggcggagtccatgttcgggcggcgtccggaccgctgtcgcgggcgctatgggagccgagcgggcggcgccgggagaagctcgccgcgtacacactagccagcgcccacgcgtccgcgacgcctgggtcgacgata

SEQ ID NO: 444997 - DNA, 1365 bp, Homo Sapiens
tcccaaagaaataatattcctaatgaaggctaaagctgctttgcctaatttaaactttttgaaaagtccactgcatttaaaaaataatgaatttgcttccgttaaagctagattcgcgtgacgaatcaggcagctgctgagggtcagtttcctttctgggggtctcagaaaatggacagttttctcgttcggcattttgagataaaaaattgcgtaacaggtaggacttgctgggtgattgcattccttctgtgagtcagggaaggaggaggaggaagaagtcagaaaatgccacttattttatgcttagaactcttcaatccttcaacattctgatgggctaacatgattcccaaagggagcctgggctttggctcaatattctttcaaaccctccgccctgtccacttcctgcacccctaggaaggacagcacagtgatctgtttcatctacaaacgtgagtgtaaaacatctgtgtacaagcctgtgttcttcaaattcatgcaaacgcggcagccacatctccgcgtggatgggcaggactgtcctcagggccggctctgctcatccgccctggctggctgctccgctgaacagagctgcggctgtgatgctgaggctgggttgcgtgtgctctgcagcgggtgaagcaaccacaggcttagaaaggtgcgggatccgacaggggcttgtcaccactccccgctgaggaagggaggttgtcactgccgttctctctgtcacccacaaccttagactttatggtcccaactcggtcctcaaacgacttgaaggtcgcagagttcctcatgtctccaagcttcctgctgatggcagagcccactgtggacagggcagctgaagtcttctgtcctgcctgtgaaagagtttcctgagtcttcttgtagaggtctgactgggtcactttctcattccactctccaagtttctcagaagttttcacataggcgctagagacctgcacgtcatgccagctcctggacaggttctgtttcagctcccccagggtggagaggcccagcctcctcttgagctctccacagtgcctctccttggctgccaggacctggcgcagagtgacaatttcctcttccaccttggtaagctcagccctgagctcctcctcctcagcctctgtcagaccctcaacagcaggagtccgggcagccacacctgtgtcgacaggaacatccgtcatggagtcagacagcagacctttgttaggagaattcaggttgatatcttggccgcacggagtaatgctcgatcggcatccggaccgctgtcgcgggcgctatggagcacgagcggccggcgccgggagaagctcgccgcgtacacac

SEQ ID NO: 444998 - DNA, 859 bp, Homo Sapiens
cccccaaaggtttcccagggttttcccccggaaaaatttttgggaagggccccccttttcggggttaaaaaaacccggggtctttccggaaaaattggggagaaccccaatttccccggaaggggacccttttttgggtttaccccttcaaaatggcttttaggggaaaaaaattccccggcccatttatttgggatgttaaagacttcccccaaaatttagcctttcaaaaaagggaataagggtgaatttcttcgggaaccaggatgtattaaaggtcggggaaatggggcccttatttattccagggccaaaccaagtacccgggaagaaattctggggggaaaccagatcttttcagcgcgcatgtgggtggctctgaaaagagcctttggggtatgtaatcagtgagtccttgagactcaagccctctcgccgcggatacgacgtgcgagctggatgtccttgggcatgatagtcacccgcttggcgtggatggcgcacaggttggtgtcctcaaagagccccaccaggtaggcctcgcatgcctcttgcagcgccatcaccgcggagctctggaagcgcaagtcggtcttgaagtcctgcgcgatctcacgcaccagacgctgaaaaggcagctttctgatcagcagctcggtggacttctggtagcggcgaatctcgcggagagccactgtaccaggccgatagcgatggggcttcttgacaccgccggtggccggagcgctcttccgagccgccttggtggccagctgcttgcgcggagccttgccgccggtggacttgcgagcagtctgcttcgtacgcgccatgccttcagagctagattcacttcccc

SEQ ID NO: 444999 - DNA, 741 bp, Homo Sapiens
ttctttttttcttgggctgataggaatatttatgccctctcccctcggatgcggcgcgcaagctggatgtctttaggcataatagtgacgcgtttggcgtgaatggcgcacaggttggtatcctcaaatagccccaccaggtaggcctcgcaagcctcctgcagcgccatcaccgccgagctctggaagcgcagatcggtcttaaagtcctgtgcgatctcccgtaccaagcgctgaaaaggtagcttccggattagcagctcggtcgacttctggtagcggcggatctcgcgcagggccacggtgccggggcggtagcggtggggcttcttgacgccgccggtggccggagcgctcttgcgagctgccttggtggccagctgtttgcgcggtgctttgccgcctgtggatttacgagccgtctgcttagtacgcgccatagttcatctgcaaagtaaatgagttaggaagattggtttgcccctctatataggaacagaatcactctgattggattgtggacgatccctgttagtgatcggttgctaaattccggaagtggccgtagagattcacgattggtttattttttcagtgcaagattctgattggtaaatttggatagagaactggctctttcaaacaagtcgttttccgttacaggtttctttgatgtttcaccgtagaccatgacccaaataacaggacttcttaacttggttttcgcttccacactcaaca

SEQ ID NO: 445000 - DNA, 1385 bp, Homo Sapiens
  misc_feature (574)..(574): n is a, c, g, or t
tctctttcagagtgtagattcaatgacacatctggttctctccaagtcacagggaacagcacaatgcactgtcgtcaaacaggggagcaggacataatggagaaagaccgaggttggaaaaatttaagcccaatggttacttccctattcaagggaattgatcaagcagatctgtgcatttcaatgaaatatatgaaatatttgtcaaagataattaacatcggtaaaaattagaacatgtagcttataaaatgcctacacaggtttggcagaataaatccaactgtgtcatgtaggcttgtaatatacacagacacaggagtttccaccttaaaaacgagtcttctgaagggcagaggccaaatgtattttaaaagcaattccataaaatgggaagtgatggatgattaacaatgcatggctggctttacattttgttcagaggaattgcttggccatcggggtaccttttggctggccacagaatgcctcctgttgcctctcctcagaaggctctgcatcaggtcgaggtggtcgttcaggccatgagactccctgaagacccagacagaancccggtaacaaggagagctcggcttgctcaaaggagagcgctgcgggggatagaatcttctggtctggctttggaattggactttctaagccactgctgcagtttcagaagtagctgactatgtagaaatagatactccggcccccagtggtcatacattttatgccctcaaacctatcttatttatagtctgaccaaaccgtcccccagactgctcagtggcaggcaacgagcaggtagactgctggccctttgtcacatgtgaggatggcccagggttcgccagctgggccggggagatttactacacagccgcagaaaagcacggggagaagagtgatgtgtgatgccaagcgcctttcttttctgctttggtcttgaagattcagtaaacttatggtcccagaagctgctccaaagccagagctgtggattcccagaattcattttgttcctgttagtttgtcggaagactggagccaacaagcagcatttgagaggatatcaccattttaggaacacctccttaagagccaccacccacctggcttgggtgctcagagatgctgctcctggggagataaagctgtgaggtgcagggcgccgctcctgaaacagactctggccgacagtctggaggaaggtggacggatggatggatgggagtgcctgccctctgtgggcagctaggcacccttacccggccaggaggcacgtgcggcagcagaactgaatgaagagcttccgttcgcacagccggttggacttcaccatctcgcagaattctcgtcaatcccgggaattccggacc

SEQ ID NO: 445001 - DNA, 1082 bp, Homo Sapiens
  misc_feature (46)..(82): n is a, c, g, or t
gatgtatagatctataggggaacggaggcttacgcggtggcggcgnnnnnnnnnnnnnnnnnnnnnnnnnnnnnnnnnnnnnatcaggccaaatcggccgagctcgaattcgtcgagagcggagttcggggccagcagccgtctacccggtgtcgcgttctgtgttgtggcggccctggatccggcgtcagggcgaccgggcggacgaggtggagccagagtctgtcaggcgggttggtgaagggcgcggggccgggcacggcgttgggagtgcgcggcagggaccggccaggcgggctgcaggcacctcagagcccgggacaccccctcaacgtccgcaggcgcgatgaaggcactgatcttagtggggggctatgggacgcggctacggccgctgacgctgagcaccccgaagccactggtggacttctgcaataagcccatcttgctgcaccaagtggaggcgctagccgcggcaggcgtggaccacgtgatcctggccgtgagctacatgtcgcaggtgctggagaaggaaatgaaggcacaggagcagaggctgggaatccgaatctccatgtcccatgaagaggagcctttggggacagctgggcccctggcgctggcccgtgacctactctctgagactgcagaccctttcttcgtcctcaacagtgacgtgatctgcgatttccccttccaagccatggtgcagttccaccggcaccatggccaggagggctccatcctggtgaccaaggtggaggaaccctccaagtacggtgtggtggtgtgtgaggctgacacaggccgcattcaccggttcgtggagaagccacagggtgtttgtgtccaataagatcaacgcaggcatgtacatcctgagccctgcagtgctgcggcgcatccagctgcagcctacgtccattgagaaggaggtcttccccattatggccaaggaaggggcagctatatgcccatggagttacgggtgaggcagggaggcacagggtgcgggtggcctggggctgggctgagccctgtatggctcctcctacaggctctgggtggccattgcgcggccg

SEQ ID NO: 445002 - DNA, 1363 bp, Homo Sapiens; identical to SEQ ID NO: 323122
  misc_feature (209)..(209): n is a, c, g, or t
  misc_feature (236)..(236): n is a, c, g, or t

SEQ ID NO: 445003 - DNA, 1535 bp, Homo Sapiens
  misc_feature (69)..(78): n is a, c, g, or t
ctccaggatcacactactcacttcagcaaagacacggaggggcaggagtggggtagggcgggcctctgnnnnnnnnnncctcttttccttgttttaaatagttaatgctcttggaggggaggactagacacaggtgtagaaatttcggccaaagtcttacatgaaggaagtgaccccacgtcccgggggtggggccgcctgagccaggcgcggcccctgcagtctgcgttctggcttccagccagggtctggccctgggccgctgtgggtgggccccgagggcctcgcacaaggtcgcgccccaaggggctgcacggagaagattcagggggctgcacgcgcccagggtcacttgtgtcgctgcagcgattttctctttctcctcttgaagaaacagcagcatttggtttcatcggccacctccacctctgcaggcgctgtgatcggggcgttggagtggccggccgtggggtcgtccgcattcagctccccgttggtggagttcaacgcctggtttttgctgtgcggctgggttttgtcccggagctgaggctgggagggcaggtcggtgtggacggtgccgatgggggtcggcaggggcttcccggcccagtcgtactcatagtcgaacacgaagccactgcggtcgaagaggtcggtgaagagcttccgcaggtagtcatagtcgggcttctcgaagaagtccaggcgccgcacatagcgcaggtacgtggccatctcctctgggaagttctcgcagagcacctcgatgggcgtggcgcgtttggtgtccccgatcttctggtaccgctccttgagcgtgtcggccttgagcccctgccaggggaggctgccgcgcaggaagtacatgaacatgtggcccagcgcctccaggtcgtcgcggcggctctgctccttgcccaggtgcgtgttgatgctcatgtagcgcgccgtgcccgtcaggctcttgtgctcgcggtacgggatgtgcttcttggtctcggggtcgatgtactccttggccagcccgaagtcgatgatgtggatggcatgctgccgcttggtccccgggcggcccaccaggaagttctcgggcttcacgtcccggtagattaggctcttggtgtgcacatactccatgcgcgtgatcagctggatggcgatcatcagcaccgtcttgagcgtgaaggtccggtcgcacaggtcgaacaggtcctccaggctgggccccagcagctccagcaccatggcgttgtacttcccgcacggaccgaagtagtagacctgagggacgccctctgtggcgctgagctgcttgtagaaccggtactccaggtgcagctgcggggcccgggacttgatcggctccaatttgatagccacgtattcatttgtatagagattctttcctaggcggagctccccgaagttgccgcagccgatcttcttgccgacgcggaagttggggcccaccctcgtgcccgaattcgccacccaggcctcgctaccttagtacgccgagagtactgccgtcg

SEQ ID NO: 445004 - DNA, 1243 bp, Homo Sapiens
  misc_feature (745)..(745): n is a, c, g, or t
gagcgaggcctgggtggcgatacaagcacgaggatcacaaacttatggattttgacaagaaaggagggaaaggggagacggaggagggccggagaatgtccaaggccggcgggggccggagcagccacggcatccggagctcggggaccagctcgggggtcctgatggtgggccccaacttccgcgtcggcaagaagatcggctgcggcaacttcggggagctccgcctaggaaagaatctctatacaaatgaatacgtggctatcaaattggagccgatcaagtcccgggccccgcagctgcacctggagtaccggttctacaagcagctcagcgccacagagggcgtccctcaggtctactacttcggtccgtgcgggaagtacaacgccatggtgctggagctgctggggcccagcctggaggacctgttcgacctgtgcgaccggaccttcacgctcaagacggtgctgatgatcgccatccagctgatcacgcgcatggagtatgtgcacaccaagagcctaatctaccgggacgtgaagcccgagaacttcctggtgggccgcccggggaccaagcggcagcatgccatccacatcatcgacttcgggctggccaaggagtacatcgaccccgagaccaagaagcacatcccgtaccgcgagcacaagagcctgacgggcacggcgcgctacatgagcatcaacacgcacctgggcaagggtgagctgcgcgcgcgcgngcggggggcgggcgcccggaccccgctgaggctgcgcccctgtccccgcagagcagagccgccgcgacgacctggaggcgctgggccacatgttcatgtacttcctgcgcggcagcctcccctggcaggggctcaaggccgacacgctcaacggagcggtaccagaagatcggggacaccaaacgcgccacgcccatcgaggtgctctgcgagaaacttcccagaggagatggccacgtacctgcgctatgtgcggcgcctggaacttcttcgagaagcccgactatgactacctgcggaagctcttcaccgactcttcgaccgcaagtggcttcgggttcgactaataagtacgacgtgggccgggaatgcccctgcgaaccccatcggaccgtccacaccgactggcctccagcctcagtccgggacaaaaccagccgaacagaaaaccaggcgtgaatccccaacgggactgatgcgggagaccaggcggcatca

SEQ ID NO: 445005 - DNA, 525 bp, Homo Sapiens
  misc_feature (478)..(478): n is a, c, g, or t
ccgagaccaagaagcacatcccgtaccgcgagcacaagagcctgacgggcacggcgcgctacatgagcatcaacacgcacctgggcaaggagcagagccgccgcgacgacctggaggcgctgggccacatgttcatgtacttcctgcgcggcagcctcccctggcaggggctcaaggccgacacgctcaaggagcggtaccagaagatcggggacaccaaacgcgccacgcccatcgaggtgctctgcgagaacttcccagaggagatggccacgtacctgaagaatattggggccctgcctgtggacatggtgcgtctatactttgcggaaactgtgctggccctggagtacttacacaactatggcatcgtgcaccgtgaacctcaagccctgacaaccctcctaattacatcccatgggggcacatcaaggctccacggaactttgggactggtccaaaaattgggcctcctggnaggtctggaccaaacgaaactttgtgtatgaaaggcgtccataattt

SEQ ID NO: 445006 - DNA, 1604 bp, Homo Sapiens
  misc_feature (79)..(87): n is a, c, g, or t
  misc_feature (114)..(128): n is a, c, g, or t
  misc_feature (137)..(292): n is a, c, g, or t
ggggggaaacaacacccttttttcttccccggtttttctttgggacaaattttggcccggttcccttccctttgggggnnnnnnnnnaaacaaaagggtttaaaaaaatttttnnnnnnnnnnnnnnncccacaaannnnnnnnnnnnnnnnnnnnnnnnnnnnnnnnnnnnnnnnnnnnnnnnnnnnnnnnnnnnnnnnnnnnnnnnnnnnnnnnnnnnnnnnnnnnnnnnnnnnnnnnnnnnnnnnnnnnnnnnnnnnnnnnnnnnnnnnnnnnnnnnnnnnnnnnnnnntactctgaagaaagtcttaataaatactttattattaagcataattattcatctgttggtgattgagaaatgaaaaccacaccttcgaagatttcttttaaaaaatgcaattcctttaactacaacaacgacaacaaagggacaagtacacagaaccaggcacttctgggaaacttgtcttctcatccctttgccctcccttcctccccctttattaaagctggttgggcacatttgctaggatctgtgggtttcatcacttcaagccttactgcttaaaaaaatgaggtaagaaatttctatcggaaaagtgaaactgacacataaaccaaaccaaggtcttccctggctgctgcggcagccgttattgctctaagttggagtgttctgtttgcttttattatgtattcggagtccttattgccattctggctggcctcgtcgttggccaaggagaaatgatggggaaggagctcggtcgcctgctcccagctgctcagtcccaacctttctgcccgcatgcggcccgtcctacccttgctgggagccagctctggttctggggcccccagggcggctctaacagctgggagaggtggtgatggggctgtgcaggtagggcaggctgctgggggccgagtgcacgcccacggagaccggaaagctgaagacgaactgcgaggtgggggtggcgggggtcttgccccgctccccgcaagggtcccgaggggctagcagcctccgcagcacaggacgtggccagcacctgggactcgaactgcagcagctgccccatgaagctgaagttgggcgagatgatgctgcggcgctgcttaacgaactcgaaggcctcctccagcctcacccgtttcttcatcatcaggtaggccaggcagatggtggccgaccgcgagatgcccgcctggcagtgcaccagcacgcgcccacggcagtccttcacggcatcgatgtactctatggcttccatgaaccaggagctgatgtcggccttgtggttatcttccactgggatgcacttgtactgatagtgtccttcaaagtggtttgggcagtccgaggagacattcaacagagccgtgatgcccagggcgtccagcatgtctctccgggcagcatggtaggcactgccgaggtagaggaagggaaggatctccacaggacccccctggtcgtgtagtggggtcccacaggagctgcagcccaggtccaagggctctgtggcgctggggggaaccgggggtgggatggctgccagggccttggttttagaacagaattctgggtactcgga

SEQ ID NO: 445007 - DNA, 1080 bp, Homo Sapiens
ttttggggctttttggcaacgcaagtcgccaaaaaatgacccaatctcctggaaaggggcccggaaaagtggaccaagtttcagggtacctttccccatgaaattgtccggggtgcccggaccaaaggaattggtccaatttcaaatggagatgtcttatttccggtaaggccaaacaaggtttgccagcagattttccccagctttggtcccagtggtactgttattagagggaaccggtgattccaaaatacatcttctcccagtcaacttgttgatgaactcatatccggacatgatgttgcctagttgatcagatccgcccagctggaccctgcatccataacgctggaagaggtaatagaagtcataggcctggagcacctggtaaaagaactcggccaagctcatgccctcggggctcttgagccgcagctgcacgctctgccggctcagcagcgtccccatgcggaagtgaccccccactgccgccaggaagtccaccaggtgctgcttctggtaccaggccgagttgtccagcacagtgaagctgccccaggagcgcccatcagtgaaaagctgctggtgattagccgccagggcctcaagccctaggcgcagagctcgcgcgttggctcgcacgcgctctgtctccagcgcctcgcgttccttggtacggccgctcgggtctcccaggcgcgccgtggcgcctcccaccagcgcgatcacgttgtggcccgctcgctgcaaatgaaacaggcccagcagcgcaagtagatgacccacatgaagcgagtctgccgtggggtcgaagccacagtaaatggtttggggaaaactcgccgtgccacggtcgaagagctctgggagctctattttcgtccccgtctccgggaagaagtccttgaacagacctcgagccttctgcgctgccagtaacccctgagcgcccgagtgggccttacgcagccccaagggcaacaatactgagagatttagggtaccagaccaccggccccaggaaaaggaccgcaagatgggcgccgccatctggtagcggcatcgcaagaattccggacc

SEQ ID NO: 445008 - DNA, 1197 bp, Homo Sapiens
caagctggccctgcacggctgcaagggaggctcctgtggacaggccaggcaggtgggcctcaggaggtgcctccaggcggccagtgggcctgaggccccagcaagggctagggtccatctccagtcccaggacacagcagcggccaccatggccacgcctgggctccagcagcatcagcagcccccaggaccggggaggcacaggtggcccccaccacccggaggagcagctcctgcccctgtccgggggatgactgattctcctccgccaggccacccagaggagaaggccaccccgcctggaggcacaggccatgaggggctctcaggaggtgctgctgatgtggcttctggtgttggcagtgggcggcacagagcacgcctaccggcccggccgtagggtgtgtgctgtccgggctcacggggaccctgtctccgagtcgttcgtgcagcgtgtgtaccagcccttcctcaccacctgcgacgggcaccgggcctgcagcacctaccgaaccatctataggaccgcctaccgccgcagccctgggctggcccctgccaggcctcgctacgcgtgctgccccggctggaagaggaccagcgggcttcctggggcctgtggagcagcaatatgccagccgccatgccggaacggagggagctgtgtccagcctggccgctgccgctgccctgcaggatggcggggtgacacttgccagtcagatgtggatgaatgcagtgctaggaggggcggctgtccccagcgctgcgtcaacaccgccggcagttactggtgccagtgttgggaggggcacagcctgtctgcagacggtacactctgtgtgcccaagggagggccccccagggtggccccccaacccgacaggagtggacagtgcaattaaggtaagaagtgcaaaagctgccgtccagggtggacccgcccggaggaaaaaccgccgctggtggctgggcccacttgcacagcctgggcctcgccaggcacttggagcttggggcctccctgaacccccggcaaccctcctgggtggacctccttttcaggcatgctttggccgtattcgactcccctgaagcgaaaacaaaatttcccttccctggaagggaacatcatgggggtccccgctttcttgcaaaaaaagaaaccccggggaatggcccaaacggcccccgggg

SEQ ID NO: 445009 - DNA, 1306 bp, Homo Sapiens
  misc_feature (1273)..(1273): n is a, c, g, or t
ttgccctttaaataccttattccccacatggggatttccaaagatcattctaaacatcaatggccaccatcacttattggccagagttattgggctgcccttttaatttccttccccattcggacaatttgggcttttcggtaatggtgccatccgacagcagagcactgcagtacacttcatacatatttgtaggaaaatgcttttgtaattgtttgaactagagtcttgactagaattttagtatgagtgacaatgtggagccatctatgattaatccatattcctgatgttctgtccatgcttttttaaagcttctagtacttttaggaaactcatgcagcaatttcttgcgatattctatcaataattcatgtaatcgatcttctttcctttcactttcttcaatggtttttgtggttagttctaagagctcagtgttggtctggaaaaggcggcaggcatagcatgtggatttagctgtctccatcttgtccccagtgagcacccagactttcaggcctgctgcatgcagagcttcaatggtctctgcagcttgatcttgtagcttgtcttcaactgcagtggctccaattaaattcatgtttgtctcaatatcatcgaaaactttttccattttttcttctctgtcttgtaaggccatttttgcctctatgagctgtctgttaattctttcataatcatctggagcaatttctttgaaggctacacagagtgtccgatacccatccattgcattacgttccacatggactttagttaactcaatttcatgattttgcactctgggaaaaactgccgagtctgctcctttacaaaagagaagtatgtctccttcttgagtcttcacaattacactcatacgtcgccggacagcatcaaagtttaaggtgtgaagaagttcatattcttctatttcttttctttggttctctactctcatatatccatttcgatttcctaaaaatgtgaacccgtaccttttagctcctttcaccaaagctatttcatctggtgaagaggagatataggttaattcagctgattctgtagctccatcaacagcatcgtttgttttgatttctacagtatgacataaacacaaggcacgtagaaacagctcttctcgattcttatctactttgtcaaaatatgttaaagttccatcagtttgagataatccatcaacctcttgagttacacctttatatttgtggccatctatgcagcattcaatgaattccatgctgtnttcagtgagtggtccagtcttatctgtaaatac

SEQ ID NO: 445010 - DNA, 1155 bp, Homo Sapiens
gacatttattgtttattcccacacccatcccatgaaacaagcaggactttccattttacagatgtgaaaaccaagattcaaagagactcaataacctgctccaggacaaatgacagaactgagacttctgactccaaatcttacgctcccccgccacacctctttgcctttctctttcacaccaatggactctatgggtgaccttggcataggttcttctaagaactggctcttaacaaaaacttctggccattatctgactgaatgtcacaaacaagtgctgtaagaacttgcttagagcctttttcctaaacctgtacaccagctcttgccttgtgaatttattcaccacaaaacacatgttcccaggggcccaggcaaagtctccaagtacccagtcccctttcttcagccttgcccacaccctcagccttcctgttaatccaggcgacccagggttacccagaggtccaggtcccagttgttcacttgagcatctgatgtaccccaaacacctgtgtgaaacgctctctgtccaggatgcgtccatagcgcagggtgacgtagaaggtctgtttcccactgtaccgctggatacgcacaaacatctcctgaggccggtccttggtttctgtcaggggaatcacatctgccatgggacagtatgtgtcctgccgccagccccagaagttcagatgggccacccgcagcatggtgccagactcattcagatacaggataccaaccagtctccgtaagaaatagctcatccagcacagcatggtcagggcaaagcccgatatcccactcatgaggcacacggtgttgagagtgaggaggccctgggagtacaagtaatagcctggtggcaaagctaccactgtcagggcagtctgtgccaacttcagtcgtgacaggaacccgaaggttctgatggcatcaaaacggtaaaacatccagaatttctcagtctctgcgtttggtagtttctccttcgagatgggtgaactgctgcccacccacctcttaggatcctcctgcccactgcagcaccacagcccatggagaggcctttcccacacagcttttccccgaaacctacgcacagctcggagaagggcagccatggccccaccacctgctgccggaagtccc

SEQ ID NO: 445011 - DNA, 1469 bp, Homo Sapiens
gtttttgggcgttcggtttctgagagggcttaaacctgccccattagtgggaaggcccttcagggaaagaagttttgtccaccgggggcacagaagggccattcccatcactcccagttggaggagaaggttctggatgtccgacgtggttggtacccgcgagtcttggctcgacacccagtcccagcagcatctgcttgatgctgtgggcgttggggaccccggaagctggtggatcgctgcacggctgcgcggggtccgccagggctgccgggccgcgccctccttctccagcttctcaatcatggccttgcgcgcctgggaggctgaggtcttgggcagactctgcgccttcatcagctctttcttcttctcggcctgccgtttctcgagcgccgccaggctgccggcccgtgggctggcctggtcctcgcggttgaagatgctgcccatcttcttggatgaggaggaagaggagaaggtcttggtttgcatcatggtgctgccactgccattctccgagcgcctcacgaaactcgactccactgtggtggtgcgggccgtccgtgtgccatcattggagtggacgagccgctcagtcttggtaacagtgctgacagcagagccatcagctgcccgctggctgtgcctcgtggtggtctcagtggctgtgttgccgcgcccctcccctggccggccccgtgcctccttgcagccgccgttcccgctccttgtcccgctggtctctcttcctttgtcggagctcacgaagtgcagcccggatgagcttccgctcttcaaagtccgtgctctgatccagcatcttgtccaagactccttcatcctcaatagtcatcagctcctcagcgctcagagggctccgcccttctggtgcctttgttcactcgggtcctgctcagccccattggccgcttccactgctgcagcgagaggctctgctggctcttggttccatcttgatgctgcagcctcctcggctactggggggggcatggctgaagctggtgacatgagtgacactgcccagccgagccagggtcccagggctgttgacacgggtgatggtgctcttgcccccactactggtgctgagtagggtcgggggcgcccgcagccccagtgtcagttctgccctctggttgcctgtgggcagcagcacccggcctgtggaggcctggccacggccgtccttgatctcgatggtgaatgtggtcttcatactgccccctggctcggcagtgccgacggccacgggcagcggggcaccaggctcctctgaacgtgccacaggcccccctgctctgttttcaaggggcctagcagccaagccccccccctggggccctcctcctgggggcagcttcgaagctgggccaggggctgggctactcctcgttgctccttgctgaaccgggaggaggtatcactggggccccgagaggaggagc

SEQ ID NO: 445012 - DNA, 981 bp, Homo Sapiens
ggtagctgagtccaaggaaggagaagctgagtgaggaagtagctgggtgggccatcagcaggtctttggttggaggagaagagcagctggaggcaggaatatttagatccaggaagggagcaattgatgggatctgagaagcaatctgatccaggggaagagtagctgggagagaagctagtgaagggggttaactgggcttaaaactagaagtagcgctgggtagacgatagagacctggggtggccatcagtgggccctggcagaagcagctagattcagaggagtaacttgagagtgtttgagaggagaagcaattgaacccagaatctcaagggaatgaatagatgtgtccagggaagaactatctgggggaggaagtagttgtgtccaggaaaagggaagctggatgggccagaggctaagatggccatcaatggacttcagggagagaggagcagcagggagaaggagtatctggattcagggaaggagtcgttgacagtactttgagaggcaactggatccaatggagagagtagctgcgggagggagtatcttgggtctaggaaggagaagagaagctggttggggagaataactggggtcaccagcgggagagaaggagctagggaaggagcagctggatccagcagggaatagccaagggaactgctgggtctagagaaggagaagctgggtagggcagttattaagctggggttgtccacaaattgaccccagagtatgaggggagcagctggggaatggggcagctggatctagggtagggcaactggctctctacctctcttcctttgtcggagctcatcgaagtgcagcccggatgagcttccgctcttcaaagtccgtgctctgatccagctgcatatagagcccatcattgcctacctggtgcctgctgggctctggcaacccccaggccaccggatctgggtataccatcttgtccaagactcc

SEQ ID NO: 445013 - DNA, 1249 bp, Homo Sapiens
gcgtccggaattcccgggatggcggggctgcggggtccgcggtgcactctgtaagttcaccgccggtcgggtccggccgccgcgctgtccagctcctgagaccttgctgtccgccggtctgccgtctgcgcgcctcacgctcctcagccctggaccggggacaagtaaccctcggtgacaagaccaaagtgcactgctgcccacacagttcctacctttctggcttcaattcttcagaagagtttgccgtcctttggggagaacgtgatttttgttatctcagcccactgacttcattgatctctaatcttttttaattccttgggccaactttgttcgtgcccccacactgtagccagaagcccgttggcgagctctggcacctgcaaaccaccccgtggaacgagtgtttcctctggctgagggttggagaggaggtgtggtctcagcaggcggcccgtagcctcacagccaggcctggtggtgaggtcaccatgtccaccaaggtgcccatctatctgaagcgtggcagtcgcaagggcaagaaggagaagcttcgggacctgctgtcctcggacatgatcagcccaccgctgggggacttccgccacaccattcatattggcagtggcggcggcagtgacatgtttggcgacatctccttcctgcagggcaagttccacctcctgccggggaccatggtggaggggcctgaagaagatggcaccttcgacctccccttccagttcacccgcaccgccaccgtgtgtgggcgggagctcccggacggcccatcccctctgctcaagaacgccatctccctcccggttatcggtggacccccaggctctcacccgtgcccacagcccaggctccacccaaggcccctcgcctgcacctggagacccctcaggcttccccacaggagggagggattgtggacatctggaggattccagagactggctcccccaacagtggactgaccccggagtcaggggccgaggagcccttcctgtccaatgccagcctccctgctgtccctgcacgtgggacctgggggccttcatccctggatgatgtcctgcagattctgggatccaggacctgggacagcatgcaaaattcccacctagggaccccaaggctgcccttaggctgggggtcccaaggggggggccccacccaaaaaaggtgggggtgttggaaacccgggcccctggcggcccgaaatccagggcccccaaat

SEQ ID NO: 445014 - DNA, 1577 bp, Homo Sapiens
gcaaattttttttccaaggtgatagggagagtccgtggctgatgtctgcactgaccagacgcccctagggggccagcgagggcgggtcccaggtgcagcggatgcagaggagagaggcccgggcgcggcgcgggggatggtgcgatcccgggcccgagggcatcagacggcggctgattagctccggtttgcatcacccggaccgggggattagctccggtttgcatcacccggaccgggggattagctccggtttgcatcacccggaccgggggccgggcgcgcacgagactcgcagcggaagtggaggcggctccgcgcgcgtccgctgctaggacccgggcagggctggagctgggctgggatcccgagctcggcagcagcgcagcgggccggcccacctgctggtgccctggaggctctgagccccggcggcgcccgggcccacgcggaacgacggggcgagatgcgagccacccctctggctgctcctgcgggttccctgtccaggaagaagcggttggagttggatgacaacttagataccgagcgtcccgtccagaaacgagctcgaagtgggccccagcccagactgcccccctgcctgttgcccctgagcccacctactgctccagatcgtgcaactgctgtggccactgcctcccgtcttgggccctatgtcctcctggagcccgaggagggcgggcgggcctaccaggccctgcactgccctacaggcactgagtatacctgcaaggtgtaccccgtccaggaagccctggccgtgctggagccctacgcgcggctgcccccgcacaagcatgtggctcggcccactgaggtcctggctggtacccagctcctctacgcctttttcactcggacccatggggacatgcacagcctggtgcgaagccgccaccgtatccctgagcctgaggctgccgtgctcttccgccagatggccaccgccctggcgcactgtcaccagcacggtctggtcctgcgtgatctcaagctgtgtcgctttgtcttcgctgaccgtgagaggacgaagcttggtgcttggagaaacctggaggactccctgcgtgctgacttgggccagatgattccctgtgggacaagcacgcgtgcccagcctacgtgggacctgagatactcagctcacgggcctcatactcgggcaaggcagccgatgtctggagcctgggcgtggcgctcttcaccatgctggccggccactaccccttccaggactcggagcctgtcctgctcttcggcaagatccgccgcggggcctacgccttgcctgcaggcctctcggcccctgcccgctgtctggttcgctgcctccttcgtcgggagccagctgaacggctcacagccacaggcatcctcctgcaacccctggctgcgacaggaccccgatgcccttaaccccaaaccgaatcccatctccggggaggctgccccagggggtccctggattgaactggggcctgggaacaaaaccaagggcaaaaggaagggaaaacggaaaaaggggcttcctgtaatgggcttaagaccccccc

SEQ ID NO: 445015 - DNA, 902 bp, Homo Sapiens
  misc_feature (628)..(628): n is a, c, g, or t
gggaagcgtcacgggtggggctgcagcttctggacctaggactttgaacatgtcgcgcctgaagcggatagcggggcaggatctccgcgctggtttcaaagcaggtggaagagactgcggtacctcggtaccccaagggctgttgaaggcagcgaggaagagcggccagttaaacctgtcgggtagaaacctcagtgaagtgccgcagtgtgtctggagaataaatgtggatatccctgaggaagctaatcagaatctttcgtttggtgctactgaaagatggtgggagcagacagatttgaccaaactaataatatccaacaataaacttcagtcacttacagatgacctgcgactcttgcctgcactgactgttcttgatatacatgataatcagttgacatcccttccttctgctattagagagctagaaaatcttcagaaacttaatgtcagccataataaactgaaaatactccctgaaggaattaccaacctaagaaacctggagtgcctgtatctccagcataatggattaaccctgcatatcagagggaatttgaacaacttttccaatttagaagatttagatctttcaaacaatcatcttacaactgttcctgctagnttttcttctctgtccagtctggtgcgactcaatctttctagtaatgaactgaagagtttggctgccgaaataaatagaatgaaaagggtgaaacatttggattgtaattcaaatctcttggaaactatacctccctgaattggctggcctgggaatccctaaaaattgctttattgccggaggaataattactttttccaccaaaatttccctcctgttacgctattgaaaggaattgcccgcaagggaaaaacccaaatggaaatgcttaaag

SEQ ID NO: 445016 - DNA, 1206 bp, Homo Sapiens
gggtttcacattcattccgttgttttgccactgggcggggctgtttttcttcccttctagttctccctttttaaagatgaagcaaaacccagaggaaaagcccggggttgtgatgttagctcccccagactgctccccaggaccaccaccagccctgctttctggtttccaatgcacaaagagactcagagagatttgcagggagcccagaggatgctgagcacggcaggtgaaatctcctttttctgcagaccctacttgaggcagctccaggaccccggtattggagatgggggtggcgttcagggcggggaagccctggaaccagctcaggtgtgcaggggggttgccgtcagcatcacagagcagccgcagagcctggccctccaggacagggagggacgaggtgttttgcaggattttgaaggaggagacattgagctggatggttctctccatggtcacaccggctccagggaacgtcacctgacaggtgaggttggtgctgtggtcctggggccgtggggtgattgtgagcaccgaggactgggtggtcctggggcccagggaggtgggggcagctgacatccaggagaagatggggggcgtcccctgctcacagacccagggcacagagcaggtcagattgctgggatgggccagactccagggtccctgggatggagatgttgggcctgtggttcagggccatcacacgcacagagagcttggaagatgtataaccgtatttcatccatttggacttcaaccgataagaagtatgcagcattgtccctcctccgggcatctctgatgctcagggagcagttcttccttctgggatcccagaggaggtggaatcggccccgggtctcctcctgcacttcttcgtctgggtcgtttgtggccactggaacatcagcccccttccaggaaccagtagccataaccatagtacgaggctggaagggtagtgggctatctgcagggtacgaggacgcacagaccctcctgcaccgtcagtgactctggcccctccagctggaatctccgctcctgagccagggcccctgcccacagcaggggcagcagcacgcggtagcatctctgaggcggaggcattcactgggctacctgcatgagcagagaaggggaagggagtggaggggaaggactgcggggagaacgggtggtgggaggagcgcg

SEQ ID NO: 445017 - DNA, 1240 bp, Homo Sapiens
gccggactgggactgggctggggccctggcggatggagacatgctgcccctgctgctgcgtgcccctgctgtggggggggtccctgcaggagaagccagtgtacgagctgcaagtgcagaagtcggtgacggtgcaggagggcctgtgcgtccttgtgccctgctccttctcttacccctggagatcctggtattcctctcccccactctacgtctactggttccgggacggggagatcccatactacgctgaggttgtggccacaaacaacccagacagaagagtgaagccagagacccagggccgattccgcctccttggggatgtccagaagaagaactgctccctgagcatcggagatgccagaatggaggacacgggaagctatttcttccgcgtggagagaggaagggatgtaaaatatagctaccaacagaataagctgaacttggaggtgacagccctgatagagaaacccgacatccactttctggagcctctggagtccggccgccccacaaggctgagctgcagccttccaggatcctgtgaagcgggaccacctctcacattctcctggacggggaatgccctcagccccctggaccccgagaccacccgctcctcggagctcaccctcacccccaggcccgaggaccatggcaccaacctcacctgtcagatgaaacgccaaggagctcaggtgaccacggagagaactgtccagctcaatgtctcctatgcaccacagaccatcaccatcttcaggaacggcatagccctagagatcctgcaaaacacctcataccttccggtcctggagggccaggctctgcggctgctctgtgatgctcccagcaacccccctgcacacctgagctggttccagggctcccctgccctgaacgccacccccatctccaataccgggatcttggagcttcgtcgagtaaggtctgcagaagaaggaggcttcacctgccgcgctcagcacccgctgggcttcctgcaaatttttctgaatctctcagtttactccctcccacagttgctgggcccctcctgctcctgggaggctgagggtctgcactgcagatgctcctttcgagcccggccggccccctccctgtgctggcggcttgaggagaagccgctggaggggaacagcagccaggtctcattcaaggtcaactccagctcagctgggcctgggcaacagtccctgatcctccacggggg

SEQ ID NO: 445018 - DNA, 765 bp, Homo Sapiens; identical to SEQ ID NO: 325276

SEQ ID NO: 445019 - DNA, 900 bp, Homo Sapiens
ctggagaatgggagctgcatcttgttggacattagtctcatgaatgatcaggacaccgccattttgtgtaatgtcttccacataatccttcagcgatgtagctgtgctcatgcagaatctcctccatgcggctgagggtgatgcctgccaggtgcccagggtacttcagctggaggagacgctggaggtaaccagctgcttggcttcctccaagattgatgcgcttgcagtttttagcatctaatctcccttctaagatgggtaaaacatgcgtacactggtatccagatgaaatgattagcccactgcacatcgagttctttggcttattgtggtagaagctgaagaggctgtctattccataggcaaccttgggaatcccgtagcactcaaaaagaagctcagacatcatttgccgtgaatacagtgggttgcacacagcttctgtcaaaactatgggatgatcaacacagccctgtgaggagacacccaggtgctggaagctgtagtccagcagcaactcctgaagctccaggttgaccggcacgttgcggtcgaagggcgagcgcagcatccagcgcagtggctccaggctgcccagagcgttccccacctgcgggcccgacgcgccccgtgccccgccacgaccgcgggcgcacaccgcgcggaactgcaggcgcggctcgggacctgggtcctgcccgggacacgcccagccagcgcggacttggaacgacccgttgtccagcaccagcggtaccggcagtggcccgtgtgccaccgggccggcctccagcactgggtccggtgcggcacgggcgtcgcggaacgggaacacgttccctcgtgccgaattcgccacccaggcctcgctacctataaccccgagagttactggca

SEQ ID NO: 445020 - DNA, 1151 bp, Homo Sapiens
aataagttgatatttagtggtcagcataaacacaattctggagagaaatcaatatgtccttttagtgtagctgcatggcagggggtgggaacatctttcatagcgtttgaagaactcctcctgggcaggaattctaggttgcaggcaggcaatgagaacacatacatccagtttctatggtacctgttagatgccacccatatgctgacactgccagctcttaaggaacaggagccagcacatgtgtacaagaacatgtgccctcccatttggccagagggctaggactacaaatgccagtgtcatgagactgcctcagaggactgtagggtccttgagcgatctttgatcaaagaggtggagagaaataaagaccagtaagtagagtgaatgaagtgggaaattggcagtataccatttgaggggtgaggtaggtttctacggctatcctttgtgactccagaaagtttacagaagccttgagttaaatacagatgccattaccattattgctgtcactttattaacagctgacagctcccttgtgccaagtactgtgttagcagtacttggttactgtactgtattgtaaatgtaacctcctcaaaactaacaaagaaaggggattctcaggagcctcactgtatgtacaaaggcaggctaaagaactgttcagcttatttaacttacagagttccttagccctataaaagggcccatgatgatgtaagatcaacacagttggacgtaaatgataagtaagcaatccagatgccatttcatcatctaagatgccagtgattttcagatgcacccctattttatgaactgataagaaaaaaagcactactaatctaaattatgagtgtcaaagattataaggtgaatacaattgcagaaatataaaaatgtgaaactgtgcatgaatacagcattattttaaaagactactttaagaaattgaacattctaagattataccatgctgtctatattatgagattaagaaaaatagatatcataccagatgctctcttcttaattagctttaggtagttcagaatactacatctggtgtccacatccacttccatgttttcaaggtaagagttcagaattgggatcagtccaggaaacacaccttcctacaa

SEQ ID NO: 445021 - DNA, 244 bp, Homo Sapiens
cacaaacaatgagaggtttttttccaatggtagaaatgacataaattcattgtaaggaactttggaatttatcaaaaagtgtaaaggcagaagaataaaaattgaccatattcctagatgtcgagtaagttttcctcagaataaatctttagaaatgacgttgacagaatgaagagggttcaaatattaagtttttggtaacatactgccaaatgcccttctgtcgtcttctcgcagccgtata

SEQ ID NO: 445022 - DNA, 332 bp, Homo Sapiens
tgccgtgtaaatttatcagaagaaaaagaaatggaaatgaaactgaaggaactggtcaactcagataaatgtagtttttttctcactaaaaatcagtttctagaacatctaggaaatcaaagatgatgaaaaatattaagatgttttatatatatgtaaaagtctttacagctgattgatcatctcatgcaaaatttgtacagtcactgcaaataaagtcattgcaaaatctttactccttttgctttttgccaacactgacattggcctttacagtctcttgacttcattctgcccttgcatcccttctgtcgtcttctcgcagccgtata

SEQ ID NO: 445023 - DNA, 137 bp, Homo Sapiens
cctaggacctcaaggttgtgtctaagacataatttacagttctcgtgtaggtcttccaaatacttagctacacagctttggggcgttttctcagccaaatacttttctttagcccttctgtcgtcttctcgcagccg

SEQ ID NO: 445024 - DNA, 157 bp, Homo Sapiens
cactcctactgttagattttatttcagaagcagtgtgaagaggctacatagctcgtgacatgttgcttagaactctccttttctcagcctctgcaccctgttatgtctttagctcaaaaacagaaaagctctcccttctgtcgtcttctcgcagccg

SEQ ID NO: 445025 - DNA, 306 bp, Homo Sapiens
gaaaaatcacttgctgacatttcaaatcaaaaaaattttacataaaagtctaaatttctgcattttcttgaaaaataggaagatttgtcaagagtaggttagtgttcccacgtcagctggagctgagcagtagctgtcccatgtcagcagggtcatgctacacagtgtcagggtgagtctgtgttctggttttcctgggacagcttggtttgttcccactgacctagcataattattaatagcatccccttttcttctgattttgagaagttttatatattcccttctgtcgtcttctcgcagccg

SEQ ID NO: 445026 - DNA, 585 bp, Homo Sapiens
ctgacacttagggaaccagcctcagaatgacttaaagccccacgggcaagaagccctatcgtgccagttgtgagggtggctgggggttccccgcaggacacgtgctgaaggaatccaccactgcaggtgcacaggggctgcaagtgccagggaggtgaagacccggaaggtgctgggcactttccgggagtcctgtgttgggtcaatcctggcatgacaccccccggcggcagtgctaacacgaaagcttacgcgttttacaaggcgcttttttgcacacatctcccatcctttctgaggttggtgccagtcccgctttacaaacatgcagggacaagcccaggacggccgaggtttcgcgggctcgtcgatggctcggtgattttgtcagccggcgtctaaagcacgcggcaggcgctcaaaccttgaaccaacgggaaagcaaaggaaagccggggcccgctggctcttggaggggaagggctgggaaggggggaaggggcccgcgcccacctaccgcagcggcgaagcagctccgcagggcctcgaactcccgcgcgcagaagtccttactcaggcggccgc

SEQ ID NO: 445027 - DNA, 735 bp, Homo Sapiens
  misc_feature (145)..(237): n is a, c, g, or t
gattccaagcgcctattttccaggccccgggtatttcttaagggaacacagtataggccaccggttccctttcccttctcggggcccccgttttcaaaagaaaggtttaaaaaaatttttttagggcttagggcgggccccaagnnnnnnnnnnnnnnnnnnnnnnnnnnnnnnnnnnnnnnnnnnnnnnnnnnnnnnnnnnnnnnnnnnnnnnnnnnnnnnnnnnnnnnnnnnnnncaggatttgaccgagtctttatcgtggcttccgttacatcttattctaactcaggtttacggacacaatgctggaaaaccaattcctgctctacccacgcctcaacttgttaagaaaaaacaggatctaacaccgaggaatgtcacatcttcgccattcccacttcctttctgccctaggcattcgatatgtgccaccaggggccatcaggactagggctctgcacccatggcagcagacaggtgtgaagctcagagtccctcctaacagcctccctccagcgtcttcttggccgcagcggcgaagcagctccgcagggcctcgaactcccgcgcgcagaagtccttactcaggcggccgcccggggccgtggaggcctgcacgcacctgccgtacgccgcggcctcggccccgcaggcggccagccgctcggggaaggcgcggaggcggcttcgcacgcggccccacaccgctccgttagccgacatgaaccccgct

SEQ ID NO: 445028 - DNA, 1089 bp, Homo Sapiens
  misc_feature (441)..(459): n is a, c, g, or t
  misc_feature (478)..(578): n is a, c, g, or t
  misc_feature (583)..(603): n is a, c, g, or t
  misc_feature (732)..(786): n is a, c, g, or t
ggagcccagggcccacaattcgccccgaaggactccaggctgccactgttgagcagaacttagagtgaaccgcctcaagctccacaagtggcaggtgggtgatccctatgaccccactgcagtcctgtaccctgcagccagcaggcagataaagcttcttcctcccaccccacagcgatctttcacaggggcctcccatttgcaggacctatccccgaagccagctgacagggcacttctgggaagtgcagaaaactgccgttgcaccaccgtgggatacccatgagaatggtgcaaggtactgtcgtgaagaccaagtgagccccttaaaaacagagcttacgacaggatgagacttactcactgagctttttcccagagcccaggaagtttctcaaggacaacagtcttgaattctgccgtcttaggtttaaagcttcnnnnnnnnnnnnnnnnnnnctctttgtagagaatgtgnnnnnnnnnnnnnnnnnnnnnnnnnnnnnnnnnnnnnnnnnnnnnnnnnnnnnnnnnnnnnnnnnnnnnnnnnnnnnnnnnnnnnnnnnnnnnnnnnnnnncggannnnnnnnnnnnnnnnnnnnnaatggtgagcacttcttttccagtctgaagatttcctgcttggcttctctctctacttctcaaatgattaatgactgcaaacatcacctgccaattctacaagctgagcttctcatccctattctctcnnnnnnnnnnnnnnnnnnnnnnnnnnnnnnnnnnnnnnnnnnnnnnnnnnnnnnnaatgttaacccatcctgttctcacacatactcaaaagagaaagacaagccatacaaaaataatagccagctagggaaacaaaacatctaacagcttcaaaatatgtcatcactatggcttgtttcctgtgtggaccaaaggaccctcttgtgtagctgctcttgtgtagcagttccctgcccctcttttgtgaatgtcaacggctttcccatttacagaggcaaggccgagagggagagggagtctgcagctccacctccagcctgtgcaaactgccaggagtcggctctgcataaggcacag

SEQ ID NO: 445029 - DNA, 497 bp, Homo Sapiens
gtgttttgtaacttaacatgaaaaattcactcttttattttggaaaaaaagttaacttttcatactaacaaacagaacaagatttaaggtaaatttcttaaacattatccagaaaaataacaagatttatagtatctacttctggtactaatatacacaaaaggccaaaaccatgcctattctgcaggtgtagcttcggtgctctcctgttcaggggcaggctcactgcccgcttcttttccttctttgcttcttttagattttttgtgtttgtgtctcctgtgactatctccttcttcactttcatggcgacgtctactattacttcgagaagacttatgtctggtttcctctttctccctgtgtcgtctttctctatgtcgttcttctttttctcgacttgctctgtgacgctcataacctctttctgcatattccctgtatctgtatcgttcttcatcgctgttgaaaacacttggtgtaggactgtgatcacg

SEQ ID NO: 445030 - DNA, 491 bp, Homo Sapiens
  misc_feature (476)..(476): n is a, c, g, or t
gtcgattcaaaggaacaccattttaatatctgaaagtagcataatgttcagccaataggcattggtacaaccatacatactgcttgtttacagcaggcatcccttctgagtggctggcatctgtcctgtaccagttgttaaaatattttgaaaatcatctctgtattaaaataattgtggccctatgagatagggaatatgaaataaatgaaggattcctttaacatcaaaggtctttagagtaagactagaatacattagtatattttaaaagtctaaggaatgcaaaattcaataaagtgatatagccaacccttcacctaagaaagaaaaacacatcggggaacttcccactgtacaaagattttccaggatgggaaactaacatgatagaattatctgggtgctaatgggcttgctagttacattctgtgcacaaaggaaggaaggtttataagcactgatcccaaatactntacattcattgcaac

SEQ ID NO: 445031 - DNA, 344 bp, Homo Sapiens
catttatttcattttttccatttttatttgatgtttccaaatataaaaaagtcaggattcttacatcaattatctcaaatgagaccatgcaaagcaattcagtgtatacaacaatcatttttccccttcagttctgctgctttatacaacagtgtgattgacagaaaattggatggcatgtgcctggtcagaaaatgtcatctgtttacaaaataacatcatgcagcacagtttctactttgtctgcaagtcaattcacaaaaactacttattttctgttttttatttgggaggcacatggaactgaaaaatttagctgcccaattttattcaactaccccacc

SEQ ID NO: 445032 - DNA, 661 bp, Homo Sapiens
  misc_feature (86)..(107): n is a, c, g, or t
  misc_feature (528)..(528): n is a, c, g, or t
  misc_feature (535)..(535): n is a, c, g, or t
  misc_feature (548)..(548): n is a, c, g, or t
  misc_feature (571)..(571): n is a, c, g, or t
  misc_feature (576)..(576): n is a, c, g, or t
  misc_feature (586)..(586): n is a, c, g, or t
  misc_feature (624)..(624): n is a, c, g, or t
gcacagaaatacccttttatcttaaagtatatcagctatgattctcaaaggtatacgattctcaaatattggtccacttgcacagnnnnnnnnnnnnnnnnnnnnnntatttcctcacatataaaatgtaggtaggaaagtatatggattacatttctttacttgcatcatggatacatagttcaattcagttcaaatcaaaaccattcaatacatatttactgagtcccttctgcgtgtcaggcactgttttaggcacttgtgatatatcagtgaaaaaaacaaaggcccctgcccacatggagcttacattatagccaggggaaacaacagtaaacaataaacacaaatatgtgaagtatctagggtgataggtaatatgaaaaacatagagcaggtgaaaggggtatgagatttctcgatctggaaggtagacagctgcagtattaaatagtatggacaggatagggcttcagtaaggaaggccaccatttgagccaaagatgaggagggtaagggtttagggcntctgcancagctagtggaancggcccaaggttaggacccaggntgggntttcgggagnggtctgggctggagttgtgattctggccgcttttaacngggccgttttttaagcccaagtcttttggtccctggg

SEQ ID NO: 445033 - DNA, 567 bp, Homo Sapiens
  misc_feature (518)..(518): n is a, c, g, or t
tttttgcaatggaaaaattttttagtaaaactggaaaaggctctataaaatgtcctgactccagcagtcttgaggcagcacacaatggcatcagtgtctaggtggcaggcactccgggctgacagcttccttctatggctctatgaccaagcaacccagcccgaggcagctcccaccagtgaggccctgatattgcagggctaagcacctaggatccaattctagtacatgccacctcatgctaggctctacaaagtggggagcagaggagcttggtacccactgtatcaccctttgactttgaaagcctaggctggagtttcgcatgaagtccccgattcccctccaggttcatgcggcctgacctcactgccttgaatctgacctgctcattcctacctcagggcttggatttccttttctctctgcctgggtccccttcgcccgatgttcacgtggctctctccttctagttgtttaggccccagctcacatgccctcggctcagagacaccttntcagaccacttatctacactagcctgccagcactctatcgcatttctat

SEQ ID NO: 445034 - DNA, 506 bp, Homo Sapiens
tttcacttaattaggtccattttaataaagggtataggagtttacaactcaaaacaattcataaaacctatcagatacatacgataaatcacaccgagagtgcaataacataaatccaatggtctgcaaataagaggtattgcaaaaattgttaagattgactttcatgtttccccccctcctttctcttgttcacagcccgagattatgtgtacattgttttctgaggcctgatgacctcaatactccttctggctggagagacctcctcattcagtccattccaaatagtcagcagggggagttcacctcttctccacggaatgagccgtggtccttgtcctttattatttggtttcttttctcctaacaaatgacattaaatgggttccctcattcaaacattcttgtggctttgggggtgtttcctgtcactgtttccccttttaatgcccacaatgaacccttcaaggtgaagccctaccaagttttcatccctttgggat

SEQ ID NO: 445035 - DNA, 187 bp, Homo Sapiens
tcgatacgactttttttgaggacagagaccatgttttaatgacttcgatatctccagcagcgatcaccggccagggcacattgtagactgtccagaaacactgatggaatgcatttgaatgcattttcctctggttctatgttctgtccttctgtcgtcttctcgcagccgtatagtagtagtaggc

SEQ ID NO: 445036 - DNA, 514 bp, Homo Sapiens
  misc_feature (404)..(404): n is a, c, g, or t
  misc_feature (448)..(448): n is a, c, g, or t
  misc_feature (455)..(455): n is a, c, g, or t
ctcttgtcggatttcttcttctccttcttgctctttgggttgctttgatctccaccttcaaccgtccccatccccttctgaagctcctcttctggctcgtccttggccccttgggagccaagagaccccttccctttcttctccttgacatcaccacttgctttgtctctctttactttccccttggaagtcgtggaggtcttttctggggaaacagaggcctccccaccttccccggcccccagcttcttcttcttcttgctcctgggggtcctggcagctggctggtctcccgatagcttccgcttgcggctctcccagcccttcctgctgctctccttggtggtgtccaccaccttctttctttcctgttccagcagctcagtcaggaccttcaccactgnaggcctgcacctggcctcattcaggggcccaggttgcccaggangcactgngtgagttgctttgcagcgccaggttgaggctttggggttccagcccctttctttggctt

SEQ ID NO: 445037 - DNA, 233 bp, Homo Sapiens
ttttttcacagtctgggggcccccgaagccccctcatctttattccagttcctcagatgtggcagttcccccagcttccctggaaacaagtatcagacaaaggtggtggcagacacaggacagggccctgggtggggcttgctggcgctaaaaggatttctcagcaggctcagggtctcccgccccgaatgacccttctgtcgtcttctcgcagccgtatagtagtagtaggc

SEQ ID NO: 445038 - DNA, 796 bp, Homo Sapiens
tttttttatcagagtcccatacctcacgggtattttctcaatcagtgaacacctcaagtactagcccatgtgttttgagtaaaaagggctcctttcaacgaggatccccttctagaggctttgactaaccagtctcttggcacccttagaatgaagttgagagcgtcacagggatgcttaacgaggccgaggggaaggccattaagctggccaaggacgtggcgtccctcagttcccagctccaggacacccaggtgagtgtcctgccacatcatccaggggacctggggggtggccttcctcggggcaggtccctgggacctctttgcatcccttttgcaggagttgcttcaagaagaaacccggcagaagctcaacgtgtctacgtaagtgcgccagctggaggaggagcggaacagtcctgcaagaccagctggacgaggagatggaggccaagcagaacctggagcgccacatctccactctcaacatccaggtgcctgccccgtgtccttgcttccttcatgggtcctctcaacttctctgcgctgagatcccccgcaggcagatcgcggtggagtgttggtgcgatggtgcttgaccccccagcttcccctgctattgggtttctccaacgaggagacatggtcttcgcttctcagagtctgtggggccagggacaggggccactcatggtccccctctcaccctaccctggacgctgtccttgtagctctccgactcgaagaagaagctgcaggactttgccagcaccgtggaagctctggaagagggg

SEQ ID NO: 445039 - DNA, 723 bp, Homo Sapiens
gaatcatgtcatttattttaaactaattgtaagacaatgaatataaagttcaaaaaggtgtaagcaggtgatggttttattggcaaacttataggggtagtgtatgaagtcatttcaaataacagattaagttgctttccttacaactaaaagcttcaattactacatttcaactttaatttaacatcacatctacatgtgaagctttaatttcaggtctggagcagctgtaaaatgaaagttaccactccattctagtccttggatatcagtatattccccttcaccttccaccctattttcattgaaatttccagtatactttgccccatttgggaatgtgtaagtccccagtccatgaaacatattatccttaaattgtccttcatatactgctcctgaaaaatgctcaagtcttccaaaaccattcatcttgtcatctttccagcttcctgtgtagacaatcccattaggagtggtatgaatacctattccatttctctcgtagattccagaagatgttcttgtacagtcaccatcatacttgtctccatttggaaagataaagctgatcttatacacttctgaagttggccgagaggtgttagagagatcttccaaactctgcgactccccctgggcggccagctctgcggccgggagagaactaggcgctaggacagctccaggtgcgacttggttgctggggcgaccgggcccgct

SEQ ID NO: 445040 - DNA, 104 bp, Homo Sapiens
ggagtgtgctaggtggcacggagaattttggattctcagggatgggttcgattctcatagtcccccttctgtcgtcttctcgcagccgtatagtagtagtaggc

SEQ ID NO: 445041 - DNA, 130 bp, Homo Sapiens
gattttaagatgatttttaattatttaacaagtagaaatacgatcagtgacaattatcaattaaaacattaaacaacccagttaccttttcttaacagtcatgatgaaatatcccttctgtcgtcttctc

SEQ ID NO: 445042 - DNA, 931 bp, Homo Sapiens
  misc_feature (60)..(60): n is a, c, g, or t
  misc_feature (309)..(309): n is a, c, g, or t
tccggggaaattctcgcgggtgaaagagaatgccccggtgagagtgcacctccaagaaanccgcccatctcgggaattgtttttacaagaacggctcgggatgaaccgcccggggcgctttttttatttgggggggaattccaaaccccttaatcctgtgcccaggatttctctttgggaaacaaggttataaaccatgttccatttaccttactgggcccaccgcggccaaaacaaagggtctaggaagcttctcgaaggccgcaggcggccccacatttatacaatctcggtgtgattggtttcccngggtgaaagtgcatacactttattatgtacattgttggaaagggaggccacctggagaaacttctgcactggcactgtgttcctagagctccttctatgcgtccctcccaagtgatttaatttcagctgattggactacgaattcacaaggcagaaaagtcaaggtcatttggtatctggagacaggagaactcaaggaaccaaaagcactgttactctaagtctcagaaaaggttttcagtcaggatatggaggctcctggtcctcaagggtgaaccacttcacacaacagataaaaccatcattttaaaattcaaaatgtaagtgcaacttgagtttaagttgcactgctccatacctctaataaactcagctaggagccaggatacatggtagttcaaggcttcctaaaataagcttgaaattggggtacaggggaagggacatccattggctggatggacagagtggttgagctaaagagagctataaaggctcgtgctgggaaagaaagctgttatgcttagacttctctaggtgactcagagtctcaaagaggaaatgttacaaatgtcacccgccagctttctggccagtaagcagaagtccagtatgctggtcc

SEQ ID NO: 445043 - DNA, 268 bp, Homo Sapiens
tcgatccgactgttatttttgatttattctttttttaggcatatgtagtaatattagaaacatttaatttgggaaactttgattcttgaaagagaaaacaaaagcatgtgaataaactttgaagtgttcacctcagtttgggaccaaactgcttggatctttgtaaaaaccggttttgtatgtcaaggaggagtttaaggcctttccgaccaccttgtgttccccttctgtcgtcttctcgcagccgtatagtagtagtagtcgccgc

SEQ ID NO: 445044 - DNA, 682 bp, Homo Sapiens
  misc_feature (124)..(162): n is a, c, g, or t
ccttaaagaattcactggtcaaggacaccttcccccaaaaggaaagcaccaaaggaccctttttaaggggaatgtttccccccaaacatttgaaaagggttcaaactaaaacagcttaaggttnnnnnnnnnnnnnnnnnnnnnnnnnnnnnnnnnnnnnnnccctgaacccacccagccataaccactttccttaatcgatcataggagtttcttttcattttataaaaagattaataaaaaatattgaaaaaattttctcatatttgtaaagataatagaattcataagtttcttagaaaacagaccagacactgccctccagtttccaccccgttgctgggaggatcagcaggactagaaagtttgggatactggagctgctggtggagaacggggaagtccagcccagaagaaatcaggaaatagggctcaggggcacgtgaggtgtggtaaggagcaaactccacgtgatacatggctgcgcagaaaaggggaacacaaggtggtcggaaaggccttaaactcctccttgacatacaaaaccggtttttacaaagatccaagcagtttggtcccaaactgaggtgaacacttcaaagtttattcacatgcttttgttttctctttcaagaatcaaagtttcccaaattaaatgtttctaatattactacatatgcct

SEQ ID NO: 445045 - DNA, 535 bp, Homo Sapiens
aagtccattacagtgcacatttattgactctgtgtatcttcacagtgtgatcttcaccacagcttgcaaagtgtaaccactcagcaccttctgcttccttctgttcagtttttccactgcaattcttccagcataattttctgatagccagtgtatgactttggctttgacttgtttctacacagtgggtccagtcatttatttctggaacttgatcagtctttttccaggtatataagcaaatctttccacactccaatcctactgtaaccacgtatcgttgagaagggtggagcactgggcagacgctgacagctgtcacagcccgacccacgtccaggactgaggagcaggggccaatggtgtgctcgatacagtcatctagtggagtcacactcagtgccagacaaccacctttttgtctcgactcccagtgaagaaatacttgctgtcaggactccaatcacatagaccaaataattctactgtgcatcatggtagtaattttgattggtgaaggctatatattacgcac

SEQ ID NO: 445046 - DNA, 552 bp, Homo Sapiens
acagcaaagcaaaaatctttatttagacatgaaaaagacagaaaataaaatacaaaataagagttaatgagctgctgttttattgcttttgaatctacagaggcagcaatccttagatgggggccccagttttccaaagtgacactcaattttcccctccccccagtacaccacccttctgggcctcagctttcagtttcctgtcttggctgcaactgtggaaatagtgaagatattgtgagacagaaagtcagtctggaacaaagaggtatacacctgctaagaaggtggcccagaagcctgattctagaagtcctaaaggctacagagcaccaccaccccacctgcccctaatgcattccatgggcctcaacctcttgggggaagaaaatatttcccaaggtctgttgtaaaaagaaaatagggaccaggcgccaggtgtcacgcctgtaatcccaagcattttggaaggccaaggcaggcagattacttgaggtcaggagttcaggaccacctggccaacatgatgaagccccatctctactgaaaata

SEQ ID NO: 445047 - DNA, 370 bp, Homo Sapiens
  misc_feature (85)..(197): n is a, c, g, or t
cagggtcataatattgtcaatgattggcaccaggcttggtgtgttttgctccacctcctgcctccttggtaattcctcagcctgnnnnnnnnnnnnnnnnnnnnnnnnnnnnnnnnnnnnnnnnnnnnnnnnnnnnnnnnnnnnnnnnnnnnnnnnnnnnnnnnnnnnnnnnnnnnnnnnnnnnnnnnnnnnnnnnnacactctgtcatttccctgtttctttcttctcacttcctcctttccccttctgaccatcttttcagccgtgaacataccacaccagcaagaacaataagagccaagggtcatttcatgttttcacacatgtcaaagtcttgaagcttcggtcattagtcttccgcttcctccc

SEQ ID NO: 445048 - DNA, 1650 bp, Homo Sapiens
ggaccggtccggaattcccgggatgccggctctcactttgaggagttcaagcagccgcggcggcagcagcagccctggacgcagcagccaagctcttcgctggctcccgggggctctcccgggttcctctcattgcaggctgaaggtaatgagaggccctaagatcccagaggatgccataagaggaaaagtcaggggagtgttgaagactgcctcctacaaatatccgtgaacataccacaccagcaagaacaataagagccaagggtctgaattgtttaatcaaaggaagagtcaaaataagctacacccagattactgagaaaggtgaaatgaaaacaagctcaaaaccaaattccaggaagatgctgtctttgtattgacttaccatttcatgttttcacacatgtcaaagtcttgaagcttcggtcattagtcttccgcttcctaaagcaagaaactaaatgctgacttgtgtcgtttgccccagatgccaccggaaatgtcatcttctccccagacgctggcttgcaagcacagcagcacccagaggctaacctatttcccctatagcccaagctctgagatctcccgtctggtcacaatgatctacaggagaggaagaaagctatctagggacgagatctagaatcaactgagagagatgcttaaaaatcaccagttactttaatgaccatccgcagagccatcctgtgcaaaggaaggagctaggctgtgcgccctgggcgtcatgatccttctgcgggcctccgaagtgcggcagctgcttcacaataagttcgtggtcatcctgggggactctgtgcatagggcagtatacaaggacctggtgcttctgctgcagaaggaccgcctgctcactcccgggcagcttagagcaaggggggagctgaacttcgaacaagatgagctggtggacggaggccagcggggccacatgcacaacggccttaactaccgtgaggtccgcgagttccgctccgaccaccatctggtacgtttttacttcctcacccgcgtgtactccgattacctccagaccatcttgaaagagctgcagtcgggcgagcacgcccccgacctggtcatcatgaattcctgcctctgggacatctccaggtatggtccgaactcctggagaagctacctggagaacctggagaacctgttccagtgcctgggccaggtgctgcccgagtcttgcctcctggtgtggaacacggccatgcctgtgggcgaggaagtcaccgggggttttcttccgcccaagctccggcggcagaaggccaccttcctgaaaaacgaagtggtcaaagccaacttccacagcgccaccgaggcacgtaaacataacttcgatgtactggacttgcatttccacttccgccacgcgagggagaacctgcctctcccagctgctgctggcccacgtggccgacgcctggggtgtggagctgccccacccggcaccccgtgggcgagtggattcaggaagaaaaaacctggccccgagagtccaaagggcccgccccaggcccaacagaaatcaccggggccctttacctctggtcccccacccctttaccttccccccacataacgggcccccccctgggttgggggtttcca

SEQ ID NO: 445049 - DNA, 159 bp, Homo Sapiens
agcacacaattatgattttatttgttaagttacaatagccaaaagagctttacaaaaggcaaaataaactacacatccattttagaaaagtcctttttatttctttaaatcagaggcccccttctgtcgtcttctcgcagccgtatagtagtagtaggc

SEQ ID NO: 445050 - DNA, 1141 bp, Homo Sapiens
  misc_feature (432)..(432): n is a, c, g, or t
gcacacaattatgattttatttgttaagttacaatagccaaaagagctttacaaaaggcaaaataaactacacatccattttagaaaagtcctttttatttctttaaatcagaggccccctctagcgtttgaaagcagtcacaggcaacacacaatgcaattgaaagtaaacagtcacagcattttaccgcagaccttccaaaacataaggcttgcttctgttccattcaagtggcacaaaaatcaatgagagaaaaatagctaaccataattaatattgcaaattcctgctatgattcagattcattatcctctcattcagtaatttctttattattttactggctggggttattttttactaggattaaatacctctgttaataaggaaaaaatatataataaatatagggactttaatttccctaatanggaaatatacctcatttgaaatgaccgaaaattaatgttaccatatatcctactctgctttgatggaagttattggtaacttcctaaagtatatacttaattttaactttattatatttggaaatcagaactttttaaagtacatatattttggaaattcaacctaatctgtgactttgctaaaactttttcagtactcagtaaaaggaggtgggaaacgttgctttgaggacaaatgttggctctgaagaatatgatataaaggaacgcttaagagtttttatacagacagggcactgcataaatccaatgagtgaatctcgtgcgcttttgaaaacgattgattgaaattagcgggagtaaaaaatagttgattttcactctattttttcagctaatgtctttatgtgtctgtttccatgttctattacagagggtttaagctgacagcctagtattactataactggaaaataaaaagaaatctctaattttaacaaaagaaaacaatgcaaacttgaggaagaaaccaacagagaaaactatattaagctaatacttcatgttcttaaaagttataaatacactgaaaatttgaaaattcaatagctcttgaaacaaatttaatctgtattaactttatttaaataaatgaccaatctgtcacccaacatgtcatgtggcttctctgcactgatcttgctttgtt

SEQ ID NO: 445051 - DNA, 146 bp, Homo Sapiens
ttttttttggtgtaaaaaacacaccctcccctcccaccccaaaaaacatcaaattccttccttttccccaaatccctggatcttggaatgaaagccacccttccccaatctgtcctcacctccttcagcccatccaagttatgcac

SEQ ID NO: 445052 - DNA, 729 bp, Homo Sapiens
gacacaaatctcaaacattagtttttttcaaagggaaaaaacagactggtaggttcttacagctaaaaatactctattccatttccttttcaggggataacattttagaaactgattgtctgttttaatgtgaatcctccttgattagcaagttgtaaaaaatattagataaatttgttgtttacaaatattatggtagcctttagaaacttaggaagaggtgggcatagttgatccttgctatcaatcaatatcaactgagaggaagtgaaattttcctttatttgatcgctaccatcagaatcttattttctgactagtttaaatgctttacaatttcttcttgggttaaaaacccaagagtttcccatagagaagtaaatgctacattaacagctatacaaagatgtgatgggctcaagatgagaagggggatcttgtcctggattctggcctctgagtccagtgtgatctgcttttcacagtgaccagtgtgaaggcacagtgccagggacaggtagatggggacagctgtcacccatcatataagcaccatagagaacagctggatagatttctttcagactatgtccatctgaaggaaatcaaatttctgctacattgacttttctgtctttgaaccctcagccttttctcctcctttcagaggcagagcagagcgggtccccccggccgtaatgggccctctgggttgatagcactgcttcc

SEQ ID NO: 445053 - DNA, 165 bp, Homo Sapiens
gttcaaatcctcaacttgagacaggtttattagttaattagtgatttcacagtatcctttcgcaggccgatccccactccaaccgttccctcagcaaccccaggggtgtcagacggggcacccttctgtcgtcttctcgcagccgtatagtagtagtagggccgc

SEQ ID NO: 445054 - DNA, 861 bp, Homo Sapiens
cgagcgccaagtacggcccgggcccggcgcgactaggggcagtgagggggcgggccgggccgcgtggagtcgggctgacccgggtgaccttggccaggccacgtgggcgccccctgtctccgtttcctcctctcggagttgtgccgggaacgcgcaccaccggccttcaccccttagggcgcgggaggggacgcaggggaaatcgaagctgccagatgcccacgaccacaacgtcaccctccagattgccctctcggaggggcccagtccgcgcaggtggctgctccctactgcctgagctgtggctgagcagcagattggggagaaacaggctctcgcaccttgtcctttattcgacgatttcttcaatggacagaattattagatcctacaaatgtgttcatttcagttgaaagtatagaaaactcgaggcaactattgtgcacaaatgaagatgtttccagccctgcctcggcggaccaaaggatacaggaagcttggaagcggagtcttgcaacagtgcatcccgacagcagcaacctgatccccaagctttttcgacctgcagcgttcctgcctttcatggcgcccacggtatttttgtcaatgacgccactgaaagggatcaagtccgtgattttacctcaggttttcctctgtgcctacatggcagcgttcaacagcatcaatggaaacagaagttacacttgtaagccactagaaagatcattactaatggcgggagccgttgcttcttcaactttcttaggagtaatccctcagtttgtccagatgaagtatgggcctgactgggccttggattaaaagactcttacctgtgatcttcctcgtggcaagcca

SEQ ID NO: 445055 - DNA, 977 bp, Homo Sapiens
gggctccacgcgcggcctggcggcggcggccactctaaccagcgcaaaatgtccctggaacaggaggaggaaacgcaacctgggcggctcctaggacgcagagacgccgtccccgccttcattgagcccaacgtgcgcttctggatcaccgagcgccaatcctttattcgacgatttcttcaatggacagaattattagatcctacaaatgtgttcatttcagttgaaagtatagaaaactcgaggcaactattgtgcacaaatgaagatgtttccagccctgcctcggcggaccaaaggatacaggaagcttggaagcggagtcttgcaacagtgcatcccgacagcagcaacctgatccccaagctttttcgacctgcagcgttcctgcctttcatggcgcccacggtatttttgtcaatgacgccactgaaagggatcaagtccgtgattttacctcaggttttcctctgtgcctacatggcagcgttcaacagcatcaatggaaacagaagttacacttgtaagccactagaaagatcattactaatggcgggagccgttgcttcttcaactttcttaggagtaatccctcagtttgtccagatgaagtatggcctgactggcccttggattaaaagactcttacctgtgatcttcctcgtgcaagcccgtgggaatgaatgtctacatgtccccgaagtcttggatccattaaggggattgcggtcatggacaaggaaggcattgtcctgggtcattcccagaattgctgggacaaaggctgttagagaaaacgctagccatccagaaatagtgcatgtttgggaccctcagttcttgattcctgaagttcttcaacctaactttttaaaaggacccagtatttcaggaaaaacccaggtcatgtggatttgaaactgtcttgtaactgtcctggcatggaactgatggtggcatttcttttaatttttcaa

SEQ ID NO: 445056 - DNA, 1385 bp, Homo Sapiens
caaatcctcaacttgagacaggtttattagttaattagtgatttcacagtatcctttcgcaggccgatccccactccaaccgttccctcagcaaccccaggggtgtcagacggggcaccctcccactgtcttctccagccagccttaaaaaccccagagacgccagcctgggaacgatctcagtatggaatctgaagtcgccttgtcagcacagacacctctggggtccccagaagacctgtggcaaagttctctaaaccgaacctggagaggggaaggttttcaagcaggaaccacataaattcacctaaaactcacgcctacacccctctgtgataaaagatttctgtttcttctgttggagactgaattttcttcttcaagactaccagtactgtattctgtccaatctgtggaaatatactaaaagaaaatggcaccatcagtcccattgccaggacagtacaagacagtttcaaaatccacaatgaccctgggtttttcctgaaatactgggtccttttaaaaaagtaggtgaagacttcaggattcagagctgaggtcccaaacagcactattctggatgctagcgtttctctaacagcctttgtcccagcaattctggaatgacccaggacattgccttccttgtccatgaccgcaatccccttaatggattcaagacttcgggacatgtagacattcattccactggcttgcacgaggaagatcacaggtaagagtcttttaatccaagggccagtcaggccatacttcatctggacaaactgagggattactcctaagaaagttgaagaagcaacggctcccgccattagtaatgatctttctagtggcttacaagtgtaacttctgtttccattgatgctgttgaacgctgccatgtaggcacagaggaaaacctgaggtaaaatcacggacttgatccctttcagtggcgtcattgacaaaaataccgtgggcgccatgaaaggcaggaacgctgcaggtcgaaaaagcttggggatcaggttgctgctgtcgggatgcactgttgcaagactccgcttccaagcttcctgtatccagttttgcaaagctggtcctcctttggtccgccgaggcagggctggaaacatcttcatttgtgcacaatagttgcctcgagttttctatactttcaactgaaatgaacacatttgtaggatctaataattctgtccattgaagaaatcgtcgaataaaggattggcgctcggtgatccagaagcgcacgttgggctcaatgaaggcggggacggcgtctctgcgtcctaggagccgcccaggttgcgtttcctcctcctttccagggacattttgcgcatcccaggaattccggaccg

SEQ ID NO: 445057 - DNA, 828 bp, Homo Sapiens; identical to SEQ ID NO: 121831
  misc_feature (82)..(82): n is a, c, g, or t

SEQ ID NO: 445058 - DNA, 292 bp, Homo Sapiens
ggttatatccaaatcagacttttaattttcacagatatgccaaattgtctgttccaaagatgggcatcacaatacatcccattccatgtgcttctcttgctatgtaacactgacactccttccaacaggtggtagaagtctgtcttctccccgtgctcctaggaagaccttcatgtcctccttgaccaacaggggatggtgggaagtgactctgtgtgacttgtgagacaagattctaaaagtcatgcacttctgccttgttctcttgggataactgctcttggaacccagc

SEQ ID NO: 445059 - DNA, 660 bp, Homo Sapiens
gagaagacgacagaaggggctgagtgactccttgagtagcagtggctcttcctagagtagccatgccgaggccggggcccccacccctcctccagggcaaccccttggtcctacagcaagaagccagaactgttggaatgaatggcagccctccctggagaggcagcctgtttactgaatacagaggatacgtttacaaactgaatacgcataataaataactgcacattctccatccacaggccatggcatgaaggcccaagtgggtctatcaaaggcccacatctccaaaccccctgtcctgccctcaggaccaggcccaccctgggcaagagagaacgtaagccccagggcttcaggtccccagagacacttggggaactggggggaaattctgaggccatggggcttggttctccactgcctcctgcccagggggcattggggacggtaggaggatgtgtctaaggcatagtcgacttggcacagagtggtctctttagttttgtttcccactggaggtggcacatgcaggaaaagggcctggcccaggctgccgaccggcagaagctgagtgggaaccaaaccctcctgcaatggcaggggccctgccgtcaagctaaggccaaagctgggccctggccccattctacccactga

SEQ ID NO: 445060 - DNA, 357 bp, Homo Sapiens
ggaatgaatggcagccctccctggagaggcagcctgtttactgaatacagaggatacgtttacaaactgaatacgcataataaataactgcacattctccatccacaggccatggcatgaaggcccaagtgggtctatcaaaggcccacatctccaaaccccctgtcctgccctcaggaccaggcccatggtgaggacaggggctgctgaaggcacagagaaagggctggagccagacattcttcacctactgtgggccacataggcctatctccagagagggcatcggacccagatggcaccacagtgtgtggccaggctgggtcgtgctgcatgtgtgcacagccaggcggctca

SEQ ID NO: 445061 - DNA, 149 bp, Homo Sapiens
gcaatttgatgtttgttttttaatagatattacaaattaaaaatctcaaaacctgtggaaaaaagtttttaagaacagtctaccttggtaaaacatgcatactctcaccccttctgtcgtcttctcgcagccgtatagtagtagtaggc

SEQ ID NO: 445062 - DNA, 587 bp, Homo Sapiens
  misc_feature (38)..(38): n is a, c, g, or t
  misc_feature (60)..(60): n is a, c, g, or t
  misc_feature (66)..(67): n is a, c, g, or t
  misc_feature (92)..(93): n is a, c, g, or t
  misc_feature (105)..(106): n is a, c, g, or t
  misc_feature (134)..(134): n is a, c, g, or t
  misc_feature (156)..(156): n is a, c, g, or t
  misc_feature (166)..(166): n is a, c, g, or t
  misc_feature (179)..(179): n is a, c, g, or t
  misc_feature (186)..(186): n is a, c, g, or t
  misc_feature (218)..(218): n is a, c, g, or t
tgtagagacaattgtgccatgttgcccaggctggtctncaaactcctgagctcaagcaancccacnnccaccttgaccttctaacatgctanngaattacagacnnatgagccactgagaaccagccagagtanttttctttactggtcaggtacnatgagatganttcagggctcatncttgtantttctcccaatctctttgactaggaatcatcncctgttccccttttttgtggatagtatttaggaactaataacttggcagttggtgtgcttactgttactgaggtgtcattgtgtttaggtcctctcagtagaatgaacacaaaatatatgcatatgtgcacacacaacaatttatttatttgttcctatatatttaaaagatatgagttctattctaatgccacactccaggttttctagctctcctcattcctatttttataaataccttctctaatggagaaatcttgctgtcatcattctcaacatatttatttgctcagtgttaccaatctctcaacaatgctgcccatctcctcccttctgtcgtcttctcgcagccgtatagtagtagtaggc

SEQ ID NO: 445063 - DNA, 271 bp, Homo Sapiens
  misc_feature (165)..(221): n is a, c, g, or t
gaatgtcatgcaataattcacagtcccaagcccacggttttcaaacaaggtaggaaaaaaggaaaaaagaagcaaaggaatcggtggtgatggtgggtttttcttcttcttttgttgtttcaagcaggaccaaatgtcagaaaaaaatgcctcttttctcaatcnnnnnnnnnnnnnnnnnnnnnnnnnnnnnnnnnnnnnnnnnnnnnnnnnnnnnnnnnattcctgcaggcagtaatagtagggtttggtataacccggcaagcactct

SEQ ID NO: 445064 - DNA, 214 bp, Homo Sapiens
tctttctctttttcgcccggtagaaagggtttatttatgcgcaacggttcacacaagccttcctgaaattccactttacagtaaataaagctgtgcgtttccccttcccatgcacaactgcgtatcaatctacaactgtcatttaactgtgaaaaaatagagcgtctccccttctgtcgtcttctcgcagccgtatagtagtagtaggcgccgc

SEQ ID NO: 445065 - DNA, 1018 bp, Homo Sapiens
  misc_feature (150)..(158): n is a, c, g, or t
  misc_feature (175)..(237): n is a, c, g, or t
  misc_feature (242)..(365): n is a, c, g, or t
  misc_feature (379)..(392): n is a, c, g, or t
  misc_feature (401)..(551): n is a, c, g, or t
  misc_feature (948)..(948): n is a, c, g, or t
  misc_feature (990)..(990): n is a, c, g, or t
ccccccttttttccccggggggaaatttttttcccaaggggcccaaggtgtgaattccctgggggattaaggttatcaacccccctttggaagggtttccatttggggggaatttttattgattttccccctttcttcaaaaaaggcccnnnnnnnnntaaattttatttaaaannnnnnnnnnnnnnnnnnnnnnnnnnnnnnnnnnnnnnnnnnnnnnnnnnnnnnnnnnnnnnnaaccnnnnnnnnnnnnnnnnnnnnnnnnnnnnnnnnnnnnnnnnnnnnnnnnnnnnnnnnnnnnnnnnnnnnnnnnnnnnnnnnnnnnnnnnnnnnnnnnnnnnnnnnnnnnnnnnnnnnnnnnnnnnttaaaaattttttnnnnnnnnnnnnnnccccaaaannnnnnnnnnnnnnnnnnnnnnnnnnnnnnnnnnnnnnnnnnnnnnnnnnnnnnnnnnnnnnnnnnnnnnnnnnnnnnnnnnnnnnnnnnnnnnnnnnnnnnnnnnnnnnnnnnnnnnnnnnnnnnnnnnnnnnnnnnnnnnnnnnnnnnngcccggtagaaagggtttatttatgcgcaacggttcacacaagccttcctgaaattccactttacagtaaataaagctgtgcgtttccccttcccatgcacaactgcgtatcaatctacaactgtcatttaactgtgaaaaaatagagcgtctccccttttgtcatcgttctggtaacatttggagtagcatctgacagaacggagctgctcactcctgggaccggttatttggttaaaacccaaaatgttaggtcgaaagaatcaatcgtcacccaatacaaataaatattgcgttatgaaagagacgggcagagtcccacggtatccctttttaaaggcgggcatttccagcacagcaggcgtgggcgcttcacagaggaccagtcagggcgcanttttgggggttgccacatggggacacagctgcaagttacccntaggcaccgtcccgtccgtacgggtttc

SEQ ID NO: 445066 - DNA, 1223 bp, Homo Sapiens
  misc_feature (336)..(336): n is a, c, g, or t
gcttgtcatctccccgagggcggcgatgaacaccgcgcggggggggtatagttgtatgaattttgctccccacacccgaagagattttgtttctctcaaaacaatatgcccgggtataaacaaggtgtgcccccaggcggagaggttaatatagaaccgccccgtttctttaagtaataggatgggcctcactttgtgggcccccctttttccccggaccagggggctggtatagaattggagcccctgagggaattattcataagggcggcgccccttgtgctctttgtctgcaggacgatttaggcgaaatgggtctctctttcgtgggttctnggggcagaggagggttttattctggacatgggtggctgggtggtcagtcccccagcaagatagaggcctcacgcacatgctgccggaccactcgatctaagagggtgtgcacatctcgggcagcctgggcagcagcctccaacacccgctccaggtggtcctcgtgcagccgggcatccatctcaagcagcgcaatctgtcctgaggctggcagcagggccagggccagctgggggccaccagctgcttcctccacatggctgaggtccgccagggctgtgccgtccacgaagccagctgagcacgcacacacaaagtctctcatgggtatcccggcatccagcactgccagcgtggctgcattcacacaagctgcataggtcccaccatctgcctgtagcacctgcacatagatatcaatctgggagcgtgggtgcagctgtgtgaggatggctgcttcgaaagtctggcggagctgcaggcccatctcacaggacttacggtccccatgtggccgtcgcttgcgctcacctgtgctgaaggtcgctgaactatattgacagttcactagggccctgtccggcagggctcgagcccgggagccccggatctcgtgcgggccgtagaccacagccagtgccttggtgttgccctgctcaatgtaggccgagccgtcagcctgcgcgaacacgcccatccgcgcctggatcttgcgcagctccccggcgcgccgcccgtccacccggtagccctggtccgacaagagctccagccccgccatgctgcccggccgccaggtccgctctctgcctacttctctgagccgcgggagaactacagctcccggcggctccgaccgcccggaatctacggtttccggaggtccg

SEQ ID NO: 445067 - DNA, 489 bp, Homo Sapiens
  misc_feature (15)..(15): n is a, c, g, or t
  misc_feature (27)..(27): n is a, c, g, or t
  misc_feature (62)..(62): n is a, c, g, or t
  misc_feature (110)..(110): n is a, c, g, or t
aaactgggggaacantccaggaccccnagaaagagaacaaaaagaggtttcaagcccccccnggcatcaagcctcctattccaaaaactgggttccagaattttaacagnctcctggggccttttcctgaatgtggaatcacaccctatgcctcaaagaactcagctctttgaacacccttaagtaaatttctttccctgacagcatgactcctccctaaaggcaaccctggtagacctcatcacactgtaactgaagagtcactggacacagaaatggaaaacaggagtcgattttccgtcttttggattgcagctccactgactgacagtaaagctgcagtgattgaggactgcaccagagttctgaagggatcttaaccatcacaagtttttaccctcttccttcatgcctgacctcaaccccgctctcctcatcctattcctaaattaggctaataaagtgaaattggtatactttccagtcaaa

SEQ ID NO: 445068 - DNA, 357 bp, Homo Sapiens
  misc_feature (325)..(325): n is a, c, g, or t
cattcttaagcacaatttttcaggtatccacttaaaacattcacatgacaccaaattacaaggcatttcttttttatctctggtaatcaagcgaagtttgtttgtacttgaatgtttacaatttaaaacactcaaggaatatgagagagcacaagtaacgtatgaatagggaatggcgcctatgagactgacaatgaacattctctttgcttgctcacaggaagctattagattgttgctgctgtggggttgaattctgttctctccttctaccctccctgtcaaattcatatattgaaggccctaacccccagctgctcagggntgaaatctcatttggggggacagaggggtttt

SEQ ID NO: 445069 - DNA, 464 bp, Homo Sapiens
gatttctaaaacatttttatttcaaatctcttttcacccctccccaaaaagacatgggtaggtacagcaatcataaaaaggagatacaaacacaagagtcaaatgtctctcgcactgacacttacaaaaaactgggaattgtacatggggtttccaaacaggacctgcagcagctactaacgtccctttacgagagtcaaacatgcctattaatacagtatatacagacaccccattctggaactaatctacagggacatccctaaccccaccccctctatccccagaaaaataccaaaacacacccaaagtgcatttgttttgtttatatcaaaacctctttccctttccccatcccaccctcagacccctcccaccccatttaagattggcctgcaagtctattttaaccatttagtatttttttatagtttatgaaaataaattatacagcaactatttta

SEQ ID NO: 445070 - DNA, 952 bp, Homo Sapiens
  misc_feature (872)..(908): n is a, c, g, or t
ggggattttattgagagcagtttttgcgtaccaaaagggtgttgggcttgcatctgtcattggcaggtgtcactgctggtggtctctttactgccatcagttggtcggccaagactgcaacaaccacgatagccccaagcagcagtaaaatcaccatgatcatcccacaagaggctgactttctgtccaccatgtttacccgcctggtttcattgcgaagtttttcatctgtgttctccactaggttggcaaggtcgtcaattatctcattttgttcatccaattcattcccaatttcctgccccatttgtttttggcgacttatgatagaggaaagggcatcaaggcctgcatcctgttcttggataattttctgctgctgttgccggatttcatcaaaacccaagcctctggtctcctctggctcctcaaagagccaagggttgggtgctcctcgcttagcctcttcactcatcaggctggacctgattagatctggttcggcaccctcattcttaaaggatgccagaagtagtctctctcgagttacaagatcatccaagaggttctgtcttcggtccccttcaagctgtgttatctgatgtgttgacacagctcttagcaataagtccttcaaaagggcgatcttttccttcaggttctgcaacaaagctctgattgtcacggtaagctttggtgccttttcaccttttcgttcatattgatttcgttgttgaattttctcagcaatttcttgggcaatttgacaagtagaatcgtatgtggagaaccaggggtccggtgccatcctgcagactccgcccgccgctcccgctctcgacgaattcgagctcggccgatttggcctgatnnnnnnnnnnnnnnnnnnnnnnnnnnnnnnnnnnnnncgccgccaccgcgtgaactccagttccccatgtattagttgttc

SEQ ID NO: 445071 - DNA, 643 bp, Homo Sapiens
ttttcagagctttgggggaatttattgagagcaggttttgcgtaccaaaagggtgttgggcttgcatctgtcattggcaggtgtcactgctggtggtctctttactgccatcagttggtcggccagactgcaacaaccacgatagccacaagcagcagtaaaatcaccatgatcatcccacaagaggctgactttctgtccaccatgtttacccgcctggtttcattgcgaagtttttcatctgtgttctccactaggttggcaaggtcgtcaattatctcattttgttcatccaattcattcccaatttcctgccccatttgtttttggcgacttatgatagaggaaagggcatcaaggcctgcgtcctgttcttggataattttctgctgctgttgccggatttcatcaaaacccaagcctctggtctcctctggctcctcaaagagccaagggttgggtgctcctcgcttagcctcttcactcatcaggctggacctttggtgccttttcaccttttcgttcatattgatttcgttgttgaattttctcagcaatttcttgggcaatttgacaagtagaatcgtatgtggagaaccaggggtccggtgccatcctgcagactccgcccccccctcggccc

SEQ ID NO: 445072 - DNA, 616 bp, Homo Sapiens
  misc_feature (383)..(383): n is a, c, g, or t
  misc_feature (523)..(523): n is a, c, g, or t
  misc_feature (531)..(531): n is a, c, g, or t
  misc_feature (542)..(542): n is a, c, g, or t
  misc_feature (573)..(573): n is a, c, g, or t
  misc_feature (599)..(599): n is a, c, g, or t
aggggggaaatgatgtgcttttatgggaaacaaaaatatccaacaacaataacaaaagcccttcaatctcgccaagttcttaaccagtgacaataaggcaacttccatgattgcgtctggctggggatgattctaaagggtcaggaaagtgaaaagacattggccaaaaagagaagttgcagggagggctgacatcctacatgagaacacagcagacttccctctggcccctcaccctatcaccccttcaatttagaatctccccccaatctacaaagatccttcctgaatttcctcagatgcaatctcttccagaaagctttcctggggtctgctctagctgcatatgacttttcattaacatcacggcacactttcttcanttccttctccgatcactttctgccttacatccgttatgtttggggtacatgccttacggtacccgctattggtagggatatccttgaggaccgagtcccgggttgattcaccccgtgttcccttccccttccccttcagnggttcagnatttaggaggngttcaacataggggggtcagtgaggggtttntcatttaaggcggtttacattggccngtcaatggcaggctttg

SEQ ID NO: 445073 - DNA, 394 bp, Homo Sapiens
  misc_feature (168)..(281): n is a, c, g, or t
  misc_feature (334)..(334): n is a, c, g, or t
ggagatatatattcacgaagctttattgcagctgtttcccttacccagttgaagtggccagtcattttaatttgcagttctatttacattcccaaggtaaccacgttcagtaactctctagaggctaagctgttaaaatttccatttttatacaaatagcaaagatannnnnnnnnnnnnnnnnnnnnnnnnnnnnnnnnnnnnnnnnnnnnnnnnnnnnnnnnnnnnnnnnnnnnnnnnnnnnnnnnnnnnnnnnnnnnnnnnnnnnnnnnnnnnnnnnngtttgagacagagtttcgctcttgaccccgaggctgggagtgcagtggcctgnatcttggggtgacaaaggcaaggactccatcccaaaaaaatggaatgaattaaattaatt

SEQ ID NO: 445074 - DNA, 694 bp, Homo Sapiens
  misc_feature (86)..(224): n is a, c, g, or t
gtggggattccaaccctagtcttggccccggtttttttggggacaactatggccccgttctctttcctcttggggccccgcgcccnnnnnnnnnnnnnnnnnnnnnnnnnnnnnnnnnnnnnnnnnnnnnnnnnnnnnnnnnnnnnnnnnnnnnnnnnnnnnnnnnnnnnnnnnnnnnnnnnnnnnnnnnnnnnnnnnnnnnnnnnnnnnnnnnnnnnnnnnnnggcttccaataaaaaataattcaactttattagtatgaaatattttgagataattagtgacccaaatgcatgattctccaatatgaaaggtgttcagcataagcatacaatcatttagtaaaactgctctttatgagacccccagaaaagctggaggcacttcctctttttggtggagagagaagacactacttaactggccatttccttgctggagtttattccgattcccttttgtctgattcttcctcctcaaactcgactaaaggagtgtgtctgttggcctgagcaccttctctgtagaacactttctttactgtgccatcctttggagactttatggtatgctccatcttcatggcgatcataaccatgagggaatctcccgctttcactttgtctccagctttgacaaacaccttttcaatgggttccagtcataggagctaagggggccgccctgagtttct

SEQ ID NO: 445075 - DNA, 575 bp, Homo Sapiens
tttgatctggaggagggggtaatttatttaatttgttgactctggcttacaattttgtcttctgtttccatatctgggtcattagaagccccttcaatcccatcatcccttttcccttcaaatcagggcaactcagagatagctttcttggctggggggcctgttggcttttccttttctctcgctttttcctcatacatcaggatcatttttaggatggcagatctcttgcccagcatcatcctgagaaagtcagggtagctgaacgtctccccggagccactggacacctctccaattaatttctttagctctaggtgagtcttggggactccaagtttctccagcattcgtttcagggacatgatatcaatatcgccatttccattaaggtcaaactccatgtatttctctttgaagccttccagtttggagggcagatcctcatcactgctatatttgggatcgtctaggaattgcttgttgatctcatccagcctctcttcctgctgggccttcagcagtccgaaagcttttcctccaagctggaggcctctgtctgcaggcctcgtgcc

SEQ ID NO: 445076 - DNA, 646 bp, Homo Sapiens
  misc_feature (72)..(73): n is a, c, g, or t
  misc_feature (81)..(81): n is a, c, g, or t
tcggggagggggtatttattaatttgtgactctggcttacaatttgtcttctgtttccatatctggtcatanngaagcccnttcaatcccatcatcccttttcccttcaaatcagggcaactcagagatagctttcttggctggggggcctgttggcttttccttttctctcgctttttcctcatacatcaggatcatttttaggatggcagatctcttgcccagcatcatcctgagaaagtcagggtagctgaacgtctccccggagccactggacacctctccaattaatttctttagctctaggtgagtcttggggactccaagtttctccagcattcgtttcagggacatgatatcaatatcgccatttccattaaggtcaaactccatgtatttctctttgaagccttccagtttggagggcagatcctcatcactgctatatttgggatcgtctaggaattgcttgttgatctcatccagcctctcttcctgctgggccttcagcagtccgaaagcttttcctccctgtaaatccctggtttggctcatagctcagcagatgctggtagaggtggggagacagaccaagctggaggcctctgtctgcaggctctccttctctcccaccagtcttctcccc

SEQ ID NO: 445077 - DNA, 859 bp, Homo Sapiens
  misc_feature (330)..(370): n is a, c, g, or t
cggggcaggaggatgggattgggagaagttggggagaaccctctctctcctctcccaccttccgcatccccattctccttcctcccactgtggtaggtgggccccctcccgaaatcatgaggaatggagcatgtagggagagacctctgtcttcttaggcctgcacaccaccctgcccccgcaaatcacccgtttctcaccaatatcgccatttccattaaggtcaaactccatgtatttctctgggtgaggggagagagcagaagggataagcgctggctggagggttttcagcaggggactgaggaaggggttgccaaccaactgctnnnnnnnnnnnnnnnnnnnnnnnnnnnnnnnnnnnnnnnnngaggaagtgggtttggtgagttgaggggccccgctagggtgtaaggagctagaagggatgctgagagaggcaggcccgggataagggaccgcagtgtggcaggagggcaataaaggcaggttccccttttgctaccacaaaagtaaacttttgtatctctgctgttcctgccttgttcttgtggaaatcctaaccctcctaccgcccagccctgtctccaccgcctacagtttccccctcacctttgaagccttccagtttggagggcagatcctcatcactgctatatttgggatcgtctaggaattgcttgttgatctcatccagcctctcttcctgctgggccttcagcagtccgaaagcttttcctccaagctggaggcctctgtttgcaggctctccttctctcccaccagtcttgctcagaagccttcctcccaaacttccccccgctctcgacgaattcgagctcggccgatttggcctgat

SEQ ID NO: 445078 - DNA, 714 bp, Homo Sapiens
cagaagaaaacaaaatgtcagtacattttgtattccatagcattgctctgtggaaaattagctggcatccattgtaaatgaaccctgctgacccttcttccattccgtggcctgaataaaaaatatcctcgactttgacttgcaaagggacttttggaattcttcgtccacactgaatctcttcattcttctctcatgcaggtgaggaacgagctgcagcaacggatgcacaactgacgacacaacatttgacttgcccaacttctgtgtcttcgaataatgaaataagaaccttttagtattatctttttcatcttgttcctgaggctttggtagcattcccataatcataaagcaaagctcctccagtgcgttggattcctgaggctgagaatcaatggacagaaaagacggaacaagtatcatctatctcattccacaactgtagctgttgttcaggctgtaatccttgaggtaataattggagcacctcggcgggcgcccgcgcaccaggcgagcagcagcagcagcagctggagcggggacgccgcggccacctgtccggcgggcgacctggggcggcagctctctgttcgcagcatctcggcggctgcgggaggctcggtgctatgggacgctgcgctgcgccgacgcgtagctggtgctccacctggtgcctggctgtgcctcggggcccggacacaggactccgct

SEQ ID NO: 445079 - DNA, 158 bp, Homo Sapiens
aatgcccaatactttgacgaacttctgagactgatagattaaagaagggaatggggaatatgcaataaaaggattttataaaagtgaagctacagggctctgatttatataataggactaaggcttaggcatataaaaatgattaatcggctgcgtca

SEQ ID NO: 445080 - DNA, 187 bp, Homo Sapiens
cgctggctgcctatctttatttctattgtaaagtttccatatttgcttcaattaatttacatataattactgtacatgagagataatgttatgacaagaatagtttctgcaacattaagtatgggtcaaaaaaagaagaaatgggccaggcgcggtggctcatccctttgggagggctgcggcaggt

SEQ ID NO: 445081 - DNA, 145 bp, Homo Sapiens
gagaggtagggtgtctttaatgaaggggctgggcattaagagcacgggggggaatattcgtgctttccttgggaaagaacggagatttttcccggaatcaagaaacccctttttttctgtcccttctgtcgtcttctcgcagccg

SEQ ID NO: 445082 - DNA, 238 bp, Homo Sapiens
gtatatgtaatgccagggtgaagaatttggttttattttgtagagtatgaagagctagtgaaagttcacaggagattaacaaaataaaaattaaggatttaggaggaacagtggtaagaaagaacatgtaggaggcttttgcagtatccagtaatgagatgtaatcacttggattaggattacgccaaagaaaaacattacaaagaaaaaaaccccttctgtcgtcttctcgcagccg

SEQ ID NO: 445083 - DNA, 674 bp, Homo Sapiens
ttttttttgtggtcatgattattattacagtttattacaccctctttgacaacaggtatggtctctgcggtctttagcaagagagcacacaaaacagcatgacttaacttttggtattatgagtagatgagaaattactatgaagataaaagttgaaactatataagcatgaaaagtaaaatttacatgaggaggaaaaaattccttaagttgtatgcacatggttaacgctgacttcacagtgtcttaacaatttgccaaaattataaacttgatgtaatccaagactgaagacagttaataaactgttttgaagaaacatgtacagaagtcttgtttgaataaaaaatacatattagtcacatataatcaaacaactgaaaatgaactgaggcattacattgagctacgaataacaggaaacacttgaaatttcctgatagaggaaagtgctcattctcacatcaaagtcctgggtgaggccagtcactgcacactacagcagaagaacaagctcccttctggttggttttgacagcagcatggtagctatcaggctgaatcaagaatacagtcactactagtatgaacaaaggtgcttactacacaaattagaccgtatgccaattccgtctacagactaggggagtcagagcatcacagaatattccccc

SEQ ID NO: 445084 - DNA, 804 bp, Homo Sapiens
taaacaataaacagaatttattagctcatataacaaaaaaagtccagaggtaaggccaatctcaagcaaggcttgatcctgtacttaaacaatttcaccaaggacttgatctctttctgcctctcaactctcccttcagtggtgtcagcttcacgtgattcctggtcatgatcccaaggcccaaggtggtcatcataaagacccaggaatactactacctttttcacattcaacaggggaattaaaacagcttctacccagcattcccataagtcttgaaattccctctggcttcattgtcttaactcacaagatcatacctaacccagtcaccatagctggaaagatggaaggtgtcattggcttagtccaggacatgtattccacccctggagaggctctggcagatcatatgaattcccaaacagaaatggggggttgctgggaaaggaaatggaggaatgaatgtggatgcaatcagcaagacctaccacttcccccattttatggatgggaaactgagactggagatgggaaaagctttgtccaagatggcagataagagctgggactacaacctggcctttcagtctgacgactctacattatttccactctactttatccccaccttgttcagaccaactcacccaatattgagtggtgataaataggaagtcagacgaatcaatttctccctatagtgaaatgaacccctttggagtcatcacatttcagatacctccatgggtttccgagcagtcagcggaaaacaaacctgtgtcccagccctggatgaggcat

SEQ ID NO: 445085 - DNA, 446 bp, Homo Sapiens
  misc_feature (387)..(387): n is a, c, g, or t
tttaaacaataaacagaatttattagctcatataacaaaaaaagtccagaggtaaggccaatctcaagcaaggcttgatcctgtacttaaacaatttcaccaaggacttgatctctttctgcctctcaactctcccttcagtggtgtcagcttcacgtgattcctgggcatgatcccaaggcccaaggtgggtcatcataaagacccagggaatactactacctttttcacattcaacaggggaattaaaacagcttctacccaggcattcccataagtcttgaaattccctctgggcttcattgtcttaactcacaagatcatacctaacccagtcaccatagctgggaaagatgggaagggtgtcattgggcttagtccgggggncatgtttttccaccctggggagagggtctgggcagatcatatggaatttcccaaacaga

SEQ ID NO: 445086 - DNA, 341 bp, Homo Sapiens
  misc_feature (154)..(154): n is a, c, g, or t
  misc_feature (217)..(217): n is a, c, g, or t
  misc_feature (242)..(242): n is a, c, g, or t
  misc_feature (252)..(252): n is a, c, g, or t
  misc_feature (261)..(261): n is a, c, g, or t
  misc_feature (304)..(304): n is a, c, g, or t
  misc_feature (321)..(321): n is a, c, g, or t
  misc_feature (326)..(326): n is a, c, g, or t
gaggttctaaaatttacttatttacttaaaaaatctcctgcactgaaggaaaatagtataaattacattaccaaccttcaaaagttagcatgtaaagagtattctgtcttcaaaccacagcctctctaaaatagtctgtaaaaaattcataggngaaaaacaaatctagggacctcaaatgcactgatttataatattcttaaatattaaaaaaggnaagtaaactagcggtgtgggtaagntgaagcaaantttcagggntttaggtacctttaaaatgatcatacaatttctttagaggctnagcagtttaaggtaggnaatanatactaggtacacac

SEQ ID NO: 445087 - DNA, 427 bp, Homo Sapiens
ttttttctgaagttaaatagtgaatactctttttattcagaagaatgcatttttaatagaatttcatgcgccagtaaatcagtacagtgaggagttacaggggtggggaacctctcttcaggaaacatctcaccctggcagagctctcaactcccagaatcccctttacccagctcaggtgattagagaccaaggaacagcagatggggctgacttgcagggtaactggttggatttataggtctctgagagcaagagagaggagagggaaagctcttgtaaaggaggagattattatattgggaacgggcagttccacagagattctctgaggaggttgatgaaggagaattggcaggggtgcctggttctccttcttggttacactcttcaagggcaatggtctggtcccttctgtcgtcttctc

SEQ ID NO: 445088 - DNA, 1341 bp, Homo Sapiens
  misc_feature (238)..(258): n is a, c, g, or t
  misc_feature (639)..(654): n is a, c, g, or t
  misc_feature (656)..(656): n is a, c, g, or t
  misc_feature (659)..(659): n is a, c, g, or t
  misc_feature (661)..(663): n is a, c, g, or t
  misc_feature (665)..(665): n is a, c, g, or t
cggccccacaagggctgcgaaccccaaggtgtgtggcgttgtatatatcccccccttggtgggcggaatttttcaaagggtttttcacatctccaatagaccccggttttttgcggaagaaagggggcttttcccacaattgtttccgggcaagaggaaaatcgcccttataaaattggaaaatttttgccccaacccccagttttactttcgccgaaatagaaaggtggcgccaacnnnnnnnnnnnnnnnnnnnnntaaaatattttgagatctattctccggagagctttccccgcctttggggaaactattcccctggttggggaaataaagatcttccccggggttaatattggagccctttcaaaggaaaacttccccctactttggagattttttgtttcacagaaaaacgcctttcggtgtttggccccgccccgggggcgtgttttttttaattggggtgagggaattcccaaggccacctatgtccaagggccccaggattcttccttaaggaaaaaccagcctatggacccatggttcaactttaccctaactggggccccgccgcgccaaaaacgaatgtgtcctagaaaagctttctcggagggccggaggcgggcccgacaaggnnnnnnnnnnnnnnnncnttntnnntnttccagtgtacagatacgtttattgacaaataaagtacatgtacccctacacaagtatcactgcgacatttcaggaaccttggagctgggaacgccccttcctccctgcccgcctcttctctagcctcctcctgattgggcttgggctctctagaaaagtgcttctggcattgtctcgctggaaactctgtaggtgtgctggttgggctctcagtgtttatcatgtccacacccttctgtccctgggagctgtggacaaggggcgatgagcctgctcagtcattcatgtccagcccaaactctggatacaactctttggtggtgacacctcggatcacagctagtttgcccatcagcatctgccccacatccttgatgtcattgtactcgtgaagctgggtaatgtggtcctccagttcatccacactgtagccttcagatacgaactgggagatctccttgtccagcatgtccctcttctccttcagtttctgaatgtcaaggtgcagagactcctcgctggtcccatcacgcctggccagacttgggcaatggcctaggggatcggaaggccccgcggcaacttcagggtaagtcttggttcagtcctcctgagccctggggtccgaggcccccggatcagggggttcaatggccgcaagagggtccagcgcgg

SEQ ID NO: 445089 - DNA, 593 bp, Homo Sapiens
caaaaacatatgcaaaaacattttatttataatagatcaacatttttgacatgaaaggtagccactttcaatttctcaggaatgcctagaacccaacagttttcagaaagactacttagttcacaattatttcactgtaggtaaatgaaataatttcagaatgaactttttaaatggctttgcctatggcaaattgttttataaacttgaatgtatggtaagctagctttcccaggaaatgaatgtaatccaactatgttccaaatgtattaaaccagtttatacaacaaatatgagaatcacttatgtgcatcaactgtgctaaaacaagaattctttttatcaaaatattcatttttcaaaaaggcctcacattaacccctcaaaccaagcacccccttcctatgtccagcactcttttctacttcgagttgcatgactggtagagacaactgtcaaattccagtggaactggtacactggacttaagactctatggtaatatacatcaaacacaggaggtcactgactttaaggggacgaggtgataactaactaggttataattcagccaatggtcttttttaggttta

SEQ ID NO: 445090 - DNA, 468 bp, Homo Sapiens
ttttttgtgttgtccaaaccattttaatttgcaggaaaacacgactgactaaggaagaccattccaagtaaatctgattgtatatgttgtacttctagagaaatttagacatttgtaggaaaattattttgaaagattatatagatatttaagcaattttataatcacggaaaatggcatatttgaaaagtgttatcaaatatagagcaagaactctcaacaatgcatggtgtaaggtggctggtgtacactgtatgatcgtattagtcaacacttttgcccatggacttatggatagtgagagccaccactctgattaaactaaacaatttatccctgtaaagaaccacagaatattcttatcatcaattacaactcttagaaagagattcaaacctatgtcatttaccaactagacactaaagtttcttgtccttaaaagaaatttcacattattctgaaagaagg

SEQ ID NO: 445091 - DNA, 407 bp, Homo Sapiens
tttgaggaggacatttattgctagtcaggggggacaaggaaagctgacccaaggaaatgatgattcagctgagttgatagaggagtgaaatagtcatagtaggaaagtggagtggtgggagttgggaggaaagtactgtatttgaagaaccacgtgttcaagttctgcagcagaagggccaatgaagtacttgagtgttgtcaaaggcaatcaaggtaactttgctttccccaggaccttctcttttaggtctctggcttgactttctgccagcctgtccagggcacccttgtcacgcaacaggcctgtagctccagccaccaaccactcttttctccagtcccctgggtggtctttggcagagccaaaggccaggctttacttccagtgtctcctgccctcgtgcc

SEQ ID NO: 445092 - DNA, 451 bp, Homo Sapiens
tttcagcatcatgtgccattttataattatatctacaaatgatacgacaactcacaagatttagggatttctgaatgtttgtgaaaatattttgttttgtctgctgcttcttgttgatgtcacacatacccaaagacattccacgggtttaacaagtcttgggcatcttgtggaagactcagattctcatccatctcagagatggatggggaacttgacggttttaattctgtgcaccatgattgcaagggtcatctggtccagcatttcccaaacttctcttgagtcccattcacagagatatgcaatccaaccaatccctttgcaattgtgttcatgtcttcatgttggtgtgtcattttagtgtcttggcctgggttcccctcagaaagcatagcctgcaacaagggctttgtaagggaagattggtttgggagaggatctcagcaga

SEQ ID NO: 445093 - DNA, 491 bp, Homo Sapiens
tctccgtccaatttggttttaatcagtaatcatataagtatacccacataaccacctaagtggagagcagacgcccagattcacggtccccacgtgttgctggagttggcgcagacgcgtgtgcgggcatagcggcggacgtgacaccgcattttctccgaattcctgccatctagggtggtgccgccccaagagggggccgtggggaggtggggtaataggctgcgcaatccacttgctctgggggagcttagggttcagagcagagcgcaactccggggggctgtcgcacagccccattctcccacaccagaagagcaatgctccttatggatgattaatagccgggcttctcctgaccatgcggcgcgtccctgccggcaccacttagttgttttaatttgacctttattagcaacgtgctcccagaggctgcgagttggattcgcaccacgataacggccctctccccttccacccggccggcttcc

SEQ ID NO: 445094 - DNA, 955 bp, Homo Sapiens
  misc_feature (698)..(698): n is a, c, g, or t
aaatgtaagatatttattaaataaaaaggttacactatgatttttatacactgttgaaaacaatgacttttatttacttaaagccagcagtagttcccattactctcataatgttatagttaaggcttgatttagttccagaaaataaatagggtaaatttttaatatttccctagctctgtctgctatagggaatttcagagtatgaaggtaagatgaagcagatatataagaacatttttagataatgacaatttttccttaaaatttggtgaaaatttagtttcttctcaaaattctgtacttctatccataaaagtaaatttctattttagtagctctgtaagaactaggccagagaagagtattacccataatagtaaatagcaaatactttggcaagtctgaattagagtacaagtgaagacattcacaaacacactttttacatctcctggatgtggtacgggctgtatgttagaattaaagcatcacaactatctgattgtagggtgctggtgggcaatgcaatcaatcaacacgtctaccccaacagatgtggagacgcatggaaaaaatacatcaaccaaagtggtcagggagaacaaaacacagaaaacaccataaaactgaagacattatctcttcttgtctgaaaaaaggggtttcctggagcacagaaagtatttaatcagggngagtgcttctattcttttatcacaggagggcttgatgcagattcctggccattcatacacatctgggcagccgggaatcatattcactccggcatgttccttctttaacactatttgggctgtcttcaggttctggggtccggaaaggcctttattagcgtataggtgtttccgtaactttatgcactggtattggaaacttcccggaatttccacgcgggtaagcccctgggggagcctcttgtgagggttagaca

SEQ ID NO: 445095 - DNA, 459 bp, Homo Sapiens
  misc_feature (401)..(401): n is a, c, g, or t
tttttttaaatgtaagatatttattaaataaaaaggttacactatgatttttatacactgttgaaaacaatgacttttatttacttaaagccagcagtagttcccattactctcataatgttatagttaaggcttgatttagttccagaaaataaatagggtaaatttttaatatttccctagctctgtctgctatagggaatttcagagtatgaagggtaaggatgaaggcaggatatataaggaccatttttaggataatggacaatttttcctttaaaatttgggtggaaaatttagtttcttctcaaaattctgtacttctatccataaaagtaaatttctattttaggtaggctctggtaaggaactagggccagagaaggaggtattaccccatnaataggtaaataggccaaatactttgggccaaggtctggaattaggaggtacaaggtg

SEQ ID NO: 445096 - DNA, 1030 bp, Homo Sapiens
  misc_feature (953)..(989): n is a, c, g, or t
ccttttgtaaaaatgggacctttatttttgttttgattataaagtgaacatggtcatggctgaaaatctgtcaagcacagaaaagtataaagtaaaggtcgctcaaaattccactgcccagccagctgatactgacatctaggaggtgtcccactttggctcttattgatccctggtgtgcagacaggggtccccaggtagacagaacccctgaccaaggacaacaggaggcatttgctcttccagggtaagcatctgttttattcagatctgggtggctcagggcctccaggcagccagttttgcaggagattcagcacctagtgtcttcctgcctcacgctcccaagaacctgctcctgcagggggaacatcagaactcatccttgatgtcaaaatggggctggtcttcaggcttgaagtccaggttagggctgccatcctcattgagaattctccgggcagtgtagccgacgatggggtatttggctttgtacactttggtgaagacctcatccagggcctccagttccttggccgtgagacccgtagtgtcatgggtgaggtctgcaggatccaaggacatcttggctacccctctagtggagtccttccccgtcaaggcattgtagggggctcctcgtccataaaactcctttccggaggtgacatcaaacaccactcccttcactgccaagtagatgggctgatcttcctcctccccgccatagcgggccagctcctcctcggtgaaaagccgcactgggggcccccgctcggcagggcgcggtgtctgcccggcccgggctgtgggcagccccggggccagcgccaggaccagggccagcgctgccagcggccgcagccgccgccgcggcgcggggcccaccatggtgagcgcgcagcgcaaggcccgctctcgacgaattcgagctcggccgatttggcctgatnnnnnnnnnnnnnnnnnnnnnnnnnnnnnnnnnnnnncgccgccccgcgagagctccattcgcccatatatcgataca

SEQ ID NO: 445097 - DNA, 738 bp, Homo Sapiens
  misc_feature (653)..(689): n is a, c, g, or t
ctagggtaagcatctgttttattcagatctgggtggctcagggcctccaggcagccagttttgcaggagattcagcacctagtgtcttcctgcctcacgctcccaagaacctgctcctgcagggggaacatcagaactcatccttgatgtcaaaatggggctggtcttcaggcttgaagtccaggttagggctgccatcctcattgagaattctccgggcagtgtagccgacgatggggtatttggctttgtacactttggtgaagacctcatccagggcctccagttccttggccgtgagacccgtagtgtcatgggtgaggtctgcaggatccaaggacatcttggctacccctctagtggagtccttccccgtcaaggcattgtagggggctcctcgtccataaaactctcctccccgccatagcgggccagctcctcctcggtgaaaagccgcactgggggcccccgctcggcagggcgcggtgtctgcccggcccgggctgtgggcagccccggggccagcgccaggaccagggccagcgctgccagcggccgcagccaccgccgcggcgcggggcccaccatggtgagcgcgcagcgcaagacaagccgctctcgacgaattcgagctcggccgatttggcctgatnnnnnnnnnnnnnnnnnnnnnnnnnnnnnnnnnnnnncgccgccaccgcgtaagctccaattcgcccatagtgagtctatacatcc

SEQ ID NO: 445098 - DNA, 1684 bp, Homo Sapiens
tttttttgagatctaaatttattaatattttggattccttttctcagccaaaagctactatctgaattaagcttttcagtttaaaagcctggaagaccatccttagaagacattaaaaaattacttctgatacacacactcctaataatttagatagatatgaaaacaatctcaaataaagatcaaaaaataaagtccctgtaaaaataactttggttgctcccacccacacgtcatatgatgatttaaactgcaatcatgaattttgaaaaaatagacgtatcttatctataaaaacactaccatacaaacttgaaactaaaatgttatctgaagtgacacagatgttctaaatctcaaggatactgaaaaatacattttttattcgtaaaataaaagaataaaaccaatctgattgtgttattaggaaatttgttctggaaacttattcataaattattgatggaaattcttaatgtccattgtgctgtcacctaaaacagattcaatcattttcttgtaaagaaatgactgagtaaatgagtaaaagaataataagtaaatttataagctacaggttaaccatcacatattacaaccaagtatgactatgtgataacaacaagagtggtcacacagtacttaagatttggctgtgtccttaaggtcttactcggaaactatcacaccaacctacctttgggataattttatcagtagacacaggcaatgggtatctttttatcctgttttcttaaagtttgtatcactagtctataacagatagcaatgagatagttctagcaatagatgaagcaagggggtaactgtgttctagaagaaacatttatctgtcttttgatccaagtttctctattaattcttgaagaggtgccagctcacgcctatcaatcagattaaactcctgaacaaagaaaataaagtgcttaaaggaggtgttgaggtgggcctcctcttgcagctgcatcacagaatcaaagtgctggtgataaatatgggcataaaccctgaacagacgctttagaatagtctttgccacagacataaagtttttgggaaatgggacaccaatcttagaaggaaaaagagtttcatcatcaagctgatcttgaacccaagtcatcaaatagtcaatgtattttggtgcagaacatttgattggctttttaatattagtaccatctgcccagtgatattcatatctcggacctgcagacatgactggacagcttgcttcagtgcagaattctgtaatagttccatataacatgttgatctggttaaagaaatccacagtgttcacagcaatccattcattgagatcctctccctcaggcaacataacagcttgtctcagattcccacttcctagagttgcttctgcatgttttaagagttcatactgatgagatccttcagggatattcttctttggtttgaatgttttagaagagcggctgctgaagaggaagctcatcttcggtcctcagaggggaggcgaggggcccctggcccccgcctggatcaggattcggagctggctagagggagcggaccgtccttagctcacgggcagcggaagccgggccgccgccgctcggagccgggtttctggccgctgcgagcctttgcaaacctcggcgcccgccttgcccgcctaccc

SEQ ID NO: 445099 - DNA, 1085 bp, Homo Sapiens
  misc_feature (533)..(585): n is a, c, g, or t
cgccgggggaataaaaaatgtttttggcgatcaagattagatttgctgctccgcgttgatgcgccagatactttttctctatgaagcggggccatggctcatatttttgtccgcgtctttgttgtgttgagacacccgccttattgagtcaccctgttgttaaaggtttgttgaatatgtcttgccctgcttggggcgcgtctaataaatttctcgcccggtgaggggaggttgttttgtgtgccccccatatattgtgtctcctctccgcccggctgaagttgagggggtccgttctttttccacaatgatgtttcctcacgcttatgcgacgtcttttttgccaccgatcttagcagcgtttttaaaacaccgcgccctagtgtccctcgtcggttatatattagcgccgcctcctattatggggcccccctttttccataaaaaactcgtggtgctaccctgtaataacctgggccgccccctctggggggtattcttttagtcggcgcgccccccctttgttttgttgnnnnnnnnnnnnnnnnnnnnnnnnnnnnnnnnnnnnnnnnnnnnnnnnnnnnnattggagataaaaacagcgaagtcccacataccataccctacaagacacaaggtgcgcagacgagccttggctatgtaccggcgctgcaggaagaggctgtccgccgggcctgggctgctccagctacgcggggaggcggccccattgcaaagtgcagtttctccgcggaggtggcggtgggtcagtggcagagggccatggtttccatgttaaggaagcggacgtgcatcttggtctcaatgtcgatcccctgccagatcttcaggaagtcctcgaaggtgatcccctcgtacacctgatcaggctccatctgccccatgcacacgctggccgcctccatcatggccccgtcggcgatggagcgagcggactccttctcgatgtgagggtttcccgacagcagctcctcgaccacatttcgatattcttccagagtgatgcggccgtcgctgtccgagtcgtacatgtggaacagaaatctcagcttctccttccggga

SEQ ID NO: 445100 - DNA, 444 bp, Homo Sapiens
tttctatgttatcttcatcatttaatttccaaagtgctccattttagtttcccgggcagacagatgaagaaattgaaaggataagcagttgcctacaagttctaggactttcagcttctagaatattcccaggctccagccctcttcagttttgagctgagccttaaattgcttttgccttcccatagaaaggtttgttttcttctgtaactttccctgtggaccttcagaatagaagctggacttcggccttgtgtgacattttactttttaacatttatagggcttatgttaacttcgtggctgaaagagtcaagaaataggaggcagacttccagtgggaaattgaaccaaataaagaatgaagcattcaggccttcattcacactcaaatatctgcagcactgtattttctacactgcccttactcacttctaataaaat

SEQ ID NO: 445101 - DNA, 406 bp, Homo Sapiens
  misc_feature (161)..(313): n is a, c, g, or t
aaaataaacttttattttcaaacaattttagacttacaaaagagttgcaaagataatacagagtaattggttttatagcatcaatttaagcctgttctgatcttcttgatctattttatcactttaggataatgaaaaataagttcaggtagaggagctannnnnnnnnnnnnnnnnnnnnnnnnnnnnnnnnnnnnnnnnnnnnnnnnnnnnnnnnnnnnnnnnnnnnnnnnnnnnnnnnnnnnnnnnnnnnnnnnnnnnnnnnnnnnnnnnnnnnnnnnnnnnnnnnnnnnnnnnnnnnnnnnnnnnnnnngtgggcacattacctgtgggtttccagcttacttaagggagggcttgagggcagggaggaacttgcctggaggcacaaggaggttcatgggct

SEQ ID NO: 445102 - DNA, 574 bp, Homo Sapiens
tacactgtggaattagaaatatttattcagaatataagaatgtttgtaaaatattataaatgtctctgtataaataaatggagtttttaaaaaacaattctatatcaaataacgcaaagtagctattttacagcagctaaaactaaaggcatctggaaacatttaaagaatacaagtggagaatctaaaaaattacaaggtatagtacagtgttaagtagcaattttaaaatgagactttcagtacaaacagtagaacaatactgacaaatgcaaacttagtcacatgtgctttaataactgacaatacattcaagcaggtttttctaattcaagtgtatagcacatattcaaataataggaaacaaatctcatgcaaagtaaataaatcttgatgtctaaaaactgattagaactagaaaagaagtggacatgttttattatctttggcattacgttctaacaaaagcagattatcaggggctcttactcacttgccattcctgacatgagcactataagtgaatactatgagttctacaaacagaacatttttccacatgaatttgaccgct

SEQ ID NO: 445103 - DNA, 1013 bp, Homo Sapiens
tttttttattctgcgtcataggatggagttttattgggaggacattctggacgggctcccagcaagagtctggcaatggagcatgaaaatgaatgagcctggaatgagggagggtgcggcctcggctacacaaagttcacccggcccccaactgcctcccagcgtgttagctcctgtggcaactccccacttctctctctgtttttcaacccaaatcctagagcagagggctcttcgctcctcacaccatctccaccaggctgcagggggagtcactagcccactcaagagctctctcctgttggtccctgattcgcaggggcacgtcattccttcttggtaactcattctctttaacagcccgacacagggtctccaggaaaaggacaggagctcacacagtcatgaacagagatgcatctggagcaggaataaggatgctgacaacatctgtgtctgccctccactcttgtaagtgccagtaaggtagtacccagtccctgggggtagggggggtggtggtgggaatgagggcatctcttctttcaggggccaaatctggcacaaggatgtctgcttaggcaactccactgcctggcatgctctctccctaggaaaacaccaaaccttttttatttcctcagtcttagtgtgagagtgatcacctcttccaggaagcccacaaccagaatggccaggggcacaccctggccctcagtagatgggcactgagacaaaacatggcctgctggtggcattcccaacaatgtcaaaagtctcagggatgagctcacagttgggagtcctttggaagtccaattccaaatgtcctctggactcaaaataaaaactacatttcccagtctcccttgtagcttgcagtagccatgtgacaatactccagccaatgggaagtgagtggaaaagtcctgtgcagcttctgagttgcgtccaccatgggcatgggtgtgcttctacctccactcttccttcttctggctggagggcatgcc

SEQ ID NO: 445104 - DNA, 901 bp, Homo Sapiens
  misc_feature (539)..(573): n is a, c, g, or t
  misc_feature (642)..(650): n is a, c, g, or t
  misc_feature (658)..(749): n is a, c, g, or t
ttttttttaaagaagaaaaaaaactacataatttctaccagggccatattagcagtgaaacattttaaactgcagaaattgtggttttggttcagaaacaagttgtatatttttcacccctgattatgggaaaaaaatcagttctgtctttgtgggttgctctactatggagatcaacagttactgtgactgagtcggcccattctgtttagaaatatattttaaatgtttagtaattgacatgtgtgggttgtccttggattaagttcacaggatttcaccaaatagggcacactaatttaaaaaatcactgagttgtaggtcataacttgtacccagttaggagcaggggtagataactttatttatatggggatagacagttgctctgatgttggtttgagaacgtaaactccaagagcgggttctgggttctcttttaattcaaggccaagcttgtaaattaggctgccttaaagaaaaaagcattgcagataaaggaagggaatgggaaaaataaacacacggtggcttttgcnnnnnnnnnnnnnnnnnnnnnnnnnnnnnnnnnnncagaggatcccttgaggccaggagttcacgaccagataggcaacatagcaaaacccccacctctactcnnnnnnnnnttaactgnnnnnnnnnnnnnnnnnnnnnnnnnnnnnnnnnnnnnnnnnnnnnnnnnnnnnnnnnnnnnnnnnnnnnnnnnnnnnnnnnnnnnnnnnnnntcaccactgcactccagcctgggtgacagagggagacccctgtctcagaaaactaaaaaaatgagcagcagcataaatattattgggaaattcttagccaaaaccaactttggcagtttggttagaggaaaaactctctgattctatcactt

SEQ ID NO: 445105 - DNA, 790 bp, Homo Sapiens
  misc_feature (757)..(757): n is a, c, g, or t
ctctctctctccatcatactaagttgctatttttccacagggatacaacagagaagacctaactccatccttctctttgactctcctttccttcttggcaatgccatgccatgctgttccctcctggtgtttttcaacctctccttcacacacagaaaattatctaccacatcggtcccacacagaaagatccacagcctgttatgaagtttttgctataaaacatttaatgttaacctacaatacaatgtaaacttttatgaaaaaaatttaaagtacactagatttcttcagtaaattatcacatgactattcaggcgcagtacaagttggggcactgcatcctttgtggatggatttccgttgctgtgttcctcacaagtcctaaaaaaaccagttgtagagcggagcttcttgttcaagcaccggataatgatgcccctgattttgcattctgggggttatcgctccttctcagtcattttctgaaactctttgcttggccttggcaccattagcaattttcacaactgctcaattgaaggttctaggttctttttagcttagtttttaagagacaagtgttatcctctggccatctcttattcaaatatcatggtggaggcaagcaaggagaaagaagtatttggctagaggaaattctggcagaagtggaagaaagaccagaagggctccactgagggtacaaatattcaactgactccaatcgagtgtccttggctgggtcacttcccanggtaatcagctcaactacaacttcagtcgtggg

SEQ ID NO: 445106 - DNA, 716 bp, Homo Sapiens
  misc_feature (592)..(592): n is a, c, g, or t
gtggcagtggcctttacatgtatttattttaaataattagcttaggtctgagctataatgactaatctccacgagtctatgcctgacggtgataaaaagttgacatacatggaaggtgttagaggaaagaaccagaaacaattacagtaagtggaaccgtgcacaaaagctgctctgcatcccgggttcatgcttttaagcagcctttttgctgaaagcctcacgaagtagttttgtttgggttgagtgttatgtttaaaatttcccttctaccagttattgagaaaataataatgccgagctcatctaataaacaaatgtctagttcgataagctttaatcaggccctcacaccctgggatggtcgttaatgacatggatcagaatccctgaggtggctggaatctaaccagtgggtagcacagaaagctcaccttgcctatggaggctgtgggtatttttagggaggtcatgcattatgggatgggaatttttataaacaaattgctacataaaaactaatgcactgttgcagcacttgtgggaggtttcctttgctttgagacaccactgtttataggtctgcagactntaaagggaagtactgggaaatggccaaaggtcacatggggccagtgccatgttttaaggtcaaaggcactgttattttaagtgacctatctcattatttaaaatcagtcacttttcaccatctt

SEQ ID NO: 445107 - DNA, 115 bp, Homo Sapiens
tttgggtggagatacagcagaattttatttccttctttatacatttccattatttccaaattttttacagcgaacatggtattactttgtaagcggactggggggaaaaatcttg

SEQ ID NO: 445108 - DNA, 486 bp, Homo Sapiens
  misc_feature (376)..(376): n is a, c, g, or t
  misc_feature (385)..(385): n is a, c, g, or t
  misc_feature (411)..(411): n is a, c, g, or t
tatggattgagaataactttacttgttttttgggaggagattaatgggtgggaggggtgagaggggagatctgatttacatacggacttgagactcccaaggcagtaccccgggtcgtcctctgcaaggttgccccggtggggtctgacgcccagctggcgtccagggagccggggtggagtcctggagggaggcgaagcgggatgtggagggggcctggagtggggggagggggcgggtgaggcgaggccggcccgcaacaagtcctgcctctgggccccgggagcgtcctccctgtgtccgggccgggcgagggcttaatgctatggccagcggggaggcctggcggggcccggcggggcttgcgggctcagtngggcgggtngcaccgcttcggccaaggcccccgcngcccaacactttcgccgctgaactggtaagtgaacttcttcttcaacttcttgaactcgcccgtctttgcctaat

SEQ ID NO: 445109 - DNA, 845 bp, Homo Sapiens
  misc_feature (643)..(652): n is a, c, g, or t
ggaccgcaattcataggaagcatgtacatgtttcctttgctgtatgcacttttccagtctgcagaagcggggatttttgttttaatctataaaatgtatggaagtgaaatgttgcacaagcgagatcctctagatgaagatgaagatacagatatttcttataaaaaactaaaagaagaggaaatggcagacacttcctatggcacagtgaaagcagaaaatataataatgatggaaaccgctcagacttctctctaaatgtggagatacacaggagcttctatcttgctgaaatattgcttcatatttatagcctgtggtagtgcacatggttaacataaaagataacactggttcacatcatacatgtaacaattctgatctttttaaggttcactggtgtattaaccaaacgttgtcacaaattacaaatcaatgctgtaatataatttgcacctggaatggctaacgtgaagcctgaattaaatgtggtttttagtttttaccatcaccaatttctatgactgttgcaaatacagaatctattagaaaacagggtcttggaaatgtagaattttggcgcactatgaggaaaaacaagctatctttgtaaagcataattgagtttaatgtaattgttgtnnnnnnnnnngtgtgcttgctctacttaaaattcctcacaatgttgaattttgacctgtattcagaagaattccaaaacaggtcagttaaataaggaaatatagtatttgtcaaaccagtatcagagaaaagttacattaatgtatttgattacttgatctggtatctacttattaatgaataatcaacatttttctagtgaa

SEQ ID NO: 445110 - DNA, 753 bp, Homo Sapiens
  misc_feature (721)..(721): n is a, c, g, or t
ttttctagttttttaacataaagttttatgtatttaaaaaaaacagtctgaagtattgtacaatataagtgctgtcttaatacaaatcactggtggaaaggagcaggacataccctcagcaaaggtcatacaatagggggtaaaacgtttgtgttcttgagggagaagtttttgctctgtcctggggaggtcatggacacctccgccccgacagctgcctctgacttcttgggagcgtctaccagttgaggcagctgaacagtgtcagctccgtgctggagacagtcctgctgatcacctgaatgctgaacatgcttcgtggggctatcttttgttttctctgtagtctctttggtgatctcatcttttctgctcgagtgatgacagccttgaaccttgtccttccttgtctcagaggggaaaaaggaattggatttcctcagggtctggggcctgggctgtggcttgaggttccgagactgatgaatccaagcatgcttgagggcctggtccggggtcatgcgaagagaaggttccataccaaacaccttctgagaaagtccaggaagctggtgtcataggttttcagcaccatcgtgaggtcctttggaattgggtatctttttatacccctggtggtggtaatatatttaggaaaccttttggaatctccatgatgcaggccaactgctccaccttattcttcccgggggaacacggnggagcccgtgtcaacttccgcctgatacaacc

SEQ ID NO: 445111 - DNA, 654 bp, Homo Sapiens
  misc_feature (584)..(584): n is a, c, g, or t
agagttttttaacataaagttttatgtatttaaaaaaaacagtctgaagtattgtacaatataagtgctgtcttaatacaaatcactggtggaaaggagcaggacataccctcagcaaaggtcatacaatagggggtaaaacgtttgtgttcttgagggagaagtttttgctctgtcctggggaggtcatggacacctccgccccgacagctgcctctgacttcttgggagcgtctaccagttgaggcagctgaacagtgtcagctccgtgctggagacagtcctgctgatcacctgaatgctgaacatgcttcgtggggctatcttttgttttctctgtagtctctttggtgatctcatctgcttttctgctcgagtgatgacagccttgaaccttgtgcttccttgtctcataggggaaaaaggaattggatttcctcagggtctggggcctgggctgtggcttgaggttccgagactgatgaatccaagcatgcttgagggcctggtcccgggtcatgcgaagagaggttcccataccaaacaccttctgagaaagtccaggaagcctgtgtcataggttntcagcaccatcgtgaggtccttgaaatctggtatctttttttcccctgttggtgttatatttttaggaaa

SEQ ID NO: 445112 - DNA, 928 bp, Homo Sapiens
tggtgggtaataaaaatttattgaaaattagggaaaaaaatcacttattctaattcttctgaaaggcattactgatgttgcatatgaataaatccctccttccccaggacgaaactaccatcctccaccatccaaccctctaaacagcacgaatttaaaaatcttgcaattttatttgcatataaaggccgctagatatagaatatcacaataaatttaaagaaacaactgctttcctaaatttcattaacaaagtaacataaaatagaataaagctcaacagcatttacaatgggaaaacagaaatgactattagcgacaatattttgtgctagcgaagattgcatcgacacacagtgcaaaatgggagaggggagaggaagtaagaagacaacttggggtatttaaatagaaaggacaactaagccttattttagttagcttccattgcatccatttaagtctatacatgcctgtaactgtacctagatttaactcaagctctttaagaccttgagctctgagagaatgtgtcagttcctttccgacttctgatgtgttgctatacagcatccctttgcagttgtactgtccttgacaatattaaactcctaacgtagtcataatacacaaaaaatacttatatatataaacccatattgaaaaggagtctgcatgttcatttttttaaccgtatgaaatacctgctcttgacagattccatttctgtatttttaaagctgaaataatttaaaagaaacaaacaaacaatgagaccttgtataaccacaataggaatctcactagttaaaccatcctttaaatgacagccattttcttctcaatgcagctttctttatagtgagagtatgaaaagaagtcttttccatgcctacttctgttgagaagattgctataaattgggacc

SEQ ID NO: 445113 - DNA, 837 bp, Homo Sapiens
  misc_feature (656)..(656): n is a, c, g, or t
  misc_feature (722)..(722): n is a, c, g, or t
  misc_feature (725)..(725): n is a, c, g, or t
  misc_feature (766)..(767): n is a, c, g, or t
tttttctgctagaaatgagtttattacagagagaggagacagggctccgacaggacgcacacacacggcactcatgctcctaaaacactgggtttgtgaagggacattataaaaatgaggaaataagctgtgatgttcagcatgtgtcagtttctaggaatacagagaaggggagagctgcaaggtggagcgattctgagggctgaaaatccctttcccagtacgaagacagcatccttcaatcccgccagctcatgtgcatctgagggtggggctctgtcttcatgctagaaaccaaactgctctcacagcttcctgctaaatcaccacggctaacggataagcagagacggactatccagtctgactactgagcactcaagtcgtcagtccagtggctacccgggaacgggggcagacagtgtgcgtgcacgtctacggggctggacagagtgtggttaaccggggaactgggcaagccggcgccgagcctgcgtcagccgtgcaagccgctccttcaggaacttccgcttgtcgctggtgtcgctccgctccttcaggagccagctgtaggtgtccttgtcctgcaggagctgcagcatggccttctgaagctgctggccgtacgtctggagcatgaagaactggatgatcanagggatgttggctgagatgcgcttgctgggcctctggtgataggccatcatgtgctgaaagatctnctncatggaagagtctgttgccgagcttgatcggaaaagcccannatcccagaaattcttctcttttctcttccagctctctctctgacctctgcatgcaccctgatacctggtc

SEQ ID NO: 445114 - DNA, 482 bp, Homo Sapiens
  misc_feature (470)..(470): n is a, c, g, or t
tctttttttatttcaaagattgcttcttatattgaagctcatattaaagcaacagtacaatgttcataaaatataagtgtgatgccgtaacattttcttacatgtcagaatactgatatttatatgtatactaaaataagaactttaaaattgtacaaatagatacattaaaaatgacatagaaatagggcgtctctcactgaaacaagacagttatatctggcacgtattagtttaagatgaaagtagaagcaaaaagatttacaagaatcagcagtaacaagattgatgctcaagagacataattgtacattgtattgtacatacattgtatgggtttaagctggctgaatattatatatttcaagtttaaaaatgcactacatatagagtgtccagagtttaaggcgaaattacagctcagaactgttgtcctttctaattttgtggaagcttctttgacaacttanaaaagaagaaag

SEQ ID NO: 445115 - DNA, 536 bp, Homo Sapiens
  misc_feature (140)..(148): n is a, c, g, or t
ctgatcgaacagaaggtggagctggaggcagacctgcagaccaaggagcaggagatgggcagcctgcgagataagaagcgcctggcccacacacagaaggaacgtgcgcatccccgggtccctttggacaagtgcccaannnnnnnnngcgatgacggttacacagagcaaggacaggaagccctgcagcatctgtgaccttggcccatctccaccctccaacctggactgcccgccaccagcgcctgcaaccgaactgcagcccaggggtcattgctgcctcaagcctctcggtgcagatgcaccctgaaaactgacccctcaaacagactgtctgatttgaggatggacattgaaaaactgacgccaaactctaaagaaatgtttatttatacccagggctatcactgtttctaatagatgactctgatcccgtaggatatatatttaataatcccacaaacggaggccagacttctgcgttaacttcagtaacacaagcttctttaagccaaatacatcacttgccactacaa

SEQ ID NO: 445116 - DNA, 1162 bp, Homo Sapiens
  misc_feature (118)..(118): n is a, c, g, or t
  misc_feature (191)..(191): n is a, c, g, or t
tggaatgtgcccgtttctcctgtgtgtgggccaggcgctttcttattctcggggagaagaagcttaaaccagtcgctttgatgcccgactcccggctggggggacgtcctcgggtggnccgatgggtggggttgggggtattcggtttttccctttccatttcttcactcttatagtaagccagctcctcntgcagcaagaacaccttggacttgagctcgttcctctcgtgcagcacgtcccgcagctcctgcagggtgaaccgggggcggttggggtccttgagatccatggccaccttctctgcgtcggagatgctctcctctcccaccggctccgtctcaggctcctcctccccattctggctgtgctccccctgcagcctctctcgcaacttccccagctctgctcgcaggctgcccatctcctgctccttggtctgcaggtctgcctccagctccaccttctgttcgatcagggctttcccctgggcctccaccaccgtgacccggtgccgaaggtcatggttgatcttcatcagccgtgtctgctgctgctgtaaagcctcaacgtcctcatttttcaggcccagctccctgtccttggcgcggatctcgtcgcgttgtttgtccaccacctccttcagcttcttcatcacctgtcgctcccgctctgacatgccttcatgcttctggaactcctcctctgagaaattgacatccttgtgggagaggttggtcatgagctgcttgttctcctcctgcagctgggcgatctgggagaggaggtcctgcgcctcccctcgccacacatcctccaccagctccagctccttctggtgcttgcgctccttctcgatgcggtccatcctctccaggcgcaggcggtccagctccaggcgcagctcgtccagctcgggcgcgacgtggtggcggctgaccagcacctccaggatctccaggacgcgcacgaccttgggcatgaggcgcgcgatggcctcgcagccgtgctggtcaatgacccgctcgaactcgtggcccacaagcgacgcgatgtcgtacacgtccatgacggtcagctcggccacgttcttctccagcgccgactcggccgccagcgccgacccccgctcctcctccatggccaccctcctggcctgtcc

SEQ ID NO: 445117 - DNA, 1059 bp, Homo Sapiens
  misc_feature (85)..(97): n is a, c, g, or t
  misc_feature (996)..(1014): n is a, c, g, or t
gatgatttatatatatatcatatttattttccaagtttctgatatcttaaactgttgaaaatacataaagttattcagagacacnnnnnnnnnnnnnattcctcttcagctctataagctgtaactctctatatttacaatttttctctcatttttatccaactgagtgtattggcttcttgctttacaaagtagaaatgtaccttgagtgcaacaagtttatctttattccacactgttgggttttttaaaggttctttatttttccattttaaaaacttcaaaatacacatgtaaaattttagtatttaaaatattagaaactccttacctgttaatgtgttttaataaccagtttgccttttctgaacatattacattcctgctgtacctattttgtagcaagtatgcctatcttatttgcatatttgtaacaaagtatgcaaaaagataaagatatgtgacctatttatattcaaaactgactagaaaactctacaaatcacaggaattctgtaacagatatgcatttacaactttctctaataaagatttttaaaaattgttttttaatgtgcttttaatgattgctagccctcccccctccttacttgctttcccaactgtttatactgtcccccatcaccctccgtggaaagctgtccttcctggctaaatccttacttagggtggatgctatgcctccgtgagacagggtcagggggtcaaaatcgattttggaggcccaccctggagagtcccaggcccatgaactgactcgaaaaatttatatcagagccagaatggtccacctcccagggtcagatctggcctgacactccaaccgcaggctggggcatgctagaccgagctcagagagaggccagggttgttgaccctgctagctgacctcttcaaacttcaggagaatttttttggcagttaccacggtgactgggtactctaaaagcttatccttcttactgaatggagggnnnnnnnnnnnnnnnnnnntatgttaaaacctaccttgcagagatgcctatcatggttaaagtt

SEQ ID NO: 445118 - DNA, 1134 bp, Homo Sapiens
ttttaaaatgccaatgtggtttttattagccttgagaatgaattttatttaatacccatacaccagatttagagagtcaatttggctcttcttgcgtaaaaattctctggagggtggtggtgatgataatctgatcgcagaagctgagaagtaagtgcatctcaggaaagtgttccaactggagccaggacgctgtcttcagagaagaaaagagacacagccaaccctgagttggaggagagctcttggcaccagaggggctgccctcagaagtggaggcctagggaccctgggaccctaccaagtcctatgaccagagtcactctcctgggactcgctggagggtacagtgtggccctgggggtccgccaagcttcgagaaagactgaggtctgtgacttaggagcctctctcaggaaccaggcagagtcagtactctgtgttgtagaaaaacagaacaaaagtcttggtctgggaggagctcgctggggaggcctaggagcagaggatgttgggaaagtattggtactgtgggttgtagctccgtaggtttctcttgaggcagtagacgagcttccggtcacaggcacagaggttcacatggcagaagggcccgggctcgcaggtgaccacgccccacgcgaatctgtatttgtaggactgtgtgcgaatgttggcagcccttctcctccagccgcccatagcagtgggtcatgcgcccaacagcaccaatcggtgccatccttgggggttcctcggccgccccagccgcagtaacagccgtagaagccgtagtttgtcagggcgttcttccctgtcaccttctcgatcattgattttaggtccagcaagcctccttgcacagcaggcacactacaagccaggaaccaagccagtgggaggaggcctttcatctctggggttctctttggcctggcctcaaatcctgctctagaggtctgctcccatgagcaacttccttgggcagaccctggagacccgggtctcgcgggctccccgtctccagtcggaacattggtatccacaggccatgatccggatccggaaaattccggaccgccgccggcgggagagagaagggtcaaagcggagaagataatagtaacacaatga

SEQ ID NO: 445119 - DNA, 1580 bp, Homo Sapiens
  misc_feature (81)..(81): n is a, c, g, or t
  misc_feature (84)..(85): n is a, c, g, or t
  misc_feature (87)..(87): n is a, c, g, or t
  misc_feature (89)..(92): n is a, c, g, or t
  misc_feature (94)..(98): n is a, c, g, or t
aactggggattaacagggcccgtggcccttcataccccaggtaattttttggggggttgggtttggtcctttcctaatttnttnntntnnnntnnnnngccagtggagatgggggtttcatcatgttgcccagggctagttttccctttctatatacagaaaaatttaaagtgaatgtgatgttggagagagtgggaaggaaaagtaatggcaagtatgcttgctcattaccaggcactgtgctaagctctgtgaatacacagataagtaaaatccacgctgtttctcaaagaactcacaatctgtttaagaagcagatgtctatacaataattttataactattattcaatgtgattagtactcacatagctctatatagagtgttatagaagaataaattagagaatatctcatttttcctccagtggtttaaaaagatgtcacagaaactgaattgtaaatggtacggaaatatggaggggtggtttgcagtaggacctatcttagcccaccgcttctcaggttttggcctttgaacttgagatatgactgttccaaggacagaaggcaaaacgaacaaaagcaaaatctgaagcaggctgtcaatagagattgactctcattgcggcacaccagtacaggctgggccaaatgtcagaatcaaggcaacttatctcaaatgcagggctgtaacgctctctcaattgcaccagtttcctcaagaggcaaatcttctaaaaaatcatctgcagcccgcagcatctgcctcagtgcagagaggatgagaatatccttcatggggtccagttccaaatctgaagcataatttccacccatcaaaatattggaaataggaatgcctagcattttatggacattcatgacccggctttgagaagtcatagatctactcatgtttaaaaagttgtcttgaagaacctcactgcaatcatccactttagtaagcaaggccacatatgctatcccacagtttaatacttctttgtgaacttgcttcacttttgccaacattttagagtagagattgtcaatagagttgatgtctaagacataagccacacagtgaatcctgatatctgtctggcatacaaccttttaagatgtggggaatgtcatccatgcacagtcctgctccttctgccccatctagccccatagtgtcacacaacataaatggcagagattttccattttttccatctttaacagaatatatcctataccgctcggttatgctggtgatatcagaccccactacggcttggccagtcacatggccatgaaaaatagacttgactgaattgaaaaaactggattttccagacccaactggacccaccaaaagaatacgaatttctgaaaccaagtctgcatagggcctatagtctctgatgtctgctagaagcctatttctgtgctctctggctttaattgtcctctttatgtcgtctaggttatccttaattcctgtttctaggggttagatcaggcttaaattgaggattaactgttctgtctgatttatcgagcagatcccgggaattccggaccggtcca

SEQ ID NO: 445120 - DNA, 779 bp, Homo Sapiens
  misc_feature (345)..(345): n is a, c, g, or t
tgagaaagtcatagatctactccatgtttaaaaaagttgtcttgaagaacctcactgccaaatcatccactttagtaagcaaggccacatatgctataccacagtttaatacttctttgtgaacttgcttcacttttgccaacattttagagtagagattgtcaatagagttgatgtctaagacataagccacacagtgaatcctgtccttcagagatggagaggtgataaaagtagaatgctcaggtgtaattggtttacgggaattaaactgatatctgtctggcatacaaccttttaagatgtggggaatgtcatccatgcacagtcctgctccttctgccnccatctagcccccatagtgtcacacaacataaatggcagagattttcccattttttcccatctttaacagaatatatccctataccgctcggttatgctggtgatatcagaccccactacggcttggccagtcacatggccatgaaaaatagacttgactgaattgaaaaaactggactttccagacccaactggacccaccaaaagaatacgaatttctgaaaccaagtctgcatagggcctatagtctctgatgtctgctagaagcctatttctgtgctctctggctttaattatcctctttatgtcgtctaggttatccttaattcctgtttctaggggttagatcaggcttaaattgaggattaactgttctgtctgatttatcgagcagccacggtttggagacagaaagttcttaagagatctgtccc

SEQ ID NO: 445121 - DNA, 398 bp, Homo Sapiens
ggctcggtacccactttcagagtagagattgtcaatagagttgatgtctaagacataagccacacagtgaatcctgtccttcagagatggagaggtgataaaagtagaatgctcaggtgtaattggtttacgggaattaaactgatatctgtctggcatacaaccttttaagatgtggggaatgtcatccatgcacagtcctgctccttctgccccatctagccccatagtgtcacacaacataaatggcagagattttccattttttccatctttaacagaatatatcctatactgtttctaggggttagatcaggcttaaattgaggattaactgttctgtctgatttatcgagcagccacggtttggagacagaaagttcttaagagatctgtgg

SEQ ID NO: 445122 - DNA, 615 bp, Homo Sapiens
ttttttcatttttagggctttttatgtggccttcaaagcacgttgcaaacaaatccctttcactcctcagaggaggagccattaggaaggtagggggcgacaggcacagcctacagcctctcctcaggaggacagagggggtcatcgcatttgagccccctgcagtcatctcgggggctcctgagggtccaggtccacatgttcgagggtctgcagcacatccacggcgctgtaggacttccaggcctgcatgttacagctcttcaggatggctcccagctgcctgccagggcctacttcgaaagtttgggggaaccccctgccctttttcctttcgtatatggcatgcatcgtctgctcccacttcactggggagaccagctgctgggccagcagcttgtggatgtgcccgggatgcctgtatctatgcgcgtggacgttggagtagacagaaaccagaggcttcttaatgtcgactgcctttaaagcttgcgtcaggggctccacggctggctccatgaggcgggtgtggaatgcgccactaaccggcaacatcctggtgcgtctgaaatgaaacttagaggaattcttctggagaaaccgtagagccttcag

SEQ ID NO: 445123 - DNA, 1126 bp, Homo Sapiens
  misc_feature (1046)..(1082): n is a, c, g, or t
atggaaaccacttctggccaacagcttttgaattgcccggatgccgatctatgccctggacgttggagtagacagtaaccagagcttcttaatgtcgactgcctttaagcttgcgttcaggggcttccacggcctggcttccatgagctgggttttggaatgcgccacttaccggcaaacatctggtgcgtctgaattgagacttagaggaattcttcttggagaaaccgtagagcctcttggtgtcctgaaatcaccctgcaatctggaaagaggtagttggacacttcaacatacggggttctctatgcctaaagacttgcagtgttcccgggcttccaaacaggcgaagttgaacttggactgaggctggccgaggacagacagcatcccactggggacagcttctgaagcttcctgcatggcctcagctcggattttcactgcatacaaaccttcagcaaattccatggctccggcaaacactagggctgcaaactctcccacactgaatccagcagcagcaacacagttctcaatcaccgagggctgcaggtgatgtagtttctcgacagcggccagcgatgccacgaagatcgcgggctgacagtgcacggtgcggtccagggtctcctgcggcccgtgcaggctcagttccagcaggtcgtagcccagcacgcggcgggcggcggcgtagagttcgcggacgcgcgggtagttgagcagaccgcggcccatgcccaccacctggctgccctggcccgggaagagcagcacggagcactggcccggcattcgccgctccgtcgccgcccagggcgcctcctcctccgccccggtcgcatctcgcagcagctccgctacaccctgggcgcccggcggaggcaccgggaagctcgaggcgccgcggcggtagctggcgcccaagcccctgacccacgctacccgtgcgacccggacgctcatggtcggacacctgcccgcgcgcgttaccgtggcgaccgaccgctctcgacgaattcgagctcggccgatttggcctgatnnnnnnnnnnnnnnnnnnnnnnnnnnnnnnnnnnnnncgccgccaccgcggtgaatccagtcgcctataggagtctataca

SEQ ID NO: 445124 - DNA, 665 bp, Homo Sapiens
aggaatagaaattcccaagtttaattcccaagagtttaaaaattatgagccttttctagcccccaccttcccaaccctcagagaaggacagtaaagaaatcagtgaatccaggtatttacctgttgttgaattgtgaggttgtgaggtagacgtgtaacaaggacaaggaagtttggggatctgcttggagaatgaaggtttattcaaaacaagtggacaggtcaggggtaacgggtgatgagggcacctggcttttgtaatcatgtggggactgtcccctgggaggtgcagcaaaaatcagaacggagacagaagctcacagtctggttttagctgccaactcctatggaagtccatagctgactcctatggaaggcctaccaaatgaggaaatttcaggaatttgctaatgcttgggaggattgaaaatgtaggcagcacagaaatagagtagttggtttaaacgggaatcaggaaggattggtataacaaggcacaagatttggaatttaccctttacagactggcttttataacacccaccctcgtctctgaagcctgctgattcagggctagcagagcctaggggcaagtttgggccagatcacccacccagtttattgcccttggctaagaatgcaaagcccctcatgagcgcaatgct

SEQ ID NO: 445125 - DNA, 571 bp, Homo Sapiens
  misc_feature (391)..(391): n is a, c, g, or t
tttttcctgagatggcagatttaatgtcttgggttttaccacgttcccctcctgagggccctcatggttcacgctcctgtgagctgttgacaccaaaccagaaggcccccacgtccccgcctcctgctcatgccgtccctggccacatggcagcacgtggctcccagggagtagggagggagagcttctgcagcctcgtcccagggtccctggggccaaccctggcaggggccctctgcgtctcttgacaggcctgggctttgtctgggctcctgtacccccacggagtttatcctgacagtcaggagttcagacagtgcccctagcccaggccaggcaaggctccatgttgaggcacctcgaaacatggaggccctcttggggaagagtnggcagggccctttcctcacagacataggcctgagggggccacaggggatcccgactctccggggaacttgcctcaggccaatgacctccatggtgggatgagctgctcggggtgacacagccagggaagggagtgggattttgggccaagggccagcttgcacagggcccagcccttcgc

SEQ ID NO: 445126 - DNA, 464 bp, Homo Sapiens
tgatgtaataaatgaagattttacctagtaggttaacaaaaaagagcatgtgctggtaatttatgtgctggtaaacatttcacagctggatctcaggaacaaaaatgcatgcatgcatatacatggataagtgtattataaatttcagtgaaataaagcatctgcagtgtacagtttacaaatatagtatacagtactcatttttgtaaattgtatatgaccaattgattctcgcagaaaacatcggctcatttctggaaaactcgtatctgcagggagactgtagctgtatttgaccagggagggtaggcccgacacagatgctagtgaatgttcttatttgcattaatgagtaagacaaaaccaaaacgacaaagcagtcagtgtgatctcgtttgtcagtgacttctctgctgaactgagtaattgtttttaaatgccagaagagttcttcaatttttttg

SEQ ID NO: 445127 - DNA, 260 bp, Homo Sapiens
ttttcatagaacaagattttgttttcagagttttcttccttccccttcccccaattgttagcagcttgatgtgtcattctccccagcaggggagggggtggaatggcttgggttgtaaactccctcccccagccttcctgtcccttggaggggcagttcagctgggttctggttcagggtcaggcaggcagttaaggcttggctggtgcgagaaggctgggtgctgtgtcttcagagctcattcctccactctggctcca

SEQ ID NO: 445128 - DNA, 302 bp, Homo Sapiens
cattcaacaaatatttattaagcacctacaatatgccaggcactgtgctgggtgctggggatacaactgtgaacaagatagacacagtccctgccctcaaggagcttacagtctagtagttatacagacgagtacacaggcaattacaacgcagtatggtaagtgccgtgatgggggaaagacatgaaaaagggcacctaactcagtctcacaggcaggggggtggtggatagccatggaaatcttttcagggtaagtaaaattcagttggagtattgaaggatgagtacaagttactcagg

SEQ ID NO: 445129 - DNA, 357 bp, Homo Sapiens
  misc_feature (326)..(326): n is a, c, g, or t
ctgtgttctcatgtcttcatagataagcatactccattcttctcgatgttcctatgtcttcagagataagaatgttcctttgtcttcagagataaggaagggcacctctcaaatgagggtcttatgtcctgcttcagggcagacaagtgatggggaggtgagggtagcttctgcttctgctgttttaattcttacagcgcaagtctttaggtcaattttttctttctgatactgtgaggataatttggcagcattatcaaagctgctggtctccttaagtcaagaatttaaatcattccatttagttctgaacttctttacactgngaaatgtggcatgatgaacttcagacactca

SEQ ID NO: 445130 - DNA, 501 bp, Homo Sapiens
tatgcttcaccaaaatatttatttgagaattatacaacaaaattccaatatggcataaactctgtggagacctttaaaaatatccaatgagatttgcttcatttttcccccctagagaattattaattataccgttttatttccattaaatggaactcttgagagaaaaagaatagaatgaagagagagatcacaattttatacattgtactgagaaataaaaggccttcctacatggtagctaatccagtcaaaataattggccactttggtgtaaacacctgggaactctggttttccacagttttccccccaactcacaacaccccagacataagtcacattgttggcatccatacagactaaggggcctccagagtcccctttacaggcatcgatggaaccatcatatgtacctgcacattccatttctttttcatagaaacgatttccgtaaaacttagagcagttgcttattagtttaacttcaccccactgaag

SEQ ID NO: 445131 - DNA, 1342 bp, Homo Sapiens
  misc_feature (138)..(138): n is a, c, g, or t
aaagggatataaccaggaatgaccaggattaaattagcgagagcactatatgacatgaaatttcgtgagatctccctcttgagcatatgtttcctgcctttcaagtaagaatgcaaagtagaaaaagttcaggcccanctttatgattggacaaatctcccccttgggcaagtcacttacccactttgtgcctcaatgtcctcatttataaactagaggggagggggacgttgtgtcaaagaaaatgacaaggtgatggcattgtgtaaaccggtaatgtattataattaatgtattagaaatacacattcccattgtctttgacttatccagagaagatttttaagaattagtttaaaagcataaagctaaagataagtaagcatacttttctagcctgtttgtggaagaccaagctcaccttgaccagtgaggacagtagggggaacaaggatatgggaattcagtgaaagaacatgggttgtggagtcagattaatgtggattcaaattcctgcattactgctgcaatttgggcaaataatggagcttttctgagcccagttccttcatttgtaatacataaaaaatatcttacacatttgtcacaaggtttgagatgtgtgcaatacacagcacagtgcctggcacgacatagctgctcaccagatgtgattcccttctcccacctctgctatgggagcacagctagcctgtcaccccaagcaggcccaccccacggccccctgcccatggcagtggtgatctgggagcccacagttaggtggacagacagaatagcacggtcgccagccagagatttctccagccagtacgccacctctgcaggtcaagaatctgggttcattcttccctgggaactctatgggatgtgttgtgtcatctgctttttgtatccacgtccctcagtagggaactgcttctccaccttttgtaaatgtcatctttggattcacataaaaaaacgctcaaatcctttcatggtatctgaatctctttttggattccggagtgacagtgtctcaggatcttggcggggaaggaccatcacctcctcataatccgtgccactcttggaggggctgagcacacagttctccttgtttccctgtttgccagcttgcctttgctaggctggcgatgaaatataggctttaccaaattttctgtgaagaatctgacaagattttcttaaaagatttcacccaaaataatcaaatcagtgccctcagatctatttaaggtccatcgggtttcactgttttttctctggatcctaccacccatcctttgtcatttctaaccactgcaaattgcatttt

SEQ ID NO: 445132 - DNA, 511 bp, Homo Sapiens
tttattggttaaacaacctttattacctgcctctgacattccccagggttacagagcagggggcatctgagcctcaagttccacggatgaagcagacactgcaataacaactgaatcaatagaggagaggcatttggaagtactggggtgatacacccagtaatggtaatcctcagcagaagatggcatagctaccaaaaatcaggcgttaccactgggatgaaaactggggaggcaagaaaatcatacggttggagtcatagatcatttccctccccgttgagcactcctcccccttccgtcccccattaagttcattctatcccacagactggtcctagtgtcctgctagctccctgctgaaagagagagggagggaaaagatgtctgaggtctcttcatttcctttgtctctgtccctaaggcaactggaagctggagctgctgcagtcggcctggcaagcccgttggctctgcagagtgagcagtcctggcagcccctggagcagct

SEQ ID NO: 445133 - DNA, 2019 bp, Homo Sapiens
  misc_feature (174)..(174): n is a, c, g, or t
  misc_feature (206)..(206): n is a, c, g, or t
  misc_feature (400)..(400): n is a, c, g, or t
  misc_feature (439)..(510): n is a, c, g, or t
  misc_feature (637)..(688): n is a, c, g, or t
  misc_feature (807)..(844): n is a, c, g, or t
  misc_feature (1286)..(1286): n is a, c, g, or t
attctcctttgtccgctgtcggtttgatatagctagcggtaatatgtgagtctagtttatgtcgtattatacgtattatcggtgcgagtgaatgggtatctctctgttgttgtcgtctcgtatatatgtggcgtctttgttattgtatatttgacttcgctttaagtatttgtntggttgtgtggtgtcttttgtgtttgaatagntgtgtccttctttggttggagttgtcgacgtttgctctagtttccttcgttgtaggtacggtatgataaaaggtcaaatattcatttgctctcctctcagtttttatgagtgctataagaagtatttcgagtattaatatattataagcgtagagcgggtgttggtgtgtactgagttttgatttattgtctcnggtattgttgtttgtcacccccgcccccggatttttttnnnnnnnnnnnnnnnnnnnnnnnnnnnnnnnnnnnnnnnnnnnnnnnnnnnnnnnnnnnnnnnnnnnnnnnnacttgccgcccctataacgtagctctgatgtgttagtcgtagttaatattaatctttgtgctgggggtgtgcgcacaaggtgtgtgtggcgctgagataggcaacgagaagtgccgtggcccgaagnnnnnnnnnnnnnnnnnnnnnnnnnnnnnnnnnnnnnnnnnnnnnnnnnnnncttctgcgtttcagttattagagtatattttgcgcggtattgtgcttttttgttatcttccgaacccacttatcaatcgtaatggtgcaagatgagagtcattatgtgccgtgatgtgnnnnnnnnnnnnnnnnnnnnnnnnnnnnnnnnnnnnnngtgaaaaagcaaaacagaacaacagaagccctctagatctgtcagtttatagaacatataggggacagaaaaggtgtacatgatcccattaggatacattcagtaaaatccactgaaggacaattctataggacaaacaacttagtttcttcaaaaattaaaaacaggaaagttaaatctatagattatattaacaaaatgcaagatctagatcttgcctggatcttgactcgaataaaccaactgttaaaaaaaacttacgagacaatcaggaagtttgaatattgactggtacttggcatcaaaaaatgttttagcagtcttacacaatggtattgtggttatgttcaaaaaagtaccctatctttggagttatatttgaatgtctctgatcacacaaacatgaaaatactatgcctgttaatgggactcaaaactgatnccttgtgggttggggcaggggatagggtggggatgcaggtaaacaagactgaccaccaggacagctgttggagggatgggtacacagagcttcattctgctattctttttgtgcatttgtgaaaatttccataataaaatgtttttaaaaatgagtttggatagcattatactataaaatattttaaaatttccttctttaatgaagacttgcaagcagaaaaatataattttctaagggtcaattaactagtacattaactcaagtaacagttacttagggcagggcatggtggcttatgcctataatcccaggtaaaactaggctctggagtcagccagatctaggtttgaatcctagctctgtcattttctatctaccagttcaatgttttttggcatagcacacaatttctgtgacccttaggctccacatctataatgtggcagcaacaactttcttggtcagtagagcactctgcaaagggcctggcacatggtaagtgcttggtgtagaattcaaataattccactaccatttcagtcataaatgcatacttttctataatctaacatctctcaaattgggatgtctcataattgatggcatatcatgatttaattggcaggttttttccttagtcgtttgtaaaaaatggtgctacagatcaatagcatctaagagtcaatataccatggtatcaatcattgtaaagatatattcccaatttccc

SEQ ID NO: 445134 - DNA, 567 bp, Homo Sapiens
tgacttcttattgaatattttactgtgttaacgctcattatttatacagacattaggtttacagaatattctgttttacatcaccaaaattcacagtccgagaataacaacataaccaggtcccaattcctccatgcaccccacaagcttctgtccaccctattttctggacagaaattagcacaacccacaggtttttcctgggccaagtcttcctttgctgccactgtcttggcttctaatcaagctctgacaggccaacattgggtgaccttgggtgagctccagacaggcactggggtgaggagatgtctgtgcaaaattacttgtagaatgatcttgggatgctggattttaatttttgaagcaagaaagttagggggggacatatttcctgtcctgggaaaaatggagaccaaagtgatattaagaaagtagtttggatttcaaatttataaatcacttgctctgtgggtagctatcaggaactagatcattttccacctctgcttattgtacttcttaattttaggttttatacctgggaaagctgtgactctattagag

SEQ ID NO: 445135 - DNA, 1662 bp, Homo Sapiens
  misc_feature (1572)..(1572): n is a, c, g, or t
  misc_feature (1578)..(1578): n is a, c, g, or t
  misc_feature (1596)..(1596): n is a, c, g, or t
  misc_feature (1623)..(1623): n is a, c, g, or t
ttttttttgacttcttattgaatattttactgtgttaacgctcattatttatacagacattaggtttacagaatattctgttttacatcaccaaaattcacagtccgagaataacaacataaccaggtcccaattcctccatgcaccccacaagcttctgtccaccctattttctggacagaaattagcacaacccacaggtttttcctgggccaagtcttcctttgctgccactgtcttggcttctaatcaagctctgacaggccaacattgtgaagtcctcaccctttcccattcacttctggtctcctagtctagctaatccccctcccccagaaggttaaggcagttggttcacaaccaagttgtttggtgaccttgggtgagctccagacaggcactggggtgaggagatgtctgtgcaaaattacttgtagaatgatcttgggatgctggattttaatttttgaagcaagaaagttagggggggacatatttcctgtcctgggaaaaatggagaccaaagtgatattaagaaagtagtttggatttcaaatttataaatcacttgctctgtgggtagctatcaggaactagatcattttccacctctgcttattgtacttcttaattttaggttttatacctgggaaagctgtgactctattagagctttgaatcttttcctatccttttatctttactcctacagggaatggcctcagctcccttctcttttagaattaaacaagtaaaaactaagagttaactttttaaaaaaactgactccagggaaaggacattattatattaccaatagctgatttttgttttccattctgggacctaaaatgcttacaggtactagcagtacatgtcggatagcaaagacttttcctttcagacccaactaaatgatctcctttctgcctttgatactcttttccttctttgtctttcatccttgcctgtcacctcacagatggattcttcctcatttctcttgcctcacttgcccaggtttattgactagcgtcagtttaaggagctggacttcctgggacctccttggcatcttgtagggtgattggagtggcctgagtactcagctcttcagaggtcaggtgacccactttctttggttaatgaaatgttactgtctccaggttagtagctgtcatgaacaggaaaggtggcaaaatggaagaccagttctattgttctttttgtttaggggattcgttttttatcttgtaatcttaagatttcctctcccctcaactttacagcagccttaggccacctgccgtatttttcagtatcccctgcaaatttagaaattgaaaatgagtgtaaagcatattgtttcttttccaaaatcctttgaagccaaaggagtaaagaaagaaaaaaggaaggggtgaggagggggcttaactgcttcccagtaaagaccctggaaagcccactcttgcaggaggataagtgttttggagagttgtgcatgggagcgagcgcctcagtgttactctttcttgttcaggatcagtcagaaagcaacacaagtgttgncgaccnctgttctcccttctcccnctgtccactggcctgcaatgataaaanacatgcagaccaatgggaaaggccccaaatgcagtgagt

SEQ ID NO: 445136 - DNA, 433 bp, Homo Sapiens
  misc_feature (417)..(417): n is a, c, g, or t
gacttcttattgaatattttactgtgttaacgctcattatttatacagacattaggtttacagaatattctgttttacatcaccaaaattcacagtccgagaataacaacataaccaggtcccaattcctccatgcaccccacaagcttctgtccaccctattttctggacagaaattaggcacaacccacaggtttttcctggggccaagtcttcctttgctgccactgtcttgggcttctaatcaaggctctggacagggccaacattgtggaggtcctcaccctttcccattcacttctgggtctcctaggtctaggcttaatcccccttcccccagaagggtttaagggcagttgggtttcacaaccaaattgtttgggtggaccttggggtggaggctccaggacagggcantgggggttgaggggag

SEQ ID NO: 445137 - DNA, 283 bp, Homo Sapiens
tgttttactaagtgcttggataggctttctaattttgtatacgtgctagagttaattattgaacatttttatccaaatttagttgtaactctgtttatactactgattgctcattcgtttaaatgatattttaatgtaaaagtcataaccaacatatgaacagacagatttatgtctttaaacacagaatgtaagctatagtttaatctgataccagttgctggaagttgccatttgtttttcttaaatctatacccataaaacttcttttaagattaaaaaa

SEQ ID NO: 445138 - DNA, 674 bp, Homo Sapiens
aatgagactaacattattttaaagtgtttatttttttctataatacatttcattcaaatcataaaagtctgatacatttttttctcaagaacaacttacactcatttgagatgctttttctttcctttaatcttataggatggacaaagatacactttaatggacaaaaaacaccagagttcattacaaatacagcttcccaggccccacctccagcacttctgactgagcgtctgggacgcatcctaggatcgcaaaactgtaaaattcccccagtcaactccacggcaggcaggcctggaaccacccttagtggaacactgcttaggacttgtctgttatctaccagaagcaatttcagaaaatcaggagtaattacgtatacagaaatagctcttctataaaatttccatataaaaataatggtatttatttacaaagtctgagatactacaaaataatatatcatattaggttgtgtacttcaatctaatagaggaaagtctacattgggcaagtcagatgtggtggttgcattttcctcttatctctcttgtttaaattgcttaaagcatgtggcaccacgatgtatccttcatgcagaaaaaaggagaactatattttctggaaataaaacccaatagcacatagtcagagtaaagcattttcagatg

SEQ ID NO: 445139 - DNA, 1080 bp, Homo Sapiens
  misc_feature (493)..(557): n is a, c, g, or t
acagggttgtcgcgcccctttgaaaaatggtgagagccccactctctcttaaacgccacaggggtgtctctctcaagagggggggaaaacaacgcccaacatgttgtccaaacactctgggtgagcgccccccttacatttggagagaaagagtctttggcacacagagttgttttctctctctgagagaaagtgtgttcccgcacaaaacagcggcttatatggtctctctggagagaaagtgtccctcttgtaatgaatttctccacgcaccctttccaatagagatgggaatgggtcttctcttctccacagcttgtatattctgatcgaccacggcggttatagtgttttaataaaagaggggaattgaggcgaaccactctgggcccttaatttttccccactaaaaatttctatatggaacgctttcttccgggacaacaacggctgagactctttctgagggcaaaaggggtggggcttggaaaannnnnnnnnnnnnnnnnnnnnnnnnnnnnnnnnnnnnnnnnnnnnnnnnnnnnnnnnnnnnnnnngcttctagaaggtcttatcaaaagttcctattttaaaaattatcataaaaactaaagggcccttcaaatgaccataaagcagtacaaatcaccaatcctagctaagtaaccaggtcacctgcaaaagcagcacctcggaaacaagagagcctgctgcattcacactcaaagcacccatcatataaaagtatcctagttaaatataaaaagcaaagttcatttccccaaagctcaaacagcctatgctgctcctgttcttttgccaaatctacccaaggcctgaggtggaggaatgctactttccccacaaatggtgggtcccactcctggccccagacctgaaggctgcagagttggaaacccaaggtccaaggagagaaacatgcttgagaagttggtggtggacacaaggctgcagtaagcactggtagagcccatcagatcttcctaaatccagggactccaggactcggaggggagcctgcctgctcacccctgctccttggaaacagaaaatctgggc

SEQ ID NO: 445140 - DNA, 554 bp, Homo Sapiens
gcattattttaagatctttattattaagtaactcactggggttgtcaaagtatgttataaaattacacagataattagagatatatgttacatagaaatgctgattttacactctcttctgagtacaagcatttgattacagaggctcatagcacaacaaaatgtatttcacgggacactgatgcccctattctgatattgacaaggcaaacatcagcggtagcagagtcaacaaagcaaagcaagatgaaatgaaactagatgtaggtaaaacaagctaaaaatatttttaagtgtttttgtttattgtcatggtggctgttttctacttacaagattgcagtactctaatttagccaagtaattgctgctgtaaaatccaaatctacagagcgcacaattttttaaatggagtgtgcattcctcaagcaagactaaaaacaatcttacttgggtctctaatattaagcttcagaacagttttgcaacttttgacctgaacaaatctcttatccataaaacaagaggaataaaagattgcatacgtgcattta

SEQ ID NO: 445141 - DNA, 441 bp, Homo Sapiens
cggttcgtttgcaattcaaaaataattttatgagtagataagaatatcagtttaccgttgtctagtgattttatctaaattttccctgaattattaagtaatattgatttggctttgattctgaagtagtagagtctttaccattataaactgtaaatctctttttgcttaaaaggaaaaaaatgtaaaagataaattccacagagaattattcagtattacattaaaatgttaatgactttttattttaaattgtactaacattaaaagttggcctgaaagtcagatattatgacaaaatttgacattaattgtttttaaagtatagatttcatttgaaattatagaatgctaatgtggttagaggacaccaaagatactgggtcatcagccattaagtatatctatttcaaaattaaaatatttgggaagtataaaaaa

SEQ ID NO: 445142 - DNA, 1386 bp, Homo Sapiens
tttgacaggcagcttcttctgtgtctctttaataccctccaggcccgtcaaaccctccactctccctccctcccctcccgccgcctttaagggtgggccccctcccccagcccaaggactaaggccccaggtggctgcagcaggccggcccggaccacagagacgcacaggttggggacgttgactgcagacgcggacgagcagggcgggcgcgggaggcagggttcaggccgccgcggggctcccccagcctctgggcccgtcctggggggcgtggaaggcgcagacagcccccgaagggagccagtcggaagtggggagccacggctggactgcatcctcacttgccgcccttgcgggacagacaccgggggaggcaagagaaagtctgcttgacgcgcgccagcagcggcagcggccggtgggcttcccggggcgtgcgcggcaccaggcgctgcacggttccctcggaggctgctgagtgcggcccggcggaggaggccgaggtctcggagccctgccggcagcgcttgcacagcggcagcagcgcgcgcaactcctcctcgtcgcggaaggggctctcgccgaagcgctcctccagctgccggcgaagcttctgggaactggcccagccaaactcttcaagctgctgcctaaagcctgggttgggttggcgatgggcctggtggccttgatggcttcaagcacgtcccgccagcctagccccgtcacagtcatcacatacgctgtcacaatcgtggtgctgcgagagatgcctgcaaagcagtgcacaaggcagttccccccattaaggcggcagcagtggatgaagttgatacattctttgaagtgctttttgatgggtacctcaggggtatcagcgaccgggatgcgaaggtaggtgatatcctgcagcagaggctggggtgactcatggatagagatgatgtgtgtgatcttatttcggcccagctgatccaggtctttggcatcaatgaagtttccgaggtagagtccaggaagtaccttggtcatgccattgcccatgatcccgggggcggcggtccgggtgcacccccagctcgccgcccgggaagcgatccggtcacagctgccctgacggcccaggcccgacgcctgcagcctggcggggaacggggggcctggcgtccgcggccctgcccagccctgcccagccaccgccaccgcccgccgacccccggcccgggagggaaatggtggtggagccgccgctgccaccgccgccgccgcaggctcctcctaccccttcggtcatgtggggcccccgcctcgggtcgcggcggggggccggacaaagccccagtgtgccgggcccacggcccgcgggacaacggcagtttgttg

SEQ ID NO: 445143 - DNA, 1169 bp, Homo Sapiens
  misc_feature (151)..(151): n is a, c, g, or t
  misc_feature (153)..(153): n is a, c, g, or t
  misc_feature (156)..(156): n is a, c, g, or t
  misc_feature (158)..(175): n is a, c, g, or t
agttccggggggttgtaaaaacgagcggcccagtgccttaggctaataattcggcttcattataggggcccactttgtaccaggaaaagctggggtacgcgtaagccttgggggcccctcgaggggatactctagaggcggccggcccttntnttntnnnnnnnnnnnnnnnnnnccaactttgatattttattgaaaaaagtacacaaaaaccactgaggtacacaagcccaggtaagcataccaagcaagccccctcacaccttttgtctgaaaaaagcttgacttctttgcagcaatgtctcgcccattccagcagcagtatctcagttaacttggttccttttcctccaggctcaaaacaaaatcaaactcttcctgggtcaggggctggattgataatctctggcgagtgaagagaaccatattttttaaggggccaccagtagctttgtgagcttgatgataggatttgagctcagccaggggaatgaaacgtttcatcatccgaacaaactgtacatccaccatggaccacttagggttgtcctctttgctagatgggtcataatggggattgtttttctcaaactgtgtgtggtctgggtaagcctctttcacgatcttcatgagtcctgcgatgcctggctctttgcagttgctatggtagaagaaggcttcttctcccagcttcatggctctaaggaagttccgagcctggtagttacgaacaccatcccagcatgttgtctgtttgggctgtgctttgagatcctcaatgctgaacttcacatctacacctttctctaggcggctctctggctctgacttcatcagccagtggctgcttagattcttcaaacagtttttagtggctgaagtcttctgagggttggagtcctccactttagctaatgcctcacctgagttctcagttttggtgcgttttcctgatagtcccttgtctgaaccagaagtcccagccagcctcttccggggtctcgacatggtcacgctgcaggggactttagtgcggacgattcttgttatccttgctaattaggatcaactgaatggataatctagatgatgaagtaatttgctggctacagacccaacactctgcagactcgactgcggtccgcctccgctgcgccgcaggctgtccc

SEQ ID NO: 445144 - DNA, 869 bp, Homo Sapiens
ggcctcaaaaaaacccaaaattctccaaactcttctttcccgtggggtcccaggggggctgggaaatgaataaattcttcttgggcgaatttgaaaggaggacccaattatttttttaaagggggccccaccaggtaggctttggtgagcctttgaatgataaggattttgagcttccagcccagggggaaatgaaaaccgtttccttcatccggaaccaaaactgtacctcccaccatggacccacttaggggttgtcttctttgctagatgggtcataatgggggattgtttttctcaaaactgtgtgtggtctgggtaagcctctttcacgatcttcatgagtcctgcgatgcctggctctttgcagttgctatggtagaagaaggcttcttctcccagcttcatggctctaaggaagttccgagcctggtagttacgaacaccatcccagcatgttgtctgtttgggctgtgctttgagatcctcaatgctgaacttcacatctacacctttctctaggcggctctctggctctgacttcatcagccagtggctgcttagattcttcaaacagtttttagtggctgaagtcttctgagggttggagtcctccactttagctaatgcctcacctgagttctcagttttggtgcgttttcctgatagtcccttgtctgaaccagaagtcccagccagcctcttccggggtctcgacatggtcacgctgcaggggactttagtgcggacgattcttgttatccttgctaattaggatcaactgaatggataatctagatgatgaagtaatttgctggctacagacccaacactctgcagactcgactgcggtccgcctccgctgcccc

SEQ ID NO: 445145 - DNA, 1043 bp, Homo Sapiens
tcacgtcacacaaacccctcacacctttgtctgacacaagctgacttcttggcagcaatgtttcgcccattccaagcagcagtatctcagttaacttggttccttttcttccaggctcaaaacaaaatcaaactcttcatggaccacttagggttgtcctctttgctagatgggtcataatggggattgtttttctcaaactgtgtgtggtctgggtaagcctctttcacgatcttcatgagtcctgcgatgcctggctctttgcagttgctatggtagaagaaggcttcttctcccagcttcatggctctaaggaagttccgagcctggtagttacgaacaccatcccagcatgttgtctgtttgggctgtgctttgagatcctcaatgctgaacttcacatctacacctttctctaggcggctctctggctctgacttcatcagccagtggctgcttagattcttcaaacagtttttagtggctgaagtcttctgagggttggagtcctccactttagctaatgcctcacctgagttctcagttttggtgcgttttcctgatagtcccttgtctgaaccagaagtcccagccagcctcttccggggtctcgacatggtcacgctgcaggggactttagtgcggacgattctggaatcaacggagatacaagaaagaatgctaatgtcctcccaaaacccgcgcagagcgagatggaggcaacgagaggcagcctagaacgtctccaacttttgcgaaacacagacgcctacgtttgagccctcaaatccttccctccgttatctgcgccatttccatctcgcataacctgcccctaaactcttctcggttctgtccttggtccttctcatccaggaacccctatctcagtatgtagttcactgggaagtggctccacagagacacttttgttgggtgaatataagtaagccttgtgttaccttgttatccttgctaattaggatcaactgaatggataatctagatgatgaagtaatttgctggctacacctgtgccgaat

SEQ ID NO: 445146 - DNA, 501 bp, Homo Sapiens
gagatctacatagaaaaatatttatttagcagattccagttgatcatttatcatgcatcataaaggtacaggagcactaaaccacaatgatgaccctaaactccatttactttgagtgcaagtgtctgtcctacagcttccagacaggagggtctattttagaaatatgtgtttgttatggtagtgattgatagtttttcttcttgtactgaagcttgtacagcagaatgaaatagctgtaatgcttagcaaattgcagcccatttggaatctggcttctgtggcacatttcagaggcctctggcctcaacgtggtggatggagttgcactggggagagagttctttcctgggctccatcaaacagctggaacaaggatgagacatcaaaccgtctgtcttcatggacagaggcagccatctgtggcatttacatcattttgaagttgtggcctgcgcctttctgaaaaccaaatcccaacagttcttctgtcttctaaaa

SEQ ID NO: 445147 - DNA, 774 bp, Homo Sapiens
  misc_feature (19)..(19): n is a, c, g, or t
  misc_feature (508)..(546): n is a, c, g, or t
tataaaaatgacttacacnctttatcattggttactatttcaatgcaccctttaaaatttgctatgcaaatgagtatatgcttgtacttgactttaatatttgtgctaaagtgagcaaagctacctgtataaagaaaacacagtgggttgtgacaaggatgacatgaaaatacaggacaattctgacaatgtaggggctgattttatagtgtaagaactattaatgccccttgcttcttttttctgcctcttgctcttgtcttttggacatttcagtgattgtaagttcttcggtcatgtcagcccctgtcatcaacttgagttacagtagatggggcagacatggagtgtttgctatatagaactatctgtttgttttacttccttgtgcgctttttgttctctgttctcttgttaatgaagcttttcctgcccattattaatccaaactcttggaccttgtggttaggaaattcccttaacttccagccatatggcattatcgtgnnnnnnnnnnnnnnnnnnnnnnnnnnnnnnnnnnnnnnntccccatattttctgtcaaataagtactgtttactcatttagttgcttatcaagtacttattcttggttttaaaaaaaattaatggtaactgtatttttctcatttttagcattattcaaatgtttatattttaatacctttaaaccactttaaagttttttcatgtttaattatagttttaagaaaaactattttgaacaaccccaaatatagtgcatctagaaact

SEQ ID NO: 445148 - DNA, 391 bp, Homo Sapiens
ttgatgtgaaaaacatttataatttcttgtagttacagtgtgtatcttcattataatcattcttacaataaatacagaagtgctaaacagaccattatcacagtggcctgtgggctgaggcacaggaactgaggggtgctgcagacaccagtgcttctccagggctggccaggacaccttcagagaggctagtgaagaggagaggaatgtagggtgaatttgaaatgtgattaatagagtcaatgcagcacatgctagaaacagatacagagttttttgttgttttttaactattttaccagatgatactaactaaacaaacagaacaaagaaagagattcaagatctcacatgagtgagaatccagggccttcccctttggccctggccc

SEQ ID NO: 445149 - DNA, 2294 bp, Homo Sapiens
  misc_feature (142)..(152): n is a, c, g, or t
  misc_feature (907)..(926): n is a, c, g, or t
  misc_feature (1175)..(1196): n is a, c, g, or t
ttagagaggggcttgcccgcaagaatgtgattagacgggttcaatgttacgagtcggtgcccgccgttgtgtttgcgccacttatgatcgcgccgtctacaaagacctggcaaatttgtagacccagagtgcgggttttttnnnnnnnnnnngggggaaaaagaatttttataccccttaaagtatagcgtgtaaacagcaaaatatacctggtttttggggacttccagagttttattacccccattccaatggttcccccagttatagaatgccattcaggtttttcccttagggattttttcttcaaagaagttgtaaacttaatccaggggccatgttttccaaaaggaccctgtagtcctttgagaggctctgaggaataaagaagggggagtgcagtttaaggtcaaaccagtgttggtccccttttataaattcacaatgtgtaatagcatgttcaaaactcttagaagtcctacagtaaggaaacaaactcagcattccttcattttaattgaccatgcaatcccccacccccaacacacacacactttttttcttacatctattaacatctcttggaactactgctatatggaacacattttgccaaaagctgctcaaccatgaagaaaaggaaagagaagtagaacaacggactgacagaaaaaaaagaactctattctattctgaattctgttactaactggctgtatgtgtatgtcagacaagccacttaaacctatgaatttgggtctttctctagaaagtgacaggaccacctaattttagaagtcccattctagcacagaatttctgactctagtagacagaacaacttgatttataattctcttaaactatcaaaaataaccaaacagtggctgcagacacgcatgtgtgnnnnnnnnnnnnnnnnnnnngcaggttcccaataatcggtaagttaataaaatgaatatattttgatggcagaatgttgaaagacaagaaactaataaaaagtacttgtttttagctggaactagcatttggaagtaatgctagccagaggctatttccactgtgaaatgcacactcaaagtcctattgtaatattattttaagggtcttaggaggcccctcagaggagactgcaaggtcagggctagagtatgagaagtcctaagggnnnnnnnnnnnnnnnnnnnnnncctataaaccctgaggttgaaagctctggatagctcacctaaattactttcctctaatctaacccctcacagcctgaatttctgagtattgcttgaccagtagtgacacattcctgaggcactaatataacccaaatggaaactacaggtcctaggaaatccagataggtcacaatgggttcatgtgaagatcaaggtgagccagaagatctcatctgcaagccatttagcagccctttaactgtaaaaaggcagttccactttcaaaggctacagagtttgtttacatacaaggtctccatggtaacatgtgggatttcttcccactgtcatgggcccaacccacactagactcagaagtcaagggaaagctctgccagctaaacacttcttatcaaagagggtgtgaagaaaccttgcaattttaacaataactaagaccagcatgtaaggtggtcttacagagatcacttgcaggaacagatattgataggaacttcagaactcaaacagcactcacataacatggaatttatgctgaaaatcccatgccttctctctcagaaaagagaggagcatacctgtgtggagagcttgtattttctcccctcccatccattcggtttacaactgaatagcgaatgtgaacttgaaaactaatctttaataaatctataaaatgcaagatattatgaccaagttctgtactccgtttttactgaaatgacttctacttcatcaacgtacggtctgttcctgaagaaacttcctctttctgggtcaaattctgactgagaatgtaaaggtaggttatctttgagacttgagcttaaaactcctaccttttcataccacttgatctctgttgccctgtgaaaattctgtaaaccttcctcattgcatctgaggaatcatgctggaatgcttctttctggctcggagggttccaagacctccccagctagtggaccttcctagtccttatgccgttgctgtagcaatggggcaggtcaagtttcctgatcatagctgtgaagcactctggggcacctctgctcctggtatttcagggtgatattacatcactgctgctaattt

SEQ ID NO: 445150 - DNA, 914 bp, Homo Sapiens
  misc_feature (775)..(775): n is a, c, g, or t
  misc_feature (785)..(785): n is a, c, g, or t
  misc_feature (798)..(798): n is a, c, g, or t
  misc_feature (812)..(812): n is a, c, g, or t
  misc_feature (839)..(839): n is a, c, g, or t
  misc_feature (863)..(863): n is a, c, g, or t
  misc_feature (885)..(885): n is a, c, g, or t
ggcactaaaacatttgttgagagttggctaaactctagattctgtgccaggcactgtacagggtgatggagatcactcataagaaggcctcttgctcttagccagatcatatgtaatactaaatttaaattttttgcattaaaaggctaaaaaatcatttgtttttgttaattatatactggttgatttatagatgtaattagcacatattcataagagacaaatatatacaatgagttactatacatatacaaagtgattttagctgtataaagtgatattgcaaaaaactacagctaatgtttcttgctgggtaattattagcataaatatcaggttcttagaggtctttaagagaatactttagagctaccaaaattagcagcagtgatgtaatatcaccctgaaataccaggagcagaggtgccccagagtgcttcacagctatgatcaggaaacttgacctgccccattgctacagcaacggcataaggactaggaaggtccactagctggggaggtcttggaaccctccgagccagaaagaagcattccagcatgattcctcagatgcaatgaggaaggtttacagaattttcacagggcaacagagatcaagtggtatggaaaaggtaggagttttaagctcaagtctcaaagataacctacctttacattctcagtcagactttgacccagaaagaggaagtttcttcaggaacagaccgtacgttgatgaagtagaagtcattttcagtgaaaaacggagtacagnacttgggtcntaatattctttgncttttataggtttntttaaaggtttagttttcaggttcacnttcgctatttcagttcgtaaaccnattggctggggagggggagaanatacaaggtttttccacacggtattgttc

SEQ ID NO: 445151 - DNA, 312 bp, Homo Sapiens
  misc_feature (45)..(65): n is a, c, g, or t
atttaggtgagctatccagagctttcaacctcagggtttataggnnnnnnnnnnnnnnnnnnnnncccttaggacttctcatactctagccctgaccttgcagtctcctctgaggggcctcctaagacccttaaaataatattacaataggactttgagtgtgcatttcacagtggaaatacctctggctagcattacttccaaatgctagttccagctaaaaacaagtactttttattagtttcttgtctttcaacattctgccatcaaaatatattcattttattaacttaccgattattgggaacctgc

SEQ ID NO: 445152 - DNA, 1864 bp, Homo Sapiens
  misc_feature (1459)..(1585): n is a, c, g, or t
ttgacggactctttttaatctatacagtgatccttaatctttggggagggggacaggtcacacacagactactttggagaatacatgaaagctataggtgacttcatcccacctccaaaatacatgcacatatgtctcaactttcacatacagtttcggggggttcacaggtttttaaaaaatccagtaaagaactcatgcacttgtgcttttccttgccactgtcttttcagtaaagagaacatccagccagccccctgcacaggcttcttcctccctcttcctgacagcagcctctgtgcttggccagactccactgagcccttcatttacagagtgggcagcccctcctcttcagttctggtgggcagagcaactttgcccctctctgtttctccttactggattagatggttatcatgtcttccaggagtttcccagccttccagagtgcaggcaaatccagtctccctccaggatgtcatcagaggcaccccacattcttccacgatcatgtctttatggtgatctaggagcactctgccattatccacatacagcatgctcagcggcttggtctttcactggggcacaacaagtggaagggactcggtggggctggtaacgtttcagcagactcttgatgtatgcatggttggtcggatgaaactcctccccaacaggattaggacactcgccctcacagcgataggcgttgtactgcttggggtagatgatccaggagccccatccgatcaggttgaagtccacctggaacttgaccttcccgacacagttgacttctgtctggcaagtgatgttcgacggtgcctcttgccccactcccatggacagctgtccctcctgggcccgccaggagctctcggcttcccacagcaaggtggacccacccagctgcctctgctcctgcgagaggttggagtagagcataaggagcacattggtggcaggcggtgtggggggtcgcggccagcactctccagctaccctggacatctgcttctccagggccccagggcgcttcagccacttggagagaggcctggtcacctcctaaaccatgctgcccaaggaaaaggtgacctgggacaaagtgacagtgaataggtccatctgaaaccgctctaagcagctgtctgaagcctgctctgtgtcgggctttggctggtggaaaatctcaatggcaagtgagccctcagtggggaggtccacagggctggacagctgcagccggagctcagcccatgccagatcctcttgttggctcaggaaggagaagtcaaaagcaaacgtccagttctgcccatccactgccacatcttggtaggagaaaaccaagaaggaaggagggtgagtgagggcctcccccagcctcagtcagtgtcacaaccaccatagctcttgctggaggccttaccttatatagaattaccttcgnnnnnnnnnnnnnnnnnnnnnnnnnnnnnnnnnnnnnnnnnnnnnnnnnnnnnnnnnnnnnnnnnnnnnnnnnnnnnnnnnnnnnnnnnnnnnnnnnnnnnnnnnnnnnnnnnnnnnnnnnnnnnnngtaaacctggatttgcccaactgccaagcccagactccgaattactgttcttccagtcccccttccaagataacttgcacagccagaggacagtcagtaaaaatgtgatgagttgcatctccccctcccctgtctcctcccatacatgaagtctgaccaacatggagaaaccctgtctctactaaaaatacaaaattagctgggcgtggtggtttgcgcctgtaatcccagccactcgagaatcattgaacccgggaggtaagagtgcagtggccaaga

SEQ ID NO: 445153 - DNA, 616 bp, Homo Sapiens
tttttttaccagttaaagcactttaatgctttaaggtgaaaacgaaatcccatccgtgtttttcgtgtaagatcgtgcttctccgagcagtattaatggacgccctccaatgacataacaactgtttttggtaatgtaatcttgggaaaatgtgttatttttttagctgtgtttcagtggggatttttgtttttgtaacataataaagtgtatgttccaatgaccggttctcatgactcaacctaaatctccaaagggctcagacaaacagggcggctcctcacaggcaggaagcccgtggcctctgtggccggccctggcaccccacttgagtttctctgtgtcgtgagtctgatgggtccctggggtgtccctctgccctgtgcctcggaggacctgcgggccaagccgagtagcctcatgggactgaccgggcctctcaggcctcctgaagtacaggcccatgagccctcatccaagccctgtggggcccaggccttctggactttagctaggccaagcagggtctcagggcgtcacaaacaccgacacagaacgcactcccgtttctcagcaaaacctaagaaaacaaaaggcagcagagagcctcatgttg

SEQ ID NO: 445154 - DNA, 569 bp, Homo Sapiens
gattacgaacatattgctttatttcttggtagtaaattaaggctttctagattcatacagcacgcagtgatttgaacattagaattaaaaaacaacaacaacaaacaatgagcattcaatttagcagagccaggaaggaagcaatgttttaaaacagataaatttcctagtgagacctttggtttggtctccaaaaatctgctgagctgtttccccagtaacctccatcatagattcccaccccaagggagaacagaatggatgaacaggagactgggagaaaagaagaaactggcaagacggtatgtgctgggcaatcagtgtgaacagtcagctttgtctcatgtttggaagacagtttaggtgatgcggtcagggattcattctctggatctccctgctcattctcagagtattaaaccagctcactcggaagaccccagggccaaggattagggacaatcctttgtgacacccaaatcctgaaacttcaaatagggtcacaagtcacagagctgaggaatgctgccttcaacttctttcatggttttaaactctgtggctttcac

SEQ ID NO: 445155 - DNA, 616 bp, Homo Sapiens
tttgaggagtttctatttattaagtcacagcatattttcattttcaaactctatgtatgtgtctatataaaaaagtacaaggagttatcagcgtcctggagagtcctgtgctgtgagaagcagctggctgggaggacctgcccctttatgaggcagcaattacgatttgaggttaacaacgtggagctgatcccgtgctctgtgcagagcccccagcagcaccaggctccatggtgtgcagcaacgcagccaggggccagagtacctttggaagcctaaggctccacggcccagcagggtgctccaggaggcccactggtgccatagctcagttttcagtagatctcatgttttgggctccccagcctttagaaatcatctgccaccgactgcagggacttctgcggagttagtcaaccaaggggcaaggggaggcatctgcagtggccttgccactggtcaccctgaagatggttggcaatgtctcgcatgggagagggaggcaggctgaagtcaggacagacagtgagacagggctaatgaggttggggaaagtgatgatttcagagccctctgtttttagatgaaaaagcctaagaaagaaagaggtgacaaa

SEQ ID NO: 445156 - DNA, 1359 bp, Homo Sapiens
  misc_feature (863)..(929): n is a, c, g, or t
agttgtcgctctctttttcgacttgttttttcttctctatgtccttattttctttcgtctctcttgtttgttggttccttgctaccttctgttcttctcttcggctctgtcttacttttgctcttctgttcgtctctttcgtttgtccctgtctttttttattcgtctttgtccttcggctctgctcctctctctttgttgggtttgctcattcttgtcttctgtttggtctggtctttcgtgtctcgctgtgtttgtgtgcgtgtcgtttgtctttttttcggtgttcttttgtccgtctgtgttctgctgtttgtttgtattgtttccgtgtgctatcgggcgttgttgttcaggtcgtgcttctcgcgtgcgctggtatattatgtcggtttcctctccagttagcttgatgttgtccgtggttgtggctgacattgtttgtctgtttcgtgtctgtgtcgtgtagtttgctgctgttgcttttggttggaccccatgctttagtactctgttgttttgttctgtttcttgtttcctgtcctgctggggcgttttgtaagtgcttcgttggtgtgtgttttggttccctcactctttttgtgctcgtctccgcctttgtgattcaggttggtctgtctgttcctcatgattttcgctctttctactcgttgtttcctcgctgcttacattgtttctttttttgcttgtcctcctgtgcgtcttgtctgtttaattcatgcgcctctctcctatttgtggggccgccctttgtttttacgctaatatgtagtggtgctagcggtcggtgtgtctgagtggctccctctactgggggactattttgttggcccccccccccnnnnnnnnnnnnnnnnnnnnnnnnnnnnnnnnnnnnnnnnnnnnnnnnnnnnnnnnnnnnnnnnnnncatctttatagtaagtttattgtatttttatttcagctcaggggagcaggggtggagagtgggcacaaatgcaaagtaagcaaatggggagccccagcagcaataggggggtcttcctggaagaggcaggctttaaagacaggaggagaaggaaatagggaaaaggagttgggactgagggaagtggtgaggaagggtaggaagagaggggatcctgagagaagtggatcaagaagatttgtaaccctgatttccctgtgtcctgaatggtctggaggagggtaagggagggtgtggggcaggcgcagagcctggcacaatcacctttgaggtcccttagagggttccctctcaggctagctaccccctctcccagcaaagctcgctttcaggaggttctgcacagggtcagtgactggtcactgggcat

SEQ ID NO: 445157 - DNA, 921 bp, Homo Sapiens
ataacaatacaatacaaatatttacttaaaactcacaaaaacataagcacctttaatccatcgggaaggcacctgcagaatgacatttggcctctaaatggatcgtgttggaggttgttaaaaacggaggctttggtgatggtgggatgacctttacgaggcttaccttggaacattttttgaaggtcaggggaaatacacatcttcaagttgaatttagaaaaaaatatagtgtccaaatctggcagtccctcccccaacccctgagacctattcacgaacaggatgggtcgggcgagctggggggctggaggcatggccccgctcccggggcgcatgggtgtggacagagcgtggggcgggcccaggcgctggggtgcagctaggtcatgtgattcagctccaggtgggggcgcggctccttccctctgttctctccgggctggggtcccacaccccgtggtgccgaggcgtagatgaagtcaggtgggaggggagggagaagccttcactgtccaggatcaggacgtgcacgggacactcacgaacgaatggcatgctgaggtcacgaggttgctctcgggagcccgggctcggcggctcctagcccatgaagcaagccggccccacttcaaatccaaatttctgtgacgcttcaccgaagtcattgaacatgatgtccacgatgggcacctgctccactttgggggtgtcgatctccagaaccgtcttctggtagcctttcttggtagcacagccgtccaccagggcgcggatgtaggggttgttgtcataggacatctcctcgtcgttggagcccaggaagcggagggccttgtcgtagctgcccgtggctgcgtcctgccaggccactgactggtagcagtggtaggtgacgttctggtgggcagaggcgctcag

SEQ ID NO: 445158 - DNA, 306 bp, Homo Sapiens
ttaagtttcttagataatgaattttagatttcctttctgtcttttatcctacaatttcttggatgaagtttggagtaattaattgtatcttgatcatgattgcaaacttcttttctacaaattataaggaaagtaactaattacaatgcttaaagacgttttacaccttgtaatcttcatctcggctctcaaaggtagctattttggctctatttgtggttcaagtatcttaaagtatggactccttgtacttattaagagttgcagtataaaactctcatcactaataactttcttttcttttta

SEQ ID NO: 445159 - DNA, 1057 bp, Homo Sapiens
  misc_feature (81)..(91): n is a, c, g, or t
  misc_feature (286)..(349): n is a, c, g, or t
  misc_feature (351)..(351): n is a, c, g, or t
  misc_feature (353)..(355): n is a, c, g, or t
accccttttcccccttaaaaatattgttttttcccctggagcgtttaaatattccgtaagggagttgtgccccaatatgtnnnnnnnnnnngaaggtaaagttcctttcccaaaagattcccaaaggtaggcagtttttccccgtcccggccgttgtaaaaacggcggcccagggccctaggttataattagggccccccataggggccccctttttccaagaaaaactggggtccgcgtaagacttgggcccctcggggggatactttagaacggggcccccccnnnnnnnnnnnnnnnnnnnnnnnnnnnnnnnnnnnnnnnnnnnnnnnnnnnnnnnnnnnnnnnntntnnnttttcaagatagaaggtctttattcaatagcagatgagagactatgcctcagtcctctgaggggatgcatttcccccacataccattcctttcccacgtttccattctctgcaggctacagcttgatggaaaaaaggggattgttctagaggtacttatacacaacctttgagggcacagtttggaggtggagtcgcacaggacatttgtaaaagtaggacagcaaagtttcactgtagcccacgaggaagtagtacttgtgtggagacaactgcctcaggaccacggcacagatctccaactggttaccccggcgctttaaaaccagctggtcagccaggcagcctgggaaggtaccccacatgaacttgcgaaggaaaacatcctccaccgttcgctctgcggcatggtcctctccatccaggttacctgtgtgcagcgacagccagcctttacggtgggcgatgtagtgcggcgcgtgtgcctcctcgtaggtcaccggcttgtcccccttgcttacgcgtactcgggccgcccggttcttggcgcagaccggggaggtgtgcagggcgcgccaagcgcaaggcagctctcggctccaggacagcacccgtggccccagcaacccgctgcacacggaggccgccatccctcgtgccgaattcagcacccggcctcgtacctagcctacgtttcccgctc

SEQ ID NO: 445160 - DNA, 1670 bp, Homo Sapiens
  misc_feature (240)..(240): n is a, c, g, or t
  misc_feature (304)..(312): n is a, c, g, or t
  misc_feature (466)..(466): n is a, c, g, or t
  misc_feature (542)..(553): n is a, c, g, or t
  misc_feature (609)..(729): n is a, c, g, or t
  misc_feature (912)..(983): n is a, c, g, or t
  misc_feature (1022)..(1215): n is a, c, g, or t
tgcccgcaggagctatttgcgggcaatatataagccggcgcgggtgtgggatgagaagacatctcgctgcgcccccttgtttcgtcataaagggtggtgcgcctgatggggtgtgggggtttgtggtgttgatcccctttgcggcgagtgtgaagtctgtttgtactaccgggatactggtgtttgtgagcgttggggcggaattctataaggatgtttttttagtgctcccccccctcntctccgcgggggggttagtgtttgggatagtgggggggagggaggccctgattaattaatacannnnnnnnnaggcgtattcgggttcttcactcgcgccgcgaggtgcgtgagtgttctccattttgtgggggggagtgctgtaaaggtagaggcgaaccagctcgcggggactttcatgcccccggttgggcggggtaatgtgtaaatataaggttgtttgggncccctgtgggtattatgggcgagattcgtttccgaggtctctgtgggcgaggtttcagtaaatgtctttttgtggnnnnnnnnnnnnttattggggagaagacacggctctagatgaagttcttaagtgtttttgtggtgcgnnnnnnnnnnnnnnnnnnnnnnnnnnnnnnnnnnnnnnnnnnnnnnnnnnnnnnnnnnnnnnnnnnnnnnnnnnnnnnnnnnnnnnnnnnnnnnnnnnnnnnnnnnnnnnnnnnnnnnnnngagaaaaggtatctggtttatttaggttgctgtgatctccctgagaaataagagtcagtatagaccaacactgtccaaccaatagaactttctgccatgatggcatatcctgtagctgcactgtcccctcatgtggctgtctgaacacttgaatgactaatgtgactgagaaactgagcttgnnnnnnnnnnnnnnnnnnnnnnnnnnnnnnnnnnnnnnnnnnnnnnnnnnnnnnnnnnnnnnnnnnnnnnnngtctagctgagaccagctggtatctcaacttgagggcannnnnnnnnnnnnnnnnnnnnnnnnnnnnnnnnnnnnnnnnnnnnnnnnnnnnnnnnnnnnnnnnnnnnnnnnnnnnnnnnnnnnnnnnnnnnnnnnnnnnnnnnnnnnnnnnnnnnnnnnnnnnnnnnnnnnnnnnnnnnnnnnnnnnnnnnnnnnnnnnnnnnnnnnnnnnnnnnnnnnnnnnnnnnnnnnngtgggtcgtagactgtctagcacctgcgctttggacaaggacagaccgcgaaactgcaggcctgggaactgggataggccaaaggatccagggcgtgcacatcaggaagaaagatgggtacagaggccaacagggaagtccgctaaggccctcttatgccatggcagccaaaacaaagaagcatctacgtgagcgcaatagggcctgaggcgagcttgccaggtagccaacggaacaaaggacagcaagaccaggattcgctactccgatgtcgaaagggagctgaacgtagacaactccactcgatgtgcagggatcacctacaaagggatacaaggacacgggggagtgcgcaaaggtgagaagacccggaaagcacccacaaaaggtaagtaaggcagaaacattaccataggatccaatcatagtaaaccagaaaaggaagatgggaaaca

SEQ ID NO: 445161 - DNA, 836 bp, Homo Sapiens
ttgatctttaaacattttatgggaaacagctgttgagttttctctagaaaagcccacaaggttccataaccccataggcatacagcctcgacaggcagggctccatcaggctcctcttgaactgggcactccttcacggaaggcaggaatgcacgtgtcttcacttcctgctgctctgcacgcacgtcacgatatctggcagaaggtggtttctgttttccttggtgacattaaacaccttcacatcctttctgtttctgatttcttctacaagagccagtggctttcctttaggaactgggattgtgccaaggattatagtccctggggtagacagcgtctgacgaacagcttgaatgaaaagctgactgaagagctccatcttcccaatctcatcgatgacgcacactctttgccctgggccactgctgcagtcggcattcctcaagacgggtagtgccaactgctcaaaagaagtcaggtcgaccacatactgcccaactcggcattcacgttttccaggtggaggctctaacccaactctcgataaaggcccccgggtgccggacaacgtgacgacatcgaatcctattcttctccctccctgtctgacttcttcggtataaaatccatcaacaggcacaccagaggattttaaaacctcactggctttatggatcaatgttgtttttccaactcctgggggccccgttaggaacacgtgccgggccatactggtgggcgggggtaggggttgcggtcaggggagcagtccaggttggggtcgcaattcaggtcaggtccggaccagggtcgcgactcaggacccgcccccc

SEQ ID NO: 445162 - DNA, 808 bp, Homo Sapiens
ctaacatttaggacagcttgatttcttagaagcccacaggtccaaaccccataggcatacagcctcgacagcggctccatcagctcctcttgactggcactccttcacggaaggcaggaatgcacgtggtcttcacttcctgctgctctgcaacgcaacgtcacgattatctggcagaaggtggtttctgttttccttggtgacattaaacaccttcacatcctttctgtttctgatttcttctacaagagccagtggctttcctttaggaactgggattgtgccaaggattatagtccctggggtagacagcgtctgacgaacagcttgaatgaaaagctgactgaagagctccatcttcccaatctcatcgatgacgcacactctttgccctgggccactgctgcagtcggcattcctcaagacgggtagtgccaactgctcaaaagaagtcaggtcgaccacatactgcccaactcggcattcacgttttccaggtggaggctctaacccaactctcgataaaggcccccgggtgccggacaacgtgacgacatcgaatcctattcttctccctccctgtctgacttcttcggtataaaatccatcaacaggcacaccagaggattttaaaacctcactggctttatggatcaatgttgtttttccaactcctgggggccccgttaggaacacgtgccgggccatgctggtgggcgggggtaggggttgcggtcaggggagcagtccaggttgggtcgccctcgtgccgattcaccacccagcctcgtacctagcctaggtgcgc

SEQ ID NO: 445163 - DNA, 933 bp, Homo Sapiens
cctgtctgtaaccatcagatttatttttatatttattaagcagtaagcaaacagagttgggggagatgacctaaaatggttttcttttggaataatattttttaaaaaatcaaataactgttatcactttaagttgcatgaggctgaagctgcacctggagaggaatttaattttcatgacatgcaaaactgattaggcagtgaactctttcctcccgcttcccctgaacacatttataaacttcaacgggggtgaattccatctaatactctgaaaaccatttctcatctcacagtttacccaaatcatgtgcatgactgcaagaggaaataaacaagaaatctttaagcatagataagccacaatggatagttaatcttgtacagacaatccagcattaaggctaatttgatcttttaaacattttatgggaaacagctgttgagttttctctagaaaagcccacaaggttccataaccccataggcatacagcctcgacaggcagggctccatcaggctcctcttgaactgggcactccttcacggaaggcaggaatgcacgtgtcttcacttcctgctgctctgcacgcacgtcacgatatctggcagaaggtggtttctgttttccttggtgacattaaacaccttcacatcctttctgtttctgatttcttctacaagagccagtggctttcctttaggaactgggattgtgccaaggattatagtccctggggtagacagcgtctgacgaacagcttgaatgaaaagctgactgaagagctccatcttcccaatctcatcgatgacgcacactctttgccctgggccactgctgcagtcggcattcctcaagacgggtagtgccaactgctcaaaagaagtcagcaccacccaggcctcgctaccttaaacccgtaggggtactag

SEQ ID NO: 445164 - DNA, 642 bp, Homo Sapiens
ccagaaagtacgggattacaggcgtgagtcactgggcctggcctttgaaacattcttttaaacttcttttagagatggggtcttggtatgctgtccatttcctggtttggacatggttttgcgggctcggtggaccttgggctgtccctctgggctcgtggtggctggagggggttcagaccctgctgctgcagctccctgggctcctggcatactcagtagcctcatagccaaactctggacagatggaggtgattttcccgcccctgtcattgacatcttggcccggctaggacaggaaccccccttgctgggggaagaggggaatgactttgtggcatggcccagcaggatccggcccccacggaggtccccatctccctcaagattctcagattcatccccaatgagtggtgtagcccctacaggggtgtcagccccctcatcaccaacagtgacagtgacagaggctggagatgaggggccagcaggctccagggagtcgggggtggccttgggcagggtttcttcactacgaggggtgtcccccaaagagccatgaactctctcggtggctcctctggtttccttctccagcagcagcgcccccatctcagcgggggcctccccctcggcggccgc

SEQ ID NO: 445165 - DNA, 819 bp, Homo Sapiens
aacaaaagaaaacattttattgcaatttgattaacaaggagacaggagcccagctcaaatctgtcccattgtacttattttaaagagttattttagtagaaaaggtgtagggagtggattctgtgattagtaggtgattgatagaaagaaaaggaagggctggaaaatcctcgggcatgggcagttacctcttcatgcctcctcatgggtcccatgtgcaaactcagagggagttagtatgaaacatgcggtacaaatttaggctgtgtgtcagcaagctcattctgcacaaactctggttttatctctttatcttgacacctgaagggtgtgcataatcccatcactccccaaaatatgccctacatgcagaatttaaattcatcctgcctccttgactctgagggccacttcctaccacagctagggtcccttttctgtcagcattctttctggagcttgcttatatcaaacctaagaaaagcaactccaggactccagacaaaacagatctccacccatctggcggccagaaagggaagctctgggcaaagagggagagagaatcaacctcactcactctggatgggcctcctgtgtgttcacagaggacagagcagagtcccccagttcatcctcaatatcagcgtccccagactggcttaggtcctgctagaagaacccaggattttgcctggcagaaagacacaagacctttgccaggatcagcctggtctctcaccaattcatgtcaggtgaagacttatagtggagctgtttaaatccttagaaaaatgattttaaatgccttgaagtcca

SEQ ID NO: 445166 - DNA, 255 bp, Homo Sapiens
ctgtcgtgcctgctttactggttgagaagcactagtttcagaacattttgctaaactccacttcgtgcagtttgtttttccagaaaaaagaaactccacttgctgcagttttgtttttccagaaaaaagtctctgtcctgttttctaaatatgaaacatagtaacaataaatgttcttttaaaaagtacatatccccttcccccaagtccaggctcactgagccaaacaggtctgaaccagattgggctcaaatc

SEQ ID NO: 445167 - DNA, 423 bp, Homo Sapiens
agcttatcttaatttcctgcagtgagacaacacatgtggaactgggaaggacagctgttgttacgagcagtttttcctggtcatggttgtaaagctctgtaacccacattgtaaagccgtgaatgtttttagtcttgttgacgagtttttagagactgctggacctctgagggctttgagagtgcagctgtgatgatgtttcactattacttcagtgtgaatgtagaaccaaggactcatcttcattttatacctaaaagtgccttgtcaagaaatttttgcatgttttaaaagataaatatttttgtacacagagttcaaggggaaatgcactttaaaaatcccaagaatggatgttctttgtgtggtatgagaggttggtttgtatctcaaaagcaaaaatgtaataaaggaagacaaaac

SEQ ID NO: 445168 - DNA, 421 bp, Homo Sapiens
  misc_feature (224)..(232): n is a, c, g, or t
  misc_feature (316)..(333): n is a, c, g, or t
ttgaacatattgccatttattttgttgaggttaaacatataattttaacgtattcaaacttattaatggacatttaaaaagctgaaaaagtgaagagctgtaccatgtcgtggattattttaatgtcataaaattcaaaggaatgccacatttcaataaaacattttaagaagttgacatacttttattagaatcatgcaaatattagagaaaggttaatggcnnnnnnnnnagtagacattactgagaaaactggctcattatatcacaaaaagtgaaacttggatctcatatataaaggtgtatttcactgaannnnnnnnnnnnnnnnnngagacagagtttccactcttgtcgcccaggcttcaaaaacaaaaacaaagggcaaacagaaaagcaaagcattccttccatctaggag

SEQ ID NO: 445169 - DNA, 694 bp, Homo Sapiens
tttttttaacaatggtatgaatctcatttattgaaaacattatttctcacctttctcaaattgaagactgcaaaaaataaaagcagtgctttattgagttgtcatgagcctcgggcgggagcagcagcactgcctctccacgctccgggaaaccgcagctggcgtgtgccacatcggtcccacctcgctttacaaaacagtcctgaagcttaatcaaataaaactattgtacacaacatttacattagaaaaagagagctgggtgtaggaaagccgggcctggtgttccctttaagcgaaggtggctccacagttggggcatcgtcgcttcctcaaggcaaaacagcaaatgaacccaaaggggaagaggatgatggccaggaagatgcccaggaaggtgaagcagtcctccagcaccccaaccctgcagacaggacagcctcctacgaccacgatagagttggcaggatagcgggtgacggtccggctgtggatgttgtagaccctgggatggtgggtgggtatccctgtgacgaggtaggggtagggcggcggcgggggcgcggcggggatggcgccgtagccgtgcgggccgcacgcgtagtcgccctggccggcctccaggttgtaggcgggcggccgctcctgcagcagcggcttgtggtccatggcggcccggccgcgccagccgctc

SEQ ID NO: 445170 - DNA, 886 bp, Homo Sapiens
  misc_feature (457)..(457): n is a, c, g, or t
cagtgtgcttcagggttgaaacagggccccccaaaccacaacaagcccccccggggccagttgaaggggttagggattagtttcctgggtctcccagaaaagcccaggggtgaaagggtggggggagaattccatttggctgggggaatgaattctgggaatgaaactttccttctccaaggggaggtgagggcagggccaggtcgggggagcaaagagggaaagccacctggacgggggtaagaggagcttaggtccccctgctctggcagggcctggggtgggggggtggcgatcacttgtccgagttcaggcccatcatgttcttgagggcgtttttgaggctggttctgctgggggacttgacagcaggccggagctccgggctctgctcatcctttcgtagctccatctcgatgaccatcacctttgggcctttggcggactccacccctanacccccgatcccccgcccggcccgctaaccgctatttcttatccttgcgagactcccccagccccttggccttcttctcactgacagctttggtgcttctgctgtggtccagcattgcatacagcactggcgtctgccgcccgcgcttcgacgcgtcctttcctggcttgtgcaatttccccttctccatagcactgagcctcctctgcagggccgcctgcctgcgtagccagcagtaccgaaccacgtagaaaagcagcagcagcaacagcaccaccccgaggacacccccgatcacagctcccagaacgaccccgtacctagttggcactttttcaaagacatacagcgtgacctgagaggtcttgcccactatgtctggagggtttttgacgtcacaagtgaacgtgccattgtcactgtagtcta

SEQ ID NO: 445171 - DNA, 911 bp, Homo Sapiens
  misc_feature (604)..(634): n is a, c, g, or t
  misc_feature (775)..(775): n is a, c, g, or t
  misc_feature (867)..(867): n is a, c, g, or t
tccgccaaaggcccaaaggtgatggtcatcgagatggagctacgaaaggatgagcagagcccggagctccggcctgctgtcaagtcccccagcagaaccagcctcaaaaacgccctcaagaacatgatgggcctgaactcggacaagtgatcgccacccccccaccccaggccctgccagagcagggggacctaggctcctcttacccccgtctaggtgctttccctctttgctcccccgccctgccctgccctcacctccctttgagatgtaagtttcattccagaattcattccccaggcaattgtattctcccccaccttcacccctggctttctgggagcccaggagctaatcctacccctcacctgccccgggggctgtgtgtttggtgcctgtccacctgagcactgagaagaaagggactttgataccctctgcctcaagtccaggccacctggcattcccatctcctgcatcccccagcctgtccccctggctgtttcctctcccgtccctccctcccctctaccaggtggcccagctccatactctgtccccccagctaatacccagagcacccagatcagactctccttcaggnnnnnnnnnnnnnnnnnnnnnnnnnnnnnnnatccattctttgtttgtttacctgtgctcatcctctgcccttacacccatgactgaggaccaatgacgtcatgtggcttttgcaattcacgccccccttaagtccttaatgaagagccagcccaagtagaggggcccctgnatcctcacactttcagtatagcatttggttcccccctggaccactttgggagcactggttctggggactccagggtctttgagggaaagagnacccgagaagagaaggatggggattccttccattagggtcaagg

SEQ ID NO: 445172 - DNA, 1681 bp, Homo Sapiens
  misc_feature (55)..(63): n is a, c, g, or t
tttaactttttgggggcctggggcttcctttccatttaaagggagactttaaaannnnnnnnnccgttgaaatttggcaaaaaggcccaccaaggacggtccaattggtcccctccagtccatggggtgtaaggggccagagggatgagccaccaggtaaccaaaccaaagaaatgggttaaaaatttaaaaattaataacctaaataaaccctgaaggagagtctgatctgggtgctctgggtattagctggggggacagagtatggagctgggccacctggtagaggggagggagggacgggagaggaaacagccagggggacaggctgggggatgcaggagatgggaatgccaggtggcctggacttgaggcagagggtatcaaagtccctttcttctcagtgctcaggtggacaggcaccaaacacacagcccccggggcaggtgaggggtaggattagctcctgggctcccagaaagccaggggtgaaggtgggggagaatacaattgcctggggaatgaattctggaatgaaacttacatctcaaagggaggtgagggcagggcagggcgggggagcaaagagggaaagcacctagacgggggtaagaggagcctaggtccccctgctctggcagggcctggggtgggggggtggcgatcacttgtccgagttcaggcccatcatgttcttgagggcgtttttgaggctggttctgctgggggacttgacagcaggccggagctccgggctctgctcatcctttcgtagctccatctcgatgaccatcacctttgggcctttggcggactccacccctaacccccgatcccccgcccggcccgctaaccgctatttcttatccttgcgagactcccccagccccttggccttcttctcactgacagctttggtgcttctgctgtggtccagcattgcatacagcactggcgtctgccgcccgcgcttcgacgcgtcctttcctggcttgtgcaatttccccttctccatagcactgagcctcctctgcagggccgcctgcctgcgtagccagcagtaccgaaccacgtagaaaagcagcagcagcaacagcaccaccccgaggacacccccgatcacagctcccagaacgaccccgtacctagttggcactttttcaaagacatacagcgtgacctgagaggtcttgcccactatgtctggagggtttttgacgtcacaagtgaacgtgccattgtcactgtagtctaggttgtgtatgacaatggagccatccttccagcgagggtcccctacccactggatgcgctctttgaaggtccccacctcgtcaatgtagggttgtcccttggcatagtggaagatcgaaatggcatctctgcccccttcgggctggtagcgccaggtgaaggagatgtcatctgagacccactcactggaccagaaggagcagtgcagggtcacccgggagcccacagcaccatggacctccctgtcggtgtaaaccacgatggcctgggccggggacagcaccaaagaagagaagagcagcacagccaggatagggctggggctggatgagggagccccaggagccatagctggggcaggggcaggggcccggagcatctgtggggttgagaaagtggcgatcccgagaattccggaccggtccag

SEQ ID NO: 445173 - DNA, 773 bp, Homo Sapiens
cccccagcgggaggatgaagcggcggaacgccgactgcagtaagctccgccgccccctaaagcggaaccggatcaccgagggcatttacggcagtacatttttatacctgaaattcctggtggtgtgggcacttgtcctcctagcagattttgtcctggagttcagatttgaatacctgtggccattctggcttttcatcagaagcgtctatgattccttcagataccagggactggccttctcagtattttttgtttgtgtagcattcacgtcaaatataatatgcctgctgttcatccccatacagtggcttttttttgctgctagcacatatgtatgggttcagtacgtatggcacacagagaggggagtgtgtttgcctacagtgtctctctggatcctctttgtttatattgaagcagccattagatttaaagatctcaaaaactttcatgtagacctttgtcgtccatttgctgctcactgtattgggtaccctgtggtaactttggggtttggcttcaaaagttacgtaagctacaaaatgcggttaaggaagcaaaaagaagtacaaaaagagaacgagttttacatgcaacttcttcaacaagctctccctccagagcaacagatgctacagaagcaagaaaaagaggccgaggaagcagccaaaggattacctgatatggattcttcgatccttatacaccacaatggaggtatcccagccaacaaaaaactctccacacctttgccagagatagaataccga

SEQ ID NO: 445174 - DNA, 537 bp, Homo Sapiens
tttttttaaatcttattccctttattctcttcaactaagcaacatgaccaccagtgacacaacactgttttggacacacaacactcaaaaatggggcctctcttcactccatggggacaagtccggtgactggggcttccctagtgagggcaaaggagtctgggagctgctgacctcagggcaggtcatggaaccccacctcttggctgtgatggcttcaagtttccccaccattcaggattcatgcccagttccaagttcccatctgacctccatgtccatagcagtttcaagtttcactctaagctctcccctctgctttccccactgactccctgaccctatctgttgggctcctccctccaccagggcgtttctgaggggcctggggcctgcatgtgattggacaagagggtttggctgcacagtgccttccagactcagttgtggtgagcaaatgctttgacccctgggccttcatctgagccgatctgagcaactctagccactgccacctccctgcttcaatcctcccaa

SEQ ID NO: 445175 - DNA, 118 bp, Homo Sapiens
  misc_feature (118)..(118): n is a, c, g, or t
aggttttttcccctaaatattaaaactgccttgattagatgggtgagtcttctgcatttgaatatttgtttgagatggaatttagttgcagtttggctgtgagatttggagaattggn

SEQ ID NO: 445176 - DNA, 493 bp, Homo Sapiens
tatttttaaaacagctttattgaggaatattctaaatattataaaattcattcataatttcatgtatacaagtcaatgatttttattaactttattgagtggggaagacatcagcataactaaatcttagaacatctttatcctttaaataagatccatcatgcctattaacatttaattgtttttctcatgcccattccaaggcaaccattaatctacattctgtcttgattagcatgctttttatggatattttatatagatggaatcatacaatatgtggtctcttgtatctgacttattttacttgacatgatttaaggttcatctacaatgtattatgtgtcagaagttcaatattgtttattactgaatagtattctattatatgtatataccacaactttttatctgttcatcagttgatggacatttgggttgtttccacttttcggatattataaataatgtttctatatttgtatacaagtat

SEQ ID NO: 445177 - DNA, 1029 bp, Homo Sapiens
  misc_feature (34)..(34): n is a, c, g, or t
  misc_feature (50)..(50): n is a, c, g, or t
  misc_feature (403)..(411): n is a, c, g, or t
cgtgtaaacacgagggccttgctttgccccctgnaaaagctgccccctanccatagtatctcccaggcaaagatgccatgctcactgcaaactatggaatgaggtcagaacagaatcaaagtaacgcttgatgggaaaagttggccccaagaccccagtactaagagggtcgcctgcgtctcacacacacacactcacagcaagctttgggataaaaggcaaccgggatggttgacatctgaatgcaatggaacatgaaggtcagcttcagtccctactgggaatgatttcatgagaaggtagcccagatgaaacacctcttaaagatagttgtgccaattatttattcccccaaccccccacaaaaacaaatttttttaaataaaaggaaaagaaataggannnnnnnnnctaaacctgaataaaatgaccacttttaaaacaggtagtttaaaagggttacaaaacaagcaggcagtccaggtttcctgattaatgaagatggaggccgtgggttttcactgtctctaagtgacacacagggctttatagttctgcgtcaccctgaagcaagactgaatcttgatcatccaagagaagatcggtgtccacaacttcagcctcttccatgacacctcccaactgctggacgacgtcgtcgtcgaggatgtccacatccttgatgggtttgatcagactcagctggtccaggggcagcagccccggcgcccccacgggccccgtagtcctctcaatcgtggctgccatctcagctgcaaaagccgccttctgagccttttgcctctgttgttcctcctgctgcctgtgagttttcatgtgtgcatttcggcttttgatcttgaagaagactttgccacactccttgcaggggaagatggtggtggggtctgtctcgccgctggtggtgctgtgagagggtgagctctttaccgaacagtacccactctgggtgccacacaggcttctgccttcccagaggggatggcacctacgggccttggtcacctg

SEQ ID NO: 445178 - DNA, 509 bp, Homo Sapiens
ttttttaaattgaatcaaaatttattaaatatagatgatgtaaaccaacagatattacacttttttttctcctatgatgggtggtgaaatctactgtgggtcagtgtatatgtgcttggaataaatgtgtaaaccttgagaaaatttttacaaagtgtatttctgattgaaaccaaaagaagacatttcagaattccttgtttggtggaaatgctttttgtttctttgtttaattaattacactttaaaaataattgctgaccatactgaattgcaatccctaccaagggagctaccagggagggagagaggtgtctgtcactgtccatggcatcttaaaggttgcccccactgctcagtgtttgtttatgggttcatattgatccctttgcttaactagtaaatattttcctatttgagaaataatcatacttagcacagaatgtcctcatcagagtaaatctttaataataaaattatacgactgttatttggtttaatcatgtttt

SEQ ID NO: 445179 - DNA, 528 bp, Homo Sapiens
ttatcattgagaaaaatctttattgattgactacaccatccacaagaaaaagaaacttaatttaagaagaatagttaacatgcttgcttgttattgaccagtggtaaacacacaaacacaaatatacagcagttctatgccacagagagttaagaatgagggaagagatgatatatgaggaggctgggaagaagaggaaaatgagagggtgaaaagagagggaaaacatgggagaaggtggggcttataggtgaagttgctctaaatgttggaaatcctggatcttcagatgtcagagtatgttaacactatcctttggcagatataatagctgtatagagcagaggctttcaaatgcatttcagcattagaactctatttttgacatgaaatctgctgtggattcttagagatgtagcacaaataaaatcaaagtagctctggttcaagaaaaattagggaggctcttgaccctccagccttccccactccatctacacctcagcccacacgtggttccccactttt

SEQ ID NO: 445180 - DNA, 923 bp, Homo Sapiens
  misc_feature (43)..(51): n is a, c, g, or t
ggctaatttaactccaaatatatttgggaatgcggtggggttnnnnnnnnnataaaatttcccaaaaatatttgtttttcttagggcccaaatgtttgttccaaataggaggcttttttataaaaggaggggaaaatagccttatattgggctggttcagtaagggtaaccaaatagccccccagtgggtttttgagcacttgaaaatatggctagtttgactgaactgatttttcaattttacagctagctgtggttcctggttactatatttgggcagcaaggttcaacaatcctataggtctatcttaattacttttataggaatgaagagtatcagaattatttctcaattatatatatttagttttcatttctacagagaaagaggtcaacaaagttttgtgaactaaattgtataagtttcttttttaggaaaggacttcacagagaacaaggcaaagaataagtaatacaacagcaaatttccaaaaaattcaagtagaatcaaactttgactatagatttggtcaaattagtgctaaacagcctctttaacaacattattattcaactgatttatataatttgctttttagtagtcaaatacattgttttaaatcttaattatttttgattataaaatacatgcttagtgtaacaaattcaaataatcaggaggataaagtaaaataaggggccgggcatggtggctcatgggaagttaaaaggtttaactctatagaacagaacacgaagtatggaaaggttctttttaaaaacacttgtcttttggaacaaaatccaaattgtccccatgatttcgtcctttgacattatgttcatcttggttatcttagtcttttctcagacttcacagacaattatctaaaagcccctggctaagtgaatgcttatgactg

SEQ ID NO: 445181 - DNA, 523 bp, Homo Sapiens
ctttttaagacgagaaacttaattttattgatatggacgaagagcaaggaaacacagtatctgcatctccagatttccgataaccttggccagcacgatcccccctcctttagtggccagggctgtcttcttgctacactttcagtgccgcatattcatgagatcctgggggctcctgggtggtgtctgaagctgcctcagacagggcgctggtgcttagctcagcataggtcactccttgggggtctgccgtcgagagagataccctttccatattggataaatctgcctcggcagcctcctgctccggaagtttggaatggctggttctcttggtggattcctcagatgatgaacctgttttcattgagggagcttcaagttcatcgtgtttatctgtgaccaccagctgcaagtgttcactgctttctgaccactcatgggaggctgttgtcttgtaggcacaaaagtacctcccagcatccttaggcttcaggtccgtgaaggggaattccctcgtgcc

SEQ ID NO: 445182 - DNA, 1164 bp, Homo Sapiens
aaagagggttcaaagttttattaaatatttttattcagttttaagatcacagttaaagtactttagcatgttatacacatgacttacatgtgcaatttttagaaatatcaaattaggtataagattttgaagaaagaaattatataaatgtgtatattgacttttactacacatacatctaagaaagcaataattctgttgtaccattaagtggaaatcatttattacatggcatgtttacaccaactctaaagagaaccaagccaatttctgaaagcgaaaaaaaacaataagccaaattcattatcattgcgagtaattttgttcaacagtacctttagaccctggtggtcaatcctgaagtcctggtgtgcttaatgtgttaatggactttgttgatgttacgcaatccaacaccttactgtagaaagagtatttatactcttggtatattggtggtgctctctgggtgagtctatttggtgtaaagctgagcataatttccgtgcagaagcctagcagactcagttctgaagaggtcctattagtaaaaagttgcgaagatagttaaccgccatagctggcagtcccaggctttgcttaacatgctccatataattcgggaaaaactcatctactctcgttacctccctcctgtgacggaaggcactatagtagacctgaacggacacctcctgtagaggggagtcaattgggtgagccttgtagaccgcgatccccaatctggatgaggccacaaaactcgagatcacgtgtactttaccggtgaaataccaatgcttgataatcctcgagagttagccgttaaaagcattggtgccgtgttaagtaatggcctctgatggattcgacagaagattttgaaaggctggattcaactctagaatcccagtgatcaccacagtcttagcacgcatttgggaccctcggtcgtctgggagaccttgtattcgatagacagccgtaaaaggtgtcatgcataagactagatgtttgtgcggtacgaccatcgatgttagaccatgaatcagtcgaaaccagggacgggcaaaaagaatacacgggagcccttaattaacaccccgaagttgtcaccccctcatgttaaccattaatacgaccccctgatcaactgtccgaaaa

SEQ ID NO: 445183 - DNA, 785 bp, Homo Sapiens
gagtgagaaaggcacaatttattggttacgcagacttccatcatgggaatgtggggtgcattcccttctgcattcacacacaccactggatttagctccctacattaattctgctatgttgaaaaagcaacataaggaaagacatcacccatctattctcctaataaccaaggaagcagagctgaaagccacagagataggaagaaaaggctgcactatttcaagagcctggaaccaagaggcccaccctccctggcagccaggctggagagcacggctttcgggagcaacagcaaagactcttctaccagcacgatggaatacatgttggggggcttggcttaactgtggctggtgatggctgcccacctcgaggagggcacagggaacctggcacaggccttggcatctctagcccaagctgaggccagatctctccactggagaataggagctgatttcctgctccttccaaccaaagaactgagaagccaggtagatccctgctctcagcctagccatgccggaacccgcgggactttagctaaagcagcttgtgtcactgaagctggacagaacaggcttcttgtaccctaaacaagctacccagactcttcagctccttaaggccgagcccttgtctcactccaggagggcactgggcttcttaatgctttcacccctccgaacacacaccgttttaaactggtgggtttgggcacgtggttttaggtggctagagcctcagctctcgaggtcatcctgatatgacgaatgttcgtacc

SEQ ID NO: 445184 - DNA, 879 bp, Homo Sapiens
gaacaaataagctcaaaggtctggaggagccaacagacctgtgcaaacctcagctttccccagttcagctccttttccatcttcttgatttctgtatttttaaaaaaacaaggctgcattatattgtaggagaacaataacccactggaccacatcctggtaaggaagagctgcaaagccatggcctcatcactgtagacataagcttccaacagtgccccattgtggcatttgatttaactcagcccttcaaaaacatgcatttctgacttaaattctgcacaccatcaccatatccccagcagatgtcgctaacgtctcacattttggtcatgccagcagcacgcatctcaggcaacaaatatttattaagcagcgaatgtgcattgtgcaccaggctgagcactttgtagataaaaattcctggggcatgacccaggacatgaagaaaagttacttaagtgaggaggagagaagagatccagatcatttttttgatgacaaaagaaggtaacataaaaaaataatggactgtctgaaaagttctttcccattgaggtacaagtttgtttctggctatgcgcacgtgtgaaagttggaactgaatgtctgggaccacctcgaagcttgtttcaaaggcctattactacgtgtcttttagacagattttatttcagcttgcctaattgaagcctctggaatctctaatgacagaacgtggtcattcatatttctaacatttcttctggaacaggaaggcccgaatgagaaggcagcactaaacaaaccgctgaagtcaaagttgaagttatgggttgctagggggaagagtgtcgagagccccatgaggtggttgccgtctgagatggcttgttgccc

SEQ ID NO: 445185 - DNA, 581 bp, Homo Sapiens
ttttttttgacagtttaaagcacatttatatgcagagaaagacttaaaaatacaatttctgccaagtgaaatattaaacagcatgtttcattatatttgctatagatgccaaaagagttgccattttcaatgaggtatgtttcctgcttatgtaacagtcatttatcatagaagctgtaaaatgcaatctggaatttctcttgccaaattgctgcctgttcttgacattttatattattaaagctataaaatctataaatacttttagcacactttcactaaaagcagcactagtaagtagcaggccttgtcttgtatttcagtagccacgtcaaaacttctgagccaggcgaaatagaaagaggggtcctagggtattttatgcccagggcaacaaacgccaaatgctgacgtagatagcacttattcggttttgccaggagctgtgctaagtgattttcataaaatatgtaatttaacctacaggcaactccatgtggtattattttcacttttttacatagaaggaaatggaagcttagaaaactgaagcaatttaccgaaagtcagagttaacagag

SEQ ID NO: 445186 - DNA, 837 bp, Homo Sapiens
  misc_feature (741)..(741): n is a, c, g, or t
ttttttttataatcagtttaactttattttaagcttctattacattgtaattaataataatatactaagttaagccagtttaactgtctagcaaaatgcatttcattttaaaattggatattgggagacttggcaaatgctgtgagattacttagtaaagttaagtatgatgtatatatagaggggaccagctcaccctcataggttagtgctgaaggctcaggaacagtctcaaaggcttagaaatgtggttatatagaccagagcattccattctgattttgcccccagtatacttatcactgttcattttttgctaagaatcacagtctactgacctaaatcacaccctagacatatcagagggaaattctgaccataaatcagccttgcaaatacatagcaggcagccttctctgtagtagccttggaacataatacaaatgatgtcagcatcctctgtggttgggtcagaactagcactggctatttgcaaggctgagtccatattacccttcagcacctgagtgccaagctgaggtctcaacatgggtgatgtgaaggacaagagagaatcagtggctgcagtccttctatatatctggtcactagatccgccagcttcttcaacttggtgggcttattatatctctgaaaggggacctgaacctgcatcattctgcaaaggagatgattcctgagaagatggtgaaatataatcactaactaaagagataaatncttcactttacttcctagtattgcattcccagaaagggtaaagaaggcatattggctcctgctgacaggccacatgtgacccatttcataaaatgc

SEQ ID NO: 445187 - DNA, 641 bp, Homo Sapiens
  misc_feature (28)..(28): n is a, c, g, or t
  misc_feature (45)..(45): n is a, c, g, or t
  misc_feature (77)..(77): n is a, c, g, or t
  misc_feature (120)..(120): n is a, c, g, or t
  misc_feature (192)..(202): n is a, c, g, or t
actttgaagatgaatgtgagatattttnagagataaatcatagcnattgaaaagacataattttaaattctgagctnaaattcatttaaaattagaaaattaaacaatactctaatttanctaaaaactctataattttcaaaaataaagcccaaaatagaaatgtaggaaaaagatcctttgctactgttnnnnnnnnnnnccccatcctgatgtggcccacattcttatttgattctagttttatctgagcaagaggaaaggaaaagggttgtacttcagttaataaagacttaaaattctggaccatcaagtgtaaatttaatataaataattttatttaaagataaatggccaggaagtactctgcaaagtaacaacagagtattattaatgctgataattacatggaaaatcctaagactggccatgtaaaagctttgattaaaatataattcaaattacagatgatgtaataacatgaagctggtggtaggatcctcaggagccataatgaacagtgtaagccagttcacaaaaggcaggcatttttacagatccttatgtttcaatttcatgctctattcacgtgaagtaaatataacatcacagtgtaccaattaaatggccataatgagacc

SEQ ID NO: 445188 - DNA, 560 bp, Homo Sapiens
caacttagtgtttttaatagccatactttaaaaatgctataagcttcacagcttagaaattattttaaataccaatcaaaggctatcctcaatcttctgaagctcaatttctgggtagcagttaagaacatgaaaggaatttgggaaataaagggaaaactatgtcatttctctcaaaagaataaaacactgtcacagtcagtagcaaaatgtgctatcctgattttcagggatttgaaaaagattcttttagaagtctttccaaagtcattccacgacaaatgtcaactttcttaagcagccccaatgtccaaccaagtgaaaattctttcttctttcattactaatgctttctcctaaagaccaacaaactaagtaccattttgttaggacattgttagtcctagtgtgtctctctcctctggtctctgtacaccaacagcctaggcaaacttacaatagacaggtgtacaccttagtacaggcagggttatgtaggtgacttgctcagtcacatgcaggcttcctgttctgagtcttatcactctagcagaccattt

SEQ ID NO: 445189 - DNA, 577 bp, Homo Sapiens
tttaacataacaacgtttatttatttggaatacatttttgttagtggaattgctgggtcattgacaaattgtctaggtctaattaaacatgttcatactgtgtaccaagaggagatgtagcgtggatggcaccaaagtcagggaagtctttccggctcctggtctgctggtctgcccttttgaaggccttggagtgttacagccataccctggcctttcccaggcttttctttccctggcacggatgcagtgtgtgcggtcagagctggcgagttcgagacttgtccgaaccatccacccgcagccaggccccgctgcagaggctggggtggcccttccaggcccttggaattctatccccaggtcccctccccgaccgcgggagggcgtgttaggggagcagcttaggcaagcgacgattgcaccatccacgttttgaaaagaaagtccggggagcgcaaggaggaaacttttacaatccaaaggttgagccccagcatccatactcggcccctgcagcgatccttccactcctgctcgctgggttccgatcccttcccttccaccccgtctcccc

SEQ ID NO: 445190 - DNA, 419 bp, Homo Sapiens
attgggaaaagagacagttgaatcccttttctttaccagcataaggcagtcaggcaaacctaagagttgcttatttcggcaacataaggcggggtcattgcatgacagcaagaaggcacgaggtcccctcatttgtcctttcccagctcgcaggccttggaaccccgcccagggccccgctgagggaggcacaggcacagtcctaccgactcctgcctggcagcttggaggagcccaggttccagcacaaaggagtctgtggacaggcaggggcagaatcctggagggagcgcctgagccaccatcccatgtggcagcttgtcggcgatacagtagcctcgggctgggcatcgtttttggaagcaagtgggttcagtgaagtgtgttgccacgaatagcacccgctgcttttggcttta

SEQ ID NO: 445191 - DNA, 1269 bp, Homo Sapiens
  misc_feature (172)..(172): n is a, c, g, or t
  misc_feature (188)..(188): n is a, c, g, or t
  misc_feature (212)..(212): n is a, c, g, or t
  misc_feature (219)..(219): n is a, c, g, or t
  misc_feature (234)..(234): n is a, c, g, or t
  misc_feature (373)..(373): n is a, c, g, or t
  misc_feature (425)..(425): n is a, c, g, or t
ggcaagaggtcttcagggttcctctgctgagatctaatggggtaagggaaaaggaaaaaaattttaaagaatactttccttcactctgcctcagtgcccaggacttttccactcctaccccaccacatgactccagggtccggtaaaacctgccagagccttttgttccggnactccctcaatataangatgaccccacgtctgtgctgctngcacttnaatcttgaccagcgngctgtcccacaggggaaaatggaagagtgaagttgatgcttcctctggttttagactgtgactgaagggcttaactctttcattttcagcttgtggctttaattggctacttgaacacctgacaggctcagctctctcncagctcagcagagctcctaaaaagactaattaaattttttccattcttaaancaccactaagaatcacaatcctaaaaccactgaccacactgaacaagtatggctggtgcttgacaaacaaagtgagttctactaaatttgctccaaaacattttgttttattaataaaagtcttacttaaaaaacaaaatagaaaagagttaggtgtcacattgaataacatgttgatagcctgtgtatggttatgggttctaatttctctacaaaatcaaccagccatgatggagtaaagaaagttagaaagagtaaatatggtcatataattttttgaaacacttccaagtacaaaaagcagcatgctaatttttaagtgcaaagaaagctcataataaaatagacttttaaaattacaaataaaatctgtacatcaaggatatttttaaggctttcccgtgtgcatgtcactatgtagacaatgaagaggaattgccaagagaggaaccatcatgtcaggtgttacaggtctggctcatttcggcttgtaggaccatctcttcttttctcaagggaaaagtgtcaatcaggttgaacagggccacaggcatcaccagggagacatagcgctctttgtccatgccatgcttatccactagcaccatactgaaggagtagagtgggattcgcagcaacagcctgagctgcagcgctagggctggaggcataatctttgctcctatcctgccaatgagagtcgggaacacacccaccagctccaccacggtgatgtgtcgaagatcaaggccacactgtgcttgctgcaccatttctagcttggagccgtaaaggagggtctcggctgtggtgttggaacaaataagagattccttttttcata

SEQ ID NO: 445192 - DNA, 524 bp, Homo Sapiens
ttaattacttctttttattagacagttcaaattaagcttgaagaacaggaagcaatacaactcaactattgaaatacaaatagttgagcttaatttattcaacaaaatttacccaatatatcagtgtacaaagcatgctgctgggctgggcatcaggcgtggcacagcaaacaagacagactgactcaaccctcagggggcttacattctaatgcagaaagcagataatttcagtttggatacataatacaaattatcaaagcaaggcgcaaagtattttaaaaataaggggtttgggaggccaagatctgacctattctgtagaaggactccttaggaaagtaacagttgagccaatctaaggatgctagatattcagtaggtcagtggaaaaaatcagtggttctcactgtggtcagtgggttattggtggtttcataataactggggactactcccagcactgagtggatgcagccagggagaacgatgtcctgcagtgtgtgggttagtgccacacaacg

SEQ ID NO: 445193 - DNA, 688 bp, Homo Sapiens
ttttttttcacggtgaaaaatacattttaatccaaaagttttgaatattggcacttagaaagttatttacaatcaattttactataccctttgtgaataaagagataattatgtacgtgtagctacctatagttgtttctttccaactcaaacaccataactatgtggaaaaagggtaagagttaaagctgctgcagctcaaaatcattacaatcaacttagattctgcaaattttcccagggttgaaaaatgctggttaaatcaggacaaaagaggaggcaagtgagtacaccccactcctctcccattttacgtgttgctcccttacttaaccggcaaagacctgcacctgaattctagacaatttcatatacaacaggcctcttattatgggtccatagcagatggtttagggtagatgttttaaagatatcaatgctaatggcctaccaatgactttcatgacctcccaatattcgttttaaatggtagtcaagagactatcaagcaggaagcctgatctcgacatgtttcctctgcggctttggtgaagctgactatctgcagtataaaatcttatggtttgatcgaagtctcatttttgactagaaacagtaaagagcagctttattaagatcaatggaatggttctgaatgcctgtttctacagaaggattaaattaaaaa

SEQ ID NO: 445194 - DNA, 485 bp, Homo Sapiens
tttttttgctttaaagtctttattatcccgaatataaaagacagagtcctctaggatataacagagttctttacgtggaaacattatttttttacaagtgaaaaaataaatacctcttggaataaaggcttatatgctaatatgtgccataaaaaagtagagttttaatatttgacaaaatgtctgtgcaaagaaacaaatgcataaacacattactgctacattaaggcaatatgaaaagtatactcagaaatctcagtaaagtgacagtgtaggtttctagctttaccttagctagtattgcacccgataaggtcatctaggtctcccgacatcccagaaaacctgctagctgaccagcttccaaaatgcccaagtgggagtggaaaacatgtttaagaaaacagaagcaaaaagaaccaaaaccccttcgaaacatacagaggggacaacccaaagttaatacttaagcacttactttaaaa

SEQ ID NO: 445195 - DNA, 545 bp, Homo Sapiens
  misc_feature (516)..(516): n is a, c, g, or t
ttttttttctcttcaaatatttaatcagtttggagacctctgcattccaatccaattgggtaaaaattctaaagaaagcaagattaaggggtcctcaaagaaaacactgggctaaaatggagaggagactgggtttgggaagacagaacatagcatgtgtctgaaggcctttcgaaggaattctacgacatattttttaaaaatactcaaaatgaacaagacagaattaaaccgttatacaaatttaaggacaactgaaacttcttttatggttgaaaataccaggcatggttttgaaacacattctctaaaaacccttcgatcctgctgtggtttgtttacatagccttctctgtgtacgcaaaaagcaaactagctactcccagggttccccgccagctcccgggtctttgcaaagcagtaacacagtgagagaaggagtggaagaggtgaagaagtgacagccagctgttcacagtctttgaacatagactcagaccccccgcaacctaatcnaattttccttggaaatagtgggaattaac

SEQ ID NO: 445196 - DNA, 697 bp, Homo Sapiens
  misc_feature (242)..(272): n is a, c, g, or t
  misc_feature (576)..(588): n is a, c, g, or t
ccgtggtaagttctgatcaatgctttattgttgaaaacaaaattgaaattctctggcacataaaacaattatttctacaaaaggaaagcctacaaatcttgataatttatacaaataacagtttctcaaaaaataaaattttaatttagtaaacttgtcttgtgctctatatttttagcactgtctgcaataatccaccataaatccctgagcggagacattttttgatcatgttctaacgnnnnnnnnnnnnnnnnnnnnnnnnnnnnnnnaagttggtcagttactaagtccagccccgtagtgaaaagtgtcagggacatttagttattaatgatccgtgcattttatgacacaggccccaattattaacgctacttggggaactggtgtcacaagaagtgcctcaactgtgcattcagtgaacctattaagaaccacatctttgaaaggtaggacaacaaccataaaaagataaaatgttaagactagaaagtcatcataggtcaataactatttaaataaatacaaatgttagacactgaattaatctctatagccttatattaaattccnnnnnnnnnnnnngcaattgccaatgcactaaaagatgaataatacacttcaacccactattttggtttgaccacgggtttgttgttaaatatcattctgaaaacacagtgattcacccgct

SEQ ID NO: 445197 - DNA, 2022 bp, Homo Sapiens
tttttttacatgaaaacatgtttattgcctgaataataaaacttagctaaggagttattagaattaggattccccctacttgaagtacaagtttccaataaacagacagacagaagcaaaaccccaaatgagaaagaatacattggtaacctaaatcataggcatttgtgggtatgttcatacaatctacctatttctttgtaatttactatagcactgatgacaaagcatagacatacaatgagaaagagcaaatcagcatatcagtgtgactgtgcaaccactacaaagcttggccttcttaaatgtggccactttaacttacacacacccacagaggcatcagaaatctccctgcaaacacgatttgcctatagttttgtggcaatactgttacatagaacaaaaacaactctcagaccatggttaataaataagagagaaaagaagtaagaaacaacttccatgggttggcaggcatgcaaagcagcaccttgaacctcatttgaaaaacaggcaactgggatagcttttggagcccaggagtgaaggctagaggctgaaaggagctatgcactattatctttgggtatttccacataatttgcaggatggggaagtttaattccgcaccacataaactgtgctcttttagatgtggctgaaacgggtgtctctgcagaattagaaacccatctagaaatgacattgcttaaaattgttctttccaggtgacaattccataacaatcacataaataatgtacaaaaacaaaactaaaaacaaagtcactcaagtgtccaatttttctcttttgaaagatgaccttagatgtattctcaaagtgcaaatcgggatataaaaaaaatagtaggtatgggggaaatgtagccccatcttctgtcccccaccctccaaaacggggctgatttgattccctctttctagcatttgtatccttccacctatactttaagataatcatttttcagccgacctagtcgggtcccatggctcctaatggtgagggccagcagctcgtatttgtccctgagccccacagagatgtccagtgtctccttcagcagggacctggtgtggaccagcattcccagaaagtcctcgttgagcctgctctcctgccggctgtcctgttcctggccctgcttgaacttgctctccagctcagtgagggatttgtccgagttggagtaggcatccccgatctggtgggactcccgccgcaggtacttgccatagctctcttccccgtctaggtcgtaggagatgcttttgctgatgccctccagcacgcgcccagcatcctccacctggcggcccagcacggtgaactcctcccgcagggtgaggctcagcaggctgccaacctggctcccctccccctgggagcagcgcctgtggtcactcaccctgaagagcagctggcacttctcggggtcatcgttctcctcatagtccccatcgggcacgaagtagtggtgcagagtcccattggacatctctgggtagagggggccatcgaagtagccttgacacaggtggcagaagaaactcatgcagaagaacttcagaaacaccattctggatattcaggatggccagggaccccaggaggagactttttacccaggcacaaggaagggagtgtctttgcgagtcagcgtctccctgagacagcgtccgcctcagtcccagctggcttgctgctccctggcccccagtccccagcaggcttcatgtggctctgcacaccagcgtctgggtagcgcgcccgccgcagcgcaggatgcacccacccttgcgcccctcgctcggtgactggaactcctccggcacaggcgtagcggggaacccctcctccggggccctggcaagatgctggctctgttgccctcctctcggagtttccccttgctcccgggagatggagtgtgtagctggagagaaaggctcttgccccctgatagtatttcaatttctggactgggtgggaatgcggag

SEQ ID NO: 445198 - DNA, 614 bp, Homo Sapiens
atacatagggtcaaattgagaataataaactgagtcattctcctggagtcaagtgagtatggaggctgagaggcagcatatggcacttcatgctggaaagcttcacaagcagtagctgcagtggtggcattgccccagggagctgtaaatgtttaactagaattactttttccatgagatctttccacctgatttaagggagagatcactgggcagtttgagactgaacccacgtcttaggggaaggaaggtcactcttctgtcctctacccacaagaacatactgtaactctactgcttttcccatccccagagagagggagggagagagaggtggatgaagggtgaaagacaagcagtcttcattcttttaactttccctggtacctgcctatacaggtctagggtggggtctggaggggatcctaacttagtcaagtggatcactgaccttgcagtttcctcattaactgatggcaggaagccagagggctgggcagcttccacccctgcctcccattgtgaaaagaaagtcccttttaaatcctcccctgcctcaccccacaagtctttgctcccccaattcctaaggcatggcatatggattcacggca

SEQ ID NO: 445199 - DNA, 406 bp, Homo Sapiens
ggagcacagttcatttgtcttgttggtttattggcctacagagttggacacacacacaaatgcggagataaatattggtcagtttctctaaatctgggtcctcactacgtatagagctagtctgtagaattctaaattttgcgtgctgcggcacagaaccagtggccttctcactctgccaccacccgtcttcccagggaacatggggaaagagggcacgaactgacaagacttgatcattttcaaaagacaaaactgcaaaatcccaaatttccaacatctgaaactcacaatattcaaattccccagctcaaatacatatattttaatctccacgtcgccacaatctcatttgttgcccagaaccaccacattctggaagctattttccttgatcatatttaag

SEQ ID NO: 445200 - DNA, 675 bp, Homo Sapiens
  misc_feature (35)..(35): n is a, c, g, or t
  misc_feature (69)..(69): n is a, c, g, or t
  misc_feature (140)..(190): n is a, c, g, or t
tttataactctgtccaacttgcccacaaacactgnccctccttgcaacccatctgatgtggggcaaagncactgttttcttagggcccataactcagtggcagctgttttatttttataatgccggtcaaccttttgttnnnnnnnnnnnnnnnnnnnnnnnnnnnnnnnnnnnnnnnnnnnnnnnnnnnctacgatgtgcttatttaataattgccaaaatatttagactagagtaacttccggtgggtcaattggattgtgactttcttttgtggttttttggttcttcgattgctctctgttaaatattttcataattccccccacagaatacgtgtgtatatactgcaacttaaaaactaaaagcagtactcgaatgagttgttttaatgttgtacttttatctgtttgttttatgggttctcctgctgcctaatgacctttctgtttttataactgccggaaagccgcgaagcctctcgcatggggagctaggtccccgctgcggctccgcacttgagtttattataaactctggggttctgagtaagttttgtttgaatacagcaacatgattgtctctttctattcttatcctaaaagactctgtctggcatcttttagttgtaccctcgtatctgcttctctaataaatgttatattttttctcaaa

SEQ ID NO: 445201 - DNA, 357 bp, Homo Sapiens
caatttagtaagtttattttgccaaagttaaggacgtgcgcctgcgacacagcctcaggaagttttgatgacacgtgcccaaggtggtctgagcgcagcttggttttatacattttagggagatatgacacatcaatcaatatacgtaagatgaacattggttttggtctggaaaggtgggacaacttgaaacaaaggcaagacaactggaagtaggaagggagcttccaggtcataggtagataagagacaaatggttgcattcttttgagtttctgattggcctctctaaagtaggcaatcagatatgtatttatgtcagtgagcagaggggtgactttgaatagaatgggaggc

SEQ ID NO: 445202 - DNA, 814 bp, Homo Sapiens
  misc_feature (814)..(814): n is a, c, g, or t
ttttttttgagagtataaaccaagaaagtaaatttatttaaattactaaaatagcttttaaagtcatttacagatcagctgctataattatttttcctgaaagacataggtaacatattacttttaaattacttgggtcaatgaaacatttaataaaaacatttgtttctctatataatacgtatgtataaaataagccttttcaaaaactctggttttcataatcctctataaatcagatgatctgacttctaagaggaacaaattacagtaaggggtatacatttatgaatactggtagtactagaggaaagacgttaaaccactctactaccacttgtggaactctcaaagggtaaatgacaaagccaatgactgactctaaaaacaatatttacatttaatggtttgtagacaataaaaaaacaaggtggattgatctagaattgtaacattttaagaaaaccatagcatttgacagatgagaaagctcaattatagatgccaagttataactaaactactatagtagtaaagaaataccatttcaccacccttcatataaattcactatcttggcttgaggccactcccataaaatgtatcacgtgcatagtaaatctttatatttgctatggcgttgcactagaggacttggactgccacacagtggatgcgcggaaaatgaaatcttcttccatagccccggacagctggttaaccaatggtttgtccattccctgaaactcatttcttaattccaaaccaaagcttcagggtgtgtcccaaataaactgttacgaattgacctacn

SEQ ID NO: 445203 - DNA, 1097 bp, Homo Sapiens
ttagggatttgctctatatttgcatttttctttttaaaaggcacagtttttattttaacgacgctgcattgctctttgatgatgaatctcatttcgactcctcactctgtcatctctcttgttatcctagattctagaaggggcctcatcttttgacttctttctatagagggccacttctaaagcttcagcactcatttggaaaaggacactgggatcaacacgtaagcgttgcaagcacaggggccgcctctcttgcagacaggtggccaaagcagggcttgtgctgggccagctgtggaagtaattcctcgccagctacacattcagtctgactggtggatgattgggagtgtttgtccctccctcccccaataattgatggccttgagatctgccagcatctcaaaggcagattcgtggctctgttcccagacttaggtctcagttatttaattggtaaatgacacaatcaagagactcaacactaattggaatgctgatttcaagtatttcctgggctagctggtggaagccatagattgtggaatgtgatttccatttctgaatcagtgggtggcaggttggttacagaaatgcttcctattagtctggaggccctctaggagtctgacatgtaattaacaaagcaaaaggtaaacatgaagggctggcatggagctgggtgtatatctggctgtgggacgtcgggttcttttctccactgcaaatgagactacagttgtgatgatggtgggaggttccaggggtgcaggtcttcaccaaggaccatgttgtaccacagcctctgctgagctgagggacacatgtccccctgctttcccaacaccaccaactttggatttcacagattgtctctaggctgggggctgccttgactgtattacacctggctggctcctttaatcacagcattctagaaatccatattggatgtggaataccagaatcctatgtagcatcctagtttgcaatccacttatagagttctttaaaaattctggagttctgtatgagaactagaaccatgatgaggtcagaggcaggcactttgcccacagttgatcctggaggcc

SEQ ID NO: 445204 - DNA, 690 bp, Homo Sapiens
  misc_feature (15)..(15): n is a, c, g, or t
atgaccagggtaacncgttcagctagggagctcctcaatgagagttcttggggcaggtggcacggggcctccccaaagccgctccagctccccagtgagggcggccacctcctcggctaccacagcatgggcttggtgagccctggcgcagtctagagccaggggtgtgagggccgcctcattttcgttggtccaggccaggaggaactggcactttttccgggcccggtaaagatgatctcgctcttctctagccacggcctgtttccgggcacggcccagggtctgtgccaggtcccccagtgctgccagcgtgtagcctttctggttggtcgggccctcgcccagcaggatgcgggcgacctcgtgcatagcccctcgtgtgcccaggggccccggcgggtgctcgcctgcttccagcacgtgggctgccgcctgcagggcttcttccgcagaggcgaagacttgctgggcacccagggctccggaaacgccgagcagtgtggcacagaagtcagagagcagcgcgtcgtcaccgccgtgatacagggcgagagtatgcgcgtaggcgaacagcacattgggcagctggaagcgcacgagcggcgagactgggccgcggctcaggctgactatcgcggggatgcgggtgggtacgacgggcgtgcaggcccccgggacatctccaag

SEQ ID NO: 445205 - DNA, 498 bp, Homo Sapiens
gggagggcgggtggcaggggaaggccctgactgacaggcgacttgagacccggaggccagcagcagggcgcgctcacctgtgaacacgttctggaagccatccgcagccgcgggggccccagacgccttggcggccagtgctggggacaccccaccgccgctgtcactcgccaccccgcgctccagcaggtgcgcggagcctcccacccggggcgtgcgggcgcctagctcctccgtccagtcagccgagcggctcaggccggccgcaaggccgccgtctgcccggtgcttcttggccggggcggctacggaggccagggcagttctggaccctcggctcagggagggttccggccgcctcttgatcctggggctctgattaggggactgagacggggagtgattgggcgagctgagctgccgggtggtggtcttgatgtagcagggggtgatgagcgggtagggcttgaaacagcgctggctaggcgcggggctgcc

SEQ ID NO: 445206 - DNA, 232 bp, Homo Sapiens
tttgtgtccaggagagcttttatttgtacggaacagttttaaaaatacagaataaaatagctttatctctactattattcacaacatctggtccaaatattacatatttttaaaatacttaaacgtttaatgaagccatgttagaaaaacaatatgaaaattctttttaaaaactccataaaagaattacacatctcaaaaaacaaccccaccccaaataccctcggtaatc

SEQ ID NO: 445207 - DNA, 578 bp, Homo Sapiens
ttttttgggcagccaatggctcttgatttttattatttttcacatgggcagcagaagatggagttgtcccatccttgctccccttgcattgaatgtgccttgggtcttaaaaccccggagtgtcattggagccccctcctcttgctcctagtgtaggagggacaaggaggaaagcactgtgagtatgtgtgttggaggggaggggtcccagctccctgagccaggctcagcacccctcagcagctccctgaggccctctctctgtgagacttttgacagacagcaggacagaaacatatagcagagaaagacataggcagactaggagacaggctacacacacacacagagaagctggccccttcctttggcatggttcaccctagccctggggataggatctaagggtagcgtatgggacctgagctttgggcttgcccgagagagagatggggctacttgaattcttgagaccccaaactccgagaccaaagaagttctctctcctgcctaacctggacccacacctcttcatgtccccacccaccacttagagactgagattgttcaagtaacaa

SEQ ID NO: 445208 - DNA, 999 bp, Homo Sapiens
tccttccagaagtagatgaggtccaccagcggctcggagcacttggcacacacaaagcaggggtggggtgccactgcttgttgtagcctgccctgtccgaagtagaccacggggctgttccggaggggccgctcccttgcagagctcgcagacgtattccacttctttggacgggtcactgagactgccgttggtggtagcagcagtggtctctgccccctctggcttttcctgctgcttcccctcctccttgggcaagccaccctgccccgggagggccacttctcccacgccgagggcctcgctcttatattgcttgacaaattcttccatcagtttcaactcattctccaaaagtccacggcagcgcgagggatcctggtcatagatggggagctggtgcatgagctggcggcggcggtaaaaggcaccctctgtgcctgtcactggctgcttctccttggggatgagctccatgtactgcagtcccagtttctgggtgactccagggggagcccactcgtaggtgatggtgtcaaaagtgggatctttcccagtagcaatagggttggtcatgatcatccggttcctcttgtaaatccggatgccgtccccgcctttcacccgagcagtgagggtggaatacttggagtccatcagcaagcggccaattttccgatcgtcttctaggtcagatgttaggcagtggtcctcttggctgcatttgcaagacttgcatattttcctccatgaatgtggctcgaagcccgaacacgtccccttgcatcccaaacatgccacacctcttgctgactgcagctggcccagggacatctttttaactcctgggttgaggtccttagccacctttgccatcctcttctggggtgggggaacagcgcctggcttctcaggcagaggcgcgagggcgcgcagcggggacagcggcggctgaatggccaagttcgcgggccatcccgggaattccggaccggtcca

SEQ ID NO: 445209 - DNA, 1294 bp, Homo Sapiens
  misc_feature (107)..(107): n is a, c, g, or t
  misc_feature (204)..(234): n is a, c, g, or t
  misc_feature (1216)..(1252): n is a, c, g, or t
tacagctatgcgatttgctcactcggaattgcattctggaaaactcctcccagagtccccttgcagaacgccatttgtgtctttagttggttgtagctgggaaacancaacagaaagaaaaggaactccatcctaagacttcttagaatatttttggttttgaaactactgaccctcaaggatctaccaccacccaacctagannnnnnnnnnnnnnnnnnnnnnnnnnnnnnntctcactgaaaagcaaatcattgtttatttcacttgcttgctgtcacatcggacccttaggatggtctcggcacacctggctctccttctcggtgggatcctgtggattctggctgtgggtgggcagcccttcaggagcgtttggacttgctgcaagttgggcacagaagctgacccttggtgacgatgtacgcccggccgctcagcagctgctcacaaccctcacagacaaagtgctttcggtgccaggccagatcttccacacgctggtagtcctcagcgaatattatctcatcgcagccggagcaccggggccgcagactctcgcagtaatggcgccgcaccagggtgcaccatccttccagaagtagatgaggtccaccagcggctcggagcacttggcacacacaaagcatgtggggtgccactgcttgttgtagcctgccctgtccgagtagaccacggggctgtcaggagggccgctcccttgcagagctcgcagacgtattccacttctttggacgggtcactgagactgccctggagggccacttctcccacgccgagggcctcgctcttatattgcttgacaaattcttccatcagtttcaactcattctccaaaagtccacggcagcgcgagggatcctggtcatagatggggagctggtgcatgagctggcggcggcggtaaaaggcaccctctgtgcctgtcactggctgcttctccttggggatgagctccatgtactgcagtccctccatgaatgtggctcgaagcccggacacgtccccttgcatcccaaacatgccacacctcttgctgactgcagctggcccagggacatctttttaactcctgggttgaggtccttagccacctttgccatcctcttctggggtgggggaacagcgcctggcttctcaggcagaggcgcgagccgctctcgacgaattcgagctcggccgatttggcctgatnnnnnnnnnnnnnnnnnnnnnnnnnnnnnnnnnnnnncgccgccaccgcggtaagctccagtcccctatatgatgatca

SEQ ID NO: 445210 - DNA, 463 bp, Homo Sapiens
tatttgtgaaaaatccacttgtttaaatgtcactttggtgaaaatattcacagatcagaatctgtagtctaggtgtgtgggtgggatggttgtgctggaggacaccatcatgatttacaacgtaaactgctttgcatttaccattttctgaggtttgtatctatgtttgatcaaaggtatcagaaccatcacttttacaaacaagtatttgaccatataagtaaataccaaaggatacagtacaatttcagaatcagccgagcccgtttacatgcatttcaaaatagggaaaatctgctagtttataacacaatggagtaacacttttttcatatattttcttgaagcatgaatcacatgattgcgtgcctaattttttataaacatgatttatatctttgatttccctagttaagtgtttgtcaacatatgccatatttccaatagttgtctattgattaca

SEQ ID NO: 445211 - DNA, 365 bp, Homo Sapiens
tctgtagcaatgaaaatttttaatttgaataaaaatcacgtaagcatgaggttgttggggaacacggaaaggaagggctcaaattagggggtgtagcacatttatcaggaggtaagatctccatagtctcctacccctcctggcctggccttttactgtggtatccagcctctgggaagaccttgtatggacagtatctccactggggctatcactaggtgaccaggtaggggacagagtagagcagccaatgaccttaactcaaaatcttttctctcccttcaacctgtgaaaaaagatgactgggcacatactcagatgtcccctggcatagccacatcttgttggccagtcacaaacaccag

SEQ ID NO: 445212 - DNA, 362 bp, Homo Sapiens
tttccagtgtttcccaattgtatttattggtcaaaagagagtaattctttcttcagctcatacctcttctgacaacttttagttccatccttataacctctatttttctgtttcttcacctctcattcccctacctccagatggcctttggttacatttattaaaatataggaaggaagactagctcaccacatttgtaggattgactggcttgcattggatcagattctctggtgcaccctaggtagccaggcaagctttccatctgaagattagctttaatcatgggaaaatgagatattctttttgtaccatttaaatccaaaaatcccaacttcactttttatattttttagaagaca

SEQ ID NO: 445213 - DNA, 839 bp, Homo Sapiens
  misc_feature (66)..(69): n is a, c, g, or t
  misc_feature (84)..(84): n is a, c, g, or t
tgggccccgcgggcccaaagggaaggtctagaaaggtttctgggggcccgaggcggccgccatgtnnnntctcccccgtcgggnttttccgctttataatcaatataatctctgtgcctttgaatctaacaggacacctgggtcccagacgcctgggaattgggtctctcaattccctttggttttggagggaggagtttaaaactgtgcatgggagcaggagggactcaagggtggcagtggtgagtgggaggaaatacactttgggatgactcgttcagccctgagagaggggtgtgagttacccagggaatgggtagggaaggtttaaagcaacacccaaggaaagaagggaaactcatctcttgtagtgattcaaccctgagaacagatggggagtggggttggctgtcccccatggatggatgaaaggtcacctaatcagtagtcaccaggacatagtggtggaggcacaagtggccaaggagtgctcatttggtggagactgggaaagcggctgttatttagtgtctgtgtagtagagggagcgcagctggtcccagaagaagagggagaggatggtgtgggggccgaggcggaagtaggaggcacctatacccttgtacatgccaaaaatgccctcggtccgagctgtctgcagcagagcgtccagtatcccccggtacatgaggcccttgccctgtgcatctgtgggctggttgtagagccttgtgcaggccacatcaaagggtgccatggccaagacaactgcaatgccactcatcatggcagccaccagcgccaacttccagctctggggaggaaagatctgatgctcc

SEQ ID NO: 445214 - DNA, 491 bp, Homo Sapiens
aattttgtaatcgtgttattttactgaatgcaattaacccagttggttcgccctgaatcctttctaaggcacttgtaaggaatggcaggtttttaaggaccacgctattgcatgttctccgtcagaaccattgccaatcattttctgctgtcagggatgaaatctagcatataaaagagaaaaccatgcgtgtgtgcctgtaagataaacacacagatatgcctgggctctgtgtcctttgataacgttaccgcgggtttggttgggagattttggggaaaagagagtccaagggcgggctgggtcatctttctttgtaatgcggaaaaattaactcaaccgcacctgcctagtcccgagagagctggggcggcccatctgggtctgggctacaagtttgctgcggagagaaaagcctgctcactaaagcttccccactgcccaggagcgcggacctcgggtctggggcccggaagaggggtttagggttt

SEQ ID NO: 445215 - DNA, 931 bp, Homo Sapiens
tattatgacatgagaagtgtgcacaagtgggggaagtatgagaatagaatggccctggcggggtagatcgggaatatttagtgaacgccagttatatggcgacggctgtggatcatcgttaccgggggattaaggcggcctaaagttactgggatgccgggaaggccgtggtaaaagaataagggaaaaaacgaaagctaagtatcaccgaaagggaaaccactggacaagacacaagggaaaaaagtgtgtagggcaaaaacaaggaaggaggggggcaggaaaaaaattggtggacaaaacagataacaagaagctgataaggagaaaaggggaatgttaagaaagggaacgggagaggtccgtttaatgtcgggaatttatgtaggggagggatttttttggttttattaaacaaaaatcatggactttattatacattaaaaaatcttctaacaacttttttcctgaagccttgtcagtatatacctattgtgacaaaatgaaaaaataagttctccaccccacatgtataccaataccatgatcacataaagtcgagttcttcaaatccaattctaaagtgaaacattgcatgattttgaattgtacactgcatgattaatagtatcagtgaaataagaatcaattcacttacattacaaaatcaccaaatatacaaagcaattttgcatattagttacaacttaacccccagtctcatattaactgaagtaaatttcatgagtgaagccacagagattggttaaaaagtataatatagttccagtttcaaatctttatgtcttactagttaatgtagaaagacaaaatctcatgggagaagagtaaaccaaacttgctacaaataaagggttgctttctacaattggtgtgtgtaagtattcaaaatacaatctgaatgctaaga

SEQ ID NO: 445216 - DNA, 1349 bp, Homo Sapiens
  misc_feature (156)..(283): n is a, c, g, or t
  misc_feature (285)..(298): n is a, c, g, or t
  misc_feature (792)..(815): n is a, c, g, or t
ccttgttaatccccaagccacttttgggaaggcttgaaggttggggtggaataacccggaggtccagggaggttccaggacccaggccggggccaaccagggggaaactttgtcttctcctaaaaacacaaaattagccgagtggtgttagtgggnnnnnnnnnnnnnnnnnnnnnnnnnnnnnnnnnnnnnnnnnnnnnnnnnnnnnnnnnnnnnnnnnnnnnnnnnnnnnnnnnnnnnnnnnnnnnnnnnnnnnnnnnnnnnnnnnnnnnnnnnnnnnnnncnnnnnnnnnnnnnngaaagaagaaagaggaagaaaatatgctaaaaatggcaaggtaccttgctgctgcttttttaagatatactttaaatgagtgcccagatggattttacctttaagatatttgcttgtgacttctagatttctgttggatttaaactaaaggctactagaatagcttatcatttgcaagtagtccaaatttagattttataaatcactttcaatttattcagtaaaccagacttttcaactttacattcaaaacatgtatctattctcttacaatttctgatagataagaggtttaattataaaagtacattaatgttccattcatttttagctatcagtctcctatacgcattagattttacttacttagagacacatacattctcaaaagatgtaatattctatatcccaaggttttactatattaaaaaaatatgacatctaattaaaaatattgagaactgtactactgtgaatatccttttccatggtannnnnnnnnnnnnnnnnnnnnnnngtacttcatgctttttattcatttctcagactgttttccctaagaaacaaaacatatatattccccatgccatttcttctttcctcaaattgcctgaccaagaaataagaaatcaaagtacaagtgagaatgcagagcttctgcccagtttctaaagaaacaatctactatcataagttaccagaaaactggcctattggtcaattctgttatacattaaaaattttttaattactttattaataatttcatgtgtttcttgaagaacatatgtgatattgtgactaaatttaactacagaaaatatcggtcaattaaattcattttaaatgcaaaatattgacacaatttcactgttaaacctcttgaaattaatcatctgttttgaaaacaatactctattaataatgttatttctgcactaagaaatttaacagtaatatataaagcatttccatatttctatttgaataacaaggggaatatcaaagaactggaagtcacatttcagctatatcaatctaatatttattc

SEQ ID NO: 445217 - DNA, 450 bp, Homo Sapiens
  misc_feature (189)..(214): n is a, c, g, or t
ttgaacttaattcctttgaaacaaaaggtgggaatattttaagcattaaggcgagctagagaaaaactatgagacaatgttaaaagggacattggtcaatgtgattatgccatctatgtttgctgattggcactttgagaagctgggcttccaccctcccacagagactgatagttagagacctcttannnnnnnnnnnnnnnnnnnnnnnnnncggtgattacacttcacagtaatggctcctaggtcctcaagaaagacatacctggatctttattagatttacatttcaaaggggcagagaaataatttacaattcaaagtcttctaaagtaaatgctctaagaaaaggaaagtcagggacctaagtcaagaagcttatctgaaatttagtcaagctgaggaatgggtaagatcatcttggccactacaaagctttcctatttccct

SEQ ID NO: 445218 - DNA, 593 bp, Homo Sapiens
ttcaaaatagggatttattataaaaactatacaaactttttatcactcacaaatgatgaaaaattttaaacaattagtgtcctccctccaaaatagtgtgttctgtctttacagtcttcactggcagtgcattcagatggtatagaaaataacaaacattccatataactttgtccctacagtaaataattttttaaaacttttcatcaagtttcagtgttactgaagttaattatagacagtaaggattacagaataagcagtaaatggtcacctgcactgtatttttcaaagcaaaaattgttttatattttctatgttgttttatcctgccccaaacacttaaagcaaaagttaaagatttttccagttacctgaaacttcaaaaatctattgtactttgaaaaaactttaaaaagcagcatcatttaaatagtggttaactcataaacgtgtatgcaacaacattccacaaccctaataccactcaggcctgcagagtcaccagctcacaataattcagtgctctgaaagctggggggaaagcccctgagtagtaagtatgcaacccagggtgtgcggcctgcaagatt

SEQ ID NO: 445219 - DNA, 492 bp, Homo Sapiens
ttttttcagttctcactagagcctagggcactttattagaaaccaagtatatcataggcaaataaaaatagtttttacccccattgatacaacataagggattttacattcagcctagatatagggagtaacaaatcctcctgcccataaatctatgacttgcaagtatcttccaccacatgataactctatatagtacatatagtacatagcccttatttattggagggatccaaaatattccttgtaggctcacaaagtccaatacattagctctctcttccctttacacgtctaatagtaaaaactattttttccatgcaaaaagccattattcagttgaagagaaatcaggcaaaacagagatggcagataaggaatggagagaatattattggcacgtgcccaactagtgacaaacaaatgcagtacacaatgacttaaaaataaaagtcacattatagggataacaaaaacaactacatcaatcta

SEQ ID NO: 445220 - DNA, 485 bp, Homo Sapiens
  misc_feature (101)..(101): n is a, c, g, or t
gcgcttcatatataagacgatgaaagtggaaagggttatacattatgaaagctctttttcaaaaacaaactgtgtggaaataaattaaccggttattttanaacgccagtttgcaagttcttcaagtctctggtgttttgactttaggattccctcttaaaacacagaaacaaagggtaaaaatcaggtggccgtccaaaatgactttcgggcgccccacttagagagacgccttggttcaggtagcccgctggggtcgaaggccccattttcccccgatctatcgggcttcgcggcggaagtcttcgttcaggcaggggatgccctaggagggaaggaggcgacggtgcccaaggacgtcggaagccggggatctccgcttccctcgggccccggctaggttaccagtgcttgcccgcggcgcgggtgcccagttgcgcctgggacactgcgggcacggctgtggcggcaacggcagcggccgc

SEQ ID NO: 445221 - DNA, 481 bp, Homo Sapiens
acaatagtccttacactgactattgaaatagtgggcaaccataggtacagacctcaatctgtggaacatatcaagcaattcagatttttcttgaaatgtcataacttttctctgcttcctggagtgctcccagcattaacagtggcacttcatatgggtcctatgctgaaattcaaggtcgatggcattgcacgagacaatgaaaactccatgagaacttgagttgcgtctccaggagaaggagcatttgtggcccccagatgtcctccagcatcccatatctgtcggccgcgcgcaggccctcggctcggggtgacaagacgctggcgcgggcaagcggggcttcgcgggccacagccagatctcggcctcgaggacccgggtcgccacgccagcccctttcctcagaacgccgaggcctcaggagcgtgtgcgcgccgggacgccccagagaatttggaagcgctggtcccggaggcaa

SEQ ID NO: 445222 - DNA, 400 bp, Homo Sapiens
gtttttaaatccaggatcaagaccacaatttattatgtaagacatggggtgaagaatggtcaaggaaagttatggccgtgagtgacatggaattagatgaaaaggctcaagtttgctgaagagagtttaaatttggcttttgctcttggaaacgtcaaaataatcataagaagcacttgtgccttacagagcaaataatccacagagtgtcatattcattttgcaaacagggtcacaacagcagtcaaatagaagcctgaacacccagagagttaacatacagattccataaggataacaagggattgagcatgctggtgggtttttaagtcagatccacattgaaccctgtgacctaccggaggttataagtggaacccggggaaagcagcttttccat

SEQ ID NO: 445223 - DNA, 942 bp, Homo Sapiens
ctttcagaccacttttattaactcaggtattacgaaaggaaccattgaagaatatgaaagctcaaataagattaaaaaatgctttaatactgctgaagtctttcaattctagagcaggcatagaatatatagaatgtttaccttatgaccagatacaacctcccaagaaaaactggatcctgcagggcagctggtcttcacagttcctgctgggactacagttgcagaagtcattccatcacttttctctttttaagggagttaagtacaggtaaaggaactcttctagcaaagatcttaataatctcttgattatcgatgtccgtggaggctttttagtccttcctttgcttctgcattcttgacccttggcttctttcactcactctctcctaattctcctgtctttctgaatgggccattccagttttcaataggtgacttctatttcttcctgtgttggtgttgcctatggttctgttgtgtgcatttctgatatatattaacactctgggaagtcttattgacagattccaccattacttaaacattgtcaattctggcctagatcgctatgttaaactctggtccctatctccaactttatgggcttttgtttttagctataccatagctgtctcaaattaaacttgttaaactgaatgcatcattttcattactaccaccatcctctaattctctgcccctctaaaagctgtctcttcctgctgtattttctgactttgtgaatggcacgactgtctagcaatttaggtcaaaaccatgactaatattagatactttcctctccatcaaatctttttcaatcccgttaccctactgctactgactaggcctggataatgtcaatgcttatatgataaaggctggataccttaacctggatttcaagcttgtgggcaagaacaaatgaaactatcc

SEQ ID NO: 445224 - DNA, 549 bp, Homo Sapiens
tgaggaaactccatatatgttctttaatccaaacagtttaattcaagcaatctggaatataaaaagcactttctgatattagaaggagatcagactcccaaaaaagatcagcattctttagtcaagcaaaacttggaagtttacaaacagctaaatcagaagcttgaaattcaggtcctctccagtacctgctacattatatgtaattccaaacatgacttcagagattaaagaagaaagggaagatgtttcccattcttttgtaccctatataaactaagggtaccctgccctaatcttttttccaacacttccccaaataacccttccttacaaagaaagaagtctaagagaactctctcatctaaatatatttaagtagaggcaagcctgaaaaaaacacaaaaacctaaatggtgttaggctgtggttcacctattctcatggcacctcaaattaatggcttgggtgttggtgtaggtaacgcttggcctgtatgttgaggtagtcactagataaaattctgggcacaacatccgtttagcaatt

SEQ ID NO: 445225 - DNA, 897 bp, Homo Sapiens
gggatccagttttgggacgggcggcagaagggccgtggcagcgtggctcgtggcacgtctggcgtagtggaactgcttctttggcagcgcgcgatcgtcaaggtacatggccccctgagtccccgccatcctgaggaggcagcagaaggtcctgggttctattgtacagttctttcaacccgatgctaaccccctgattacaacctgaggaatgtagaggtcaacggtgccctgaggagagcactgtgcaaggaaagtcattcctaagaggtgtgacatttgcactgccagcctcagttgtcactgtggactcttgatgcccaattattgcctcaatccagaaaagtttacttctctttatctgtgctttactgacagaagggcaagtcttctctcgttttttgcagataaaattttagatgtgttgcattcattgggtttctatgagatgtggttttatcagacaattttttcttttatttcacaattactttaatatctgtaaaataaagaattattttaattcattttcccagtcccaaaagttaaatacaggccacttacttctttaaccaaatgatatagtttggctctgtgtccccacccaaatctcatgtcaaattgtaatccccgcatgtcaggggagggacctggtgggaggtgattggatcatggggagggatttcccccttgctgttctgttgatagtgaacgagttctcacgaaatctgatggtttaaaagtgcagcacttctccctttgctctctctctcctgctgtgccatggtaagacgtgccttgcttcccctgtggcttccgccatgattgtacctttcctgaggcctctccagccatgtggaactgtgagccaattaaacttcttttctttagaaaaaa

SEQ ID NO: 445226 - DNA, 1120 bp, Homo Sapiens
tttttctgtgcaaactacttttatttataaggaaagtttctctattttgtttataaacattaaaccagtgctgtgtgaaggcacttaattggggagaggtggggcagggatcctggtagagaccaatgtttcccacccagaccccaagactgctgggagagatggtgtcagcagtgactcccaggaatatccagtggtgtggtggcccatcccaggcccggctgggcaggtggctggcttgctgggggatgtgatgatggtggtaggcatgggaggcactttggacgggatctgatttggcaaaaggaagtggtttcctgtccccagtgatttccagcccttcccagacctcccaaggctaaggcagattactaaatttaaggctggggccctccttcttccctggacttccaggagaacagagaaccggtggtaaggaccacccccagcagggtggaggggtggcatatacaggccccctaaaaacagaggtagagggtctgcacgttaaggcttgactcgctgttatacgacgcccatctaacccgccctttgtctttgtaaaaactccaaccccgttggatgtttttacctttggacaaccggccctagggttatccccaccatgtagatagacccacacgagagctcgcatcagtgtcggccctagaacggactgtgtgttagccagcgattccagtagagaggctgcgtgctggcgtccagatcgagtcgatgtggatctcccattcatccctcgcgacttgttctcgcctcccgtgctccttctcattctactcgccacttcacgatctccgaccccctatcttacactccttatcctcgtttgtttccccccttttttccatctacacctctatctactcaccacccgcctattaaatagactacattcccccccaccccacagctctaaccacgaatatgacccagtctcacgtccgctatcgctaatctctcctttgttccagcccgtttatcgattgattccttcgctgcttagattcgcctcgtgttgcaattcgctgtggttccccccgttctctctatttctctcacactccgcctctttacttatgaccctttacacttctagtcg

SEQ ID NO: 445227 - DNA, 1154 bp, Homo Sapiens
  misc_feature (712)..(758): n is a, c, g, or t
aaaaaatagggaggaaattccttcatcagaacgacttcaagtggataacaatatttataagaaatgaatggaaggaaatatgatcctcctgagactaactttgtatgttaaggtttgaactaagtgaatgtatctgcagaggaagtattacaaagatatgtcattagatccaagtgctgattaaatttttatagtttatcagaaaagccttatattttagtttgttccacattttgaaagcaaaaaatatatatttgatatacccttcaattgccaaatttgatatgttgcactgaagacagaccctgtcatatatttaatggcttcaagcaggtacttctctgtgcattatagaatagattttaataatcttatagcattgtatattattattgctgttgtcactgttattattattgtggatactggcccttggtgtgttgcatagctccctatgtattctctgtttccatctttaagttcccagaccaatatacattaagagttttgcatggtctaaattgtgtttattccaaccacgtggaaagctcctggaaagaaattttacattcggttgttctgtgctcctaatgacacttgaccttgttgaacaaatggcagagcctttcccaaggatttgattgtttgtgaattctctgcatgtgtgcttttttttggtgtgtatttcattaaaaaatataaatatttatgnnnnnnnnnnnnnnnnnnnnnnnnnnnnnnnnnnnnnnnnnnnnnnnggggggggccccaaaaaattaccccgcggggggccccatttgccaccccttttttttgcaaagggggcccccaaaggggggccgagcgaataaaaacgcagagacagaggggcgccgaggctgtaaaaacacagcgtggcgtggcgcgggggaacgcacgcggctagtgtgggagaccttcttgggggaaagagaacccctcattcgtggtgtggcgtggcagcctatttcggcgggcacaaccctcccctcgaagagagattaagacgccccggaggggacaaatacacatctgacggtgttttggtgctacacccaacgcgaaatatgcatcgcggcaaaaaatttggtcccaggaaattatttagaacattcttaccgaccgtgtataataaa

SEQ ID NO: 445228 - DNA, 337 bp, Homo Sapiens
attgcaggttgtttgtttgatatggtttggctgtgtccccacccaaatcttatctagaattgtaatcagaattataatccccatgtgttgggggagggacctggtgggaggtgataggatcatgggggtggttcccccatgctgttctgatagtgagtgagttatcacgagatctgatggttttgtaagtggtggtttcccctgctcttctctcttgcctgccaccatgtaagatgtgcctggttccccttccgccatgattgtaagtttcctgaggcctcccccgccatgtggaactgtgagtcaattacacctctttcatttataaattaaaaaa

SEQ ID NO: 445229 - DNA, 302 bp, Homo Sapiens
tcctgatatggtttggttgtgtcctcacccaaatctcatcttgaattgtagttcctgtgggagggacccggtgggaagtgattgcatcttgggggcgatttcccccatgctgttctcatgctagtgagtgagttatcacaagatctgatggttttataagcctatggcatttcccctgctggctctcattctctctcctgccaccctgtgaagaggtgctttctgccatgattgtaagtttcctgaggcctccccagccatgtggaactgtgagtcaattaaatctctttcctttataaatt

SEQ ID NO: 445230 - DNA, 509 bp, Homo Sapiens
aggatcccctcgggttctaccttgtctagttgttatttcattagccataacaactagacatagtaatatgaatctcatcttgaactgtagttcccataattcccacctgtcgtgggagggacccagtgggaggtacctggatcatgggcgcagttcccccatgctcttctcacgattgtgagttctcacgagatctgatggttttttaagcatctggcatttcccctgctggcactcattctctctcctgctgcccagtgaagaggtgccttatgtcatgattgtaagtttcctgaggcctccccagcaaatttagatctctttgctttattcattaccctatcttgggtatttcttcatagccgtgtgagaatggacttatacagtaaattggtatctcagaatggggcgctactataaggatacctgaaaatgtggaagtgactttgaaacgggctcaaggcagaggttggagccgtctccgatcgctgcgttgtagacgacgtccc

SEQ ID NO: 445231 - DNA, 649 bp, Homo Sapiens
gacccgttaaataatttattgatgatacaaagcgactcgcgcccacccggggccgcccccggattctgcaaaaatagattcgcccccaccccgcgggtcctcacaaggcgtcccccgcgccgccgccgcacgggctgaccagcgccaagttcgagggtttgtgcttcttgagcagccgcgtgatcttctcgtcgtccgagttggggtccaggggccggttgtattcgtcgtcgtcctccgcgtccgagccgcccaccttcagcttctcggcgtccgagtcctgcttcttcttggccgacgccatctccgccgcgtgccgcttgcgccacttggtccggcggttctggaaccagaccttcacctggctctcggtcatgcccagcgagtaggcgagacgcgcgcgctccgggcccgccaggtacttggtctgctcgaaggttttctccagcgcgaagatctgctggcccgagaaggtcgggcgcgagtgcttcttcttcccgtccttgtccaggacgccgccggccggggccgggccagccagacgcgggtccctccagggcgcgccctgcaccacgccgggccagaagatgggcgggcgccccggcagctcggccaggggcttggggtagccgcgcgccacagcggccgc

SEQ ID NO: 445232 - DNA, 952 bp, Homo Sapiens
  misc_feature (420)..(492): n is a, c, g, or t
actgatcccgccgttgtgaataatgatttctcgaagttcatcggtcgctctgtgcccgacatgtgtttccgcgcgtgctagctcatcgccgctgttgttgtcaccccattactcaccttgtgaggtggttgtattgtccccccgtggcgttttaattttctctggggtgtggtgtgctcccccctttttcgccccccctcgcgagaagtgggttgcttcttcccacgataagttgccccggtgcgctcgtttgtgcccgtcccaggtgtgttttagaggggcgccgcgccgcctgcgcttaaataaaagagccctcctctggggggcgccccttcttgtctcaaaacatcgtcgggtccgctgctgcaggggggccccccgtagggggatatctttcgggcgcgcgccctccccctctcnnnnnnnnnnnnnnnnnnnnnnnnnnnnnnnnnnnnnnnnnnnnnnnnnnnnnnnnnnnnnnnnnnnnnnnnnggtgagtaggtgagtttattaggacttacacacagggcactcagcaggatggctctagagatccggcctcccccagtctctaaactgcttttcagttaattttctgtctctttgcctgctgtatatgagtaatgagactgtttttcttggtaggttctcgcatactctccaggatgtttgggtttttagagacacctggtcctcagctggggacaatggccatggctcattacctggccttcagggttcaagcaggggacatatacccctaaataacctaaaggggatccatcacactacaaccaccacctccaccgccatcatcaagaagccactggctgactgagatacacttccaggaggacaagacagagtggatgctggaaagacagggcaggggaccatcaccagggaaagacttcattcttggaaggacatcgaaccggggggcgggtcttta

SEQ ID NO: 445233 - DNA, 681 bp, Homo Sapiens
tttttgattgtgttattatttattaggaaaatgcattatctagttcaatcccaagaactctctgagtcatgtgtcactatgactatcttgaagatgacaaatggaggcttaagggagagtacgctagttggtcaaggccagcagctagcaaaatagcaaagcatggctgtgaagctttggtcctcccgctacctgagtgtaccgtaggatgaggtgctggccgggccgcaggccaagctggctgttcccgggtagagcaaaccggacacggtaggtgtccttagtgagcctgtccatggcacatgatgcagaaggccacgaaggtctctgggttcagcttggaggggcagctctgtgactctggcccacgcagcaggctcctgtccttgctggcttgggctgcctcccaccttgccagatctcggtgatagaggtcaaacacacagggtgagcagccactgacgcagcactgggaaggcaagggttctgtgggccgtagctgcatcaggcttcctcagtgtcgtcgtcctcttccctctcagccatcatcagtggggcttgggcagcctagaaggaacaactgggtgctcttccagaacaggccaggctctatgagaccacgggcgcaggccctgctccttggaactgaaatgagacggggctcctcatagtctagactcg

SEQ ID NO: 445234 - DNA, 1273 bp, Homo Sapiens
  misc_feature (1055)..(1176): n is a, c, g, or t
  misc_feature (1253)..(1253): n is a, c, g, or t
tcttcatgggggcccgattgaaaatgtagggtgtttctgaagcaagtaaagaacatttggcccaaggttcaccttggcaaaatgagcagcagggaccagggcttggaattccggttcttcggattcccagtctgtggtcccttcctgggtcccaagtagcagggtccatggcctaggcttttgaaggagagggccgggctagaaagagaaaataggagtcctcagtgaggcctgcgcacagtagccacctggctattcttggtgaactcagccgagccacagaccagtgcgaatggctttctccgacagcagctgaccagctctttaattaggtcctggcccagtggcccaaagtgggttttctcttggtaactccagggaagctgctctgaggagctctcctggtttggtttatagaagaaatctccgaaagggtcctcgccagaaagctgtgtctcctactctcccaggactcaacatacccgggacatcagccccatcttgtagcacttaattaacacttcaaagtattcttctgcgttggcagggctgatgggcgtataggctctctgaatttctaagtcatctactatccctctgagtgtaccgtaggatgaggtgctggccgggccgcaggccaagctggctgttcccgggtagagcaaaccggacacggtaggtgtccttagtgagcctgtccatggcaatgatgcagaaggccacgaaggtctctgggttcagcttggaggggcagctctgtgactctggcccacgcagcaggctcctgtccttgctggcttgggctgcctcccactttgccagatctcggtgatagaggtcaaacacacagggtgagcagccactgccgcagcactgggaaggcaagggttctgtgggccgtagctgcatccaggcttcctcagtgtcgtcgtcctcttccctctcagccatcatcagtggggcttgggcagcctagaaggaacaactgggtgctcttccagaacaggccaggctctatgagaccacgggcgcaggccctgctccttggccagcannnnnnnnnnnnnnnnnnnnnnnnnnnnnnnnnnnnnnnnnnnnnnnnnnnnnnnnnnnnnnnnnnnnnnnnnnnnnnnnnnnnnnnnnnnnnnnnnnnnnnnnnnnnnnnnnnnnnnnnnnctactcgcctgcgcttcacctcacgtgaggattttccaggttcctcccagtctctgggtagatcccgaggaattccnggaccggtacccagcccttc

SEQ ID NO: 445235 - DNA, 838 bp, Homo Sapiens
cggccaagcacagttgtgacccagtcttttttaaatttagggtccgtggccccagggggggccccaaaaggggggtttttttcttgggtaaacctcccggggaaagctgcttttgagggaagcttttcctgggctgagtcccaaaggaaggttacggcccattcccagaaacgggcccctgtttttggagggaagtttttcaggttagatgctctcaaagggtcttgaagcaacccgaccaggagtgacaaaagttctggtcattctcattgtctgtgatgctttgcaggataggccccatgggggccaggcccgtgccccgcagccagcaagaggagctccccatactggtttggtttatagaagaaatctccgaaaggtcctcgccagaaagctgtgtctcctactctccaggactcaacataccgggacatcagccccatctggtagcacttaattaacacttcaaagtatccttctgcgttggcagggctgatgggcgtataggctctctgaatttctaaatcatctactatccctctgtgactctggcccacgcagcaggctcctgtccttgctggcttgggctgcctcccaccttgccagatctcggtgatagaggtcaaacacacagggtgagcagccactgccgcagcactgggaaggcaagggttctgtgggccgtagctgcatccaggcttcctcagtgtcgtcgtcctcttccctctcagccatcatcagtggggcttgggcagcctagaaggaacaactgggtgctcttccagaacaggccaggctctatgagaccacgggcgcaggccctgctccttggccagca

SEQ ID NO: 445236 - DNA, 237 bp, Homo Sapiens
  misc_feature (117)..(138): n is a, c, g, or t
actatatgtactttcattatgtccactttgcttggggcactttgcttggggcccaaggtcacacagctggtaaggggcacagtcagcattgggacccaggcaaggaatctgtgttcnnnnnnnnnnnnnnnnnnnnnngagacaagagtctcgctctgtcgcccaggctggagtgcagttaagcttcacagagcgccaaccaggagccaggcactgtgcaaagtactttatatatat

SEQ ID NO: 445237 - DNA, 903 bp, Homo Sapiens
  misc_feature (683)..(683): n is a, c, g, or t
  misc_feature (765)..(765): n is a, c, g, or t
  misc_feature (782)..(782): n is a, c, g, or t
  misc_feature (793)..(794): n is a, c, g, or t
  misc_feature (885)..(885): n is a, c, g, or t
gcgctggagagttttgttttttcttggaattcttaccttataaagtttatttggcttaagctgctggtcacaaagtcattcctgcactcacagcttggtaaggcagtggagggaacccagcagaactgcatgagatctccgggcatggaccgcctccttactgtggaccaggcctggtgccagtgctgaacactgcaatttacttcatctttacagaaatgttaggatagtatagcatttaagaggacaggctctagaggcagatacctggcttccaatctcactggctgtgaatctttgggcaggtgacttgagcctgggctgtgcctcaattccctcatctggtcgtcgcgccctctcctagccacacctgctgtcctgctcttgtctctccagagtcagtggcctttcccccttcatgggagacaacgataacgaaaccttggccaacgttacctcagccacctgggacttcgacgacgaggcattcgatgagatctccgacgatgccaaggatttcatcagcaatcccgcacctcactctcagccgacagcccaatgggcttatcctcctctcgccctcacgatgagcgagttcacgcggtctcaggctggaagaatgcacttgaacacccagccaagcactcacggacgacactggattctagggccggctgggcttnctccactgtactaggaatgtaaaatcaaaagtcagaaagaaaacttcgagggtgaatctcaccccggcacgggttaagactngtgccgaatcttggctnagggccaattnnctaatgtgagcgattaatcgtatcatggcctactgggtctggtgaatggtatcgctcaattcccacacaacagaccggaacctaaggtaancctggggcccatgatact

SEQ ID NO: 445238 - DNA, 440 bp, Homo Sapiens
tttaaaatgcaaatgcttttattaaaagttgtcgcactgaataagagcaattaaagaaaagtttctgatctgagtatagagaaggaagaaaggcgggaacaagccagtcaagaagtcgcacgccttttgttttctacctttgctttcttaaaaaattgatcttgttcacttgtcaatttttaaaagggtgcaccgcagaaattactcgtgcgcaccatttccgctgtgggggcattcgtacaagtttccgctgcacacacagcctcccgggccctctcctccaaggctctgccggatcttccaacgaaatcccagagcagcctgcgctggggagcccgcaagtctctccagatctctgcaccccgcaccgcccggaatctgggacggcgcccacgcagggctgggccaagggcagagctcgcaccctgccttcacgcccg

SEQ ID NO: 445239 - DNA, 497 bp, Homo Sapiens
caaaagtggcgatagggactgtttggacctgactccaacctgcgccctcccttcctctatgaccctcctgcgcttttcctggaacccaaagctctgacttcgtcaaacttacacaattaaaggcaggcggaagaacgcgggctgggaagcaagcgggaagattctagaatggaagggagcccgccgagcgccgcgagccgcgccaggccgggtccgatggagcaggcggggattcctcccccaggcggacccccgccaccagccctgccgggagctcgcggcctgcggagcgcccgggctggccgctcaccgcccgcttcccccagcgaacgactcggggaagctccaggaggccatctgtgctgacggttcacaccagacaggaccacttgcaaggacaaaaataagaaatttaggaaacgaaaaaagacgtactggggcgaggggcgcgggcgcggcgacgacggggccgggggcacatcctggcggccgcaagg

SEQ ID NO: 445240 - DNA, 557 bp, Homo Sapiens
ttcacttgcgtccacgaaagcagcgtgccggcctcctccatcttcccactcgcgcaacgcacggcgacccgcgcgacacttctgcaatctgaaggcttgcttcttacaaataaagggccagagtctcacacttgccttcgttggagggacttagaagatcctccccacgtccacacacaattaaaggcaggcggaagaacgcgggctgggaagcaagcgggaagattctagaatggaagggagcccgccgagcgccgcgagccgcgccaggccgggtccgatggagcaggcggggattcctcccccaggcggacccccgccaccagccctgccgggagctcgcggcctgcggagcgcccgggctggccgctcaccgcccgcttcccccagcgaacgactcggggaagctccaggaggccatctgtgctgacggttcacaccagacaggaccacttgcaaggacaaaaataagaaatttaggaaacgaaaaaagacgtactggggcgaggggcgcgggcgcggcgacgacggggccgggggcacatcctggcggccgc

SEQ ID NO: 445241 - DNA, 150 bp, Homo Sapiens
ttttttttaaagtctctcaaaatgtttatttttgtcagaatagctgacaattttctgttaagtattttggtttattattataataagcatttcccccccttgaaaaatccattcaaaatatctcaaccattgaggtaaagcattttaact

SEQ ID NO: 445242 - DNA, 343 bp, Homo Sapiens
tttgtcacgtgggtttgttttcggtctccgtgcctccggcttcccaaagagatccaggtctttgcgtttccagggcgtggggaccccggccccctatgccgccacgccgccacaccgcctcaccctggcttttgtgctacttggcagttccatttcattatttattttttgtgctgctttttatcatgatataaattattgaaaccagatcacatgtgggcccgtgtttggccgccgccgccctgccccgtccctgcggcccccccctaatttattgccgtgggtcctgctgctgtgactgcttttgtacctttgcaataaagaattttctggtttcagaccc

SEQ ID NO: 445243 - DNA, 1182 bp, Homo Sapiens
gggttgccatctttattcagaaagtcattattttcagcaaaatggagctgaggcagaaaatccaggttgcaggactgggaaaaaaggagtgtctgccccatgggacacttataaattggtcactatgacagcagccctttctagaggtattaatgtcattaggttgtgataattctccagaaaccccaacagccctggattaagaacatctggaaattgttcagatgacacaaatttctctgtttcctgctgttaaggcttccgtgatgcctctctgtggcatctaccacctccatttttttcttttcaaacctcctcctttcaaatcaggaagtatacataaagtgcaagtaaggttcattccctcgctgtgctcctaggctcttctcttgatagtattaccgaatctatcaggtaaaccgctggccgagtaggatgtctgcaggaattttctggaggttagcaaataacttcatctggcaaagagagtatctgaagatcaacacagttttgggcaagaaaacatgaagtaccacacacaagacagggatgtgaagtatgcaagaagtagcagggagattgttgtcactgaagaggccatctttggatctcaaagaatttaagagaattcaggaaccgttactaaaatgaacaaggccagcagatttcagagcacggtcagtcttcagtgagggcagattcagttttcctagttaaattcctgaatttctttttggcttctgccctttcttcagcatcaaagtaccagacagtcatagcatatctggttgcgtaagagggctgcacttcgtgtgggttcctacgatctgaccagaagaacaggagtctgtcaaaaatgggctccacatctgctatgaatgatttcccctctggaaatatccgcaggatcccaccatgtagcttggcatcccaattcttgttcagatagtagatgcaggtgatgcagcgaccatcaccgttggggttgtccacgtggcgaacataacctgttccatttcccggatagcaagccaccattgcctatggagaaatcccaagaaagctggttaacaaagctgagacagacaatcttctcctcccactggtgagcagataagtaacacagtctccttgggtgttacgtgacatttacaggtagttgcatcccgagaattccggacc

SEQ ID NO: 445244 - DNA, 1064 bp, Homo Sapiens
  misc_feature (157)..(196): n is a, c, g, or t
  misc_feature (526)..(587): n is a, c, g, or t
  misc_feature (644)..(715): n is a, c, g, or t
  misc_feature (832)..(841): n is a, c, g, or t
  misc_feature (844)..(911): n is a, c, g, or t
ccataccttttattgaactctgcagacttcattaagggaccatttgcttagaaattcttaaacatttggacatattttacaagacaagacagcagctggaggtcacacaaagatcacaatttcatctcaccacatgcataaaaagacactgggattnnnnnnnnnnnnnnnnnnnnnnnnnnnnnnnnnnnnnnnncgtagtttagtttgctagtattttgtttgggatttttgcattgatgttggggggaatgaaatacggtccctttctcataaagtttttgccaggttttggtatctaggttttctggcatcataaaatgagttggggagggttcctgcatttctactgctctttgtaagaatttaagattgtctttccattgacgaatcaatccatctaggcttgttgtttcactatggaaaagcaaataaagtaactataggttccacttctttagcagatagggaactactcgaattttctattttttcatttgtcaattttggctcttccatagtttannnnnnnnnnnnnnnnnnnnnnnnnnnnnnnnnnnnnnnnnnnnnnnnnnnnnnnnnnnnnngtcagatgactctaggatttgtaatatcctttcattcctgatattggttgtttgtgnnnnnnnnnnnnnnnnnnnnnnnnnnnnnnnnnnnnnnnnnnnnnnnnnnnnnnnnnnnnnnnnnnnnnnnnccactttatcttcattttctactccattaattcttgttctttattatttcctttattttcttcaggtttaatttgctattcttagaatattttaactactaggttcattttcaatcnnnnnnnnnnaannnnnnnnnnnnnnnnnnnnnnnnnnnnnnnnnnnnnnnnnnnnnnnnnnnnnnnnnnnnnnnnnnnnagcactttcactactcagttcaaatatattctaattttcattgtaatttattgtctgatccatgagttatttaaaagtgtatttcttaatttatgaacttaatagaatttttctatttttgaaattattattgatttctaagtgaatgatacc

SEQ ID NO: 445245 - DNA, 466 bp, Homo Sapiens
  misc_feature (69)..(110): n is a, c, g, or t
ttgtccatatacacacattgcaccatacataaataattacattgtaaaaatgactccataattacaagnnnnnnnnnnnnnnnnnnnnnnnnnnnnnnnnnnnnnnnnnnatctaggtagatgatatctggggggttttgtccgtgggggctgtgtctctgggcatcggcccctctcgaggccggcaggtggcggtggccgcggcctcccacccgcccctcccgccggggccgccactatctggggttgttgaggaggatctccagccagcaggggcaggaggtgatgaactgccgggagtagcagggcccccagcccttggcgaagctgatgcggacgctgttggggtcgtaggggccgtcggcggcgtcgggctcgggcgcgtgctgcaggcccgagcgctcgaagtcgaacaccttgatggagtagccggggggcaccttgcgcacgaccagggcgcggccgc

SEQ ID NO: 445246 - DNA, 456 bp, Homo Sapiens
tactgggtaacttgttaaacacatttattgatttcttgacagtaaccaaacacagtgagtgaccattataaacaagaaaagaaaggcattcgttttgtactttgtgagatctggctgcacctggagagaaaacatacccctttcccaggaacttacaaggcaaagtgcattccttcacgggagcatcacaggggggcatggcagttttgaaacgcaagaagtctgtcgcctgctatctcaggctgaagctcacctcatgtgaatgattgagccatggagtggaattaaagtcatacttgcttagcaaatgcattcctgattgccacaaactcagtaaaaactggctgcaaatgaacaaaacatgtagatgaaggaacaagtgaaatcaaagaatgcagttgcatggagccagggcttagcctgtaaggaaggagaacagaccaaagccagaaaaat

SEQ ID NO: 445247 - DNA, 489 bp, Homo Sapiens
  misc_feature (142)..(142): n is a, c, g, or t
  misc_feature (423)..(423): n is a, c, g, or t
  misc_feature (431)..(431): n is a, c, g, or t
  misc_feature (458)..(458): n is a, c, g, or t
aacttgttaaacacatttattgatttcttgacagtaaccaaacacagtgagtgaccattataaacaagaaaagaaaggcattcgttttgtactttgtgagatctggctgcacctggagagaaaacatacccctttcccaggnacttacaaggcaaagtgcattccttcacgggagcatcacaggggggcatggcagttttgaaacgcaagaagtctgtcgcctgctatctcaggctgaagctcacctcatgtgaatgattgagccatggagtgggaattaaagtcatacttgcttagcaaatgcattcctgattgccacaaacttcaggtaaaaactgggctgcaaatggaacaaaacatgtaggatggaagggaacaagtggaaattcaaaggaattgcagtttgcatgggagccggggggntttaggcncgtttaagggaagggaggaccagaccnaaggccaggaaaattggaatttaactcgttt

SEQ ID NO: 445248 - DNA, 878 bp, Homo Sapiens
cggaatagggaaagggtgaatgagaagtagaacccattaaatgcacttagccacatccgaataaagaagtatattacatgatacaagccaagttaaagactcacagcaaagctaatccaactggctccaaaaccagctagtaagcatgtcacgaagggtcaacttacccttttagaattttgagaagtgagttttgtatgaaaataaacataaatatatactgaatatttagtatttgtagccagagaaaaattcctgtttacctgcaaatctatattgttctcaatacaatgttcattcttctctaccaaaatcttcccatagttttctgatttgataagattttcaactctggttgtatctttcacttctgcctccaaatccttcattgttgcagtttcatcttttacagtaacagtatcagacatcctcattagaaaaggttattttcgaattctacagggagcttgaagcctgatgcgtcctttggatttgggattgtggtgtcccacaaaaataaaataaaataatccaaggttctttttcacagttgtcagccaggatgtcaactgtagtgaaccatctgtaatctggcaggaggagtcccatgtccttgtcaccactgtagattcccggacttgaatggactgtcttggatcaaatatatcatacctttccgtggccttcattgtattggtatttgcttcatcatacagagttaaggagatgttctttccatagtacctgtaaactgatgctctgcattgctcctctatagagctcactgcacacatccagctgattagtctggcattgggagtgcctgctagagcagcctccgctctcgacgaattcgagctcggccgatttggcctgat

SEQ ID NO: 445249 - DNA, 1219 bp, Homo Sapiens
  misc_feature (268)..(283): n is a, c, g, or t
tttggttatatttctgctttaatatatagtaacatttgaaaatacacagatatccaggaaaaaaaggtaaagcagtatgaggtattgacagcacaactgtgttttaatttgggagttaatttggggtgttatgtaacagcaatcatacttgtagacaaacacatccactagctctgcaaacacattcaaaggtaatagtatatagtacactccaccctgtaaaatatgtcaaatacccccactctacaaattcactgtgtttcattannnnnnnnnnnnnnnnataagaaaaggggcatatcattataattcacaatccaagtcagagtcttaatttaggtatgaaatattacctgccaatttgcttctcaagctactttaaaaatatatatatattctttaaagccattttatggccatgggaatctaattaatttcataatgatgttggttgaacatgataccaaaaaatgcaggtattttcaagaacaataagatagataacagcattaaagcataatcctttaagaattcatgagaaaaaaaaggatgataaaacttaagcttctttttcagatgtttaaaaatttctataaaattctttgtcccaagattaatcatataaccatggtacataaaatatgctaactacattgcctggtgtcaaggtgggaaaatcctcttttataacataaaatcctcttctaatccatgttgacccaagtcctggctgtctgagggcagattcctgtcaagagacctaaggttgtcatggaaagcatcactttcgtctactagttggtaatcctgttccatttccgttaggaagccactcccagatcctgatccagagccggagccggagccgaagcctgatccagagtagtcctcagaaagtgggaagatacgattcaagtcctggattctcgtctttggaaaaaggtcagtcctcagacgggggatcttgttggattcacctggaagtagttcgaacattggtcctttttcttcaaggcagtttgcagaattactgtctggattgcagcgcacccattggtacctggctctctgcgtaggataaccttgaactgaggattccagaaccaggatgagggcaagagccaggacaagccgactgcatttgagtagcttctgcatcatgaccaacttagtctagctctcccagctgcacgccaacttcttgattaggaaatgtccc

SEQ ID NO: 445250 - DNA, 813 bp, Homo Sapiens
  misc_feature (54)..(54): n is a, c, g, or t
  misc_feature (61)..(62): n is a, c, g, or t
  misc_feature (107)..(115): n is a, c, g, or t
cataatgatgttgtttgaaccatgataccaaaaaatgccaggtatttccagganccatagnnatagataccagcattaaaggcataatcctttaagaattcatgagnnnnnnnnngggatgataaaacttaagccttctttttcaggatgtttaaaaatttctataaaattctttgtccccaagattaatcatataaccatggtacataaaatatgctaactacattgcctggtgtcaaggtgggaaaatcctcttttataacataaaatcctcttctaatccatgttgacccaagtcctggctgtctgagggcagattcctgtcaagagacctaaggttgtcatggaaagcatcactttcgtctactagttggtaatcctgttccatttccgttaggaagccactcccagatcctgatccagagccggagccggagccgaagcctgatccagagtagtcctcagaaagtgggaagatacgattcaagtcctggattctcgtctttggaaaaaggtcagtcctcagacgggggatcttgttggattcacctggaagtagttcgaacattggtcctttttcttcaaggcagtttgcagaattactgtctggattgcagcgcacccattggtacctggctctctgcgtaggataaccttgaactgaggattccagaaccaggatgagggcaagagccaggacaagccgactgcatttgagtagcttctgcatcatgaccaacttagtctagctctcccagctgcacgccaacttcttgattaggaaatgtagcagggtgctctctgtcccttccc

SEQ ID NO: 445251 - DNA, 831 bp, Homo Sapiens
agcggattttcctaatcaagaagttggcgtgcagctgggagagctagactaagttggtcatgatgcagaagctactcaaatgcagtcggcttgtcctggctcttgccctcatcctggttctggaatcctcagttcaaggttatcctacgcagagagccaggtaccaatgggtgcgctgcaatccagacagtaattctgcaaactgccttgaagaaaaaggaccaatgttcgaactacttccaggtgaatccaacaagatcccccgtctgaggactgacctttttccaaagacgagaatccaggacttgaatcgtatcttcccactttctgaggactactctggatcaggcttcggctccggctccggctctggatcaggatctgggagtggcttcctaacggaaatggaacaggattaccaactagtagacgaaagtgatgctttccatgacaaccttaggtctcttgacaggaatctgccctcagacagccaggacttgggtcaacatggattagaagaggattttatgttataaaagaggattttcccacctttgacacccgggcaatgtagttagcatattttatgtaccatggtttatatgattaatcttggggacaaagaattttttagaaattttttaacatctgaaaaagaagcttaagttttaacatccctttttttctccagaatttcttaaaagggatatgctttaaaggctgttatccaaccttattggtccatgaaaatacccgccattttttgggtatccatggttcaaaccaacaacccattatgggaattttaaattgagatttcccaatgggccc

SEQ ID NO: 445252 - DNA, 675 bp, Homo Sapiens
  misc_feature (496)..(567): n is a, c, g, or t
tgccttaacaagtgtgtgcaagcccctcagaactcaagacatccaaattttattgcgtctctacttatactggtttgcttttgatttattcctctattagttctataggagtgatctcaagtgagatagcagagcaagatgccaaaagaccataaatagagtaaggtttctatagatgtgagacagatttgagagagcatttactctgtctccctgtggatgaaactgctgctgaaatggttccaatttttaggaatctgcttacccacttcattatttgacagctttccttggtgacccaaaccttgtagcctaagccatttgtctttttctcagtggagggagtgtatggacctggccccatggctttgcatgttagagacctggcagactaaagtctctagtgtttgtttgctcacatttgctgagtgacagctatgtgccagactgcataaagggtggtggcagaagtgaaaatgtttaagaatgaccaaannnnnnnnnnnnnnnnnnnnnnnnnnnnnnnnnnnnnnnnnnnnnnnnnnnnnnnnnnnnnnnnnnnnnnnntgagataaaggatacttaagcccaaactatatctaaacccaaatctcacttggctggaaacatcaatcttaaccatttattcagaaccattaaaccaatgattccaag

SEQ ID NO: 445253 - DNA, 539 bp, Homo Sapiens
gatctaatatcagttattgattcaccttacgtatggccaaaatgttataatgcatgttttgcaagtgctttatgcaaatgcttagagcaatcagtgtggttttcttacccctgtcaaccacctctggttttctttcctcttttactgttttcttataaaagagaccttgagtatgcttctctcttctgaattgtattttgggtcttttatctccatataactctttatagtttgtattttgctgagaactttgatgtctggaacctacagttgatccttttttgtggagagcaagaaaaatctggatgtgctggtcaaggaatcctctgagaattatggacactgggggaggaaagtgtatgtcagggaggagaactagaaggagaatgtattattcacaggaagcctaagatgaaaaatattggcaaaagagattgggaaataggtagttatggaattcctaataactagggaatctgacctaagacctttgtttttttcatgagtgtagtggaatttaaactgtgcatgtggatact

SEQ ID NO: 445254 - DNA, 1084 bp, Homo Sapiens
gggtgcgggaaaaggttaaactgaagggggccaagggcccccaggcgtgttgccttggcagaccatccagggaatgtggaaggaacccagggggccccaggaccccctgatgtgtcccaatggttcagatttgggaaaagtttccccttccatccacactgggcaatgagggtccccaggcatggcatgcacccatgctcacagaaatcacagcttctgagccccatttcataatgaacagaacggtcccatacccatgcagacaggacacgcagacatgccccgccccggcctgccatgcacagatgcccacagccaccacagggtgcacactaagacagaaggcgacccacagtgtggggaggacatttagggcccctaacagagccggagtcctcccaggggcaaggctgcctgagccttggcagggggcttgtggctgtgggttcctgagcaccaggggaaggagccccgtaaggtgggaggtctgaccgctctcgctcttctctacgacctccaccacgtcccccgtggacagagccatctcggagcccgaggtcttctcgtagttggcaatggcgcggtacgtctgcaggatgatggggccggtgatgtctgtcgcggtactcttgccatctttgggcatcaagtatgtctctggcttttttgtctggttgtccgtggggagcttgaggtcatcagggcgcaccttgaagaagtcgaggaggtggggacagcgggagatcttggtgggcaggctcatgagcgtgctgcagtactcggtaagtgtgccctggcggttctcggcggcccgctgcccgtcaaaccacttgggagctgggaggtgggggatgatcctgttctctggattgatcgcccctgcctcaatagggaacatttcttttaaggttttatggaactcgtagatctcggtgaagcgccggtagaccaccttctccgacaggtcctgccatttcaccaggaacatgtacacatagtgctggctgggtacgaagcgcttctcaaagcccagcagggcgatgtgacggatgaaggtgtcccccatgatcccgggaatccgacc

SEQ ID NO: 445255 - DNA, 2031 bp, Homo Sapiens
  misc_feature (458)..(466): n is a, c, g, or t
tagtatattgtgtacttgaatacaccccgctgtgcgaggacgcgacccggcgctgagctagagcgggcgggtgctccgtcccgtatgccggagcgtgccggcgcgtggcagaatctgcgcattgcgcgcgccggcgcctcagagtcccccgctcctagggttggagggcgcgccgtgacgtgagggggatgtctcggggctttaagaggcggcccccaggaggcggtgatgtcgtctccgtgtcccgcgggggcagggtttaattgctgtcatataagcgcggtcgtgcggcgagattctcccccgaagcgccactcgtgtaggttgccaaaattgtaggcctcaacgagggagttattcgcgcgcggctaacgggggggaactcgcaacacttgtcttagatgggaaatcgacgcagtgtgattttctcgcattttcgatgcccccccgtgaccgtnnnnnnnnnccccgggcgctcagggcgtcagaagaaggagagaaagggcgttctagggagaaggcgtgttctccacaagggggcccggagagcggggccgggagcaaggcgtagtatcggggctcccagaacgccgtcttcccgccgcctccggaaaaacacccctggggggcgggaggcccgggcccctcccttgcatttcctgcaggagccctcgggtccaactccaaggcaacatttattgagggtggcgggagccgcgctggacaggggtcggggctgccctcggcgtccagacgccaggctctatagaacacgtatatacaggcacggggcggcaagggccgagacgctagctggggactgcgctccagcctcagacggcagacgccagcttccgcttggtgctctcgctgcagcggttcaggatgaggtcggcgctcggccgcgggggcaccgccggctgcggtttagagcgctgcgtctgccgctcctcctcgagcgggctcccggggctctgcggtcccggccgcgcctggcggcgtcgctgctgcagaaaacggacgctgttgcggcgataggcgtcctggctgaggcgcttccgcgaccgctggtggatgctgtgcgcgttgcggatggacgacctgcggggcggcgccccccgcttgatctggcgttgggcctgggacacgtcttgccctgacttttgcaggtacatggacgggaagtagcctgtgacgtcgtctttcctgatgacccaccagccgtccaggagcttgtgaatgacctcaacagcttcaccctcgagcagggacacctcgtccccctccacagcagtgtaggccttgatggcgacgtatggctcacctgcatagttgggctcagggtcttccgtctcgtcaggactgtccaggggctcgaggaaggacgctgggatccagcctcgctttgctttcatctgacagaaccaccaaccgctctcgctcttctttacgacctccaccacgtcccccgtggacagagccatctcggagcccgaggtcttctcgtagttggcaatggcgcggtacgtctgcaggatgatggggccggtgatgtctgtcgcggtactcttgccatctttgggcatcaagtatgtctctggcttttttgtctggttgtccgtggggagcttgaggtcatcagggcgcaccttgaagaagtcgaggaggtggggacagcgggagatcttggtgggcaggctcatgagcgtgctgcagtactcggtaagtgtgccctggcggttctcggcggcccgctgcccgtcaaaccacttgggagctgggaggtgggggatgatcctgttctctggattgatcgcccctgcctcaatagggaacatttcttttaaggttttatggaactcgtagatctcggtgaagcgccggtagaccaccttctccgacaggtcctgccatttcaccaggaacatgtacacatagtgctggctgggtacgaagcgcttctcaaagcccagcagggcgatgtgacggatgaaggtgtcccccatgactgggtggcctccagtgctcccc

SEQ ID NO: 445256 - DNA, 311 bp, Homo Sapiens
gacggcttaacaacagaaatttatttctcactattctggagattagaagtcaaagatcaaggtgctggtgattttgtttcttctgaagcctctctctttgcttgcagataactgccttctcactgtgtcctctcctggtctttgttctgtgcacacattgctgggtatctcttatgtccaaaggacaccatgttggattagactaacagcctccttttgaacttaagtcacctctttaaaggcctcatctccgaacagtcacattcaaaagaaatgggagttaggacctcaacaaatgaattgggggatac

SEQ ID NO: 445257 - DNA, 506 bp, Homo Sapiens
tttaatataaaatgtttttaattgtttttgaaaacatttaaaaaacaatttttgagcactttaataaaaaaagagaactgaaatgctaccgcaatattcaactactgtagtttcagcaggtacaacagacaacaaaacactggggaaatctgactttttgcactaaatgaaacatgaaacagggcttgtttttgtcatttatcgtgtagtaaagcacattatagtacaagactattatatgaacctcagaagcactgcacaaaaaaacactttccttcttttcagttcaaaagtcagtgcttattgcaattatatgcaaaattatttacttcatgaagttttatgataaacagtatgcaaaatgttttaaacatcaaaacaataaaaataatctggaacagaacatattcaacaataactaagcagaattagtaaacataaagtaaataacctgtgaataactatgcttgcctggttaacactgaaccagtttcaatacagcgaag

SEQ ID NO: 445258 - DNA, 1106 bp, Homo Sapiens
gcggccgcgtgtgtgctcccacacgatgcggctcggggccgcgtgccctgagggcgcgtcggagccgccctggggtcttcgggggctgctgccagcaccttggctctttttccagacggcggcgctggaagccggcggcccgggtgcagcggccaggaaggggcgcaggcgcggggggcttaggccaaagggcgcagggttcaagtagggcaggaacggtccggtgggggcaggggcgggggtcgtgaagggttccagcagcgggaacggcaggcccggcgctgatgcggggtcaacctccggggggcgctccggcgcgggcggctctcggtccagggccgggggtggcggcggggctgggctctgcgcatgctccgcgcaaacatgcaggtgcttgaagagcgagcggtgcgtgcggaagcgcaggaggcagttctcacacttgaagtagcgattgggtttgtagtgcagtttgctgtgagccaccagctcctgcatgctggggaaggtctcggtgcagctcagggctgagcagcggaagagcttgccttccagggactgtgtgggcgggcagtgggttcgcagatgctgtgccaggtcacggacgctgggaaaactgaggcagcagccagggctggagcaagggatttgcttccctggaggtgggcgtcgtctgggaggccgcaggtcctcgctggtcccggagactatgctggtcaggccagggctgggtccggggccaggctggcagctgtctggggctggggaggagccctgccgcatccctccagcccctccacgttcccacactggcggtgtggctgcctgctcagggcctggctcctccgacatggaggaggaaggggctgcagctggcacagccggggacaacacctccttgtcggtctcactggagctgggctctgcagtggccagcatgtctgggatgggccctgagggtttctcctccatcttcgacacggctcggcctcttgtttctgcggctccggcggctgcagcttaggcggcggccaccctctgggcagtgcgagttcgcgctcacgtcagcgccattttccacatgcaagggaattccggaccggtcc

SEQ ID NO: 445259 - DNA, 550 bp, Homo Sapiens
ttttcagtttagtcacatttattgaataaagttagcaaatggatatctcttgaaaatgagagctccagggaattaaaaaatgtaaagttcccatttcctttctgtgttaacacagctaattatgatctttacttcacatgcaaaagtcaacagaacaactcagtatttcaccaaattataaacaagaattacgctagagaaatgaaaccctaaagagaaacggtcatataactaacctcagtcaagtagttctggcaattatttgaagtctgaggcttgaagtaggaattcttacgggcatttggggaatatattttcgttgagtcctatactagtaagattttcaacacaaggtgactctcgacctcgccttgcaggaagagtgctgagaaaatatttcacctgctctttctccataaagagctgatactgatcattgctattttcttattcgatttagttaatttttttaacatggaactgttagctttcaatgctgctgcaaaggcttccttatattcttctaactcagttgtaacctcttcataag

SEQ ID NO: 445260 - DNA, 1397 bp, Homo Sapiens
  misc_feature (298)..(298): n is a, c, g, or t
atacccgccgtggttgccccccgggattcagggggaaacttgagcgggccccactggaaggacggagaatccacacggtgtgcaacacggattccgggggaactgagcgggcacggctggaaggacgaagatcacacatggatgctattttacttttgatccccatgtgctttcctggggcatgatattttagatggaactttttctggtctgtgatctttggtagaaaaaaaggtctctaggattattataaaaatgttgcatctataaaaagaaaagggaaaaaagacagcttgcntcagctggcccaacccctgtcgcaaacacctgatcgcagggtggtcccctccacctgggtaggccctgtccaccttctgtgatgggagagagcccacagtggttacccgaaccacccttctcaggcctcgctggaggccccggggctccaggctccctgtcatgtgctcagcccagtgttcctcggtgattcgtaaggactgggtgggtgaatgaaatgaagtaaggaaaagttaaaacccagagacgtgagggcccacgggtcccctgtgactcggccaagctgctggctccagtgccagcccctggttgtggatttccagaactttttaggcaacaaaagtaacctcccagcagaggttatcaccaacaagacgcagctgcctgcttgagacacacccccaacaggaaacacccttggtgcagtttaaccagggggcccgaaggcctgagagaaggtgcgtggccatgggtctcgcggctggccacacggtaagtgggctccatgctgagcctgggctgctctgccctgccacccctccaggcttctgctcctggcaggctctagggggcagccagtccccacacatagggcacagttccacttggcagactcagccacgtttattcgcctttccaaatggcgactttcccctcctccctgcccgacccactcagcacgtatctgtcctcagccgagcacagcgtcctcacggtgtccatgtgcgccaccagctccttctccacggtcttcctctcggcgtcaatcacgtagattttccccttgggtgttccctgccccagccctcggctgcccacccagacctgcttcttcacccggatcatgcagttgatctcagagcagtcctcgaggggcaccctctgcgggggctgggccaggtccttcaggctccagatgtaaacctcgctgcgtcctgcacaggccgcccacagctgctcctcctcaggaaggagctggaaggccaggaaggaggtactggtgtctttgaagttctcctcaatcttcaattcttgatggagggatccattcattttcatgaccatgatgctgttacctgtgcagcaccacaggcggccgc

SEQ ID NO: 445261 - DNA, 521 bp, Homo Sapiens
ttttttttcaatattcaattattaactttaatgtgcaaataaatagaaaaggaaaactacattcaaaacagctgcaaaggaaggacaagccccagaacagaaattcctcaagaacggaaaagaggcgctccctagaagcatgcggggatgggaatactgggaggaggggctcggcggggtctccggctgcacccggggcccaggtggctctgcccgagacggccgtgggcctggtacaggaatcttgatggcaagttcccttcttagaaaaccaggatgtgtacaaagtgcctgtgtgacacttggggagcgggggtggggagcccaggaggacgggtcagcatcggaatcgcccagcctggagtcaaaggcgtcaggagcctccaggttccacaggaaacttctagaaacacatctccacttcctggaaacttgagtccagctgttgcaggatggcaagggtggcggttattctgggcctactggtgtgcaggggccagggccaggggctctcatggtcg

SEQ ID NO: 445262 - DNA, 497 bp, Homo Sapiens
gaccccaacatgtgggaatgttttgttctttttaatgcacccaagcattaatttagtcccttaaggattttacttccccaaacaaagaactttctggaaaagggagataaagccatagaggcaacacagtcacatcacctcttataaatatcttccagccacttttcatcatcctgttcttcatcgtcgattggctcctcggtttccagtggagttgggataaagaagtgtggcctcagggggggcttgctgacgtgagacttaagtccaaacttgcgcttcagcaggtggaactgctctttgacgtagtggtaaaactcgtactcgtatctcatccgctggtagaggatctgcacagcctcaggagaggggacagtcttcttcaccgtcacagtcatgtttccaagcttcctgtgctcaaaacctgctttctgttccttctgtactccattcagttactctcgcttccttgttggtagctcagagggcgcctcaca

SEQ ID NO: 445263 - DNA, 479 bp, Homo Sapiens
tttcactaaacattataactttatagaggacaatatttgatgattaagaagacactccaggatcttgctctacgtctgcgtcattacactgaatttaattatgaagaaagcagggaagataaataccagacaaggagcccagagatctgggctttgatcccagctttcatcaattcagttcacagttcaccttagggggccttagtttcctcatcttagagtgaggggttgactctattggtgattcccaaatccgtgctggtcttgatgaggttttcatctccatctttcctactgacaccaaattaaaagcaggtgtagtctcaggagctctttctgttcacaggcttccctggtgaaaataacttcttgccttggaacaccaattttgaagaggggaaggggttctcttaaggtgtagaaaggactatccagggagttgcaaactttgttgtaagtggacaatcaccctcgctcct

SEQ ID NO: 445264 - DNA, 447 bp, Homo Sapiens
acctatgaaattcccttttattaaaataacatatgaagaaatccctttacctatcagaaacaaaacactctctggtttataaaacaccttaattctactgctcttttttctccaatcaccagcatctgtttttcagggggtgattttacttttgtgaattccttagcctttcttccttggtgcataaagttaaaatgcacatcagcagaattgctgcatattaacatctcaggactcttctcttgtaaagaagctgaaattcgtactatattggccaaagtgagcgagttaggtgatcttggtttcaatttccgagcctttgttaatatggagaattatggttcatatcagttatgtaggacctttggacccagggtcctacagatagatatggtgtgcccagattttaaaaataccttcaaaaataaaaaatacattcagtgacaa

SEQ ID NO: 445265 - DNA, 1648 bp, Homo Sapiens
gtacaacccttcaggacttatgccgggatgtcatgtcgcctttgctccgagctggggtctcatgtctgtggtgctggaatccagagccctgacggtaggggagtgattttgcaacacagttgcatttcacatcttctgacaggattccttgagggagggttggaccctggcacctggccagctccaggaagggtggccaggcccctcactggccccatcaagagtacttggtgttggagatcttcttccagagcagagtcttgaggtggctgagcaccagcgagtgatgggcctccacctggctggccagcccgctcagcgtggtacaggtgcgcagctgtgtgcccagctcctcgcggaggtcggcgggcgcgccaggcagcaggtagccccgtagcagtgcgcacaccttggccaggttgggctggatgaggtcgcccttgcactgcctcatgagcctgtcacacggggccctgcagtcgcgcccgtaggtgcagtcggtgctgtgctcgcagcggcggccctgcaggaagcggcgcacggtggcctcgggtgccacctgctgcaggtcggccatcttgaagtcgtaggtggctgtgtagcccacgttggccagtgtggtctcacacatgtagaaagtcccgtaagagccgtggaagagctcctccacgaactccagcaggccgatggcgatcttggcccgccaaggccacgcaggccccagccactgctggagagcaccctgcagggcaggcggcagcagtgggcgcaacaggggtgggagggcggccgcgtgccaggcgccatgcggcacgccctcggtgaggtagaggtccccacagtagcccagcagtctggaggcgtgctccttctcctgcagggacagcagcagcaggaactcgttacgctgcagcagggcccacacggacttggcttccgccagggacacccggttgtccttgttgaagtcagccatgagcaggacctggccaaccagcgccggcagggaaggcaggtctcccaggttcgccttgaggaagccgagggtcatctcccggaattccttgatggaggtgccccgggtgggcttgtcaaacagtaccagctcccgccggggggccgcatccgaccgggccttggagtcgagggtctcctcaatgccacacttgatggttacatccttgtcccgccagagcccgctgtacacctgctggcccggggccaccgagaggcaggtcctccactccaccatatgcagctcacacaggtcctggcagacggagcccgagatgatccccttgcggtactggtcacaaatgaccacctggcagacatggccgcgacagcgctccgagtaggacgagtagtgcacgtacaccagccagctgcctgcaaagacgcccagccaggccaggaagatgcagcggaccctgaggcctgggagccggccctgcaggcgcttggagaaggggcagaagagcaccaggtgcgccaggcgccgcagccgccgcatggtgggctccggccggggctgcgcgggccccgcggctcgctcggcctcagccccggcccggcccggcccgcagcgccagccgctccctcctcgtgccgaattacaacccagcctcgtacctagccgtagtttttc

SEQ ID NO: 445266 - DNA, 553 bp, Homo Sapiens
cgaatgggggctcagggtgctcagccctgggcattacataaaagctgtttattgacattacgttcttcagagtaacaaacccccttggaggactctcctgccgggatgtccatgtccgcctttgctccgagctggggtctcatgtctgtggtgctggaatccagagccctgacggtaggggagtgattttgcaacacagttgcatttcacatcttctgacaggattccttgagggagggttggaccctggcacctggccagctccaggaagggtggccaggcccctcactgccccatcaagagtacttggtgttggagatcttcttccagagcagagtcttgaggtggctgagcaccagcgagtgatgggcctccacctggctggccagcccgctcagcgtggtacaggtgcgcagctgtgtgcccagctcctcgcggaggtcggcgggcgcgccaggcagcaggtagccccgtagcagtgcgcacaccttcctcgtgccgaattcgccacccagcctcgctaccttataaccctgagggtactgccgtcgtt

SEQ ID NO: 445267 - DNA, 470 bp, Homo Sapiens
atcaaagactcacgattgttctcccattcctgtcgaagctgtgaagcaggtgggtacttgcaacaagacagttctaatgtgatctcaaaacagttggcccacacataattgtaatcttgcataccaccttccacatcataccaatgtgcgccgtttgtgattccatctttgaaagtctcgtcttcatctcctggacaatgaggctcaccagttttcattaatggggtggtttgaagcataagcttttgccaagtatttaaatacttcatcatctgaggttttgctatagattccagtggccttatgttctggagaatcatcaaaaggatagcttgctaccactgagccaccatgcagatttccagaaagcacaaacttgttcctgcggatccactcgatgagggcgcgcacctcgggcacctcgtccagggcggggggttcgccggtgctaaactggtcgggaaagcttc

SEQ ID NO: 445268 - DNA, 621 bp, Homo Sapiens
ttttttttgcaggaaggaattccatttattgtggatgcattttcacaatatatgtttattggagcgatccattatcagtgaaaagtatcaagtgtttataaaatttttaggaatggcagattcacagaacatgctagtcagcttgcagttttacctcgtaaagataacagagaattatagtcaaaccagtaaacaaggaatttacttttcaaaagattaaatccaaactgaacaaaattctaccctaaaacttactccatccaaatattggaataaaagtcagcagtgatacattctcttctgaactttagattttctagaaaaatatgtaatagtgatcaggaggagctcttgttcaaaagtacaacaaagcaatgttaccttaccataggccttaattcaaactttgatccatttcactccaatgacgggagtcaatgctacctgggacacttgtatttgtaaattctgatttagcttattgtagacttgtgcctactttgtcatgagggtttgacttctgcattcttcgtggctttccttcctttggctgtaggtttatctacaggctacgacagatttcatattgcttttctacagacttatgaggcacgactagta

SEQ ID NO: 445269 - DNA, 805 bp, Homo Sapiens
  misc_feature (197)..(197): n is a, c, g, or t
taccctttattcctaggatggaaagtgtcctgaatcacatcccgggcccctgattccatgtgtcaaggcttccagcccctcaaagcgttggaataagcatgttcaaggaggctcactgggcaggtggccaacatccctttcaaggggatacaccataaagatgacattgtccaagggagggagggcagggtgatctnggtctgaccacctcaaagcccatgtagctgaaggcccgcagcagggcacctctgtcgttccgatcattctggaagttcacaaacacagagtccacatttgtcttctcttccacgtactccagggttgcagtcaaactttcccggttgccttgatccaaggcctgatatgggatatccaggaagagtcgacggtcacagagaaggccgtgccaatgggcagaggtctgggaggtaaggcggaagtgaaagtctaactgtactgggtcctggtggagcagggggtcagtagccagcaccgtcaagttcccagccgaatacagttctttaagctggtcgtggttaccctgctcggtgcttttgccctcctggaggcctactagggactcaggagcactggaggcaggaacggggctggagtgtcaagtcctcctcttccttataagtgatgcgtcgctttcctggccgccagggcacggtcatcgtggagcgctggtggaaggtaccgctggccggggagggccggaagccgcgcctgcaccggcgacatcgcgtctataagctggtggaggacacgaagcatcggcccaaagaaaacctggagctcatcc

SEQ ID NO: 445270 - DNA, 1241 bp, Homo Sapiens
tttttaaaaagaacatattctctttatttctgcttgggatacaaatgttcagtttggatgatgagaatgaggcaagtactggagacaatggctggctctcctgtttgtcccaataaactccaatggaggaagaagctaaacaggttttggatggtttcggtctactgcatctagcttatcaaatctacagcctggtacttctggaacaggacttccctgccccagtgatgacagttaaagatggcaaaaatgaagaattcaacatgtatacgcagtgcagtctgatgtcttcagatgttctctaaaattctgtatttggtcagagctgggagtgagatcagggtgcttgcacatttctgctccactgctcccgattctgctttgctgccttggagggagagtagatttagatctgggggctggtgggggccatagccttggcagcttgctgggctaaccagtacttatatcttttggtcttgggcttctcaaagttcacgacagacataggcactctcacagtatcaagcccatttaccgtcacctcacaccaatactcgccccaccgtgtgataggctctgctggtaactttaatgtatgtggggcaaccacaacaccaagattcttaaagaagtggcgggcaactatttcagggttcagctcccatttgacattgttcttcatccctacctccaggcgacagctttttagaaatttcactgtcgcctcacctgccttggtctggatcttctctaattttccttcttgtctcagcaatttctcctcttcaaacagcttcttgttttcaggggatgcatatacagccagtccctgaggaaggagtcgattccggcctaaagatttcttcactgagaccaggtcaccccggactccaacattctccaccgactgcgtcaggatgagctccaggttttctttgggccgatgcttcgtgtcctccaccagcttatagacgcgatgtcgccggtgcaggcgcggcttccggccctccccggccagcggtaccttccaccagcgctccacgatgaccgtgccccgattttgagaaaggctgaagttgcaggccaggtcaggggcgttcccttcatgtcgcggccgcagtagctcctggacgcctccccgaagcagccgtccagcgcccgcccgcagcagagctctgcccggggccgtgacaacgggcgccgccatgttcacaggcacagaatgagacctgaggccc

SEQ ID NO: 445271 - DNA, 1095 bp, Homo Sapiens
  misc_feature (849)..(849): n is a, c, g, or t
ttttactttgttctttcttttttatttagtcacaacacatcagtacaacagaggtcaaacccagttcagtggaggtcgtttaactacacctgctaaaagaataaacctgaaaaatgatattttatagcccaaatcaaattaaataaatcaaagagaaggaggcaggaaagcccttttaaataccttggcaaccacagttccatgcaccaaaaggaaaactcacataaaaatttccagttaaaagaaaatatggcagtcccaggaaaattaggttatgcatttaacaggttccactgtactactcaattgaccactcgcacaccatgatcacttatccatgttaacatttgtgaatttgagatccgtgtgattaaaaattctttgtgttgctggggctggtaaatgcaggcgtattctattcaattaccttcagtttcctttccaccaacactccaaatgagacctaacctatcagcggctctctcctaactaaatcagaactgccagtcctggcagataccagcagctggtcagatggattcagggccaccaacagtttgtacattcacctttctgctataggaggcagacaatttactagtcttctttcttggataaagctgatcatctgatttgtcaacgctttgctcagaaatataaaattcaatatagttcccctccccccaaaagaatattatttatacaacaccttaatctgtcaaaatattaacaaacagaatcatgttaacattaagcatagtggtttggaaaattaattctaaaaaccaaggcccataactatacaaggagaaaaaccaagacccaaaaatactaaatgttaagattccnccaaattttgaggcaaaaacggaatcattctggtttacaaagtaaattaggcacagtacaaacctatcacgaagtgttggcttatactcactatttcaatttaatgtcttgaaccaaatttaacaactagtttttaaaaactgctaatacatgacatgatgaaaaatacattaaaaaagataaaagtaaacctacaacctttagtcttaaaacaaaatatctgaaagtgctggtccctacggaccg

SEQ ID NO: 445272 - DNA, 296 bp, Homo Sapiens
  misc_feature (123)..(123): n is a, c, g, or t
  misc_feature (272)..(272): n is a, c, g, or t
tgaggggaatgggcacaattttggaaatcaatcccaaagagcctgagtaaatgaaaggccactacgaaatgacgccaggagtaacaacggaacttcacttttgtaacgggatttttatttttnctctttttatagtatcagggaagcaaactgccttttacaagttagaaaatgctgtttgaatctagttgaaccagggaatacagagcgagcaatatgtagcttgaattacatttaaaagcagattttttacaaacaaaatggcgaaagcnctgattgtcatttttagcagtcac

SEQ ID NO: 445273 - DNA, 244 bp, Homo Sapiens
  misc_feature (108)..(146): n is a, c, g, or t
catgtttatttatcaaaagtgaaaaagcatacaattcaacacaatttcaatagcatttgacaccacccctgtggatcctgtacatggctgacgtcaccgtccagtgcnnnnnnnnnnnnnnnnnnnnnnnnnnnnnnnnnnnnnnnggatttttcagtggagaacatggtgggctgattaggcttctattagattacattcatttcacatctgtgtgcaattctcccataaattggtctttaaa

SEQ ID NO: 445274 - DNA, 1011 bp, Homo Sapiens
  misc_feature (52)..(62): n is a, c, g, or t
tttttttaaatttacacagacgtttaattagctttatttacagagcagggannnnnnnnnnncagtctccaatggtgcctagataacatcattaggcaagaatgccagtttaaaagaaatctatgcagaatcctaaaaataacagatgttggtgctcctcaagaagaggcaagcttgactatatcagcagctctctatgcctcagttactcagaagcaattctgttgcagtctctacatcccatgattttgaagacaaggccactattactgcattcctatcaaagcccatagcacataggttttctatttttttggtgtattctggactagaaactggtgctccagcatacacatgtgcccaaagtcgagctgtctgtttgaacatttcgggattttgtttgtactgatttgctactacagcatcctgtggatcatctggctctgcagctgccaatagtgcttgcaatgacaataataccgtgcggagagtcattgcagctgcccattgatctttcaggatatccaaacaaatagcccctgtgacggaactaatattaggatgccatattttagtgataaaccggaccttagggggattaaatgggtatgtttctggtatttttatctctagttggtatcttcctccttcatatggtgtgtctggaggtcctgctatttctcctcttaattctgtaaaattctcatctacaagatctactttaatttgatttttgctcgtctcctcgctcttcagcacctccttgaactcccgcttgattcgctgcaccgcgatgttggccatgtctccgcccgcagctgattcgtacccgcctcctccgccaccgctacgaccaccgccaccgccgccacctcttcctccaccgcctcctccctcggcgattcagacctgagcacacgaacactgccactaccaccccggccgccgcgctcgcctcagtgtggaatcacctccgcgcccggccaccaaaatggcgccgggtcggcgcat

SEQ ID NO: 445275 - DNA, 557 bp, Homo Sapiens
ttttttcaggagcagctatataattttaatctaaagatttgggcatacagaaagcatttcacataaattctcttgagtctttaattatatgacaggacataaggacctcagaaaaataagtatcttcccatagatcttaacccttgatctctgcagcaaagatagtccctggtaatccaggtaatatggtctgtaaaatattaataaataggcctattgacttctgactaaaggactgcatatagcctgagaagcaacattatggcccagtggtcagtacttatatacatgggccttttgatcctacattttcctattacgtagttgggattggtagtttctaatcttctagtcctaagtgttatatttaagagagctacgtattacagtgggccttattcaaggttagttttgtcaaatgttgcagaagaattccagtaattaaagtaagtcattaattctttatgcttcagtttcctatctctaaattagcaataagctcccatgttcaacttcagccacattcaatttttaagaatcttcagaagaaaaaatgt

SEQ ID NO: 445276 - DNA, 511 bp, Homo Sapiens
gtctttattatcaaagtttattgttggggtcagttcctatctactagggagtacaactatatctcaatatgtgctatagtaattctagggtaacagccattctgcaaaatagttgtactggggctctgttaggcatagatcataattaagtcagtggaagaatgagcccagagaaaccctggcagcagagccgttactctaggaaagttccagtgctatgcaacctgtaaggcatcatcgctcagctgatgatgagactcacagaggtgttggtggagcgaaacaggagttgaacccattttctactcttcttggcagggtaactatggctccaaggaaggaaccccaaaattagggtctttgtaaaatcttttaagctccccaaagcaagagaaataagacatgaagaaagagccagtaactaggacagatgaaaaattaggtggaattggagggaatggaaacttctggaatgcaaagaaactgggtttagacgccatttgagatgacc

SEQ ID NO: 445277 - DNA, 616 bp, Homo Sapiens
ctgttttaagacttctgatctcctgccctgcaggaataggtgggaagtcattgaatttttacactatagtaatttgcattcccacataagtttgagtgttacgaaaacattcctttaaagggatctgtgctacacaaaatatgccaggacctcacagacaaagccattgctagatatgtcattccaatgatcagatctggaaacaggctgccataaccacttttccttcttgtagactcagctcacctgtatatttaaactgttcttggcatcttgaaacacctatttctactcaggtactcattgtcctgttactgattcacctttctgatccttttcaaccagttttcccccaaggggggaaattttacttaacctctagtatttgaacaactcaatatttgaattgttgccccatttgcttttacctgtactgtattcttggtcatctcaaatggcgtctaaacccagctactttgcattccagaagtttccattccctccaattccacctaattgttcatctgtcctagttactggctctttcttcatgtcttatttctcttgccttgggagcttaaaagattttacaagacctaattttgggttccttcct

SEQ ID NO: 445278 - DNA, 515 bp, Homo Sapiens
ttttttctccttataagacttttattaatgccagaaatgaaacagcaaaaacaaaatgaatttgaaaaatcagtgtgattgtgggtgcagagatggtatgaacagggactgaggaaaaagccaggtctgaggagagccttcagtttcaactcggaacttttaaaggtcatgattcagctgatcctgtgaagtggactgtacagtgggtaggtcgcttcgtgtctttatagccaggctgtgtgctggacatcaaggctcttccctccccaaggaaagcttaactcccagtgctcctgggtttgtcaccttctggacttgcaggcttgagacccttgggtcccccgtcctgcactggacgacccctgactgggaggaattttctaacgaggtgagacagaagaaaatgaaacaaaaaggaactacagaaaacgatgtggggttaattgctgcattgccctgttatgctgattcccacatcttgtaggtctctgggatcatttctgtaacaaacatta

SEQ ID NO: 445279 - DNA, 809 bp, Homo Sapiens
  misc_feature (302)..(310): n is a, c, g, or t
  misc_feature (744)..(744): n is a, c, g, or t
  misc_feature (754)..(754): n is a, c, g, or t
  misc_feature (759)..(759): n is a, c, g, or t
  misc_feature (778)..(778): n is a, c, g, or t
  misc_feature (791)..(791): n is a, c, g, or t
aaggtggaaaggcccgtataccaacctgagtatattgtttaagtccagaaaacatccaaaattaaaggataataggacatggaatgtcctgttaaagtgcctgagtttttcctgactagagtttaatcctagcccagtgttaatgtggaagctgtatgcttttttcatgggcatgttcgaattttttctttcaaaatgtttctcaactttttgatgtgacactttgttttctcccaagtcactctaagggttctatcaacatctttctttgaaaacagcccaaaaacatatttttaaaatgnnnnnnnnnttcacaagagaatcaagatttggttttaatctattatttacatatttgtaaactgctgttaaaatgctctcaaaaatgttatttaggaaggcacaatttggtagcatcaattttttatttatagttttttctaaacaagatccgaagaaacttccactttaattttccccttggagtacttaaagtacttcaaggttcaatgtcaaatgcagataaaaccccttcattttcaaacttactaagtgttaacaatacatttgatagtgagcagaatatgaaagtacagatgttatcaaaagaggaaattcttatgatactaggttcagagattaaagaatttgaaacaaggggctttcatgactggggggaaaatccaaagcttttcttggaaggggagtggggcttttaatactcggggctattaattaaatgcnggaattgagntaacntagttatcccggaccttcnaaaaggcaccgcntaatacagctattgcttt

SEQ ID NO: 445280 - DNA, 1384 bp, Homo Sapiens
  misc_feature (692)..(692): n is a, c, g, or t
  misc_feature (1106)..(1106): n is a, c, g, or t
  misc_feature (1222)..(1222): n is a, c, g, or t
ccccccatttttaaagtttccccccgcttttggggccctcaagaattagtttcggttttcccagggaaattagggattcccgttcatccttgctgtggacactgagccaaaaaggagcagcatgctattaagatggttgagacacacgagtgaacaaagatgggacaaactgtgcttcgttcaagaggtttcatcaagacccctaccgccccccgtccttcagctctgtacagtaactttaactttacatagagctgagataaaaataaagctttcttacaaattacattttttttccagtgaattacttttgcagtaaaaatagctgctacataaatccctcctgatctctgaaaaggagttgcatatttccaaaaataatattcttattttaatcacacagaagaacgtggagcacaggaaggaaatggctgggtggtcagagagaggtgagctgtcggagaaacacagttaaactaaaaaataaaatccattttgtgtataaactgacttaaacgcatgcaaagaagtggaaaacatatgccatttgtcaagaaaaatactgctttatagcttttactttacaattaaaggagaaagcagaggccagatataagcccagataataacatttaagtttctcataaaaactcccaaatgtacaaagtccttgccagacaaccaaggcaagnaaaaccccccaaaaacaaacagtcaagctgacaaaacaccacaaaaagcagggattaccccccacaggccttatccctgtaagtctattaaatgtgaataatacatactttacaacgtctcttagtcggcccttggcagattaaatctttgcaaaattccatatgtgctattgaaaaatgaaataaaacctcagatgtctgaattcttatttcaaatacagttatataattattttaaattacaatatacaatttctgttaaatacaactgttaagggattctgagaacaattataagattataataatatatacaaactaacttctgaaatgacatggttgtttccttcccaccctcctaccctctcaaagagtttttgcatttgctgttcctgggttgcaaaaggcaaaagnaaaatctaaaaatagtctgtgtgtgtccacgacatgctcgctcctttgaggaatctcaaacaggccaggaaccatcccgtcccacggactgccggggcgccggggacgggcttccntggtgcctctttctcgaccatttttcacttaaaagcactgtgagtagaattagctgtgccgttgctgccacaagggaggcagcctggtcaagaggcgtggtttgggatgcaataaggcactgcttcttggcactttctggacatttcaccctgccttcctgg

SEQ ID NO: 445281 - DNA, 1218 bp, Homo Sapiens
  misc_feature (17)..(17): n is a, c, g, or t
  misc_feature (635)..(725): n is a, c, g, or t
aatcatcaggttgcgtnttgagagttgcgcgcgtgatcgtcgcgacgagtgcatgtgatatctcagtagtggagcgcaggagagttggtgtggagagagagaacttccaccgtgtgtgtggcgcggacgccgagtggtggagaagggggtatcaaatatattttggctacgtctgaggattatgtggacgttctgtggtggagaacgtgttgagtgaggtggatcaccagactgttccggagcgagcggagcaggcggtggaggaggagacctcggtgcgcgagtggtgtgtcacaggcgtgagctgtgaggatgtggtggtcggcgcgccgattccccgagggtattgggcgggttgcatcactggtgtgtgggtattcggttgtggagtcattctccgcggcgggagggggtgtttcaaatatgtcgtatatattctcacagccaaaggttgcgtgtcggggagggagcaggtctgtggaggtgagggtttgggaagttggcggggttgggggccttggtagcgatgtttagcggggttttgtagtccgaagcattcaacgaagcgccgatgggcgccgcggaggagacaggtggagggctatggtgggtttgtggggggaggtgtggttggnnnnnnnnnnnnnnnnnnnnnnnnnnnnnnnnnnnnnnnnnnnnnnnnnnnnnnnnnnnnnnnnnnnnnnnnnnnnnnnnnnnnnnnnnnntgccgttgcccgaaatgacaagtaccgtttattgtcgttacacaaatgaacccagcctctggcttgggcaccgtcccacggaccagcagatgagcatggtcagccgacccctttccccacccccgagtcatgtgcagtcatacactccaggcagaaagtcgcagtatcgaataccggacacaggttcccttggcttggtggtgcatctctgatccacagactggcccacctctcggagtggccaacggagtcgctgaaacgttgtcaaataagcaagtaagtgcaggagccctgggctgggggcctctggcctctgcagccgggtgggaggaggatgtccaaggtgtctgcggggtaggcctcggctccacacctccgctgtgaccacagcctcaggtcaagctgtgctggggccatccaccttcctttgccatttagaagatggggcttggagcttggcaacacagaaattgacatcagccttataaaaccc

SEQ ID NO: 445282 - DNA, 941 bp, Homo Sapiens
  misc_feature (926)..(926): n is a, c, g, or t
tttttgagccagagggaccatttttattagattccagcaagactactgtacatgtttcatgcagattaaatatgtgtcttcactgcccctgggaggggagcactctcactgtcagctccttcattggtgtgtcaaggggtgagtgtcaaggggagctctcaatgtattccgtatggggggcagttgggatcatgactcggggtagaggtgagacagtaggtagctgagggtccctgggaccttgagtcttcagaggttcagggactgcaggaccttggtcctttgctggtactggcaccagaggatcttgatccttcagaggcactgggactataggaacttgattcttcagaggttcagggactatacgaccttgattctttggaggctgtaggactgtggggccttgatccttaactagtactgggagaatggggtcttgattcttcacggactcggggaccacaggaccttgattctttacaggtgccacaactgcagaatcgtgaacctttgcatgctctgggactacaacatcttgatccttgactggccctgagaccactaaaccttgattctttacaggctcagagaccatggaaccttgattctttatgggtgctgtggccatggcactttcatccttcggatgctctgggaccatgggatcttgatccttgataggtgctgagaccatgggaccttcatccttgacaggtgctgggactatgggaccttcacccttgacaggtgctgggactatgggaccttgatccttgacaggtgctgagaccatgggaccttgatccttgacagatgctgagaccatgggaccttctgtccattgatcatggtgctgcggaccatgaggagcttgattcttcacaggctcaggaatcctaggaccttgatcctttagagactcntgatcccaaggaatt

SEQ ID NO: 445283 - DNA, 505 bp, Homo Sapiens
ttttttttcagtaaagtgaggcacaaacaaatgagcctctgttcactttattcaaagagtatttttttcctctgtgaaactaggtagaactgaggaggaatcaaagaaagcctcatatattaaactcttaaatagattctttgaattcaaagtaagggtcaataggagaggcacaggttgtgggccttgtcccagcaaacaaagccaccaaggcagtcctgcaaattaaggaggatggcaaatctgtctcttaaaaaaaagttcttgaggggaaaaatataaaatacctaagtttcaaaagccggactacttccatacccttcattctctaccctggagtgtccagagatagagagtttcaaggtacgttttcaatgattcagcttttgcaaacatatgcaaatacattcctcatcagcagtcctgttttggcgattaatagcaagcaatatgcttggattagaggtccgatttccacttaaatgcattttcttctcttcttgcc

SEQ ID NO: 445284 - DNA, 748 bp, Homo Sapiens
aatagctcagttactattgtttatgttgataaagggtctgttaatgtattgcaaaagagaaccaggaaagaggtccagtgtgggaagcactgccttactgtaccccgctcactctcaactgaggctaagcattgggtctgggttcaggagccacgatgctgccccgggtaccccccctgccaccgtggcaggtgtggcacagacacaggcctctgccaacagggcagctgggcacgctgggcactcaggttgccttctccttcccgctttccattggttcctccttcaggttctcggtcacgagcttcatttgctgctgcttgagtgcctccaaagactcaaattccagtctggctagtttcatctggatatgccgtggcttatcaggtatggcaaatgcaagtataaactttaaagccaggagtgcgtgctccactgctactacaatcaaaatgaggtctgcttttgattctggaaagactgcattcacttgtggtgacattccaatcagcgcacagttagtgaccacagatataacactcatcgtttcaaaagccaactgccacacaccaatattggctgaaggttctgagaatgggacgtttgaagaccctgcacatttttaaggcatctgaatttacttcagtgaagttatttaacacagcaaaggcagctgcttatggtgtaaacaccaggagaaaaggctcacataaccaaactgcaggaataactccaagtaatcatcaaa

SEQ ID NO: 445285 - DNA, 969 bp, Homo Sapiens
ccgtcctctctcaggccctgtccgcctattcccctcatcctggccatccaggaggaggagacgccagctgcttctcatttcagtgtccttaaaatccctgctggtctgggctcacacagtgcgacattgcatttccaccacaccaactgtctcccatctcctcagagtcagacccaggacttgcaggaagctgcaggcagcatcagagtcaccacttccctggggtcaaagccgctggccaggcttccacagagagcagaggcctcggccactacttaggcttctgtggctcacctggtgtcctgttttctcttaacagcaaatgaagctcgtgaccgagaacctgaaggaggaaccaatggaaagcgggaaggagaaggcaacctgagtgcccagcgtgcccagctgccctgttggcagaggcctgtgtctgtgccacacctgccacggtggcagggggggtacccggggcagcatcgtggctcctgaacccagacccaatgcttagccaaacgaagtggctcccatgtggcaagcacccttctcagtttcgcagtggcttggctcgggatccttggcagttcccccagccccaccctgtctgctccttcccagttccttcccgggccccacacgctgctccagctgccaactttgctgcagagccactgccgcccttgagcctctcaccatgagtgagccaccagctctccacgttcccctcatagcagtgtcactcccaaccccaccatggcccagggacccgtggacaggttggggatggggtgtgtgcccactgtgctcatcacaggagcctcagttgagagtgagcggggtacagtaaggcagtgcttcccacactggacctctttcctggttctcttttgcaatacattaacagaccctttatcaacataaacaatagtaactgagctattaaaggcaacctctctgactccttctgcctac

SEQ ID NO: 445286 - DNA, 532 bp, Homo Sapiens
accatccgggtcaccaagggttttattcgagtccaatttttatccgcactgcggagaaagagggaggggggacatagagaaagcggggaacccggaccagaccccagacccctccccccactggagcccggggcatctgcctggttgggccaaggaagacttcatgagatccctgagggccccaggaggagggggctgggagcagcagaagaggactgggggccaccgcttccccatcgacgccccaggccagggccctcagtctctttcctcccctcccttctgagggctgtagcctccatctctacagaggctcggctggccatgaccccatcagacccccaaggtactcccttgtcaggtccaaagcacatgttatcctatgcctgtgaccctgggctgccatccagcccacgtcccagaccacaggcacacgctgccctcctcttgggtggggctgggggcactgctgacctgtcagctgctccctccccagggacccgtctccactccctgggggctactcagtcag

SEQ ID NO: 445287 - DNA, 1063 bp, Homo Sapiens
acaaatggccaagttaaagacattttatttctgtaattgaacataagcaattccaaatgcttttctaggcaagacatgccagcgattagaaaatgagacagcttaaagacagaggtacatttaacagagaaaacacgcctggaagctcggccggccccgcccatgctggctcagttcctgcccctggagggaaggggccgaggggcttcccgtcccagggaactcccaccacaggagtctgcagacgggctggcctggcagtcagtcccaggaacactgaccatccccttagggaggcaccacgccctggggagcacagttccaggccagggccatgggtcttgccctgaagaccctccctcagggaccacgcgccctgaccctcattgcctcaccatattataaaacactaaaaccgcttaagttcttccccacagagttggggaactaattgtaaacagaatacacgtctacatatcagccctgagacagctggccctgctgcacacgcagcctgctggccccagcaagacacggtcagagctggtaagtgctctacagcattcagaaatctgaccacagcgtacacacagctcacaagtcagtgcaaacagaagctaatgacatcctccaagaaaattccatacagttatgacaatggaaaacctgttatacattgtaaccatacatcattagcaatgtttaatacatcttactataaacactgaatttctaagtacatgatactcctagcagcttaatccagaaaataacgatgtgaatccctccaatactgtaaacacaagaccaagtgctgcccatgagagtgccccgtgccacccgcgggcaccaccggcctctgaggacccctgagccacacactgctgctgcttcagggaagcatccatgtcacaggacttccccaggggcctgatttctgccacagctgcaccaactacccagagatatgctgtccgcccacagatccagacgctcccatgccatggttgctggggacgggcgctgcacacacggccctcgtgccgaattcgccacccaggcc

SEQ ID NO: 445288 - DNA, 434 bp, Homo Sapiens
agcatgtaattctatttttatttcttgactacataacctagcagtggtctaatactgaccgtttcaatttaaatgctggaaaaatactgaccaagactttctgtgaaaaagataatggaaaacagaaaccagttagtaaagccatgcaaataggaagtgattttcagccccaagaggactttgtatcatctatggctccatttaaacccaagtagcatctgtcctggtggattttgaacatccttttgatttaacacagaagaaggtttgttctacctttaaaagcatatcctcttttttcccccaacagactcctcaacaagtggcttctaagacaagactggggttgttttcttactgaaaatcctgtgattatccagtcttttccttttcaatttctgagtttagcttacctaacagcaaaacagaatcct

SEQ ID NO: 445289 - DNA, 1318 bp, Homo Sapiens
  misc_feature (384)..(384): n is a, c, g, or t
  misc_feature (524)..(558): n is a, c, g, or t
gtgtaggcggtgttgtgttttccggaaccccagttccggtaagggactgggaggggcccctgaaaaataaacctctgggggaccggggaatttctaaaataccccccagcccatttgaggatccccctagcttccccggggaataaatattttccaaaaaatccaatcccccctgaaaaccaaaattcttccaaggcaggccaggccttatgccagtttgttgtttacccccatttattcccccttaaaaatttttaaataatttcccctaagagctttaaaatttcctgtagggtagtttggtcccaattatgtccccccccacagaaagaaaggtttctttcacaaaagatcccccaagctaggcaggttttcccagttcangacggttgtaaaaaacgacggcccagtgccttagcttattaatacggactcactataaggggaccacttttgtacaagaaagcctgggtacgcgtaagctttgggccccctcgaggggatactctagaggcggccgcccnnnnnnnnnnnnnnnnnnnnnnnnnnnnnnnnnnnccagtggccattggagatgtttattacactgcttcggctggacacgcaaccatgtgacactaatgtgtcatagaaggtctctgagcactttggctcattttgaatataatttttaaaaatatacacaaggctggctttccaatgtttaaaatcattgtagaaaccaacaggttgaacagaaatataaaagtacagaaaatggttttcctgctttggtgttggttgtggcggccgaggaacgtgactgctgctgtttacacaagtccagacgctgccagggcctgttgggatcagctcagtctgtgactaaaacagctggatcatcgactctcttgacttgccaacaccaacccatttgactgcgactcccacgtgattctccacaaagcggatgtagttctgggcctgtgggggcaggtcctcccacctcctggcgcctgtggtgtctgctttccacccaggcagcgtttcatactcaacttcgaccttctgaagcatctcctggttagctgggaaatagggaatccttttcccgttcagcttgtatgagacaccgactttaacctcacccagtacgtccaggatgtccagcttcgtcagggccagcgcagtgaatccgttgaccatgtgagcatatcttagaatcatcaggtcgagccagccgcagcgcctcttcctgcctgtggtcactccccactcgtggccgcgggtctgcagcaggcctccaatctcgttgatctgctcgatggtagaaccgact

SEQ ID NO: 445290 - DNA, 547 bp, Homo Sapiens
  misc_feature (11)..(11): n is a, c, g, or t
gggctccgcgncggaggcatctttcacagaatccggcggggtcctcgcaggggcgagctccagctccgcggcgtcactacccggggcattatccagctcctccagaagctgcggtccggctccgcggttccaccaccacggccgccatggaggcagcagccgcccggcctcaccgcggctcagcagccgctcgaaggcagctttttcgcccggcgccagccgctcccagagtcccgataggccgccgggcgccgggccggagctgaggcctgcttccccaggctcgtcctcggtctcgcgttgctgacgcagccggcgtagggcgcttgctaggcggctgggaggagcgctgcaaccgcggagctctcccagcacctggtcacggtagaagttttctgcgcaggtgccatgcgtccggtagcagcgcagcgagcagtagggcgcattacagcgagggcaggtgtaacgcgctggctggacctcccccgccgggcagaagccacagggcccggccggctccatggcaactggcaccgcgatctacctg

SEQ ID NO: 445291 - DNA, 462 bp, Homo Sapiens
tctcttttaaggtttaacttttaatcagccaaacatcttgcgcagaccctgagccagccctgcatcctggttcttcccctgaatgaccaccttccccagttcctcctgggctgcccggtttttgggatctatcgccagcaccttcttgaggtcagcagttgctttttccaggttcccaagggcagcctgggcaaccccccttcggtataaggcctttaaatggccaggctcccgctccaacacccggtcacagctctgggctgccaactgaggctgccctagcaacaactgacaggcagccagattggcatgaaggacagttcgttctggagggccaggtgggggtaaagtcaggagcagccgaagagcccgtccatagcatcgggcagctccttcagggttcccagctcgaaatagttctgtgccccttgcacgttcttccctggccagggcttccttctc

SEQ ID NO: 445292 - DNA, 682 bp, Homo Sapiens
  misc_feature (513)..(513): n is a, c, g, or t
ttttttttggtcgatgtaaacaatgctatttaaggagtgctttatctactttactgaaatacggaaatacttatgtacacgatttaaatgtgcacaagacttgggcttttttcttctagactatgtacatcattcagcacacaattcaaaaagttctggtgtattcaacacactcccagtaagattatgttacactgaaacatataatattaaactttcaagagactgcttttgatgctaaggagtaatctatttttacaagaatgctcaatggtggtgatttctagaatatctttttcaatatcaccaaaaataagataaaatttattttaaaattatgatttagaggtagagctgaaattatttatttaaattataggaaagaaagacataaaatcattgtgagagaataatggtgaaaaacattcttgcctaagagtctccatcttctttggctatagttgttgtttcaagttgaaacagcatcactagtattgctgccttcgaacattntgtttctggaaaaaagcctttccaaattcatatgtactgatcataatggcacaagcaggagcaatttgtattaagcgaggaattaggcctgagaatgatctgggaatccattcatgacaacaatgtacttcattataatccaagatgacatatgcagaggcatagaaat

SEQ ID NO: 445293 - DNA, 1810 bp, Homo Sapiens
ttaggttgtggggtgtgtgtgttgttatgctgtatgctgctgctgttgcgtgtgtcttctgtctgccgttcggcgttggttgagcggctgcgtcggttgtgtgcggtgtttggggtatgcgtactgtcccgttactcttctggggtcgtttccgcgccttttatgttccctttctttccgggtgtgaatgatatccctttggttgtcttcgtcttgtatgtacgcgcggttcttttcctgttgtgggttgcttggtgttgcggcatccctcgcggcgttgctgcggccttggcacttggtgtcgctgtgtgagtttcgcctttttgggtgtggcgctgcccgctttgtccttggcgccttgggtgggggccttgggtggtaagttggggcttggtcgcgtgggacggtcttttttgttgtaatgtaccgggtcctcgttgggttgtatgtcgtggcctctgcgtaacccttttcggctgggcccatccctcatcgtttgggggttgcttacctgcgctctggctactggtagtcgacttttggtggcgtgggtgcggttggttttggccaactgtcccttgaacttgttcgtggtgcggagctttgtgtggtagtgcgtaggggcccaactttccttcgcttttggttgtgttcttccgctgttgtgtgctgggtaagggttggagagggagttccgccccgtgcggtacttctcctgtgcttgggggcacggagttgttcgttggtccgcttgatgcggttctgttcgtctggggagccatttcgttggggctgggacctgcgttctcgccgcgtcagttcgttcgccgtagtaagcattggtggttttttgtggtttgggttcccattgtagtgtgtgggtgctgtgtgcgcggagttgtgggcactacgggtgccttgtctgacgagtagtccatctacgtggcgtacttgcttatggatcgtcgtgggtttcgccgacatggccagggcggaccatagtgttggttgccagacgtgccttggtccaagttgagccgagaaggggcccaatgcccaatggtgggacccgaccttgttggaaattgttggtttgttgaatccgcccgtttggagtttgctttggcaatattgtagttaggaaactgggtatggatgttctacctgtaaatcaaacttgatggtctgcagtagagattctctccagagccattacgtgtcctcctttgggtcatctccacaactggccaaattgtacatcatttaataagactgcgagctgttttgatgagtagtctttacatttttttggtgtttcttctactttcccagccagaaagaggcaacaggctcctgtcacatatcttgggaattgcttgaaggaatgaaacatatagaagcgatgaaaataaattattccagttgccagggtatcatagtgtagccccaaacgtgtgcccacatcaaagatgaaccgagcgccctctcggcggtaccgggcctcggtggctggatcaagtccttcaagttgtgagggtgtatgagccaagtctttcttatcccagtaccaacatggctttgtgtggtccaggtttgctgaagttactgaagggcttgaattttctttattctccttcatttattgaagtaggcttgttctttccaaaaggttctctgaaaatgttagaatcccctcgcttcaggcaagcccctcagcgacgtctctccttgccgactgcggatcccgggaattccggaccggtaccagcggctggcgcaccgccgcctttggcgggggcgggcgccggcc

SEQ ID NO: 445294 - DNA, 493 bp, Homo Sapiens
gcggccgccgccgccttccggggactctttgtcgccgcctggttgttgtcgttaccgctgccgccaccgccgcctcctcctggggactttctccgcctcttttcggcgctgccactgtcactgctgctgctgcagcctccgataccgtttaacagcctttgcagcaggtcagagaagcgctgcatttcagcagccgcggcctcatcgtcatcgtcccctctccacaggccgccgctatccgagcctccgccagacgaggagagaggccccggcgagctaagcccggggtccaggtgccagtccggttgcctggggtccaggagatccgccagttccagcccagacagaaagtccatatcctccgtctcttcccccgggaggctggcgatcgcctcctcctccatctcctcgggggaaggcgcgcgcacggccacgccggcgcggctccccctcccggcttccaactctccttcgtcgccaaactgctgcttgc

SEQ ID NO: 445295 - DNA, 580 bp, Homo Sapiens
taagtttggactagcttccaacatcttatcccttgaattttcaatattgtggaatcactccagaagatcctttcatgtgaagttttttgctggcatttcaacctttgggacatcttcagcccttttattaccactcctctcccatttgtggcagtttgcgtttactacctccctctggctgcctatctgaagttcctgcatcagggtctacattgccacagtcaactatttgtacttctagaattccactcacattcaatttgaacctcacttgcagcattttcacttctcatttcttcactgcactttcatcttggttgcaaaattcctctttcaattattcatttctgtaaaatgtcatatgggctcatcactgggaggcaaggaggcaacccaactataggctttgctgtttgagtaggagagccatagggaccaatcaccaacagactttgaaagacacaacatgactggttactgatcatgacgagcttttattaccatggtgatttgtggactgaagagctagcccagaagtttgtactctatgcaaattacattaaatttactatggcaccta

SEQ ID NO: 445296 - DNA, 391 bp, Homo Sapiens
gggatatgaatgtttattttgatattccaaatcacttataggttaatatttcaatcaaaactacagttacaactatgcttaaagaatgcacagaaatagttaacacaatgcctgaaccatgagacaagaattcttgacccctaaagacaaaaggaaggggaaaatcatcttgctgttatgtgctgctctgcttcccacgagtttctcacagatttatgggaccctgagatattctgattttcagaaaaaaaggtggaaattcaataaactcaataagcaggtctgcttgtagatctggaattgcatgggagaaaaacattctaacagaggcaactatagtacattttcttttttcactcatttacctaatatttttaaagctgggcacagg

SEQ ID NO: 445297 - DNA, 304 bp, Homo Sapiens
ccgggccacctgtgcactctttcatgggatttctaagcagtgccgggaggcaggcaggatcgcttttgacttatgatgatggaagaaaattaagctaaagtgggtcatcttgtttcaaatgcagtgattgtcccatcatgccttgaagcctctcgaaaggagaggtgtgagagtcagtacaacactttgccatcggcagaggtctttgggctggctctcgatgcctctgggccctggaacaagagaacaaatggaggccgcccaccatgtgtctaaatattatttaaaagttattaattagggg

SEQ ID NO: 445298 - DNA, 400 bp, Homo Sapiens
  misc_feature (180)..(222): n is a, c, g, or t
tttgcataaaagaattttatttagtggtcagatcccaatgaataatgtcagtcattgcttggttctgctaaaatgtggtattagatatattcttaagaaagtgtacaattgcatcaccaaaagctgtttaatttggattgtgtagaataaaagaaaactacataagtctttgttctttgnnnnnnnnnnnnnnnnnnnnnnnnnnnnnnnnnnnnnnnnnnngcagtattcaaaactaacaaatgtcaccttggactatttacagtaagacgcctttttgaaaggagaatcttgttctcagcttgttcttttcctcacattttacttacagggattctcactcccccatctgatccctattcataacttcttccattcctgtctcacatgaaacagccat

SEQ ID NO: 445299 - DNA, 465 bp, Homo Sapiens
cgcgagccaggccgcctgccctgctgggtccccaggaaatcgggggttcttccaggttgcaccacccggcccaggttcaactctagggaaaggcctgttggcctctcctcgctgcggccctccgcaggtcctgggctggggtctgagggacccgacgaggctggaggagggacttgggggagcctagaaacagcctagggaacgtctataaagtgcagcccctgaatggggcgaatgggtgcccagccgctccctaaggcagagggggctccccgcccacacagcttcctcccacccactctccccgaaggattctggggcccctgggcgcgagccccgagcgcccgcctccccgcgtcgttccgcctggcggggaggggtgaggccggggcgggatggcgggcgtcgggaccgtctctgcccctagggggagcagtcagcagagagggagcggtaacggcgcgg

SEQ ID NO: 445300 - DNA, 527 bp, Homo Sapiens
ttgctaaatccatgtttctttattaactggggtaatatagtgattctacttagaaacagacccacatagcatctatggcaagaaaccctcaccataagagttagcagattaagtgtgtaagttttgatcttggaattatcgtcactcacacgttgcatgattctagcacttctttttccccccagggatgccgaactctgccaattcgccctttagtggaatgagtactgggggagaaaaagtaaggtttctctttgatcatccccaatcactggcattaatcctgtttttcacacagctgggttttgtctataaagtttgatccctccttttctcatccaaatcatgtgaaccattacacatcgaaataaaagaagtgtggcagacttgcccaacgccaggctgacatgtgctgcagggttgttgttttttaattattattgttagaaacgtcacccacagtccctgttaatttgtatgtgacagccaactctgagaaggtcctatttttccacctgcagaggatc

SEQ ID NO: 445301 - DNA, 1685 bp, Homo Sapiens
  misc_feature (1084)..(1104): n is a, c, g, or t
cagactaccttttaataaactcaacttcccaatgttaaaaatcactgaatcaaaagatattttcaagcagccttttctcccagatatatattagatataaggaaatcgagtccaatttgaaatgaattttaaaacagcacacaaacatcacaagcccccagcgcacaatataaaatagttctctaaggaatataaacatttagtatattagaatgtgaaattacataggaaaataatctcttcaattagctaaaatcacttgcgaaagattatttattgcacaatttatcagtgggtactaagaataacacagatcctattattctcaacctctaaattcagtacatagtaaaattcattttctcaaactaaggttctatacataatcggagtaaaccctctgttactgagttaggatagggaaaacaaattccttagagttcatgaaaccacttcacaaatcctagaaggcacacattatatttcctatcatagtaagtacatttaagtacttcatatttaaaaaagacaaagctgtacagaatacaaaaagtgtacatttcatccattaaacaaatttacaacttttacgattagttattacagtagaactgacctaacattcacatctaaataattatcacccagttcaatagagcgaacaaagagctgtgctcatttatttatttgataaggctaataacattttatattcacagtagatcagcaagtgtcttggagctcatattgtaaaataaaaaggtttgggccctattgagtcactgggctcattgttaaataactccttgaaaggtgaaggattctgggggataaaatcattggctatccctggaaagatccaaaactctgtaaggtaactctgttcacttttcagaaacattttaaaattaggtaatctgaattaaactcagcaagtctaatctaaaaggacaatttaaaatcttagagctggaaaagatttcagtggatcatctatcccaaggttttcaaaatatgttccatggaatactaagaatctatggaggagatacagggttctgcaaatttgacttgaatttaattnnnnnnnnnnnnnnnnnnnnncgactcccactatatgtgtgttactcaccaaattcaaacatgctggatatcaccaatgcattaatgtttttattcattgacttaatcacatttatagtatataaagtttatataataaggaaatttataataatatgacttttatatagtggggtatagggtatgtgtgtatgcacacgtgtttaaaggttctgtaagattttccttgaaaaagtttttgctgctgaaatagtgtgaaaaccacaaataaagtctcagtttctaaagtaagaacacataaacaagagtaagagactttctcaaggtcacacaaccaccaagtgcattgccaggttgatatgatggaacccctggtactctgcttgcataaacctccatagggagtagttagctatttggtacttagctgtcccattatgaatgtcaatggattagtcttcagtatttttgggggcgaaatcaagctacccctggccagatgtttttccttgaaattgatttgaattttatttgctcgcctattaaaatcctactatccagaaattctgtcatcaataagtggcaacttaaattgtgtaccc

SEQ ID NO: 445302 - DNA, 441 bp, Homo Sapiens
  misc_feature (365)..(365): n is a, c, g, or t
  misc_feature (391)..(391): n is a, c, g, or t
  misc_feature (400)..(400): n is a, c, g, or t
  misc_feature (412)..(412): n is a, c, g, or t
aaaatcacttgcgaaagattatttattgcacaatttatcagtgggtactaagaataacacagatcctattattctcaacctctaaattcagtacatagtaaaattcattttctcaaactaaggttctatacataatcggagtaaaccctctgttactgagttaggatagggaaaacaaattccttagagttcatgaaaccacttcacaaatcctaggagggcacacattatatttcctattcataggtaaggtacatttaaggtacttcatatttaaaaaaggacaaaggctgttacaggttacaaaaagtgtacatttcatccctttaacaaatttacaacttttacggttagttattacagtnggactgaccctaacctttcacatctnaattatttntcaccccggttncattgggggcggaccaggggccgtggccc

SEQ ID NO: 445303 - DNA, 249 bp, Homo Sapiens
  misc_feature (123)..(143): n is a, c, g, or t
ttttatttttttcactttatcttttctactttattacttcaaattaacaaccacgataaagctcaaaaaagtccaatatttacacaggaaaaaagtacaaaattccccccaaagttcttcagnnnnnnnnnnnnnnnnnnnnnaaattacaaagtaattaaagagcaaagctttttattactttgtaatttaaaaagccggacgcgtgggtcgacgatatcccgggaacttccggaccgcttaccagcc

SEQ ID NO: 445304 - DNA, 649 bp, Homo Sapiens
tttttgagagttgtgttctttattcccttgtatctccctaccgatcatttggtagaaaacatcttccaggttttccatatccttgactttgaacacatgttgctcattgtctttcttggaagccaaagcattgatgttcacttggttcaccaaaggcccgaccccaaacacatagacatccagataatcctcccttgggtttttgcgatccttgccaatgtatagcaagtcccggatctcatcaatgacagtaattgggtccccgcccatgttgtgcaatccatcagtcatgaggatgatgacatggcgggtgcggttccagccttcaggagggacgtcatctggccagctcatcatgctgtacactgcctggagggccttcttggtgttagtccctgacttcaacttgtggtcttcataattgatttcattgagctgcttcgtgacccagtctgcattactgctgtctgcttcagacactttgacccaaattttggggtatgtggcatatgtcactagaccatatcttggcttcacaccataacttgccaccttctcaattaagtgactagacactttttggctcctgtgaagtgctggccccatgctgctgatcatctagcaccaagtagagtcatgagccctaagg

SEQ ID NO: 445305 - DNA, 1860 bp, Homo Sapiens
  misc_feature (343)..(345): n is a, c, g, or t
cctcttaatattctggagtcatcattcccttcgacagcattttcctctgctttgaaagccccagaaatcagtgttggccatgatgacaactacagaaaaaccagaggcagcttctttgccaagacctttcaaagccattttaggctgttaggggcagtggaggtagaatgactccttgggtattagagtttcaaccatgaagtctctaacaatgtattttcttcacctctgctactcaagtagcatttactgtgtctttggtttgtgctaggcccccgggtgtgaagcacagaccccttccaggggtttacagtctatttgagactcctcagttcttgccacnnntttttttaatctccaccagtcatttttcagaccttttaactcctcaattccaacactgatttccccttttgcattctccctccttcccttccttgtagccttttgactttcattggaaattaggatgtaaatctgctcaggagacctggaggagcagaggataattagcatctcaggttaagtgtgagtaatctgagaaacaatgactaattcttgcatattttgtaacttccatgtgagggttttcagcattgatatttgtgcattttctaaacagagatgaggtggtatcttcacgtagaacattggtattcgcttgagaaaaaaagaatagttgaaccctatttctctttctttacaagatgggtccaggattcctcttttctctgccataaatgattaattaaatagcttttgtgtcttacattggtagccagccagccaaggctctgtttatgcttttggggggcatatattgggttccattctcacctatccacacaacatatccgtatatatcccctctactcttacttcccccaaatttaaagaagtatgggaaatgagaggcatttcccccaccccatttctctcctcacacacagactcatattactggtaggaacttgagaactttatttccaaagttgtcaaacatttaccaatcatattaatacaatgatgctatttgcaattcctgctcctaggggaagggagataagaaaccctcactctctacaggttggggtacaagtggcaacctggcttccatggccgtgtagaagcatggtgccctggcttctctgaggaagctggggttcatgacaatggcagatgtaaagttattcttgaagtcagattgaggctgggagaacagccgtagtagatgttctacttggttctgctgttctctagaaagaatattgggttttccggtataggaatgagattaattcctttccaggtattttataattctgggaagcaaaacccatgcctccccctagccatttttactgttatcctatttagatggccatgaagaggatgctgtgaaattcccaacaaacattgatgctgacagtcatgcagtctgggagtggggaagtgatcttttgttcccatcctcttcttttagcagtaaaatagctgagggaaaagggagggaaaaggaagttatgggaatacctgtggtggttgtgatccctaggtcttgggagctcttggaggtgtctgtatcagtggatttcccatcccctgtgggaaattagtaggctcatttactgttttaggtctagcctatgtggattttttcctaacatacctaagcaaacccagtgtcaggatggtaattcttattctttcgttcagttaagtttttcccttcatctgggcactgaagggatatgtgaaacaatgttaacatttttggtagtcttcaaccagggattgtttctgtttaacttcttataggaaagcttgagtaaaataaatattgtctttttgtatgccaaa

SEQ ID NO: 445306 - DNA, 536 bp, Homo Sapiens
gacagttactaagattttatttattaatattcattttttttacagcgaaatgtctggtggtttttctctgcttcctctcatgtgaaatgttcacaaacacaaaaccttttacaaagagccatatattgctatgtataaacaaaatgacaattaaaatactagcctctgtttgaaaaataaactgggggacaaggagttcataaagttgctgtgaattgaggagagaaagcctgaggaaggctctggaagccaagggattttctgtcggccctaggaggagttaggatgagagaacacagtggtggacttgagaccctgctgcccacatctttggaagactcgaaggcgaacgggtcacccttgggaagaaagaagggacaggggaccacacagaccacaactcctcccacacacaaaccccacacacgagtctgcctggtgacctgtcatcaccgtgcagcctcctcaccgggttcacagaactgcgagccaggctggaggcgagattgcagttagatattaaccaggtgccctca

SEQ ID NO: 445307 - DNA, 681 bp, Homo Sapiens
ccatgctgaccttggtgggcctggtcacccatgcagcacagagagccgatgttggcggggaggcagctggcacctccatcaaccactcccaggcggtgctccagcgcttgcaggagctgctgcggcagggcaacgccagcgatgtggttctgcgggtgcaggctgcgggcaccgatgaggtccgggtattccacgcccaccgcctgctgctgggactgcacagtgagctgttcctggagctgctaagtaaccagagcgaggcggtgctgcaggagccacaggactgcgccgctgtcttcgacaagttcatcaggtacctgtactgcggggagctgaccgtgctgctgacccaggccatccccctgcacagactggccaccaagtacggcgtgtcctccctgcagcgcggcgtggccgactacatgcgcgcgcacctggcgggaggcgcgggcccggcggtgggctggtaccactacgcggtgggcaccggggacgaggccctgcgcgagagctgcctgcagttcctggcctggaacctgtcggccgtggcggccagcaccgagtggggcgccgtgagccccgagctgctctggcagctcctgcaacgctcggacctggtgctgcaggatgaactggagctgttccacgcgctggaggcctggctgggtcgcgcgcggccgc

SEQ ID NO: 445308 - DNA, 522 bp, Homo Sapiens
tttttttaccatttcatcacatactttattggacatctcctgtggctggtcactgggatacagtaaccaggaaatacagtcggccctcatgaatgaacaaaacttacaaccccaggaggggagccagaaactcaattagtggcttagtttccacaacactacgtgctacaaagaggtacagaacaattccaggcaaactaagaacctgccccagcctggaggacaggcatgggggtgagggaacccacaggcaagaagcctcccttaagctgagctcaggactggatgaaatgatcttggtggggcaggagggaaagttccaggcagggaaaacagcagggagtgtgtggtggttggaggtgcctgcctaagggaggcaggagatggtaggtacagagttagtgtaagaaagcccaagagaggctgggggaccagatcccacaggccctgggaggcgaaaaagtaaaaacagcttgtatttaatgggaatgtcctattacatggaaattcacttggaaactg

SEQ ID NO: 445309 - DNA, 326 bp, Homo Sapiens
catatttcttattcaataaactcttttattctagtccacagatttttccattacaataataatgaaaatagcactagtaatttgtaacactgaggcccaaagggaaacccctcctcaaattataaggtaaatgacacaaagttgaacatagggtcagtgttgggcaaaaagcatttaaaatatagataacggggtcaagattttgtgtgtgtgcaaacactgggttttgtttttcaggatgacaccattttagaaagtgcatgattttgaaaactatatgtgtaattgtgacaaaactaaactgtagagaaaagacaaaatcaagc

SEQ ID NO: 445310 - DNA, 295 bp, Homo Sapiens
atacttaaaggtagacattttaatttgtttctatagtcagtgttagatttttaaaaatgctttttaaaagtatgggttcataaagttcaactttccatactataacatcaatagccatgattttaacaggtttccttatcactattaaaatgggagatttaaactattttaaaagttactaaagacagcacccaacttttcaaagatttaggttgaatgcttgggtgaggatttctcatacaaatatatggtacatagatcctaagtaacatactatagaaccaagcctcgtgcc

SEQ ID NO: 445311 - DNA, 487 bp, Homo Sapiens
  misc_feature (461)..(461): n is a, c, g, or t
aatatcagtagagtatatggatgtttattgcactattttttcaacctctataattttgaaattttcacaataaaaagttggggacaaaatttttaaaataataataacagcacttattctctacctgggactgtactaaaggatttttgtgcatttcaaatttaatccttgaaacaacaatacaaggtagttataattattaccatagtttttcctgacaatgaaactaaggtacagggaagttaggtggttttcacaaagttacacggataattctatcaatgacaggtgagattcaaattgagtatatctaacttggaatccgtgttctgaataacaaaagtatattgactcctgagcattcaaaggaaatatttcaagttcagaaaagtcatttttctaggtcttgataacctcaatctttattctaaagaccaagcagcgtgcgaggtgaaccccgngagttgaaaaccccattcaggccccg

SEQ ID NO: 445312 - DNA, 445 bp, Homo Sapiens
gagaccagaatagcttttatttcacatgaagctaaggaaggaagtcgagaggacagggctggttctgtgggcgctgcctggcaggtgcaccacctccaactgctgggctccagctccagggctcagaagccatctccgagaaggtcgggagcggggctgaagggtcccgggggcaggttccaggccagctcctccagcaggcccagcaggcctttcacctctgtccccaggtgatccacggtcttctctaccatctcctccatgacatctagacggcgttgcacagccatgtgtctgtcacacgctgtgctctgagctgagtctcctcgcggagggctgaagggttcggcagcggccaaagagcccgcggcgcggagcagggccagtccggtcagcgcgcagagcaggggccgcatggtgccggcctggccgagcgccctcgtgc

SEQ ID NO: 445313 - DNA, 809 bp, Homo Sapiens
  misc_feature (400)..(400): n is a, c, g, or t
ggagaccagaatagcttttatttcacatgaagctaaggaaggaagtcgagaggacagggctggttctgtgggcgctgctggcaggtgcaccacctccaactgctgggctccagctccagggctcagaagccatctccgagaaggtcgggagcggggctgaagggtcccgggggcagtttccaggccagctcctccagccggcccagcaggcttttcacctctgtccccaggtgatccacggtcttctctaccatctagagtgggaagtggggtaaagtcgaggacagaagtggttccacgttccgcttcatcagctaggtcctaagagagcagcttggcggtccaggtgcggtgcagtgggaaaggactgggcgctaagtgaccttgggttttcctcacntcgggctctgccccttacctgcctcagtttccccagatgacaatatcctatggggcttgctctctaaggctccttcttttttggcacttagtcacaggtttggatgaagcgcgtgtagattaccttctcccttttggactttgcagcctggagctcacattctttttgttgttctgctccctggtggtgtctctgccaaatgacaggtttgggattttgaaatttactcagggttcttaatggtttttccctgtgtatgccatggaccccattggcagtgtggtgaagcctacagacctcttctcagaataatgccttaaatgcaaaaaataaaacatatagaattaccaagagcaccaattgctttaaaatattattcaagtattaggccaggcgtgatggctcacac

SEQ ID NO: 445314 - DNA, 657 bp, Homo Sapiens
ccattctcgcattataggcgcccagctgggcatccagctcctttgccaaaagctgttgttttaaattcctgccggcccctttgctttttccacgggcgcctccgggggtgcctttccgggtgcctccaccaccaccaaaacctccagcgccacggtttctagtcatgccacctctgtttacgctctgtgcaggcctccgctgtgcgtcaatctgtgacgtgacaagctgaatgttcatggggcggccatccagagggacgccgttgtactgcttcatggccttcagggcatctgccttccgctcaaagtgcacgtctgctgttcctaagctgcgaccagagcgatcatagtgcacagccgccttcttcagcgttccaaattcagcaaagagttcctgaatatcggcgtctgagactccaaaatccagattggacaccagcagtttcccacctgtctccacgccggcaccaccgccgaagccactgtcgaaaagatcgtgctgccacttgtcgggaagttgttttggcctgctgtagggcgccggtcggttcctgccgcctccgccggccgcgccgcgggcgatggccggccggttccggatgggcccgccgcctcgattcactcgcgcggcggcctgcgccccaccgccgcggccgc

SEQ ID NO: 445315 - DNA, 544 bp, Homo Sapiens
ctcgtggcggttccggaaggggataaggatcgccaccttccaccgaggcatgcaatcagaaggcttccagtgacctccgagcttgatggttgggtctttggagaagagttcatgaatgtaatccattccaatttcactcatgtttatgtctattgggcccttcatggaagggagtctttcagggcaggtatggtttgcaaagtaggtgaagtcttcaggaagaaatgttgtagtttgcaggaaggtttcactgtggttcaagtcaagaggataatctgagtcatttacactgctgttcctcttggcataagcactccgaagcacctgctcataaacctgagcaccgattgttctcacgttgtcccggatcagaatgccttgggcttgcatcatgaagaggtaggtgttcactatgccgggcgccacatagacgaagtacagcagcgaggacgagagagaaaagaagaagagcgcggcgagcagcgagcggcgcggcagccgcagcagcccccggcgggcgcgcatgctgcagccaggcggccgc

SEQ ID NO: 445316 - DNA, 1344 bp, Homo Sapiens
  misc_feature (181)..(209): n is a, c, g, or t
attggggggaaaaaatttcccaaagccccttaggttccctgggcccccggggattccccctaggggaaaaccaggtttttggccccatgtttccactttacccttcctgggggccggggcggcccaaaaggaatggttcttagaaagctttctcaaggggccgaaggcggccgaccaaggnnnnnnnnnnnnnnnnnnnnnnnnnnnnncagttaattgacaattatatcaaatgtttattttaaaaaataataaaacattcacataatgttgtcacaattttgggtgggaaaaaagcatgtgtatctctatatctctgtgtactagaaaacaacaaagggatataaaattaaataataaccagtatttaaaagttaacttgaaaatcctcgttgataattcagcagcatgcttctggtcagcctatacagtctctgtcctggtgaggagcatgatcaccaacaggcaagatcttctggccttgaagtttcgcttgagttaaaagagctcatctcaggtaagtaacaggccaagaatggtgggcaccgtgaccactagccaacttgcaatccattctactccaaaggaccgggccagggtacagggtggactgaggcagaccgtgccattcttgctgctcacagaattgctgacttggcaagtataacacctggagtaattatgtggcataagggtggtttcaagcacactgttctggagctcctttgggaagggccttttgtccccataccaggtgtagtttacagactcgccaggtatcacacatgacagtttcagataacagttgtcatccatgtcttctatcttctcaattttgatgacaggcttgggtacagggtcaagcacttgcagcttgatcttccattcttgctcattcccagtctttttcaacaccctcatgatgtaggtgctgttgtcctctttctggaccttagagatgtacagtgcgccactctgaggatcaagtctgaccctgcctttaaatttggattcaaagtacttagattttctggaatcccattctacaatcttctggtcgaaagtataaaaccaggttagttgtttgtagttctcaggcaggctctcagagatgttcagagtcacgttgctgccggagaccacggtcatatgtaccaagtgaccttgaatgctggtcaccaggagtgacagaggcagcagtagcaattccagagccagacacgaatcccaacctctggagcacatgcttccttccagaacttcccagcaacgcaggagacagttgagagcctggctagaaaaagccgctctcgacgaattcgagctcggccgatttggcctgat

SEQ ID NO: 445317 - DNA, 855 bp, Homo Sapiens
  misc_feature (102)..(102): n is a, c, g, or t
  misc_feature (493)..(518): n is a, c, g, or t
  misc_feature (541)..(597): n is a, c, g, or t
  misc_feature (794)..(794): n is a, c, g, or t
  misc_feature (827)..(827): n is a, c, g, or t
gtatgctaaaatttaatggaatttataaccttttaaaaccttcaaaacatcaaaagcatatcacttagtgagtctttgggttctaagttgattttgtaattntatttgcaaattagccttaggttgagatttactgttacatttctgtatctataggctttgagtctctgattagtaggtaccacaaaacagtaaagacttccagtaaattaaagaactaggatcacgcggaatggatattatggtcaatgggagtcgggcagtaatttgctattttcagctgacagccttatggtaggcagacattagcaaagctttggtgaagttcaaaacatttcctggcataggatgaagtatgaaaaactaacacatttgagcagagtttattagcatttttgaattatcagagataatattagattacagtatcatatagtattagataagatgcaccgttgacacaggtacagaagtttccatatagttcaactgnnnnnnnnnnnnnnnnnnnnnnnnnngagatagggtctgactctgtcannnnnnnnnnnnnnnnnnnnnnnnnnnnnnnnnnnnnnnnnnnnnnnnnnnnnnnnngctcaaacgatcctcccacctcagcctcacaagtaggctggggactacagggcatctggacaccacacccaggctaatttttgtatattttgcaggaggacagggatcttggccatgtttgcccggggtgggttctccgactcctggaggcccaaggtaattttgcccccctcgggccacccaaagttggtgggggntttacaggggattgaggccaccatgtttcgggnccaggttcaattggaatttaggggtttt

SEQ ID NO: 445318 - DNA, 363 bp, Homo Sapiens
  misc_feature (47)..(48): n is a, c, g, or t
tgagtggtctgagttttgtaagcttgtactaaagagtgaaaaacttnntgtaaatatgatctcattttcacctcagaaaccatttacaacccagattattatagtaatttgcgaccagactttccttagactgttaagtaaaaatggacgtgtacttttggccagcaaagcacattattttggtgtaggtggaggtgttcatctctttcagaagtttgtagaagaaagagatgtttttaagaccagaatactcaaaataattgatgaaggattgaagaggttcataattgaaataacttttaagtttcctggttaattaacattcactgagtatccaaaatgcaataaccagaaggcccaaaa

SEQ ID NO: 445319 - DNA, 1106 bp, Homo Sapiens
aaaatttttgccattccattaaacaaacagggttaagatttacatttaagctaaattaaattaataaaaatctgagcagagaagtcaagcacaggagccagtgctaactccaggaaattctgatgacatttccaggataaaggcagcgtgttataagttttgggtagaatgtactgatttttggttgcaggtatagctcacttatcgacagtctctgcatgccagttagcaggagtgcccatgaggtacacaagccttgtcctaagagcagcctaaccaaggagacggactttaggagctgtattttccaataagtgactcaatccaaatctgaaatgactaacgcagtgcataaaatattttattcacattttaactccactggagtcacagatgaagtatcatcttctattccaagaatgaagtcttcaggtactgtctcaggtgctatctgagctaactggtcatcataagaacgtagggtccataatttctctaattcatagatttctctggtttctggaagcatcaaatgaatcaccatgctgccaaaatccacgcacagccagtcatcagtgtccttcccttctatcttaacatgagggtcacgtttacatttcaggtgtttgtacattttcacaacgtagaaggccatggcatgtaagtgtcgggtagaagttccactaacaatcacaaagtaatctgtatatctcatttctggaggaacctggatcacacaaatgtctcttgcattttcttgcctcagaagtgaaaccatcatatcgatgtcaaacttgggaccagtatgatctgccgcgtccgattctgggcgtccctcgttgaccgtcccctccgcccgctcctccagcccaggctcgctgtgcaggccgcggacaaagtttggggtctggcaagcccggcagaacgctgctcctacgggaagccgctgcacggccagcagccgaagcccgggctcggctccaaccgcggaccccgccaccgaggaaaccgccctgcgccacattagtggggcgagcagccgcgccacacggccgcccggcgccacccaggcctcgctaccttagtaccgtatagtactgccgtct

SEQ ID NO: 445320 - DNA, 801 bp, Homo Sapiens
  misc_feature (42)..(42): n is a, c, g, or t
  misc_feature (138)..(138): n is a, c, g, or t
gggccaggtgccataaaaaatattttatttccacctatttancttcccccggggagttcccagaaggaaagttttcatctttttattccaaaggaggaagtcttccagggtaccgtcttcaggtgctatctgagctanctgggtcatcataagaacgtagggtccataatttctctaattcatagatttctctggtttctgaaagcatcaaatgaatccccatgctgccaaaatccacgcacagccagtcatcagtgtccttcccttctatcttaacatgaggggtcacgtttacatttcaggtgtttgttacaattttcacaaaccgtagaaggcccatggcatgtaagtgtcgggtagaagttccactaacaatcacaaagtaatctgtatatctcatttctggaggaacctggatcacacaaatgtctcttgcattttcttgcctcagaagtgaaaccatcatatcgatgtcaaacttgggaccagtatgatctgccgcgtccgattctgggcgtccctcgttgaccgtcccctccgcccgctcctccagcccaggctcgctgtgcaggccgcggacaaagtttggggtctggcaagcccggcagaacgctgctcctacgggaagccgctgcacggccagcagccgaagcccgggctcggctccaaccgcggaccccgccaccgaggaaaccgccctgcgccacattagtggggcgagcagccgcgccacacggccgcccggccccatagcagcagccttgcgtcggcatccttacatcccaggccggtaccagcctg

SEQ ID NO: 445321 - DNA, 1476 bp, Homo Sapiens
  misc_feature (289)..(376): n is a, c, g, or t
cctggccgtcgtcctcgctgcgtggtcgctttgttcttgtctcccacctctggggctgtcctggtccccttgcacctctctcctctcgcgctgtcttgtgtcgcctccgctcgcatcggtcttctttctcggccgcgcccgtcccggcctcagttggtcctagacgtggctacccgccgccctggggtcccccgcttcttgtcgatttggtgatggggtggtggggttatggtagtgggggctgcgggagagtatagataagaggggtggagggtggaggagtgtagtnnnnnnnnnnnnnnnnnnnnnnnnnnnnnnnnnnnnnnnnnnnnnnnnnnnnnnnnnnnnnnnnnnnnnnnnnnnnnnnnnnnnnnnnctgaagtgatgtttaaattttatttaataaaaatacagttttctttttaaatcaacaaataacattgtttttcagaaatctactcaaatgctgctccttagttatggcttaagagctacccaaagacttcagtgggtaggctgaggggaatagaaatgcagaatccttctttcagtagcctatatacagttatctcctacactcactacacacgtttgggcatgtagaacttgccccagtatttccccttgtgggtcaagtcatatgggctcagtactttccgtatgcccagcatgttggcagtggctattcgctcaaatgtccaggggttctggttgttacgttctctttcctcttgatcttttcgcatcttctctagagtcccgcggctcacagcctttgctgcgaagggcaacttgtgggcaacctggtcaaggaaaccttgcacttcttcaaattcacaacgcccacccatctctacaacaaggcggccagccttcacaggtgtcacgtagtggtcaatagcacctttgcctccccccatgcgatgcccaacacttttgcgagtgatgggcttgaaaggggctggtactcgccatatggcaaacatgttcttggggtccatagagcggttgattgtcaggcgcatcatttcaaagtggccccaatgcaggtagccaccacccaatgccaagattgcaaaattgccttctgtaaactccgtagcttcagtggaaggtccccgtatgtcacttaaatttttaggttctcttcttacttttggcacaagtggtgccctttcaataaatctaagcttgggtttttcaggaatggaaacatcttcaaaacttggtactgggagcagtgtctttacgccagcactggcggggaggagtgcccaggaatctgacaagggcacccgcaggagcggcgcactagcgcgagccagcagcctccacatggtcacgggcgtccggcggcgcggagctcccccagcgactccggctgtctcctgcacccaggtaagcagcggcgctccactacctagctgtaatcggctcaggacaccgctcagtggggccggaagttgtgctcccgct

SEQ ID NO: 445322 - DNA, 469 bp, Homo Sapiens
gaatgaggttcctgggaggagaggacgtgtgtgtgcgcgttgggggcgcgggggggcggtgaatgtatgtgtctttgtgcagggtttcggggtgcaaggaagcggtggatgttctcgcgtgtttattcctgcaggtggcttaactgtgcttgcgcgcgcgtggaaagctggggtcctttccgagtcaattatgcgaggtcatgtgcctggagaggtggtggcgctccctgaaggactcattgcagatggggcacttgagtttctcctctcgccggcgcttcaccaagggctccatcgcatactcctttttgtggtgcgacctcatatggtacaccaggtcggaggtcatgcggaaggaggcattgcacttggcgcaccagttctgcgcgggcagacacagcgaggtgaaggagggcggcagcagcgtgagcgccgagggcagctgcagctgcaagggccccgcggccgc

SEQ ID NO: 445323 - DNA, 1520 bp, Homo Sapiens
  misc_feature (847)..(856): n is a, c, g, or t
ccgttgctcgactcttaacaactaatttattttaaaatagacaaactattaattgtagaaaatagtaacatagcaattttaaatgtacagttttaaccaatacaaaaaagcaataaagcaataatatctgaagcattatttaagaaatctcaatacacgatctctgaagttcctaaaattctggcactaattctaatgtgaacttagtagcaaaagacccagaaatagtaagcccttgacctaaaaactaactgatttgtatgatattcatgcagaaacaatgatgaaatggagtcaagttttctagtgtcattgttatcaaaataactgtcaaaatagtaagtttgaaacttaaatgagcacaaaataaaattttgttttctaacaagaccagatttctttttaaaaataattctgagttagacaaagtgattttcctaaaagctagctgaagctaccttaaatatcccctattttaagttacagcatctctaaataagttaatcacacaagatagtttaaatacacctttaggtgtaggggaggggagaagcgcctctttttctaatgcagctgttttaatttgaagcttttgcacaaaatcagatagaaacattaatgcctaacccataatgacccttgattacttgtaattttggactagaaataatgtggctttgaacatgccagtgttagaccatactgacttaaaaaaataaaagataaatagacaattgccagttcaaaagatacatggaagacatgtaccattccagagaaaacacaaaccttcccaaattaaggagggcagaataattttgagatgcaattagacaaatctctatgnnnnnnnnnnttaaggctcctataattaacagtctgtttatggagtaaaattaatttgtatcttaattcttcaggacccagaaacattagaaagtgcacttgggatatactgtgttagggtcctctatacctaagatctggcagaacactttactttttcaagtactagatgggtactttataaattcagtgatctgaatggtataaaaaccaagagtactatcaataatcctcatttaaaaacataagttggatgaagaaaataatcagtaagttcttttacattctgaggtatgaaatctgtttcagtagtatgatagtatcatatggttatactttgcttccagcttttatttaattaaaagcaaaattttataaaacaagcacacagtatatcagattccaatagtaaaataaaatctaatgtgtaaaattagtaatttttttctaatttctaataatatccatttttgcagaagagttcaggataattttggtgaatgggcagtcaatcaaattgcatttggaagatagataggacacattttctaagggtgttcatgttaaattaaaaaaatatacatataaattaataaaaacaagagcaaacatcacctatatgctacaaaagaaggcaaagtagtcagacaggcctgggttatcaggactccccc

SEQ ID NO: 445324 - DNA, 1621 bp, Homo Sapiens
  misc_feature (399)..(399): n is a, c, g, or t
gtaggggaatgtgaccaagccccggaaaacttccctggggcttcaaaagggggaatcccctttggggtaaatttaaaaattggagagcagccctgtgtttgcaaggctgggttttcccagaaaagggttccctttccgatttccttgtgccaaggttaggaattttcctttttttggagattctgtatccctggcaccagtcaacttcttggtatcccattaaagttttccctcctttggcccaggtattgcaccaactaagttttctggcactgttatttcaactacatccttggatccatctgtggacttttctgttcctagaatggcactggcagctaggggagaagcagctccaaaatatccattggttgcagcagtagcagcagccaggctacntaatgcaaatgtccccgccgtaccaccagctgtgctgccactggctgaggcttcactggcataggtggccaataaattggctgctgctgctgctgggttggcactggcagctgctgcagccaaagcccctgttgctgctgcttgactgagacctaaacctaaagtgttgagattatatccatagctggctaatgtattaagtgcagaggtgatggccaccaggtcattgcctgtgaagccagataaaactgctggaaaggctgcaacgccagcaaggttagcatgtcctaatagccctgcagctgctgcagcagttggtaacacttcagcagtgtttgcataaggagatccggttggattggaatttgccactggacctgtcacattggcataactgatattgagacagctgccactttgtggatcctcttgtatcttctggatgataagttcaacagcttttcggttttgttcaggttctccactcacagtgacaaccctctcttgcaagttgatcccatcaggtttctgggaaagctgcacccaagcccttgattgctccattacagcctttcacagtagcacctcccttccctattatcagacctgctgtgctgttgggaactataatctttacctgattagctctggaggtggtcatgggatcagatggagaggacttggtggtagttggggaagatggcaatgtttgtttgatgcgatctggattaacggtggtctggggttgtagaatgctgactggttctgtcttggccacattttggggcatttctcgaattttttctgcaatgaatccatgaactgcattcagtgcttcaaccgttccctggatcaagcacactcgctcagtagtacctgggtaaaaatctttggacttagacagcttgatggtggctccagtttctttttgcaactgaacaattgtctgtcctcccttcccaattatagatccagcagcataactaggtatgagaacctttagaaaatactggccgtcttcgcccgtattggtcctcttggtgctgccggcttcagggggggcttccagcggccttttccgcgagtccggcgggtccaggtctatgggaaccccagtgtgggtcccgttctgctggatgggagctgccgccatcatgtttgcagttcctgccgctgctaccgggagaaggttctcccttttgttttggctttttcttttctt

SEQ ID NO: 445325 - DNA, 972 bp, Homo Sapiens
  misc_feature (902)..(902): n is a, c, g, or t
agcggaagtttccccttgtggatgcgcggccccgcggctctgctcctcccggcgcagaggggccgggagaggccacaggagcggacctggcacgggatttctgaggaacgggagaagactggcgcccgacccgctctggagggtcggtgaacgatgaagggccggcggcggcgacgccgagagtactgcaagttcgcgctgctgttggtgctgtacacgctggtgctgttgctcgtcccctccgtattggacggcggccgcgacggggacaagggcgccgagcactgccccggcctgcagcgcagcctgggagtgtggagcctggaggcggcggcggccggcgaacgcgagcagggagcggaggcgcgggccgccgaggaagggggcgcgaaccagtctcctcggttcccaagcaacctcagcggcgctgtcggggaggcagtgtctcgcgagaagcagcacatctacgtgcatgccacctggcgcaccggctcgtccttcctgggcgaactctttaaccagcacccggacgttttctacttgtatgagcccatgtggcatctatggcaggcgctgtatccgggcgacgccgagagcttgcagggcgcgctgcgcgacatgctgcgttcgctcttccgctgcgacttctccgtgctgcggctgtacgcgccgccgggggaccccgctgcgcgcgccccggacacggccaatcttaccacggccgccctcttccgctggcggactaacaaggtcatctgctcgccgccactgtgtcctggcgcaccccgtgcccgggccgaggtgggcctcgtcgaggacaccgcctgcgagcgcagctgcccacccgtggcgatacgcgccctggaggccgagtgccgatagtactctgtggtggtcatcanagacgtgcgcctgctcgatctgggcgtgctggtgcccctggtgcgtgatccatgcctcaatctgaaggtg

SEQ ID NO: 445326 - DNA, 829 bp, Homo Sapiens
  misc_feature (205)..(219): n is a, c, g, or t
  misc_feature (242)..(242): n is a, c, g, or t
  misc_feature (247)..(312): n is a, c, g, or t
  misc_feature (315)..(315): n is a, c, g, or t
  misc_feature (318)..(325): n is a, c, g, or t
  misc_feature (327)..(337): n is a, c, g, or t
ttaggcgccggctatggtataccgcggggagatgcctcccgatggaaagagcgtgaggacactccgctctgcgatttttttgtgggaggaccgcccggtggccgcagagggtgtatatattatttctcgagggtccccaccccccacgccaatcccccgaagtttttttggggaacccgattttgtcgccttttgtgttttggtnnnnnnnnnnnnnnncgaaggaagagtttgtgaaaggnttttnnnnnnnnnnnnnnnnnnnnnnnnnnnnnnnnnnnnnnnnnnnnnnnnnnnnnnnnnnnnnnnnnnggnggnnnnnnnngnnnnnnnnnnntcgaagcaaaatacagtacaaatttattgactccaatcattcttagtcaacatttaagcaaactgtagacaatggaattgaatacaaataagcaatggattaacattagatagaaatcctattttaccatgaattttcagttcgaaaaagcttattcctaagtaaaatggaaaaatgacttactctgctaaggcatatgacaaaatacacagaattataaaaccattcgtttttcttttaaccataagcatatattcaatggaaaacttgaaatagccttggactaatgttctgaaaactagtattaactgagtataactgtgtgaaaaatctggacagcattaacaaatgaaagagcactgaattctgttattttaaagatttacagtaaaatactttggttcccaaaagactgtctctaaaaggaatttttaaaaacacctgacattgtaactcattttttctcctccagaatctaaacaccaattttgt

SEQ ID NO: 445327 - DNA, 579 bp, Homo Sapiens
taccattctctgaagtggtgaattttaatattgtataaaaaatccaacttgttccacaagtacatatgtcctatgattttatgcatacatccatatacatatatcaaggtaaagtccaatacaaaaaaacagcatttcctatggccagtgttctacagaagtaagactgtgcaaactttatcgtatagtcaaatgagattgcacactaaggcaggatgaggcagaagcaagttgtgtccacagtatattacaaaataccttgcatagcttattcattctcacctggtaaattcatcttagaattctgaaggatttttttcctagataaatttatacaagttagtgtatacttcttgtctttgttctgtggcaaaccaggtttctcagtactgattgttttacttcacaacattattgatttaacaatagcctgagctttggggctctgcactgcgttcattgtaatccgtgatacaatgactacaaatgtgtcgcgatttctaatcttcatctgtatctcaggcgacttttccagggcttccattctctgtgtcatttcttctaagcgctgtgttaatg

SEQ ID NO: 445328 - DNA, 307 bp, Homo Sapiens
ttttttttagcttaaacaacaggcatttatttctcacagctctggaggctgggaagtccaagatggtggctccagcagattcagtgtctggtgaggggggcttcctggttcacagatggtagcttctagctgtgtcctcacatggcaggaggggcaaaagagctccctcgggcatcttttataagagcactaattctatgcaagagggcagagtcctcaggacctaatcgcttccctaaactgttgaccttagggatgagagttcaatatacgaatttttgggggacacaaacattcaggccacagc

SEQ ID NO: 445329 - DNA, 532 bp, Homo Sapiens
tttttttaaaagaactaatgcagccctttatttcaaaacataatcaaaagagcatgagttcagacaggaggaatatagatggaatgcatggttcaaagctggatacacttctgcattcacctacaaatctcctctatctcggaaaggatttcttttattcagtttcatgaaaagtctccttcacaggcatgtagaaaagcaggagccagacttcttggtccttcctcacccgtccttaataacaacattgcctttagcagaacttaaggcaggccttattcatctttcaagatccaatttaaatagcacttagaatgaggcattaaaaccacctgcttacctgtctgtttcactgtattgattcaacagtgtctagctaacagcagatgctcactatctaacaggattctaactagaaccatgtgcgatactgggggaagggaaacctgtccatataagaattcaaccagcaatcactgggggaagaaccaaaattcttaagagataagaataagagacaggtgtatttctc

SEQ ID NO: 445330 - DNA, 901 bp, Homo Sapiens
  misc_feature (874)..(874): n is a, c, g, or t
catataaaaatgtactgtagtaatcagtaagaaaaagaaacaacattggctaagtcacgaataggcatttcaccatatgtacatgataaatggccaatcaaaataaggaatggggctcattctgctggaaattaaatacattcaaacaagaacagagatccattagcaaaatgtttaaaaataatatcacagggttaccaggggtatgacaaaaatggacacttccatacacactaggtgaatatattggtgaaaatagttcagataaacatacaaccatgtatgtaaaagtatttatcatcaatgcattatttgtagtagcaaaaacaacaagcagccttggaaaccagttaatgtcctcagcagggaattaataatattattgtatattcatgaaattgacaccatgtggccacacaaatgcattacacaggcctctatgtaacataggatattcattagagaattgtttttcaagaggacaaagtactttcatttttgcctagaaaatgggggaagacaaaaatgcgcttctctctaggttgtgtgattttaggttatcctaagtttcatccttacgtgctcctgaattatctgaaatatcgtatctttaaaaacagtaacaacaatagtaacaagagctctgtaattcctacccttccaacctcaggagcccacccacccctatccgagccgacccctgactgcccctgccattgctccctgctgagttgcagacattgacttcttgccaagcctcaggccttgctcacatcgacacctcacagtgaccctgagaggcaggatgctgtggaccccatttcacaggtggaaggggcctgaggcacagagggaggaagattgcctcagccanggcgttagttaagtgggtagttcccaa

SEQ ID NO: 445331 - DNA, 500 bp, Homo Sapiens
accctgaccccagaatattaaaacttttcagagtttcaggattaattccattatatggacatgattccttgagataggaaaaactgattggattgtgacattagacttatcagaatctaagatcttacaaaatataaagctttactagtaatttcacgaactcaggtaatcattaggcataggcaaatcagagaattatttagatctcttaatctgattctttagatccttggttctgtcattagatactcccttgcccaggcagatagatgagacttctagagaggtatgcagacaatttatttacatggagatacctgtctcaattatcaaatatcttaatttttatgcagatagttacatatgtggtatatgtgacattttccagggagccccataaatccacaaccttctactttgttaaccataagcaattctaaacgaccaagtacattctgctaaaagcatttctgtgatagataatcactctcctgccagca

SEQ ID NO: 445332 - DNA, 1023 bp, Homo Sapiens
ctctcagagcatgcttttctttattaaaattactgatgcagaacatttgattccttatcatttccatggtctttgttcaaagtgtctctttcctgggtctcttgagtttctttatatgccttctcctcattttgctcaaagcacgaagaacacacattaaagcttttcctccttgaacagcttgtggcctagatgagaatgtagctattccaggcatagtctggagtatttgatgaaatatctcctccatttcattttctgacacgtctacattttttcctttctttatggtaatctggactaggtgttttttcttaatccactgctgaatctgtttagtctttgtgtccaaatcatgttgtccaatatttgaagacaaaatcagttcctttctcagggttggtccagttttggggttcgccttctccatctccctcagcctctgccgctcctggaggatctgcaatcctgtcatgagctgatactctgcaggttctgtgctggtgttcctttgaaccagtcgcaggtctcgctcatccataagtctaatcacatttgctcggtgcatgtttcccaaatcattgcccttctcatcaaataagtgaataactcgctgactaatttttcttccaacgttactaaaagctgttttattcttttttgtcttttttccttcattctgggtgtcttcagcggtactaaaggcttttgcatgaattaggaaggagagtcttggggcagaagcaataggggacaactgtgctggtgctgtcttttgcaggatgtgtttaccaaaacatctaatgcaactattttcagactttacagtttgtagtgttaacctctttagaaaaagagcagccatccttttttaggaagaactgtaatcatccccagttgatgaggagaagctcttctgtagagaagaatgacagctgtgctggggcaagcgattgacatactgtagcggacgcaagtacagcggatctgcggcgagtcccctatcccgggaattccggaccg

SEQ ID NO: 445333 - DNA, 648 bp, Homo Sapiens
  misc_feature (597)..(597): n is a, c, g, or t
ttttttcatcactgaatttaggatttacttttctgaaagactttggagagctgggcaggggcccgggttaggaaaggaagaacttctacccccaacccactgcccaaggcctgtcctcagtccctacctagcttctagggaaactattacacagtcctaaaaggatgcctggaaacactgcaggatttgtcaaactcacccacctcagagtcctgtccctagaactgtgggaaaacatttcctccttttattaggtcccagtttcagctaactagaggagcttttcccttgactttaaccatgccctggctcaagttcactcgcatatgtccctttgctcccgacgctgggtcaactcctgattgctcagtaggtagtcatcaatgaatgtgaagatttcctcgggggtgacaggttccatgtagcggtctcggtcaataccctgcttgtcaatcaacaccatgttgaagtaggagcgagtgaggcgctgaaattgcctgagctcctcgatgatgttggctgacagcatgtgctctcggatgcgccccaccctctgaggtggctgtcccacagttcaatgatgggcacatgctgcanatcccagtcacaggtggattgctgtagcatagagatctgcattttatatat

SEQ ID NO: 445334 - DNA, 619 bp, Homo Sapiens
ttaacagttcagacagctttatttttatcaccagagttttaaataaatacacagttccatcagaccagcccccgagtccccaagaaggtcaccccaataaattaataataaataacagacttatataaatacagctgtttgggcaggaatcgggtgtctcaggaaccttgagcgcattccacagggcaggacaactgaggtcgcgtcccccgcgcaggtgcacagtggaaggaccaggactgctcatatgcagtggcagtctttggctaacaagtcatcataggtctggagcgacaccccggtgtcggtcttttgaatgagcaccatgggattgtagctggcgggcacgcagcagggcgctggcaccgtgtcgggcttcaggcggtgcaggctcgtcttgatctgcgcgtgcatgtttgccgcccggaactggctcgggcacgcgccgatgcacatggtcacttgcacctcccgtggcgacagcacccaatcggcccagcccaggtcttccagcgacgcgcggaccgtgtgcagacggcagcaacgcccgggcccgagcggacagtggtccccgttgcgcgcacgcgctctgcggcgccccctggcggcttgcggccgc

SEQ ID NO: 445335 - DNA, 529 bp, Homo Sapiens
ttgggggtggcagtgcactttattaacaaacaaaacagtaccatacaggcaaaatcttacttcagtggcaaagcacacacataggtatactccaacgtgtagcactggggcaaacttcagacatggaacattaggcaccaagttcacaatcacactaaacatagttcacaatccttcaatccatactcttcagtggaggatgaggccttatttaacagttaactgggacagacagatgaagttttaaaatctaattcttggcctaactgtggagtggggctgactcagccttcagaactgtgaagtgggatgccttaacaggggccaaggatctattcaggcctcttaaactggactttcatttctctggttcagagaaaaagcttatggtatcttcacgttggatgaacttgcatatcgtgagagtcctcagctccaatttcgtgtctaggcacatctggactggcattcattttgatacccaatccatagattaatagggttaatctaattagaataaattaaatcg

SEQ ID NO: 445336 - DNA, 450 bp, Homo Sapiens
caaagtaggagaatagaacatattttatttaacagttgttagcttgattgataacttttaaatatttagacatatggtatgaggcccctgtgtgtactcttgccctggccctgttggcaatggggtgggcttgggtcagcctcacccatcagaccacaagctccaccagggcaggcagcccatgcagtgcccctgcccagagcacagcacctggcacagaggagcagacaataaataccggctgtgagaaacaaatgggataatccaagccgaatgcttggcatggtgcaaatgtccaataaatatcagctgtcattgtctgttgaataaatgaacaggtgggttggtggggctgggggccaagagccacaagctgaggtggcttgtgtctgaggagggaagggacccgctgttccctgggggttcacgcttcctttcttgaggttgtgt

SEQ ID NO: 445337 - DNA, 747 bp, Homo Sapiens
gggagagcgcgttgtctaccctgtaccgaagacagaggctgtggggacagcctaggggcctggatctattgcctacttagagagaggccaactcagacacagccgtgtatgctcccagcagcaacggaggttcagctccgcctgcagggacagaaagacatggtctggaaatggatgccacttctgctgcttctggtctgtgtagccaccatgtgcagtgcccaggacaggactgatctcctcaatgtctgtatggatgccaagcaccacaagacaaagccaggtcctgaggacaagctgcatgaccaatgcagtccctggaagaagaatgcctgctgcacagccagcaccagccaggagctgcacaaggacacctcccgcctgtacaactttaactgggaccactgcggcaagatggagcccgcctgcaagcgccacttcatccaggacacctgtctctatgagtgctcacccaacctggggccctggatccagcaggtgaatcagagctggcgcaaagaacgcttcctggatgtgcccttatgcaaagaggactgtcagcgctggtgggaggattgtcacacctcccacacgtgcaagagcaactggcacagaggatgggactggacctcaggagttaacaagtgcccagctggggctctctgccgcacctttgagtcctacttccccactccagctgccctttgtgaaggcctctggagtcactcatacaaggacaacaactac

SEQ ID NO: 445338 - DNA, 1118 bp, Homo Sapiens
gttcttgcagaggaaggagaagtccacgtggcattatgtagaggacaaggtggaactcctgcggataagccccagagagaatggcacaacagttggcaagtggttgccatggcagccctgggggggctcattttaagcgacgtgtatccattcagctgtaaggctgtggcagggtacaagtgcactggatataggagtcaagataagtcctttcatgtagaaggtgctttgaaccatatcttcaccaggagcttaccttttgaaggttctcaacccagaatcttcaggatcaaactgggtaaccagtggttttcctttccagaaccagaagcacttgtaggaaagttgaacaggggtttcctggaagcaccttcatgtcatcctatcaaaaccataaatgagaaactcattgctgaattaggcaaagttttcccgctaaaaaggctgaagtgttccttccctttgctgccacaggaaggtaccagtgttcttcctttttggaattgtgactttctgtcagctgctttttggattagtctccatgaagataactcaaattctgagtccctgactggtgggacatcacaagatgtggaagactttctagtgtcattttcagaacttagccttctcaagaatcctggaagagatggtaaagaagaagcttgtgaaggaacctgtggccaggccaagatctgccttagaccttctctcctagtgcatgttcaggatgtcatcgaagtaccagacttcctctcaggttctctgcacatcctcagtggacctgtctttcagaagtgccacattttgcctttcacaatgccagcatttcatgaaactttatttatccttggggttaatcaaaatctgaaggatggctgtcttcaatccctgctggatcatctgaagggcattttagatagcctgctgacccagacattgccggagagctttaagctgagcagtttagtcaaatttgtccttcagtcaaatggaaaggattatatgattcgtgtgaagactcataattttagcccagattgtactgaggatctaattattgggtctgttatcacatctgcccctagtgttatacataaagaccagtgttttgtgaa

SEQ ID NO: 445339 - DNA, 706 bp, Homo Sapiens; identical to SEQ ID NO: 325009
  misc_feature (468)..(511): n is a, c, g, or t

SEQ ID NO: 445340 - DNA, 1375 bp, Homo Sapiens
ttttcataagcagaataattctcatttaatgggggaaatttttttcaacttcacatttcctagaggaacaagtatttggtgtagtaatagggattggatgtgggaagaaaaggacatttatattaatacattcttaaaagaaatacagcatagatcagtgagtgagatcaacatttgtcacgcctcaggcctttttctgaagtcatcttcagcccttcctctccactctatcctcagttggtatcattctatagtatcacatcttctgaatggcttacttaaagattctagactagaaactaagcagtcatgatccacttagtaacagatgttttgatttcagaattgccaggtcttccccagattatcttttgtacttactgtcattttcccctttaaacaactttttttggccttagtctttactgtcttttctgagaatcctattagagtttaagatttaaaactagatgtagaaatacatccttgcttagtgtcagggagccactgtgaaatcccattgacaacctattctgggctttagagccagaagtttaattaccacctattgagcgagtttgatttgtcacttcttgggttctggccaggcagagctaattcctcctagcagagcaaggtcggtgggcaggagccagaattgagaaagtgacgcagtcacttcagcttgtccagcttcaggcgtagatgaagggagttaagtgtgccagattaagtccaaagtggcacacaagcatgaggggcaataagggcacctggtaaaccacagcaagagggagtctgcaactaagaaagggggagtgtggtgactagcaaggagcaagcgcttgcaattttcagaagtccaggcaagctgtgctggcaccagacaggaaacattgcggctgcgcttcagtcagaggctggcttcagcctttgaaggagactgacagggggtattaagtagttactggaatgagactttcccagcttccaggaatcaggaactaacttagacttttcttttcatctcacgtggatattgttctcgtggaatgttgaacatttcttgaagtattgttttaagcacttatttatgccattgagttttctatccattgattttttggaactgtgtatatcacaccaaaatccaaatccaaagtgaaaaagatagtcaaacacaggtgttgtgggatatacaaaaacaagcaaaactagattttcttggagaaaaagggtatgatgacttcccaggatgctttaaatttctttcttgtttttagctgacctcactttaggtctttcctctgttcttgaccagggtggagatcttcattatcaagtttcctgtaaccctctgccgaattcttgcctc

SEQ ID NO: 445341 - DNA, 499 bp, Homo Sapiens
attctgatgatatagtttaattttcttggacagggaatggtttgtgtttgtacagcaaaagctattagctaattatggacagaaagaaaggctacagatcaaaaacctctgatgttagttgttacctaagtaagtattcccaagttcataagtaaggagacaaccacactgtctgaagttcaattccctaaatttgcttatacagaaacttttgtggttactgcaagctccttctccactgtaaagtgggaatccatgtagtaagtgggccatgggctctgttcctccatcttggtgagcacgttttgtccaaagagctctgctagttcttgcagcaaggtttatgttgaacgggttccagtggtgaggtcaccctcatggaaggtttccatatatgacatgcctctgctgctacgcccaagagctttcccaagcccctttcactgatgctgtccaagaatagggtctggctggattcccacattgaaggggcaatgaa

SEQ ID NO: 445342 - DNA, 813 bp, Homo Sapiens
ttcacagtgtgattatttgtttatttcattaaatgtttaacgaggctacattgtttcccaaaccaatgtctaatttgtgaaggaaacagcgcagagaaggaagctgggtgactcctgcatctggggtggggaagggagtaaggtcccctccctccatcctacagaggcctttgaggatcagcaacagtcccattccctcctcccacccactgagctcctcagcccagagccctcctccccagaaataaaacgtctggcaacccagacctgcagaaagggaccaaaaatccattcctggtggtattgaaaatgtattaaactttggggggtcctccagctgattgatttttctaattatgtttgctttagatggatatttaaatgcatttgcattccctgagctcacatggcaggatatggatgttggaggaaagagggggcacaatcactccacactctgcactttggtggttgcaggcttgaacctgctctacactgagatgtccaaagtcgataagagaagccactcagctaattatcgcaagtcgattcttttggcgggtccttgtcgggaaagggttatccgtcatagacagatgtgagacccacctaatctggcgctgtagcaacgtgcgctctgctgtactcctagtcgtgcgactatcgtctgttagtacattctctatccaggattaatcgttcggggtgctattttcacgctcataggtatatatagttgcatactatattttctgagattctctactctcctacttctggcgtgatgccagattcaaattttgttcttggtca

SEQ ID NO: 445343 - DNA, 466 bp, Homo Sapiens
  misc_feature (405)..(418): n is a, c, g, or t
ttatactaaaagaataaagatttttattaagcattgtaagttgcattcaatagccttcagatacaccacaccacaatccatcgacagtcagtcaaacccaacagcagttcattcttgcacaatccatgagttagggcaaaactcccttcaacttacagtaagatcctacttagctcttgcgggcaggggttggggaattacacctcatttctgatcactaatgtgatgaagagcatcagaagtatatgaaaacgataagaagtgattctgatttcaaagtacattgtttggaaacattaacaaaaacatcaaaatgatagaagtatacctgcttctactaaattcttgatgggaaagttctcaagaacaagcaatttgtttcctgctacagaaggggggggtggnnnnnnnnnnnnnnaagatcaaagggttttttttcacagaatttcatatttgctaatatgaa

SEQ ID NO: 445344 - DNA, 613 bp, Homo Sapiens
ttatagttctcaggctttaaaggtgtagaagacagtatggagaataagagaaggatgttttatagtcctctgtttcagtgccttccccatgcccatggagctgtcccaaaacccatccctcagtatttgttgatgccaaagacacgaaccccatggaactggggcaacttcggcagcagtacacttagcaatgaggctgtgttgatgaggaagtgcgcagcatcatacttggtatagaagctggccaggagatagagcacaataggagagatgctgaggaacttgcgggaagaggtaaactggagcccatagtccatttgctcccagtgtgtcagtagccgagcctttccttggtcaggagtctcaaagggtgtccctttcaccgtatgaaggaagacatacgtagccaggttatggatgacgttggtcagggtccagacaacaggaatgctgaagaaggggatgctgagtagaaccatatgcagcaatcctaccaagatgatgtaggccagccagatgcctcggctattcatcactcgggtgttggggtttacttcgctgtgtgccacccccacattcatcctgccagctcagatccccgtccggctatccc

SEQ ID NO: 445345 - DNA, 421 bp, Homo Sapiens
taaaaatcagatggggactttattgtgatggtggcaggtccaccagcagatgcaaatgtggggtgctgagagtggcaacacaggccaccccaaaccaacttcactccctcccctgtcctcagccagtacagaagccaaatgtagccccagccctagactccagcccaggcagagtccaagggaggggtgtcagggtcagaagtcacagggagcccagtgactatcaaggtggctgagagcaaggctagggtagggatggggcagagaaagggcagggggtgcagccccaggtggcccaaagcaacacagaggagcaagggctggcattcaagtcagcaggtccctggggagaacagatggtgcctggagtcccacatggtggtacaggtgggggagctcttggtggcaggcagcaccccag

SEQ ID NO: 445346 - DNA, 556 bp, Homo Sapiens
cccggaagatcagtctgtagctcttgggcctggatttctactatgttagtgagtgtaggaatatactgtgtctttaatggatgaaaattcaatgtatgctgtgaatttgttggtttgaaacattgaaatttttcattagacaatgtttacatacctcacctgaagaacctttgagagtgtatatataaaattttaaaatatattaagttgctttaaaacaatatgtatagctataaaagttggagttattttaactttgaatatgtaccaagtctcttaaatattgaaatcttgtagacttcttgtgcttctgtgttttgctttcctatcaggccatgtaggaaactgtgttcttgttattggtagaggggccctcactgaaatccaagcttggaaggatgtcctgtgttgtttcagattctcttgtttggttttgaaggatgcggtgtggagccagaggatgtgtgggaggggtttctctaacactgacttctattccatgagctttttcaaggcgcttattttatggcagcgtattaaacttctttgatattca

SEQ ID NO: 445347 - DNA, 549 bp, Homo Sapiens
ttttttgccatgaattcctttttactgaaataccgtaggactcactaccacaataagtacttaagctgaaagagtttctaatgggagccaagtaaattcagctctccactgtgcaaagcatcttgtcatttctataataaaagtctttccatgttcagtccactttggctctggaacctggatgagtcatgcttggggcccagggtgcctgtgaggatgctgcatgagaatttcagctgtggtggcagtgtctgggagtcccactgactcagggggaggccaggctagatgagctggaacttttaggggagagctggcacttagggacatcattgattgtgcttttcttagcctagttctgtcctgcaatttatttttcttatcatgtgactgtcggctgaagtcttgggtcatttggtttctttttcttcttccttgctggacagtcttcatggggtcacggttgtctaggtaattaaaacgaatgatatctgttgggtgcttatcagaagatccccagggtggaagtgccttttcccctgaaatatt

SEQ ID NO: 445348 - DNA, 289 bp, Homo Sapiens
atatttatttgacatttagtctgggtcattgactcaaatgcctataaacacacatacacacatacatacccctcacactctagcttctgcaggtaggggaaccctcagcctttgttctcagaaaaaaagccccagaggttaccattgggcatactgatttgcacacagacccatctggaagaaagtttgagattggaagtgagtcactgatagggtgagtagatgagcagactttccaaagagatgtcttaaggttcttacctcacttctctgcagtatgagatgggtg

SEQ ID NO: 445349 - DNA, 332 bp, Homo Sapiens
aatttttaatgcaccagatttatttaccatttcaaaagatcacgatataggcagataccttaaaaattctctgggggcaaacaaatcagtatatattagatgtacagggactgcagccaagacaggcatgagttcctaggttataaatatcatctttataaaaagtgggtattttataggacatccaagtaacaccgacttataaaagcaaacactgtacttaaaatgttggccacatatgaaagaacagctgaaggctttaggggattgaagaatggataaactcaacgaactaaaaacacattactcatccctcagaaccaaaatacagg

SEQ ID NO: 445350 - DNA, 993 bp, Homo Sapiens
gggaccctggccctggtcctggtcctggtcctggtcctggccctggccctgtccatgccacggggtctccttgaacacaaaccaacagttcccggcccacaggaagaagttgataaagccaaagagcacggagatgttggccaggcccatagagggcgtggccccggcactgcacactgcttcctctccatggcacactgacatggctgctgtcaagctggatggtcgtgtggcccccttgacatcggtcaggcccttgccccaggcagctgcagctaccagccagaagaaggtgaaggagacagtcacacagaagtccaccagcgggaagcgtttgttctctgtgtagaggttgtggaagcgcaggtagataactagggcagccatggtatagaagaaggaaaagatgccaagggtcacgaagaactcggcgggtgcagagaagtcccccatgaggtgcatggtcttggagctggactcttcatcgcagaggggcatctcatattggatccggtgcaacctgaagggatagccaaatgcaacgatgatggagctcacgtccttggcttcgttgttgcagcgaaccattgctcctgtctccccgctgtaggggccacaggacccgaaggcgaaaatagcaaagagccactggagaactttgatgaagcccagcggctcctccagccgccgccagcgcagcccctcgagtagtcggtccacctgctggcgcggcgacctgtcccgccgtcccgccgggcgctctcggtcgaggacatgctggcgcggcgagcgctgggcgcggcgtgggggcttggctctctggccgggaggcggcggacacggcgggggagcggggagctgcaggtccggggcagagcaggcgagcggggccggagcgcgagcggccgtcggtgggccggagtccagtctggctggctggctggctgggacgcgggggcgctgctgttcgtgctctcagaggctgcggccgct

SEQ ID NO: 445351 - DNA, 455 bp, Homo Sapiens
  misc_feature (419)..(419): n is a, c, g, or t
tctatgtagcaataatccctagactaaggaaacaagaggccctcagctttgcccccagccagctgagcagcggtagttaaggatatagcttctctttggctaccgctggtctccttttttgcaaacttgagacaatcaccgagagccctggtggcttttgagagggcagtttaatggcatgatgagggcaggagccaggccaaagaggattttgaagggagcttctgaaggataaactgtttagtgtttcttgactgaagttggtaattacaagatgtagttcagagtaatcaagaggacaagtatctaagccctttgctgattgttaagggccaagggatcctaagggcttggcatctggccccattctcctgtattttctcttctctaatttcccagtgatcttaccaggacagttntctctctctgcatgtgtgtgcctgcacaaagggctg

SEQ ID NO: 445352 - DNA, 511 bp, Homo Sapiens
ctatgttgaaacggctttattttttaatccataaatatctgttactgacaaaagtggaaaaatccttaagactaaatcttactaaagtgtatctgtttacagtacatgtagaatgtgctttgacaggtaagtagaacgatgagatttgtacagagaagcagttactagagcactgcttaccatgaagcttacatatgagtaacgaagaaactgcaaagatacagatagaaaggtacttttcatcagtactaccatataataaacatggaattcataaattgggctaatgcataaaaatgttcattaatccccccttaggaaattgtgtccccaaactaaaaatattacagtaagaattgctttttattagagaatttcaagaattctttactacaaaatgtctagttgagttatagaactagaggaatatttgccactacaaagccaatgaatgagtcctcccatggtgtggcattcaggggtcactgcagggtgggcagcaaagttgagc

SEQ ID NO: 445353 - DNA, 449 bp, Homo Sapiens
ttatgaaaaaattacttttttaatgtacaaaaagacttatttacaagttgagcatgtcatctcaattcatagcatgtagaaaaagctaaaaatgttttggagatataaatttggctggacgactcacctacagtatattcagggatgtcttctgtacagaatatatacaggttgggactggcaagggaaatcctatctcaggaaggcgatgaacaccaccacagagccacagacccttagcaatgttccctggctttcatttgcagttggccttgtctctggacagagtttgatgtgctgggacgcagcgagcccagatgacgatgttggccttgtcctcaaactctcctaagaagttcctcattaaggccaaggtcacagtcagagtcacactctgagtggtgctgtttggcaaggttgccacacattccccatgaaaaggtttgggg

SEQ ID NO: 445354 - DNA, 497 bp, Homo Sapiens
tttttgacaagaatattttttattattgaaaaatacacaaaggtgaaaggttgctgagcagctgattttccatagtacaacagagtattataagaaagagggaaatgtatctgttatatatggcagtttacatttctaaggcatttaggcttaagagcactaggtcttgcacagctaggtgcattgtcttgagtttaaatatactgaggcacaccaggcaggcaaaggattcaaaactatacattaaaacttgttcatgcatttgtgtcttaggattttattccctaccctcctcattcatttttttcccacatgggttttggagttgttcatagaacactggaaataatccgactcttcaagagtttgtttacaatgacaacaccaatgggacacaccaaacagaactacttcacagatacattctgtctcttaccaaaatgaagctcccagtaagaaaaacactggatttgcaaaggcacagtggagacaggttt

SEQ ID NO: 445355 - DNA, 534 bp, Homo Sapiens
atgagattgttctcatttccaaaatcgtcagacaccgatttctctgcgcttttcttgcctggtgtcaggacagggaaaagctatgcaggagacatggcctctagctctgttcaactgtcaattctgctggggaccttagataaatctgttaacctctctgccctcagtttccccatctttaactcgagagtgtagatctaaatgctagaagagtactaagggactcttccagccactttttggcagggatcagacttcggagagtgaactcagggagcaaagaggtgaaactggagcagtgtgagggttaaagggaaggcggctggcggtgccgagcaggggagcacgtcgggggtacagcaccagggctggaggaatcggctggcccacaggtgggcgacctgggaccctctatgtcaggtggtacatgctgtagcccacatgggccgtgtagagtcccacgggcgccacaggcagcgcggcgcgctggaaggggccagaggcaccgtagagcgaggcacccgccgcggccgc

SEQ ID NO: 445356 - DNA, 796 bp, Homo Sapiens
ggcggggtcagtgaatgaaaatttattaagaggaaacatcagggctaagggtagactctggctaaaccaacctaacaggattcttactgaaggcaggccaaagttaccaaacatcatctggggatggtagagggtgaggaagctgatcagatatcaatcaaatattgagggtggtggattctgattaaactggtttagcaggattcttgctaaaattggacaatgcagaggcaaacacggaagcccagaagtcagggcctagttgagaagacagtccagaggaacccaagtatagttcggtcaaggaagaatctttgccacaagtatcttcatgttatgcttataggctgctggcaggatccattcaaatctttaccccatcctctatggtgacgccagactcctcactattagagtcactccctgtgtgcagggcagttgacaatgcctgggtgacactatgtcagaaggtcttcgctaagaatctagatgcaacctaggaacataaagggagggttttccccaggtgttcccaagcctggccgggcttcagactcactgaaggagctggttacagcatagactcctggcctcagttattgagagcttgctcagtaacataggttggggacacactaatgtctccttggaggccacactgccatgcctaagtaaatgatatgtgcttctgaggcatatgggcttgggagtatttccttctcactcagccagattttgctatgggccagagtcaaactacgagatctatctgtgatagatagaaacaacacggtca

SEQ ID NO: 445357 - DNA, 536 bp, Homo Sapiens
cttcatttcgacgtggtggcttactgcacgttacttactatgtcgaaccagatgattttagtaaaaaatgagtttagtaatttagtataacacgttcaaatgtttacatacaacgtttacaggcaaaagctaccaaactgttgtggccattgagatgttggaacaattttcaagtttcatggtgcatgatccacaatgcatatgaatacatacaatatcagtaacaaaaacagtacaatgtacaccaaaggttgtttcaaagtcctctaatgtctgcagtcatgatgaactaactgcactggctttcattcattcattcataagacttattttgaagctgatcttcatactgcatgattaagaaaccatcagtgcagtggtcagaattacattctgctgttaacagaggagcaaagaatgctttcaaagctactgctgtatttggaaaaaagttcagttttagtgttttctttctaggtattttgcatggctaaggcgggagaagaaggggctgcgcgggattgggggaagcgact

SEQ ID NO: 445358 - DNA, 1292 bp, Homo Sapiens
tttgtagaaacaatgattaggtttatttgcatgtgccaggaaatatcctacatttattgttacaaaaaccatgttatcacgttagtgtggaattctttagaagcaccggctaaataagctttagaaatggaatgccttcaatggctcaatctcagaaatggcaaaattctaggacacatcaagacctgctcttccgctttccactagttcccaatctttgatttccaggttttggccctttcaaacccattttttgcgtttctgaaatcaagaatagcttgagaaatctcttcattggtgttcatcacaaatggaccatgttggataactggttctcttaatggctccccagcaattaagacaaagtggcttctcttgggatccttgttctccacttggacactgtcaccttctccaagcactgctgtgtgatgaggttctattttttgttgtgcatcatcgggcccaatatacacatctccagatatcgtgtaaatgaagcttgtcccaccctttagggataggttgggaatgtttggctcctgggtccaatttgaagtccaaatataaggttggtgtgcgagtgtaaaccttggactttattcccagggcttctccagaaatgacagcaactgtcacaccatccttactgggtttagggatttcttcacttttcagttcctggtactgaggctccaccatcttctctgagctcctcaaattaacccacagttgtaggccatgggctggctcctctgagcaaggcatctcagcgtgcagaatgccccggcccgcagtcatccactgcaaatctcctgggttcattttaccagtgtgtccacagaagtcttcatgggccatgctgcccccttccaggaggtaggatactgtttcaaaacctcgatgtggatgatcaggaaatcctcctggtctacctcctttaaattcatcaaacagtaaaaacggatccagattttttaactcgggtctgccaatgcttctccggaccctcgctccaaccccttccgactgctcccggctgagcactgagagagtaactttcttggaggaccccatatcggagtctaaaaagagagtgttctgatgctgagctgtagaggatggaggggctgcggtagcggcacctggagccttagcggcgggggtgacgcgaagagccgccgggagcgagtgcagggagggcaggttaagagagtgtgggtccagtcgcctcaccgtgactcagcgcttcgcggcctcgtgccgaattcgccacccaggcctcgctacct

SEQ ID NO: 445359 - DNA, 1473 bp, Homo Sapiens
  misc_feature (71)..(71): n is a, c, g, or t
  misc_feature (206)..(206): n is a, c, g, or t
  misc_feature (365)..(365): n is a, c, g, or t
gggggccccgctgctttggagaattcatgtgcaggcagagtggttagggaggccacccttccgggctcccncactcacctgaggaagcctctgcaggtgttcagaagagcaatgccccaagatacctcccagacctgattgagaggtgatgcctcgtaatcctgatgctagattttccttgaatataaggccatgttcctaaatanaaatgcaaatacccttgggaagggcaaatatgtagccatttaacaactggcatggaggcattttgatcccttcctggcaatgaggtggaggtgagtgggaagtgggccagggcagaaaatggggagaggtaaacttggcttatattccatgaaccagcnctagggcaaacttggcttatattccatgaacacatggccctaaggggacctgccaggggctctagtttttaaatgggtgaatatgaggcccaaatgtttgttggtttccagcatcaggattaccgctggacaaattctaatctaaacacctgggcctgcggaatatccgagtgggcatcgctagcctcagaattacaaattcctcagtgaagagcaagaggaagatctggaaaaagtgggtgtttgagctaacatctttccaagggtccagaaagctggcgttgctgttgagtatgccaggagggcaggggtgggtgttttgcaaaaaaggtcagccccaaggtgcagcaaggcccagtgccccttagctaggaaaattccttcagcaccaacgcctccagcctctcaggggaactgtcttctgtttgagctttttcttgagtttctggaaacagtgttggcttatagctggtattctgatgcatctaattcttttcctttctcctaaacatttttctaattatttttctgggggtggggaggggagaaaaaaacccaatgctctgaactccgaggttatttggaaaacctaaaaggcactgcaagttgtctccatagagagattctgcttgtctctgagccttccctgactcatacctgcagagctcccagctctggcagcctccaggtacccacgaggtcttccctccacagctgtctaggcctatgggtattttccacttgcatacaatttgtctgtgctttttaaaaatctcctttctttggcaggactcgggtgtgtatttgggacccagcagaggcttggccaccaggtgtatgtgacctaatccaggggaaggctgtccaagagagctgcctttagttaggatcacacactagacagggaagccctctgctgcttcccgtatatttattttagggtgcattctcatccctgggtctaggccagcctggtcccacacggtatttttcgccttagtggctctaaagaaggtcatgctgacccagagctgtcccctttgtctccaaaccagatccggcccaggttaaagtccttgaattcaaatagcttcactgtggaaaagta

SEQ ID NO: 445360 - DNA, 513 bp, Homo Sapiens
tttttggaagatattaaaattcaggttttattatttgttcagttataataatttaagttaatatttgctgtattctcagagcaaagatgtatttctgtaccactgtcctgtataaatttgttacccaagatagtgactggtatgaaaggagagggaagagggtgacagatggaaacgattgctgtaggacagtccatctggccagatgcggtgggggaggggagaagaagtgggagagagatggtcctacagatgctcccatgggtaaatgatgggtgcatccctccctgcagtcgggctgtgcctgtacttcacagtcctctaagaggtgtcattcaggccacctcactcagcctatgcccaaccccactcactttccctttccttatgggctgcccccgcaactgacttccatgatgattggttctcattaggccctttgtttctacaccagccttagatcattaagacaaagacgtacttgctaccctcatagcacataacaacgcctgc

SEQ ID NO: 445361 - DNA, 463 bp, Homo Sapiens
agctgccctgtgttccatgtttctgggttggaatgagaaagctattagaacactggaagactgcaagccacatacaaatcatctttgttactgacacttgggggagtactttatagtggctgtcaagaccaatacaaaacatggtttgtgcctgaaaaagtcaagtgccattattcaaaaagaagatgttagtaatccaaataactgaacaacatccaggatcttcattgagtttagctgctatagacgcagatttattattgagtctgacttaagtaaattagcatgtaggtttgcattctagatttgatggaataacaaaggttaattacttgcaatgatctatgctggaataggagtaaaaggggagagctatatttagatttaatttcaccattcttaagggaatactatgtgaggggacgggattattatagggggcaaaggaaggagtgctaaggaa

SEQ ID NO: 445362 - DNA, 813 bp, Homo Sapiens
  misc_feature (161)..(161): n is a, c, g, or t
  misc_feature (172)..(172): n is a, c, g, or t
  misc_feature (746)..(759): n is a, c, g, or t
ctactttcatgataaattttgctattatagatatatttcttcattttcgattttattacatgaatctatttggtttttctgtggtaatgctctatttttaattactaggtttttacaatattttggtatctgttagagcaggttgtcattgtttttgaagntgcattgcctnttcttatactgttctcttacagatgctttccagaatcattcttatgctcttgattttttattttaatgacacacagtctccggagtagagatgaagagagaatttctaaacctggggctgtctcaactcctgtaaagcatgctgatgatcacacacctaaaacagtggaagaagttacagttgaaagaaatgagaaacaaacaccttctcttccagaaccaaagcctgtgtatgcccaagttgggcaaccagatgtggatttacctgtcagtccatctgatggtgtcctacctaattcaactcatgaagatgggattcttcggtaatacaattttaaagttgtattgttttctttgttcattattaacattattcagagtaggaatttaattgtaaaccatattgcatatattttttaaaatagtacataccacctaatactatgattatttttatatttaacattctgctacttatatatgatagtgagttagaaattagacaacaaaggaactttttggatgctttctttctcaccgctgtctcctgcctagcttttaaattaggaattagnnnnnnnnnnnnnnttctattcagacatcagaatttccacagctttccaatggagcattaaaaaaaaa

SEQ ID NO: 445363 - DNA, 680 bp, Homo Sapiens
  misc_feature (43)..(106): n is a, c, g, or t
  misc_feature (202)..(211): n is a, c, g, or t
  misc_feature (214)..(215): n is a, c, g, or t
  misc_feature (218)..(219): n is a, c, g, or t
  misc_feature (221)..(222): n is a, c, g, or t
gtggaaaaatgttatttacccccttttggggcccaccacgaannnnnnnnnnnnnnnnnnnnnnnnnnnnnnnnnnnnnnnnnnnnnnnnnnnnnnnnnnnnnnnncaaacaaagagtttttatttatggggcgggttctggggtgagtaatgtgtgggattgaggagggaagtgggtaggggggaaaggcggtggggtttnnnnnnnnnnatnntgnngnnggagaacaaaatattttatttctctcacaaaactatagtttacagtagtatttactaaataaattatataatttctcttttacaagcaataaactagatcacaaatatttcaaagacaatgtatgtacacgacataaggccttttataaatagctttgcttttctcatttcactagtaaacagtgaaaaaatctttatagaagctagttttctataaagtgaaggcagacctagtatattgatctttaaatgaaaccaatttaaactttcaatgacatgaactataattttgcaaaagaatttatacttaatttaccatgtgtgtggatggatttttaaaaatatataagcagattacatatgttgcttatgtataatcactggatgcatgcacaatgaaataatgcaaaagtccataggaaaatagcacttccaactccaaaaaggtgattggcacc

SEQ ID NO: 445364 - DNA, 312 bp, Homo Sapiens
tgttttattacaaagcttcttttaaaaaaatgctcagcacattaactcaaactggaatgacaaacgttaggatgacagttttgggcaaaggctgtgccttgcttttttaaaaaatgggtacatcaatgctcattttaacaactggcataaaatcccactaattggctaataaaaacagatacaaatacagaacatttaaagtaataacaattcaagtgctgggctttttacaacaagggggtgataaggaaagaaatgaaaattcactgcaaaccagtctgctgaacgcatctgttaaggtttactgtttaa

SEQ ID NO: 445365 - DNA, 674 bp, Homo Sapiens
aacagcaaacaatttacagaatttttattgtaaacagaagctcattactagttattacaaactgaatcaactgaaactcaagttagcaatgtgaaacacatttataggcttatttttgtataccataattggtaatttttgccccctcaatacttttaagaagactgttaaaattttcagcatttcaatgatctcttatttgtcaggtttagcaccatgacattctcattcccttaaaaaaacactcattcaaatctaggtagaacttccacctttcatcatcaaaattatcacacaaaatttattttgtttttttcacaatgcaaaaagaagacaaataagtatattttaaaatattatcagcagtccgttttgtgtggttttacatttttctgtctgcccattattaagaaatcttgcattgatttcatttgccccccttgtcattgcaacccgtctctagaatactgtggtaattgaaactagcatgtacctgtgccgcctcccggggtcctatctttgtcacccacctcccccatggctactgcttgtcatatctgtgctcagtgcagggatgagcatacagcaggaagaggcgaagtcagcatttcatttacagaaaaatactatctggtggagacatgagttgctgaagatttactgtggataaaaat

SEQ ID NO: 445366 - DNA, 893 bp, Homo Sapiens
cacactttgtggttattcttttattcttgggtgtcccccaccagaccccagctgactgggaagggattggccccaggcttggcacagtgccaagcccacccgagtgctcagccacctcttgccaaacatctgaatcaatgtcacagcaacacttggtttgctcctgttgcattctcatgacaggctcagcgtcaggtacgacgttcttgagggcaaggcctgtcctccacaaagccctctggggctggggtctccagaggcaagccctcagctctgggagactgtctgcctccgggaggaaacctggggcaaagggacagggagctccgccaccagcagcagcatgttttattgcaaccagaatccccggtcacgtggggaagggattggagctagggatgaggcaggacacatctggtccctgacaggacactccccgtccaggatgcaaagccaaaggcccggaacagcctgctcagtggctgagccctgtggccagctgtgccctgtctcttcccctgcccccagtcagggcatccaacggggcagaggcagaagggacgtgaaaaggggggtcggtttcagcaaagccttcacccagggacctgaaggaagaaggagtattgtgatggggtccaggtgccccaagatgctcagggcgcctgggctgacttcaggatgtgtccatgtggttatcagaggaaagcgatggggcctgccctgcccacgtggagagggagggagaggggaaacacggcttcagaaggagaatcactggccagcgaccatacaggtgggatcttgggaccctgactccgccgccagggccgggtccacaccccacctcctggctgggccccacctgggaccccagcctaggcagccctcgtgcc

SEQ ID NO: 445367 - DNA, 389 bp, Homo Sapiens
tttcgaaatggagtcttgctctgtcagcccaggttggagtaactgatgaaatccccaaattcagagatgcttggagatcccttgagaaagctatcagtcccatgtggtttccctacgtgaaggcaatttgccatccagatgctgtgaaaatcaccatgacagccttgccttgcctccgcagcactgtaccatgcctcagaaacaagctccaccatgagaaattaccaccaaggaaaaccaatttcaggaggaattcctgaaagtaagctcaaggatgcatctgctgaaagctcagacaggttggccaatcaacattcacagatgagcaatgggaaatcctgcaatcatgtggactgacccatgaagtcatccaggcaactattggagac

SEQ ID NO: 445368 - DNA, 535 bp, Homo Sapiens
gctgacaagtccaagatggcagtcggaactctgacccataaaaccagaaggcttagatgaagaacaaaaagaagggaaaccaaccctgcttccttttgcctgttattaatcgctgcaataaagccattagaatctaccaacatatcacccaacttgaaaagaagagagattctgaaaaatagtcagaaaagaagggtaaatggaaatgatgagtccctcccctttatggctattttaagaagcacaccatgttattcatatggcccgtgcttagcccactccctgaattgtttgattttagtggatataaaaattcttcctaagggctttcttagttccactgccagcagtagttccccatttctatttctcgttaggtctcaactcttccgtcatgagttctatgttccccaggattccaagagcccaaatcctgcggtgggagtgaaggggaggcagatgctggctactgattggctctgggactcagagtggagtcactgtggaaatcactatttccaagttctttggcagt

SEQ ID NO: 445369 - DNA, 689 bp, Homo Sapiens
taatgctttgaaatgatttattcacctgggaaagtgatcacaacttgctgctaattaaaaccaacaatagaacagtgagtacaattgaagtccatcattgttattatcataaatatgcacccaacaaaaaacaaactaaaagaaaatacactcaaaagcacacagtgggcacattttgtctttgggtagtggaagtgtaggtaatgtcagtgtttggggtttttctttgaatttttaagctgttttagaaataagttttgttattaggaaaattatttttaaagaaatatacatctgagggaaaagagaacaaaggcatgataaataaggggtccttggttggagatgatgcatccagaacattttggataaataagctactttgagttaagggccttctcggcctcctacatcaacacagaatctcaccccaccctcctagtagacactttcctcccaaccccctatcagctacaaatactgtcagcttacacagcaggccttattattattattatttttttttttgctgacaagttcaagaatggcagccggactttgacccataaacccagaaggcttagatgaagaccaaaagaagggaaaccacccctggtcctttggccttgtattaatcgtggattaagcccttgaaattaccaacctttcccccacttgaaagaaaagag

SEQ ID NO: 445370 - DNA, 547 bp, Homo Sapiens
taatgtaaaaatcaatttattatacaacaatcatagataatgctttttatctacaaagagaaatggcttctgcagcctccctgtctactccattcatgatactatgttcttaagatataattactttcaaaggaaaacaaagcgatatccatattttccaaacaaggaagcccccagacacatttatgaacgatatggaaatattggaaagaactcaaatggactcctagatacaaaaggctgttctgcccatcacagtaaacactgttttgccttaaaataaaaataataaaatatttctcaaatgcaggggtgaggactttaccccgtaacatgcctaagtggttcgatatataattttgatggcttgacaattgctatgtttaattccattcagttaacattccatttttgttagtttaaaaaattgggggaattattaatagatatgctttacagtatttaagtattttcattcccatgggtcagaggaaatttgagagaaaacattctccattttttttaatagattatagaaatattaatt

SEQ ID NO: 445371 - DNA, 565 bp, Homo Sapiens
tggaggactaccccaacatctatttatttacttataatcacatattctatgagtatattacagaaaatatgttttatcacatcattttattagaaaattacataatagcaatgggttaatgtatgtcaagaacctactgaggctccataatggaaactgttactattaatagcatagtaaatagccaagaaaaactaaacactgtcaggaaaagctcagtttctcaaaaaacataatagggaaccatgaaagacaaaaccagtacctcagctcatcctacatctcagcaatgcctcagacatttctgctaacaagacatacattatgaagattacacatgctcttgttcacatgcccacaggactactgagaatcttccagagaacacaaatgaaagccacttttctaatcatcaccagcttaaactaagctttggatattaatgcaccaagtctccctgtctatgggaatgcagttttcctctctctgaatcgataccaaataatactaatcataaaatatacactaaacttatttaaaccttttgattataagtgaaataact

SEQ ID NO: 445372 - DNA, 371 bp, Homo Sapiens
  misc_feature (313)..(313): n is a, c, g, or t
  misc_feature (329)..(329): n is a, c, g, or t
cttgacttcagtctctttattcgagagaaactttgtcctcaaagggaagaagtaagaagaccccctgctgaattatttcacagtagaaatagtagattcctctctggtcctagataccacccccagcagcaattttccaaacccagggatttggtaaccttgggcctagggcatcccagccccaacaagagcataacatgttagggagggaacgagagagggagggcagggcagggagttgaggaatcaccgaccacttttcatccaaaccagacaccacctcgttttgcagagtcctcagggggaaggtttnaaaaaccttcagtttncctcattcttgtggaaattggggaggacatttgggggcaaag

SEQ ID NO: 445373 - DNA, 1499 bp, Homo Sapiens
  misc_feature (522)..(530): n is a, c, g, or t
caatgtggcacgttgtcgctgtgcctgatttctgaagcctgtcccccgctgcttagtctctgctcgtcgcttgcggggcccgttggttgttcttggttccccaggaggctgctagggccgcttgctcgtcaactccaggggagtttagacacggtcacgccagcaggaaggttgctgtagtaagtagtcacgtcgattccgggaggggcggcgccaggcagtaagtgccgtccggtagcatgtagtagctgtaatacatggctgccacggtcgagtctgccgtgtactccacctgggagggctgcacaggcgcaccgtctgcgttgtgtgggctgggagtggaactgtcagcctgtgccttacgaacaagtgctgcgaggggatgatctgggtccactaccttcaagggcttcatcagctcttcaaggcggttacactttcttggaggcaaagagagagggatgaaggtaattcccatcttcttcatcatcatcatcttcattgtcagagctgactcctgannnnnnnnnctcgtcacttttgttttctgccaggacagtgtagcgtccctctttcatggctttctggatgaacttatagtaggggttgaggtagtggtcgaagcgcagaaagtcaaactgggagttccgggcctgcttggccttcagcatgatctcaaactgtgctccctgcctgcacacgaagctggccgtgcgctcgatgatggcgtgcattttagcggttggtggcaactccacgtcagacgggacgctcaatcctaagggggcaacgaagggctcttcattttcctctaaattttcggcctcattttttttctctctgtttggaaggctcctcctcctccgtcggctctgacgggtcgtaatagtcgctaccgtaagtgaaccccacggcattgtagctcccatcctctgctagtgcttcactcaatcgcttgtattcttcctcttgccttgcctcctcctcaagcaagtccgtatgcaaggctaaatacctctcttcatcacacagggcctctattcgcgcctcctcttcagacagctgataatctctgttccacgtggaatactcagcatcgtactcagaaaggtcatgcaggtgaccacgtccatcatatctgtcgatgaggatcttgtggtcccccatccaggggatgaggtgctgtccctgttcctgagccagggcccgctcgtcgtcccggaacagcttgcaggcatagccgaaaaccaagagctaccactcggctgcccccaccgccaggcaccgcctggcccggcctcctccttcgcgccgcttttgcctctcgggtttggcgcggcccccgctcgcgccgtacatgacagcgtccccggcgtccaggctggtcctctgtctgtgccgcgcgacgtccatgatacctccacttggcctaccccttcagtcaaagaccccgcatcccggacccaaccgacgtcgcgggtcgacatactcccgggtac

SEQ ID NO: 445374 - DNA, 408 bp, Homo Sapiens
tttaaacacaataaaagtttatttctcaaattacagaggtgagtggtccacagccgatacagctgctttgtcaaacttgacagacaacttgtctctcagtgtctgaaatggctgcagaattctcactcctacctcaacagaaggagaggcagggcaagggaaatgcatgctccagtagtttttaaaaatctatttttaaaattgacaaaaattgtatatatttatggcgtacaacatactgttcaaaatatgtatagtgaaatggctaaatcaagttgattaacatatgcatgacctcacatacttgtgaaaacacttaaaatctctcttcgcaattttcaagtacacattgttgtttgtttttggagtcagggtctcactctgtagccaggctggagtgcagtggtg

SEQ ID NO: 445375 - DNA, 994 bp, Homo Sapiens
  misc_feature (737)..(862): n is a, c, g, or t
ctgtttgtttagattcctctttgtgtccctgtgcttttggaggtaaggatgctccttttctctgggtgccaggagagcacctcttacatgacagtcttatgatctacttcaggggaaggtcagaaaatccttcccaggttttatggctgcttctggggagaacagcaggcagaaggtcagagtcaccttcctgcttctgcaatttcctcaaatgccttcagcttaaaatattcaatatgtcaaagtgctgtattttgtgtagggtgtcctgaaccccgtcactaacctctaactgaaagttaggattttcttcaattctgaacatagttcataaaccacggtaatattagcaatacttcatcatcaaaagaaaaacccagatattttcatatcacattagttttttgcatctattttcattatgcttatcactatttcaaatttaggatagctattaactcttatttaatgcatttataaagaagcatgcatattaatatataacaaacttatcttttaacattttaataactgtatttcgatataattagattcctttgtaatcctatatattttatgcatttaaaaacatgattttaagaaggcattcataggctttaacagatagctaaagactaagaacccatgtttttattctactttcaatacttgaaaagttgtggataaaacaaaaattatgttaaaaactgaaaagtaggctgggctcagtggctcannnnnnnnnnnnnnnnnnnnnnnnnnnnnnnnnnnnnnnnnnnnnnnnnnnnnnnnnnnnnnnnnnnnnnnnnnnnnnnnnnnnnnnnnnnnnnnnnnnnnnnnnnnnnnnnnnnnnnnnnnnnnngttttgaatcctcttctgtacaaagatacaatctgagtccttaggacatttatagcctaatattttcttccatcaaagttgctaaaccccatcaccagaataccacaattaatattctcaggatagattatt

SEQ ID NO: 445376 - DNA, 564 bp, Homo Sapiens
gcggccgcggaggaggagaagctccacaagcctcctgcagactcgggggtggacttgcgggaggtggagcatttcctgaaggctgagcctgagaaaaacggggaggtggttcacaccccggaaacaagtgtctgagtggctgggcggggccggcaggcacagggaggaggtacagaagccggcaacgcttgctatttattttacaaactggactggctcaggcagggccacggctgggctccagctgccggcccagcggatcgtcgcccgatcagtgttttgagggggaaggtggcggggtgggaaccgtgtcattccagagtggatctgcggtgaagccaagccgcaaggttacaaggcatcctcaccaggggccccgcctgctgctcccaggtggcctgcggccactgctatgctcaaggacctggaaacccatgcttcgagacaacgtgactttaatgggagggtgggtgggccgcagacaggctggcagggcaggtgctgcgtggggccctctccagcccgtcctaccctgggctcacatggggcctgtgcccacccctc

SEQ ID NO: 445377 - DNA, 1375 bp, Homo Sapiens
  misc_feature (854)..(907): n is a, c, g, or t
cggtatcgctctcgtattcatatgtcaggttcattggggtcgtgcgtgattttgtcgtttggagttttctcgctgttacgtgtctctctctatgtcctatctgactcgcctaccactacgcgctgtcctgtcttgactcagctacagctgctaagattacgtggctttcaagtgtccctcgtgacgcatgatctacgatgccaaatagtgtagtcgtttgctttatattcttccctgcgttacacgccgctgtgtatagcgttcgatatcggtactggtattttggcgtgcgtggcttgatttgaaagaaagtgagtgaccctcgcggggttgttaaaatgagatgtttcgtttagaaggtagtagagtaattcacttacactgtgtaggacagcgcaagtacttttctttctagtacgatcgacgttcctgctaatatatttctacaccgagtgtttgtgtgcttgtcaacactgtgagagcagcacgttggcaaacgtggtactaatgatgtaccgccgctcagggggggtcgtagtagatactatcgtgtgtggtgtgggtgttgtgggcccacctagaatgtggggctcgccccgccccagatttatagggtgttctgttcgctacacaggagagtccgccccaggtgtgaaccgaggtgtttctccacagtcttgacagttgtgtttaactaatgctgccacgtgtctatagaggtgttataaaatgagcgcgacctataatatttggggcaccaccctttttctgacatgaaatcctgggtagatacgattataatgtgtgggcgcccctctcccggggagaatactttttgatcggccccccccccnnnnnnnnnnnnnnnnnnnnnnnnnnnnnnnnnnnnnnnnnnnnnnnnnnnnnngcactgagtttcagcagagattaaacattttatataaatgactcttaaagctttacaccttgggaccagtgtaccttctcgtgcagaatacatttagatataaaaagacgttattaatacattgcacagttttcaaaatttaaaaacaaaaccgaacgctgctctgcggcagccgccgccggttgctgctacatgaacggtcccagccgaggcccagcgcccttccaacgtccgctgccccggcaggttccctcggggctctttgggctctaaattggctcaccgcagcctcttgcgcggggtctgctccaccgagcccacgccaggggcggcgcttggagagggacacggcgcggggacatcgcccgacgacttctcaggcgctgatctcttgcgcttggcgaagaaatcggagatcagaggcccggacagcttcttgatcgccgcgccgttggcgctggcggccgc

SEQ ID NO: 445378 - DNA, 360 bp, Homo Sapiens
ttttttttaaggtaacaaatttctggtttatttcaaatgtatacatatactcaacacttatagaggtttgctctctggttttactctcatcttgccacatgactataaacaaaaagacatccctttttcattagagatccatctgttctgtgatttttttaccttgtgatttataaaaattaggacctaaatctataatataaacttcttggatgccagtcttactcatagctgacacattttagatcctactggaaaactaagaaatgcctcttatttcaataatccaaaacttaacatactcttagtaaattcttactttgctttattcacagaacacagaccaccagtgcaaaacaa

SEQ ID NO: 445379 - DNA, 543 bp, Homo Sapiens
ttggtgtctgcccgcaccaaaagctgtgtcttctgatttgctgtaggttttaaatgcagagtacctatgcctttctctttaaactcattgtctttcttgtaaaacagtttacactttttggagtaaaaagcatcttcttcttttacttcggtaactactactttgggtggctcatcattctcttcttcatctccaccaaaggctaccttgggatctgccgctgcctttgcactggcgaagggaggggcactggttatgttgtttccattcgacagtccttccaaaggcttccctccagcgccactaccaaatccagaaaagcgtcctcctccagaaggtaccaccaaacctttaaaacctttaaaggctcctccagtgtcagattcaaatccaacatttctgcgctttgctttctttatggctctattcttcaagacttcctcactggccatggagaatgttcccacctcttcagcttcatcttcttgatcccaattcctatctgtcagttccttctcggcatttcttttggccatgttttcg

SEQ ID NO: 445380 - DNA, 943 bp, Homo Sapiens
  misc_feature (45)..(77): n is a, c, g, or t
atgttcgactactataggggactgggttacgggtggcggcgcatnnnnnnnnnnnnnnnnnnnnnnnnnnnnnnnnnatcaggccaaatcggccgagctcgaattcgtcgagagcggagattcgagttacaaaatggccgcccggagtgtgttcggcgcggttcccccagctgtctctggctgaaccggcgctctcgcctccctgccgaacacagcgtgaggagcccccccagggatatggtgtttgagtctctgggcttgccgagcactaagtcctctgagttccgcagcgcagcaccggaagcggccgagcgcgctcagcccggcgacccctgcgggctccagacccctgcgccgctgcgccccgggtttcgccgcaaccaagacccagcgagtgcagcggcggccgccgaggaggttcgaaaacatggccaaaagaaatgccgagaaggaactgacagataggaattgggatcaagaagatgaagctgaagaggtgggaacattctccatggccagtgaggaagtcttgaagaatagagccataaagaaagcaaagcgcagaaatgttggatttgaatctgacactggaggagcctttaaaggttttaaaggtttggtggtaccttctggaggaggacgcttttctggatttggtagtggcgctgggagggaagcctttggaaggactgtcgaatggaaacaacataaccagtgcccctcccttcgccagtgcaaaggcagcggcagatcccaacgtagcctttggttctcttgctgcaaatggccctaccaactggttgataaagtttcaaatccaagaacctactgcgggacagtcagcaggcctcactcctctggacttgcttccagtacagctgtgtcggaaatgcctttcacacgcacgttgggccgctgcaactggtccgtgccgggacatgga

SEQ ID NO: 445381 - DNA, 1140 bp, Homo Sapiens
  misc_feature (622)..(706): n is a, c, g, or t
tgcgaagcctcaatgttttattagtaacacattatttgtaacatagttctcaacaaattaagtcaccacattgtcttccagactgaggttaaagctctcagacatctgtgcctaccacctagactacactaccctctcaagttcctaagggactctctaaccagctcctaagggactgggagaaaactgcaactgcatttcagcacatttatttgagtaaggaagcagtttggtacttccttttggtgtgagaggccacagggcatagtggttaggaacaaggctgtggatcaaacagcggccccaggcccagcccctcttctctgttcctttattagctaagtggccccgggtaagccatataatctttcaaacaatgggattaagattagtacaattactgttaactcacagaaataatagaggaagaaatgcaaagtgcctggctcacaccaagtatttggtaactactagttacttccattcatgtcacctgtcacctccaccctgtggcaagctccttgaggagctttgtcttgttttgtttccttatgcttagcacagtgcttggcacaggattgttctcagtgtaggttgctgaatggatgaatgcttccacctnnnnnnnnnnnnnnnnnnnnnnnnnnnnnnnnnnnnnnnnnnnnnnnnnnnnnnnnnnnnnnnnnnnnnnnnnnnnnnnnnnnnncaaggttctggtctcttgttaactatgttctaatgcgggagaacagacaagtgtgtactgggaaagagggagagaaatagagtaactagagcagaactgagggggccaggaaggctgaggcggtggggtggggggcttgctcttttatatatcacagaaggtctccctgaggaggtaacatttgagcagaggcttaaaggaagtcagagagcaaaccacaggaatattggcagaaggcatgcttcaggcccagggaacagcatgtgcaaaggcccagaagcaggcccacggacggcatttttgaagaaaagaaggcaggtgtagctggaatgatatgagtgaaaggcatatctctttttctattctggtcaaaatgagcacacaacacaattcagaaattgaaaaagatgtattaaaatattcacaaaaataca

SEQ ID NO: 445382 - DNA, 552 bp, Homo Sapiens
  misc_feature (494)..(494): n is a, c, g, or t
  misc_feature (501)..(501): n is a, c, g, or t
  misc_feature (510)..(510): n is a, c, g, or t
cctttctgtacatgaattaaatatattatctgtctctgcactgagtcacacgacgttcacagtaccgtggggaggagtggagggtgggggcctgaggtgggcagggcagggggcctgggtagaaaggcgaggctggcctccccttggcctgtgccattcaggatcagcccagtgttgaggagacctgggggatacagaggggagccttcttcaggggccccggccacccaggcttccagcccccggaggcaagcctctcagcatcagagcctgctcctgttccacgttcctctccctcagatggtggcatctacacctctccctgtcgtggccgccctctggggtggcaggggctgggggaagctggtattgggatcaggtggacagagccacaagggctgggaaggaaggatggggaggctgtgcgagccttcgggagctgaaggtcagcctggcaccagtgtcagggtgactctgcatatctgggtgccgtnccaggancctgaccangcctggctaatcagagcctgggatgataaggtaagcaggaaa

SEQ ID NO: 445383 - DNA, 660 bp, Homo Sapiens
taggtttatttattttattgtttgtttcactgtttgaatgtttatcttgcgagagtctacagaattgagagaaaatatctgcaggctaattttacataacatgaggcaaagattaagcactaaatataaaaaataaaacttttagcttgcttattaaactaggaagaattttcctgaaacacagcagttaaattggtctgcaatgcattaataaatggagaacacggatctcgcctatgaaatattttaaacattgtggacgctaccaaaaagctcattggtatataaaaattttcaagtcacagtcctctaagcagactaaatacaagttagtttttaacctgaattcagaagtgcaaaatctgtaaaaataaaaatatttccattgttctcagcaatctatggattaaccttacaaatccttaaagtcttttcagtaacatgaaccatgatctctgacagttcctgcttaatggcaagtactttgaactgacttctcatcctgagagagaacactgcattcacacatgctcctttgaaattatcttgagagaagaagtccacaagatctcaggcatactcccgataggcagtagcaatgagagtcccacaggcatcacccgatcagacagatgaggaggagaacgagcaacctcagta

SEQ ID NO: 445384 - DNA, 1180 bp, Homo Sapiens
cgctgaccgtggagggttttaattcagaacgagatctctggggtgtggatttggtgaaagatgagaagttttgtggttggctggaaaacaaagactgtgggagagggggggccgggttttacccagttggtaaatttgggttggtttgaaaggggagggggattaaatgggaagaaagagaaaatctttgggcgttataactttgcggattccccgaaggagcgttttcgggtttaagaatattgtttcaattcataggttctttggccccagtattttttccccggaaatgctttttagtccttgttttagaccattaggaaagtcctcatcggttttaaccaaaaatccaggccgaagcgtattcttatctttcaggtttacagttaggtagaaactccaatatagatgacaaaagaggcatctaaccatgtaacggtaatttatctttgatttatccaagcagaaacatcattgtctaacaataaaccattattctactgaaatcagagacaatgataaagcttgtctcttaaaaaacatcaacttttcaactttgatcagatggagcaccaaagggattatatctgtcaaagcatctttgcaattttttccacataactagcataatttagttacctgatataaaataggaaaatatactcaatttttatttaaaagaaagctgaaaatatgacatccctcaatcttatataatatacaatatgctaataaatgccatacatgttaacaatacgtgaaatgctgctgagagttccacaatcagctaattcatgtcaccaggctaagtaaatctgacaatttcacctcaatatgtcaccctttgtaccctgaagaatttatagaataataaagcttctcagaattttatttgtaagatttttgagactgttgaatcatggtgactactagaaagactgtatcaaggtgtagtgacttcaaggacagaaaaaaataaattaagtattgatcataatttcaaaacaatcaatatcccgctaagtatgaaacaaaagagaatgcacattttgtgttaattttcatgataaaagggacacgggtaaaaacctgatatttcacttatattgcataacaagctaaccaaactggacatggtggataaattataaaacaaatcattttacttatttctatgatt

SEQ ID NO: 445385 - DNA, 853 bp, Homo Sapiens
ggatatctgtgttttctgacatgggacctgcagaatagtatttcttttaaatcctgcaactttattatctagtagaattccaagtaggtctgcttagacacatattcagtgaagattgtattgtgtgtgatattatcctatctttaataaagtcctactactgaaaaacagggatttgcaatgaaaatcatagctaaataggcaggtttagaaagttcaaaatattggaagtgctagaaggctgcaacttgtaaaattgtactccccaagttcagtaggatagtagagaagtcgtgctaagttgatttcattgaaatgtcacgtctcacatcctgtggtccaaaggtactagtttgttttgtggaataattttctgttcacttgctgataagaaatttagcagtcagaagtaatttttaattaataacctttctttttaaaagttgctttatggtttacaagtaatactgatgcaaaaaggatttgttaacctaaattaagtagcacgcactttgtttacatgcttcagtatattgtggggttggtcccttctcacgaacccaggacctgtgcttggggaacattttgccatcatgctgttctcttgtaccaaggatcagtgaaagtgttttatcttttttatgtagtttgtattgactggattttataactgtaagaaaacagaaacagagtgttgtattttgatctgaaatttgtgtatgctaaagtaattttgttttatgtattggaagttcacttaaaaacttgaaatattttctagaagggtaccacacaaaaggaatcatctttaagctgtttaattaacctaataaaataatttgatgggaaaaaa

SEQ ID NO: 445386 - DNA, 539 bp, Homo Sapiens
ttttcattagtaactttttattctcaaagtgataaaagcatttaacatatactttacagtataaacaaattaagtactatgcattttgcttataaagtgacaaagtattttaagcattatataattcaatttgtacaaaaagtaaatttccaaatacaagctttggttagtagaactgattatgtactgtcaaatccatttttccaaagttgttcaaggaaaaacaacaacttgactagcacaggtaattcttgtacaatcagagctttttactatttagaaggaggggatatattactataattgctgttaattttcgaatctagataagccttttttcttctcatatgttgctgtaggagagcatatcatcacttttggaaagcaaaaattatgtagaaaatcaccttttgctttattcttaagaaggccatccgttttaaaagtagatctaagactgttagcttccttaactactgagacactttctaaaagtcacactactgaaaagagccgctttaagaattaatgtattcccc

SEQ ID NO: 445387 - DNA, 965 bp, Homo Sapiens
atcggctaggtcgaggcctggtggtgaattcggcacgaggcggggctgtgccggagcagctgtgcagagctgcaggcgcgcgtcatggctgctttgagacagccccaggtcgcggagctgctggccgaggcccggcgagccttccgggaggagttcggggccgagcccgagctggccgtgtcagcgccgggccgcgtcaacctcatcggggaacacacggactacaaccagggcctggtgctgcctatggctctggagctcatgacggtgctggtgggcagcccccgcaaggatgggctggtgtctctcctcaccacctctgagggtgccgatgagccccagcggctgcagtttccactgcccacagcccagcgctcgctggagcctgggactcctcggtgggccaactatgtcaagggagtgattcagtactacccagctgcccccctccctggcttcagtgcagtggtggtcagctcagtgcccctggggggtggcctgtccagctcagcatccttggaagtggccacgtacaccttcctccagcagctctgtccagactcgggcacaatagctgcccgcgcccaggtgtgtcagcaggccgagcacagcttcgcagggatgccctgtggcatcatggaccagttcatctcacttatgggacagaaaggccacgcgctgctcattgactgcaggtccttggagaccagcctggtgccactctcggaccccaagctggccgtgctcatcaccaactctaatgtccgccactccctggcctccagcgagtaccctgtgcggcggcgccaatgtgaagaagtggcccgggcgctgggcaaggaaagcctccgggaggtacaactggaagagctagaggctgccagggacctggtgagcaaagagggcttccggcgggcccggcacgtggtgggggagattcggcgcacggcccaggcagcggccgc

SEQ ID NO: 445388 - DNA, 1336 bp, Homo Sapiens
  misc_feature (405)..(428): n is a, c, g, or t
aggctctttaatgttccaagtcagctgtgcctcacacaaggctctctttttagctactaagtaacatactcaagactttgtatctgtgcagcattttatggaaatcactggtgacctataggatattactaaattatttcaatagctttatttttttcctacttggattctaggtggacattacagagttgaattcctcactaccccctcccgctgtcatttgttttattggaaaacttcatgttaactagagtgtacaaaaagtctgtttcctgctgagccaatagtgatttgtttgcatatcacctaatgtgaaaagtgctcatctgtgaactctatagcaaattatattttagaaaatactttgtgaggccgggcatggtggcagagcgagactccgtctcnnnnnnnnnnnnnnnnnnnnnnnntataaggatgtaaaagaagcaatttgcttgcacatctgaatatccttcttgtgtctccattttcactcttgaaaactgaaagcaatttgacttttatttttgtttttctaaagaacagctaggtgaaaggaggttaagctgattgtcactctgcctgcccactacctactccccaccatggtgtttcatgaaacatccccaccacctgaagtgatctttttaatccttgtgatagtaaatgcattgataattaacaggaaaaacatgtttttaaataatctacaaatgagaacccaaatggtagtgttttgtttgacagaagtaaatcaaatattatggtttaaatataatgcaaaatttcaggacagttaatttgggcttcccttaccctaagagggtttttcttataataaggagaagaggtgtggttcaaagaaaattaagagacaaaaccttcaggtacataatgcatgaaaatctttaaatgcctgcaaaaattaagttctgttataataccagccaattctgaattagccaatgccctaaaagcatctaacaatttaaggttatcttatgagtcctatgaaaacaattatttgttgctaaatttgagttttagctaccaacgccatgtttacgtgacaagaaattgttttggccctgtggtttatgacgtgctgctggataagcatttatgtaaaactgagtatttcaaagagaaccatttacaattggaatttccacctgtgtggctgtttgcagacctacctctgtcttccattttgcatcctgtcagtgctataattagtttgatcactttgtcctgtttttcagtgtctaccaatattagcttaatcactatggttctaactatttaaaaattaatggggcccgggccccggtgggcc

SEQ ID NO: 445389 - DNA, 634 bp, Homo Sapiens
tttcaatttaatgccctttattttctgatgggtgccaagtcacttactacataaactccaacaataccaagttttcagctaattgtttgcttaaagaatcacagaacttacattcaagatttcatttacatacaaaattccacttgaggttttctggttgaaactttcaatagctttaagaattatattctctaatttttaaatcacttgcagtttaagctcatttgagaaacttttttctccttcagaggtaccgtattcatttatcacagcaaaaacgcaccctttaaaggtttgtttttggttatggttgctgtttgttcccttatgtttgtttgtatgcttgttttttaagtatgatactgagggcagaaacaatctgaattccatattcgggttcacagggtatatatattttttctgttagatacacactccttaatcactgccaggaagtgtactcttgatcatttagaaataagaaagtgtaggggacttaaacaaaatctatcattgctattgaacaaaacagttgaatcagcatgttctgctttcaacaggaaagtggtttataactactccaagtgactgttttagtcaattcagactgcttcaacagaaaaccacagactcc

SEQ ID NO: 445390 - DNA, 609 bp, Homo Sapiens
aaagttaaaagtgaaatttattacaatacaataaatgcaagtgtcattattaaaaatgccggttaaaattataaagtatctaaataatttttctaatataaatattggaaatgacaactttaacaattctatatgtacacaggacactgaaaacataaaatcatgaacaaggccaaaaaataacgttgcacattaaccctttagttattactttctattttccagtcccagcatcatacctgctaattactcagatcacaagcctcaaggattaagtgttttgaatgtatttcagtttcatactttaacaatgcttaaagactattggttgtattctgatcaaatggttctccttcccatatttccctttctcaatagatcttagacaaaaaggtgagcagggaaaactgtgattacaggatccaacatgacaggtatacccaatgattcatttaagggtggcataaagttatatagaaaagacctacaggacggaagacaagtacatcaacatgtagtgaaattaagcagttcacccactgcgtgcttacatggctcctatatctcttcgggaagaagccagagccgtagagaagtcagggcaaacca

SEQ ID NO: 445391 - DNA, 459 bp, Homo Sapiens
aggtgtttttctggcgcactctctgcctttcccacttgtggtcagttcaagcccccaccagccacacatgggctaatggtgctaagtggcatccccactcctctttccagaaagctgcttgtttgggcaagaagagagatgccccgtgatgccgaagagcaagttatggtggaggcctgagcatgagagctctggtcacaccacgccgaggaccggacggtgcccttgcttcctgtgagtggtctcttcgctttctggctggaacgataaccccaggggttgtgaggacagaacctccacctgccatccccatgggcaccgctggtctccagagcacgtcaaggtccttcccctcccagcttctgatcttggagagcgaggcctctcatgctcacatgcatgtgtttaggtgtatatgctgccatgccatgctttaaaaataaaaagtgttttgaataa

SEQ ID NO: 445392 - DNA, 750 bp, Homo Sapiens
tttttaaatgattccaatgttttagtaaataatgtgaaaatatatactcctgaagaactgtgaaatatcatactcaactactttacatgccaaacagatattaaactgaaagtacccattaccctccccagttatatcctagctcctggaaagttatatccttagtgaaagggagagaaatgttgatgccaacaagcatttccatgaacccagctgtcagggaatacagttagatataaatactatatctagacttttgatgattgctcatatcttattttaaatcatctttgtgtttatagcatgagaaaaaataattcttaagggtaataagaaaataaacagaaaattatttttacataccagtataaataattagccagtgttgagtttttgcaggctctcgatatcaagaaggtacagagatcttgttccagattttcgccatctggaacttcttttgtttttgatgcaggaggaggtgaagagactgaaggaagggggctggttataatttgggagctgaaaaagtaataaaagagatcactgagatgtaaaatactctgtccataagagaacgcacaattttttatggaacagttcacttcaattgtgtctagttaatgcaacacttcctaaagtgtgttctgtgcaacactagagtcacattgtactctggaaaaagcgcatggtcaaagattatgggtaatgcctcttgggagatttatgtgcaagtctgcacctcgtgcc

SEQ ID NO: 445393 - DNA, 620 bp, Homo Sapiens
  misc_feature (512)..(512): n is a, c, g, or t
tcaccatcagtatcatttttattgcaaatcagttaacaaaagggatgaaaaaaatacatcatctacagttcctcatgtagatcacttttaaagtctttttctgtaaactacactctattttataaaacacagtaaaaatcaacatcttgggacgcatctggtcatgccccctggggatggcaccacgcggcccccgtagagccgggggaggctgccctgaggagtgcaggcggcacggcagcggagcgtccccagtgcatgggcggctaaggctccccgagctgagccgagtctgacgtccctcactggcatgacacacaacagactcattcattaagattttttaaacaaaatccacctttaaaaacatatttacagacattttttctgccataggctatacttggtattgcaaaaatctgctcctcccaaactaggaggggtggcccaagggcagcccccgcctccctccagcccctgcccgaccgcatgccccctgccagggctgcggngacaggaccaaaggacgcagcccacggcgttgcacagctcaatgtgcccggctctggcaagtctcctacaaaacacgggagccccacgggggtcgggtcccgcgagct

SEQ ID NO: 445394 - DNA, 722 bp, Homo Sapiens
tttttagcagctccttccaatttattaatatagcatggtacataagggaggggggattctctgatagaaaagtggaaagccactgtaaagcaaacataaaaaacgcttttaaatgtacaaataatgctcaactttatttattgaattagttagggctaagctaggctatgctgccataataacaaaacacaactaatgcagtcgtttgacacaataaaatcttaccactcatgctgtctgatgcggttgagcagctttcacccatcttgtattaatagctatgctatctggatcactggcttccacagttgtgggaagtgtggaggaggcataccaactgttgtttttcttggagggaagtaatatgaccccaacctaaatgcatgagaggccaggaaaacaatgtagtttagttgtgttttcagggggagaaaaagctatggtatgcacatagctttgcctctgccacactcagaatgcaaaataaaagtagagaaaattggttcaacttttatggaagacaatttggcaatatctataaaaaattatatacatacaatttttaactctgccattctacttctaagaatttattctacagatgaataaagatgtatgcacacatttttctttttgtaatagcaacagattggaagaaatttaaatgtccatcaggagggtccacatccaatgaatcatggtacatccacatgatgggatac

SEQ ID NO: 445395 - DNA, 895 bp, Homo Sapiens
  misc_feature (70)..(88): n is a, c, g, or t
agcggacgagccaggacatgtgctaataatgccataagccggttataaagacgtgggaattgaggggagnnnnnnnnnnnnnnnnnnngggtctgtccttcctgggattcctagccgaggccagtctgctgccgtgtgcgtgtgcgtcagggctctccgggcggcaatgggggcttgagagccgggtccccagcgccgggaagggagcgcggtggccgccaccgccaccgccccggagtccggcgccgaagctgcgggcgggcgggcgggcaccagctcggtcaggggctgcttggcgcggcactgtgcggtgcagcggcggcgcggcgcggtgcgggcttttcccaggcgccccggggtcgggtggccaacggcgcggccgcgggcgctgagcgcgaccggttcgcggtagcggtggcggcggcgtgcgtgccaggggctgggggctccgccgcctctcttgcggctcaccgagctccgcgcttccctctctccagggcaggcggcttctcagagcacaacagctccagctggcagcatcacttcccgccaatttatccaacttctgccaaggctctgaaatgccaacaacgtcgaggcctgcacttgatgtcaagggtggcacctcacctgcgaaggaggatgccaaccaagagatgagctccgtggcctactccaaccttgcggtgaaagatcgcaaagcagtggccattctgcactaccctggggtagcctcaaatggaaccaaggccagtggggctcccactagttcctcgggatctccaataggctctcctacaccacccctcccactaaacccccatccttcaacctgcaccccgcccctcacttgctggctagtatgcagctgcagaaacttaatagccagtatcag

SEQ ID NO: 445396 - DNA, 857 bp, Homo Sapiens
gtttgaaccggtctctttgtaagtaactttatttttatttacaacagaattggtggctttattcctccatctttagggacacttggcattagcagctagatggaaagtccgcagtgaagtcaaactcattctgccccagccacagctccggaagctcattggctcggtccaaccccagttccaccaccagcgacatcagcacttcctcatccactgggtccgaatcgatgatagcagggctctgggcaccagcagaaggagagagtgattctgcccctcccgcctgggccccaaagtcccagttttgcaggggtcctgcctccccgggttggcctggagtggcagcagccatcccctgatactggctattaagtttctgcagctgcatactagccagcaagtgaggggcggggtgcaggttgaaggatgggggtttagtgggaggggtggttgtaggagagcctattggagatcccgaggaactagtgggagccccactggccttggttccatttgaggctaccccagggtagtgcagaatggccactgctttgcgatctttcaccgcaaggttggagtaggccacggagctcatctcttggttggcatcctccttcgcaggtgaggtgccacccttgacatcaagtgcaggcctcgacgttgttggcatttcagagccttggcagaagttggataaattggcgggaagtgatgctgccagctggagctgttgtgggagggcccgcgcgggtgctgtgccgtccgctgctctcttcctcctcaccgagaacagcccctcgccggcggactacaagagggcagccgggcagagcgagcttcctctcggcagctcagcg

SEQ ID NO: 445397 - DNA, 467 bp, Homo Sapiens
tttttattttcaatcaaatttctttttaatgaaaactaatttttaagggcaagataccacagcagaagaaaaacgtcttgcaagaaaagacttcatggtttacaacgatcaaatgtatgggctatttgcctgattggtggcctggactcagcaagagattcctttgcagcagaggttggccacacatctgggggctgcaacaccactgaaaagacagctttctaagcattagtgtaaggcaaaaagcagagtgcctaaacttggccatttccaccaagaaaaaaagtttcatagcaaccttccttcaccagaaaggcttactttatgatatgctaacagaacagaaaagcaggttgggacaagatacagactttgttgcatttagctatgacccttctctcccctctgtggatgtgggcagggtggggagaggcaggaagaggcagtagagggaaatgacatttgca

SEQ ID NO: 445398 - DNA, 1067 bp, Homo Sapiens
  misc_feature (41)..(49): n is a, c, g, or t
cccaatgtttattttttaataaagcaataattcaaaacaannnnnnnnnctactcattcgaaaggtcataactcaggagtgctgtttataccagatgaatctacaaagccaagaacaggaatcaccgtatctccttcagtagacctgatactgtgagtcttctctttttctgttgacatatttgtgcaacatgctgtagtactggcccttcggattgaaagtatacagtgatgaaatttgctgccactctttcatgcttggagtgttatattcttttggatgcgagccctcaaagaaacatttaatattctcttttgccaattcagttgcatgctctgtggctttacttttaaggatctgctgctcctgttccaaatagattttccagaatttcagctgcagaaaactaactggagataggcatcgggtgacagatgtaaaaatcagaagaatgatgataacaactgctatcaagatccagcccaacacctgcgactgagccttcagatccttcaggaggtcctgcacgtccgacgccttggcctggttgcacggcaccagcggcagctccgcggcgcagctgcggttgcggccgaggcacaggcgctgcgcgaaggccgcgctcccggtggccgcgcactcgtaaaaggcgcccccgagcagcgccacggccacccaggtgaggggcgcgagcgcggcggccgcgctgatttgcgcgcacaccagggagccgcgcagcgccgatccgcaactcgcgcgggcgctggagcagcatccggtgagcaggcgccacgtgcgtgcgctcagcacgtagcccaggaggaagagcgcgagcgccggcaccagcaagaagaccaggccgtagggcaggttccaggcggcgctgcacgggcactggaatgccacggcggagaagatgcgctccccgcccgccgtcagcagggtcaccaggccgtagcccaaggcgctgtggtgcttgacgtgcaggtccagcaccgcccgaaacttctccatgagcctcgtcccccggggcgtcgcgcacaggcccagatccttctgcctcttcg

SEQ ID NO: 445399 - DNA, 488 bp, Homo Sapiens
tttatgcagctaaatttattctcacaacaaattacatttaaatgtgtaaaagtggtcaacaggaaaagggcataaaggaaaacaaagcgttctttcaggggaagtaagctgctctggaggccaggaactactgcttgcgttgacacggtgtgagtgggtatctttgccctgaagctgaagttaaactttctactggccgtgtggcacacacgttagatgtgtattaggttaagcctggccaactagagagcgaaggggcttattagttaaattgtgctaatatcagttaggaaaatgcttgtcatgttgtggtgaaatcttgaggagtttgtgttgcaatgcctgggacatgaacgggccatacaaacagaggaaagctctggggcttccaggcaatggccttgtgtcgagtcatcttacaagtgtccatcttgaaatcataaagtggatttaaaaagaagtagcagtgccacagtttatcaccaaga

SEQ ID NO: 445400 - DNA, 530 bp, Homo Sapiens
ttaataggttctcaataaatgtttattccttttcctttctgctgcatttcaagaggttttgaaacaatggaaaagagcagaggtagttagcttgatgaaggggagagcatggtggaaaggatgttccaggttaggtgaggtgtctgcttgatggaaggagccagtaacaagggtgacttggagctttcaattccctgagaatgaatgctgtgttgataaggactgtagcagggttgaggaagtacccttggaaagaagaaagaggagcacacctctgccatcagcaaaaaggccagaggaggtgagagctatgtggagggagagaaagggaatctggcctgtgcttaactgacgtgagagccagactttgaactccagtggcttcatttaccactcatgtcatcttgggccaactgagatcacttttctaagcctctgcttcactggaatgttgtgaggcctaaatgagaagcatagagcctggcctgtggacatgtttttagtattggtggggagctgcacacctggtg

SEQ ID NO: 445401 - DNA, 534 bp, Homo Sapiens
gagcttccaaaataacttttattactatataaaagaagtcaagaaaaaatagatgcatatttttcctacaaaattataaaatattcaggatagttaatattttttccataaatgcgctaagataaaaagatagaaatctttttcacttaaggttttcgagtaccttgtaggaattaaagaataataatgttctttcttctacattttcctaaagacatagcagttacagtttcctgctggagttatctaaaaaaggacataccaagataaattttctatcatattgaaataaaattagcataaagctttacttctgtctttgtgcttttagattggcaactgtggtcaatcagtgctgcactggaatttccaactcagcaggggaaagaatctaattaaaaatgacacacactctgtattttgtcctttagaaaacagaaactgcttgtcgatatcccttaaaaagtgcaattgccttctttgtcatttctttgtaaagtctgagatgttgtttctaaacagcacagcttacat

SEQ ID NO: 445402 - DNA, 631 bp, Homo Sapiens
  misc_feature (466)..(502): n is a, c, g, or t
caagttttcagttttaagacaagttctgggaatctaatgtacaacatgttgactatagctaataattctgtattgtttacttgaagtttgctaagacaaatttgcttaagtgcccccccaccgaactactacataaattagtgaaggatgttttacttaatttgattttggtaatcattacacaatgtataattatatccagtcatcacattgtacaccttgaatatatataattttttgtcaaataataaagctgggaagaaaacgataaaactgacaatctaacatatatgatgaggtaaaaagatctggtatttcaagaaatttggatgacctcttgcaccccacttcgctagcctctactccctagagtcatgttctgactatgtgaagttgagcaacttccttaatcttgccacgcttcagttcttatctgtaaaatatgataatgaaacgatttgagaannnnnnnnnnnnnnnnnnnnnnnnnnnnnnnnnnnnnaaaccccctgcaaagaataaagtcttttctttccccccaaaacttgagtgttagaattcattctctctggtttctctcttttactatgctaaaaaatgatccaggtccgtccttctcattggcaagatt

SEQ ID NO: 445403 - DNA, 545 bp, Homo Sapiens
agatttatattcattttatttatattcatttaggcacttattaagataaacacataatttgagtctaatatgctcagtgcaaaaactagtttcatgaaagatgctagaattgtgacataatcagaaccaaagcagggaggggagattttgtatggttctctgctgtccagaataaagtctacattcctgtcattggcccaacaggcctccaacatctggcaccaagccaggaactatcacttctgatactgacttgaattacactcatctgacattccatataatattccattcctgctttccttttcataaggatatgttttcactctccaaatagactgcaggatccttaggagcagggaaaaatatagtgggaaggccgtgaggaagggagcaggattgtaatgccagtggggtcacaaccagcctcacacagagggtgttatttaaagaagtgaggcagcaacacttaaatctagaagctgagttgcccacacaaagggaactgtcaatatatagtccctgaaagatacatacttacagca

SEQ ID NO: 445404 - DNA, 756 bp, Homo Sapiens
  misc_feature (142)..(159): n is a, c, g, or t
gtgggtgggggatttcccacccccctttttttcctggccccggggttttttctgtgggaaaaaagctatagggcccacttttcccttttcccttaggggggcccggggggtccaaaaggaaatgttttgaaaaatttttttnnnnnnnnnnnnnnnnnnccacaaaaaaaatattgttattgttgatgtttcgtacggggggtgtttatcttcttgcagcatggtcccgttgtgcatattgttgctttgtgttaatgtttcttgagtttgtgttcggttttctttagttttgcttttaatgaaggacaagggattaagacacacagagactggccagacaaatgggaaaccgaccagaccagcccatgaccaaaatatcacaggcagaccacccgcaaatgcagaggcctcagagtccacagtgggcggttggaaccaggccccagggaatctttcagctgcattccggctgtgatcggcgggcaacaggtagaggtgctggagggggatgagtcgtgattttcagtgtctgtcatattcgatcaagtgtgtcatagagcttcctgtttcatctcccagttattcagggagaggctggtggctccaccttcccaggaactgtgctgtgaagatctgaagacaggcacgggctcaggcaccgcttgtctggaatgtcaatttgaaacttaaaaagcagcgaccatccagtcatttatttccctccattcccaatgatgtacacacgactaagaaccc

SEQ ID NO: 445405 - DNA, 543 bp, Homo Sapiens
ggcagttttgatccatgtttaatgaaaaagaagttacatgaatagaaatggacatataacaaagagttcaatttgagaaaatgtggtgataggtagaacaaggagaaattgtttcaattctgaatttactcgcatattcctattagctgttactgatctaaaacatctccttaaatccaaaacaaaacaatagttacaagttcactgatgttttcatgggcactcacccaagtaatgtccaaacaatatttttccatgtcccccctcccccagaacacacacaggcaaaggcagagatgtttactgtgaggtcacatggcatgaagcaaatgcagccttatctgtttattattacaacagccagttagcattggcaaatgtgctttggttacaaacatggtttctgctaataatttcatgaagaagcttttaggatatgtgaccatttattcttagtataatcaatcattgaaggataaaaatcagagtataaaagtttatactctggcaaatataaatacatgcacagaagtttctgacagt

SEQ ID NO: 445406 - DNA, 511 bp, Homo Sapiens
aaaatagctttggactttatttaaatgtatccattccaggagcataggattggaagaagcccaggccccaagaagttgtgactgtcccctgggcttcctagggcaccaggcattgaagcatgtcctggtggccgggagtggctggggcaaagggcggtgaaaagggtggctatagggagtttagggtgaggacccacccccgggcctagagggccacagttcgcaggctcattggaggatttttcctccgggcagcttttctgcacctccagaccactttcccgatgatgtccaccacaaggccgactcccgcttccacttggacagcccagtagagcacctcgggggcttcttcagcctggtctgggagcagtcggcttttcggcaggttttagaggtaaggggtctcaggagaggggcactttagttttgctcggctttgggtgaagtttttggaggtagtcttgcggcccactggttccagcatgttgtttcagagtgcgatggccat

SEQ ID NO: 445407 - DNA, 424 bp, Homo Sapiens
tttttgctgctcacactttattaagatgcaccaggagccccacgggcccactatggaatgtaggtgaggggtccacggccccgcctggagcaccaggaccagtggggccacctccaggatgccaagacccggctcctccagcgccaacctgttttccaggaggctgggggccacaggctggctcccgtgtgaacactgctttggagaatacgtaaatataaaaagtgctggaggcccctcccacccctgccctgggttccgcagccagcacgtggccacccctcccagggggggtccggaggccctgaagccacctgagctagggccttccagaaacagggttccgggggctccaggcacctgtccctccctccctcctcccagcatggggcagagcaccgaggctggtggtgggaaaggcagc

SEQ ID NO: 445408 - DNA, 451 bp, Homo Sapiens
  misc_feature (50)..(50): n is a, c, g, or t
  misc_feature (317)..(317): n is a, c, g, or t
  misc_feature (383)..(383): n is a, c, g, or t
  misc_feature (392)..(392): n is a, c, g, or t
  misc_feature (431)..(431): n is a, c, g, or t
  misc_feature (438)..(438): n is a, c, g, or t
caaggttgctgctcacactttattaagatgcaccaggagccccacgggcncactatggaatgtaggtgaggggtccacggccccgcctggagcaccaggaccagtggggccacctccaggatgccaagacccggctcctccagcgccaacctgttttccaggaggctgggggccacaggctggctcccgtgtgaacactgctttggagaatacgtaaatataaaaagtgctggaggcccctcccacccctgccctgggttccgcagccagcacgtggccacccttcccaggggggttccggagccctgaaagccacntgagccagggcttttccagaaacagggttccgggggttccagggcactttttccctcctttccttntttcccagnatgggggcagagcaccgaggttggtggtgggaaaggcanttttggnttgcggcattttt

SEQ ID NO: 445409 - DNA, 752 bp, Homo Sapiens
  misc_feature (659)..(695): n is a, c, g, or t
ttttttttagtagcgcagttttattttctgtagtaacaaacatttaagaaccagataaaacatgaggccctcccaggaaagtagcaactgtgggaattcctgccctagggaaggatggacgcactgcctacaaggagacgcaaagtgggacctcgctccatttgcccaggccaggcttagcgggaaacggggggcccaaagcgctgcatggtccgcaccaccagggaaagctggtcaagaaagttgatgacggaaattcggagcaggcgacagtcttcagctttccagcggacgaccaggatcctgccactcactgtgagatccttcccaaccaccctttggtggggctcggcatctggtgccagggacccatgggcgatttccgcctccaagggggtcgggaaaggcacgctgagggtgaatatgtgcggccgcattcgtgaccccctggccgcagacgcggcgtctctgcccggacctggcgcgtgcgctgggggagctccaccggccggagctgcggctgtgtccacgcccccgcggcagctgtggccaccccggccatccccgccgtcagcgcctccgcctgcgtctgcatccgcgtcccgcatgaccgccgccccgctctcgacgaattcgagctcggccgatttggcctgatnnnnnnnnnnnnnnnnnnnnnnnnnnnnnnnnnnnnncgccgccccgcggtgaactccagttcgcccatagatcaatacacgtcgtttctcctc

SEQ ID NO: 445410 - DNA, 471 bp, Homo Sapiens
  misc_feature (458)..(458): n is a, c, g, or t
aatagtagctcagttttattttctgtggtaacaaacatttaagaaccagagaaaacaagggacccctgagcacacaaaggcagtacaggccgaccatgaggccctcccgggaaagtagcaactgtgggaattccctgccctagggaggatggatgcactgcctaggaggagacgcaaggttagacctcgccccattttcccaggccaggcttagcgggaaactgggggcccaaagtgctgcagggtccgcaccaccagagaaagatggtcgagaaagttgataagggaaattcggagcaggcaacagtcttcagctttccagcggacggccaggatcctgccgctcactgtgagatccttcccaaccaccctttggtggggttcggcatctggagccagggacccatgggcaatttccacctctaagggggtcgggaaaggcacgctgagggtgaatnatgtgcggtacca

SEQ ID NO: 445411 - DNA, 467 bp, Homo Sapiens
  misc_feature (363)..(385): n is a, c, g, or t
tttgttaaggaccagatatagcctttaattcctaatgttcaaaaacaatcctgtcttctaaatcacaacttttcgagttacaagatttatccacttcaaataaggataccttttataaagtactttcttgtggttttacagatttcaaggtgcttctacgtggcttcagcaattctcacaacaaaccctcagtgggtcagggtcttctaagattaaaatgttaacaccaatgcgtgtgaagtacagtgaagtacagtgaggttaaggctcagtggcaaacgttaaagaggcccacacaacacaccagggatcagagccaggtcaaattcttgctccccacctccaccccacctcaagaagaannnnnnnnnnnnnnnnnnnnnnnagaaacagtctcactccggtcacccaggctggaggcatgtcacgatcacagcttactgaacttaaccctgtgtgacccttga

SEQ ID NO: 445412 - DNA, 629 bp, Homo Sapiens
atggaagacgcagctactgtgaaataataaacattcatttttattgtgatttctaaagcctgtagctttggatcttgaaagtaaatgggcttggcttctgcattttccctgcagtttttggcagggcttcctgcacggaagatggagggctctgaaatagaattctgagtttggagaaccaattagagggaggacacgtaacaggcaccggggcacaagatggcagcaccctcggctcgtcttcacgacagaaggaaagaaggtgacttacccgaggtgccggaggatggaggcgtcttctccaaagccaggaagtgaaaatgacgtccctgggcccagccggtcacccgggtgggggaggagggcaggtcccgccggccagcaggctgcccggtgccagccccagctatgggcccacgggccccctagtctctggccgccgccgtccctcggtccagtgggcccggctgggcctcggccaccccggcacagggggcagggctgccaggagccatgtggtgctgggggaaggccccgctgccagccccggagtacgaggaaaatgctacttttgtctcctgctctcatctggcactggctgcccggggagggggggcagaggcggccgc

SEQ ID NO: 445413 - DNA, 768 bp, Homo Sapiens
  misc_feature (547)..(547): n is a, c, g, or t
  misc_feature (613)..(613): n is a, c, g, or t
  misc_feature (647)..(647): n is a, c, g, or t
  misc_feature (695)..(695): n is a, c, g, or t
  misc_feature (740)..(740): n is a, c, g, or t
  misc_feature (756)..(756): n is a, c, g, or t
tatatacatatatgactttaattttataagtgcatgtgtatacgcacacctttagctcatttaaataaaaagctatccaatgttttatgtccattatgtcccccgttaacattgagcaaaatgttaacccctactatatatgcaagggaaataaattaagttgttatatagaaacccttgacactatatgcaatttcttatgtcccatattctgataatatctgtcctcttggctcttacttcttggaatttctcataaacacggaagcttcatgacaaattgtgtaaatcatcatttcctcctttatgaagtatattgaagacaaaagggattaaagtcatttcacatttagcaaagctattttatggcaacattgttacaacacaaaatagacattgcagtttacaattaacaattacacagtgatttcataacaatactacttactccaattaacaaaatatttctttataaaaaatatgttcaaaaggaggtttacattcacttcttcgtttaatatcaaggttgttaacaatggtcttaggngatgcaaagacgaaaaactacttaccttaaaaatctgtattcttgaaggtatatactccacttgantaaggtactgctcaaggtttagggcttcctgggngaactccgaggggttttgtggttgtactttaatatactccatagcccnatttccctaaacctttccataattttgcctacccgggggcccttnaccaaggttttaaggncaccccgggggt

SEQ ID NO: 445414 - DNA, 619 bp, Homo Sapiens
tcactcttccttacgtgtcgtgatggtacgtgggtttacattccctcgatttggattatctttcttttctttcctatgctttctcttctctttcatgatatccttggtgtcctgcagcatcttctccttccaaagatcaaagaagtatgaagggtctgtgtagaatttgagtgcctcttttccatcgtccctgtaaggggtaagattgttgagagggggaggagtatcacaggtattgtatgtttctaagacaggcactgggagagagtttctgtcaaaaagcttctggtcttgaatggtggaacttctgaaggcttttcgggtgttgattccttgcagtgacacttcttcttccttgggatccagctgagtgactttaacctgtagtcggtcgaccctctcagcaagggagcttacccgagaggcaaaggtatttgcctgagtaaagagctctccaaaaatgtcctctgcatatttactcaggctgcccagctgtcggatgacatttgccagggtgatgttggtcacgcattccagctcgcttctaacgctaggcaacgtctgacggcacaggtgccttggctcgatgttcctcgttactaacggcatggtggacctg

SEQ ID NO: 445415 - DNA, 969 bp, Homo Sapiens
  misc_feature (800)..(864): n is a, c, g, or t
taagatttaacaaagggattttattacctacaacaagtaaggaggacagctggggcagtttcccaaagcagtacctcccaaacaatggtgaaaacagctttcgttaggctagttggctgagccattgtatgcggaggcagagtaaaggcagagactgtgaagtagctgatcatgcttctccatatgtcacatgtgtaggaaatggcagataagctccttcctgggtggggtttttagtatggtaatgaggaaagtttgcaaggttcatctccaactcaggcatctctggactcaaccagtttttgttcatctagagctgagcttcactctggaactttctgggcagcagaggagagcagagcaaagatggcttcaaaaaaggagccaaagaaagagctgggtcttcacagaggaattcttcacttttatcctggttcagaccagccagatggtcggcattgccatagacatgaatatatattagcaccaggtgctcctgccacgtcttcctctgtggctcaggagacaccgagcagtaagctgtgctggcgaccctgtgttcggcctctcaggagcacggaggagcctctccctgcaatctttgatgaaataattgcttctgctgttatttttcactattacttcagaaatgttctctctctctcttcctttcttgtccctatagcgaggtgccctgctgttgtgcagatgaaaggtccagtctctttaaaatttcatgcagagctcttcacaacattgaagctttaaaggcccatggcaaattcaacatattgttacannnnnnnnnnnnnnnnnnnnnnnnnnnnnnnnnnnnnnnnnnnnnnnnnnnnnnnnnnnnnnnnnaaaagagaccatttcttgatgggaagagcaacaatatcatgttacaaaggggtgtggatacagggaggcattgattcactgggagctgttatgatgatgatctac

SEQ ID NO: 445416 - DNA, 585 bp, Homo Sapiens
ttaaccactctatatttattcattatagaacacacttttcttcccagaaagaaaacaaacagtctgaggtatcccacattaataaatcccattctgtggctttacatcctgaatttctgttattaatcaaggttcagtatcattatacacagtgattaaaatttttccctgagatcatcaaggctgtgcctttgacatagaaataccttaccctaccaaaattcaggagaaagcatagaaaactaaaagtctttttggtggtagaaaaggcagacaacttaggcagaattcctgagaaaaaggtgcagagtcattaagccaccagttaaattttacctggctgtgaactgttatcccttctacatttctaaatattctgggaggaaaattcatcttattgcatagaaagatactttttcacaaggctatgcacaaagcatctttgcttttgctagctgccacagccatcttgacgcctcagtttccagtaaaatgcaaagcttgagaggtacaggcagcctttcccccagtgacatatggaaaagagaaatcatccatttcctcatggatgatgaggaaaaatgt

SEQ ID NO: 445417 - DNA, 1110 bp, Homo Sapiens
aaagagtcataaaagtttattatatgaaagaaataacatggcttctgtacatctatttacagaacagagacttatttacagtgagatggaggccttggtgttggtgagggacagacagagagtgaggaggcgtgagcagcctgcctcccatggctcgaaaacagggaaccccagcaggaaggggagcagcaaaagctggtgggggaaccggcgttcctgttcttcctcaatggagacctggtgagcatgtagcaggtgggatggaacccagagtccactgcaggaccctggaggtgcaatgggagatgcttgagttgaagcccagaacattctcgggttgatcacagtgtccttggggtgctctggggaaagttgtgtgcccctctgcccctgacgctgtccgcagctgcagaggggaaatgtccctggggtcacagctcgctggcagcggacagcaggttccagcttgtgggacagggcagtgaggaccttgtcgaacttctcatagctgccgtggcctggctgctgctggcaccctgtactgccccagagaaggcgcatctggaactccgtgctgatcacctccgggagctccggccgggcctggaacccctgcagcttgacttcagcattggtgtggtacaggcctccgtggtgtgccactgtgcgggcgtgcctccaggtgagccagcaccgaacgtcctacgccgtgctccgtgctgccccagggctcacggccctctggtggggccgagtcacactccagcagggtgatgagtgggcaggacatgaggaaacgtggtgttgctcaggcggtgggaccttcttaaggcccctcgatggagagctcctcgagaaaaaggcttgtagcttcttcctcagtacaaggatggcacaccctcagtagtgtcagctcgcaggaagggatcaacccattgtattgctccagtcggagaaaatcttgggccaagttccagggccaccagatgaaccgccgggatagtgcaccatagtttgacacatgttccaccgaaagttcggcgccaacggaagtggcttgttcgaaccaggacatgccagtacacccgaaaagacggtgagacggggagc

SEQ ID NO: 445418 - DNA, 491 bp, Homo Sapiens
  misc_feature (165)..(175): n is a, c, g, or t
tccttgtcttttccttcttcttctccccaccctctccttccaagggctgaagaagttgggcattcaggcagctgacctgattcaaagcccagctccatacctcactagctgtgcaactctgaactagtgaagtctgttcttgaaacagaaactcactttctgcannnnnnnnnnnaccttgctatgatggtccccttctgccagggccaatttgaggtttcagtgtttgtgcctgaaccatcgtaggtgcttcatgaatgccagatccctttccttcatcatcatgctctgggacctttctgtcccctctcctgtccctcccctatcctcaaacaccatcttcttttcttttccctctacctcttgtcctcacgatccctcagctcccccaccccacccaggaggcagggctaagtaaggccccatcactgagtcctgggcccagagagaaggctctgggcactaagtatgttggttgcctgtgcagcagt

SEQ ID NO: 445419 - DNA, 508 bp, Homo Sapiens
ggagatagagggtttacagggtttttgagaaggactttgtataaaacttaatggtttaaaaaaatattttgcaaaagtctactttcccccaagttttaagcctgataaggaaattaataaattcaagacaaagagtatagtcaaagtttaaaccataaatcccatcaggattttatgcaaaatgtaaatgagttccaggtctttaagggatttgttcagaatgtgacaacttaacaatgctggtcacaaaataatgtctaactttctcttgcgtgtggtccaacattagcaataaacttaccaaaccttcaaaatctgaattaaaaaagaccacttttcctgaattttaaaaaatgatgggaaacactgtttctccttttgaaaaagcaacttatattaactaagtcacaattctttattcccaaagcaattgggaacctaaaatgtgttcgtattatcatcaatagagccatcttagtactaaagacaagagactagcatatagaat

SEQ ID NO: 445420 - DNA, 1168 bp, Homo Sapiens
  misc_feature (501)..(531): n is a, c, g, or t
tccctcttgaaggcgagggttcgggccacagtgagcgaggccagcaggtgggcgcgcgcagagggaaaccggatcagttgagagagaatcaagagtagcggatgaggcgcttgtggggcgcggcccggaagccctcgggcgcgggctgggagaaggagtgggcggaggcgccgcaggaggctcccggggcctggtcgggccggctgggccccgggcgcagtggaagaaagggacgggcggtgcccggttgggcgtcctggccagctcaccttgcctggcggctcgccccgcccggcacttgggaggagcagggcagggcccgcggcctttgcattctgggaccgcccccttccattcccgggccagcggcgagcggcagcgacggctggagccgcagctacagcatgagagccggtgccgctcctccacgcctgcggacgcgtggcgagcggaggcagcgctgcctgttcgcgccatgggggcaccgtggggctcgccgannnnnnnnnnnnnnnnnnnnnnnnnnnnnnnccgaggccggaggctgccatggaccgtctgtgtgctggcggccgccggcttgacgtgtacggcgctgatcacctacgcttgctgggggcagctgccgccgctgccctgggcgtcgccaaccccgtcgcgaccggtgggcgtgctgctgtggtgggagcccttcggggggcgcgatagcgccccgaggccgccccctgactgccggctgcgcttcaacatcagcggctgccgcctgctcaccgaccgcgcgtcctacggagaggctcaggccgtgcttttccaccaccgcgacctcgtgaaggggccccccgactggcccccgccctggggcatccaggcgcacactgccgaggaggtggatctgcgcgtgttggactacgaggaggcagcggcggcggcagaagccctggcgacctccagccccaggcccccgggccagcgctgggtttggatgaacttcgagtcgccctcgcactccccggggctgcgaagcctggcaagtaacctcttcaactggacgctctcctaccgggcggactcggacgtctttgtgccttatggctacctctaccccagaagccaccccggcgacccgccctcaggcctggccccgccactgtccaggaaacaggggctg

SEQ ID NO: 445421 - DNA, 559 bp, Homo Sapiens
  misc_feature (40)..(40): n is a, c, g, or t
  misc_feature (520)..(520): n is a, c, g, or t
  misc_feature (526)..(526): n is a, c, g, or t
caatggaaatattggatttttactgagtagcgctactctngctacccggtgcgcatgcttctacctgggcggcacccgggttactgcgcctgcggttctccccatatcgccaggtccgctccgcgagggcgagcgcgcgccatgtcccactccgtgcgccgctctctgatgtccccgcggtcgaagacggtcacatacgcccccaagaaaacgtcgccgaggatccacacaggtactggaggcgaacgattgtccaaggcccggaagccggacaagcagaggcggacgtcaccctgagcaaactggatgacgtaatcctgggccgtgagattaaaccagacccccccaatgaggagtgagactgcggggagttttgggatttctgagcaccggatgatgtactccccagccagcaaggggattccccaatggctgcatgcagggcccggatttcctcagtggggtcctacgatgacaggtgtgcctgtatccaggatggcagcacagccttggcacaganagttanccgttagccacctttaaaagctccatgttgatt

SEQ ID NO: 445422 - DNA, 866 bp, Homo Sapiens
tgagtaaaaggagaaacagcttatccaatagccccgctccaaccagacatccatcgggccgactcctgtccacagacagatggaaaccgagccccatatcccatcaaatggcaaaagcgaagaccaaggctggctcccagagagcctccccgaaatcactgagcacccttgattccaccaatagtcagctgtcctcgctcaggattgccatctacccgcccagttccatattgaatggcaaaacttggtcccattggcctggaaggagctagaggctttgggatcaaatcggtggtgtaaccctaggttagaggtcagaaaggtgtcatgggggagggaatctccccagtgcctactgcccctttgactttctgacctgtgagggcatgataaaagaacagttcctcaaaagcctctgagaagctgaggtccagccccgcctcctcccttcacccccattcagccttattctcccacatagaagctcacagcagggcacactgaagaagtggcatctcctggacgggacccagagattggaggagccagtgtcaaaggcaacagtgaagttttgtggaggcgttcccagcccaatttccccaaaatactgcacctgatagcaaaagaggagagtaaacgaagagtttggctcaagggcgcaggggtgagggctgtgtggggctgtgactcacatccctgtagttcgagagaggtacgaagatgggcttgtccccaggggatggggcccccaacttggggagctctgctggttctctccatcccctcagtaggttcaggatcctgcgtccaggttggactcgatgaagagggatgcggatcagtgtggccccggaaggctccacatt

SEQ ID NO: 445423 - DNA, 1856 bp, Homo Sapiens
  misc_feature (1597)..(1632): n is a, c, g, or t
cggaaaattctgttattaggttatcccgtttttcccaaaaaatttgccaaactcccggagagttttggggtttttttccaaaaggggttcacaatgccggggggagttctttgacgggtaacctgtaaattttagaacaaacgtgcccattgggcataggcaagttatttggggatggacaacgggggggccgcctttactaaagaaagctagggcctgagtgaatcttggaccccctggaggggatacctctagagcgggcgcggccggcatagggcagatgaggggtcgcatcatgttggtcgctcaatggaaatagtggatttttagtgggtagcaggacctactgcgacccacccgctgcgcatgcgcttcacttgggcgtcacccggggaactgcgcctgcgcagtctctccccatccgaggtccgctccgcgagtgcgagcgcgcgccaggcccacccgggcgctgctcttcatgtccccgcggtcgaagacggccacatacgtccccaagaagacgtcaccgaggatccagaagggccctgcaggcggagggacatccagggcctggaaaccggacaagcagaggcggacgccatttcgagtagtctggatgacgtaatcatgggccgtgaggttaaaccagacccccccaaggaggaaggagactgcggggagctttgggatttccgagcacaggatgatgtactccccagccagcaaggggattcccccaatggctgcatgcagggcccggatctcctcagtgggtcctgtgatgagggacgtgcccgtatccaggatggcagcacagcccttggcacagagagtcagccctgggcccaccttcacacgctccatgtggatctgccagtaggcagggaccgtgactggcacgaaggtgaggggtgggatgtagtgtgccgggtccgagccccccaggaccagctctcctccatcaggctcttcagggtccctgttgaggtaaaaggagaagacaggcttatccaatagcccctgctccaccagtacatccatcgggggccgaactccttccacagacagaatgggaaaaccgaggcccaatatcccatcaaaatgggcaaaagcgaagaccaggctgggctcccagagagcctccccgaaaatcactgatgcacccttgattccaccaatagtcagcttgtcctcgctcaggattccatctacccgcccagttccatattgaatggcaaacttggtcccattggcctggaaggagctagaggctttgggatcaaatcggtggtgtaaccagcagggcacactgaagaagtggcatctcctggacgggacccagagattggaggagccagtgtcaaaggcaacagtgaagttttgtggaggcgttcccagcccaatttccccaaaatactgcacatccctgtagttcgagagaggtacgaagatgggcttgtccccaggggatggggcccccaacttggggagctctgctggttctctccatcccctcagtaggttcaggatcctgcgtccaggttggactcgatgaagagggatgcggatcagtgtggccccggaaggctccacattnnnnnnnnnnnnnnnnnnnnnnnnnnnnnnnnnnnncggtggtggagacatcgctggggacctgggtgtgaacccaggtgtcctggggcctcattttctttcccctgtgactccaccctgttcatgccccacctccaggtttagaaggagaccaggacatgagatctgtccgcaggtgacgcagtgggacaaggatgttttttgaagatttgtgcagagtatttttgtagggttggcagaagtagcatcctgtgctcctg

SEQ ID NO: 445424 - DNA, 485 bp, Homo Sapiens
  misc_feature (173)..(341): n is a, c, g, or t
tttttatttgcctcagatttattttttaaaattaatgcaatataggaaaaattaacaatttttaaaatttcacttagaattcatagattacagctgttcagactctagtaggccccggtttgctgatctatgagcgatactggtttgtgtgtagccaaaaatccctacagacnnnnnnnnnnnnnnnnnnnnnnnnnnnnnnnnnnnnnnnnnnnnnnnnnnnnnnnnnnnnnnnnnnnnnnnnnnnnnnnnnnnnnnnnnnnnnnnnnnnnnnnnnnnnnnnnnnnnnnnnnnnnnnnnnnnnnnnnnnnnnnnnnnnnnnnnnnnnnnnnnnnnnnnnnccccacatgtcagtagtgcagaggttaatccctgctctagagacaacacagggatcatgggacacaagtcactagccctggaccagccactgctcaagaggccacgtgcaatccacggcattcatctgtccctcttcctccact

SEQ ID NO: 445425 - DNA, 1160 bp, Homo Sapiens
tagggtcaaacttctaaacctttattactgattagtacaaacacaaacggagcaatgacaacagcagtgaggagaggccctgacaacgagggccgcccctgcccggggtgaggctgcacagcgccagctccaggctgggccagcttggcccgcactggcaacacaggcttgaccttggccacagctcagcagtagaaaggttcttggacagggtgccaggacacacgctggggctgctgtcacaggacaatcttaaaggagctggcaaagtctggagaacgggagatgacgtgctggaactcagagaggttgatggttccatccctgtcaatgtcagactcctccaggatgttgtcgatgagctgcttcatctcagacgcactaagccgtgtgtcctcgccctctcccgtgaggcagttcaccagccggctcaggtcttctctgttcaaggttccgtcatcatcaaagtcaaagatgcggaaggcataatgggacttgatgtctggcgtggctgtgtcactgaacacactgaggagatccaggaagtcctcaaagctaaggctgtctttggctggggatgtggagaagaccctgcagattcgctccttgaaggggttggccttgagctctggaaggctgagaatctgctcgaagggcacttgtgcccgaagtgacgactccacgctccgctgctcctggggaagcagctcacaaaaccgcctgtgggctaggaggatctcctgcttcgtcaggaacgtcaagtcctggtactcggccagcagctccttggacaggcgactgcccgagccccccatcgccccgccgcgcgcacagctccgccaactcgcctcgagacgcagacaactttctcacttccgcccttgggccgcgtcactacccggtccccgcggcagccgctcctggggccaccacgcccgggcccgccccctcttaaaagctgccaggcgttcccagccgggtttggcaggcgagctgccggctccaagcggtcctaggcgagctggaggcggggcccggggaggggccggacgctccggggcggagacaaggactcacgtcccccccttttatagcaagggaattccccccctacccaagtcggtgaaaaagaggggtggaggggtgataacctcggccct

SEQ ID NO: 445426 - DNA, 479 bp, Homo Sapiens
  misc_feature (155)..(155): n is a, c, g, or t
tccagcaaaaaaatacggctttattggatctatttcctaactacaaagacagctgacacagacatcaaacgtttccttttcaatgacagtcccctgagaaaggctgcacgtgactcctacagtgccgggtgcagggtacccagccgcaggtgggnacgcggccacacgtcttcacggttacgtgcagaccgacgggatggccttcaggttgtttctttccgtgagtgagacaccagagacgcgattgtgccggagcgcacggtacaggccgttccttctgcgggagcctttctccatcagcgacgttctgttcagtgacttcacagccggagcctccacccgcaggtgcaattcaggcaggttccataagggggcattaattcctaaggcacgagttcaggtcaaccgtgtttcaatgaataaaccatgctttttggttatatggaacaatagatcgctgcgagtaatcatacgtaata

SEQ ID NO: 445427 - DNA, 378 bp, Homo Sapiens
tctccgggcccaggtgacctcggggtgagaaggaaggggcctctgagatgagaacatagttttgctgttttcagtttatactcaaagccctgcagtttcctgacagcacagagcacacctgtcacgcgagcaggatgaagcccagaggctgcctggtgaagtgggcggcgcgctggaaaatccacgtagctttgttccctccacggggagcgtgcaaggccctctcgagcactacgggagcctcgccttctgcacagacttcggagccaggtgctggagcggcagcaactgaggggcgtggatgtctttgcatggttcccatacgttttttaaacgttaataacgtgattttcagtaaagtggcaggatcagcattga

SEQ ID NO: 445428 - DNA, 472 bp, Homo Sapiens
ttttttcacttgacaattttatgattaaaaccaacaaatggaaaacagacagtgttgggtgttgctgacataatcaagcatttcgtgcggacccactcaaccaccccatttcttggatctatttctggatgtaccaaatgtgtctgaagatgaactcactttcgcacatcaaagatgtatccagtgttaaacaccggagccagaacccaggtgaaaatctgctggttcagggcaacaccacttccggctttattaaacactcaaaagtcaggttcccaagaaacgcttggatctatgcgcaagtataacatgtcaaaactgttaaatgtgaccatgagaaaaatgacatgagcatgtttcatctttgggtagagggtggtggttttctgggaagacactgtctgagacaccgagtagagaagtcaaatggaagacgtttagcatgtgcttaattcttgcttgataagaacaa

SEQ ID NO: 445429 - DNA, 375 bp, Homo Sapiens
  misc_feature (102)..(114): n is a, c, g, or t
caaacacagatgggtttttattttagctaagttaatgtttcagttccatatatatttttgaatttccatcaacgtcaaacaccatttttttctttcttcttnnnnnnnnnnnnngatttacaagcacttttacggcactcaagaaagtaggctgaaggttcataataataattttccttttaaaaaacatccatcagaccaaaataaaatcattttaattaactccttcctgagtaactaaaaccttggaatgtgctgaaaggttataataaataagacagtcaaagatcaactagcttaaaaggtattttttaaattaaactatgtaaaatgtacaatatgtttcatgaagtacaaactgttgggcccagggcc

SEQ ID NO: 445430 - DNA, 895 bp, Homo Sapiens
gggtccggaattcccgggatctcacgggcagtagctgtggtgaggtgggttttcttcccatcactggagcaccaggcacgaacccacctgctgagagacccaaggaggaaaaacagacaaaaacagcctcacagaagaatatgacagctgtccctgtcaccaagctcacagttcctcgccctgggtctaaggggttggttgaggtggaagccctccttccacggatccatgtagcaggactgaattgtccccagtttgcagaaaagcacctgccgacctcgtcctccccctgccagtgccttacctcctgcccaggagagccagccctccctgtcctcctcggatcaccgagagtagccgagagcctgctcccccaccccctccccaggggagagggtctggagaagcagtgagccgcatcttctccatctggcagggtgggatggaggagaagaattttcagaccccagcggctgagtcatgatctccctgccgcctcaatgtggttgcaaggccgctgttcacccacagggctaagagctagcgctgccgcaccccagagtgtgggaagggagagcggggcagtctcgggtggctagtcagagagagtgtttgggggttccgtgatgtagggtaaggtgccttcttattctcactccaccacccaaaagtcaaaaggtgcctgtgaggcaggggcggagtgatacaacttcaagtgcatgctctctgcagccagcccagcccagctggtgggaagcgtctgtccgtttactccaaggtggggtctttgtgagagtgagctgtaggtgtgcgggaccggtacagaaaggcgttcttcgaggtggatcacagaggcttcttcagatcagtgcttgagtttggggaatgcggccgc

SEQ ID NO: 445431 - DNA, 595 bp, Homo Sapiens
ctttccagagtagagatgattaatgtttttgctatatacttttatacattattttcttatcaaactagttaacaagtatttttatatgtttgtaagcagatatgctttcatagcataccttgtgtatatgtaaagataagtatttaattctcactgttcacttttaactgacaaagaaaaacaagtggaaactacagaaactgtggtagaacttttacttgctggtctggtcttggttgtacccatctttggccagtcacataactactcaagaaaccttcccaatagagtacaacaggatgagactctgaaatcactttcagtattccctgctagatattgattgttatttcaagtattaagtgtaagcttttaatggataattagtataactgtggatggcatctgattttgtttttaattctgtggattgtgtttaagcaattcaatagtatgttcctgattttgagatgctaagtggtattgcacagttgtcactttatcaagtgtgtacaacagtcccatgaagtttatagagcatacccttgtatagcttcaggtgctagaattaaaattgatctgttatcacaaaaaa

SEQ ID NO: 445432 - DNA, 493 bp, Homo Sapiens
aacatccttgaagaagtcataatacatttaaaacatttgtctttgtaagtaaactgaaacctcctgccacctgtggctatagggaaaactcgagctgggtaggaccagaaccatatgagtggtagaaggagaaagatgcctgggcctgggctgaacttaggttgtggtctcagacctaggatccaggggccaagtttccaagcttgcccatcaggaaggtggagcggttaagaactcatatgctaaatgccacccagtgaaggccaacagagacctcactgcccctgcttctgggcagcagctatagtgaccattggggccatcacaacgtttagacaggtttgtgcagcagcactttcctcccctgggcctttgactggatgtgcaccagatttcctgccagcctgactgtcttgcttggatctgcagagagcttgttacctatccataaacccccaaaaggatgagacgctagagacagagaagctcagta

SEQ ID NO: 445433 - DNA, 511 bp, Homo Sapiens
ttaataataatagctaccatttattgagcacctactctactgtgtgccaggcactgtgctaggcacttttcgtacaatatctaatttaaatcctcacaacaaccctgtgaggtaggtattattatcatcattttacatacgagggaactgaggctcagagaggttaaataactctatcacacaaccaaaaatagtagagctggaattcaaacccaaaaccacctaactccaaatcccatgctccaatgaattaaagtagagaggggagagggagggccaaattcaagacagagtgttggagtgaaatggatatgatatgctgataagatatgggaagaaggaatgtaagctcataaatgtttctagctggtgagcctatgtagattgtgatgaagtaaccaggagaggaattcaggaggaacatacttggttgggcagatgagttgagtctatacggaactgtccatagagatgtccagtaggtaataccaatacagatctaaagtctggg

SEQ ID NO: 445434 - DNA, 442 bp, Homo Sapiens
gctggccacagaaaattttttattaaaaatacattttttcacagaagaaaattcattaaaagtcaagaaagagcccccagatgaaatgggtgacctttactcaggtgcacatttggccagtcttggggctttaagacaaactacgcagcagctttagagaagtagtagattataatgtgcggggaggggagacggacttgagcctggagtttgagaggggcactgtaccgttttttccaacacccccagctaggattttagtggagttagctttgtccaccatggccttagcctgaaaaatatgggcatttaagacttcagcgggccacatttagctcaaacaggaggattttatgacagccaaggtaaaaaagggagatttaaacattgtaacaggtttcagggggctagattttttttcccccaagaaaacatctccaag

SEQ ID NO: 445435 - DNA, 710 bp, Homo Sapiens
gttgtcttatgtagtgtgttttcaagctccagcaatttttattttcatgaatgagagttggggatcagctgttaggttctgtgcccaggacactgactgctgcctggcgcccactctctatacagtcattaacagcaactccctcataggaggctccagccagagtcaggggcaacctgtgagcagtcaggaattgcctagctgactctagtttttgccagtgacctagtgtatactggggaatgcagttcttgtgtagatggaccaagcagtggctcggcatctccttcagtcctaattgtgtagcagctgcttcctgggcccgctgttgaaacagctcctgagataagacacagccactagcctccagtgtctgtaaccaggaacctcccagcatcacagtcactctgaggccaggggggctcccgtcctgctcagggaaagcaactgagtcatacacgattcccaggactcctggatcttctgaagatggcaccaaatgtccaaatccctggacaggcagatgggctccttggtactgcagattcaccacagctacagacactgcagtgatggcactcagggcacgagccagaggggcagcctcagcagggagcagctcactgaggcactgaagctggaatggcactaataacgtggtcagcctccagactgctgttcccatccctaacaactcccgaccggtacca

SEQ ID NO: 445436 - DNA, 791 bp, Homo Sapiens
ttttttaccggtggagctgtttaagccaaggagttgtggagatctctgtgatgatccaaaatctgactaatataaaatcaactctgatgctaattaaatctgacttataacttgtctgctaaaagaaattataacaggaaactttggtgactggtaaggaatgttgaaaagggaaaatcagaaggaaaaacctggttcataagaaggaaggaaatattggtccaagcacgtcaagggctctaagtaaaaaccgatggcactacaattccacataatccattacatttggaaaaagaagctcctggtagacacagggcctctttgggatattgttctttgttctgattctgtgctcaccaggaaacaaatttcatctccgtagggggcccgtccttcagtaggaatggccctgctcctaggttcttggctcacttgccaagactacaatagcactcgcgtttatcagttatgcttgtgtgaagctggttattgcaattcattgttctcaaaatactttcatgaaaagcctgacctgagaaaaagccttctctgtaatcatattaattagaacataaatgtctactttgccataattatacaaagagcccaaatgggcaattaactccagttggttgcttctctctgagccttacttgccagctcttattaccgcattccagagagagtcaacctggatggagtttgtcccctaaataaatgtagcgacaaagaaaagggtgctccaaatcagtttcatcagaatgataaggtacagtactgcagccatgtcc

SEQ ID NO: 445437 - DNA, 504 bp, Homo Sapiens
tcaaggatagaagcttctcatttatttgggtactttccaaatgtatacaattcaaagtagaaaaataaaaacaaggtaaatcttataaaacacaaatgtttacaccaaaatggtcaaatcctatcatgctggaagataagactgtccacacacgcgcacaaacatccagagtttattgctcttcaccatggaaaaaaagtctcttcccgatgggtatttacaaagcggggagatggagtgtgaaattaaccagtgttgaaatcgtaccacccattcacatcttcaggacagtggcaggaacagcgccgtatgcttgagggtgctgtggtcacagctcgcggccccggccaccgaggcccagttcccttccagtagtgggcagctcagtgaggctggatagaaagtctgggcaggcagtgggtaagcaattgaaagcaagaagagaaaggagatgttcagagaaccaaaggcgcccttgtgaaggttccatctgtctcacaggag

SEQ ID NO: 445438 - DNA, 504 bp, Homo Sapiens
  misc_feature (317)..(369): n is a, c, g, or t
agaaggcaatctcatcttttaatacattcctcacccccaacctacactgtccccctcagtggcccttattgcagcacatcctggctcagggcctttgcatgtgctgttgcctccagctgcaagcccttactcagccacccctgttgctcctgctcaccccttgacggagcacgacctgggcagtgtggccctcaattcaaatcacacatcccaccccctgctggatttcccacacagcagttaacttgcagcatactacatatatattttccttatcttgtaaactctgtctccctgccctagaactcaactgctgnnnnnnnnnnnnnnnnnnnnnnnnnnnnnnnnnnnnnnnnnnnnnnnnnnnnnggaggtgctcaattactttttgctgagaatgaaagtgatgaaggggttttagggggtgctttagcgggatgaaaggacagggtccaggagctgagtggggcagcagaacagcacatgaggggactgcaggtgcgg

SEQ ID NO: 445439 - DNA, 421 bp, Homo Sapiens
agaaggcaatctcatcttttaatacattcctcacccccaacctacactgtccccctcagtggcccttattgcagcacatcctggctcagggcctttgcatgtgctgttgcctccagctgcaagcccttactcagccacccctgttgctcctgctcaccccttgacggagcacgacctggggcagtgtggccctcaattcaaatcacacatcccaccccctgctgggatttcccacacaggcagttaacttggcaggcatactacatatatatttttccttatcttgttaaactctgttctccctggccctaggaacttcaactgctggggaaggacaggggttttctgtttcttttgtttcagtgtgggactccccaggcggcctagagggagggtggttcaattaattttttggttgagg

SEQ ID NO: 445440 - DNA, 102 bp, Homo Sapiens
ggacatgacaaaagcgtgcatttaatttgatgctttgcagagatacatgaccaaagttgtatgcatggcttgtcttttgggatggtcccagctgtttatttt

SEQ ID NO: 445441 - DNA, 1054 bp, Homo Sapiens
  misc_feature (270)..(270): n is a, c, g, or t
gaatgtgccccctgtgcccatcgaggaggccgtgaagatggagctgcccatcatcagcaccgccatgctcattggggaccagaggaagttcctgtccatgctgctcaccttgaagtgcactctggacccagacacctctgaccagactgataatctgactgaacaagctgtggagttctgccagagggtgggcagcagagccaccacagtgtccgagatcatagagaagaaggatgaggccgtgtaccaggccatcgaagaggggatccnggagggtcaacatgaacgcggcggcccggccctaccacatccagaagtgggccattctcgagagagacttctccatttcgggtggagagttgggtcccacgatgaaactgaccgggctcacagttttggagaagtacaaaggtatcattgactccttttaccaagagcaaaaaatgtaatcagggcctatgccctgcaggtttctatagaatagagggcatgcgttccgagcctcttcctgagccccaggtctcttcagtctgggcacaggcatttctgccaagtctgttagatctccaggtcagggcacagcactggctctacatttaccaggtcttacgccaacaatagctgacaattccaagaagcttcacgtgtgggtagttttaattcagtttaagtattgctttttgttcaggtgacaaatgagatcagctctccttccagaacgaaagggctgataatttttggccttagttccaggtagattaaaaagctgctagctcacatacaggacagccagcagtaggctgtggagcgggtaggagagagatggctgatactgctcacgtgcgctgcaggaaaagcaatcagtcacaactcacctagcgacctgacttactctggaatcttggcgggcatcgccgaccctattattccattaccaggcactccgccacccacatgccaactgacttgatgcttaataaaactgctgctgcctgtttgattctatttaatgtataatttgaatattaaaccttttaacagaactgtcaaaaaa

SEQ ID NO: 445442 - DNA, 1156 bp, Homo Sapiens
  misc_feature (114)..(114): n is a, c, g, or t
  misc_feature (193)..(205): n is a, c, g, or t
  misc_feature (419)..(427): n is a, c, g, or t
  misc_feature (471)..(471): n is a, c, g, or t
  misc_feature (476)..(479): n is a, c, g, or t
  misc_feature (483)..(485): n is a, c, g, or t
  misc_feature (487)..(487): n is a, c, g, or t
  misc_feature (489)..(490): n is a, c, g, or t
  misc_feature (492)..(494): n is a, c, g, or t
  misc_feature (497)..(498): n is a, c, g, or t
  misc_feature (500)..(500): n is a, c, g, or t
  misc_feature (502)..(513): n is a, c, g, or t
tataggatttttttaaagaggtccactgtaataaaaaagacagagtttttttgtggtaagatgccaaaactagtaacggagctgtgttttattacccccaatacctcccttganagaaaagaatttttattttctcccggcccgcggtgcaagaaaattatttaggggtgtgaggagtgtccacacaaatttnnnnnnnnnnnnntgaaaaaatatggtgttcctcccacaaaaaagacacgaaaattgtggcgcttgttttctcctaaataacggcccgaggaaaaaaaaggtccccaatgtcttgccacttttttaaaaaaaagaggcttcctttggggaaccctttctccaaaataaaaagttttgggcgccccacgaatttgtgggcacccccggggggcaatttaaagaggggnnnnnnnnnacctttattaggggcccccgtggtccttggaaacctggggaccntttannnntggnnncntnnannnatnntntnnnnnnnnnnnncgacaccagactataccaaggggaaatagggtctacccagaaagctctttattggcctccagggccctggtccagccccactgtggggtcacatggaaacccaggctggggagccgcctcttgtctcacaaaagtccacgtcctccgggaaaacggcaagccctcggcgtgggggtcagcgatgccgggccctccatgctacaacctcttgttcttgctcagccggttgtggcgccagatgttctgtttccgcagccgccgccagtactcccggctctcggggtccagctcctccagggtctttgggggacccaagttcatctcgaacagccattcagggtactcagcatccggtttcaggggtacatcctgcccttccttgtagatgttgacgcccatggcatatgtggtgagctggacaggatctgtgcatacgtcggggtccttgagggcctcgctggtcactgcaccttttcccgatttggcccccttcataactggtttcttggcataatcccgggccaggagtcttccggaagtggcggggtttaggagctcccaggccccccagccggcccacgtccgggtagccccgaaaaggcgtttggtcgccatgacatcccgggaattccggaccggtcca

SEQ ID NO: 445443 - DNA, 410 bp, Homo Sapiens
  misc_feature (33)..(33): n is a, c, g, or t
  misc_feature (67)..(67): n is a, c, g, or t
  misc_feature (337)..(349): n is a, c, g, or t
agcaacccagcccccaaacacccccactgcgtncctattaagtatggaacccatttgcatttgtttnttttaagctttatctttccttgtgcatcctgaccaagaaatatctttgattatgattaatgtattatgtcaaaatgtaggctagttaaacttttgtaaagttgcctggaatgtcatttgttaggttataaacacaagatctaaatgaagggttttatgtgttgtgtacaaatcttattttgaaatggacaaacttgtcattacatttgtaaccttgtacagaggatttttcactatgtgcctagcttggtgtccattcagctaaaattgnnnnnnnnnnnnnggtgcatgaagagttaaaaatcaaattaaagtatatgtagagatgactattttatattaca

SEQ ID NO: 445444 - DNA, 511 bp, Homo Sapiens
  misc_feature (294)..(311): n is a, c, g, or t
gcggccgcctgcggactggagacccgggaggacggacgcggacgcgggctgctcgtcttttacggcccttcaacgcccaccacgacccactcctcttggagaccccgggcgacggtggggctcttgggcattctgagactgcgcttggtggagaccccgggcgacggtggagctcttgggcattctgagactgcgcttggtggagccccctactggccagactggatttctcagcctgcgactcagccccaggctacacgaaagaagccagacctgggtaattcttctagttcnnnnnnnnnnnnnnnnnnaattgcactgggaaacttccccaatctcggccccagttctttctccaaactaaggagtcatggcctttcgcccgctagtccagtatgcacccgtaggcgcttcattttctctcctcttgtcagcttttactgcctcctgaggccttcgtcttgttcacactgagtgtccagtccctccaaatccggctacactctactgg

SEQ ID NO: 445445 - DNA, 242 bp, Homo Sapiens
gataataacttaatagtttattagtcagtcaacaatattacaaatatttaaaaattacttaatataaatagttggcagcaaactattccattacagagttaaattaccagtacaacagacagactggagatttagacacctggaagataacaataaaataaactaaaatatttaacgaaaaatttaagctgaaggtgtttacctagtgtccataaaagcatgggttctctttttatttaccc

SEQ ID NO: 445446 - DNA, 414 bp, Homo Sapiens
acaattagattatttgtgtttttattgttgagttttaagaggttctttattctggatacaggtgccttgtcatatataggatttacaacctttttctcacattctatgtgttgtcttttcgcttgcttagtggtatcctttgaagcaaaaggtttttgtttgttttactttatgaggtccaatttatctagttttctttggttgcttatacttgaaggtgtcatatttcataatatcatcagtgctgggtggggacaaagccataatctgccaaaatctgcaccatccttgccaggtttgggagttctgtagagtagttaccactgccaggtctgactgccatagctcaggaaaagggtgcagtcatttctcttagcataatcttgagaagatgtctaagagaccaagagccag

SEQ ID NO: 445447 - DNA, 277 bp, Homo Sapiens
ctcatttaattaaacgtttattcaatgaaaggatgtataaaaacttacaaatttgagaactcaactatacatgaaataggatgatgggatattcagtttttaacatatacatatactatagctattagctattctccccttctccttcagtccttacttctggctcctgttttgtcttgtgaggcccttcttttattggcctaacggaagattaatgaacaatttttactgctttcgggccaatggagaaaatttcaggcattaagaaagaagaaag

SEQ ID NO: 445448 - DNA, 667 bp, Homo Sapiens
  misc_feature (433)..(448): n is a, c, g, or t
gggaggaaggctgtgtgaggtcatcagtgggggaacaggaaaaccacgggcttagatgaactcgactctttatttataagcagcacatggataggtcctgaatgactctttagattgatctggtatttcttttgtccattctgacccatttctggaatgggtacctccagttgtgtaccagaaggtgcctgaatggccaaaagtgtatcaccattaaagcaattacagatgtcttcatgagttacataggaaaatctattattaatggaatcgtccatcacatttttgatgctttgctgtagccacaacttctgctgatcaagttctctttccttcagttctagatcttcaatttcagctttaagatatcttaatctatctatgacttctttagtattacagccagcacctacacctttccactggatactgnnnnnnnnnnnnnnnncaatcaagtcaattccctctaagacattggtgatatcataaattctccttttttgcctcacagccaaagtatcagcagccgctttgagatccagaacgccgtccttggcctcctgcagcagcgacacgaacttggtagtgagcagccccaggctcttctcgtgcctgctgctgccgccccccgcgcccccgagctgcggcggcgggggcggctgcgggg

SEQ ID NO: 445449 - DNA, 923 bp, Homo Sapiens
aggcaaatgtcgtcaagcctccaccttactacatgtgaaaacagaagccttataagcatgcatgtaagcttgaataacttgcccacttctaatccaagcagttctacagggtgggaggctcctcattcataaatctcggaaggcttggccttgcctgatcatctctcagtttccttcttatgtcgtcatccaactgttcagtcagcgaggaaaccacagagctaccctatatcagcgaatatcgagtcgaggaacctgttggggccagtgcgtcccaggcgcggacagggaggggctccatgaaacgcagcaaggtttggccagagcctgccggggtcatggagcctctcccggcttcttcaggccactctaattacagagtctgtggtaggttgcgtggaggagctgtctcggggcgggaagcttccctgcgtattgtatttgcctataaatacttcaaatagttaagtgaaatgtgcagcctttgaaaactggagaggaagccgttgggaggccccccgcccagccggcctggaagagcaggcagagaaatggctggcgcgctcttaaagcgggagacgagcttcggccctgcccaagccagatgggggcagcgaggctgcgggcgtgactccggaagactcaaaccgttaaggtgaccggagcaatttgaaaaaggaaacaaacttccctcgagccgtgcccgcgtggctctggggcggacggttgcgttcgaaagggcatttttcaaaagaagggtttcaggaacgcaggggtgtgggccccccgggaggcgcgcggccggggcagtgccgcaaagcggccaccagcccgctttgtactcgcggccaagcgcggccccagagtttcggcggcggccagagtttaggccacaccctctttgccgtgagacccgcggccgc

SEQ ID NO: 445450 - DNA, 767 bp, Homo Sapiens
tttaaacaatccattttaataatctaaattatttacaatacaataacatggattcatcctttttaagacatgggattgtaaaaatcaacaagtgaatgatgcttcaaataatacatttaaatacattaatcaaattttttcagtgcttaaaactttttctccatgggacagcaggctctggacaaaagtgcctagcatacaagttttcccaatttccttctatcataccagctgcacataaaaaggttcatcacctcctgtctccaaagtgtctccctactgagtgttcccaggcagacaatagttcctgggatagtgctgtttggtaacagaaaagcccaagcgtagaggacggattaaaaggcagggaccagaccaccatggatacaaatcccaagacagaggatgccccatgccttccccatgaagcttatctgtctgcctgtgtctccatgattgcaggcatagagctacttgggacctccaggatgatttacttagcgatatgctttttacattctaagaatcaaaatggtcctgtaattcccaatagagaaaatagagccaattcattgttctcccctctccccgtctgaagccagtttttaaagatgagccttacccagaaaataagccccaaagaactctcatctaaatgatcagacccttcctaaattacctttggcaacctaggtaattcttttttattacacacctccaacctgaccctttctacagtttcaactataaatgttcatgcccctcgt

SEQ ID NO: 445451 - DNA, 472 bp, Homo Sapiens
tttttttcattttaggagataaaaggtttacttagaaattgcaaacatttagcaaaggtaagacaaatactattttccatattctacagaaatacaatactttatagctggcttggtacatggtcacataagaacaaatctaatggaaaaagaatatttcattctacttttctgccacttatcacagtgtaataagtgccagtaagtcctggaagacagttgcagaggaagattagaatcccagggctgtttgttaatatacatgattatattgtaagaataatataaaaacaaaataggtaagatatacaattaacatgcaatttaagctatattattttgaagaaacaggacagaatttagtgaacgcaacttaaaaatttgttaatgtagtataatcagcatatcatggtattttacatggtatggaattattcctccttaataatgcttggcaaattggaacaggctg

SEQ ID NO: 445452 - DNA, 476 bp, Homo Sapiens
gttgttgccaattgtttttgttgtcttccagaggtaatacaaggctttgctcctttagcaggattcccagttggaccctctccagagaggattcatatttgaattcccatctgaataccaacccaaatgttgatacagaacactcctgtattaaaattaatatccatcccagataaacctactctgtgactaagacaattgagatcttctaggtgaagatgctgtaattcaaaatattacatggaaaaccatgtcttacttaaaacgggtacttgttttccggccataattattccagtctcttccatagaactgcttctgcaaacagtttttttaatgtatcaaagagagtctctcgccaacatttaatacagtcaaatctattccaacttcagagttcttatatgtcttatttagcagacactatgattctatcttcttattctctggaaatccatcagatgtgtgttccaaca

SEQ ID NO: 445453 - DNA, 264 bp, Homo Sapiens
  misc_feature (43)..(51): n is a, c, g, or t
aaagcatggtaaacaccatttcccaggatgtaaatcggtactnnnnnnnnngtgctccaaagtaagatatatttgggaaacacagggataactaaggttagataggtgttctttattgcaggaattctaagagcatttaacaaattaatttacactgggaattttacagtgtggagggtctggctcatagcatttctacaaacattatatttcagagtcccaaagcctttaaataaaatgttaatggtagaaactccttaaaaa

SEQ ID NO: 445454 - DNA, 1015 bp, Homo Sapiens
tctcttccataatagtatggaaaaataaactcctgctggaacactcaagtcaacattcccccacccactgccaggggcttttggctttcacatctcccaaatacccatcatcagcataaaagtattatgtttttgagtaggcaaacacttttgctatgtctagtgtgctggaagtaagagaaaaaggaagtggcaaggctcatgtagcattttgaagggggagagttacaaaataggatggtttatttgctaacaaaatgaaaggtaacaaggtggtttcaggccttcctaaaaagtcataggatgtcccctcacctcttagaccactttcagccttgctaatgcttggtagattcttaatggaagggtagggagccctataggctaattatcagtgtcaatgcaaaggagggctcaacttctgcacccaggatcatcttaaaacactgagctggatgaatgggagaagacaaggatccataaaaacagtaaaatgtttattttcttagaaaaaaaagtgaggaagagggattcaaaatgattgtgatcacacttccatctgcatctgagcaaagccaatgttgcaagcttaattcttgattaagatacctattaaatcaaacaacctgccactcactcctacgtcacttccaggagtcacatcacagcatgcttttaattgataatagcttctctacttcttctgagcagagaaacaaggcttggcatagcaaccatcccatctccaaagctcaacactgccagtgagaagcaaggctcagtccatctctagactgcgtgcgagagatggggaggaaggagagagggcaggagatgcttgtcttagaagcagaaccagtttagaagagaagtttgttatctgagttcaccactacctcatcttatagaaaataggttggagagcatctgtaaaaccaacagtatctttaaggtgaaattgcagaattttgctgcatacctggacacaagagaagtgaaaagttgcaacaagccc

SEQ ID NO: 445455 - DNA, 451 bp, Homo Sapiens
ttcaaagtacatattttatttatatagattagtgcaagctgaacaagaatatggtttgtaatccaatttatacagcatcacgtagtggctgactgtcctgaccatgggtggaagcagggatgactggccttggtaaaggaaatgacacacattcccccaatttggaagcaatcttaattagccagggagtgatttttttccttcagcaatgtagtccccaaagtacagacagcttctctcttccttataggccgagtcgtaggagtagcaagcttctaaattttggctgtgcctctgagcttttggcctaagtcccaccagccccgaagtttccatgacaacaaaacaaggatcaacgtgcctctgacactcccttcagccccaaattgttctcttactcccattttcttcctacctcccaagtatcactgggatacaagcagaacagggc

SEQ ID NO: 445456 - DNA, 337 bp, Homo Sapiens
ttttttttacaggaacacagatttgatgttttaataaaaatacgatttctacaaaaggtgcttaacacggcccaggacgggctgtccggtggagtcagccgtaggacccctgaaggatttacaaagacagagccggctcaccagcacactcctgccagcaccgggacccactgcgaacaaagacagagccggctccccagcacgctcctgctagccctgggacccactgtgagccactgcggggtgtccttcatttaaaaaaagtctggactgtgacactgcagaaggagtctgaaagcccaattcctgaatccctgcgttagaactgagagttcag

SEQ ID NO: 445457 - DNA, 1017 bp, Homo Sapiens
  misc_feature (1002)..(1002): n is a, c, g, or t
tagaggtcagcttattaaagggcaatattgttcttgtttagctacatcactgtggtgaatatagatggaattaaggaagtaaatgcaggccagggggttgtgatgagaggataggggagataatatcagcatcaaattctttgggtatctctctaagaattaaataatcttttctagcttaatattttaattctaattcaaacaactctgaggttttggtttcattagtaatagttgagggaataatatactaggcaaagaatggcctaatgtttgtcataactgttaatggatgaaattttttaaagatacaaccatgataaccattataaatgatctatgatcaaaatctaaagtgatgaattatttgtaggaatgtcttcctaatggggaagaattgcataggagcattatgcaaatctacacaagcttttataaatgttgctgctgggtagctccacagtgtttcataaggccatcctgtttcccccaactcccccatttttggtttgtttctttttaaatatttgttgagtacttacgtgtttatctaacagttcacttccatttttctagtctggattttttgagtatttaggaaagagagctattaaaaactctggggatttctcaatgtgactaactctaatttttctaattataactgcctttaattaacataatattaacttttgctgaggtttatgagattttctcaccccacatcgctcccctttttttaaaaaggactgttttgctagtgtgataatgaataggtaagatatgagataattgcaacattgtctagttctagtatggtaactattcttgaaatggtattgaaaaataccgttaattcaaattgacagagattgataaaaagaaactgatttacctaagtttactttttaattgcataatagagcattttttgttttgagttccctcattcttattaccagaaagagcttgcaaatagttttactttcttggcactggaanggtagttctggaaag

SEQ ID NO: 445458 - DNA, 462 bp, Homo Sapiens
  misc_feature (415)..(415): n is a, c, g, or t
attttcacttttaatgatcttttacttaataataaaatgaaaaataagaatataggaatacatacaatctatatacatatatttattgcaaatacttaaaattcttatgtaaaatgattttctatatttgtgaaaaaatatgactttttaaatggtgttgacaccaacttctttgtacataccctcaattccaatgttaacaattcctttaaaaaggcaaaagacacaaaagtttagcatttaccaaaccagtctgtacaaaccttacagccagaagggaaaaaaatagcttgtggtaaataagtcaattttcttttaaaataaaaaataaaccccaaaaactattccccttattggcatttttctggaaataatctggagtgtctttagagtaacttcctttggaaataatttngtggccttaaaccagtgaggtcctacatccaaacataccatattatg

SEQ ID NO: 445459 - DNA, 500 bp, Homo Sapiens
tttttatagcttaatctaatatgtgtttattgattgcccatgccccagttcactgtggtcaatagtgctctgttccatcctatgcctggtggatccataccctctctctgctggctctgccatcccccaggaccttcccagaatcctctgctgggttctctgctttcagctagctcacaggtttcatacaagacctaggctggcctccatgtggtgggcaccatctttccctcctcacccagagtactctgaagcacctcatgactctccagcatccaggcccagaaggatgaggctgagagagaagctcccctccttccactttctccttcggcctgccctgtcctcatgttcggcaccaggatctgtgttttcctgagcatcatctagccaaagctggtacaccatgctggtgttttggtgaacaccaataagcgccgccttcatctgtcccaacctaggttggagggatttcttccaataacttgtgacatcatgcg

SEQ ID NO: 445460 - DNA, 530 bp, Homo Sapiens
  misc_feature (416)..(425): n is a, c, g, or t
tccaggaaaagtaattacaaatgttttgccaagggcacgtctagcatgtctcccagaaatgggcctgccttagtatcccttccatacccaggaactagctagaaggagcctcaaggaatctggtttcagcataaacatgatgatggatttcagtgtcacagctgggagcccatagtcaattctgctttctgtaaatagaggtctgtggggtgccttcttatgcacggatggcattgtgattcccatttaacagagtaagcaaaatttcagaaaaattccagggtctgcctgaagtcaaagccaagaggtggaagagtcaggatgagaatccacacctcttaacattcctcccaagctccttcttaggtgatattgggtcacgatccagaggtggaaagaaatggattcttaggacnnnnnnnnnncttattttcattcatttattgaggcaccactgcacttggactctaagggcatttggatttaacatcccaggataggaaagcagggctgtgtgcttcaaggtcaag

SEQ ID NO: 445461 - DNA, 421 bp, Homo Sapiens
tgcacacaagtctgagacattatccgagcaatctcccttttacttcctctgttctagtttcatttgaggagaaacttctcattactcactctcttcccaaacatctcaggtcaaaaccccaaagggagcagattccatagcagcttagggaatgcccatcacctgggcagagggccctcatggttcaaaacctcctgttgggcaaagctccccccacttgcaacccaccacccctgaagcattccacttaagccactctccaacccttgctgtttgggcaatgtaggactgggcttggggtggggaagcagggcaggggcattcactccatcatgaaattgttgatccttgtcagcagcactgctgtttctaagccagttttccctctcttcttaacaaatctcctttggaggaggaaggt

SEQ ID NO: 445462 - DNA, 647 bp, Homo Sapiens
  misc_feature (219)..(219): n is a, c, g, or t
aaatcccaaagacccctttagtttcaatgggcccaggggttttttcctttaggggggaaccaccggtttttgggccccaatgtttctccttttaccctttacggtggggccccgggcgggcccaaaaaggaaaagggtttttagaaaaaggtttctttgggggggcccggagggcgggcccgaacaatttttatggatattcggttgactcggggtttnattttgggaccgttaagctatttcgcagggagctttttattattttaaaagcccttgtcataacaaataccttgtccccccttttgggagggaaaagtataacttttatttacaaataattattgagcatgctagatgctactagaacaaaagttacggtttccactgttaaggagaaacaatggagaaaccagcgtgagctccagtgctttcttcgatttggtgcactgaagaatcccattttgggagcagaaaaaccctgtgtgttgtgttagctgttccttatcaccaacgagagtaagtattgttaccctcactacatctacgggtaactgaggcacaaacgttgtgaggcagttaatgttcccagggtcacccatgggccagctgggagggcagcatcgccccgtgaacataccctgggcccc

SEQ ID NO: 445463 - DNA, 521 bp, Homo Sapiens
aattttctgcacaaagattttaattcatgtattcattttccatttccccccattagaagataagctccatgagagataaacttcatcttgtctcattcaccgttatttccaaggatccaccatattaaaccatcaaatgagtagaaaacttagaaagtacagatgaatatgaaaacgaaagcaaaccttaccataatttccaccattcagcgatacccaatgtcaccacattcctgcaattcctcccagtcttttttctatatacgcatatattaaacatttgggattgtaatatttacagggttgtgctctgcctttatttcccatgaagggcgttattctaactaattttagatggagagaaaagttgcaaaatagtacaaagaactcctttccactcctggccctgcttctcctaaagttgacatcttacgtaaccatagtataatgatcaagaacaggaaattaatattgatacaatgttcttaactatactacaaaccttatttaagtttccccag

SEQ ID NO: 445464 - DNA, 514 bp, Homo Sapiens
tataattacacagttacctttattggtgctctttgtttttgtgtgtgaatttgaattattgtctgtggtcacttactttcagcctgaagaactctagtatttcttgtaaggtgggtctggtagcaacaaattctgtttttgtttatctgggaatttctttattttgctttcatttttgaaagatcactttgctagatatagggtccttggttaacctttctgttttggggttttctttagggggcactttgaatatgtcattccatgcttctggcctccattgcttctgatgacaaatcagaattttatatgactttccttaaaatgtacaagtagtttttacttggtgctttcaaggttttctcctggtctttggatttccacatttttactatgatgtatttgcctgcggatctctttgcatttattctaaagttcactgaagttcccggatgtgtggattaatgttttacaataaatttaagaagtttcagccattatttcaacaaataat

SEQ ID NO: 445465 - DNA, 602 bp, Homo Sapiens
  misc_feature (73)..(183): n is a, c, g, or t
tgggctccagtgatccccccaacctcagcatcctgagtagctgggaccacaggcacgcaccaccagggctaannnnnnnnnnnnnnnnnnnnnnnnnnnnnnnnnnnnnnnnnnnnnnnnnnnnnnnnnnnnnnnnnnnnnnnnnnnnnnnnnnnnnnnnnnnnnnnnnnnnnnnnnnnnnnnacgagccaccttgtccggcccattatttatcttttgattgaatttactgaaaggtgtaatgtgaagtctgtcaagttgaataataaaaatttgggcttgtattttacatgccttttccccccatttcatttttctagtaattcatttttatcatactttacagaaatatcaatctgcaaggggttggtaattttaaaaactggttcttcaaacacagtttaggaggagctagtttaggtttcattctgtcagtgtgcagcaaatagaatccagctgtggtagaacggcagcactctcggcaggaagctacggtagagtgattaggctgtgtcttaggtcacttggcttctgttgtttttctccattttcagagcctccagcctttccacggattctgtaagctatgtgattgctttcca

SEQ ID NO: 445466 - DNA, 1507 bp, Homo Sapiens
ttttcttttaaaaccttttattcaataatatatacttttaaaataataatatgtaactgccgccatgccacatactgcgcccgtccccccactgtggagtctgtggtcagctagttagcgtggtttgctggaaaaacaggcggccacgggacgagttgaggggctcggggagcaacagtaaccaacaacattctgcatacccttcacattccccatgctttctgggtcgggaagaagtcaacaggaagccaaaggcaagtgagccttttacattcggaagtgaggtttgatatacggtggtgggctgcccttcgcttggtctagttcgtgctcgccaaacctgccaccgttttgtgtctgctcacggaacgtgatctctctatacgcgttaagacgtttgatttggttcttgttctgcttatggaaaagtgggagaaccgcaacagacccgtcgctttccagtcttcatcgtgctgccgtgagaccactggaaagcacagcattgtctggacaaggcttgggactgctccttcaccacagggttagaagtatgggtgctccatggcctctttggcagtcagtctctgttgatggtcgtatcgcagaagtttgtccagaagatctagggcctcagggctgacaaggtgtctgttctcactatggataaagttttcccagcgtttccgtgaatgttgtcccaggatatcgttgaagtgtggatctaggtctatgtgatacttcttcagatacccatacagttcttctgtacccagaaccttggcaatgcgaacaagctggtcatagttgtcctgtccatggaagaatggttcccttcgaaagatcatgcttgctaacatacagcccaaactccacatgtccaagctataatcatacatctgatagtccacgaggagctctggtcccttgaagtaccttgaggctacacgaacattgtactcctgagcaggatgatagaattctgccagaccccaatctatcagtcgcagctttttctgttggtgatctatcatgacattgtgaggtttcacatccctgtgcatgattccccttgctgtggcagtaatccagagctttaagtagttcatacatataaaaccggatatcaaagtctgtcaggatctggtagagttgcttaaaatctgtattattgatatattcaaataccaaagctggtgtctttgacacggggtcctttacagtgtcaatcagcttaatgatatttgttccaccacgaaggttctccagaatcttaacctctcgttttatcttctttttcttcactggcttcaggatttttacaaccactctctcattgttggtgatattaatggcctcaaatacttcactatattttccccgaccaagttttcgaaccagttggtaatcatcttgattaccccagctcgggacgtgagcctcgtagtcccagtactcgcggctcctcagactgttcacctcggcgtagacccgggccctgctgcccgcg

SEQ ID NO: 445467 - DNA, 687 bp, Homo Sapiens
cattaaggatgggaactttattagagcagtgtggatctgttcaacaaggccctggtgcaccacgctacaaaccactgtcgaaatgaggttgctaagagtcaccttgtggagggagagctgcaggtcccatctcatccagagctgctttgatctgaggtggggccctggagatgaacgaaagaaaggtggggagtgctgtgtattttttccccacaaatccaccagggctcattgtcagatcctgggctttcctttccacatcatttttagggactgaggccagttttgcatgattcagtgaccaggcatgtggcctgacttgtaggtggcaggtggggatggtgcaagctgacaggttgagtggccatggaccctgttcaggtaatcttgggggaaggtgataggagagaagtgggtgtgggaaagggatgagaatttgataaagccaggttaccaacagggaacctctgagcaggccaggcagggaggatctgggaacaatcgagtggaagagtggtgatgtggatctggaggccagctgtgctgatcctttgtccaaggtgaagtgattgcccaggaactggggagaagagggaaggtccttggacagggctgacatcctaggtggggagattgaagccaccctgggaaaatagtacttcaaacccacccctgtttcttcaatac

SEQ ID NO: 445468 - DNA, 321 bp, Homo Sapiens
tttttttgatattttaacaaacgttcctttattaggttactgactattatcaaccatcataaaatagaacgggagtttcaaaactgtacaagccacaaggctctgggctggtaggaaagaagggtggggtcgagggtcccagggtgtcggggggtgggagatgcagagagagctagagggtcacccggcatctgtgaggacggctgggtcaaggccataagctgggatctgtacaagggaaacattcatcagaatgtgacccacctgaaacaggagggaggaaaatctttaaaagtcttacaggtaaggtcccctgccccg

SEQ ID NO: 445469 - DNA, 478 bp, Homo Sapiens
  misc_feature (322)..(330): n is a, c, g, or t
tttttattttacaaccaacaatatttaatatttccacattgaagaatagatgtgataattaaatcttttataaggttttaaaaagacatgaaacataaacctaattatacataaaagaaaagaattttaaacaagagcttattgtgatgacattactcataacttttacctttaaaaccttttcttgggtagctattcaaaagtaaagaccacaagttttgttgcccagatttcttatgttttgtatatttaagctctttatttattgaacagatgtgtcattaattcatttggagcattactattatcagtaaaatttgannnnnnnnncccctcagtcataggtaaatcagctccacctggaatttctaaggacccagttttagtcaatattttcaagtaatcatgacctcagaaatagtcttaattaagataacaaatattagccatcaaaatggaaccaagacaagattctaat

SEQ ID NO: 445470 - DNA, 502 bp, Homo Sapiens
ttgccttccagctgccctttgctgagggcgcgggcgatggggcgcgcctcgacttcgtggtgcgctatgagacccctgagggcactttctgggccaacaaccacggccgcaactacacagtcctgctccggatcgcacccgctcccacacccactgatgccgaaagggctgcccccagcagcagcagctgccgcagctggagccacagcccgagtgccagggtcccgtggaggctgaggccaggcagctgaagagctgcatgaagccggtgaggcgcaggcctgccgaggaggaactgaagacgaagaacatggatgataacacctttgccatggcagagcatcctgatgtccaggagtcagtgggtccactggtagcccccacccctctccgtccatggccccagatgacacttcaggtttctgacgttccgatgactggcaaccccgcagaagaaggtgatgtccccagaagcagtccacctgtggcttttacagaggtc

SEQ ID NO: 445471 - DNA, 444 bp, Homo Sapiens
  misc_feature (409)..(409): n is a, c, g, or t
taaaacgcgggcgatggggcgcgcttcgacttcgtggtgcgctatgagacccctgagggcactttctgggccaacaaccacggccgcaactacacagtcctgctccggatcgcacccgctcccacacccactgatgccgaaggctggccccagcagcagcagctccgcagctggagccacagcccgagtgccagggtcccgtggaggctgaggccaggcagctgaagagctgcatgaagccggtgagggccaggctgccgaggaggaactgaagacgaagaacatggatgataacacctttgccatggcagagcattcctgatgttccagggagtcagtggggtccacttggtaggcccccacccttttccgttccattgggccccagattgacatttcaggttttttnaactttccgttgatttggcaacccattttaagttt

SEQ ID NO: 445472 - DNA, 2120 bp, Homo Sapiens
  misc_feature (1492)..(1492): n is a, c, g, or t
attgtcatccttttttttacgaaacaaggctgccttttaattgctatcagatattcggatatcccgtctgatgtcagcaaggcccccgcgccccgccggaacccgcagggatggagcagcaccgccgcctgactgcacagaagggctggggcagggtcgctgtgcctctcggcctccttgctgccaccgtctcttagcctcggggcgcctggtgcaccgtctcctcttcgggtcagcccagcctctggcggccctcggaaggaggggaggcaggggtcgggggggtgagccggaggcgggggccccgtcgcgcacgcatgcagacttgccctgtgttggcttcgtttgttctcctcctttgctaaagtgatcagatagtcctgtgaagcagctgccagccaggtggacagggcagcggtgctgggatgccgcccgtgggctcctcggacatcctgaggccccgccctacttctgtatctggaacaggaagagccgcaggttgatgttcttggcagccagcagcttgttgcactccacggagtcaatgatgggcagtggcacgtagtccgtctcgttgctctcgttggtgaagacaaagtggtagatgacggggctgatcctcacgtcgtcgtaggggcccttgagcagcaggaaggagcactccagcggtgccgtgaccttgctcttgaggaggagctggaaggagagcgtacgcttgcaggacaggttggggttacgctccgagtcgttgactcgagccttcaggacccacgtctggttcagcactgtgaacctgggcgtctcatagtacaggcgcgtgatgaagtcgtctgtgcggtacggccggaactggacctctgtgtagccaatcttctcgaagctgagcaggctgaagatgctgttgtacagctgcatctccttgcggtggctctggtccatcccatccaggatctccatcagctcactgcctgtcttggtcgggtgggcgcacgcagcctcgtgcaccgtcagctcatggaaggggccgtgccatgggcagccgatgcgtttgtacttgcactgggttaccctgtcctggcattcctctttctggtgcctctccaggagggagcggggaaactggcgcaggcagaagccacactctgaaggcagctcgctcacggctttctccacggccaggttccggcagcagaggctcttactgatctcacaacgacaattggggcacgtggcctgctcctccttcagccgggcatctgctagtaggtggataaaacagccagcgcacatcaagtgaccattagtacactggtacacggaggccttgggcaggtccaggcacacggctgcagcacagcaccgagtagagccgctcctccagtttcagctccagccaggtgtcctgagggactccagctggtgcagaggggcgcacgtgcctgtcccgagtcgtgctggagtgtggtgaacactgcgagctgctcaggagaanacaggcagagccagcttgggttcttgcagagattagaggtcctaaaagcaaggcattatcagctcacagaggtgacagctcgccctggcagtgacgagttcagccatctggggccgagggtcacgcttttccgttagggaccagcgtctaccctgacccccatacaggtccagagtttgggagccctccaggaacactgggctcttggccatcactgtcaggtggggagcggatgcagctcccacactggggcaggcatgctctctgggccttcagaaaggccatttatcctgggttgagaggcacttgcctcagtgtgagcccaggtgagaggaggcagctgccccctcgtccagggaggtcggctacctgcagaggcctcctcagagctgggaggcaggagccaacatggcccaggacaaggacaagggcaggtaggcactcagggagtgcctggggagcagaaatgggggctctgagtgggtgccgagcctgctggggtatccggggcatgcaggagcagggcacctctcgttgggctccctgccggtgtggcctccgcagcacgctacagtggcctatcgtggctctcactccctcaacaatcccgggaattccggaccggtcc

SEQ ID NO: 445473 - DNA, 526 bp, Homo Sapiens
  misc_feature (40)..(40): n is a, c, g, or t
tttaatttaatattcccctcttgaaaagggatgacaatanagtcacatacaaaaaaattaatccaactggcctttcttgtttttctaaaaacttttcattcaaacatttcttattatcatttattgcacatagcatggattaatcaaataagtttaaaataaaataatagactagagaaaggtgctttattttaaaaacagaaacaaaaagaaggtacgtggattatctgatgctacatcacactctgggagagacttcccttctttcagagagcctctcatttcttaatgtggatcattttgctctttccccctgataatgctcacttactctctttcataatctccccctctttcacttgttcttttctttccaatcatccaatgatccatcaaggtactttggtgttcagtgctttctcatatggttcaactcagatcatgtagtctttctcacccaaccaattcaactactgtttcctgagaccccactatgtccttgactctgtaaggagttcctgaatac

SEQ ID NO: 445474 - DNA, 1464 bp, Homo Sapiens
tattaacagtaaatgttgtaatcaaaatggtatttaaaatgtgttcaagtaaaacactgtaataagagaaaaaccacagaacttaatataaattatagctttattttttaaaaagattttataagtctgtcacaacctcaaacacatataggtgaattatttattcctctcttccatcagatgaggcttatcgtgtcaaatcctctgaaaaatataagtaaaaattatttttcacaaatatatatcccctatattactcaacttagttctgaaattttctccttataaatactttaacacagctgctagtggaaggactgtgttgtgcagctgcacatagctataattttataagtctgctttacttttgctagctccctggttcagctccaaggtccaaatcttataaatggttaactgggctgccagaaaagcccactgaatgcatcctgtagtgctctgtgacaagcaagagaagaagtatagcctccagcaaggtcctgtggtgaggcagctctgacatggtttaaatacccaagtcttcctagcatctcaagctcaggaacatgtggtccatatgtctctatctgcagtggctggtattcatacagagcttcttcaagcttgtgaataggtgccagtgaaatatgttgacccattttgatgcctgtggaaaacgtcactggttttacaggtttgggtttctcaagttgcatttctaattgggtagatctatctttatgctgagccaaaagcagagcaacagggagatccagaactctccagctcatctaaaaaagcctgcttattcttcctttttagaatctgctgcagttgttcttctttttgtataaataatcttctttgttcattttcctgtcgttccacttctaaagcttcttccagttcttcctgttctcgagtcagctttaatttatttttctgaataacatctttgttttccttttggtatatctccattttctttttggtgttgtccaaatccacattgttggtcaagttgaaaacaatttcttccacttcttccaagaaatcattgtattctcttagactaggaaaatcttcttcccttttattgtatatctttagcacttttttcctgatctcaacctccttgtcaacagtgggatcttcaaagagttgtaccctgaagttgctctttctgagtggagtaccacactcagggcagtttccagctcctctcacaaacagtaaatctacacaactttcacagagagtgtgtccgcacacattcaccatcagcttcaaggaggggttccgatatttggtggtcttacaccgagggcaaccctgatcgtccatggcggtttccctcctacagactctcgcaggcgcctgtttcagccagagccacctacaagccccctcagacgcgaccaagcaggttcctaccaacaggcgcttggcagagacggtcccccc

SEQ ID NO: 445475 - DNA, 543 bp, Homo Sapiens
  misc_feature (11)..(11): n is a, c, g, or t
  misc_feature (32)..(32): n is a, c, g, or t
  misc_feature (44)..(44): n is a, c, g, or t
  misc_feature (77)..(77): n is a, c, g, or t
  misc_feature (82)..(82): n is a, c, g, or t
  misc_feature (95)..(95): n is a, c, g, or t
  misc_feature (106)..(106): n is a, c, g, or t
  misc_feature (123)..(123): n is a, c, g, or t
  misc_feature (149)..(149): n is a, c, g, or t
gggggttcccnaaaagtggcaaatccctaaanggggtaagaacnaactttaaggctggagcccaaaaaagcagggcnaaacngggaagaaccagnaactctcccangctcaacctaaaaaaangcctgccttaatcctccctttttaanaaacctgcctgccagttgttccttcctttttgtaataaaataaccttcctttgttccattttccctgtcgttcccacttcctaaagcttccttcccagttcttcctgttctcgaagtcagctttaatttatttttctgaataacatctttgttttccttttggtatatctccattttctttttggtgttgtccaaatccacattgttggtcaagttgaaaaagagtgtgtccgcacacattcaccatcagcttcaaggaggggttccgatatttggtggtcttacaccgagggcaaccctgatcgtccatggcggtttccctcctacagactctcgcaggcgcctgtttcagccagagccacctacaagccccctcagacgcgaccaagcaggt

SEQ ID NO: 445476 - DNA, 462 bp, Homo Sapiens
gtagtttaccaacccctgatctagacccctttgatattatgacacatttttatcattttcttttaggcacagatgatctctgaatgaatgcttatagggaaccatatgtatatgcttaaagatttctctaataaatatggttgctgcaactttagagttaattctgcaaattcaatttaaaagtgatgattacagatctggcattgccagatgtttcagaagctttatgacaattttgtgaatatttaagttaccaatgactaaattcagttcaagtatcaacactacatttttaaagcaatgaagcaggtcttgtaagggttgaaaaggaactgtatgcagagcagtgacctgtggctgatgctatactgactgatggctgctgagctagagtaggggaattttaggtcacttgcagcctgtaactgaatttcttgatttgcattttagggttttctattt

SEQ ID NO: 445477 - DNA, 442 bp, Homo Sapiens
aattttaaaaactggttttacagatacacatgctaacaatgttctacagttacatttgtataaaatacattatacaaaagatttatagattttgcatacataaaaattaaagcattcagatatttctatgatctaacagtgcaatatgcacatacgtggaagaaaatactgattacctgagcaacatttttgtaatgcaaattaaaaatgaatccatcagtgcaccatttaaatacagactttaaaaaactccacctttaccctgtaacactgactagatccttgcttcatgatatttctaaaactaagcatatccttcatattttcaactaggtaattttagaagtagatactttaaaaatgaaccactacttagtaattagtggttcatttaaataactcttcaggacactgaaccaagcaggtagagtccaggaaaaga

SEQ ID NO: 445478 - DNA, 475 bp, Homo Sapiens
ttgaaatttcaaatttaattttttacagaagcacttttacataatagtataaatatcaagagatatcataattacaagttaaattatatgtgcaggatcagaaatccaatcaagaattctgtctctaccacttaacagctagtttgtactttagcttcctcactgcaacatggggatagaacccacctcagttgtatagtttaagtgacataagacatacagggattacaattatcacctgatacagaataagaacttggtaaatctgagttactgaaatgatgatgaaaatcatcgcagagataggtatacagatatatgatctaaacattggggaccacaatacaaactcagtctatactgagattcatcctttcaaatgtactaaataacatttggcacactaagagcaggcaaataacacagggagtagatgtgtaaattaaattttgaaccactcctggttctagttatt

SEQ ID NO: 445479 - DNA, 643 bp, Homo Sapiens
ttttttttgcacaatttgggtaattttaattttacatagtagccaaccttggaaatgtcagtcttaacattctgatcaatccactgcattcaatgcagcggagtgtgttaagtgttacttcaaataattacattgctgctacttctatgttgaagcatgctttttaaacactgtagttattgaatatttacaatatgtatcatttaaacttcatgtaaaagcacaagtatgactgtctgacttcaatacaaacaccatacttggatttccccccaaaatgaaatgtaaaatactacaattttaataatcgacacttttggaagttttaaaaatatgtcttaacgtggaccaccaacatttgctcaagtaactcaaacaatgctgttccttttttagggtgcaaaacttcagtctggcttcagtttctttaggcatagagaaagaaaatatttcctccaaagcgactccaaaatcacgcatttcttctgaatatcacactttttctctgctgacttcaaatgtggtccacctcagggaaggggaggggagtatcaggattcaggatgaacttatatgtgattcccaggttttcacgatcctcccttttttgctcttttaaaaacacagtgagttaaaatactga

SEQ ID NO: 445480 - DNA, 1437 bp, Homo Sapiens
tttttagggccagtgggcaacacggtaaaaagtacatgggcccagaaattggggacttggatggggcagctgggatgtaggggacatattaattaagacctagtgtgggcctttcgtattctgggtcagataagtgaacaagcaggtgaggttctgtgtgggctaccctggaatacagtgttgcatagggttgtgtgagaggtgcggggaacgcctagaaaactttgcagggagaatgttttctaagccaacacctagaagacaagcaagagtttgctgggcagagagtgaagctgggcgcggctgggatcatggagccggatgtgcacagccgggacatggggaagagctgcagtggagagtggggtatggtggagagcagtcagggccagacgatgctggcgggcctggaggccttgggagcgctgactttctccaagagctgggggtgccaggacagggtcccaagcagcggccctacgtggcctggtttgctcttcactggcaagctccatggccctgggcaatgtgctgcttctgtttttcttctcatcggtgcctggctgagctctggaatcgtttcctgctctgagcctgaaacttcaagcagtaagaagacggtccacagcccggttactggggctctgcaaatgcgacgttcccagtggccctctcccaggctccgggcctccgggtagaggaacttctgtctgtaaaggatgaaggcgaccttgctcaggctgcagcgggatggagaaacgtgacccagcggaggggctttcggctgcgaggtgcgagaggcgaccgaggggtgaaagcaaggcgagtgcggtcagcgcaccgggctgggcggcctccccgccggccgggaatcgttcccagctccagccgcatctcaccgcctctatcgcgcctttggggcctcagagggaggctgcatggcccggaggcctgaaatccgccatttgttccctcccggggcggcaagagccacagctcactgaaggctgcagcctcggcagccggaagcgctggccgggcgcttggacagcgaccggctcggggccgggctcgggtctgcgcaggcgcagggctcgggaaggccgggcgcgagagagtggaacatgcgggccgcgggatgccatctcgtgggccgcaaggcgccaatggcacgagcggcttccaccgcacgcggaaggttgcgcttggccggaaagggcggaggagttcacggacagccaggggagaccaagccaacagggcatgtgggtctatcccagggtcccggggcagtgccaaggggaacccagtgcgcggattggctcgcgtggcgaggaggtcacgtgggggaacaagtacacgagaaggcaccagtagagaccagcggggacagagaattggggggagaagcagcagagcaggacgagtaacaatccg

SEQ ID NO: 445481 - DNA, 509 bp, Homo Sapiens
  misc_feature (467)..(467): n is a, c, g, or t
gcggccgctgcaggagctgtgccgccagcgcatcgtggccaccgtgggccgcgagaacctggctcgcatccccctcaaccccgtcctccgcgactacctgagctccttccccttccagatttgaccggcagcgcccgccgtgcacgcagcattaactgggatgccgtgttattttgttattacttgcctggaaccatgtgggtaccctccccggcctgggttggagggagcggatgggtgtaggggcgaggcgcctcccgccctcggctggagacgaggccgcagaccccttctcacctcttgagggggtcctccccctcctggtgctccctctgggtccccctggttgttgtagcagcttaactgtatctggagccaggacctgaactcgcacctcctacctcttcatgtttacatatacccagtatctttgcacaaaccaggggttgggggagggtctctggctntatttttctgctgtgcagaatcctattttatattttttaaag

SEQ ID NO: 445482 - DNA, 486 bp, Homo Sapiens
tgcaatttccactttaccaccagtttaaaagtaaaatgaggaatttaacccatatctggattgaatcatactatgattttccgtggctctctgtttcataaaaacactcctcactgacaacagatgttaaactctggacactgaattctcgctctagaacagaatttaggtcgatggtggcattttcagactgactgtcaagggactggtgacggatctgcgccttgagcaaagttcctctgtccctcttggtgctgttggcttttcgtttaatggggcagaagtgcccccggaccagtttgggctgctctcctcctttctgaccctcacccgactccgggccaggctgctgctcagcctcggggtgaacgtctgggtcctcggaaatcctcagtctctggaactgaatttcgatgtctttagtagggctgccctgcttcacagtctgacggtggtcatcatcttcatcgctcatgatgtcactct

SEQ ID NO: 445483 - DNA, 1126 bp, Homo Sapiens
  misc_feature (64)..(66): n is a, c, g, or t
  misc_feature (73)..(252): n is a, c, g, or t
  misc_feature (869)..(935): n is a, c, g, or t
tcttgggggggccgccgccccctaaaaaaagttgtttaaaaattttttttgggggccgaggggnnnaaaaaannnnnnnnnnnnnnnnnnnnnnnnnnnnnnnnnnnnnnnnnnnnnnnnnnnnnnnnnnnnnnnnnnnnnnnnnnnnnnnnnnnnnnnnnnnnnnnnnnnnnnnnnnnnnnnnnnnnnnnnnnnnnnnnnnnnnnnnnnnnnnnnnnnnnnnnnnnnnnnnnnnnnnnnnnnnnnnnnnnngagaaaaaaataaaaactttattggactttgttacatttattttacagtttagtattgtttgtattttgaattacattaaggcggaggatggggcactgtaatgtttttgaagtttaggacctttaaagctcttaagctgactccgctactgtaaagaaaagcagggtatctgcttcacactggcaaaataaggggctacatttccccatctgaccctcaaatcccttgaaacgctataccctgacataaaccactggtttaaaagacaatgattccaataatttatatcaagtcctgcttccctaccccacacctccaccctaactgagcctgtcccctctgtgttcctctgtctaattctgtaacaaaatctgaaatccagcctccatcagattctggctagatatctctgacctttgaatattgtcttattttagcccataatgagatcagcagctactgtcagtgctatgtcagtgctaaaaatgggttacactttgcaaaataactttattctttaacaatcttgtacactaggcaccaacactgaggctcagctgcctgtggtcataaatcaaatagtacgtactcaacaaataatagctgacaagtttgnnnnnnnnnnnnnnnnnnnnnnnnnnnnnnnnnnnnnnnnnnnnnnnnnnnnnnnnnnnnnnnnnnncttaagagaccacctacctccattcttcttcgaacacatgtttttcctgtttgccacctgaatacgtggaaccaccatccacccagctggttaaaccagaatcactcagaaatctacctctccttcatattattcataactgccagtgttaaaattctaattgctggccaggcacggtggctcatgccgct

SEQ ID NO: 445484 - DNA, 825 bp, Homo Sapiens
  misc_feature (11)..(11): n is a, c, g, or t
  misc_feature (211)..(211): n is a, c, g, or t
cttctctcccngatttcatccatgcctgtaagaagttctcacgtcttctccacatgccacgtcatctggaaccgccaggcgataggttattcggtattttattccaaagccataggacacggatgtggacttgtttttccacgtgcccttgtagatggtgccatccagtgtctgtgatgttccacctcctctgttgggttgtcacctcccnccagagaccttctggtctcactgcttttctgtttgtatccagcaaaacactcaacaattctgtataagaacacctatctcattattcaaaaaacatgcatgtataaacaaaaagaaatatttcaaatatttactttacaattgttttattcaaaggaaattaaatacaaatgtatatttttcattaaaaatggggatttaaaaatagttttataattagtgttatgttgctttatcttatctttgcataaattatgtattattaaaggtttctgatatccatatacattctagtcttttttaggcagctatgagaagatttcatattcaaaagccaatgccacttttctaaagaaacgatctttgtgccaaattagtagacaattgctccaaatctctggtcttgacttccggttgtgtgaagagcagtgttttgtttttttcagagaagggaaagagccttcattctttaggtttgtttttgcctcaaagacatttctatatgggtatctaaagttttagtttataagtctcataatgatttgacccatgcagtccaacttttagatagtatttccataccccccaaaagctggcaggtggtagtcgcactag

SEQ ID NO: 445485 - DNA, 970 bp, Homo Sapiens; identical to SEQ ID NO: 99028

SEQ ID NO: 445486 - DNA, 897 bp, Homo Sapiens
  misc_feature (651)..(678): n is a, c, g, or t
ggaaagtttccaatttatcattttaaagcttacagtacaatatttgacactatagtataggtacatacttctttcattcacatttttcagttgttcccctatttggtgatcacctgattcacacttcagatcgtttcagaactagcagcatgatattttctcagctcttaaattgacttaaatgcttcagatgtttcatgagattaatctgattttaacaaaaggaacaaaaaatattgaaaacatggagaaaaaggggaatttcctttaaagctcttttgatggaaaaatgaaattatgatacatatggtttcatttaatgtacagctgcccctcagactcaaaagggttgaaaaggaattgaaaagtaatttttttcattattttgataagatttgcaatcacttctatccaaaagcaagagcagaaactgcattcattcaacagatgcggcattcatagtgaagtcgagaggaggaaccatgggcatggtctgaccaacctgtcggaaggtcctctgcaggtcccccttccgctctgccgatcgacttccgcctcgggcagtcaacatgtacgttgcggctgtctggcgaagctgcttctgagcgtttgcggaggcgcagcttcccctctgcggggccgccctgcttnnnnnnnnnnnnnnnnnnnnnnnnnnnntcgctcctgtcctggggtcggcggacttctcgctacatgggggcgggcttccgcggtcggcgcacggcttcctgttctgaggcggcccggcggtaggcggtggcgactctgcccgctcccgtttcggcgcggtgaccgagcgcccgggaggctcgaggaccgcatcgtgtgccgttgcgccaagcccggtcctgcgccgccatggccccagtgcccgct

SEQ ID NO: 445487 - DNA, 507 bp, Homo Sapiens
caccttggcacttaaatgtttatttgactaatatttattgcacctacaatattgtcagggattgttttcaaacttcagatatattagtagacaagtatccataaggcctaatctggaattcatacaactaagaaaaaaagaaacaaagtcccacattctcatgtgttcctgctgatgggctgtggatgggtaagttatggaaaggctgggaggagcaacaaggaagatagaggccaagaccagagctttttaatccccttctgagtctggccaagggtatatagagaaggctaaaccctagggaataatacaagtgtgaccctaaaaggtattattttgcaactaaatcagtccaatctaacacagccatttcctctaagttcacaaagcaactttattttcaacacacttgcaactgtgagacaaagttgggtcatcatgtgctggggacactggatttttgccctaaatgacaggtaataaatctaaacttaggaacattttctt

SEQ ID NO: 445488 - DNA, 543 bp, Homo Sapiens
tcctttaatcccagtgagagggaacaggttggaaacaaccaacctgaagaccattcaaaggctcaactgttgattggcagatcactgtgtaactgtttgggtccctcgagtcaggggactgagtcagtatcatttgtgtttcccagtatctcagcctgagattgggagatgtctgaggttgggctccctggaaacagactctgatatagagagctgcacgcagaacattaattaggagtgttcttgggagatgtacttgtaagggggcaagggaggcaggacggggcagagggagtagctgccccacaatgtgctggccatggagacctcagttaattctacagggaactctggagctgggatggccctccagagctgtcctactgtgagagagctgggcctttgcatcccccatcagccagtcattgactaaggctctcccccaggaggggatgtgccttgggtcatgcatttcccaatgagggatgaacctctgagccattagcagcccttattctcagtagctaggggatgggtgtgtgg

SEQ ID NO: 445489 - DNA, 772 bp, Homo Sapiens
taaggttgaaattaggaatttcttttttattggccactaaatgtcctagcaagtttctgacagaagcacagacagaaaatggaaacaaataccttactgggaatgtttccttgcttgcactaaccttgactacagcaataacgcattgcttaacagtcaaagtgcaccaggtcatttccgcaaatggcagggtgagtgactgtgccgttcccaaggaagcaaaacagacacaaacaggtcccacgcgctgggtgtcctggctgagtacagaggaggctgctagaccggcagtacccttttcccaagtgaggaaagccagctgtgacactctgcttgccggcaggggtccccaccctcccctccaccatctggcccatagctgtaccaccaattacattttcttccagcttccacttcatttcctacttttacagcatttcatcctctccttttgcagcctttacaaataagatcagaaatgtgtccaaacaagtgcattaagataggcccctattggccaagtcaaagagctctcacacatggtggtctttttgccttctcaagaggaacttgtataaacccatgtaccaacatacttgatgtaatcaaggaaggatcccctccaaattttaagcatttaattgcagagtcttgtcaagaaacttcttcccaactttacaattgaatggctgaatttgaaagaaggtatccagcttaatagctaaaataatactatttacaaaataagagaggaaaacacctattgatatcc

SEQ ID NO: 445490 - DNA, 539 bp, Homo Sapiens
  misc_feature (473)..(473): n is a, c, g, or t
  misc_feature (498)..(498): n is a, c, g, or t
  misc_feature (504)..(504): n is a, c, g, or t
  misc_feature (522)..(522): n is a, c, g, or t
ttttttttagccattcacctttatttcagagtgttccttggttacagggaggggtgtgcaagaccctgggctctgggggaggggctgagctgcccagtcagagccggcctcagccccctcagccatccagggattcgaaagggtgcttggtctcaaactaggtgctgactctgagggctttcacggtcccttgaacttctgatcctccttttcctcaaaatcagtgctaggactcataagttatggagtccaagattaacaatgctaaatcctcaagctgactgaagaatgccgagtttgactgtgaaatagaaatgttaaaatacagaaacaacccttctattgtgactacctgttaaggtcctgcaattaatacaacgaaagtaccatttttgttgaaaagtaggtggttaggggctttccaaaagccctgggtagctttgcccacaaaggaaaacgagtttagacacganggggaagtaggctgtgttcagtttntttagnatttaggggtagtttttnccgaggtttgaggtagg

SEQ ID NO: 445491 - DNA, 541 bp, Homo Sapiens
gggggtcaagttgggtagggcacgggaggaaagaagtatgacaataacataggacagcagccggctctttttttcatcaggatgtggagagtgggcgccttgggaagacgaaattgagtatgtgcgggggaggggtcatatgaaacaaggtcgggaagggggcggggagagctggggctctggaggagcttggggctcgcgctgcgggggaggaagcgccttccgcggtcgctggggggaagtggttaggaggaagcacgggcagtggaggggactgctggagggtcccatctgggaaagcaggcacggatgcggggacatttccgcccgtcaccctggcaaagcgctcgcagggctggagggacagagttctcagatccaagtagagaaaaccgggaacggttccggctctggggactgacattcatcgcggcagtttagagaaaacggagcaagtgtacaagcacgccaacccccccggtgcccaagctcggcgctcacgcggctaggatgacgcccgtgggacgccccaggggccctg

SEQ ID NO: 445492 - DNA, 1924 bp, Homo Sapiens
  misc_feature (1561)..(1601): n is a, c, g, or t
ttttttttcaagtaaaaacttaaaacgtttatttctggtagaaatgataaatactttgcattaaaaatctggaattcaagttttcctcgtacttcatgctccctccctgccccagaaccttacaaaaatatttctgtctagagagggaaagagctggtgcctgctctggaggcaacgtccaggtccgggaaaggcactcgtggtctgtgatctgtctcagtgatgggaggtctccactcgccccacaggcagcctcggggccagagatgagaatatgctgtaatccagtacaggggctgcgtcgtgggtccccaacagctccttctttggggatagtgagccccttgttggggagtaggaagggactgaggggccagctccttccagatgtgtgcatggggaagggagttgtgtctggggaggtgggtgtccaggtatagactccttttagggtctaaacgttcaaggagttcaacagaacaaccagaggccatcatgttttggcagcttgcaagtgaacactcccggggaagatgcaggagggaggggtgtagatctggggagcccttctctccctctctgcccgcaaggaaggcacagggtgggaatgggggtgccttcatgagaccccctgccatgccacacccccttcacagtcatgtgagatggggccagaggggcccaggctctagggccaggggagtggggagggagggaaataaggcctcaggtgggggttgccaccccctctagtggctggtgaagagcagtgggcccagagcagccacccgccaggttgctcccaccctagcctgggtagggatcctcatcccagagacacagctgcctctggggcacgtagaagtcgaagctgtagctcttctggcagctgcggatgccacacttgtagggcgtgggccggtcgcggctgtggcagtacttgagcatgcaggggtaccaggccaggctcaggccatagtggcagacgcagggcttcccgtggtcccccacctgcctgcagcgaggcagctccgcctgctctgaggccttgggcagagcctcgaacacagaactgtccacaccttgctccagccagaaccggacatcctcctggcgggtgtagatggcatccacggcctcggcacacacgttgtggagatgggggctcagcagggccccctggctgaagttgacagcgacatccatgtgcagatgctccagaccccgaacctcctccgcctgccgcactgcccggggatttttctgccggagcttggccatggcctcactggggatgatctcattgtgctgcagctgggtgacaaagcagagggcctggaactgactctgccccttctccagctcccccaggatcagggcccggaagaccttcacatccttcttgaagtcggcggtgaaggagacgagggtgccgtcgggctttgcgcagctcgaggctgatgctgtccgcgtcgctgtccggcctgcaggctctcctcggtcacctggccgtccggcaaccgcacgcggacccgcagctcggccgggcgcacccgttccnnnnnnnnnnnnnnnnnnnnnnnnnnnnnnnnnnnnnnnnnggcgcgcacaggggtaccccgggaaggcgcatccccgggggccgctgccgtccgcaggccccggcgcgccgcgtgggggcggggagaggcgcaggcaaacttcgcccaaagttgggggctagttcggggcgcccgggagccgctccgccgggggccttggccgcggggtcgcccgcgaggtggcgcagacagcacgtgggtagcgctcagcagggcgcccccggcggcccacgaggcgcccacggcgctgccccggcccggctccgcctcgtgccgaattcgccacccaggcctcgctaccttatacgcgctgagatactgcc

SEQ ID NO: 445493 - DNA, 1309 bp, Homo Sapiens
  misc_feature (328)..(368): n is a, c, g, or t
ggggctggtacggccggaattttgggatgcaaaacacaggctcgcagcgctggagcccggggccgcggagccgggccggggcagcgccgtctccgcctcggggccgccgggggcgccctgctgagcgctacccacgtgcgtccgcgccacctcgcgggcgaccccgcggccaaggcccccggcggagcggctcccgggcgccccgaactagcccccaactttgggcgaagtttgcctgcgcctctccccgcccccacgcggcgcgccggggccgcggacggcagcggcccccggggatgcgccttcccggggtacccctggcgcgccnnnnnnnnnnnnnnnnnnnnnnnnnnnnnnnnnnnnnnnnnggaacgggtgcgccggccgagctgcgggtgcgcgtgcggctgccggacggccaggtgaccgacgagagcctgcaggaggacagcgactcggacagcatcagcctcgagctgcgcaagcccgacggcaccctcggctccttcgccgtcgacttccataaggatgtgaacgtgttccgggccctgatcctggcggacttggataacgccgcagcgccgaatgcacagtccctgtgaactgggcacgcgagatatgggtgcaacggagatcatgcccacgagcatgggaacgcccagtacccggggatgccgaaccccgccggcccaggttctgtcttgttccgacgaatctaacaacgacttccgcgccatgccagtagcggtccgcgtctaccgtaccccgtcaaaagacagggcgtgcgctcgacggggcccgaacagcttctcagggaccggggtgattggcgagggacacgaccctactacacggacttcaccatcggtcaataagttccttactcctcacctacgccatgcggcctgggacggacactaccacattgctaccgcgcctcccctaatgggcccgatgcaacttgactgatcaatgaagggctctaagagagatcgacagcgtcgctcccgcgacttctttaaagctgtaatcccgtcgcggagtccggtcgctaattactacttatacgcccgtccacacccacgctggcttctctgagacgctctccgacgcgcgcagcaacagcgatgcgcgcgccgagatgtagattatatccctgccgcaaatacactgcttgttagcgtcaaatggtatattatatcacacgcctttatataccgtggcagacgatcctaggcacttacggcagcgcgtaggcggcctctttgagcacgagagactgctccgcgatcccctacccattccccag

SEQ ID NO: 445494 - DNA, 228 bp, Homo Sapiens
ttttcataaaacaaaatttatctttaatttgtaagtgtcaacagcagtacaaaagatggagtgatgacaactagattagggtagagaggacagtcttgaggtaaatgagcataaataggcagttcttatagacactcccctaaggggcctgagccccatcacggcatatacattatcacccaaagatggcatgttgaacatatcaggaaagcaccttgtgcaaaaagg

SEQ ID NO: 445495 - DNA, 509 bp, Homo Sapiens
cagaaaggtagttttgttatttattaagtgtttattaaatgcctccctaaaggtcctggatgccactagaatctttagttaggactgagatgtatatgcaagagtggcacatatcaaaatatctgctcattggttcagatccaacgtaagttttccttgaaccagaacctcatattaacttaaagtactcaatggcacagcatcctctaatttaaagattttaaaacaaaaacataaccagaagacccagttttcaaaattgctgttaaaggccaacaaattagtgggagggaaggaataaaaaggaataacctctcttaaaataacaaatctacaaagtcctctgccacaaaagcagatctttgtcatttcccatgagataatcatcaccttgctgaaaatgagaaaggcaccccccgcaggcagggggaaaaaacccactcgctgaaacagcttctacttgtttttaccatatattccaggggttatgtgtgtggaggggttggttt

SEQ ID NO: 445496 - DNA, 576 bp, Homo Sapiens
cactgggacgaggttctttaataggagtaggaaagagaaaaataaataaacctcataaattcaggagagcaaatgatgctgaccttgtcaggcaggcagcctgagaggggtacatggtaggaactgcctgcccccaggcctaggaagaggggtgagccagggtcagggtggaacagcacccaagagcccactgccccttgtgactcagccaagcagggccaaggcagcttttccatttcagcctcccgttccggacaggcagaggggaggggagggccctcagccagggagtggccgtccccagggagctgtgaggtagtgccaggatctgcctcaaggagtggacaaggccaactcagggcaggcctgatggggcctgaaagcctggggcaggagggttcggggttagagtggaggtgagtggtccaaccctccaggtgaggaaactgagcccagagctggttgctcaataggaaaggcagagtggggccaggatcccactttctgccttccagtccatagtctttgcctcaacaaatatatgacactatctagagaaggagggaccgagtgata

SEQ ID NO: 445497 - DNA, 465 bp, Homo Sapiens
agcccaagctcatcctggacctgtcgcactggaagcaggcggccggcgcgccccccacggcacgggggctggcggacacgggggcgcgcgaggacgagccggccagcctcttcctggagatcgcgcagtgggtcaagagcacgcagggcggcccagagcacgccagcccgcccgccgacgaccccgagcgccgcttgtctgcctcgccccccggccgcccggccccggtggacggcgggcgccagcccccagttcgacctggacgtgttcatctcccgcgccctgaagctctgcaccaagcccgaggacctgccggacaataaactgggcgacctcaatggtgcgtgcatccccgagcaccctggcgacctcgtgcagaccgaggccttctccaaagaaaggtggtgagggcggaggggccgctccaggccccacagagcaggagacccccagagaaagccgggg

SEQ ID NO: 445498 - DNA, 875 bp, Homo Sapiens
gggtgggaacgaggatggcgaccctctgtaagctgtaacattcctcagggcgataccggcctctggacactttgggatttttctgcctggtacctcttccaaagtgagatctggtttgaaaatgagcttgttctggcctctggaggtaaggagacacagaagggcagttgtcaagttctaccttcttcgtggatgcttcattagtcagagtttttcccttcccctaaatgagggtcttatggaaattagccatgaactcctttgctttaggaatctcttgaatggcacccacgaagtagttactggtggcccacccaaccactgtcaggcactaagtcaacagcaacagtaatcggaatttgtaggaaaggtggaaagtcaggttgaagcccatgttttttattacgtgaataatatctatctctctgcttcactgcaggcaagaaagcttcaagttgagcttttccaatctgattgcgaacttgatgacaactgaagatacaatgcctggtttttctcagtagttctgctccaacagtctgagagtcctttctttctctctacttttgtgaatgcttgagattttccataatagtttttaaaatctggcaaggaagataagctttaacagaatggcacttttggtcacacccactgccttccgctcctctgcctctaaaagtgatacttctccttggcttggggaggaagtgttgcgtggcctgcctcttccttcatgaagccacaaagtgccactgcgtgagttccgtggcacattggaacacagtgtacccgcctctgggcaagagccgtggaaatccacacatgaagccaggtggtccccggaggcggccgcggcgagctagcactccgct

SEQ ID NO: 445499 - DNA, 937 bp, Homo Sapiens
aggttttagatggccacattcaaggattgggctggattaacgtgtttagcttcagcttgggtggatgacttagagaccataatccagctgttgcttctgcaggaagggatgcaagatgttccagcaggtacaatcaggtgtttctctctgttccggtggggaacgaggatggcgaccctctgtaaagctttacattcctgagggcgataccggcctctggacactttgggattttctgcctgtacctcttccaaagtgagatctggtttgaaaatgagcttgctctggcctctgaggtaaggagacacagaagggcagttgtcaagttctaccttcttcgtggatgcttcattagtcagagtttttcccttccccaaaatgagggtcttatggaaattagccatgaactcctttgctttaggaatctcttgaatggcacccacgaagtagttactggtggcccacccaaccactgtcaggcacaaagtcaacagcaacagtaatcggaatttgtaggaaaggtggaaagtcaggttgaagcccatgttttttattacgtgaataatatctatctctctgcttcactgcaggcaagaaagcttcaagttgagcttttccaatctgattgcgaacttgatgacaactgaagatacaatgcctggtttttctcagtagttctgctccaacagtctttaacaaatggcacttttggtcacacccactgccttccgctcctctgcctctaaaagtgatacttctccttggcttggggaggaagtgttgcgtggcctgcctcttccttcatgaagccacaaagtgccactgcgtgagttccgtggcacattggaacacagtgtacccgcctctgggcaagagccgtggaaatccacacatgaagccaggtggtccccggaggcggccgcggcgagctagcact

SEQ ID NO: 445500 - DNA, 1419 bp, Homo Sapiens
  misc_feature (13)..(13): n is a, c, g, or t
  misc_feature (1341)..(1377): n is a, c, g, or t
ttttttttctagngcataaatgtgtatttaaaatttcatagtaaacaaatacttgtaagtgataatttccccattttccaaataagataatgttgaacagacattatgatgaattttatatttgatctctttttttggtaaatgtggttgtgaaaattgagttatatattcctcttttcaaaattctccgctaaacaagcacttgtttttgatattggtcaagacatttggcatactaagtaagggagcaatgctggggaagatacctgagaagacaagcgtgccctcccctcactatctccctcactttttttgctttgagggttttaacatcaagatataaattattttaaggtctcaaaataatcctttcacaaaaataagacagttttatgttgtaaaaacattagttatttgtcaaaggtatgttcttccatcttcatctgtcactagctgtcggcatctcctttaaagatcatttttttcttcataatgacacctgcatgcggctcgttggctgtccagatatggtttacaacctaaatgtataacactgtcaaaccagagcttccactgttgtttcacatgcctgaaacatgctgagttagtcctagtgttttctggtacatctcggcagatcttggagaggcaatactggaattcttcatcacagtcattcttgcttttgccacaggtctcatagcacctgtcgtgttggttgcaacactttgtcagggaagggataccaatgttaagatgaacaccaaacagtggagagccacatccattcggtggggagggtttataaccataacgtgggaaaggcttagatccgtcactgcatttatactggcagagaccgtcctcgcctcccaggaggtccaaggcggcgttcaggtacgtgtctatcttatgaacgccgttccggatggtcttcagggtggctctccagtcggtggtctgggcctgctcctggcacctgacaacagcggccatgaggaggagcaggagggtgagcgcggggcgcgagagcagggccatgcgcgcagcgccgggctctacgggtccccgagccgcggcgcggggcgcgtccccacagagtccccaggacgcgctaggcagcggcgcgggccccggacttggcagcagccagctccatatccacgcctccttcccggctggccctcaggatctcgctgtctttacgtgaaccgcctcgggcaggcagcgccgtcgcggggacgcgcccgctcacctggaccagcgcgcccgctcacctgggccagcaaccgtcccccgcccgctctcgacgaattcgagctcggccgatttggcctgatnnnnnnnnnnnnnnnnnnnnnnnnnnnnnnnnnnnnncgccgccaccgcgataagcctccgattcgccctatagtgatc

SEQ ID NO: 445501 - DNA, 450 bp, Homo Sapiens
ttttttttagatgtaaaatattttatttgtaaatggtgatcttctaaatctgtgtccacaaattccaaaacccataacactctgtatacttcaaaaaattcaatttttgccaacattagatactattatacagaacagaaaacaacaaaaacccggtaggacaaatactggtaggatgtcaggatattgtacaagagaagaaaaatattcaggaaacaaatttcatacagctatttatcaagagaaaaatatatacaattgatttattctgtaagataaaaatacatcatgccatatacaagttcagaactgcatcactgaatataccaacagtttacagtccacttgaattgtgcacacaaaacttcattttatacttagcctgtgaagtgtcagtaccagaattttaagtacaaaataaaaagctaacctggttcaaaatgctgatta

SEQ ID NO: 445502 - DNA, 419 bp, Homo Sapiens
taatttaaagaaaacttctttattaagtaaatggacagttggtacacagatattgcaaaaatttcgaggcgggtacatgaatgactgaaattcaggagacgcggggagttagcacagaagcactttcctcattcagagctcttttggctgcgagaaacagacacccaatcaaatcagcttcagcaaaatgagagaatgtatcctgacaagggacgctcacagggcctaaaggaagagtgctgggcccctggaggactgagggaagccggcaggtccctggaggcggtgcccggctgctctccaggcgcctgtgattcctctggtccctgccttgctatgcgtatcttccctctgagcagagccattttctctaccacattcatgcaggtgcccatcccccgcaacacacacagacaaac

SEQ ID NO: 445503 - DNA, 631 bp, Homo Sapiens
  misc_feature (545)..(568): n is a, c, g, or t
aaatatcactttaatctaattttataggtatagaaactggggcctagatattgaaaggattacctaagatcaagttagtagttagagacagaaccaggacttgaacttttatctttcggtttccaatctagtgttcttctactatatactacatgagttttaagtcaatgagatgtcctagagttttaaaggacactaatatgtgaaactgatggtcacatatattactgttattaactataacaactatgccacaaaactagcaaggccaatttaatagtatgtgttatacttataaacttagtgttttttgacacagagttccacttctcaccatttattatagagaaacagtcaccatacttatgcatagggtgacattacagagctattcattacaacactgtttgtaacagcaaaaaactggaaacaccctaaatctccaacagtaaggaatagctaaacaaactacacagcagttaagaaaaaggagttactggggcacatgttctcaggatttcctggggctgtgtcgcaggccattnnnnnnnnnnnnnnnnnnnnnnnntgagttacttctgtatgtagagacatggttaatatattgttgaatggaaacaagcaacttgta

SEQ ID NO: 445504 - DNA, 324 bp, Homo Sapiens
tttgtaaaaaattaaggttattttggggacggtagagcgtccagacacatccttatttgcatagctgcgcagtttttaaaaatgcaatacgtttctacctgttagggtatgtgatttctggctggtaagctacaccgaatcttggctagcacagttgaattccatgtcagatttgtaaacgcaaatttgctctctgcatttaaatatattagatatatttaggtaactacatttaaatgtattgagacatttaaataaatttgccgtctgtatctaaatgcgctccctcctcaaaataaatatctgaagtgggccgagagcggt

SEQ ID NO: 445505 - DNA, 510 bp, Homo Sapiens
ttgttgtaaaaaaaaccaagttttttttctttcctaatagctagttccaatgatgtttattacccgccctgagctgaaataacagtagacaaagatagaagctagcctctggttttacaaagcctttgtacaagtcctctctgtcttttctgtccatgccagggaaatgtattgctggtgctagagggagaggaaacgtggacggccaagaacagggcggcacagtcctctgggctggaggcctgtgttccttcccataagcagggcctgtggggtgtatggggcagaacataggcctccacaccaaactgacagcagagaaaagccaggcaacctgttcaatcgccccagcagtgacctgggttctatgtgtgggagtgaactgctgcggccctggagcgactgctcccagccttggggctgatgtggtctagaaggacacctctccacacaagtggcagggccaggaccctggccaggcagagaggttgggtgggtggaggacctatc

SEQ ID NO: 445506 - DNA, 1122 bp, Homo Sapiens; identical to SEQ ID NO: 310402

SEQ ID NO: 445507 - DNA, 216 bp, Homo Sapiens
  misc_feature (64)..(116): n is a, c, g, or t
gttgtttgtggtgctggtggttttatttatttattttttctgaaacagggtctcactctgtctnnnnnnnnnnnnnnnnnnnnnnnnnnnnnnnnnnnnnnnnnnnnnnnnnnnnntgggctcaggggatccactcacttcagcctcccaagtagctgtaaaatgcaatttgaggtctaggtgaatgaacaagtaacctctaaatcataaggctat

SEQ ID NO: 445508 - DNA, 777 bp, Homo Sapiens
ttaacagaataaagactttatttttatttaacaaatgataccatattaccttcatggtgggaacagcttctgcaagcattaaagggaagagaaaaagttagaattgccgcctcagtttcttggcaatattgaggtccagatattcatccagaaagctgtttgcaattcccagggcacctaggagggtcaacaaggccaaaatccccagactcagtcggaaaccggtgatccgttttttagcagcttctgaatatccccagaagtataggtgacggccatatatgtacaccagacccagacaagtagcaaaaacttggttgaaataccacccagccatccacaatgtaattatgaatataggataaaactccacacagttttgttgtgcccgaaatactctctcaaactctggtgacccagtgactgctgggggcgtaactttgtattttaatcttgcctttccaacttgcaaagcaaaataactttgctgacaggccgagagaatagagacagcagccagcaggatcgagttcccggccatctttctcacggaactatttgtagagcgcacgggaagataaatggcgcttcttgactttgaatgctgaccttccttatcgggtaaacaaagttggggaccgggtggggggaaaaggctgattcaagcggctgaatgacctttgctctggaacagaagtcaggaaggcaggcaggtctgggctgcccctcgtgccgaattcgccacccagcctcgctaccttaccgctgagatactgc

SEQ ID NO: 445509 - DNA, 693 bp, Homo Sapiens
aaagactttatttttatttaacaaatgataccatattaccttcatggtgggaacagcttctgcaagcattaaagggaagagaaaaagttagaattgccgcctcagtttcttggcaatattgaggtccagatattcatccagaaagctgtttgcaattcccagggcacctaggagggtcaacaaggccaaaatccccagactcagtcggaaaccggtgatccgttttttagcagcttctgaatatccccagaagtataggtgacggccatatatgtacaccagacccagacaagtagcaaaaatgtgcccgaaatactctctcaaactctggtgacccagtgactgctgggggcgtaactttgtattttaatcttgcctttccaacttgcaaagcaaaataactttgctgacaggccgagagaatagagacagcagccagcaggatcgagttcccggccatctttctcacggaactatttgtagagcgcacgggaagataaatggcgcttcttgactttgaatgctgaccttccttatcgggtaaacaaagttggggaccgggtggggggaaaaggctgattcaagcggctgaatgacctttgctctggaacagaagtcaggaaggcaggcaggtctggggctgcccgccacccaggcctcgctaccttaggaccgttatagttactggccgtc

SEQ ID NO: 445510 - DNA, 507 bp, Homo Sapiens
aatgactggccttgacctagcccaccatctccaatcccagatgtgacctgagtgatcaaccagacaagaaagcaagaggtagcaggagacatgatgagggggaacacaatccaggatcactctctacccccaaatctactgtcccattagactagacacctgagttgttttccctacatcagccgtgagctgaggaggaactgaggtttgactattggggcccctggccttactgacttaagtagatttaaaacttctggtcctatgtggagacagaggaaagggatggaccctgaggcttgtgtccctagaaggactctcttttcccagacctcccaagccttgaaggcttcaggaactggccactgaaggggtggggtaggagggacattaactgccatcaactgagcggcaactgccatcaactcaatggccatcaactccacctgtcctgctctgtttgaataaggatctgtcaactatgtaacatcccatccgcatttcagc

SEQ ID NO: 445511 - DNA, 691 bp, Homo Sapiens
tgatgaaatagataattcaggttgtcatttataattttagagtttgcttcacatatacaatgctgtgttacgaaacaatgaacacttttataaaaaatttatttcacacttttatacaaatatccacaggtaatttctaatcatgaaataattttacaatgctagttagtacaaaaatgtatcaaatgcaaacagaccagtgacttgacttgagatgacatttttaacaaccataaatctaaacaccataacatctttgtttctttgttgaaccaccctcccaacacccttttcaggacattcatcttttttttagtaacacaggtctaaaaacactgtcaaagtatcagctccttagcaatctagcaatctaaacacattagggacacaagttccccaagcaagaaactgagactttaaacactgttataacctgttttacagaaatttttgtaaacaaaatatattttgtgactaagaattccaaagtacaaccaaaacaacgtccttagtatcttaaggtttaagatttccgaaaaggaaaaaagcccccccaaaacaacagtggcactaccaactgtggttctattctttccaaacacagacactggcttatactatatcccaaaccaatttagcacctgtttgctgttgctccccatataacttaacattgtgaagcatggtaatt

SEQ ID NO: 445512 - DNA, 476 bp, Homo Sapiens
  misc_feature (299)..(299): n is a, c, g, or t
  misc_feature (429)..(429): n is a, c, g, or t
  misc_feature (442)..(442): n is a, c, g, or t
gatgaaatagataattcaggttgtcatttataattttagagtttgcttcacatatacaatgctgtgttacgaaacaatgaacacttttataaaaaatttatttcacacttttatacaaatatccacaggtaatttctaatcatgaaataattttacaatgctagttagtacaaaaatgtatcaaatgcaaacaggaccagtgacttggacttgaggatggacatttttaacaaccataaatctaaacaccataacatctttgtttctttgttggaaccaccctcccaacacccttttcngggacattcatcttttttttgggtaacacgggtcttaaaaacactggtcaaggtatccggcttcttgggcaatcttgggccatcttaaacacttgggggggccacaggtttccccagggcaggggactgngggctttttaacnctgtttattaccccgttttttcgggggatttttt

SEQ ID NO: 445513 - DNA, 671 bp, Homo Sapiens
  misc_feature (259)..(310): n is a, c, g, or t
  misc_feature (388)..(435): n is a, c, g, or t
ctttcaaaatactccttttcttttgcaataaattatgctgcatctcctttgctgtctcatttaaattcttttaaaccaagaagacaagaactgaggtatcacaacagctgtcaacacatgcattttgctttattcatttgctttatcttatggatctctccattttgtagagtattccattgtatagctgtacagtaatttagataaacttttgtattgatagccttttcttttggagatgggggtctcactctgtcannnnnnnnnnnnnnnnnnnnnnnnnnnnnnnnnnnnnnnnnnnnnnnnnnnntgggctcatgccatcctcctgcctcagcccctgagtagctgggacaacaggtgcatgccaccatgccttgccgagttnnnnnnnnnnnnnnnnnnnnnnnnnnnnnnnnnnnnnnnnnnnnnnnntggactggtctggacttgagattcagaccagatctgtaagccactgcacccggccttgatagccatttgttttcatacacagcagcaattagtagccatttaagatatctgtgcgccagcctacaagaaatacaaatgtacagggtaaaatcctagctggatcaaatatgagctttgtaaatttttaaaaacttttttattgagttgtggtttatgcctgtaatcccagcactttg

SEQ ID NO: 445514 - DNA, 1460 bp, Homo Sapiens
  misc_feature (749)..(749): n is a, c, g, or t
ttttttcaaatgcaaatagtctttattatgagaaagcagtgttatctaggaaagtcacatgctggtttctttctaataaaatgacaaagcaggtttcttaaataatttacaaagggcagaaattgctcttgaacagggctacccctcctggcacatccacagtgctctgcactgagcatataaataggtacccgtgagcccagggtcgtaagcctggaaatatctcctatgccttcctccgagtccctggtagggaaaggagggatgagagtggggccctcaagagccttggcaccagaaacacagtgggtgagtgactctgcggatgactccccaaaaaccaggcacccgggtacagagctaagagctctcaaatatctgatgctagcacttcatgttatagatgaggcaaatagaaggctcaaggtcaagtgtacgatgagtttctaagctcaagagtcccctaggaaagcagaaggaacaattctccccctctgcaaggtctccccaagacactctcaggctatggcaggcagtcactgatgggtccagatgtggctggagcagggggctctgggccccttgttaggtggcttgttagcagtggcccagggggtactgacgacttcccgggggttttttccaggaagctcacggggaagcatagacatccttgagtatgaagccttggcgttcagacagggcttgtttccctctttccggccataatggcttcatctagctcttgngacagcttctggagatgctgaattcccgccccccacaggctctaggtcactgtcagactcgctgggagagcagaggggctctgttgaggagtaggggctccggaaggcagcctcccgccttgatcgccgtaatgggtgggcatgtgagcccatccggacagagaggcggtgatgctccttctcccaggggtctgcggctgagtgggcaggggcggctccagacagccgggtgctcttctggctcaggctgtgagttggggatccactgcccttctgtgctcctctcttccgcctcctggccttcacctgggtctccaccagccacttggtgccactttggcaggactcctggattctctgggacacggcacccaaagcactcttagctgagcgagctgcagcctggaggccctgctgacctggctctggggtttccaggcgtttccaggagggccctgcgcggaggttgaggttgacggctctcaggggcagcctcctttggaactgtctgcacagggaccccagggcccctacagaggtctcctgatggctgaccacaggctgcagctccttgctgtcctccagctgctcctggtgctggagagatctccggcgcacggaggtccccatgttctgccaccgagaagccatctgcctggccaagagtcttctctgtccactagaccccgacaccactaaggccgagcacag

SEQ ID NO: 445515 - DNA, 993 bp, Homo Sapiens
agcaagtgggccccagggggtacttgacgacttcccgggggtttttttccaggaagcttcacgggggaaagcatagacatcctttgagtatgaagccttggcggtcagacagggcttgtttcctgcaggcacttcctcagtcatgaatgagagagacgatgtcaccactctcttccgccataatggcttcatctagctcttgggacagcttctggagatgctgaattcccgcccccacaggctctaggtcactgtcagactcgctgggagagcagaggggctctgttgaggagtaggggctccggaaggcagcctcccgccttgatcgccgtaatgggtgggcatgtgagcccatccggacagagaggcggtgatgctccttctcccaggggtctgcggctgagtgggcaggggcggctccagacagccgggtgctcttctggctcaggctgtgagttggggatccactgcccttctgtgctcctctcttccgcctcctggccttcacctgggtctccaccagccacttggtgccactttggcaggactcctggattctctgggacacggcacccaaagcactcttagctgagcgagctgcagcctggaggccctgctgacctggctctggggtttccaggcgtttccaggagggccctgcgcggaggttgaggttgacggctctcaggggcagcctcctttggaactgtctgcacagggaccccagggcccctacagaggtctcctgatggctgaccacaggctgcagctccttgctgtcctccagctgctcctggtgctggagagatctccggcgcacggaggtccccatgttctgccaccgagaagccatctgcctggccaagagtcttctctgtccactagaccccgacaccactaaggccgagcctcgtgccgaattcgccacccagcctcgcaccttagaaccgtatagttactgcctcttactacaccgcgtgggtaccaaactta

SEQ ID NO: 445516 - DNA, 1046 bp, Homo Sapiens
  misc_feature (33)..(33): n is a, c, g, or t
  misc_feature (240)..(240): n is a, c, g, or t
taattgtgggctgggaagccaagggggggcttntttgggccccccttggttaaaggttgccttgtttagccaggtggccccaaggggttacttgaccgactcccccggggggttttttcccaggaaggctcaacgggggaagcatagaaccatcccttgagttaagaaagccttgggcgttcagaccaggggcttgttttcttgcaggcactttcttcagtccatgaaatgagagagacngatgtcacccactctctttccgccataatggcttcatctagctcttgggacagcttctggagatgctgaattcccgccccccacaggctctaggtcactgtcagactcgctgggagagcagaggggctctgttgaggagtaggggctccggaaggcagcctcccgccttgatcgccgtaatgggtgggcatgtgagcccatccggacagagaggcggtgatgctccttctcccaggggtctgcggctgagtgggcaggggcggctccagacagccgggtgctcttctggctcaggctgtgagttggggatccactgcccttctgtgctcctctcttccgcctcctggccttcacctgggtctccaccagccacttggtgccactttggcaggactcctggattctctgggacacggcacccaaagcactcttagctgagcgagctgcagcctggaggccctgctgacctggctctggggtttccaggcgtttccaggagggccctgcgcggaggttgaggttgacggctctcaggggcagcctcctttggaactgtctgcacagggaccccagggcccctacagaggtctcctgatggctgaccacaggctgcagctccttgctgtcctccagctgctcctggtgctggagagatctccggcgcacggaggtccccatgttctgccaccgagaagccatctgcctggccaagagtcttctctgtccactagaccccgacaccactaaggccgagcacagccgcagcacagctgctcctccctcgtgccgaattcgccacccaggcc

SEQ ID NO: 445517 - DNA, 653 bp, Homo Sapiens
ggaaggcgccggccgagcccacctcgcccgcagcaacccaggcccgggtgcgagggcttgaaaccacggactcgtacgggtgcgccatgcgccacccgcgggtagatgccctgcagcccgtccacagaggtgtgcaccttggacgatgcacaccggctggtgggagccgtcctgcgagtgcgcggaggagccgccgctggaggtgagggagaaggcgctggagccaggcgagccgccgcagctgaacgagtcggacatccagggccgcggcagccgcggctgctgccgcggccgccgcagccgccgaggacgagccgccgttcctggaggccccggacacgccgaagcttgagagactggaacccactacgttgcagctggcggaagaagaggacgaggagcgtttccaggggtggaagcctttgccgaaggaagaagagctgtccgagagggaggagggagacgggctggggctgcctatcttattacaggtagcggcaagcatggccagaggagtcgatcccaacctcggttcttcccctagaagtgaagtttgccatcacacaaaagtgccctcctcctctcagaggatcttttttatattgataaatcagaggcagtgttttttttagaggtgtgcaatacaatccgct

SEQ ID NO: 445518 - DNA, 314 bp, Homo Sapiens
ccgggcgggcaagcctttgatttgcccccctgaaaatcgcggaattgagtttcgatagattgatttttaaaacttttttggagtagggggtataggggaatcatttaatttaaatcattaagattcccctgctcaaacccagattcctgtgtacagatgctatttagagggaatcagaaaaatgccaagccttttctctttgaatgtgctatttttataactgaacttgtacatatgtataaagagagacacatcttccttttactaactggataaaaaaattttaaataaaatggagtgagataattttaggt

SEQ ID NO: 445519 - DNA, 395 bp, Homo Sapiens
ccaccaccacaggcctcctgatggagaattttccagttactctgggattgggtttgctaagcatcccctctggcccctgatctggggcatccctggggtccccctgagaccaaacctgggagaaggagggactctgggaacatgcaaagtgggggagcagagaccccgccccaccccgctgctctacaggatggtggctccagctgcatctgggctccgagggtccttaacagcgatgatgaagttgttggtccttcggctgccatggacccaggataagacatctactttctccacgtggtgacccctggcttccaggaactcaatctcttcctctgtgaactcactgtccacctgcaggaggttggactgcaggtccgggtgtaggcggccgc

SEQ ID NO: 445520 - DNA, 634 bp, Homo Sapiens
  misc_feature (603)..(603): n is a, c, g, or t
ttttagagaatctggatctattgaaacatgtttaaaacggggttggtcacaacaggatgggcacaaatgggagcgggggaggggagtggggccgcaccagcccctgccagtgcctgaggctgcagcctggcgagtgcttttgcttctgcttctccacgctggtggttcgagatggtcccaagccccactggggcaggccctgccttgccctgcagaggcagggtggctccacttccccatctcctcccccatgggctgcaggggcatttatgatgcccaacaggtggcactgtcgcgctccttcctccctgtctccgtggctcagaaacaggttaagggtagaggtagatggggagacgtgggggccacacagtctccggtggcagtgagggagcttgggaccctgaggggggcatgctgactccttgctggagaaaaggcacctagataggggagctgggcttgggggcctcccagggggtcctggggtgaggtggggagggaggctgaacgaagcaggaagcagggtggtgggcagaccccaatcctggtttccaaaccctcaccggctgcgggagaaggaagaaggaaggagtcctgganagagccctgccctggtcccctacgcctgagc

SEQ ID NO: 445521 - DNA, 576 bp, Homo Sapiens
tttaaaattcacaattatgatgtttatttaggaaaataaacttgaagaaggttttctattaaaaaaacataagaatcatatccaaattttagactctccatcttctttggtatgaaaatcaacattcataatagaaaatattttcttttgaaaggtttagttgttattgggtctataacggttttccatataaggaaaatacagtattaagttatctgtaatcatctcacttattgaacaaccaatgaatgcatgcaagtaaccaagcatatgtgtgcagagaccagcatcaaggaaatattcattcatagataaatgttttctaataaaatatattttaagtttttaatgatcttctgctatcattttttgccatgttatctgaatagccatccagatctgtagtaaaacatcctgttagttacataactcaagaagtacttccccaaggaagctcacaccatcataccaggacttagcaacatttatctttcaacatgagtataccattaaaatttttttgtatttctcagaattgtattcttcagtcttttccacaatatagtatatggaaat

SEQ ID NO: 445522 - DNA, 483 bp, Homo Sapiens
taaaagcatacaaacaatatctttattacctgtaatatacttaaagagcaggggtccccagttggttaaacattgaaaacagtgggagagcttcagaatagagaaaaatgactgtgcctcacccctcacttactgagtcagaatctgcagagagggaagtgctgagagatgtctttttaaaaagctctccaactctccaggtgcttctgtccaccagccagatttgggcaccggtgctgcccagcatgccccaggcttcagggtatgggagtcgccctgggcttgggtcaggctggggctctctcattcaccagggtgtggggaggggcttgagcctgcatttccagcaaattcccaggtggggcttgaggtttgcttgatcttgcagtgctccatctctgggttgtgtacctacacacccgtcacctttgttgtactgggctcaggtataagttgcagggtgcaccgtgtacccccgtagcc

SEQ ID NO: 445523 - DNA, 539 bp, Homo Sapiens
  misc_feature (335)..(351): n is a, c, g, or t
  misc_feature (419)..(478): n is a, c, g, or t
tgaaaggcaacattttatcaaaggcatttggcgtttttcctctcttatgaccctctagaagcttgagaatgtgggagagaagggctggaaccagaaatggagaagtagtgctggaacaataatgacctgaaagccagtggaactgaggtctcctgcaggaacttttggggaggcctggatactttggagaccaatgggtatggatggaaagaagagcagaaatgattcagctcataaagcagtgaaaaggaatgatctaagtacacgaacaaatctttaaagcaaaatgttaaagtgtgggagcaagttctacagaacacatacaatatgatacnnnnnnnnnnnnnnnnnaaagagacagggtctcactctattgcccatgcaggggtgcagtggcacaatcagagctatagcaatcnnnnnnnnnnnnnnnnnnnnnnnnnnnnnnnnnnnnnnnnnnnnnnnnnnnnnnnnnnnntaggcaggcaccaccacacccagctaatttaaaacaatttttttggctgggcgcgggggct

SEQ ID NO: 445524 - DNA, 541 bp, Homo Sapiens
tttattactaacagtgtttttatttacaaataattgtttttattaggccatttggaaaaccactaacattttttattttagaaaacattaaataataaacaagatgttatacagtactttggataacttcttccatcagtttagtgcaatgtatcattggcatcgaaaagtaaaattttcatttattttcccctttcatcttcagctgtgcagttatatgaccataaaggaaatgaaccattaaaaatggatctacagccatatattctgccgttactcaaaggcttaatgatttattttccccctccagccctgcctttaccaggttaaatgacagaagaccttctattgtacctattgttcaaaaaatattactgttctgtggaacctgggagagtccaattgataagagaaactgaatcatactgatgaggtgaaggaaaggtctgccggtgtggggcagggcactctttctcagcagccaagataacttgtcacacacgaagcagagagaatgcacccgatgaaaatctctctgaac

SEQ ID NO: 445525 - DNA, 888 bp, Homo Sapiens
caacgtactcagatttcataggattttatttttctactaacacagacagacagggaaacctacaaaaggaaacggagtcaattgtaaatggctgtagttactggttacacggagttgacaacacaaaggatgcctggtgcttgcgtgcagaggctgcagcccagggcgggggcagagctgagccctcaggaggtggtttcgtgtgcagaactgagcggccctcagaagcagggctgttttccagccaccaaccaacgttcagagccagcaccatgtggccgctgtgcctctagcctgctctcctccaggtgcaggggacacaggacctgccggccccatccagacatggaggagcgttttgctgcttaactcatgcttagccaaggcaggcagaggctgtgggaactgctgagccccgctgtgatgtctgggacacgctctgggcagcagccgtcactctacagcaatgccagccctagtctggctcctcagaagcatctgggggcacaagtgcagcctctgccccgatttgaactttgttgatggggctgattcccttgggagaccatgcaagccagacgtagcccaaggcctggccatctggggcctctagtatatagaagcaacctctttatggacaaccttgttaccacgtaactccctggggtgtttaaataaataaatatgccacatagaaagggaggcccaagtcggtgccactgcccgcagcctgcaaatgtgaccacaacctacaaagcagaaactcacagccagcccgaagtgcaaaagtgttgggcccccttgaaaagctattctcttcagtgcccaccgcccgccctccatgccaagggcacaaggcccatggggcaggggggaacgccccgggga

SEQ ID NO: 445526 - DNA, 487 bp, Homo Sapiens
cagaatttcataggattttatttttctactaacacagacagacagggaaacctacaaaaggaaacggagtcaattgtaaatggctgtagttactggttacacggagttgacaacacaaaggatgcctggtgcttgcgtgcagaggctgcagcccagggcgtgggcagagctgagccctcaggaggtggtttcgtgtgcagaactgaggcggccctcagaagcagggctgttttccagccaccaaccaacgttcagagccagcaccatgtggccgctgtgcctctagcctgctctcctccagggtgcaggggacacaggacctgccggccccatccagacatgggagggagcgtttttgctggctttaacttcatgctttaggccaagggcagggcagagggttgtggggaactgtttgagcccccgttgttgatgttttggggacacgtttttggggcagcagccttcattttacagcaatgccagt

SEQ ID NO: 445527 - DNA, 624 bp, Homo Sapiens
  misc_feature (525)..(525): n is a, c, g, or t
ttttttcagtaagatcttgtatcatgtatttattccaaaaaaatcggtcatcaacctagaaaaggtgcaggaacaatagttcagaaacacattatttcagttttcctacaaaagccaaaacaggccatcacttcttcccaagggcaaaccctgctctacgagctgtgagtggtaccttctgccagaggggccgaccgtccctctccccagtgctctgcctctgcacggaattggtcaggtcataggtcaagctataataaaaggattctgagtccatgaacatcttcagcaactcttcaagtaatctcctctccaacttctccttctctttactttccttaactttctttttattaggagcagacacattggatttaatatgcgtaaaggtcttcagtagaaactttgagtcatcaggagatggtatgatcttctctggtttgttaataccaaaatgatgcttcttacagagctctagctcaagatcctgaggttccatttcagaaagtgagagcacagcaattntggtaactttacagacctcatggtctcctggagtttgcccaccaatgctttctgccggattagaataagccaccatgggagatctgaatgaagttgaat

SEQ ID NO: 445528 - DNA, 859 bp, Homo Sapiens
tggacaccttgttggcgatccaggcagtccatccgattgacacgtagatccgttgcctgcttacatattaccccagcttgatcaaccctacgccactgtcatatccaagaataaggtcataaatggcattctgttagtgtctgaacattctcaacttcattcctcggcagtgctcatggaagtcaaacgaaacgtaagtgaggtgtgagttgttgaaaagcaacacttgcttcaggtaagcatcgccgataatcttctctcttcctgcctggtctaccaagttaataataacctgttttttgtaaatgttcagttgttcttcgaaatgggcacagaaataggcaacagtttccttttcacttctgtccagccgcggtcttgggttatatcgatacccaacctggctccaaaagacaggcacagagcctcgtgtttgaacaaatgacagggtatgattatgaacatgaatcaactgctcagtctccacataattggcaacatttccatttttatccactcctcttcgtttatagcgcattcctgctctgtgcctacttcggcgtgaaatgagagccactagaaatcgtgggtgaatatcatctacacaggtggactcctgagggggggtctctgggctgcttttctcatcatcagatgattcggtataattaaccacaagttcttcaatctgcacaaaaccttggatcatggggataatccaaaagtccacatctggagtaccaatctcagtaagatcttgtatcatgtatttattcccaaaaaatcggtcatcaaccttctgccagaggggccgaccgtccctctccccagtgctctgcctctgcacggaattggtcag

SEQ ID NO: 445529 - DNA, 491 bp, Homo Sapiens
gcataaaataagtcattttattttttttatttacatgaaacacagatttcatgttaatgtgacttgtcaacttctctagttaactgacaattagctgccactgctgataattttgtagattaatgagatgaaaggtataaatgttcttcaaggataattgcacacatactcaatacacacatatttaaagggtttgggacattcttaagtcacctctgaaccagatcaataacctccttcattgattccattatgtgattcaaagatggcatttgccacctacattttttggtagattatccccagtaagtcttttagaagatgacatcttcacccccagtgtctttctttagtactgataatcaaggattttgtgaattagcaggatttacttgcctgttgagtgcatatcagttcaagtcctccaagaagctgatgccaagacaggactagatacacaagaaatttatggggaggaaactcctgtgaag

SEQ ID NO: 445530 - DNA, 380 bp, Homo Sapiens
cataaatgttacaattttgtgtctgtctttataaactattataagtactatttttgttataattcaaaatagatatttagtataaagtttttgctgttaaatatttgttatttagtaaaatatgaattttgctctattgtaaacatggttcaaaatattaatatgtttttatcacagtcgttttaatattgaaaaagcacttgtgtgttttgttttgatatgaaactggtaccgtgtgagtgtttttgctgtcgtggttttaatctgtatataatattccatgttgcatattaaaaacatgaatgttgtgcattttgtgattttggaaatactcaatgtggctcttctataggcttctagaataaaccgtggggacccgc

SEQ ID NO: 445531 - DNA, 792 bp, Homo Sapiens
ttgggtggctttgctggctttactccgtgactttgtccagccatgacatcagcttcctctgggccccaaggagaatcaggtgcacgtgcccctccttggatacccaggcctcaggggccctgctctcccaccttcgcccttcagagcccacctccccatggacatggctctggagattgagaggcagcagggaccccaggcattttactgaggctccaggtggcaggtgattctagatgtcagcccagtctcagccccacccctggccctccacagcttgccctgatcaccaggtacccacagtggaaagcagccccttgcctccctggggtggacacttagaattccctgccccgccctgggaccaagaggagaattccagctgcaaaacctggccagcctgagggagatctcggtggtgttgtttggaaccattccttccagccactccatccagcctgggatcagagccagggcctccctcgagcagctgcccagacagcttcctaggtatgacttggactgaagtgaatttcagatgtacagcctcccacagcctcccacccccagggctctcaggaagcctggaggaaagattccaaggggttgggctggggggttaccgaggagggatatagaaggtcctgaagaacccaatgatcaccaacttagccctgccgccctctgctctctctcccagacctccatggcaaaagggctaccactggaaagcagccggtcccggacgcgtgggtcgacgatatcccggtattccggaccgtaccagcgctt

SEQ ID NO: 445532 - DNA, 548 bp, Homo Sapiens
ttttgaatttttatatgatttatttaataataaaccaattaaagatacaaaaatgtttagaggattccaaaatttaaatttttgtttaaatacaaattcactctgtaatatgaaaacatagcattagacctctaaacataatgatttttttcatctacaaaaatttctgttatactagaaaatttgcagaagacatttttttcttgtgacattaaatgtacattatttacagttgaaaaagtaatctaaaaacatttcatttcagaaagttggatatatatgttatctttgtatgcaaccccccccaagtccgcccccagtaaaaaatgatccaaaatataaagcaattatgcttttataactgactactcagccagattagcccaaggctcaagttgctttcttggcccttaagaaagagtcttgactctctcaaaatagcagtattctgtttagcacttagcaacacaagtttactaatggaccgcaaagcacagtggcctaaagagttagtaaacaaattatttaggaagaatttatggcagatc

SEQ ID NO: 445533 - DNA, 583 bp, Homo Sapiens
gtaagtttttcaagaattctttagagtaggcctcatttcaagtcatctttgatgccaaatttccaaatgtatcccagttgaagtcagttcatttatttgctttaagagttatataccatgagacacacagttctggtgttgttgaacttttggatgtttgtacgcagtgctcatggggagcaagtgggcaggggacggtccagatcgatggccaccaactgagccgctgctacgtggccccctggggctccttccggtgcaccccttcctgcagctgttcttctttttgttcctgacatttcagctcttcttctaaatgtctgtcttcttgaaggctggaaattaccttcttctcatgaccagaatccaaagagatttctaaattccactttttctttcttttcagttctttacgtattgtcacccagagaacagtgttcactaaaaacattattcccactgccagatagaaaaggacatgaaaccagacaggagttggtaactggaggcctgaaacagaaaaagacaaagagaagagatactatttagagaccagaggggtctggctgagttatgtttggaa

SEQ ID NO: 445534 - DNA, 1340 bp, Homo Sapiens
cccagttgaagtcagttcatttatttgctttaagagttacataccatgaaacacacagttctggtgttgttgaacttttggatgtttgtacgcagtgctcacggggagcaagtgggcaggggacggtccagatcgatggccacccactgagccgttgctacgtggccccctggggctccttccggtgcaccccttcctgcagctgttcttctttttgttcctgacatttcagctcttcttctaaatgtctgtcttcttgaaggctggaaattaccttcttctcatgaccagaatccaaagagatttctaaatcccactttttctttcttttcagttctttacgtattgtcacccagagaacagtgttcactaaaaacattattcccactgccagatagaaaaggacatgaaaccagacaggagttggtaactggaggccaagcacttgaagctccaactcagggctgcgcttaaggacatttccatcctctgtggcagcctcgcaccagtataacccagagtcttctcttctagcagttagtatttggtattcagaggatgtgttcctgcctcgcagggtcttgctgcccatgtagaaggagaagtaaagctacaaaccaggcctctgcaagagcaactttgtttcacagctcagggtgaccagattcccctccaggagtggggatgtcacagatgcattcagcactggagctggaaatagctctttcacagtgtattgtgatattcctgctgatgtgtagcgatgctttcccatgcctgagcaatggtaggtgccattgtgacttatgttggttttcagaatggtgaggttagaattccagtggaaaaacttaaaggctttgccatttcgatagtaaagcacattgtacaccagcttatccttccacgcatgacacctcaaggccagaggttctccttccatgaagactctgctggagacctgcagtagtagccagcctctgtggatttccagctgtatggggtcacttcgccctgagagacctctctggcacctgtattcaccactgtcattgacactggcagaggtgattctgtagctgggggtcgaggtctgagtggctgtgccattgagaaaccactgtgtggagctgctcccaggcagatggagcacctcacagtgcaaggttacggtttcctcttggaacacgctgacccatggaggctgcaaagtgatcactgcctttgtggtgtccacttgcccatcaactggaacccaaaggagcagagttgtcaagaaccacatgttgtctccaagctggtgggagtagtgaaatccctaattccggccgtaccagccg

SEQ ID NO: 445535 - DNA, 2108 bp, Homo Sapiens
  misc_feature (1078)..(1101): n is a, c, g, or t
ttgcatttcaatttaaagaaaggttccaccattattttttgcacggacatttaaaatacaagaacaagtcttgtaatacaatatatattcaaatatacccaatataccttatatgaattaaaaacatgtcaactggataactgtagtaaggcattaagtttcagcagaagccataaagaaatttcttaatgagtggtgtccatttaatattaactggatttagtaggtttccttaaaatgaacaggaaacaaaagatgtgaaaaacaggcagtgatgccattatactgaattccagaaaaagcacagtacaatgtgttttctagcagggagaccagcaaactggaagtggatgagcggccccagcttacatggtctattgtatttgatcaactgctgagagaagtattagtagcccagtaggtttgggtaaaggtaccagaatccttagtgctagtctcacagccaaaaacagagcaggtactccagatatacttcctgaactgacctggatgaagaggctttaaaatcaacagagctggacagtataaagttcacggaaaaactcaatttttcattttattttggtatattagtgaatgtctactgatctagtatttcaagtgtggatcacgtaaacaccatgtagaatgtagtaaacggagttaaataagaaaacacactggctatcaatgccagagtctttgaatatcaggtcataaatataaccaattgtgcaatataaccaacatgatgagaaaagcacacctcacaattgacaattttagttcatatgattaagaaaaataaaatctgaaactgcatttagtgccacattctatcatatcatacatcagattccatgctgtggagccgcactgggctacaggacatacagtacatatagcatgttttaaaccgaaagtgaaaggaaaaatatgaaacagaaaatttttacatacacatctaacggtgttgtccatttaattcgatttatatgatttgctgtgccactttgactggcttgcagaacaccccaaattctcttttccccataaagatctacttccttacagagtnnnnnnnnnnnnnnnnnnnnnnnncttcagattcttcaggttccaacgattgtgtcccaaatgccactgtatgaacacctgtgtgctctcctaacaaccacactcctgagcgttcggggcctgtgcgcgccgcggtgacctcagctgtctcaaggcagcatctccgtactgaatacctgagcccattctttctgggtccagctcacctgattcgattttgttaagtatttttcttgcacactgtacaaaagcctcttctacattctcccctgtgagcgcacttgtttccaaaaacatcagctcattttcttgagcaaatctggaggcttctaagaaggtaacttcacgatctgcatccaggtccttcttgtttccacaaaggatgatcacaatgttctggctcgctagcattcgggcatctgttaaccaattagtaagcgcattgtaggtttctcggctggtgatatcatagacgaggagagccccggccgcgcctcggtaataacttctcgtcacggacctgaatcgttcttgtcctgctgtatcccatatttgtaactttacatatttaccaccaacatttattatctttgaaccaaattccactcctattgtatgatttgagtcatctttgaatttttttttcaataaactgatgaagtaagcaagatttgccagttcctgcatttccaataaccaagaacttaaacaaaaaatcgtaggtttcggacatggccgtctgcgacatcttgggagcggcgccgcctctcgccgggtcaccggctgcactcgcccgcggtccgccggcgcgtctcggtggggaaggacctggggcgggggaccggaggagggaggggcccgaccggtccccacggcaaccgccggtctcccagcggctgcggcccagccggactccagctccgcgcaggcgcagggccctccaccctccgtccggccgcgaccgcgaggaggaagaggagatgggctacgcgaggcccggcccaccccgcgttcgcgcgtgcgcacccgct

SEQ ID NO: 445536 - DNA, 551 bp, Homo Sapiens
  misc_feature (123)..(131): n is a, c, g, or t
  misc_feature (374)..(374): n is a, c, g, or t
  misc_feature (395)..(395): n is a, c, g, or t
  misc_feature (493)..(493): n is a, c, g, or t
  misc_feature (499)..(499): n is a, c, g, or t
agtttatccaacaaatatttattgagtatgtatgatgtacagccattgttttaaatgctgagggtatagcagtgatatacagttcctgcttacatgaaacttacattccaataaaaagagacnnnnnnnnntttagatataatgttggttagcggtaagtgcttttgagaaaatcgtgaggaaaggattggagagtgacaggttgtaattttaagagggaggccggggactgcctcttgatcattaacatttgagcagagacatgagtcagggtgagagagcgggctctgcgggctatctgggaggaaagagcgttctaaggctaagggcaacagccaatgttaaatgcctctgaaggtaggaagctccccttngtatttcaaaggaattacccnaggaggggcccaacgtgggcctggccaggttaccacccgccaccaagggggggaggaaccagtagggcttattagggggtccaggacacgttggtttnaggggncagggtcctttgggggcctttaccggtccttttccattttttttcttgggcc

SEQ ID NO: 445537 - DNA, 529 bp, Homo Sapiens
tttttaagtataaaagagagtttattggctcattcaacggataagtccagtggtaaaactagttttcaggcatgtctggatctctgggttcaaacaatgtcatcaggacttggtctctctgtcttccagcttagcttctttagcttcaatatcagacaaacctccatgtggttgcaaaggtggcctgtctgctctgtgtctgtatgttctttagcacattctctgttttccttgacagccaaacttcttgaaagaattgtcttcacatgctgtgtccacttcatcctgtcttttcaattcaattttctaaaaggaggcagaaaactagagaagcgacagtgaggagccactgggccacacttcatttcaccttaagactgactcagagaaaaacaagagggtacgactcagatccccggggccagcagcagggccgcggggcacgactggataaccgcttgtgaagaaaattttaagagagccctcacgaccctttagcgcatcctaaaagacctctgaatatctctgc

SEQ ID NO: 445538 - DNA, 884 bp, Homo Sapiens
  misc_feature (858)..(858): n is a, c, g, or t
acaggattttataacatttaatatagatatgctcaatgtagagtttatttttggtgaataaattgaagaaccaagcagatagaacaacagttattcaatcaattccagaggcacataggcattattttcctgaggttgccaaatgaagtgattctccggtcagctgggaccacattaggtaactaaaataattgagactggaacatgcatagtgacatctgtgaaaagatcctgtactaaagcccaccgaggactttccatatcttaacgaaattatttttattacatcattcatacaaacgctttttacaagtgctgcaaaacacgaatccatagagaggttgaataacttgcttctctaaggttgctctagtgctggcgatacatattttccaaggtgatagacagattgagagtgatggtctgaatggacatagtcaaagcccacataacaggacatttgcttcagaacgagaggtcctgcttgtgaattactgtatttgtggccctcatgcttctgtggcttttcactggggccatctctttgctggaactggacaacttaagctgtgaaaaactagggatgggcaatgtttggatttatcaaaatgggtgggtgagttagacctgagaccctgcctgtgccctttcgggccttctttttaccctgagtaatcctgcaaggaaacaagccgtgggctcactttatgaactatttaaggtaaacctatcacattcagtgcctttccagggagaggaaacgtgggggagactggcttgctcctggtgcagtctccttgaaagatgcccaagggcactggaaataaagctatttttcctttctacttatagagaatncttgctagggtttcaggcctcgtgcc

SEQ ID NO: 445539 - DNA, 343 bp, Homo Sapiens
cacttgaagagacactatttattttgttccagtcaagcaggatgatctgttgataggtgagtggtaagtgtcgagcatgaaatctacacccatttgctgtggtggactgaaggatacaagccacaggccaccccccataggcagagccctccacagccccactacaagagggcgaaggagcagctgccacccaacaacaccagggccaaccattagcaccagattgattttctatgaataatacaactagatccagagttatggatgttgactcactaaaatctttgggtccccactaaccaaacgtttcaaaggcaaacaggggaactgacaggacagctgg

SEQ ID NO: 445540 - DNA, 807 bp, Homo Sapiens
tttttttatttgaatatcaggtttactgaaggaaaaagatacattgaaaatataggaacatacacataaaagacaatgtcatatttaaagtataatcacaataaagagaaagggagctgtaggtcctatggcatccattctgatgacatcccataattgttccttatattccattgtgaagaaggggcagaaaaagattcatctgtccttcagatgacgatacctgtcatttttcttttctaccttagtcacttggcagtgttggtgcatttgagcagatcttcagtcatgaatggaaggaaagaagctcacaagtacagttatggtcaaatgaggtagaaacagtcatctgttagtagtgctgaaaccacactcctgaccattttcttctttattattgttttcacttagtaattcaacaaattgtttatgcccacggtgttcaaaatgcacagcagtaccagatggctggactcagataagatgcacacaaaagtgataaattaccctagattcgacattttcctatttaaggcttgatggaattgtcatcagagaaggtaaacagaatcaaagtaatttagttggccatgccctagattttaagattttgagctatatgaaatggaaattaagttttgataatgaactctagcttctgagacaaggtggggctatgtaaaggcttctttgtgacagatccttctaagaatggcatttaaattaaatgtaaaaacactgtagatcttcagatattaatctgatagaccagattcataaggtgttggacacctttgaaagatcctt

SEQ ID NO: 445541 - DNA, 495 bp, Homo Sapiens
  misc_feature (216)..(329): n is a, c, g, or t
ttttttataaatatagacattctattttttactacaagttttccacacacacagctcaggagtgaaataactagatttaaaatggtggcaggtcacacccttcttcaaatcattagctgtgtcagatggccctgatatttctcctcgtggtacttaacacattttacaatgagataattctgggtttattccatatcctgtgtttgtctttgattnnnnnnnnnnnnnnnnnnnnnnnnnnnnnnnnnnnnnnnnnnnnnnnnnnnnnnnnnnnnnnnnnnnnnnnnnnnnnnnnnnnnnnnnnnnnnnnnnnnnnnnnnnnnnnnnnngaataaaccatacacactgcattttgtgctgcctgtctgctcagatctatttcctttggtgctctttatcttatggggctacatttccagggttcccttgttttctggcttctaggtagatttggctaatgggagacactggtaggaagactaggggagagagaga

SEQ ID NO: 445542 - DNA, 685 bp, Homo Sapiens
ttttttgtctcacgcttcatttaatctgaagaatattacaggctctccgtcttcagatataaattatttataacgttacagaacaagcagcgaattcaaccacttaagaactaaggaagtctacatggtgttaattgctggccacagtcctcccgatctggttttttaaaaaagtcccccgggcccccatttcagtagacgtgcaccatgccgtagaggaacgtccagaacaggacgtaggtgaagaggcccccgatgaggcctcctgtaaagagaggtctccgtgatttgaaatatttgttccacctccttcccgccttgagaatgaggagcagggagagcaggacggaggcgagcaggtagaagatgaagccgtagaggccggtgaggccgaggatgccggccgtggcccccgacagcgctgacaccgaggtccggcaataatccaggacggcggcgttgccccgcacggccgcctcgctgatgaacggcggcccttcccgcttggccaccaccgcggccatcgcaccagcccgggctcggcctctcgctttctcgcggaacaacgcggagctggaacacggcgccggacacactacttagcgttccctcagacgggcagtggaagaaatgcccgcggcgccatcttgctcggaagcctcgtgccgaattcgccacccaggcc

SEQ ID NO: 445543 - DNA, 872 bp, Homo Sapiens
  misc_feature (188)..(188): n is a, c, g, or t
  misc_feature (742)..(822): n is a, c, g, or t
cgcgggcatttcttccactgcccgtctgagggaacgctaagtagtgtgtccggcgccgtgttccaggtaactgggccaccgtggccggggaacgcagacgcgccaccacctcccggccggcccggaccctcaatctcctcggcgtctttggaagatccgaggcccaggactggtgccagctccgcgtntgttccgcgagaaagcgagaggccgagcccgggctggtgcgatggccgcggtggtggccaagcgggaagggccgccgttcatcagcgaggcggccgtgcggggcaacgcggcgtcctggattattgccggacctcggtgtcagcgctgtcgggggccacggcggcatcctcggcctcaccggcctctacggcttcatcttctacctgctcgcctccgtcctgctctccctgctcctcattctcaaggcgggaaggaggtggaacaaatatttcaaatcacggagacctctctttacaggaggcctcatcgggggcctcttcacctacgtcctgttctggacgttcctctacggcatggtgcacgtctactgaaatgggggccccgggggacttttttaaaaaaccagatcgggaggactgtggccagcaattaacaccatgtagacttccttagttcttaagtgggttgaaattcggctgctttggtctgtaacgcttatacactaaatttatatcctaagaaacacaaacaccgacacgaccagcccacgagnnnnnnnnnnnnnnnnnnnnnnnnnnnnnnnnnnnnnnnnnnnnnnnnnnnnnnnnnnnnnnnnnnnnnnnnnnnnnnnnngcgcgcccaaccaacaccacgaccgccgacgccaccaaacaccgcaacag

SEQ ID NO: 445544 - DNA, 832 bp, Homo Sapiens
tcatggaattatttttagaacaagccagagtccattgagtggtttacctctgcatgtttggagggaacctcacagatgaaacccttaatgaataatgtgtccggggttttttagagagaaggagcactcttaagttaccactttgagacagctcttaacatcttagtgaccatttgtagttttctttttatgaggaacccatgcttctatacttgggcggacaatcgagcttaatgagaagtgacttcccttcaaattccaacagcagacatgcattgtcatgattctgtcttctttttagtgtggtttattgagttcagcagttctcatattctgtttaaataggtacagcattttcaagggcacagatacagagaagctggctttctaggtattggggcttccaagccaaggagttttgtccttccacctgtattagttatctattgctgtgtaaaaaattaccctaaatttagtatgttaaaataggtaaacattatctgtccagtttctgtgggttaagaatttgggagtagtttaacatgatggttctggcccatggtatcatgaagttacagtcaagattgaacaggggctgcagtcagctggagctggagaaaccacttccaagttctctctttgtggccgttggcaggatgcctcagtttcttcccatgtgggtctctgcgtagggcagcatgagtgtcctcacaccatgacacctggcttctccctgagcagctgattccagagatcatggggcagggccaggagaaagctgcagtgccttttaagacatagtcttggaaaggacacaccggcacttcttatc

SEQ ID NO: 445545 - DNA, 226 bp, Homo Sapiens
tacaggcactcagcttttatggggcccagcaggtaggaaaccagcaaattccaaaccccccattatttcccttggggcatagctccactgctggttactctaatgtttcaaaggcctccactgtattcattaagcagggatcagatgccactatccaaacccctcattcccttgaccccgaacccagaagagccgcagttaagccatctcaaagaggccccatcag

SEQ ID NO: 445546 - DNA, 480 bp, Homo Sapiens
tggcactacattttctgatctttgtaacagttacaaattactacaggatatcaagtaataatctattaagaatctagcacaatccccttcatgtagtgaacatgcaactacatggtgactataccttgtacagagactacatcaaacaagcacaaaagcagactgaaaatgaactaagacataagccaggaagactgagagaactctaaatcagatttccttttctgagcttgactcatctcctgattagaatctggacctcatctttagaataaaatgctttatcttgcattcaatgtgactaacataatagtgtaagattatagacagtttaaattttaaaagatggttgagagagagaacagtgtctctagaaatataagccaatggaaaggacgcaagccttcaggccttcagatgttttcacatgtaaacttacatgtacaagtatacacaaacacaatctataattgccaacac

SEQ ID NO: 445547 - DNA, 611 bp, Homo Sapiens
  misc_feature (168)..(168): n is a, c, g, or t
agcaataaatcccgccaccgccacgggcccttgaagtgagcttgtgaaggccaagcccgaggcgcagcacgctgcggttgctgatgagccgttcttgaggtgccgcacaccctcgttcccgatggggttgtggccaaggttcagcgtctccaggctctgagtgtgcgncagtgtcatgcccaggaaggccatgcctgtgtgcgtgagctggttgttccacagcaccagggtcaccagccccttcctctgctccttgaggccctcgcagatgtaggccagacccgagtctagcacgtggttgttccggaggtccaggatctgcagggagcagttgaacttgagcaggttacccagctgggccgagtcctgcaggccgttgagcttgttgtccgccaggtacagctcccgcaggttcatgttcatcttcagggccgtggcgagcagcatgaggggccgccccgacaggctggcgttctccaagtgcagcactgccaggctgctgcggatgcgcagggcacgggccacgaagggcgccgagtggtccagcaggggcgtgttgcgggcgtccagatactgcaggcagctcgtcttgcgcatcatgtgggcggccg

SEQ ID NO: 445548 - DNA, 1364 bp, Homo Sapiens
  misc_feature (1127)..(1313): n is a, c, g, or t
tgaatgctttttaaaaatgcaacttgtttgcattttgtttgtccaaatttggtgactggtcacagatcacttggtgtccaactggctttttcatagcctttcagtagagaatagaaccccctcacattaagcacaataacatgacctctaaaatgtcaagttctgctgcagtggtgccatcattattgtcactgaggacttttcaaccaccatgtctttgttagttggaattctgaattttccagtgggatctatggcattaaaaccaaagaggaaacaggtcaggcactctccaggaaggatatctgctcttactgttgtaatacagcatgaagagtgtgggactctagactgctggccggacacttctctctgttctccccagtggtatagttaataatgatgatgaacttggtgggggtggtaacaaaattcaatcttaaaaaacgaacaacaaaatccaatcacaaaattcaggtagacaagtgaaaccaatctcttgggaatcagatctctcaactgacaagtttctctacttttaaattgatcattatggataaaatgaatgctgagttcatagagaagaagggaatttgaacacttggttacactaaaggagaaggtccttctagaactaaatggaggcatctgttttacttaaattaagggtctgtaaataccagccagggactgagttgacagccacttctgcaataaagtaataaatcatggagctggttaaggaagcaagaaacaccatattcttgctttgttcacccaattaggcaataagccatctgggtccttttgttaattgccacctaatacaatttatgcaattaaattcagtcttttatttaattatattaatttatcccagcaacttcaaagacccacaatgccaatgataaagttcagttaaaaaacagaggtcttgaaaaattttttttcttcagccgctaataccatttacacggtcgccatctgagaatttgtagctccgtctcagtctcaggatttagggaaatttgttttaaatatagatgggtctgaagcaagaagacagtgactaaagtctcttctctagatgggataatgaatctatctagattggtccaacagaactnnnnnnnnnnnnnnnnnnnnnnnnnnnnnnnnnnnnnnnnnnnnnnnnnnnnnnnnnnnnnnnnnnnnnnnnnnnnnnnnnnnnnnnnnnnnnnnnnnnnnnnnnnnnnnnnnnnnnnnnnnnnnnnnnnnnnnnnnnnnnnnnnnnnnnnnnnnnnnnnnnnnnnnnnnnnnnnnnnnnnnnnnnngtccagagtgtattctgaggaaggagaaatgcagtgaacccttgacttagc

SEQ ID NO: 445549 - DNA, 1057 bp, Homo Sapiens
  misc_feature (191)..(377): n is a, c, g, or t
  misc_feature (990)..(1005): n is a, c, g, or t
gaaaaattttttttcttcagccgctaataccatttacacggtcgccatctgagaatttgtagctccgtctcagtctcaggatttagggaaatttgttttaaatatagatgggtctgaagcaagaagacagtgactaaagtctcttctctagatgggataatgaatctatctagattggtccaacagaactnnnnnnnnnnnnnnnnnnnnnnnnnnnnnnnnnnnnnnnnnnnnnnnnnnnnnnnnnnnnnnnnnnnnnnnnnnnnnnnnnnnnnnnnnnnnnnnnnnnnnnnnnnnnnnnnnnnnnnnnnnnnnnnnnnnnnnnnnnnnnnnnnnnnnnnnnnnnnnnnnnnnnnnnnnnnnnnnnnnnnnnnnnngtccagagtgtattctgaggaaggagaaatgcagtgaacccttgacttagcaggtagacaatgaatacgtagttatgataggtattgtttggaaacactgcacttcccactcagtttttcttatttgaaggatactgtgttctgagacagcccaaaggagattagcatctttaggggaagatttctaagctgaccatgtggaaaggtaggtaactccatctggggaaaaatgaatatgaatgctgtttattaaatagcagaacccatcccattcggcaactcttacagctaattcaggtaagccaagtcatagcaaggaaagtcatttagctcttactagcctcagctgtgctccagatgagccgtgttcttcccacactcatggacattcaacctgtggacacatttgggggttccagacagttatatgggctcagagatggccctgtcagctctcatggacattaacacccaaatgttacctgtcataagaattttggctcaggctctggcattttcctcccaggaaaaaggtttgcttttttagaaaggttgctgtttctgctccagtcagtgcaaaccctgtaacagggcatcaggagagtttctctcnnnnnnnnnnnnnnnngagatggagtctcactcgtaaggctggtttattggtttaaaaataattaatt

SEQ ID NO: 445550 - DNA, 551 bp, Homo Sapiens
  misc_feature (292)..(478): n is a, c, g, or t
gcaattaaattcagtcttttatttaattatattaatttatcccagcaacttcaaagacccacaatgccaatgataaagttcagttaaaaaacagaggtcttgaaaaattttttttcttcagccgctaataccatttacacggtcgccatctgagaatttgtagctccgtctcagtctcaggatttagggaaatttgttttaaatatagatgggtctgaagcaagaagacagtgactaaagtctcttctctagatgggataatgaatctatctagattggtccaacagaactnnnnnnnnnnnnnnnnnnnnnnnnnnnnnnnnnnnnnnnnnnnnnnnnnnnnnnnnnnnnnnnnnnnnnnnnnnnnnnnnnnnnnnnnnnnnnnnnnnnnnnnnnnnnnnnnnnnnnnnnnnnnnnnnnnnnnnnnnnnnnnnnnnnnnnnnnnnnnnnnnnnnnnnnnnnnnnnnnnnnnnnnnnngtccagagtgtattctgaggaaggagaaatgcagtgaacccttgacttagcaggtagacaatgaatacgtagt

SEQ ID NO: 445551 - DNA, 548 bp, Homo Sapiens
ggggaggggagtgctgacacagaggacaggaagctcccggcccctggcgccgacgtcaaggtccacagggcacgcaagaccatgccgaagtccgtcgtgggcctgcatgcagccagtaaagatcccagagaagttcgagaagctagagatcataaggaaccaaaagaggagatcaacaaaaacatttctgactttggacgacagcagcttttaccccccttcccatcccttcatcagtcgctacctcagaaccagtgctacatggccaccacaaaatcacagacagcagctgcagtatctcggaagaaaaaacgaagaatgggaacctatagcctggttcctaagaaaaagaccaaagtattaaaacagaggacggtgattgagatgtttaagagcataactcattccactgtgggttccaagggggagaaggacctgggcgccagcagcctgcacgtgaatggggagagcctggagatggactcggatgaggacgactcagaggagctcgaggaggacgacggccatggtgcagagcaggcggccgc

SEQ ID NO: 445552 - DNA, 512 bp, Homo Sapiens
  misc_feature (63)..(74): n is a, c, g, or t
  misc_feature (96)..(148): n is a, c, g, or t
cttttccattggtttatttgtatattggtccacaacacattgaagcctcacagttccaaaaannnnnnnnnnnncatatttggggcaaactgaggnnnnnnnnnnnnnnnnnnnnnnnnnnnnnnnnnnnnnnnnnnnnnnnnnnnnncagccgaagcgactgacttctaaatggagcagattgctcatttcacttctgttcctccacctcaacaaacctttacatcctcactggtttgtgaggccagagaacaggtgtggccttggtgtgataagaaatgctaattttatacaaactgaagcaatctggtctcaactttgacccccaaatgccctcaaaatggatcaatgagccagggaggcttgaggaaggagggagcatctgcccttcctcctggccagaagagaatttgaatttgctttgagtagcttatgggcagggctggaaggtgcagttcatgactgtcagcagctttgaggctgatggaggcatggggaaggattaggggcct

SEQ ID NO: 445553 - DNA, 209 bp, Homo Sapiens
tttttttaaaaacctgcaaactctttattaaattctcccatttcatctgtacagaaaaaaatgcacattatgttcagaacatatctcagtaacatctcaaaattacacagcatgaacatgtaaaaacaagggaccaccacgattttatacatagaaaggaaacccatttacaaaagaggcttgttaattgtatttttttctttctttca

SEQ ID NO: 445554 - DNA, 1072 bp, Homo Sapiens
ttttaagaatgacttatttgtggaccctggaatcaggagggtcagggctgtctggatctttgatttcatatttgtttcctgggtggctcagcccccatccctgggagtcagggtgcacctgtgggcccgcaaaggtttccaagaatctcctttttaagtaatcagggcaggcaggaggccaccctcggagtgtccccgtgggtgcactccctgcctgggtctctggtttctctgcgtcacattgtgggctgagtgctctttgaggggtctggtctccgaaggtggttattgcatctgttaataagagtgtgacgctggcaccgtgttctggggtaggtgcctctctaccttcctggccgacaggtgcttccccacttttcccgggtgcctctgccagctcccccatgccccttgggtcctgtctgcatggtccatttcacatccagatttggaacattggacagccaggcttcctggttggcgcagccctgagactcggcctcaccggcttcgagtttgcgtgtcatgaaagggtctgtgttttccacagagaggttccgaatgcacatgtcacttctgtgtcaagggtcccaggctccttcgactgaaagtgttctccctccgcagatgaccgaggacctgcctccctgcggtgggcctgggagctccataggtccccactgaggcctttcctcccctgtggaatgcttctccctcttctgtgtctgcccatgtcattcaaatcttccagttaaattccaaaggcatcttcaaggtgccggtttgcatcggcagggcttggggttgaggccacccccaggaattctgctttccatgttctttgcttctcctaaatgaacagatgtggaagagacaaaccctttacccagagatcccttgtggagcctgaaaccgacatggggctcccaggttatgttcccgcctaacttgtcgtgtctcgaggagggtggtggacgggtcaggatcgcgtggactcgggactcagaggacccaggctgtgttctttgctggccgtgacctttgcccaggcccttgtgtggctgagccgtgc

SEQ ID NO: 445555 - DNA, 2199 bp, Homo Sapiens
  misc_feature (683)..(695): n is a, c, g, or t
gtaaaaatggtttattccatggccattgtaaaaaataatgacctgatgagtaaatattggcttaaggcatatagcagagcagctcgctacctctctaacataatgtgtaacaaggtggagagccagctgctctccaaggataggaggttaaaccagtacgtccattttgaaatgctactatatatacacacccaaactactacatacatatacaggacttaaaaacaacaagcccagctcagaatgcttacagcctggcacctaagccttatccacacctcaccatagctctgcagggtgacacctcgaatgttcccaccacagaatttctctgtactggcttctaccacgagaaaggcaaaatgtgaaaatgctggcaagagagtagctcgggagctacagctgccgtgtttttcatgttaaaaagccacttaatgtggaggtcttcagttccctttgcaggaagagtcgtgagcaccatcaggccccacagggtttgagggtggggcagacgcgcctctctcggcaaggtgaaccgggacagagacggcggcaggctgcctaaaggaccgtcacccaggctgtttcaagaagtgtggtttccagcaggtgcctctcttccaaatcacggtctgctcaagaagagtgttgacttggaatggcggaggctgatcccaaaggtnnnnnnnnnnnnntgtccctgcttccctaaatcatgtccagagcgtgaggtgtgaatatggcgttcccaatacccttggaatgtctgagttacagccaagaccctgctgtaccaggacaggctgggcctcaaccaggaagtcactagagtgtcatgccaggaattaggcaaatgcctattcctggaaaaactgcaccctattgctgagcgacaatgacttcagcaacaggcttaggaaccacagccatgtaatgatcaggtcatgcacaggcaggttggacttggacatggggcacattagtaagcagagatcaaagtttctcatttcaagcacatattgtttcatcaggacacaagaagaccttacatgcattctaatacacacgggggagcagtgattgagaactagatctagcagataacagggaggagaataagcgggacaaagtaatctcacatcatgtttcttattaaatacccacgtgttcattatatattatagcattgttctatcttctcacgttacccacaatatcactaaataacaactgcttacaaccgtcctccttcccagtactggtctgacgcagcaggcccatggcaagccttccattcccagtactacctgaggatttattattgtacttttttataaatcccttgaatgcaaggctgacactcaaaaaattttaatacattattggttcaagaaaatgctagtgcactatggatgcctcttggggaaaaaattgtttaaataaatatggagtggagagttgctccctgcagattcaaggggggggctgttggtgtgccgcccgcctgggatgctccaggagggagccctgggtggggcgagccccaagacgggtgtaggccccttccctttgcgccgccagcatggtactctctttcactctcctcaaaaaatggcttgtggatttggtactcaaagtggaaggggcaaaaagtagaaggatgaggggtgagacactacatccggggtaagatgggttcttagtgcagaaccaacgtccgtccggggcccggctctttacgcggtccggcggcccttacctaccgcggcatgcctgctagtcgggcgtgggctctgcgggtcagaggcggacagtgggtggaggtggagtggaggagggtcaggctatgtgttgctgttgaacaggaacctgtagcagaggtaagcgccggccgtgaggaccgtagccacgcacatgttgaccaggaagggcttccagtaactcagtgcatggtcctcgtccttctcgggcagtgacggctcccctttggctggggaggcagcctgggcacctcgaagacttccccccacgacccgacttctaacttcagtgtcttgactcatgctttcgatgccgtagggtgcggcatttaaggggcttcctttttcttccttgatggggcagtctttatcctcctggtctcttccttcaccccgacgcgtggtcgacgatatcccagaacgccgaccgtaccagctc

SEQ ID NO: 445556 - DNA, 728 bp, Homo Sapiens
cccaatgactcccaagtcctactcgcaaacaaatacattgtagaaaaaagtttaattgctggttattgtttgaatcttgaaatacaattcttcactgatgatactggtataaaatggtggttattaattcatgctagcacaaccaaaactaatttaacattattggtaaaaatgagtcatttttgaatctctattaaaatctgaacacataaacaaatctgtgctaaaactggaactgccttctcactctacatataattaaacttccagcttcaaccatctgatgttgaaatctaaagcacctccatgagttaaatgtccccgacaaaccatgtagatggacaaacaagattggtggtctttaattgctggcgacagaaaaggctgcagtttagtacttaaacctgcagttagtggtcaactttctatccaggcagagtaaactaaggagagctatgaaatatcaaaagaaaactagaggccaggacaaagaggcaatgtcagccaagccactgcaagatggtatgcacccctgtatttcagccaagggcaggcaatccaaaattacacactgctttccttaacttgaccaaacagtgtatttttcctctgaaaatcttgtcaacggttgtattccattgtacctagtgaaatacaaacgtccactctcataaaaatattatatttttcaaagaaatatatatttttatgagagtctccgtcgaact

SEQ ID NO: 445557 - DNA, 638 bp, Homo Sapiens
  misc_feature (580)..(580): n is a, c, g, or t
tttttttggagtaaatacattttattcagaacaagataataaaatagcgtgcactttatttaaaaccaaccaagcactgataaaaaatatatatcactgcagctgtgattccacatcaaacctgaacagtaagaattgggcatttattcttcacatcatgtgccaagcctggcagagaaggacatccacctccactagagcctcaaaggaaaagtggcccctaaccaccaagacagggtaccctggtggagaggggcagctggcagctcaccctgctctctgcagaccacgtgaagggaaaggagctgcctgtgttcctcccgggctgccggggtgggcactggtcagcaactccttctcggtttcaggttgtggagcgatggggagagaagtgcatgcagttgtgcagacaaggaggcgggtcctccctcctctttcagggtctctgaaacccccacagggcatataatgcccagcaaggtcccacttgcaggcacatgcctacaaagcagcagccatcttttgctttggctgatggggaatcaagattctgagagtgactgctcttttcttgacacanagcagccacagaacactttcctacatacagtatggcagcaggcaagcagaaggccctg

SEQ ID NO: 445558 - DNA, 489 bp, Homo Sapiens
ggggagcaagttataaaaatttattttcccacgaaataattccacaagctgtgtaaacaaacatttcttactaaaacaaatactctaacacacaaagattgtacatttccagtgaaacactcacagtaaaattgcctgtattttcactctctaggagcaaaaacaaggaggcagcagatgaatgctttcctagttacctttggcagcaagcttactcacattccctgactgctcaatgggttgttaaagcaacatatagcacaattaattaaatacagagcgaggtgggcagaatgctcgatatcagtctctagtttcttcgttagtcttcagcattccaattcatctcaaccattcagtcactcggtgcacactttcttacatacggacacacacacgtgcatatagcgagttccggctcgtagactccagtgcagtgactagaacagacactagctactaaggatgtgtcacaataggtggtgactg

SEQ ID NO: 445559 - DNA, 486 bp, Homo Sapiens
aagagttaagtggttttttttctttattcaagtaatcatttagactctaatacatgataatggacaaccatgtgacaaagtactgtagtgtatggtttggtgtagcctccttgcctctaggatgggattttttccaggtgattcttcaggatctgacatcgatgcccaacacaggctttccaatggcaatgcatgagttctagaggtcactgccccatctttcttcaggtgctgtgtgccattttctcccacccattttatcctccattacttataaaaaccccactctaaaattcaacctatgttataaaattaacaaaatcaggagttagtacacatttttccacaatgataaaattaagactcataatgtactatcttgtttcgtctaacttttggaggatttatataatctctaaagagtcagagtaatacataacacaaaacatgcaaagaaccttatcactgggtgtatgtaatacgctg

SEQ ID NO: 445560 - DNA, 1063 bp, Homo Sapiens
  misc_feature (59)..(71): n is a, c, g, or t
  misc_feature (1020)..(1020): n is a, c, g, or t
catggccaaacgtaactatttattcatttttttcttataaacattgagtttcttctttnnnnnnnnnnnnncacctagaatttaaatatttcccatcccatcacatacaagtctgtatacattatttacatcttttgaataaaacatattacagattttctgacatcagtatccctttttaaacaaaaatgaagcaattaaactttgatcagtaacaactacaatttgcataatccggcacagtttgtaatatagcgcctatgttggatttcataacttagatgatttttccccttctagttacttgattataagagagaaactgtctccatgagagtagttccctgtctttatgcactcttctcaatacttgcacagtgtaaatgccgcccttattcttccattacttggcactgacaatattcctctgcttttgtcttcagaaatgatttctatttgaactttaagtgttctcatatatactgtattctccttcaacccagatttcatgacactgttcctagtgttaattctatgcagtaaaagttaaacctataggaaaagttcaaataaaacatcaagtaagtgtttcctacaagattagtgccctcaccaccctggttatgcatgtacaataataaatacaagttagtagctccaaaaaaactactttccctaaaaagtcatttctgtcgaacaatttaaggagcaaagcatccttaaaatgaaaatgcactaatcttttttacagcctgcacaattaagtatttccagaaaaacaaaaacttgtgcaaaatggtaagaaacgccccacctatacaaatttaatattaaatcagatgagaacatgaatttataagtaaaaaacaatttaatattaataatatatagagaaattaaatattgaaattttaactttgtatcactaataatctcagcttcagtgaaataatttaaaaaaagctgtcaaacactaatttcctaaataaactgaaacctatgaattgacagtaaatactntcagaatctctaacaatgaagacctgcaaaatcagcctaatta

SEQ ID NO: 445561 - DNA, 572 bp, Homo Sapiens
atatctaacgtctcaacattggacatatcatctagacagaaaatcaacaaggaaacatttgatttaaactgcacttgagaccaaatggacctaacagacgttgacagaacatttaatccaaaagctacaaaatgtacatcctttcttttcaatagcacatagaacattctccaggataggccacatgttagactacaacacaagtcttaacaaatttaaaagaattaatattatatcaggtggaacgtcactttctagtggcagacctgcatgaaaaggaaatcaactaattgccagaaaaggaattcaaaattatgattttttaagaaattgaatgatatacaaggaaatacagatagttcagtcaatcagaaaaggatttatgatgtgaatgacaaattcaacagagatagaaatcataaaaaaaagaaccaaccagaaatcctgcaactgaagaattcagtgaattaaattaaaaaatacaacagagagattcaacaaaagaaagaatccagcaaaagaatccctgaacttgaagataggtcattcgaaattacctagtcagaggaaaa

SEQ ID NO: 445562 - DNA, 466 bp, Homo Sapiens
cgggccctaatatattcataaaagtagccaattagaagctgaggggaacaaacggaagtcccgagcgtccttcagagaagtagattcccccggaaacaaaacagggcgggcgcgcacctcctgcggcgacacgcctagcagacggcggaaggcgggaagaactgtctacggaagtggaaggttggtaacgaatcaaagaacaaggatcggaagatccgttccacggacttccggacgcggccctgccccgggaactgcgggtgttcaggaccctgtggtgcgcgggacgccgcccgcgcatgcgccgcgccggctcagccccgttttcgcaagctctgcgtggtcttgggtggcgagttcgagccttagaacggccgagtgccctggaaccggtttcggctctggcgtcctcgcgtgtcctccggctccaggttacaacgtcagtattggcgccttggcgcggtcc

SEQ ID NO: 445563 - DNA, 559 bp, Homo Sapiens
aatgagaaaagccaaataagcacatgtaagtgcatttttttcttcgagatttattttttgtttgatgaatctgacaccagtcagggagaggagaatgttgtgacccagcagaaaaatatggccccagaggaggggcggcttcttcctgcctgggtgggtttggtgctggggttgatttgttattattttttaatttgttgctggaaggttttcttttgtttacttttataaatctctccccgggcttgcgagcttcccctcccttccgccttcccttcccctgcccccaaatttcatttttaaaaagcgagcttgctcgccaggtgtgtcccccaagctctcacagctctaataaataaggagcacctgtaaaacagtagcttgacttgtgaagtgactctgtacaaaggagaatctagaaatacagtatgtacaccgcatccttgggccgtggtgcttcaaggctggcgccacaccgtcctggccctgcccacccgcaactcgccacccctcctgctgaggctccgcggccttgtggggcgggggcacctggacccct

SEQ ID NO: 445564 - DNA, 415 bp, Homo Sapiens
aattgcagaaagcccctttaatgtctgtggaacagaagaaccatgttggatggggaaagcaggggcaggacacacgtgtcgcgtatttatggggtgttatcagggttatatttgtgacaggatcaactaacttactggctttcatttcacctgataacataagaccctccccggtgactacacacagtttaggttatcactccttatgactcctgctccctgccctgcaccctagattctttgggactcaccgcagttttcctgactctgatgggaatgtgctggagtctattacggagccctgcttttcagaaggtgctcaacaggccctgaaaatgtgcatcttggccgatggggggtcaaaaccagagttctgcaggctgaaatttttccttttattattattaaacttggc

SEQ ID NO: 445565 - DNA, 913 bp, Homo Sapiens
  misc_feature (445)..(453): n is a, c, g, or t
gcccgtctctttctcacgcagggagatgattaaggcggtttcacgagtacctcccaaactcccggaaggaacctgagcgcgggggggcgcgctagaaaggtcgcggagctcccaccaatgcctgctttgggggaaggaaggataaaccacacctttggatttttgccccccagttcttggggatttcttgaaacctgccgagattccaggaccccctttaatggtaactgtgtggacccgcaataggaaaggagaaagagcttcttggaagtcagtctctcccaaaagagccattatatccgagttctgttaaagccccagccagcaaaggcccataagggaatgaagacataggatagattcatggtagtaaactgttcccagtttagcacagagtgcgaggcagaaggctaatttaagtaacattgcaatgaggtaccaggcnnnnnnnnnaatattgtgtgatccatgtcgagggtcaaagccagacttacaccgcccagccattttcacaatcagcaggacaagaaggatagtatcaaatatccagactggaatgaatatgaggaaccagttccaaggtgctttctcatccagtttcaacaccaacatgatcaagaagagtagtgtgaaaagccaggtgagtagtactctctgagccaaggacattctcatttaaacagtttaaagaggctgttgcaggatcggaaaaaaggaaatataccctggcagcgctgccggccggaaagcggagagggacgcgaagatcagcaaattcgccagtttggatccttgtccttttccgcccttttccccccattaaatccagaacccgtcacatgataattaagaaaaaacttcagttccgcctcctcaaacgactgcggtagaggatctctcagttctacctccc

SEQ ID NO: 445566 - DNA, 604 bp, Homo Sapiens
  misc_feature (525)..(537): n is a, c, g, or t
ttttcctgataaagtgacattttattttaaacatggataggataagaaagctccagtctacaaacaaaacatgccagaagatttttaggcgatgatgccacctgcacatggaaccaaaaggtgagaaaatttgtaagaacgtcaaggtgctaaaagggggaaattaggtcagtatgggacagagggagttgtgtcttgatatgaggtctgagaggtgagcagggacaatattatctgtggaaagatacatggattttaatgtaagcgccacaagaaacccctagaaggaacaataaaatatggattataaaaatttcatctgcatcagaaacatttgttagaaaggttgacagtattgatgtccaggaacttcccctatgtctgattcagaggggcgggatgctgcttgaacatccattttttaacaggctcttcaaagattattatccacacctaaatgaaaactgtttcactaatcaccaaccttactattttacataaacacttgttaatctctgcattccnnnnnnnnnnnnngaatttcataatggtgttttaatattactgagctatttatttctagttggtgttattttcagttttt

SEQ ID NO: 445567 - DNA, 619 bp, Homo Sapiens
aaaatgtgagtttgagttcttctttgtggaaacttaagatgtggtgtaaatgattctttccaaaattgtccagcagcttgaatgaggcagtgacaattctgaggtggtttattgggagtccttctacatttctcttagataactctgcactctgggtggctattgtgtagccttactgccccagagtgcctgttagccaaatatttcccctctgataggaatattttctaagaatcagctgataacttgcgtgctggaccttgttatctgtgcccctgggagacacacgttttcttggttttgaaaacctgaaacacaggcaactttacattttggggaattagctgatgcctcctgaagcctgaggaggtggcggggaatatgagcggtgctgtctctctcaaaagtgccctttagatgattccccctcctagggctgcctgcaggggctgtaggcttgggaaagattgtgtaggtgacagtgaatcagaatgaagtggtagattttgtgtagatgcatttgtctgctgtaattttttatatatatattaaacttactgtaactgtacagttcatttctgttgtaaaacatcattaaaccatcttccaagtgttttca

SEQ ID NO: 445568 - DNA, 1082 bp, Homo Sapiens
  misc_feature (564)..(594): n is a, c, g, or t
  misc_feature (1000)..(1000): n is a, c, g, or t
  misc_feature (1046)..(1046): n is a, c, g, or t
ttttatgctttttgttcttgattttattttacataattgcatgtataaactttctgatggattgatttttcctttctgtcccgattatctagcctctgatgtgctcaagagctggatctgctgacttatcaaaaaagtgacatttggccaggcacggtggctcagcctcacctaatggtttcttagcaaacttcagtagaatgtttagaacgcggccctgataaacttgagtgctggtaggaggtgctacctcgctcaatctgtgagcaaccagccctgtgccctggatgcttggcgggtggagagaaagacagtgttatgtgggcaagcctccaactcaccagttgcagtagagcatctggctctctgtctgctgctatagccctgtgagtcagccagacgtgtggtccccaagccagcttcccacctagcacccttgttctgctacagctcccccacctgccctcctgcattgcctaggatcccacgccccgctttcagtctgctctgggacatctgtcttcttctttgcaggggactaagtatatgacttaatgaatcctnnnnnnnnnnnnnnnnnnnnnnnnnnnnnnntgcacacaagaaatgttgcaacatctcatccttagcaactttgtttggttagtactgcataactcacagcagattccaaggcacctgccttgaacattgctacatgctctaggcattatcaggaacgcagccagggtgcctgcaaagttgtctccagtttctgggtaagaggaccatcatccatattgtctgtggctttgtgtctgagttgggctactgagcctgtgacttcagaccccttgtctgcctgatggatacattctgtataatacgttaccatcacaatttcatgaatgtaacttgatgtagatctagcccttccatgcctcctgctgaactatgtcacctgtggataataaaacctctacacataggcattttatacaaaggcaagtcaaacaggcantgatagtgggcaagtgatgtatttggcttaaaggaggttgtgttantgaagttaacgcgaagtctggcctcctttgtggggt

SEQ ID NO: 445569 - DNA, 807 bp, Homo Sapiens
  misc_feature (49)..(58): n is a, c, g, or t
  misc_feature (60)..(64): n is a, c, g, or t
  misc_feature (66)..(68): n is a, c, g, or t
  misc_feature (70)..(75): n is a, c, g, or t
  misc_feature (77)..(79): n is a, c, g, or t
  misc_feature (134)..(134): n is a, c, g, or t
gttctaggaaaagctttcttgcaggggcccgaggccggcccgacaaggnnnnnnnnnntnnnnntnnntnnnnnntnnnaagtgtttgccttttaggttatttatttgcccagggaatctttgactttcccganatatgtactgtttgagggtacgatgcatgcagagccttttaaaatgcctttgtacaatttcatctcaaaatgatttcattcacagcatacacagaaatctaaaaagagacatggtatttacaagatttaataagtttttgctgctttaatgaagaaactgatcaattcttttacagtagggaaagaaacatggacattgggtatcataaataattcagaattgttcagtctcaaagtaacttttcatggctttagaattaaaattgagtcatcattctattaatctctgaatgcccaagccatgcagaatctacttgtattaaatatttggggatgcaaataatacaggaaaaaaagtctggtgaatgtgaaaacgtcatcagaattaacctttacaataggcaaatactgttaattctttcgaaaagatacagtagtggtgcaacacagacagtgcccaatttattctgatttttaaaagtaacatttcagttgtcatttttctttctctacagatagatatacagacacacacggtaacatggactcattcaaggtctaacaatggtacaatattaaaataattcaatttttaactataaagggacatcttcacattccaggatacatcattgatatttttagaggacaattcttctatgccttatattct

SEQ ID NO: 445570 - DNA, 534 bp, Homo Sapiens
ctttagtcaaaagaacacaattttaatgactttatcaagccttaggacagagatgagagaaacacctttccaatgatgcatcaagttaacgtctaagcaaaagatcagcagagatcagagattgttgggtacacacgtatcttgtgatgtcttctgagaaccaacttattcctctttctctgagaagaacttgacccctcgccccggggctgagtgcttggcagccacatttgtgttgagatcttgattcctgctctaactacacagggctgggatggacacctgctccaagtttggccagtcatttatttttccagtaatttaaagctgtgactaggagacacagcctctgtgggttgtgagggttgagatgatataaactcaggagctgtcgggtggacatgttcactgagaaggacagtcagtccacagagagagaacaccgccaacatgcaggggggtctagagaacacagaccatgtggatccgagagtgttggaggggcagctctagcttctctgggcttttcggatc

SEQ ID NO: 445571 - DNA, 1456 bp, Homo Sapiens
ttgggaggccaaacgggattttttaaatggaatttcatcccctattccgggtattctatttatcactattctaaatgattcagggttggctaattgattatcatgtaagcaagctatttgaagaaattgattacatatatttatatatagggggtaactaattaatgattacttgattaaattgctatgtgaactgacaactatttataaatcaatgcaatagactgttgtttgaccaaattattttactgaactgacaagtgggtttttgatttgtcagttgcttggctgaactgatcaagtcgatagttgcttgacaaactcaccaactttagaatggccaatcgtctaaacaagtgtcagagctgattgaaataaaccaagcattgttgggctgaattatggagagacccgaggagtgactcagcctaaagcgttgacccagttgtgagcagctcacaggccctgcaggaggagcaggccagcgagggagacacaagcagattgtcctgccagggaggggcgggagggcccacccaggccacaggggccaccaaagcaaaaaagcagattatgaggcagctccacccctcccagcactggggctggggcctggcgagggtcacacctctgagtatgggggtggtgctgggcccccctctggggtcttcgatggcaaagacagggcttcctcgtaggacggcaggaccaccttctggagcatcttggagtttctcttctcctccaccgagttcatgcacttgatcaatctgtagcaccgccacacgcacttgaacatgtagaccttgaagataaggacagtgatgaaggcgatggaaaagatgatcatcatcttgatgaactggttatgaggcatatcctcctggctggggaggtaattcatgtggttcatggacttgaagttgagataggtgggcacttccatgtaggagctgcagagggtcaggatgctcaggcagaagtccagcagctgcagcgtcatcagggggaacttggaggagctagcacggctccgggaggccaacttgaggtaggcgggcagctcaatgtaggagcccagcagggtgagcaggcacaggagatagtccatgatttgcagggacaggaagggcagcaggtacttctcccggttcttgactacgccgatcagtaggctcaggctgatgatgaagagcatggtgatgagcaggaagctggagatcaggtcagcgatcctgaggtagcccatctgggagagcttgcaggacgccttgccatgggccacctctaccgagtgctcgatgaacaacaagacgctcatgatcacatggtagatggccagggcggtggttgcgatgcggacattgaagcagcagcaggtctggcggacagtggacaagcgggggtccatggtgctgccgtcccctcctctgagacactgaaggggaaagccgct

SEQ ID NO: 445572 - DNA, 573 bp, Homo Sapiens
  misc_feature (523)..(523): n is a, c, g, or t
acctctgtggcacacaataattttaatataacaattatgattattactgattatgtacactaagttatattagaattataggagtttcacataattttggaacatacaccaataacatatttatacaaatacagcccaaagaaaaccaaacaccatttcacatttgacaatgcttcctatataatttttataccaaataagccaaattatgtcattttaggactttagggaaactaagatcttaaaggattaattaggttagaaaaatacataatttataatttgattttggaaagcttgtcaaatacaaaaggtttaaaacacttgacattacaaaataaaattacaggtcatcgtaaagtcatttatttaatccaagtgataattcaaggatttcaaaaaaagcaaaaaccttcattctttgagagaggtgacttaactttctaaacaagaagccctaataaaaacagcctgaagccaatcacatttgattttcaaaattttgtaaacaaactataagatntaatcttggttataaaatataacttccataagccttttataacctttatg

SEQ ID NO: 445573 - DNA, 502 bp, Homo Sapiens
ccttggccgagggggttacccaaggctccacctaccgccttggagggggactgcggaagcccggaggtgacctgggctctgggaggggcgtccccaacgtgggggaggggagacaggggcctttgaagacagcgcgggactcggagggggtccccccgacctcagacgtggtaaactgaggccggcgaggagggaggctgagtccggggaccaggcggcccctcactgctcctccggcccgtctcccccctgcgcctgtatcgtacgggcagggccggcggccgagtccagcgggctcggggccaggcctgggccctgcgggcggcgcctcctcctccgcgccgtccccatgctcgccctccgcgtcgctctcgtccgagttgtcctcctccaagtagcggtaaccgcgcaccttgtgctggggccgcgggatgcggggctggcgcggggccacgccccggcgcagcttctgctccatccgcaggtaggagaccgcggccgc

SEQ ID NO: 445574 - DNA, 493 bp, Homo Sapiens
  misc_feature (118)..(155): n is a, c, g, or t
  misc_feature (387)..(387): n is a, c, g, or t
ttaattttctgccttttattgttatttcagaaaatatttgatcatttgttccaaaatgtacatttaaaaaatccatacaaaactgtaatttgttttaaaaccagacagaaacagtggnnnnnnnnnnnnnnnnnnnnnnnnnnnnnnnnnnnnnngacacccctccccccaacccttttttacatgaaagcataaatacggcaggtacaaattttccttgagttccttgttgaaatttggtccatatgaacaggctagagtagaaaacagacactttgtccacatttgcattatcagttgctcagggcaccagcagccttagttcatccttcagatgtttttttaaacagaggaaccgaaaaatgaggtttacagtctcatcacatngaacactccaaatctggtacccaaggaaacagcgggtattatatttactggtcacagctagaccctatcaggtgaacaggggctctccacctgcgggctggttgcc

SEQ ID NO: 445575 - DNA, 1763 bp, Homo Sapiens
  misc_feature (110)..(147): n is a, c, g, or t
ctgccttttattgttatttcagaaaatatttgatcatttgttccaaaatgtacatttaaaaaatccatacaaaactgtaatttgttttaaaaccagacagaaacagtggnnnnnnnnnnnnnnnnnnnnnnnnnnnnnnnnnnnnnngacacccctccccccaacccttttttacatgaaagcataaatacgacaggtacaaattttccttgagttcctttgttgaaattgggtcccatatgaacaggctagagtagaaaacagacactttgtccacatttgcattatcagttgctcagggcaccagcagccttagttcatccttcagatgtttttttaaacagaggaaccgaaaaatgaggtttacagtctcatcacatgaacactcaaatctgtacccaaggaaacagcggtattatatttactgtcacagctagaccctatcaggtgaacagggctctccacctgcggctgttgcttcgcaaaatatccttcctctccacgtgaacaagtagctctagagtgcttttaggcagagtgacggtgatgtcatgggcaccacgccaatcttattcctggacaatgacttaagccccatcgtgagaatggttttttcctcttcaacacatttttaaaaaatagacctctaagatgatgctacatgttctaaaagagtgccacagaaacccacccaggatcacaagaatgacaacaaaaggaaagtggctatttcttgtgtaagggatgacgactccccctcccatgggtcccatttctcccccagttgcaggtgttttaagggacagaaaggctgtggaaaggaccactggctgggagagttattgcacaacccggaagagtgagaaaaacgtgggcgggcaaggggtaggggagagggttgctgcgactaaaacaaggtaacactgaattaggagctcgaacagttttgcaacagtcagacatgtatgtgtttatgtgttagcacttggagactgggaagtaaaagtaaacacctttatcatataaactttgggctgaatgggaagcaaaatagaccaaaagaggttacggcaagtgggccttttaaaaaaaatctgggggtggggaaaataacggagaaggagtttgctatgtggggccagaggagagttttcgaagtgggggctggaagctctgggcttctcttaataggtatgcttgtggttgggccacctcacagacttccacagccacccagctgggccagaagagaactgacacaagggagaaaccaaaaacaaaacagaacacaccacagaccctaatcctgggcagcggggttagaaacaaatggggtgaaactgtcacaatccgtgtcccttttatatataactatactgaggtatggtgtccttggctgccgtcgagccctggcaactgggggctggccacggagtacaagttgaaaaccacacagcaaagtaaggcacttattctcacacacaggcgcacgcacgcaatctgcttgggacaaaaagtctacaggggttgccaagcacgaaaggctacatggagactgcaaatcccaatgctcgtctttatagctctgccactccagggaactccataaaagaatgaggcagctttcactggggagaactggtcttcagcctttgcaaggtggagctaacactcatgtgagtagtggggtagagtgagaagttggtaaagtcttcctcactgggacaaccttgagctggagagagatcctatttaggttttcc

SEQ ID NO: 445576 - DNA, 593 bp, Homo Sapiens
ctctgctcagaaggtccagcatcctgaccagactcggcagcttattgaatttgccggggtgcaagcttccttgcactgtccacatgttcttaccagggaagggtctacccagggccatcctgcctcaaaggagaagtggtttactgttttctccacctttagagggaatgagggtccctgctcctggtccttactctactccactgtccaattggcgcatgccctgaggctctcattatacaaattggaagctaaggtgcaaaagaactaagaatttgcataaggtccccaacaggtgaaggcaggccccaaacctaggatctagatttcgtttttctgaccccgcttcctttaacctgcagggctggcccaacgccccgggcttcacccaacactgggcgcaggcgggaaggccgagaggctgggtcgggcgcccaagcgagggcccaggtggggcgaaacaggcgcagtcaaggggctggcaccttggccccccgccgtggattcaaagggtcaggctccgccccctccaagccccgagcccactttgatgtgctgatgcggcctggaaggggccacttcacacctcgggc

SEQ ID NO: 445577 - DNA, 448 bp, Homo Sapiens
  misc_feature (359)..(368): n is a, c, g, or t
agatcctggccgtttgttttgactcatctggatcacaaggggcactcccagggttaacaaatcagtgaagatccccccaatcctttttagatgtcgaaggcggcagtaggaagacctgagcttgagcataagatctgtgggatttcatcttaggggcagaaacaatccgttcactatttatttagaatgacttagcagccatttaaattttcacagagggctcaaccacctttggagtgactccatagcactggccatggtcagggttgttggaacatctgacctgtgcatccaggagccgaggagtcaggttgtaatacaggccaagcagacgggctttgagggcatttagtctcagnnnnnnnnnntgtagaaggatttcggaattagaattttgtgtattgtatctgtagttttgtaataaactaacgaaaaatagtgtgtcccc

SEQ ID NO: 445578 - DNA, 447 bp, Homo Sapiens
  misc_feature (153)..(178): n is a, c, g, or t
ttttttccaaaaatactgcaggctctttctcttataagtcattttttttctcctgtaaaaagcccccctgccctgccttcttacataaagcacttactacgcgccaaagtgcccttgagacctaagatctgaagcaactatgagaaaggtacnnnnnnnnnnnnnnnnnnnnnnnnnncacgccagtgagaaagcgagcgcgagcgcgagcgcaaggggaggagagggtgggagagggcggaagggggaaagctgtccgtgggagattgtgtcttcatgtccacggggctgcatctcttgatggtgcactgaaaaagcagagctcaccagacagagtggaaaggcaggggggaggggcagggagcaacagaaggaagagaccacaagcccaagacagcttccatctcagacggaaggcccccagaagatagaattccagccgactga

SEQ ID NO: 445579 - DNA, 600 bp, Homo Sapiens
cagccttaattgtatctttattttctgcatgaaacaatgcagagatttgactaaagactaacatttaataattttcagttacagcccttcagtgaaagctttgagataaagcaactagaatctcaaaatgatcgagccaactctgtgaattagtattaagcataactatcacatatgtaaacgcgagttatcctctccaatataggggaggcatataggaaacatgggaaagtagcagtatgaacaagagtaaaacaggtagtagaaaacaacagcatagggatgaaaaccttgcaaacaaagaattactaatttaaagtgtaaaaattttgcaaagggaagataactcaatttctacattttcagctctttgtattaaacattttttcatctgtaactagatattggtttttcttctccatagtaagatcacctgatatttgataatttatgcttttattactacttgttttatgataccaacatttatgttcacatcctcaaggctttattttcaagaaaaaataaagtcgtagtagcactatgtgataagctccatctccaaccgatttttaattgtctcattggtagtgatagtgc

SEQ ID NO: 445580 - DNA, 540 bp, Homo Sapiens
tatcaataagcagctttttattgaaggactgaaagaattaaatagaaggcacagtagcactgtaaagctttctcagaacataataatctttttctatgtatgtgtggaacccagactttcttttttgttgttaaaaatgtcttctggacaatcagaaaatctttatttgtcatccttccctttggtctttctgtaaaccatttctcgaaaactggccagaatcttgttctctctctttcgtctctcttcttggttaaaggatgcaagggctctcttctcatcagcactgtagatctggttctcttttcgcagtcgcacagcctccattcggcgatgcctgctaccactcattacataacctgagcattcaaatgatgcaatttcttcacttgtcaagccaatttcacctcttcgtgggatacgttttccagcttttacatattcagccatagctgcaccttcaccaggtaacagagcatggccatagttcaaaggtttatcatcttgagaggtaagtgtttttggagcctctgggccaat

SEQ ID NO: 445581 - DNA, 538 bp, Homo Sapiens
ttttccaggaagtttcagtgttttattaacaaaatcttacaaaaagagtctgtctctggggtaaggtgcacagggcctggaccgacatttaaggcctggtctgtgtggggcaaggggcaggggttggccacagcctcatgaggtttccagggtcttcacaggctccagggcttccccaaagcctgtgccagccttgaggattggttatggcttatgtgcaaaaataaaatctgtggggctggcagggtgtgggctgaagacttgtcagagtggtctgcagggctggtcccccagtggacaaggcagaacgatgaaccctgagccagcacctgcttaggctgcagacgctagtggcccaccagcaccagggttctggtgtcggggcagggcagaatgcctggaagcgccccaggagccatggcttctgggatgtccttcctgcagctgagctcagggctgctgggcaggggtaggagctgtggccccagccttggggctcatgaaagcctctggcagagaggatggcctggcagcgggc

SEQ ID NO: 445582 - DNA, 536 bp, Homo Sapiens
  misc_feature (67)..(82): n is a, c, g, or t
  misc_feature (431)..(440): n is a, c, g, or t
cacaggagatactcaattattttattataatttctcaaacaagtaaaaaaaatcccctcgccccccnnnnnnnnnnnnnnnngctgctctttagttagggaaaaaagcatcgtttctagaggagaagctggctccagtgaagagatggtcgacctcctgctttttctgaggatacactcacagcaaagccaggcgctttctcctgtcctaggattattagaagctattctaaggctctcacaggttttatagtattctttgttagtgaggattttacccatcttatcctcatttcttggaaacaagctcgttccttagtgaggcagatttagctcctcagtgtccttggccaagaacggtgttctccggaggtaatcttggaaggaagaggctgcatattgctgctcaaaacagggtagctaaggacacannnnnnnnnncctcaagaaatgtaggaggcaccaaaaaagagaccgctcagggatcgggctgctccctcattgtgtcacgagacggaggcagggtcgcctcgtgcc

SEQ ID NO: 445583 - DNA, 1451 bp, Homo Sapiens
  misc_feature (95)..(95): n is a, c, g, or t
  misc_feature (1396)..(1396): n is a, c, g, or t
  misc_feature (1427)..(1427): n is a, c, g, or t
  misc_feature (1435)..(1435): n is a, c, g, or t
aagaattcactctcgttttattaagagaactaaattgtttctaaatgtagatggtccctctggaaaagcagttttcagcaggggtggtaaccttncagagggagtttggaaatgtgtgggtatgattcttggttatcataatgatgggggtgctactggccttctgctgccatgggaccaggatgctaaatgtcaaggtagtcctatacagtgaagaattgtcctgctcaagatgccaggatttcccccagtgagaacatgctctaaggaatgaccacccctttcttttattctcccacagtgctccatgtacagaagtaaggcatagcagtcatatgaggcaaccacattcctgaacctttcctcatgctggctctacacttaatcctttacttgtatgtttctgtaattcttacataaattctattaagagggtggcatactgtagtggatgaagctgaggcttatagtaggtaaggcacaaagttaaaaagtaacatcactgggtttcaaacctactggtctctgtgactaaagaacactttcagaaccacttcttgattctgccaccacttgatcccataacaggctaccccttggcctcatgctggagttgtgtgtgtctgtcttcatcccaggctgagctccttgaggtgaggatgttgtgctgtttgcctccctcacagtgccttggtcttagtggatgcccagtcgtcttgtgaatgacttttaagacgtgtacttaagagaaaaatcctaccttatttgaataattacaagtcatgtttttgttgcttaaaggtgataaatcagtgtatattatttgttaatgtccattaaagccagtttttaaaaaaatcactggacttttgtgtttaccatttaaaacaaccattttaaacaaacttagaacgatgccttagctgtttataggtaacagaatgtaaactcccaccacctggagactaggccatatccagggacctcacactgactttcctaaaggagagaagcagctacgctgttcatactgatagagaagagggcaagaaaagatccagagtggctgttactttgaaaattaaacgaaagatgaaattctgaacttaaaacacttctgtttggccttctataactgatcacccttctttgctctgttttccagataaatggagacaccagatctccctaacctctgacttctgccgttagccatactctgtgtagttagatctcagtctgggaatggcattccagggcaattgtgaacatgaggctagatttttcctttgatttagcacattcctaggcagacttttgcaagctcaaaaaatgaaaataatatctgcttaaccaaaacataatcataggaagaagaaaaattttaaaaatgatnggatttttgaccctacattccttaatctacnatactggncctttccctttttagg

SEQ ID NO: 445584 - DNA, 541 bp, Homo Sapiens
tttttaagatagtaataagtactcacttttaatacaaaatcatatttcggatgcacacagataaaatgaactctgatgcaaattatcctgtaaggtgaataattttctaatcagagtaagcacttccttattagtctgttttatatgtctgatttttcttgaactaggttcctgtaaaaccacgcatagcttttttatacacaaaatggctatattcctaatatactcaaattaacaattctccaaagtcctgttaaatcaagtttagcctaaagttgcctctgtacgtattttaagttcgacttaaaggtttttctgtacattgtgaactataacaagtggaggtgtaaacagaccgtagcttacacttgtgccaatcattgagttttggccaaatgtagccaattgtttgaacatgttgaaataaggcaaatgccaacctgtaaccaatctagttgcttctgtgcctcactttcctttttctgtccataaatcttctcccatgtggctgtgctggagtctctgagcctactctggctgg

SEQ ID NO: 445585 - DNA, 405 bp, Homo Sapiens
  misc_feature (136)..(185): n is a, c, g, or t
attgtgaagaggatggaaaaactgaatacaagataccaaaaatgaaaaaaagtgtcccatttttaataactatattctattattttataaatgtgtaataaaggggtccctctttattggttgttctccacttaannnnnnnnnnnnnnnnnnnnnnnnnnnnnnnnnnnnnnnnnnnnnnnnnnataaaacttgtgtttagactttatcttgctatggagttttcacacttctataggcacatatcctagtatctagtcatttctgttttaatatgaatttcagtaatttaattttaatctgggtgacatattaatcggaaaataagggagtaatgtatacctcccacatgtcctttctttttgtcttctcttaaattcccaatatccagtaggagtggttaaa

SEQ ID NO: 445586 - DNA, 630 bp, Homo Sapiens
  misc_feature (188)..(230): n is a, c, g, or t
  misc_feature (549)..(549): n is a, c, g, or t
  misc_feature (577)..(577): n is a, c, g, or t
  misc_feature (584)..(584): n is a, c, g, or t
  misc_feature (599)..(599): n is a, c, g, or t
aaagaaagggacatgtgggagggtatacattactcccttattttccgattaaatatgtcacccagattaaaattaaattactgaaattccatattaaaacagaaatgactagatactaggatatgtgcctatagaagtgtgaaaactcccatagcaagataaagtctaaacacaagttttataaaccnnnnnnnnnnnnnnnnnnnnnnnnnnnnnnnnnnnnnnnnnnngattaagtggagaacaaccaataaagagggacccctttattacacatttataaaataatagaatatagttattaaaaatgggacactttttttcatttttggtatcttgtattcagtttttccatcctcttcacaatcttccataacttgctttttgttatccattgttcacctgaaacttccaccccaccattcaaagtacaactgaagaataaacgatctaacagattcttgtgagacacattatcagataaattaatccagtgacacatgaataaaggtttagggtttttaaaggaaatacaggtaaaagcaaaancatatggaggcataatttaatctgatgnttcaggnagggcacctcaaggnttgtgttgtgccggttttccctcatgctgcg

SEQ ID NO: 445587 - DNA, 404 bp, Homo Sapiens
  misc_feature (13)..(13): n is a, c, g, or t
  misc_feature (26)..(26): n is a, c, g, or t
  misc_feature (37)..(37): n is a, c, g, or t
  misc_feature (183)..(225): n is a, c, g, or t
ggacctggtgggngggtataccattnactccctattntccgattaaatatggtcacccagattaaaattaaattactgaaattccatattaaaacagaaatgactagatactaggatatgtgcctatagaagtgtgaaaactcccatagcaagataaagtctaaacacaagttttataaaccnnnnnnnnnnnnnnnnnnnnnnnnnnnnnnnnnnnnnnnnnnngattaagtggagaacaaccaataaagagggacccctttattacacatttataaaataatagaatatagttattaaaaatgggacactttttttcatttttggtatcttgtattcagtttttccatcctcttcacaatcttccataacttgctttttgttatccattgttcacctgaaac

SEQ ID NO: 445588 - DNA, 1211 bp, Homo Sapiens
  misc_feature (511)..(519): n is a, c, g, or t
  misc_feature (527)..(577): n is a, c, g, or t
  misc_feature (1101)..(1101): n is a, c, g, or t
  misc_feature (1110)..(1110): n is a, c, g, or t
  misc_feature (1128)..(1128): n is a, c, g, or t
  misc_feature (1194)..(1194): n is a, c, g, or t
gttgtgtatgggctccgggtaaaaaatatttgtctcgcacgtatcatgctccgttggttggaccaacaaatgttttccgaccagtctacagataatgtcggccggctggggttttaaaagccagctgttgtagcaggctgaaaaagtgtgatatggattggtggctctcttgggggtgttttaaatatctttctcgttagaggagatgtgctggtgccccaccataatttggtgcccccccggccctgcgactgtataagtggtggttctcctctctcccacaagagtgtgctcctccgcggcaggccacggtttgttccgccgcggccagcaggcgtgttgtattattcgctcgtcggccccccttgtccttcgtccgttttatagaatcctgcgttcctccaatattatggggggccccccttcgtgtcccacaaaactctggtgggttagcgccggattactctgggcgccccctctgctggggagtatttcttgtggcgcggcgcgnnnnnnnnntgtcttgnnnnnnnnnnnnnnnnnnnnnnnnnnnnnnnnnnnnnnnnnnnnnnnnnnnggggtaaagtttaatggaaaagccgtggaaacgttgagttcacaaacaggacttcccgtgcaactgtccagccagacctggggcagctcctggggaccctgcccccttcacacacacccatcccatccatggtgcctgagaggccttcatcttcagttccctccaccagatcagttgggcatgttgggggcagagatggagggttgttgaatcacactaggctctgtaagctgagaagacgatcctgcacagggtggcgtaagccagtccctcctgccagggcaccagctcccgccacctgggatccgctcccggacctcggccgcccgagcctcccgactcgcccgcccaccggcctcgctttccagtgcctgctgtctctttccggggcgcagggacccccaggcggcgccacgacccggagctgggtcggaggccaggctggggctcgggccaaagcggccgggcctctgggcgcgggagaaggagggcgccccctctccgctcgggtcgtgtcaatgctntgcacttgnggcccggcgtgcggctcnggtccttccccaaggccccgggacccgggctcccctcgcctcaggccctttcggcgggtcaggtcngccctccgcgctttcca

SEQ ID NO: 445589 - DNA, 533 bp, Homo Sapiens
ggctgggagtgcagtggtgtcacctcgccttgtatgtcatcgccggttgtgtgcctaacatacatacaaaaaggataactcgaatttagccatcacgcattttcaaaaatactgcttagaaattgaatgtttggagaaaagatataatctggggtttctacacggtctgaattgggttcatttccgtttagcaaacatttattgagctcccagcgtgggtcacagaattcagtaaacctgatcccgtgttcaaggtgctatattccgatgcagggcagggcgatgcagtgaaagaatggtgaccacagcagtagcatgctaatagcctggtgggcaggtacaggttttgcatttctttggcgagatcacttttgagtgtctccactgggtggcagaattaagacccgtgaacgtttaatatctcctgtatatttagtatattatgaatatatactgattaatgaatattaagtgcgtgttgtatatcttgtgcctcatgaatattaaatatgaactctggtcgttgccgcacc

SEQ ID NO: 445590 - DNA, 1362 bp, Homo Sapiens
  misc_feature (661)..(669): n is a, c, g, or t
  misc_feature (833)..(842): n is a, c, g, or t
aaagttaaatgaattagtttattgaacttggagatggacacccttataagggcaataacaaacaaaaatagaaataggtttaagttataacacacaagaataaaattagatgtaaagacgactttcctcagttttaaggtggataagtgggttgttaaattataacagatttctctaggagggtctggtgtactccaggctcgctgggaggcagacctggataatctctgagtatatctgtccccacctggcattgttgagacccttcagagtacttctttaggtccatgattgaaaattaagaggcagccagtgcctccattgttataagggccataaggtttggttatctttgataaagagaaatggaaacatataacagagctcttcctcaagtcctgcattgggaacattagcacacaccaggacctttcctatatgtagacacagtgcagatttgatctgtggtgcagccaaactaaaacacaggtcatggcattgtttccccacttttggtacaaacaagcccttaatcaagtctctaatctagggacagtaacatcggctatttgagtgcaggcaccctaggttgttaatgtctgtttcccaacactattccattccaatatttttctttacctaaagtgggataatgatcatnnnnnnnnncacaataattttccttacaacactgctgataactaataatcacacaattgcatgtaagttaattctttaaatttaatcagtcatttataaaactccccaattagtaaaagttggcttattttaacagccttagacattggccactatttaaacaagacattctnnnnnnnnnngcaatcacataatagtttatagtcatttacaagtggatggtatacatttagatacagaggtagaagttcacctttacaatgtttcactaatacacatataccaaattcaaggcacaaaatagtttgctttacaaaaaaaatactgtaaaaatgtcatttgctgttctacaatgtgaataaacctttcaaaagaatctttacacccttccatacatatgccatagaataagatttcttcctctcactaatcatagttggcacaaaaatggggacttttcaatgtagaagttcccatttttaaaaactgtttctttgcagagctgctatgtattctagataagagtccatccaaagaaatgaaacacagcaacttcctgaggaaagggcactttctgtatgcagcaaaattcataggtagaaaatgtatgatcttttaggataattaggtctccagacacttaatgaagtatatcagagataaaattaaaaattcaaggctgggtgcagtggctcatgcccc

SEQ ID NO: 445591 - DNA, 465 bp, Homo Sapiens
  misc_feature (362)..(362): n is a, c, g, or t
  misc_feature (395)..(395): n is a, c, g, or t
  misc_feature (405)..(405): n is a, c, g, or t
  misc_feature (418)..(418): n is a, c, g, or t
  misc_feature (426)..(426): n is a, c, g, or t
  misc_feature (433)..(433): n is a, c, g, or t
  misc_feature (446)..(446): n is a, c, g, or t
aatgtttcttcctctgtttggctttgccattgtgcgatttggaaaaaccacttggaagaagggactttcctgcaaaaccttaaagactggttaaattacagggcctaggaagtcagtggagccccttgactgacaaagcttagaaaggaactgaaattgcttctttgaatatggattttagggcggggcgtgggtgggctcacgccttattaatcccaggcacgttggggagggccaacgcggggtgggatcacctgaggttcagggagtttcggaggataacgacagagggccccgggcacttcacagttcaccttcattcagtttccttcacttatccctctggcaggggaacaggacantcttactgttccttgtgttgcagttacttcctntttatctttnccacagttttgantcctcccntttcccntccacaggggttntttttcccgggggtaccat

SEQ ID NO: 445592 - DNA, 469 bp, Homo Sapiens
caacatgtgataaagaattaatttttaatattctaaaggtgcttactcttacaaattaataaaaattagatagaaagcacaatagaagaacgtacaaagataaatgtttcttcacaaaacggccaaatcagtaacacaggctttgtgttcaaagtattgattagtgcatacttcactaataaagaatctatagtatgtattttattagtattctagaaaatttcagacaatcagcaaatggaatgaattttattatcaatatgccatagaaattcagtcatctaatttttctagcttatgttatgttgagcctgcttgtggtctctctacctggaggagggacaggataagaccagcagtatcccatatgattccaaatggaagtccaataatgtattggaatttgctacatctcatatccaaacagtgctttatctacattaatggatgagtttgtgattttaatatg

SEQ ID NO: 445593 - DNA, 983 bp, Homo Sapiens
  misc_feature (306)..(320): n is a, c, g, or t
  misc_feature (586)..(637): n is a, c, g, or t
tccctaaaacaaaggtttatttatgtcattttaaactgctctttcttaagcctgcattatatttttatagttacaaaattctaaaatgggaagaacattactaacttccctcttaacacagtgcctgcactaagcaaaggcttagttcatggtaattgttgctgtaaggacctcctgcaatgctctagcccttgtgattcttagggggcagaaatggcatccctacaccagtgaagcctcagcttccagcacagtgttcagcttttaatcaaaattggttacacaaataaatgaactaaacaatcnnnnnnnnnnnnnnngaaatggcacatacatagaggtactatctatgctagcaatcaggcaactgaattccaccttcagctctttaaaactaagatccattcattcatatcctcccccaagtgggagtgatgggacaactgaggcacaatgaggcaatatgacacaccaaggctctgtcaattgctggaaaagtttaggcctttctttaacccagagaatgatgaggaagaatggcatgaggttttaaggttgccatcacgtcaccatctagaaaagaagnnnnnnnnnnnnnnnnnnnnnnnnnnnnnnnnnnnnnnnnnnnnnnnnnnnntattatgagggaactagaagctgaagcagagaggcagagacttgtccatggcagctctcttgatctcttcatttcctggagtgatcttggtgatcctggaatcttgcatggatcttgtagcatggaataaatgaggctctcaagtaagatgcaatagattcaggcagcaatgaaactcaagggatgaaatcttagcttcccagaagacacaagagaagtgttgtggatactgggaatgactccagtttgcatcaaccctagatcttgactgagattttgtggccacggatgaggtagcagtgacgacatgaaaagtttccttgatttgtcaaaggctggttttaat

SEQ ID NO: 445594 - DNA, 1232 bp, Homo Sapiens
  misc_feature (221)..(230): n is a, c, g, or t
tttttggatttatatgttatttttaatgaattatacatgttataaatttctcacttttaatttccagtagagtaaatatcaatagacattgttatacaaaaagcctctttggggtcggtacttgttaagagcgtaaaggggtctccagtaatgcatttgaggcctgctagtccaggctggtcttgagctgcccttgaaatctttgaaaatggagctgtgannnnnnnnnncttgcaaaactgggagctgggctggctccagccggcttgctttttgaggagtgaccatttctgcaccatttgctctacaggcagccactggggagaatgcctgctgcgttgcgtctgcgtttcacaccaggccgttggggagagattgtgagcgccttcaggtcaggattggggtctttgcatcaatggctggagcctcagcgcccactccacacagtaacagctcaggaaaggcctgctggttgatcccaaatccacgtagaacggttccaactgcagcggggaagatgggctggtttaaaataaaaaaccaggtattgtttcactggtgccagaacacccagctcttcctggtattatggggtctgcagaccaggtggaccccgggaataggcaggggctatagtcgcattttcagaaggtgatctggagccatggaaaatgccctactctctggcagttctaccagccaccctcagaccacagcttccctgaaggcctgtgtggtcaggtttttcctttgtgttaatttccaggccgggagctgactaactgcacaggtctacccacagccacatgagatgaagtcaggtgcaacgatattttccctaagtgactagagttagtgccacaagcaaacgaatgaattcccaggaagctcatcttctcacattggtccacaacaagccgacatcaaaaacaagcatctgatccaaggagaagagggtccacgactctaccagccagaatgtagcggcttccagggtgacccgtgggtattgagggtgcgtgcgagggtgggagcagccagtaccaggtgcaggcagtagggggtgcactatctgtggcgaatttaggaatcataactgactagaagtcagtttgcttattaccaccgtgtgccggtatctctgaacaaagtcagcaataacatattcctcctccgaaaatctgttgttgattgaagtttaaaaaattgctgtggctacggttgcgttttaa

SEQ ID NO: 445595 - DNA, 818 bp, Homo Sapiens
  misc_feature (14)..(14): n is a, c, g, or t
ctgagcatcttttnagggtttactcacagtcttaggttttatcttctgggaaatatctacttctaccttttgcccacttttctattgcttatttgtctttttctcaataactcttaggagtttttatgtattctgggtaataattctctgtggattaaagatgttgtaaaaacaagtttgatctcatattttatttctttatgatataacagaagttgttaattttactgtaaagttattaatatttatttttatgtttagtgtattctttctacttttaaagaaaacttcatctacactaaagtaaatatattattccatattttcttctaaaagtttaaacattttacactacaatttttgaactatcgctaattgattattttatatggcttgatgtagggatatatttttttcagatggtagcctattatcccagccctattcattgcttaatcccagtgacctgctatgattcattcatacatcaaatgttcatgtatacatagcttgtttcattaacctattgtctattcctgcatgaataccacactttatctattactagagctatataataagttttgctatctggtagggtgtttctcctccctcctttcttttttcaggagtatcttggctattcttgggtcttctgcttgttaagttctttgaaaatattgtggaatttttattggaattgtttgaatctatagaaagaactaacatttaagtcttcatattcaggaacatgtgtacctctttttaactttagatcttctacaatgtattttaataaagttttataattcacacta

SEQ ID NO: 445596 - DNA, 358 bp, Homo Sapiens
tatttatacttctagcagtgcaagaacaacctaacacagtgtcccattgtcatctactcagtctctaatagggctaaggagcatgatagtatctatttataagcactgagaaatttcctactgtagaaggcatggatctaccccatttagatttactggctataccattgaaagatttgcactttagctttcctactgtgccatgccagaaattccacacagcattgttatccatcatgggcattactagcaacactggagtggctggtttgtgtcagatggctagtatcatagcctggacctcttactccagagtcttctcaaacctgatagcattttgagttccagatgtggtata

SEQ ID NO: 445597 - DNA, 1218 bp, Homo Sapiens
taatcattttttggttatgccaggtgtctcctgtgtgtccctccagatccctctccagccctagaaacctgagctctataaatgttgcctctctccactcatcttctctttggcttcaggttgagttcagccaacagatgcccctgtaggatttggacacagggagccaggggagaggggcatcagctgcctggttagcagggctgtgatgattcttctacctatgactctcagtgctgttgcctcttcctctggatcttggaagcttccatgctgaggtctgaaggtggctccctgcctcccactgatgtccttagaatcccatcctcacctaatacctggtattgaacactgcctttcttagatgtcatttaggctctcgtttcaattcccagtatgcttcctgcaaagacctcgatagatggactgaggggaatagtgcaaggtcctcccatccccagtattgggatctaggggcagggggtcccagctgtgcagtaggttaggactacacttccatcatcaaagccacagagggaagaggtgaggatgaaacacactagaattgacttagaaaacacactggccaaatcttagctatttgaggaatgtagggagaaaagccaccttctctctctatgtctgaaggttcccatggctgtctctttgcccaaggggcaaactttccatcagggcatcttctgtgcctctgaggatcattttccaattataggcaatggtagtacgtgtttcagtgcagaatgagatagagttgtttaatttgacaataaagcgatgcgtcaaaaacctcagtcaacacagtaagtgttttcttgttttcctgctgaccaacctaattctggtttcatacagggcagccaggtgcccacctaaaagactgcacttctcaacttccagttgtttctatggataatggttggaagcagaaattgggttggggcttccagataatcccccctcacagggactgcttcaagagaaagggatgccctttggttctttctcctttccactgcctggaatgtgatgtctgacactgtggtcagccatactggcataatgaggccaactctctgccatgctaagagtggcagagctgggaattgaaaagagcctgctagccttgggttgcttccccttgatcggctcattacttggaagagaacacacccttctcttattattttctttaaggca

SEQ ID NO: 445598 - DNA, 460 bp, Homo Sapiens
ttcattcatcagacattttaatgagacccaatctgatatgaccccttcttgggggtagctcatcatccaaggagaaacaaacagttacaatgttacaatgcaacttgctaaatattgaacagaggtaattacataaagctgtgttcccccagctgctcccctgcttgtgctgagatcaggagagctgtaggaaggagccacaggggtaaaggatgacccactccagctgttggaatatgagatgagtcacatctggaaattctaatttggtgcagctgcccaaggcaaagtggtaggccttgttcacatttaactcggtaaagctttatgaagcacctacccagtgggtgccatggaggtggatcagattgagccacgctgctgccacctctgtggagggaggctggcatggatacaacttgatgactatagactcttcctctctggattcagttccctc

SEQ ID NO: 445599 - DNA, 439 bp, Homo Sapiens
atatttcagaagttttaatagttctttgtagagagagaacattttaccatgtacataattcacaagggtataaaggtttcccaatgtaaagttccttttacccttcaactgtaacccatagcatctgcccaaatactgctcatttttcactttctactatatgtctctttcctgccaactgaggtagttgtcacttaggacagtttaaggctctggaaaacactggtggaaataatcaactgcccacctggagggcagtctcagagctgaccctttggaagtctgcaatggagctaggcctttcaaaattaccacgctaaatggctggtctaaaggagtcattacggctttttaaaaaatcatctgcctttttccatcatcttggtgagccagtaagtctggtgctgtgcgcttgccatgaccatctatcttcctggct

SEQ ID NO: 445600 - DNA, 696 bp, Homo Sapiens
  misc_feature (645)..(645): n is a, c, g, or t
  misc_feature (650)..(650): n is a, c, g, or t
aaaatgtcattttaaatgtttattttattttgcacaattttaacagtagagtaattttgctgtggaaaataaaatttcatcttgcaagaaagagaaaactcaagaccaccaactggcgtctttatttacatattagagcgggtcagccaatgaaaatcctgggccttccgtgtggcttgtggctcaatcatgatgttgataagagaaggtttagttgtgtctgctaggctctgcctcagggatttttggagttcttctggtgtttgtacaaaataccctttgcctccaaatgcagtcatgacttgctcataatgtgaatttggcagcaaacacattggagggaccactgcagtagcatcttgaaattttaacatttctttccaagtatctgtatcaaaaccttggtaaattccattgttattcactaccaacagtatgattggcaagttgtacctgcagatggtttctacctccatgccagaaaacccaaatgcactgtctccttccacacagatgatccattgcccagggcttctatctttagccaccacggcagctgcaatagcaaatcccaaaccaactcccattgttcccaaagtaccagcattaagcctgtgacgaggaaggtaggttctgaacacaggnccgcncaatgtccatagtatttgctcctttacttaccacgaaacagtcttt

SEQ ID NO: 445601 - DNA, 488 bp, Homo Sapiens
  misc_feature (390)..(390): n is a, c, g, or t
  misc_feature (396)..(396): n is a, c, g, or t
  misc_feature (403)..(403): n is a, c, g, or t
  misc_feature (446)..(446): n is a, c, g, or t
  misc_feature (460)..(460): n is a, c, g, or t
  misc_feature (478)..(478): n is a, c, g, or t
gacattttaaatgtttattttattttgcacaattttaacagtagagtaattttgctgtggaaaataaaatttcatcttgcaagaaagagaaaactcaagaccaccaactggcgtctttatttacatattagagcgggtcagccaatgaaaatcctgggccttccgtgtggcttgtggctcaatcatgatgttgataagagaaggtttagttgtgtctgctaggctctgtttcagggatttttggagttcttctggtgtttgtacaaaataccctttgcctccaaatgcagtcatgactttgctcataatgtgaatttgggcaggcaaacacattgggaggggacccactgcagtaggcatctttggaaattttttaccatttcttttccnagtatnccgtatncaaaaccctgggggaaatttcccttgtttatttcacttacccnaccggtttggtttnggccaaggtttttacccngccggttggg

SEQ ID NO: 445602 - DNA, 907 bp, Homo Sapiens
  misc_feature (475)..(486): n is a, c, g, or t
  misc_feature (741)..(766): n is a, c, g, or t
  misc_feature (827)..(827): n is a, c, g, or t
aattttagttagcacattgtaactgagtaattacatgaagtacaacctctctgctagctcttcagtctacaaatcgctatgtaaataacagatatgcttcatgattgtgaccagtcatgttatttctttcaaattcttccagtggtttgtccctgtgcatctgttaattcagttcacgtacagcagagcatgtagttatgctgtctctctgtcatctacttgacattctatagaagtgaacactcgaaagaactggtcaacaaagatgaaagtgcagcaaagcaatgaaaaatgataacactggaagtgaaattttaatcaaacataaatgaatttgtagaagaagtcactgaccatgggaatgttgttcttgctgctgtgtattcataggagcttagtgaaggcaaacttaccaacacaaataagcaaagtggttgcaataaagacagatacgtcccagaggaagtgatggttnnnnnnnnnnnnctttacattaaaagatatttaatgtgaatatagaaatatttcacaacattgaaagcacaagcaataaaagggtggaagctgacccaaacttagaaggagtatggcagtttgccgtgaacataaaagatgcttactcagtatggtaagttacttgccagaaaaaaaggcaagccctattcaaactactttgtttttacaatgaaataaaacactttaattctatttctaatgttttaaattacagtgtactaaatnnnnnnnnnnnnnnnnnnnnnnnnnnctacatttataactggtcttaagagtttttaatatttgagcagaaccttaaaggtcatggnaacaatcatcatttttccctatttgattatttaagattgccaggacccattttttatgggtcccacagataaccatgttc

SEQ ID NO: 445603 - DNA, 542 bp, Homo Sapiens
gccggggaatgggcgaattttataaaaatccagtccagcaaattgacaagtcacttctcagcctcagaaataaaatgcttgacaaaatatattctttttaaaaggagagagaaatgttactaccaggtggagctggaggtggcaggtgactgggaagatgagaggagggaggagaggaagggttccctgggaacaagagcctggcaggctcaaaacccctgccatgagctgtctctgagaggtgtggatgaatcaatgtggatctcaagggagaagcctggtgtttccagagtcctgccctggcaggtcagactcggcacacccagtctcacagtgggaagctgggagacaaggtacctgatactgcccttctatttcctgccttccccagagatcccgcccactgcatcagggcagagccgtcccggcctgccacaggggccacttgtgttcatgatgctttcataatgacaatagggtggactgactagaacaggctttcccagggtctcccattttaaatgcttatgagtctgagagtg

SEQ ID NO: 445604 - DNA, 1208 bp, Homo Sapiens
  misc_feature (271)..(330): n is a, c, g, or t
  misc_feature (452)..(542): n is a, c, g, or t
tgttgtgtgggtctttgtcttgcgtcttcttctcctctttctctttctcgctgcccgcctctttggtgctgtgctgtggcttcggcgtcgagtctgactccgccgtcggtttctgtgcgtctatttgttgtcttgggtcttgtgtgggtctgcggttcttgctctggctgtgggcggttcgtgttgtgctcccttctgtctggtgcgttctcctcctggtgttgtcgtgtgcgtcgtctccgctccagtgtctgctgctgcgtgtggggtnnnnnnnnnnnnnnnnnnnnnnnnnnnnnnnnnnnnnnnnnnnnnnnnnnnnnnnnnnnngtgctggctccctccttcgcttgcgtgtgcctgctcgttgttcgtcacaccgcgttgctatcctctgttcttcgtccctcctttgtcgtctgtgtcttgccttgattgtgcggccccctccnnnnnnnnnnnnnnnnnnnnnnnnnnnnnnnnnnnnnnnnnnnnnnnnnnnnnnnnnnnnnnnnnnnnnnnnnnnnnnnnnnnnnnnnnnngtgagaaagctctttactgggggtacagcgaggaggagcaaggccatctccccctacctgcccccaccccctcctagggtcctggggtgagggggggtcttccctccaccggaccaccactgtctttggtacaataaatagaaaaaaagggggagaggggcccaagggtccagtccttagtggggagggagcggccaaaaccctctccttgacccccctgccccaggccccaatcagtgcaggcctcacccaccccagctgggtagcagcaattccagtcaaggagagagatgaggatgggagcccagggcccccagatgggggagggtatggcttcaggaggggccccagggagggggcagggtcacgagctggctgctgtgctctggggtacaccacggaggcccaggtgaggccccagagtggcagggtcatcaggaggcgggaggggtggacgacctccagtcatccgagtccggatggctgaggcagtcgggtgcttgggggcatgcgctgggtgaggtggggagcagtcatcaaggccgcccaccatgctcacatccatcagctccgggggtgtggtgaggttggtgatgggggacgaccaaggtatcggggctgggggggtaactgggccccggtcccaggcagcggctgggagggtgg

SEQ ID NO: 445605 - DNA, 329 bp, Homo Sapiens
ttttacattttaaataacttttattagagtatattgttacaactctttcatcttattagttctgctgttaagtgccaaattcataaactttatcatagggatatgtatgcataggaaaacaaacagtatatataaggttcagtactatctgcggtttcaggcatccactggggatcttgcaaatgtatccaccacagataagggcgggggtgaggggtggctactgttaagtcacattgtgacattccaggtgtacatgaaatttggagggacactattcactatatcacacaagcaacataatgcctcttttgacacagtaagatttt

SEQ ID NO: 445606 - DNA, 758 bp, Homo Sapiens
  misc_feature (109)..(110): n is a, c, g, or t
  misc_feature (131)..(289): n is a, c, g, or t
  misc_feature (322)..(573): n is a, c, g, or t
  misc_feature (581)..(604): n is a, c, g, or t
atatggtaattcccactttttcggtaaatgaatttgcctttacatgagagtgtatacagccatctccttacaggttgaatcttctttatagatatttatccagtggaannatttggaacgggtttctgatnnnnnnnnnnnnnnnnnnnnnnnnnnnnnnnnnnnnnnnnnnnnnnnnnnnnnnnnnnnnnnnnnnnnnnnnnnnnnnnnnnnnnnnnnnnnnnnnnnnnnnnnnnnnnnnnnnnnnnnnnnnnnnnnnnnnnnnnnnnnnnnnnnnnnnnnnnnnnnnagacagagtcttgggccaggcacagtggctcannnnnnnnnnnnnnnnnnnnnnnnnnnnnnnnnnnnnnnnnnnnnnnnnnnnnnnnnnnnnnnnnnnnnnnnnnnnnnnnnnnnnnnnnnnnnnnnnnnnnnnnnnnnnnnnnnnnnnnnnnnnnnnnnnnnnnnnnnnnnnnnnnnnnnnnnnnnnnnnnnnnnnnnnnnnnnnnnnnnnnnnnnnnnnnnnnnnnnnnnnnnnnnnnnnnnnnnnnnnnnnnnnnnnnnnnnnnnnnnnnnnnnnnnnnnccatctcnnnnnnnnnnnnnnnnnnnnnnnngtgtaaatctatggtttttaatgggactgaaagtcagcaaaatatcaatgacaattatgattatgactgggtgttctgctaataggctattgatgtttggatgactaataaagacgtacccaattcataattataatatatgcatttcataaaa

SEQ ID NO: 445607 - DNA, 767 bp, Homo Sapiens
catgatttaacagttttatttattgaaaggttatgacaaattatatgagatttttctctttaaaaattatttataaataagttatttttacaaaatttaatattagcattcatggaacattacaatgtgctaggtaagtagcaaccaaataaacaaaataatcactagacatgtggtggtcacaagaggaaaaggaccacaattttagtgtattaccaatgtagtgaagtgcatgtttatatacaatttgtgaaaaatgagtaaactaaattttacactcatggctattaagagggcttagcctagtatagtcaaccagaaaggacaaggtaattataaagttaaatacaaaactttcaaacactctggccttgcaaacattaagttacatggtaaagacaggcacaacaaatatttagaaattcaatatgcatatattcacttaaatgttccattaaaaagatgttaatttaagaatttcattaaaacataatttatttttatcctaattgagtaatttatgattacaaaaagattaatcaccaatagatcaaatatagagaaaatccatactcaatatccagtataactaaaaatgttaagtgcaattaataacaataaaaaagggacaaatttagctttatcagggacatgagtaggtttgaaattgtggtatgaatatttagataagtagacaatttttttaaataaaggcattgcagtgggaagtttgacaaaactaacgggcggttcactgaactaaatac

SEQ ID NO: 445608 - DNA, 489 bp, Homo Sapiens
acctgaaagtatcaaaagcttttataccctgacagggtcaaaaacaggcaaagccactgggttgcaaagagggctgtttttaacacaaactggaacctggctgggctcagcctgcaacaaaaaaagggcctggataaggccgaggtaggcaggcaggcatgggtgctgggagcaaacaaacatattctttcctgcactttcacctggggagtaatccaggctcaaatgggccgttctgctttcggggggcccgtctagtttctgcacccgtcaaaggctggagagacttttgtaaaaaaggggccttggagggagcctcgtttgcccctccgggggctcgctccctgtgctttcccagttggggctgcctatgacaccttcagttttgacgtggggtaaaggggggggattgtggctcagggttgcacaggcaagtgagcataattcgtcttttgacaagaggcttgtgggaattcccaaatgtgaccc

SEQ ID NO: 445609 - DNA, 700 bp, Homo Sapiens
  misc_feature (253)..(262): n is a, c, g, or t
  misc_feature (512)..(525): n is a, c, g, or t
ttttttttgttgctatggtaatttattagatattattcctgatatcaaaccaaccatgcattcctggaaaaaattctaccctggccatagtgaagtttttaacacttaaatagtcagacatgtcaatcttttcttttatagcttttatgtcatacttaagaagacatttcttctccaaggtaataaatcctcttcttatatttctatctaatattttttctttcttacatttaggttgtcatggagatggaannnnnnnnnngtgtgtgaactgtgtgaggaagtttctaaatatcttttctttctaattggtaagcaattatccccaaggtcatttatcgaatagtgcattcttcctccaccaatttgaaatgccaaatttaacataactaaagtctcatagaaacatgaatttgtggctgggtgtggtggctcatgcctcaaatgactatattgttagaggcctcttactgggctttctagtatgttccacaaatccatttgtctattcnnnnnnnnnnnnnncttacctttcataaccctcatgtatctctgtctattcttgggccagtgccacactgtttccatattactttacagtatgctttccagctagtaaggcaagaacctcttcattactctttcttttctatagctttcttgtcttacatatgattttagaatcagcttagaacttcta

SEQ ID NO: 445610 - DNA, 456 bp, Homo Sapiens
tgaatgaactcctgtaacttgcggcaaccaaggatggatctcaaatgtctaagctgagtagaggaagacgagctcgaaagcctacagaccgcatggttccctataaatgacactctggaaatgacaaaactgtggcaacagagaacagatctgtggttgcttgccagtagctggggttgggggcaggcttaactccaagaaggcatggtagaattttgggggttgatggcaatgttccgtcttgaccgtggctgcagttacgcggcaggtgttcatcgatggtagtgatgacggtgatggcgaagtagaaggagccggggaacttccactggcggccggcgcggtggggctcagcctggagcgccaggcgctccagctcgcggtagtcctcggccgagaagccgaacttcctccggagagcgccccgcttctggaccagcagtcgctggcggccgc

SEQ ID NO: 445611 - DNA, 578 bp, Homo Sapiens
  misc_feature (161)..(161): n is a, c, g, or t
cgagagctggaagaatcgaagcctttgtgagcttccgccaatcatactcatgcatcagtcttaagaatgcagagatgtccttggaattagtgcacactgaattcgctttctgttgggcttagaggatgaggaaagacctactgggaagatctagatcaagnctttgaaggcagcacactttccaagtggaagtcacagctagtattccagagctgctattagaagctgcttcctgtgaagatcaaatcttcctgagtaattaaatggaccaacaatgagcctttgcaaaattttcaagcggaaattttaaggcacctcattatctttcataactgtaattttcttagggatcatctctgttaaaaagttttctgtatgtcatgttataattacaggtcaattctgttaatatctttttgttaattttgctctatgtttgcctctgaaggaggtgagatttgtgctactttgggagattatgttcttttttcatgtctaagatttattttgatcatgtttataatataatggtaattcatttttgatgttttgtgaagaatttaaatttaaacgaaaaa

SEQ ID NO: 445612 - DNA, 917 bp, Homo Sapiens
  misc_feature (144)..(206): n is a, c, g, or t
atttccaccatacaaaaatgtgaaatatctaacaatgatctatctgaagcgggtggagcaaagcagcgccatgagcgtttgtcgttgctgtgatctgtttcaacggaaaatgggctgggacatgttgtagatttgcacgatttnnnnnnnnnnnnnnnnnnnnnnnnnnnnnnnnnnnnnnnnnnnnnnnnnnnnnnnnnnnnnnngctgccgtaccccgagaccgccatccaaacaaacgaacagagactctggaaagtgaacacagcgccacgcataagaacagaagttaacctttttactcgtacatcccccatgagaaactcacgtcttaggagaaaggaactctacataaatatgcccaaaggccagggcatacggcaagccctctcatgggtgggcatgagtggacatcttcctgaaggaaggacaagcttgagagcgtcatgttttcaggcagctatggtgggaagcagggaggcacaaccgatttttccactgggagactaaccgagggctgcaactgcctcaaaatctcagtgcgagaagatgcacaggcaggacagtacacccccaaattcatgatcacagcagctggaatgtcagctctttttgcagatttcacagccgacactccccatcaggcaggttcttaagcacactgggtcatgacaggaaaggcctcataagagcaacacggaattcactggttaagcacgtacacattcatgacagcctacaaccgtgatgagtgtcaatgtcaacaggcagttagattaaaaaggggaaaaaaccacagccacaaaaataaaacctgttttctcccccccaggagacaacttggtttccaacccctcccataccacatttgattaagttaaatacagtgagcttccaaatgtgccacccgacctcaa

SEQ ID NO: 445613 - DNA, 427 bp, Homo Sapiens
gaaaatcaaattattttattgtaaaaatttatataaaataactcataagggcaacagttaaaaacaagttaaacagaactaaccaaatatataagatatttcaaataaaaaagtaataataaaagccttgctagcttgtttgaaagtatatataatactttatttcctagacttaaaattgtgatttccattacacttaattagtatacaaaatattatttttaaaagacaggttctcaaactcaaggattaacaaatatttgccaaagtgatcaccaaagtctttgtatattttgttaacaaaaacacaaatccagaatataaaatctatctgaaattatctaagccaacatcaaattatttaaatatgactcagcttgtataaagagaaaattaaaaatcttctttccttaccaagttttggaca

SEQ ID NO: 445614 - DNA, 782 bp, Homo Sapiens
  misc_feature (479)..(479): n is a, c, g, or t
gacctttagaaaatatttttattttcttaacacacagaggtaacaatgacatttgcccactagacacagtagttcaagacatatcagaaatggatcacaattcacatgttacaatattcatcaatatgaccagtctcatgttttcccaattatctttgaaaacttattaaaataccacagcatactaaactggtaaattcatttatcatgttaaagagtaattttgattttgattagtgaaaaaccaaggcatagtccattgttgaaatacaataccttatccagcatcactcaagtatgaagcattctaccgaaacgtttagtcaaatgacacctgttaaaaatctaattctgtattttaactaccatagaggaaataatgtttaacatgccttttttaacttttaaaatatcccacgcagaatataaccatgttctttcattaatcttcctcattagaaatatgaaccacttagttntctagtgcaacacaatatcctaaaaatttaccaacgtgggtatctgccttactagagataaccccaaatggctacattaaaaaaattgtgaacttttaaattttttggtcacatttaactgtcagcgattacttcttgctttgattaaatatgctggttttctgttacctttcctacctccctgaatatcaaagttagggtacagcaacaaaactacataaacccttgataaaactattgggtctctcaaagacagtcattccttttacccgcaccagtttagaagagggtatatatttgaac

SEQ ID NO: 445615 - DNA, 1013 bp, Homo Sapiens
tgctaaaacatggatttatttgtgtattaccgtcaaatatgatcaaagacacaattctgatagctttgattatctgtagtactagtgaaagagcacttgtacagaacatattcatgtacaaagccaatcatttatttagcactaaaatcaaattataaaaacaacaattccatcttaaaacaggcattttaaaagcatttctgtggttctaagtttgcatcaagacagcctaagtttgcatctgcacaatctggatacccaaatccctctataatttccaaagacaaagacaatttttgctagttgtgaggtgtcagggggaagcagtgatgccctgcaaacagtctaatgggcccagggaaccctgtttctttctcaacctgaggttgcatccttgatctccaggaaaagagattagtgcttgcttaaccaggttcctagtaaatggtcagggatcttctatgcaataatgttgcaaaagttactgaagaggaagaaaaaaagcgacaacggaggcttcttgcgcatttacacttgcaatgtgacgattttgaaaacaagggccctgtacatagtcagcacccaagtcctgacttccagcatgtaatgcaggctggttgaacagcccttaataactacattgcgaatgccaagacgactaccctgagcacctattcatagacaggaagtagaacataagtgtgcgggtgcacagtaaggcgtctccgaggcaactaaccaagacacggttagaacgcataggccctatctggggttgactttcgctcgaggcttataggcaggcattcctaggttacagcatagcgccccgagacggattattagaacgtaatgagagcgccggagcaatcgtcaagtgacttatgaactaaaaaggcccaataggcgcaacattcgatcatggacacttgtcgcggtgttgtaacagcgagtttgaccactgggggccggacgtgggtatataggaaacagcgtgggggataactacccag

SEQ ID NO: 445616 - DNA, 795 bp, Homo Sapiens
  misc_feature (15)..(15): n is a, c, g, or t
  misc_feature (300)..(300): n is a, c, g, or t
cccatgcctggtganggggtgcacttaaatgaagaagaaactatattgatcatcaggcgtctacatagggtgttaagccattttttattaaggagactgaggaaagaagttgcatcccagcttcccggaaaaagtggaatatgtgatccagtggtgacatgtcagctctgcagaagattctgtatcgccatatgcaagccaaggggatccttctcacagatggttctgagacagataagaaggggaaaggaggtgctaagacacttatgaacactattatgcagttgagaaaaatctgcnaaccacccatatatgtttcagcacattgaggaatcctttgctgaacacctaggctattcgaatggggtcatcaatggggctgaactgtatcgggcctcagggaggtttgagctgcttgatcgtattctgccaaaattgagagcgactaatcaccgagtgctgcttttctgccagatgacatctctcatgaccatcatggaggattattttgcttttcggaacttcctttacctacgccttgatggcaccaccaagtctgaagatcgtgctgctttgctgaagaaattcaatgaacctggatcccagtatttcattttcttgctgagcacaagagctggtggcctgggcttaaatcttcaggcagctgatacagtggtcatctttgacagcgactggaatcctcatcaggatctgcaggcccaagaccgagctcaccgcatcgggcagcagaacgaggtccgggtactgaggctctgtaccgtgaacagcgtggag

SEQ ID NO: 445617 - DNA, 966 bp, Homo Sapiens
  misc_feature (265)..(273): n is a, c, g, or t
ttggcagtttttcctgtttattatatagttattctaaggtggtaagtgtcacaaagttaacttcaagaggaataacatggtccagtgtgaaacacaaggtacaacattttacaatgaaaccacagcacaaagtaactgaactttcaaaattgggtagttcaatgaaacattttgtcaacccttagctctataaagctctgctgatggacttagttgatggatttaaaaaatatattgctgtgtcaaatgttttaacacaaaatgnnnnnnnnnaaagagaatacacatccaatcaactgaaactgtgagcagaaagtatgtaacctctttataaaaacgttatccaaatttacaacattcataatatatttcaaagtaaagagttcttagaaaaaataaactcaattccttgcttactgatgagtatcaactcctcaaaaacacatcacagaaagttaactttcatacttctttgcctataacttttagatatctactaccctggcttcaaaaacatttggtggccatatataatacaaacactcaggtattacatgcatcatttatactatcttggaatttatccataatctactaaaatgaaccacattttaaagacatcatatgtcatgcacccttaaaaattatagtgagggcctctgatttcctcttttttccacatgcataacaggcacaaaattacaaatatttttcaactgacagtacaacacgctatatcaggcaattggtatattgaattcagtgtatctctatttttcacactatgcctctgtgcaatatttcaatcaaagacagttgtcactaacatgcacaaatagagatgctagcacggttaatgcaaatatgcataactgagccacatgtatgcatatctagtaaattcattcgattaacattttcaagtgtgtatatattaatgtcgatatatacacacataccgcaagt

SEQ ID NO: 445618 - DNA, 1003 bp, Homo Sapiens
tttactagaaaattttaaatttttaataaatgtgctttgttcacaaaatgtgaaaaaatacaacaaacacacacgtacattttcaggtatgctacctcccaccacttggcaactatggtaaaaccacatgatctagtcatgatactgaagaatccaaccaaatgattaccatttgtttttgaaacaaccaaattattttggagaaccagctgtgaatgtgacaggaggcctcataacttctttatatccaaaatgaaataattcttaggagtacccatacagtattagaaggccctattaacttccacttgttattacatacatgatctggcatcaagctgcaatgactgcttatacttcaatacttatacactgaattggtttttgtggaatgtgtatcagtttaaatctgtgccaacctaattggaataagctgaatttacagtaacaaatgatataaattcaaacaaatttatactaagtggtagtaggttttataaagagacttcctcagagtactacgtaaaatacatcatgcacactttggagcataagcagaatcaacatctgtaaacaatcagaatttatagcaccaacattttcgctgtaacacaaaggctgactccagggtcatactataccagcctttcaaaagcgctgttttcatttactttcaaagcattttcatttggtgtattgttttctttgctcttaagatatttacccaaatcaaaaagcaaacagtatggtaaaaggtactaccaaaatagttcaaaagagttctgtattatccttaacatagtgcttttttttccttccccttctcttggggaagctacaagacataatccttcagtgcttaactggaaagaacagtcaatcctaaatattaaagaatcttatgctgttgaaagtaaatgaaaaatttcgagttatttgtggcatatttgagcaaccaatatttattgcatttaatcaactgactttaaagaattacaatccc

SEQ ID NO: 445619 - DNA, 491 bp, Homo Sapiens
  misc_feature (304)..(325): n is a, c, g, or t
tttttaaacaggaatgaatcatttattcaaacaaaacaaaaagctatataattttgagaatttcattttttgagagtaaaaactacaaaattgaacagcgaggaggaaaaaattctgacaatgtgattcaacattaatcctttaaaagtcactgtaacaaatttaaacataagtgctttatttttctattcacaaaactaattataatacaccacaatgaattttgttacggttttatgtgtgtaatagagggtatacatctccatactactagctaatttgtctgtttgttcaaaagagttannnnnnnnnnnnnnnnnnnnnngagacagggtctcacgctcttgcccaggctatagcataagggcacatcacagctcactgcagccacaacctcctgggctcaaccgatcctcctgtctcagccttcaagtagcttggactacaggcacacatgcaccaccatacccggctaagtttttgatcttgta

SEQ ID NO: 445620 - DNA, 413 bp, Homo Sapiens
  misc_feature (349)..(349): n is a, c, g, or t
  misc_feature (381)..(381): n is a, c, g, or t
caggaatgaatcatttattcaaacaaaacaaaaagctatataattttgagaatttcattttttgagagtaaaaactacaaaattgaacagcgaggaggaaaaaattctgacaatgtgattcaacattaatcctttaaaagtcactgtaacaaatttaaacataagtgctttatttttctattcacaaaactaattataatacaccacaatggaattttgttacgggttttatgtgtgtaatagaggggtatacatctcccatactactagcctaatttgtcctgtttgttccaaaggggttatttttcctctttttttcttctttgaggcagggggtctcacggctctngcccgggggtttgggccctaggggggcacttncacaggctcacgggcggcccccacccccgggg

SEQ ID NO: 445621 - DNA, 442 bp, Homo Sapiens
ctcttttagcagcaagagcctgctttctgctctcttctcttgacttttccagatcaagttcctttaaaagaatactcgcattcttatttgcttctgcagcttgctggtctttagccttcacaatggtttcgacacattgatgacattttttcaacagttccttatctgtaattgttgctatgtatctcatgcattctatatcagaagggaactgatttacttcctttaccaaatattgaacaacttttacatgacccttgcgaaatgctgacataagaggtgtgattttccggttatctgctgcatccacatcagcacctgcttgcactagcaactgcacaacatcaaaatgacctccattggatgccagccaaagtggcgtatttcccttttttgttacgaacatcaatgtgggctcccctatgaatcaggagttcacaca

SEQ ID NO: 445622 - DNA, 519 bp, Homo Sapiens
ttttttttacaacaccagaaaaagtcacattctcagaagaagaaaggatttgttttgggtgcagtggtctccccaccaggctccttttcatacctggtggctgcagttactttccagagcacagcagaaccaacctgaggcaactggagtcctcttgtctacttttcagattcttgaatggctggtcttcagctcatggaaacctggctttaaatggcagcccccaaattcaagagaaaacaccaattgcaagcaattctaaaagtcaggccattgggcccttgggacccagaaggggagtgaaactccagagcaaaaggaaaatgcaatcgctatcccacacaccctgggaatgggctggactcctgaccttccccatcgcccccagagagagaggcagggagagctctacagcaatgagaggctttccttcaggcttcagctttagtgacccccagtgacatcttagcagccagcttctcatgctgcatccagtgcaagaacaacttttccagccta

SEQ ID NO: 445623 - DNA, 359 bp, Homo Sapiens
tgggttagggttttctttcacgctttctgaggaggagagcatggcgcgggcctcggcgaagcacttccgtcagcctcgggcggaggatcgtcttagtagctggccagacctggaggagagcgggcggtctttgcgggcctcaggagataggtggccgcccggcccctttccccgcctgcccggataggtgcgtgcagacccaccaaagaaaagcggtcgctgcgggacccccagtcccacctcggccgcgctgtgggatggctgcgcccccagggcttcctgcgtctccaggaagccgggagtggcgccctctgcggggtggggtgctcccgggccgaactccgacagggtggagggga

SEQ ID NO: 445624 - DNA, 780 bp, Homo Sapiens
  misc_feature (607)..(607): n is a, c, g, or t
  misc_feature (681)..(681): n is a, c, g, or t
  misc_feature (686)..(686): n is a, c, g, or t
  misc_feature (688)..(688): n is a, c, g, or t
  misc_feature (723)..(723): n is a, c, g, or t
gtggaaaccattgatttttattaatttcataactgggaaattccatgtgaaagtgaaacaagcatgagtcaagtcaaccagggaaggaatctggggacaggccaaggagcgggaggtggggcagcgaggcagtcctgctggtaggagccctgaggatttcccagcttgtgtgcgctgcctctggcatcctagagacccggatttactcagctaggagagaggatggatcacagggtctaagggtggccattcagaggtagaagatggaggggcggcagattctggcagggcagcagagggctcagtggccatggctagaggggtaaaaaattcaggacatcccccaggtgctgcctcagccagggctgcatgcggaagagattgatgtgaaagtctcgtggcggcgggaccttgctacgaggggcccttttgcgggagtttttgtcagcagagccaaagcaggggttgtaaagaccccagctcaccagacccacctgaaaaaacctgaatctccgctcaaggaaaactgctcccccagattcttcgttgcaggggactctcatctcctgggtcccactgcataggaactgggtctgtcacacctccntgacatctgtcaagttgggggaacatggttttttctttgggagacaacctcgggcacactttgtccactccacntccancnttaagggttaatggtcagttttgttccattcaggnggacaaagtgagcaggaccactctgtttgtcagcagtccatctcatggctcctaagg

SEQ ID NO: 445625 - DNA, 911 bp, Homo Sapiens
cccgtcccggcggctctggcacccaggtccggcctgcgccttcccgccaggcctggacactggttcaacacctgtgacttcatgtgtgcgcgccggccacacctgcagtcacacctgtagccccctctgccaagagatccataccgaggcagcgtcggtggctacaagccctcagtccacacctgtggacacctgtgacacctggccacacgacctgtggccgcggcctggcgtctgctgcgacaggagcccttacctcccctgttataacacctgaccgccacctaactgcccctgcagaaggagcaatggccttggctcctgagagggcagccccacgcgtgctgttcggagagtggctccttggagagatcagcagcggctgctatgaggggctgcagtggctggacgaggcccgcacctgtttccgcgtgccctggaagcacttcgcgcgcaaggacctgagcgaggccgacgcgcgcatcttcaaggcctgggctgtggcccgcggcaggtggccgcctagcagcaggggaggtggcccgccccccgaggctgagactgcggagcgcgccggctggaaaaccaacttccgctgcgcactgcgcagcacgcgtcgcttcgtgatgctgcgagataactcgggggacccggccgacccgcacaaaggtgtacgcgctcagccgggagctgtgctggcgagaaggcccaggcacggaccagactgaggcagaggcccccgcagcctgtcccaacaacaacaggggtgggcccccgggtccattcctggcacacacacatgctggacttccaagccccagggcccctccctgcccagtgctgacaagggggacctcctgtccaggcagtgcaacaaactgcctggagaccattgtgacaggtcagggggc

SEQ ID NO: 445626 - DNA, 898 bp, Homo Sapiens
gttggttgcggtcggtttgctcgctccggactctggcctggcctctcctgtgttgtggcacagtgcggggcttctgcctcagttctggtccgtgcctgggccttctcgccaggcacagctcccggctgagcggcgtaccgcttgtgcgggttcgcccgggtcccccgagttatctcgcagcatcacgaagcgacgcgtgctgcgcagtgcgcagcggaagttggttttccagccggcgcgctccgcagtctcagcctcggggggcgggccacctcccctgctgctaggcggccacctgccgcgggccacagcccaggccttgaagatgcgcgcgtcggcctcgctcaggtccttgcgcgcgaagtgcttccagggcacgcggaaacaggtgcgggcctcgtccagccactgcagcccctcatagcagccgctgctgatctctccaaggagccactctccgaacagcacgcgtggggctgccctgcgggtgcccggccgcggagagtcagggccggctgcagggcgctcggggactggcatctggagagggtgggccgggctcttacctctcaggagccaaggccattgctccttctgcaggggcagttaggtggcggtcaggtgttataacaggggaggtaagggctcctgtcgcagcagacgccaggccgcggccacaggtcgtgtggccaggtgtcacaggtgtccacaggtgtggactgagggcttgtagccaccgacgctgcctcggtatggatctcttggcagagggggctacaggtgtgactgcaggtgtggccggcgcgcacacatgaagtcacaggtgttgaaccagtgtccaggcctggcgggaaggcgcaggccggacctgggtgccagagccgccgggacgggaagt

SEQ ID NO: 445627 - DNA, 1941 bp, Homo Sapiens
ggccagcttctaggtgggctgctccagctttctggagttctcattagactgggttctaggcgggctgctccagctccataaggaagcactcgatgtcgtcatagaggctgttggcgctggacaggcagaggctgaggctgctgctatccagggaagacacaccctcacgctgcgtgccctctaggtgcactcggcacagccagggttccagcttcaccaggaccaggctcttctccttgggcctcccagctgacaggtcctgcccgaagcccaggtagatggtatagcgtggggagccacggcgctgccgtgcccggaattccaccagctcttggaagaagactctgaagtcgaagatgggggtgtcacagttccgaggcagcaggcaggctggggtggaggggctggcggagcctgggggtccgcccacctcccagtacaccttgcacttgcccatgcgccgggcccacagctgtggcccccgaagctccaggtgcaacccaggggccacgtgccgcagcagttcctccgtgtagcgcagctgcttctggtccgggagctcggcagggctggggaatgctacctgctgggggtctgtggcccggacagctgggtctggggggccgtataggaacgtgcagctcgggtgtcccaccaccttctgcagcaccgtgcggcccttgtacatgatggtcacgtccagcgcccctgggctgggctcttgcaccgcggtgcaggcgcttggggagggtgacaggtacggctctgcctggtgcggggactctggggccgcggcctcgcctgtcgttagtgccgcgggctggggcccggggctgggggtcgtctctactgcccacccgtacagctccccagcagggagccctgggcctccagcacaggcacccagtcaggggaagcccttcttgtccctctcacaggagccttggttgggactggatctgccccccatgacgctgtcagcagatggtctgccaggcagctctgttgcactgcctggagcaggaggtcccccttgtcaccagctggggcagggagggggcttggggcttggagtccagcatgtgtgtgttgccaggaatggccctgggggcccaccctgtggtgggtgggacagctgcgggggcctctgcctcagtctggtccgtgcctgggccttctcgccagcacagctcccggctgagcgcgtacaccttgtgcgggtcggccgggtcccccgagttatctcgcagcatcacgaagcgacgcgtgctgcgcagtgcgcagcggaagttggttttccagccggcgcgctccgcagtctcagcctcggggggcgggccacctcccctgctgctaggcggccacctgccgcgggccacagcccaggccttgaagatgcgcgcgtcggcctcgctcaggtccttgcgcgcgaagtgcttccagggcacgcggaaacaggtgcgggcctcgtccagccactgcagcccctcatagcagccgctgctgatctctccaaggagccactctccgaacagcacgcgtggggctgccctctcaggagccaaggccattgctccttctgcaggggcagttaggtggcggtcaggtgttataacaggggaggtaagggctcctgtcgcagcagacgccaggccgcggccacaggtcgtgtggccaggtgtcacaggtgtccacaggtgtggactgagggcttgtagccaccgacgctgcctcggtatggatctcttggcagagggggctacaggtgtgactgcaggtgtggccggcgcgcacacatgaagtcacaggtgttgaaccagtgtccaggcctggcgggaaggcgcaggccggaccctgggtgccagagccgccgggacgggaagtttcgtctcgcggggaagcggagggccggcgcttttatggtggccaggcgggagtttt

SEQ ID NO: 445628 - DNA, 1839 bp, Homo Sapiens
  misc_feature (459)..(467): n is a, c, g, or t
  misc_feature (711)..(735): n is a, c, g, or t
ggctgatctatgatcgaggaacggtacggagatatatgaagcgacaggcttagctgagtcactatcgcgcaggatcgcacttaatctcgctgtgcgagcgcgaagaacgttcgacggataggcagtaccccgtggaggggagcaacgggttcgttcgcgacagatattctccggtgtgatggtgacgagagcctttgatggctctcgtagggaagcattgcaggtggcgctaggtaacaagacttcgatcttttgggttgggtgtctggtcccccagggacatactgtgtgtgtgggagggccctattatttggggcgcgggcggtgtcggggggtgtgcccaaccccattttgtggggaagccccggtgcgggcccttttggtccagtggtgggtccaccgcccaggcggctcctcgggcatgggggtctcgtgaccccccgggggccaacacatttnnnnnnnnntacccaggtaccgtctttttccttggttggggggcctttgggggcggggtctttacccggtcgttaggtcacacgagccggggcccggggctagggggtcgtcttactgccccaccgttccagttcccagccagggagccctgggcttgaggaggggaggacagtcggaacggtgtccccttcttatttctccagctccccaatccccagcccccttctaaagtgtccgtccaggtgcactggnnnnnnnnnnnnnnnnnnnnnnnnngggcacgcccacacctccagcacaggccccagtcaggggaagcccttcttgtccctctccaggagccttggttgggactggatctgccccccatgacgctgtcagcagatggtctgccaggcagctctgttgcactgcctggagcaggaggtcccccttgtcaccagctggggcagggagggggcctggggcttggagtccagcatgtgtgtgtgccaggaatggccctgggggcccaccctgcagggaaaagtcagggtgaacgtaagcagctccgcggcctggcaggaggagaggcaggcagagagaagggtacctgtggtggtgggacagctgcgggggcctctgcctcagtctggtccgtgcctgggccttctcgccagcacagctcccggctgagcgcgtacaccttgtgcgggtcggccgggtcccccgagttatctcgcagcatcacgaagcgacgcgtgctgcgcagtgcgcagcggaagttggttttccagccggcgcgctccgcagtctcagcctcggggggcgggccacctcccctgctgctaggcggccacctgccgcgggccacagcccaggccttgaagatgcgcgcgtcggcctcgctcaggtccttgcgcgcgaagtgcttccagggcacgcggaaacaggtgcgggcctcgtccagccactgcagcccctcatagcagccgctgctgatctctccaaggagccactctccgaacagcacgcgtggggctgccctctcaggagccaaggccattgctccttctgcaggggcagttaggtggcggtcaggtgttataacaggggaggtaagggctcctgtcgcagcagacgccaggccgcggccacaggtcgtgtggccaggtgtcacaggtgtccacaggtgtggactgagggcttgtagccaccgacgctgcctcggtatggatctcttggcagagggggctacaggtgtgactgcaggtgtggccggcgcgcacacatgaagtcacaggtgttgaaccagtgtccaggcctggcgggaaggcgcaggccggaccctgcggagacgggaaaggcgacatcccggaaattccggaccggtaccagccg

SEQ ID NO: 445629 - DNA, 574 bp, Homo Sapiens
tggctagaaagccacagtgctaatttagtatttatcaagcgtttgtagtgtcctgggatctggcacttcgatgagaaagctgtgacggccccaacttctaacagcgagtggtaaggaggacgagggacacaggagggaggagactctcgccaaagcttagcaccaacagaagtggtcccccgcaggttgctctgcgagcgccacctcttccctccaaccgaggagaaagtggcgcgcctttgaggagtccgaggtcccggcccaggcggcagcttgggtcctggcgggttccggacgggcgcctcagggacctggaagcaaccgcaccgaacgcgacggagagcggcgagacgactccaggaggcgcccgagctacatcccccggccacaccaaacccgggtttgctggcagatgcggctcacgacaccccttagggtcgcagcccctcccccggaagtgacgtgtagcgactacggcgtctgggagggacccaggagcagtcggggggtttgagagtggcggcggccgcggagggcctggcaggccccgccgctgcaaggaacaccccccgct

SEQ ID NO: 445630 - DNA, 863 bp, Homo Sapiens
  misc_feature (396)..(413): n is a, c, g, or t
  misc_feature (432)..(466): n is a, c, g, or t
ggataggtagaaggcctctcgctcgtgggcgaggcggcgctggttgtaaataagagtccccacgaataatagggaccccttggagagaactctctcattcggggagatatgggttgtcaagaaaaacacattccgggttgtgcccggcgccggggcgcttcttattttattgtggggggggagaatttccacacaccccttattttccatgtcctccggggtttcccctttgggaaacccaaattaaagacccaagtgtccaattcccctaattggggcccgggggccccaaaggaaatgggtttagggaagtttttttggagggccggaggctgggccgaccaaggaatatgacttgttcctgtgggggtggtgggtgttttttgtgtatggggnnnnnnnnnnnnnnnnnnccagaatttaatatttttnnnnnnnnnnnnnnnnnnnnnnnnnnnnnnnnnnngtttaaaggttcattttggggctaaatactaggactgaaactcttttcttgtaattgatttatggtaaagagtaaaaataatataaaaaacacagcagttatagctgtccaaatgaaagcctatctgcaaaaaggcaggacaaggtgggctgactgagcaaatattcacatcacgaccttagtaataaatttcaaatggtttcagttcccaagatctgaaaagagaatcatcttgcacgcttagattccacttcttcaagaatccactcaatgccattcaaaaaaccagtcagagtttcagcctctgtatcctggaccagccatgggtgatttagaagattcagatgcagctcatgagccaaataaaaacagggcattctttttacatccccttgcc

SEQ ID NO: 445631 - DNA, 345 bp, Homo Sapiens
gtgttttcagtattttattaacaaatgagctggcaagaggacaagtgatctagtagtatcacccccaccctcatggagcagccaccacaagcccaccatggtggggggtgtccaacatgctctgctggcccagttcccagccgatcccctgagtcttggcgcccgtttagtcacccttcagctgcttgggaggcaggaagagacttccccttttcacgaggtaagggagacaaaagcagccatttggatgccagggccacaggggcaagccatgccctatttttttggagggacagaatcactttttcccaaggccagacactgtagcccatggtactcagcctt

SEQ ID NO: 445632 - DNA, 461 bp, Homo Sapiens
ccaggaactatttacagtaaaaagctttgattcactttgggaagcggggagaggagttggagccacccagcgggagcagtagtaagagatgtgccattggagaaccagcttctgtcagaaccaccagactctgaagtacagaggagtggagggggtcagaccctggacttacctcctctagctcggatcttctactggtgcctcctgttagaggaactcaacaagaagccagagggcagggaatggaccatactgttcccgggcacagagaggggagagaaaggtggagaactgatctagaggctaggtctagggaggagatgaagtgacaataaccagaatttgttttaaagtagaatgcagaagagatagcctggctagttaactgtgcctggattaaaacttgtgctctgtttattaatttatagctactatgttattaggggcccattgcttacttt

SEQ ID NO: 445633 - DNA, 510 bp, Homo Sapiens
gtaatatcaaaatttttattttaaaactcttattgtattatctgttaaaattaatacagtaattaaaaaaattagtggcttaaaacaacatttatctcacagttacatttgggttggaaatttaagcatggcaatagctggatcctctggcccagggtctctcaaaggctgcaatcaagatgtcagaggattgaagagctcttaagctccaaatagccagcgataccagcgatacctaggtatgcagtgggccttctgtgagactctgagactagctggcttcaaatgagactcagcacatttccagccatggtggctatggggagagactccttatgctggagaaaagtagagggaaaagtaaaggggacttttgcaccttaggtacaggcgcagccatagttgggtagaacatcaagcgggctcttgaggtccctgattcaaagccttggctcctggacagtaattctggacctgccttgggccagaagggagcccactgtcctgaag

SEQ ID NO: 445634 - DNA, 864 bp, Homo Sapiens
  misc_feature (248)..(248): n is a, c, g, or t
  misc_feature (254)..(254): n is a, c, g, or t
  misc_feature (263)..(264): n is a, c, g, or t
  misc_feature (278)..(278): n is a, c, g, or t
gattatgaccaaaagggaattggctcagccaagatcggcacaggtatacgccgccgcgggtgccgcggcggtgcgcgggaagatgcgcgtctcttgaacagagctgtccgcctggagcaagctaagcagagaccgaaggcccgcgtagatcgcttcacctggatatcagccccacggccccaggccaccctgcagctcccgctggccagcgatgggggcagccgctcgccatcctcagagagctcccngcagcncccacgccnncggcggggcccgcncaccatgctggggctcccgtcaaccctgttcacacccgcaggcatggagagcattgagattgaccagaagctgcaggagatcatgaagcagacgggctacctgaccatcgggggccagcgctaccaggcagaaatcaacgacctggagaacttgggcgagatgggcagcggcacctgcggccaggtgtggaagatgcgcttccggaagaccggccacgtcattgccgttaagcaaatgcggcgctccgggaacaaggaggagaacaagcgcatcctcatggacctggatgtggtgctgaagagccacgactgcccctacatcgtgcagtgctttgggacgttcatcaccaacacggacgtcttcatcgccatggagctcatgggcacctgcgctgagaagctcaagaagcggatgcagggccccatccccgagcgcattctgggcaagatgacagtggcgattgtgaaggcgctgtactacctgaaggagaagcacggtgtcatccaccgcgacgtcaagccctccaacatcctgctggacgagcggggccagatcaagctaagcgacttcggcatcagcggccgc

SEQ ID NO: 445635 - DNA, 344 bp, Homo Sapiens
ttgtaagtttaaaattttaatatttataaatttaaaaaattttacacgtgctgagtggtagcagtgctaacatttttgtgaccattaaaccacaaactcactgcatagagcttctttctttgtacagataatcaaatcacaataccaacatttgcaatttgtaataattttatgtggtaaaagacaccacaccaggaagcctgggctcagaaaacacttgaggtcagatccctagtaggtacatagtgcagatgcagtatataatttcaggctaggaaaattagctactagtatgtatctgacagttcctaatagctaagaggcctaagaatgcagacggggag

SEQ ID NO: 445636 - DNA, 549 bp, Homo Sapiens
tttttttaaatactcaatggtcatttattatataacttaaactcattcaatacattaaataactgttttaaataattacaattttttaaaattaaagaatatgtcactgatcttaacgagacttccaaatcgtctcagcaggggctccagacttccccagcaggcggcaggtttcctgtcatgctttcgccttccttctcatatacaccagtgctagagttcatcatgtgtcaaaattgtatcttgcttcttgttttcaagatgatctaatagttgtcttatctcagcatcatactccacccattctgggacaattctggcagcagcttttagtttggattcttttgttttgggattattgcacagatcaattgttttggctctttgtttggattcatcatcacaccaggtttcacaccacagccagtcttgaggaagagacttaatggcgacttggtaaatcatattattggggagatcctgatctaggtttgaaagactgtttggatcttgactgagagcttgatacttgctcctggagctgtcacc

SEQ ID NO: 445637 - DNA, 521 bp, Homo Sapiens
ggatccttgaagtttttactccagagctttcattttaagaaattgcaaaaaagttattaagtacagagagaaacattttccctgtaataatttgaaattaaggtgaccatttgatgccttatcccctgccaaatacattgatttactttccagcaaacaagaacatcctctgatgtaacttaacaggcaaccatgaaaatcaggaaattaacacggacacatcattaccacggcatcgtaggccccatttaaacttttccaactgtccctgtaacttcctttcaagcaaaaagatccagttcagaatcatgtgttgtgtttagttgtcatgcctctttggtcccctccagtttggaacagttccagggtctatctttgattttcatgaccttggcactttctaagattacagttttgtatacagcatgtctctttacgtgggtttgtctgatatatcctcatgattacatccaggttatggatcttcagcaggaatatcacaggggtgatgttgcaatctt

SEQ ID NO: 445638 - DNA, 689 bp, Homo Sapiens
ttttttatttttaaaactttttattttgaaaaaagttagactttcaaagggtggcaaaaataatagtttccatgtacccttcacccagctcttactaatgttaacatcttacataaccacagtacaattatcaaaaccaaataattgacattgatgaaatcttatttctggtcctttttctaatccaacatctaaatcggtatctcacaatgcagttagttatcatatttctttactctcttccagtccatgactgttcctcagtctttccttattgttcacggccttggcactttcaaaacgtactggccagttattttgtagagtgtctctcagtttgggcttgtctgatcttttctcctgattgcactgagattgcacatttctgacaacaccacagaagtgacaattgtgcccttctcagtgcatcatattggaaggtacatggtatcagtatgtcttattagtggtgatgttaacttgatcactgggttaaggtggtttctgtcaggcttattcactataatgactgtttttccctttgtaattagtatctcgtgaagggatcttaaaaccatgcaaaatcgtgtttcccatcatacttctgttcactaattcggcattcataggtgtttcttgtctgcaacaactattcctatggtgtttgcctaatggtgtttttttgtttg

SEQ ID NO: 445639 - DNA, 567 bp, Homo Sapiens
  misc_feature (512)..(512): n is a, c, g, or t
ttggtgttttccatgtgtacctttatttaatgctcacagcatccctatgagataggacttcttatacctacttcacagagaagaaaatggagacatggaaggttaaggagcttgtgtgacatcatacacttagtttttgaaagagcacagattttttttcaggactctctgcttgcaaagtctaagatgatgttaatatagcaggaaactcacataatgtctataaacccattgcctgtggggtgttaaatctccaagaatcagcctttggtccccgacctgtagaggatgtggatcttctagctgagcctgatgctcttgtgggttcctcactgggtcctgacctctgagtattcggttgaggtgtccttggaaggattcatcccatgaaagttgagggaagcataatgcagctcctcatccatctccacagtaggggcggcacctgaacagcttgaggtttcagtggggccatgtaacttggacttcttctggtgttttgatgaggcagngacaaagagcgagcagggctttaacaccagctcctccaatggccccatgaaacac

SEQ ID NO: 445640 - DNA, 405 bp, Homo Sapiens
ggtttttaacattttaatttcaacgtgccagcatttgtccaaatgagatgatacaggctagaatgcacggcggaattccagactggactcactccataagccaactcatcactgcccgtgaacatgaattctggtcctcagagaagctgacattgtttccctgaacattcccgtggtctccctctgaaagccgatgaccatccaaccctgactcacctgaaatatcctacgagcatcgccctccgagactgacgattattaaccacccacacggaaaaagaaacagcccctccatcacccacatcttgtacacaaaaaaatgccaccactaatgccataaattcaggcaggttcctctatccaaaggctaaactgcttcaggtgacctaaaaagtggccacgcct

SEQ ID NO: 445641 - DNA, 485 bp, Homo Sapiens
aacattttaatttcaacgtgccagcatttgtccaaatgagatgatacaggctagaatgcacggcggaattccagactggactcactccataagccaactcatcactgcccgtgaacatgaattctggtcctcagagaagctgacattgtttccctgaacattcccgtggtctccctctgaaagccgatgaccatccaaccctggactcacctgaaatatcctacgaggcatcgccctccgaggactgacgattattaaccacccacacgggaaaaaggaaacagccccttccattcacccacatcttgttacacaaaaaaatggccaccactaatggccattaaatttcagggcgggtttccttttattccaaggggttaaattggtttcagggtggaccttaaaagtggggccaggttttttccaggttaaaacacttcccgttggacaaaggttaggggttcgggttttttcccaggggtttt

SEQ ID NO: 445642 - DNA, 550 bp, Homo Sapiens
cagagcttagaacactagaggagaggggtcgccgcgaactgccggggcttccagccacccacccctctcgacatgtcgcgctccttctatgtcgactcgctcatcatcaaggacacctcacggcctgcgccctcgctgcctgaaccgcaccccgggccggatttcttcatcccgcttggcatgccgcccccattggtgatgtccgtgtccggccccggctgcccgtctcgcaagagcggcgcgttctgcgtgtgccctctctgcgtcacttcgcacctgcactcctctcgggggtctgtgggcgccggcagcgggggcgcaggggccggggttaccggggccggaggcagtggggtggcaggggccgcaggggcactgcctctgcttaagagccagttctcttcggctcctggggacgcgcagttttgcccgcgggtgaaccatgcgcatcatcaccaccacccgccgcagcaccaccatcaccatcatcagcctcagcagcctggatcgaccacgacgacgacagcagcaacagcgacgtcggcggccg

SEQ ID NO: 445643 - DNA, 111 bp, Homo Sapiens
ttttgggagtgctaactggattttttatttttatatcaagacactgtgtttaaaatttttacaaaggacaaactccatgggtttccgttagtgttttaagaacttttcttt

SEQ ID NO: 445644 - DNA, 498 bp, Homo Sapiens
ttattcgaagagatttattctgagccaaatatgagttgaccatggcccgtgacacagcccttgggagaccctaagaatatgtgtccaaggtgggcggggagcagcttggttttacatattttagggagacatgagacatcaatcaaatacacataaggcatacattggtttggtccagaaaggcggcacttcgaggttttggatagattttctgtttctcgtcgagaattggttatcactagaaaggaatgtcttggctacagtaagaggttgtggaaaccaagagtgccctattcaaggagggagtgcattcagatggttgctgggggcctttgaattttatttttggcttacaagcgggagaaggtcaaacatggacctcagaccttaaggggctcttaagtctgtgctgtggtaaggggtatcttcaggggcaggagggctctggaaagtttggattagatggagaacaggaggaaacttggcaggcagagagtg

SEQ ID NO: 445645 - DNA, 766 bp, Homo Sapiens
  misc_feature (703)..(703): n is a, c, g, or t
ttttttttagaatgcagcaggaagtggttttattgctgtgaacacagggcaataaagcttggcaaaagttgcagggttagaaatctgaatctttctttgctgtcttccctattcccttctctcgaaaagtacagaactacaaagcagaaaataatcttatttctttttgtctcaactctggtctggcatcctaggcactcgaattctccaaacacctttcttctttcttctacgggaacaagaaaatcaacaaaagaaaagaaaacgtggatgcaattgtaacagaagctatgtcaaatgaaaggaaatgcagtggatgccttagagaatactatctaagtgtacaggaaccaacttgtaggggggatcgctcttctgaggggggtcacaggcaacaatgaagaatttgtactgggcagcagcactatagcggcactggggatactttcctgaagtgagtctgcagtcagtcatgttgacaggctttgagctctggtggcagttgtgctgacgatttttgcagacaatgctgagcaaatcacagacagcagccacattctggaaagagtcatgcagaaaggtattttgatgcttacagtgctgggtataattgttgatgccactcattgccctggtgcattggagaaggactttgctgtatatgctgaatttcaaaccagtgaggccttggtgagacgcttanggccaagcatgaatgggacacacttgttccccatagaaccagcagcagtaaaaagaagaggaa

SEQ ID NO: 445646 - DNA, 828 bp, Homo Sapiens
ctcactccccaactggccattaccctagttctgcccttgtttgtggagttacagcctcaaggttgtagcatgtgtgctggcaatcagggccgcagtgtgttctgcgcctgcccagagctgactcctgatttaaccgctggcgtaaccgcgggttgcacgcatgcgtgctgaaaagcctttcaccctcacgtggtttcttttttaaccagtcatcaagcgaggctcgcgcgcaggccccgcgttggaaaatggcggggaagctgaaacctctgaatgtggaggcgccagaagctgctgaggaggctgaaggtagtgagggcaagtgggctgcactcctttctctccaaccagggcagaaaggagggaggattcgtcccattacaataatgaaataatgatattctaatttttttaaataaaatgttaagccttttgttattgaagaaacaacaattttttaaccgttcagcacagtggagataaattaacaggcatattcttatcaccgagattaacttttgtcaactgtagtgtatacgttgttgaaagtaaacaacatgtagttcagtacgaaagtcttcaaacaaaagtggggcggtggggatgttctcataacaatcaccgtgctgcagccaccccttattaacagtaattcccagtgtcgccatttcacacctaacacatatgacactttgatggactcttaaacctcctaatcgaacatggcctcccccacagcctcttttctccagggtattgacttgaatgacaggcaaaggagggtggaggggtgtcggcctagacactattggaaattgtattccatcc

SEQ ID NO: 445647 - DNA, 914 bp, Homo Sapiens
ggtggaattaattactcttttattagcacaaaataacagcaacctagcagccgcacggcccgagaataagttaaggcacagagcaggcgacgggcggctttcccagggccaggcctgcatgccccgaacttcctgagcaaactccctaggggctggggtttcgagggtcctggagggcctcttcccttgagatgaggggaacggaacagggcaagaggggcgcccccatgggcgcaaggggtccacgctgcgccgcgatcacttctcgaagtagggcaggtagaagaactggaagccccggtggcccttgaccgcgcagtagatgaagatcacgtgatagactccaggcaccaacaacaggaagcccggcacgaagaagatggcgctggagacacctggagagggggtcgcctccagtcccacgccgaccaggatcagcaccagccccagcagcaggagcaggaaggaggccagcaccactcggcggttcttctggatcaaagggtgttgggtccagctgcagcaggtgttgtaggagcgctgggtgctgctgctgatggtgctgaaggaccactgggagctgcggatggaagttcggctggaatccctggtgccgactcccccatccggctccggagaggcctgggctccatcctcatcgttctccaggttctggtagcgcagccgggactgcttgtcctcgtcagccacctcgaaccgggcccgacgctcgaagtgcagcggcccaaagcgcgcgaccccgctggactcgggcccagggcccccgtcctccagggacagctcgaaggcatcatcaatgctgaactggggccgggcggcgctcatggccccggcccgctcaggcgccgtgcgccgccgccatctgcgcccacacacccagcgtcgccgctgcc

SEQ ID NO: 445648 - DNA, 694 bp, Homo Sapiens
tttttcctttcaaatgaagaggttttattggaagttgcatagagaacacagtcagtcacgagagcagaaggagcaggttccaggattctggggagataagggtccaagctgagaactcccctgagaagtctgtgtgcagacagccccgggtgatcctggctgtccaagggctgagggcgggttgggaagggccctcatcaccccaggggccagctccccacatagcagctgagtagcacccagagaacccggatcttcactcaaggtggctggcagcagagccacagcccaggccaccaaagccaccagagcccctgtgtggcaaggatcatgatgcaagggtggtgagttggttgctgttctcagcaggatcctgggtgtaaatggccatgcctgtccagcacggcttatggggctgagcatgtgagaacttgtgtggcctgtgcctgtgcaaacgcgtgtgccctgggtatcacacccagagccctgctgtgtgaagaagcctcagtcatcacgtgtgacctcacagtgggctggtcatggggccccttccacatggtgcactgctgctgcaggaattgctgtgtctgcaaattctggacataccagaccctaaatagaatgctgggagcaggcaggttacagaagcctctgagtgcggcagctctatgggaactggggtgctcctcgtgcc

SEQ ID NO: 445649 - DNA, 593 bp, Homo Sapiens
aagacaggtatttttatttttcccatacaaaaacacattcttcctgctttgcaaattgtgcttgcaagtcatttccctttatctttattagttctagtagctttatttacatatgttgattaaaatttttaaccataagtaacctctttttttggtaacagaaaaaactaggttatagacaattgtgagttgtctgtcaagtaccaacattctgtagcagatcagcaaattttatgaatataccatctcacaatttttataggtatgtgcttcctcgtaatacaattgttttaatgtggcaaaaagaatgtttagtaacagacctaaatatatgtagcctctctatatgatataaaaataagaagccaaaagtatataaaattaaacttatgcttaaaaataaattttcagtggtttatctgacttagaaataatctagatagttaatgaatatgtattacttagcataattttaagattgcaagttaccaaaaagattgtggaaagcatttttaggcagatattataaaacataattattgtcaaaaagttcatttataaatttgattccactcacagaatttaatacatgt

SEQ ID NO: 445650 - DNA, 477 bp, Homo Sapiens
tttttctagtcttctaggaccctttatttgggaacataaagggacaggctccctgagcgggtgctgatgagcccttccctcccctctgagtccagtggtcccctaatctgccccatttccatgcccacgtgggtaccatttttgtagcacctgccattcctgggccatctaaggggtcagccttgagggggtacacgagaggcaaggacccccattttccctgagctccacctttccatcggatcccacgctccttatgttgaccagggggcaccatggacatggagccacatcctttacgttgccgtctcttcctgactcccttgagcaacactcactgcgtccctgatgccctcgtgggatacacttctggggtagggctccccatcattgagtgacagcagaggagggccgaagctttcagccggggccatggggtggcaaggggagaagatgcagttaccagggctggtgcct

SEQ ID NO: 445651 - DNA, 2412 bp, Homo Sapiens
tttttgactaataccaatgggtttatttaaaaggaagcaaattaaacaaaactatggtgataacagcagatgtctagttataattcatttctctaatgctgattaatatattcatgaacaaatcaaatgtattgccaaaagaagaatgctaccattaacaccccagcggctactggtttcagttgtgcttctcaatcaggcaaaatgttctttcttaagctcctatttattttacttcctgacagtctcaaaaataattcatcttgggtgttgtttcctcataaacacttcctggtgcttgattgctttgcctatgtgacatttgacttcaaactgccattttacctttataaacatttggaactttctaagcatgaggagaatgcccaaaaggcatacaaaaataaggctgtaattagatcggcagagtatgttttaaggcatatctagctttctgtgaataccagaaacctctcttttcatccaatattgcattcccaattggggtgcagaaagtaaattaacatctggagactccagcaaagaggctctggtaacagcatgtttaatttattattattgcaaaagaacagtttttctcatgattagtgaaatagaaaactcacaatatacttaagagtctgcccccaaaccattacaaaggggttgagagaagagagaagcagaaaccaaaagagaaacagaagtaataatcagttatcacatgatttttatagtaaacaatagaatatgatgtgcaatagtgcaattttcctttgctagtccagcaatgcaagtaagtcttaataggaagtccactgtgttactttttgtatttcgggatttagttgcgtgcttgccgggggttcgagttcctgccagacttctgactctgagtggaatcactattgctagaatcacttttactgagtccaagatgacgaagcttcatatcccagcgcttaacttttttaccgagtcgatccttccacttctcagctatagagccttccaccaagagtaatctggaacgttcctcatcttcatagcccatgatgatatattcctcattaacattaagtggagggcagaggcagccagagctggtatagaggttgacagtgtcccgtggaatgtttaccagagaggactttagaatctccttcacctccactactgcagtcacatcatggcacttagtctttatctctttaactttagcccgaatgacatagttgtaattgttccggaaataggtcttctgtgtagctctaataggcttacatttacagcgttcactgcttgcccctctacagtttccgttactagaatccataggaaaatcagctccgtccgcagtaacgatggcctcgggagagatgcacacgcccctgtcgtacactggcagctcctcgcaggccaggttctccggccacgagtggcggtacttgatgagtatgggctcacagccctgccgggcccgctcgcacacagacttacagggcttgatgggctcgtgctggaagtcaatggtgcagatgggcgcgtacatggcacagaggaagaagagcagatcggggctgcagtgggtgcccagcagaccttcgaactgctcgatggccaggatggcgttggcctgagtgctgtggtgcaggtggttgggcatcttagtcatgttccagggcagggacttgcacagggggatgcggacgggctcacaggctgcagcccgagccccgggcacccggagcaggcagagagcagccagggcaagcagcccggcccgcagcagcagcatccctcccgggctgccgcagaccatgatcccggcaggatggggcagggtgcagccgcgcagtggacgccaaaaggcccgctccgccgtctccgcctcccccgctgcaagtggacacaaggatctgggagcttctcctcccccggcaatcaccgcttccttggatcaaattcccccaatggggtcccacgagctttaccgagctccagccaccgcccctgccgcccaggctgctctttcccaacgtctaagccttcggaagcagcaacatctatttattcctctccctctggcagaagcatcagacttcgcagatcagtcagataagagggacacgagaggaggcgaggaagacataaaaacaaaagtagaattcagctgagagctagttggagctctggggtgtctcctcccctagatcacgcacacaaaaagatgctaaagaaagcattaaattccccaaagtgaggaggacagaggggttggggggaaggagggaggaaaagctcctaatgggagagaatggtgcagtaagagtttacaagtcctgtgtgggctaagagctgcggccgccgctgcggctgcgacctggctggcaggagggacgcccagccgct

SEQ ID NO: 445652 - DNA, 413 bp, Homo Sapiens
  misc_feature (216)..(216): n is a, c, g, or t
  misc_feature (369)..(369): n is a, c, g, or t
ttttttttcggtgaaagcctcggtttaattggagacaagatcgaaggattattgatcaacggaccgaatgactgatcgtcaaagtggacaatacacaagcagcttacagaggtcctgtgctcaccctggggagaggagccctgcttgggggtgggtctgtctctccagtcaccccctggctcctggaaaaggggggaggggacaggctctgcccanccccaaccccttgggtgacacgacttcccgtaaaacaacagcggtgagtccacccttttcccaggactatggtacagtttgtataatacagcaggaacagagactctcccaacgggagacctccttccctaccttcccgactgggtcagccanggaagggcaagtttttattttccctttttgcctccgtagaataa

SEQ ID NO: 445653 - DNA, 575 bp, Homo Sapiens
  misc_feature (465)..(465): n is a, c, g, or t
ttttgacctattaacttctttataggcacacggggagttacaggctgaggacaaatggggacttcacactacattatcttcctctgttcagatagcttttcagggggagtgagtgcactctatatgatggaggaagaggacattggtgcctgtgggtacttcagcaccaggcttggtaaagcacatactctctgtagcacagccccgcatagcaaatctgggtttgaaaataccagcctgcacgtgtccagataaggagacgcagtggttttcctttccagtacagtgggtcatgggccccatgcatttgtccctgaagctcgcagtgcaggcggggcacatcaggccattctcagtaagattggtcaagggaacagacaaaaaggcactgttgcagccgtcgctctggcagcagaaggagctggttaccatgtggtccttggggcccatggtggtggatataancgccggagtagcagtcctgggacctgatgcagcccttgtaggtgtgcaccaactccttgcccttctatttcaggccgcctatggccacccccatgccttcgtgaaatccc

SEQ ID NO: 445654 - DNA, 464 bp, Homo Sapiens
ggcaaattcctcatggcttggtgctgttttcatgatagtgagtgagttctcctgagatgtggtcatttaaaagtgtatggcacctccccccactctctatctctcttgctcctgctctgctatatgagacacctgttccccgtttgccttccaccatgattgaaagctttgtgagacctcctcagaagccaagcagatgccagtgccatgctgcctgtatagcctgcagaaccacaagccaagtaaacctcttttctttataaattacttagtctcagatatttctttacagcaatgtaagaatggcctaatacaatagcctaaactaatttgagggaggtgatgtgtctcttgctacacaaagtatggttcatggactaacagcattggcgtcaccaggaggttgtcagaagtacagactttcagttcccttcccagacctaataaatcagactctccaaaaa

SEQ ID NO: 445655 - DNA, 501 bp, Homo Sapiens
gtgtcacttaggatttattataacactaacaacaataacagagaaaatatacactgatacgacttataagacattacattcttttatctttggatttatttttttaatctaaggaacgaagactttgaaattcagttaggaggtccaaaaggtgggaaagggaaaggcttaggaagttctaaaacatgatatgtgagtagtatgattattaattatcttaatgaagaagaaaacagaaaaactgttaaagaactcaatgtggctaaggagaaagattgctcagaaaaaaagtgtacacacacaaacagcagatgcagagaggaacacacacagaggagtggaaatgtgcagctggagcctctaaaagtgccccaaacaagccaaacacacacaccacctagaccaagaaaagacataagaccaactaatgcatatcccaagaggcattccaaggagaaagaaaaaggaagtgttaagcctacgaattaatcagactggtag

SEQ ID NO: 445656 - DNA, 1035 bp, Homo Sapiens
  misc_feature (54)..(54): n is a, c, g, or t
  misc_feature (548)..(556): n is a, c, g, or t
  misc_feature (588)..(601): n is a, c, g, or t
  misc_feature (770)..(805): n is a, c, g, or t
agcggagacgaggccagtgtgggcgcgacgacgagaatctggtcgcctgttganccagcgctcacaggagcttgacgaggcgtgtgtgcatctgccgatgacgcgtcgggaaccgcccgagataaattcctgtgtttggcccccaccccacgagggcgtcataagatgactcgcggggggcgtgagttggttcagttgatatattctcgcccccacgccaaagaagcttaggtgtgttgtgtaccgaaaacgaccgcgcgtgcgcccacttgttttcccccgaggggtcgggggtgtgagaagaaattgcccggacgggcgccccgtgtgttaatggtgacccccccctccgttgggcgccccccgtttccggaacagaaaaacgggtgttactgcttcagttcggggcccccctcgcggggcgttttatggcgcccccccctcccggttcgttccatccggcgtatgacttttctgccacctgcccccggtccgcttgtgtgtgcttttcgcgttgttcgcctttttctacatgttcttgtctttgnnnnnnnnnctttgacaaaatagtaattatttatattttcnnnnnnnnnnnnnnttaacatttggaagttctcccctggaggaagaggggctagtcagaaggaacagaactggctcctatgcaggcggcaagtcaggtacaaacagctgagcaatctgggctgggattttatcacacagcatttttaattgataaaatttccttctctcttcttttgttctgnnnnnnnnnnnnnnnnnnnnnnnnnnnnnnnnnnnnagaaaaaggggtgggggagaagaaataaaatcagagaaaaatgcccaaaaacattttccacaatatctaaaaacagagaaccatagttcttgtcaagacaatatgaattctggatgagttattttttccagttttcaacaccaataaagatttttgcaaaagccaccacatcagaacactcatcttccagatcaaataaccttcccctttgatcccgggaattccggacc

SEQ ID NO: 445657 - DNA, 538 bp, Homo Sapiens
ttttttgttaggcatatttttacacacattttgtcttgttttacttaatagaagttctttgattagaattgttttccaacatatttatattgaagtttgatattttaaacaaaatattttaaagtagaaaggcacttcaggaatcaagacttttatgtacttgttttatagataagagatttaagtgatatgcccaaagtcatactaaatgaaacaagactgaacaaatgtatgctgaccccaagttcagcttgtttcacaatattttgctgccttggtctttaacttttgatctcattaagaaaacaaacaaacgctaaactcagacctatccaatgaaaagattatattattagcactattaatgttcttgttttacttatttgggatgaaagcatttttatctgaacaggagaagtgaagattggatgggtgaagtgttgaaataattaaatcctgtttaaatactggtaggtatcagaggctcatataatacttgaaatttccagcacactcatcttttagtaaatgtgggcaa

SEQ ID NO: 445658 - DNA, 786 bp, Homo Sapiens
aaacggcagtcccgtgtatatttaacaatatatatttatatatatttcctaaatcagtacattcagtttttaacttgtttttttcttcacaaacagaagaactcttacaatagtagactttctaaaataaatactattaaaatagagcttcaaaataaatattctatacaaagaaaacctgtggcaactttgtggtggggtggaaatgggctacagtgagggggaaatgaagttgggatgtggcggggtgggagcctcgagcttttctgtttgtaacatgaaaccaagctgtgggacagtaagaagagaaagcaaggcaagacactgcacgcagttacccacagcagaaaatggcaacgcaagattcatcatcgactgtcacagtaagcagagggggcacaaaaatgcttgtcaaaggcatgaaccagaaggctagtgaggctcgcaggatgccctagtgaatcgtacagtgtagagctgtgctgcccacgcccgccagacacttcctgggacagcacagaaggagaacaggatgcttcaaggtgacagtcatccgggttctggtgcagatcaactttccacgtgtgccatcttggacaagtcattatctagctgggcctcactcgaggtatgatggcgactgacaggctccacaaggctgaaaagaactagccatgtcttccatctcagctctgagggggtgcgtaccaaaggaccaaaggaagggattggtcattcacccccgtcctgtctcaggaaagcacgttaatagtgtctactgctatg

SEQ ID NO: 445659 - DNA, 572 bp, Homo Sapiens
  misc_feature (12)..(12): n is a, c, g, or t
  misc_feature (39)..(39): n is a, c, g, or t
  misc_feature (451)..(451): n is a, c, g, or t
  misc_feature (484)..(484): n is a, c, g, or t
  misc_feature (492)..(492): n is a, c, g, or t
  misc_feature (497)..(497): n is a, c, g, or t
  misc_feature (519)..(519): n is a, c, g, or t
  misc_feature (524)..(524): n is a, c, g, or t
  misc_feature (530)..(530): n is a, c, g, or t
  misc_feature (540)..(540): n is a, c, g, or t
  misc_feature (557)..(557): n is a, c, g, or t
ttttttttatanttaacaatatatatttatatatatttnctaaatcagtacattcagtttttaacttgtttttttcttcacaaacagaagaactcttacaatagtagactttctatactaaatactattaaaatagagcttcaaaataaatattctatacaaagaaaacctgtggcaactttgtggtggggtggaaatgggctacagtgagggggaaatgaagttgggatgtggcggggtgggagcctcgagcttttctgtttgtaacatgaaaccaagctgtgggacagtaagaagagaaagcaaggcaagacactgcacgcagttacccacaggcagaaaatgggcaacgcaaggattcatccatcgactgttcacagttaaggcagagggggggcacaaaaattgctttgttcaaaaggccttgaacccggaaggcttagttgagggntcgcaggatgccctagttgaatccgtaccagtnttaggagntgtgntgccccacgccccgccagacanttccngggggncagcaccagnaggggaaccagggttgnttcaaggtgacagtc

SEQ ID NO: 445660 - DNA, 512 bp, Homo Sapiens
tttttgagttttcatattttttatttaagaaaatacttgaattgccttagacaatattaaatatttaaacaacatgagaaagagtgccagaggtcagaacatagtatttagttcactgagttgccctgacagataatgaatggggattgatttaatagtgaccaaatacactggccatatttactaaagtgctgtaaaatggccaagtgaggacaactgcatctaaaatgagatcaaatcctcgagtccattccttttagcagaaatgattaaaaccatcttggcaggaccaagtctttgcaaaacctatcaaatggatggatggcttcaagacagcagagaacccacaagcttgaagaggcctccggagagttcactcaggataaacggggtgctggcatcgtcctggtcctctctgtacagtaacagtgttacagccctgtgagttcagtagtaaaggatctggagtccatggggaaattctttatttttgttgctgggtaactgtgacc

SEQ ID NO: 445661 - DNA, 462 bp, Homo Sapiens
cgtcataccggtacccttttctttaccccctttaaagaatacccaggaaaggaaagataactaaaaggaagtaaaggaccagatcttttacccaccttcctgcgtgggtgatccatcctcttcctctataacatcgatttccctaggacagaaggaaggccctgtgagtctatgaagcggcaaaatgagtaaactgattggctgaagacagaactaatcatcctactggtatctaactccagggcctacgttaatagcatatatttccatctgtgtttaatatgcctcagaggctgagtagaggcagatcttgcttggagaggcaccatctgcctacagggattagatccgagccacattacccatatatgctcagaatggtctgtcaggaacacccttgttaatagtttagctgatactgtttctctaaggtggaagtaaaaattactaaatgaaagagca

SEQ ID NO: 445662 - DNA, 199 bp, Homo Sapiens
ttacaatacaattttatattttttaaatatactatatatgttaaggataaggggtgaagttttcttcctttgtaatacctgttcaagagtttaatggattaggagattagtgttaaccttgaggataaaagtacaaatttgtctcattaggacacttctaccaagcatttcttaaggctatagtttaacatttggtttc

SEQ ID NO: 445663 - DNA, 470 bp, Homo Sapiens
tttgtagaaagaataatttattacccatatgttgttactgaatattctgcaaaacaattttgtattgtatttgcacaatgaaagaattttgcatagtcttaaaaaccttgtgtgcaatgatttctttccaaggtacacattcgagtagcttcaccaccaattaaatatccatgcttcatgggaataaacattcctacaaaagaagagctcattgccaataaaccagaatttgatcaccttgcagaatatctaggtaagtattaaaatttctataaactttgattattaacagagaaaatccaaagcttgacagtctttacacctttagtaaaaaggagtattcagtgtttgttaaaagtagttatatatgttaaacagatattgaatactattctcaacagtgagagtagtgggcatgggcagacaccacagagtcttgtgttggagagctaagccaaggtgagatcaga

SEQ ID NO: 445664 - DNA, 759 bp, Homo Sapiens
  misc_feature (426)..(437): n is a, c, g, or t
aattaaatatccatgcttcatgggaataaacattcctacaaaagaagagctcattgccaataaaccagaatttgatcaccttgcagaatatctaggagcaaacagtgttgtgtatctgtcagtagaaggactggtttcatctgtacaagaagggataaagtttaaaaaacagaaagagaaaaagcacgatattatgatccaagaaaatggaaatggtctggaatgttttgaaaagagtggtcattgtacagcttgtctcactggaaaatatcctgtagaattagaatggtagctggtagggttggatgtgtgtagtttcaagatagaaagttggtcaagaagttatagtggtctcacctcatctatttactgttactcagttggtacgatgtaaaatgccatgcttttgtttataagttttgagannnnnnnnnnnnctgaaaaggataccaaagtgcgataactgaacatttccaattgcatataatacaacaatatgtggtgttcttttttttacacaagcattggctagcctttttaacctggtcagagaaggcaggtggtcactgacatttcccaagtccatgctttaaagggtttgcaagaagttagggttaaggagaggtgatgccaacaagacaggtgagttaaatataccatttcccacaaagtttgaatagaatacatttgacctcataggtgtccagcctctacgttctggcctgtacgttactgcccggggcttgcctctcattgtag

SEQ ID NO: 445665 - DNA, 834 bp, Homo Sapiens
ggcttccaaggaccgcctgggcccagacagggcctcaactgcccagggctctgcagacaaatggttgatcagattttcggggcaggaaccccatagaaggggctggagcatccctgccacaccaggaagtgggtcagagcccagcagagctgcgtcccaaggaccgggtgccttctgagcttcaggtggaatcagcagaacagaccaaattcccatcaaagacgtgcgaatcttaaattcataagatcataaaaccaagctcactggtccacgttggaggacgctggatgcactcactgctttgaaaacaggtggatgaagagaaggagtcgagcctcccacctctctgtccacagggactgtctgctgcggctgcccagcgtcgatgagggcggctctcctgagagcgggagccctgctcacgaaccaaggtgaggactactgtggcggctcgcaggattcatggtggctgctgacggctcaaaggtgttcccggtcacgtcgaactcggggggaacgaaggcaccctcagggtcgtcgctgagctgctccatgaaacacacgttcccgctggtgttgaaggccagggtgtcgggcgtgatgcacaggctctggaagatggcggcgtgggccacgctccgcatggacaggctgcactccaggcacacggcccaggcttcctgctcgctgaggccgcggtcccgcagggagaggatgtcagccagagacacgttctcctcgtcctcggggagggtgggcagcggctcgaagtcgtagaagtccaggtctttgccgtcctcctcgtaaagatccgccgcggccgggtccatggcc

SEQ ID NO: 445666 - DNA, 940 bp, Homo Sapiens
ggcacgaggggaatcattaactgagtgattcttaatggagggcctggattggaggatacttgtattccaccccctcccccctcattcagtgtccttacattgggaggagtcagtggaaacctttataggggatctttgttgctttagagtttatctgttgctgttgctgtctgtagtcagtgatcgtggaaagaacatgtgatcccaggtgtgcagaaagcatcagaaataggctgtttccatttaccctcctctgggctatgtagagaaaatgagggaaaaaattgggtttttgattttctgcagataaggttagttgaggtttttagtatgacttaatagatcttaaagtgtttatctgtggtttccgtactgcctatgatacattataagaatttataattaaagtttattaagaggaaagattatgcttataatttaggggaagggggaatattgaactacatttatagtgattttgtttcaggtttttctgaggaattttaaataccctgtgtcctcttaatagtaaaaacagtttgaggtactctgagtttcttacaactatttgtctctgaatagttttctcttaaaatttgacaaatattaaaaacattgtccttccttctttggttacagtggagtctcttctgttttgccaggaaagttaacatattttttcttccatttttgttcatcatttataaattagatggtatagattttagcaaatagatctcaagagctggattcaattagcagctttttaggacataaacattaaagggttagatggaaaagattgttttgactgactggataaatgacagggctgtgtttgatgtgcgtccaggaattggtctggagctggtgcccaacttctcagtccatcttgagaagccaaataaaatatttaacctaggcctcattttgtttaaaa

SEQ ID NO: 445667 - DNA, 375 bp, Homo Sapiens
  misc_feature (235)..(316): n is a, c, g, or t
  misc_feature (362)..(362): n is a, c, g, or t
gttagggagatagtttatttagggacaaaatacattaagatgttttactccactagagcaatcttccagatgtctggaagatgaaaataacattgttcattaatgctattaccaaaacataactattgcacaccctactaaaacaatgttatacacgctgtatttcagaatatcaatgcttttaacttccaggttgtgacagcctccttccagatgacacttaaaaatgcccacnnnnnnnnnnnnnnnnnnnnnnnnnnnnnnnnnnnnnnnnnnnnnnnnnnnnnnnnnnnnnnnnnnnnnnnnnnnnnnnnnnatgacactttcagaggctaggttacaaaaaacatcatggcttcttnccttgccctccgg

SEQ ID NO: 445668 - DNA, 1961 bp, Homo Sapiens
gaaaataaaatttactttttaggaagtttcctattgccagggatataggtaaccataggtgtgggtaacttctttatgggaacagatgcatctgatagatgattaaccttgttgatttaaggttcttcccactgccaagatttgatgaggggagactacagcaatggatctaaatatgccaaattctttcaggtgtatcctgggctgcaggggatagagaggggggtttagttgaagactctgcgacttatcccactgcaaataatgcatccaggcacctcctttattttgctttccatccccccagatcttctgaggaagatgcttcttctggatcactgtctcttcatggtgcactcaatgtaagactccagcaggaagatggtttcgtccacctggatctcactggcatccaacttgttgacattacgtttcagggtctctagctgctgacgttcaggagctgtgatcatctcctctatttcttgtaactgtgcttcctctgcaccagtagcctgcatagatgcaatgatggcttctaccctctgagatttttctagtagacgcttattctctttggtttcaaattgcctcctttctatcaagttggctatgctcttgtagcacctgtgcaacaacattcgggcagctgacaggatgttcacagtatataaataaaaggtcctggatggggcatggtctggtgttttgggaatttcctggagtgacatgaaattttctgagagcatcttatatagcatatcctttgcctcctttgcaggaatcattgcaaagtcttccacttgcttctgctctatgtgtttcttctgcaaaactagacggaatattctagcacagcgagacccaaatctctcctgtacgacggactccagagtggctgtggctagggatgctaatgccttatggaggttgatgacatacattcctccaccactgtcgccagactttccaacaaactctagtggatcatctgccagcagagtgagatactgatcaagaacttgcttagagatgttatagccaacaggtagggatctgaagatctcattggaagacaatggctgggtgaagggagcactagaggaagtggtaatctcactcattcggagcatggttcgcacaatctcgctgcttgtctggtccatcctgttagcaactgcgctcacaatggcttggtcacggaagtgttggtggaatctgtcaaggttggcctgccaataaatcccatcatctggaatgggctccttgttatctgtagtatattttggtctcttggccttgggctccccagcagcatcttcatcagatgatctcctccttttacctttccctatcaagctgagtttaggaaccaggtacatgtccttttcattaatgacaagtgtgggggcaggtggtggtggcccagggtctgaattctcagtggtaggtaccgaagggcagcgttgtacaaagtgtgtgtctgccagtcgcacaaatgtgtttgatacttcagcatagtccatggtcttgccatcctccatggtctctgtgagccggtctgccactttcttcacaacagctgacattgtcagtttgccgttcaacagaagctcctcaacaatcagctctccagtgtcacaggttatgttggacgaggacacacagggctttcttcacctgatccagtgatgttcctgtgtcatgggcaattactcttagtggctggctgccggttcttatcagatggactccaattttttctacaatctctccaaaatgctcttgcagcaacaaagaacagagcttaatttctgcttgagtcattgtactggggagtctgagagctcagggtcagcgcaatccgggggctccaactccaattcggctgagcttcccgcgacggcttcctacggctcccgctggccttctaggcacgaggtggagcccaccgccctttc

SEQ ID NO: 445669 - DNA, 1168 bp, Homo Sapiens
  misc_feature (150)..(150): n is a, c, g, or t
  misc_feature (154)..(154): n is a, c, g, or t
  misc_feature (174)..(174): n is a, c, g, or t
tgggaaagccatgggttccgccacaaattttgggctggcttgttcggttcccatccctgttaagcaaactgcgcttcacaatttggcttggtcacggaaaagtgttgggtggaatctgtcaaaaggttggcctgccaataaatccccatncatnctggaaatggctcctggtantctgtagtatatttgggtctcttggccttgggctcccccagcagcatcttcatcagatgatctcctccttttgacctttccctatcaaagctgagtttaggaacccaggtacatgtccttttcattaatgacaagtgtgggggcaggtggtggtggcccagggtctgaattctcagtggtaggtaccgaagggcagcgttgtacaaagtgtgtgtctgccagtcgcacaaatgtgtttgatacttcagcatagtccatggtcttgccatcctccatggtctctgtgagccggtctgccactttcttcacaacagctgacattgtcagtttgccgttcaacagaagctcctcaacaatcagctctccagtgtcactgtacagagttttggtagtatagatgtaccggggatatctaagcattcgcaatacccggctgcactgggcttcatactccaccacaccacgtttgtgcacttgataactcaccaggttatgttggacgaggacacacagggctttcttcacctgatccagtgatgttcctgtgtcatgggcaattactcttagtggctggctgccggttcttatcagatggactccaattttttctacaatctctccaaaatgctcttgcagcaacaaagaacagagcttaatttctgcttgagtcattgtactggggagtctgagagctcagggtcagcgcaatccgggggctccaactccaattcggctgagcttcccgcgacggcttcctacggctcccgctggccttctaggccgaggtggagcccaccgccctttctaggacgcggatcgccaccgaagaagacgcggaaaagcaaaaatgcgcgtgccactctaccccagagtttcggcggcttccggggacgctctttctttcttctcgctggaagactggaggaccagcgaggggctgtttgtggagccggcgggcgggccgtttgtctctccttcctgcgcctctttggtg

SEQ ID NO: 445670 - DNA, 585 bp, Homo Sapiens
  misc_feature (129)..(165): n is a, c, g, or t
tatccgggtccccgtgcgggagggggtgcgggggcagggcaagaaggagaggccgggggcccaggtatcttactcctacgacgctgctcactcagggctgtccccactggaccagaaaggaaacagacnnnnnnnnnnnnnnnnnnnnnnnnnnnnnnnnnnnnnagccccgcgcccggtggccggacgcgaggactacaaggcgggatggcgggccggagctcattcacactcgagggcccagaacgttggcagagccaggcagcacccgagccccgccccggcccagaggttcagaccccggtctgaaaaggcccgacaatccactcgcagctgcctcccgccctgggtcagtatcgacgtccccgagcaccgccatttcccaaactgcaaaatgtcagcgcaggcgcagggaagccggcccgccctcagcgtggtccagagtgccgcgacggcacagctgccggtcggtcccctgacgcctttcctctaggggccgcaatccaccccggggtagaagatttggggccaaggttcggccgcctactgccggggtcgatggcgcatcctctccagacctcacag

SEQ ID NO: 445671 - DNA, 558 bp, Homo Sapiens
tctgcttctgagtgtcgcactaggattttcattgcttattttaaagtgtcttaatccttggttcccagacacacaacccctctagctctcggagggggcgatcatgagaaaccttccagggaaactgagcacaggatgaactgttagttgtttttaaaagtctatataaatatttcaacagatcgtaaagaaaaaatttatctctttggtccttgcaagagaagtcaaaggaacttttgtttctcctcaagagcctggacatctctgtctgtcatgactggaaagggcccgttgtgctgaaatcctatcatcatggtggatttgatcttcagtggccaaacacgaattaaagtataattcttaactgaactggtgggtgggttgagctttagggaagtatatggcggtcattcctggtgcgcctatcggtgtgacatgagccctggagtgtgtcgtccctctcagccctgctcctcctgcctcctggggtccagtgactgggaccctactctagaactgtgtaccatccaattcgccatcataaaggaatcttcctgc

SEQ ID NO: 445672 - DNA, 414 bp, Homo Sapiens
gcaggaagattcctttatgatggcgaattggatggtacacagttctagagtagggtcccagtcactggaccccaggaggcaggaggagcagggctgagagggacgacacactccagggctcatgtcacaccgatagcgcaccaggaatgaccgccatatacttccctaaagctcaacccacccaccagttcagttaagatttatactttaattcgtgtttggccactgaagatcaaatccaccatgatgataggatttcagcacaacgggccctttccagtcatggacaggacagagatgtccagggctcttgagggaggaaacaaaagttcctttgactttcttctttggcaagggaccaaaggaggataaattttttcttttacgattctgtttggaatttttattattagg

SEQ ID NO: 445673 - DNA, 477 bp, Homo Sapiens
ggattgctacccatttattcttttgccaagaaagggtgttataaaaaaaatgcaagcagacaagccactgtctactaacagcaccatgtcataacagcgacacagtcagaaggacctgatttaaccacaatatagtaggaaggacaccatttgaagaataaaggatactccttccccagataggacaggtgctaagcatgcacagacacgggctgtgggctgatggacacttcctggtgactaagcatttggcagtcgctgcactgtgcttgtggaggattattgatcaatatcaccaccaaggtcaaacagcattcctcagcactccaggaggacagcaagagcaggcacgcctgtgcttcaggagccaactacaccgcccatgtaataaagccacacttcttgaccaagcactaagagagggacacctctctgcttttcctttcccgagacagtgagggcctcgacagagcccta

SEQ ID NO: 445674 - DNA, 662 bp, Homo Sapiens
gtcctcattctggtttttaatggtcaaggtgacaacagtgtacagtttttccagacccatatgtaggttccataatctccacctgctggagaaaacaccgtgacagatgccattgccccagcaggccactgccggtgtgggaactttgggatcaaaagcaccaagccaagtcccttgctcaggatgggtcttggttgaaaccacaagcccttctgcagttctaggtggatgtagtgttggttcttggctcattgcaggggtgaagcaggaaagagaaagagactggtgaggcctgcttggaaagaggattgaggcacattacgattccaaaccaggagatcctgagtcagcactgattctgtctctggtttgtttaatacgggaaagggttccatccaagagcccaataggcctcctctcccaaacctgcatagcaatcaaacttataggggtggtggagggtctttaccaggctaggactactgcctatgtttctgcaagtcacaagtcagcaggtcaaagaacaagtgtgaagcagaacctgctaagcaaagccaagtagtgacactcacttccaaaacatacccagcagaagcctcctgcaagtaccaacagtgacaggtgcttgtagcacagaaaactcaccccttcttcaacagttg

SEQ ID NO: 445675 - DNA, 683 bp, Homo Sapiens
tgctgaggggtttgtttggttttattttcccctctggaaacttggagaaaggaggacaggaaaagatgataagagggcaccattgtttggttttaaaggtccctccccaaccccccacaacaagaaagctcattttaatgagatgagagaaggggagaaagctccctccgttctgatgcttttgagcttatcagggacaccctgcagcagaaattccagctgatccttcagccttcagagttgatgaggtggggctcacacacatctggatttgaagaagaatcgtgggtttcaagaactctgtggtctcttaagcattggtattccacagctacacttccctgatactttgcactcagtaatgacaaaataaatatttgtagaattgagttgttgctaccctgtgtctccacttcctcccagaagggtagaataaacttacatgtgtttgttttattttgcatataaaccacgactttgtaaactttactttttgtgacactcttttctccacaattgtgtgaaccctttttagtggaaaaataagaatgaagaattcctagttttccctaataatatttccctcttgtaagtctagttgagctcctggtgttaatcatggtatcaaatgtttatgacaggacatctaggtgaggcctgagtaaactgctgtaagttacaaa

SEQ ID NO: 445676 - DNA, 1124 bp, Homo Sapiens
accagtgtttgcaaaatgctttattgttaatgccaacatagaattcaaaaagttagtcattggcacctgcaactgacactctactatttgcaaaaggcttcccttcttccactcccagccaggcccatctagattattactatatccacaaactgatataatcaatcacttaaatgggccatttccaccttgatatccagatgtttttcttaaaggatgaatggcacttgagtgtattgtaaatcaaccacgaatgacagggcccaccccagcctttctatatgatttcacggagttcttgggctcacagcagagaatctgatccattgtatacagagggcaatactgacggtccagagagggcaaagtgttgtcccaatgtcacacagcacattaggactgaaacagtagccccatttcagactcccagttccaagcatttttcccatgcaggagtgaacctgagagttgtggctgctgataaggtgtgggaccagccattggacctgtgcttccatggtggccctcatccagctggaacatccctccatattgagctttgtggcactgagtctgggcatcaagggccaggactctggacctctctttgccactaccatgctggtagaacttgacgcaagtcatccagaccgtctctggcatctcagtgtgaactcttcacttgagtgaactagctgacggcaaggattgaatgttcatccatcatgtaccccgaaggacaccgtgtatgctggcaagtagtgtgggtgcgaagccatcatcgatagacgtactattctttgtaagtgcctcatgaagtcacactagagccttgtgtaaaatcactaggcctagcagcattacaagattgggccactaggcttagaccgctgttcttctcccgccctgacagccctgtagatttttcagggcagcaaagccccagagctgcaacggcgcgagtgccgcctattgccgacggggaacgcaaggaatgttggttgataccaacagatgtgcgccatccggacaaggggcctggttagatacagattacgcactcctgaagaaagtccaagcgggccgaccttcagtcgcattatatgttccccatggctgaccgc

SEQ ID NO: 445677 - DNA, 641 bp, Homo Sapiens
gcggccgcacatccagttggtgcccgccgtgagtccaggagccgaacgtcaggccgcagtgctgggcgtcgaacgggaaggctgctacatccacgcggcacgagctgcgcgtgatggccggcgcgtcccagcgcacggcgccatcgtggcgcaggaccacgttggtgctggcggaacctggaggctgcgcgtcggctctgggggcaggcggggcagggctcacctaggctgtccagcctgaggagcagccccggaggccgggagcccagggcagacccccaggggctgaaagaaaccaaaacttctccccagaatattgaggctcgttaagttcgagacactcacgacgcaggggagcacctggccccagcgtctgctggcctgatggcaggacatcagcccttccttgctggagtcagcacttgcttatccaaagggcaccagtaggtgccagaggaatctggaaacagattttaccctctttccacgttttcccgccttttaaaggtggctgtcctttgtcttgccactatttataacttactggctctttcttgaatttctatttaagcaaggcccctaagtcactgccttcagagagaaatacttttgaactaaggcctctcccatgatgggtacag

SEQ ID NO: 445678 - DNA, 859 bp, Homo Sapiens
ttttaacatttcgaatgctttaatcaacagacatatacaaatgaattttaaaataaaaccaaggcatcaatgaagaagatctaacatgaaagtcaccacatctcacaatgagaatccgatcagatggaagaaggcaaaagtctaaatcatagagtggcggagggaggcacgggagagacggagggctctgggactaaatcatcagggcatggccacctgatgtcttccactttcagggtcccagggccctaggtggaggtttgggacaaatatggtatttggtcacaaggagcaacagtacgatctgctgtatctggaatgggaaaggcgcacagaatcctggaaggactgaagacatcagatgctatgataacaagatggagagtacgagggcacaagagctgtaaggaggctctgtgctcttcggtgacaggcatcaatcacaccacagcaagatgtcattaaaaagttactactttagtggaagatctggagtagctacaggaaaaactctttgggaaagtccaggtggtagagagaaaatacacatttaagcactaggaataactgtgatgccacgctcagagcaggtgggagaaagcagttctctctgtttgacttgcagaaggcaatctttcttcacagagaggaccacagcattcagtcctctagaaagttctattagtcttgatcttgtcttgttttgctttgtattttgaagcatccctgggttcactgctgggattgctccaatcatcggcttcaggcgtggtcttgtaatggcgccatgcggacttattaaaaactggaagtctctcaaatgactcacttgaaagagcctattggagaaacaaaaatc

SEQ ID NO: 445679 - DNA, 1037 bp, Homo Sapiens
  misc_feature (574)..(582): n is a, c, g, or t
  misc_feature (915)..(915): n is a, c, g, or t
  misc_feature (918)..(918): n is a, c, g, or t
  misc_feature (928)..(928): n is a, c, g, or t
  misc_feature (940)..(940): n is a, c, g, or t
  misc_feature (998)..(998): n is a, c, g, or t
  misc_feature (1006)..(1006): n is a, c, g, or t
ttttatgagtaaagtcactggttttattgagcagctcaaactagttctgaaggcaactgttcagaaggcgttcccaacagcttttgagcaatgcacagcctcccataaaaccttaaaaagtacatctgttaatgtgcacattagtctttgttagtcacgttcactaaatgcattaaccttacatatacttccaattaaaaaaacacataggcttttcagtattttggcctagatttttgttcaaatgagtccaaatgtgtgagtgaggtttacctgttttctgattctgatctataaaaatgggtggtctcaaaagaccagaaagtttattcatagccaaaaatggacaaaaagagttcttattctcccaaaataggaaattttgtattcctatagtcaaaacaataaacaatttttgaaattaaaaaagttgagaatcttgaaattcatttttttcagtagaataaaacaataagcagcatgaaaacgtaaagtgctacataaaagccccacattacataaattttgaaaagtttattggcttaaacagttacaggtgaaacagattacgtannnnnnnnncaagcatgctattttaattaccttgatatctcatcatgtgctatgttggtcaaataaaatgtcatgagttatctagatctgaggattaaagaggagtcctcagcctttacttgccagaatatacatccagttttagctgtatgctggaattaaggagttaaagtagggctttaaagataatagttttctgaagaggcctttcagtggggcttggacaaaaagggccccaaagaccaattttgctcattaacctcacactggggatcagtattgacaacttaaggatttttagggagcatatgtgagatcaaagggaagaagaaaatggtgccnctnacagatggtncttcaggtgctnaaaaatatcccaacacaaacaagcaggtggctagctgacaggtgggggaagagatgcnagtcaganagcaaaggatctgcacagtgcaaaatcttct

SEQ ID NO: 445680 - DNA, 2651 bp, Homo Sapiens
aacttcacaggaaatttattattttttgaaagggctgagggagactttacaagggtctgaagctggtaactagaaagaaagataaataaaatacgaagccagtatgttgtggcaaaattcgagaaaacacactgaaaaaaatctttacagtttaaaactgcttcactttatacataattacaaatgaatatacagcatctgggttttaacccgtcttttttatttaataggatttagcacacaaatgtccatagagcatttggaaacaagcaatgagagcagaggtatccggtgtatcccaaccaccctcctgcggatccccacgcctcccctgcgcatcccatgcgggcagcagcacacaggagaccacaggctaagcctgaaccacaggcagactcaccaggcacgccccatggcctgtgctcatgccctcaggtggtgacgaaaggtaggggaagctcaggccggggaaggtgtggggggtgagtgcttcctgcagaagcccctccggactgcagcacaggtggtcccacctggttgtagggcaggtcactcacttcggtggcaggggacacagccagtggggggttgcacgcctttaacccttagtgagatggagaagtaattcatggcctatcaatcttttggacacattagattagatgagtacttggaaagatgcctttatgtttcccttcctcccccccgcctcccttttatggcagcattaaaacacttgtcattttaaagcctggccagcaggcagtagattccaaggctctggttaactaggaatgctttgctacattgaaaggaaagttcaaaaccaagcccaaactccctgccctcttctttgtctctgaggatggacgagagcgacggggctggctgggacgcatccataggtggctgcgcacctagacggtcctgctgaaggaaggcaaggcacacagatcttccagcagccgctgccccaattccatccacagggttatttctaggctcccacattccaaggacatccaaaatgcagagggtgcacatcgttctgcagtgtctggggtcacctcacagccaccctctttgtgaccacttgaagcccattcaccaggactgtctttctaaactccctcccagggcctgcctggctgtcctctgggcacagctgggccaccatcattagagtaaacctcaactccatgcaaatactaaaatccttgggaaagacctggctacaagaaaaagagccctagaaaccaaaatgatgaaataagaaaagcacttctgtggaacagcaacttctggatcaagttctggcctctaaggttatagtcccatcctctactaaggcagggtctatctagttcaacccttgcatgcactaacacctcccctcccacatcaagaaacaacgccaaaggtctcaaaactttgtgctcacgactaatactgaggcctcaggaaggtaacaaatacgggagaaaatgagcaaaggggcgactctgaatagtattaccctgagacacagaaggggaaaaaagttaagattcgtacctttccaaaaaaaccttggtaaggattcttccccccagatagctctcacgggggtagagggaatactggcaaaggttgaaagtggcagtttgcatgtttttaaccctctccattttctaagaagaaaacacagtcaatacatttgattgtcttgaaaatgaagccaaccgatgagagcatttaaagtgcacatgtcacctaacgacaacgactgagatgactggaattgagagaagacgcagtctccttccaggaagctcactcgattctggaaatctgggggctctggataggaactccatctttcccccaaaacttaagcacagtttcaggcacgtgatttctttagcttgatggagaacatggtgtcccggcgtggaaacagtatggggaattcagtccgagtcaccccaaaaaaacaaccccttctcatgtgatagaaaccaagacaggccattagatccagcaactagagcactgtcaaggccatgagcaaaagcacaggcagccaccatcccaggtaaatccccaggacaggaacaaatccccctgaggacaacttccaaggggggaagagagatgacaaaggtatgtaagcacagttcttggtaagcggttctgttgctgcactgcagactgtattcctggatgaagttgggtggtttgagggaattccgggcactactttgattttaaacttgtccaagccagaacctgaccaagatcgttttgagtggggtctgggcagatgtgaaatctctatttttactaaaagaccaccaaaacaaccaaagcagatgaaacatcacagctgggcggggagtaagagacactctaacattgatgtcaagctctgtggcgacgtgctctaacttcagcatccacggtgtttttgtgaagagcacgtacgcaagtaaatcccatcagcaccaacctcgtattgttccaaacccggagaacaggggcacccggcctacatttacaaggagaagaatgcaggttcagtactgccctcctgcaaatcccaggaggggaactcggagccagtgcccagaacagacatccaagccccgggtagatacacaggtagctggtga

SEQ ID NO: 445681 - DNA, 384 bp, Homo Sapiens
agctattagcttttatttactcaaaaacatccacaggtgaattcagcagtttaagtcccccttaaactcagtttatttcttctgttcccaacatctcctaggcatcctccgagagcaggttctctgctcaattccacaatggcatggaaatgagtcaccaccacacacatgttcagcccaactagagccttttgtcagtaagtcaactaggcacccttcaggctccatgacttattcttctattgggaagaaggaaaacagacaataatatcaataatacgttgtccccaagtcaggcctccaaaacactgaattagagagaaaggacaagggaaaaatgaagtggaggaagagagtagtggagtgggggagatataattgggg

SEQ ID NO: 445682 - DNA, 1207 bp, Homo Sapiens
gtttatatttttaaaaaagggcacataagaccggaataagggggtttcattcaatgggaagtttgggcatggggaccaggcaggattggccccatggtacagccccaagctggtgggtaccctcacccattaaaattggatgatgcagttgatgatagataaagggcagccatgacagagcaaacaagaaaagaaccagaaacaaggacttagccgtcttgaactcccgtccataaaatgcacctgtctctttggagttagataagttcagactgagtttgttccgaatgatgtaaaagatgtcacggtagatggcgcacatgacaaccagggggatgaaaatccaggtgaggaagctgaagtataccatgtagtccattctcatgacggaaacaaattggcatgaaaggaaggtgacatttctgtggtactctgaggtcagtttcatgttccagccaaacatgggggtcaatcccaccaggaatgacaccagccagcaaaggcccagggccagccatattcttctgtgagtggtgaccctcttgtatctgacggtaagcttgacccgcaagtatcggtccacagcgatggccagcaaggacatgatggaggcgtgggtaaagataagcagtaggcaagtcataaaaaggcagctgtagaagtggattgtgatgcccaggctgacaacaatggccaaaggcatgaccagcaccccaacagcaatgtcagccagggctagagagacaatgaaatagaaggtggtggtctgcaggctggggttcagcttgaccacgcagatgaccagcacgttgcccactatggcgcagagtccaatgaaaatttccatggtgatgtaggtaacattggccaatgacagagcagtgctgttgttgggcatcttgccttcccaggggaacctccacagggacaggtgagccagcaagatccgtctgtagggccagtgggcctagctctcgccagacgtcttcccagaggtccatgtgcagtgacagtctaaaattcccaacttgctcattcctacccttttctggtggggtgatctcttggaaacccttctccttagaaagggctcatcacaggtgggtcacttccagcccctttatgcaccgcacatcctcaagtttccagaatgctgtaggacagctctatatggactgaatctgaaagtgctgctgctcttagttcc

SEQ ID NO: 445683 - DNA, 506 bp, Homo Sapiens
  misc_feature (44)..(44): n is a, c, g, or t
tcttaaatcctacaatgtgaaactgaaactaataatttgatccngatgtatgggacagcgtatctgtaccagtgctctaaataaccaaaagctagggtgacaagtacatgttcccttttggaaagaagcaaggcaatgtatattaattattctaaaagggctttgttcctttccattttctttaacttctctgagatactgatttgtaaattttgaaaattagttaaaatatgcagttttttgagcccacgaatagttgtcatttcctttatgtgcctgttagtaaaaagtagtattgtgtatttgctcagtatctgaactataagcccatttatactgttccatacaaaagctatttttcaaaaattaatttgaaccaaaactactactatagggaaaagatgccaaaacatgtcccctcacccaggctaaacttgatactgtattattttgttcaatgtaaattgaagaaaatctgtaagtaagtaaaccttaagtgtgaaact

SEQ ID NO: 445684 - DNA, 433 bp, Homo Sapiens
  misc_feature (195)..(221): n is a, c, g, or t
ttttttagagagaagacattttattgagcctgctacataaatagctacagaaatctgggaggactgaagggagtggctgccatctctctttgcacagatcactaaggaatccatggggagggcattaggggagggcttggtcctccagagggagagaggacaccctgaatgctatctggcatgaggaggatgatnnnnnnnnnnnnnnnnnnnnnnnnnnnctgacagcctaggtgtcatggggaggtatagatgggcgccaaacaggtcacagcatttggaagtcactgggtcagagcctgtatcacatcctttaccagcatggtgccaatcaccattttctcgctgttgacagttcagctgggcagctccagctggccggacatccagggtcagcagaacgagactccaccagtcagtgtcctccggccta

SEQ ID NO: 445685 - DNA, 529 bp, Homo Sapiens
tttcacagctgctgattgtttattgcacaagaaactggcaatatcgaggcaaggggcgggcattacaaaacaatctggtgaccagcccatggctagcaaagggcattccgtacagacacttcagttatatacacgtacgcacacacacgcacgaacacacatgaacacccgtgagcctgatgcttccaaacctcaccagcagcttgcaccctgacccaccctggagcggcttccatggtaacgtgccacagggaagtacagcaaatgactgaaagggacagaagaggttgcgctgtggcaagctaagccactcaaatcagcacacacgacagaggcagacgcaggctgcacctcccgggccgggggaaggtcgagaatctgggagcatggagactgtgcttggaaggcacccgggaccagtccaaggggctgcctgggcatggtcaccttgaagatttcaatatgacctatgaagattccagttacggcagagtccccgtgttggaggctggcgggaactgcaaaaatc

SEQ ID NO: 445686 - DNA, 1332 bp, Homo Sapiens
  misc_feature (763)..(763): n is a, c, g, or t
tttaaaatttgaaatataattttactttttatttttacaatacagtgtacagtatgacatctcaaaataacagtgcagatacaggaaaagagtacaaagggggattaacaacagatgtcagaaggttacctttattaaggctaaatccctgctttatattttccacacattcacaaaattacattcaaatcattccttattgatccttatttcttaggccatgagaaaaggaagataatccagacattagattttcatagaaagcaaatctggattagtctaaataatattctccttccatttgttctgacaacgaaaatttgagaaacaaagttatgcaccaacctaaaacttccttatttggattttccaagtacatagcattagttattgatatcatttctatattaaatggtaagacctcccccacactggggtctccagtcagaaccacagagggacaggaaatggaattggccagagtggctgtacaactaggtgtacagcaaggcttttttccatattcttttgtggaggtcagcaacaactcagttttcactttaaggactatgttgaatatcagcacatcctcatcactaggatttagaaaagtttaggacatttctatctaccattgctgatgaggaaggggagaatgattgatagacttcactgaccttgaaatatttatcatctcagacttcctaaaagtatggcatggcatcacctctgccttgatacaagatctgcttgttaaagccantgttcctgaatcttgacagcacatggccctagtgcaggcctaatgtctacagcaggcacaagagccactcactgacactacctacaccctcactctaacttaacatgaactgccaatagtttagctcttggagttgaaaacagttgtcagttacaataagcaggatcacaaaactccattgtcaaccatagactacacttcattcctgagacgtaaactggaaaactgaaaagattaagtaagtgctaagtatattccttagtttttaatgctaaaaatcggtgtgacctgtgaaatttcctggctctaaactggagtatttcagatctgaagagacagtagtgtatggcattccttccctcaacccaagaatgttattttcttcctaaggaacattatcttgaaaatatttccacataaaacactctccagccaacttaataggccatgcaaatttgaacagaaaaaggcgacatataaactgtctacatttgttcaaataaaattatgtagaagaaaaaaaatcaatcaaatatgtacatgacacaaattactccttaaacataacc

SEQ ID NO: 445687 - DNA, 760 bp, Homo Sapiens
aagataatatcagtaagcaatttattaaagagtctgccatccatcataggaatctggaacagtaatgatgcactgaaaataagtattcaccccaggtttcttttcctcctcccaaattccttcaatatcaatatctctttggtaaattgttaatagtattttgctctttgtccttttggaaacaagcccagggaatgagaagacaccaacagcagctgtcacaaactcaacggtacttatcgctcggttggcctgctctgaaactccttctccatagcgaagcaatgtcacaaaatgttcacagttgttgacaagtaagttataggccacctcctgtccaattacaaactctgaccgctttatgatttcttccacagggagaggggggtacgtttcatcgtatttattgtttattctgtatgtgtcatttcccacaacatccttcaagagctgcattttcaccagggccttactgctgaatacagacttggcgcttgtaaaggacgcaggaatgccatctacaggtgctatgttgataacgtaaccatcacccaagtacagggcccagtgctgatagccaggacggaacacttcgatcaagtcccctgggcaggggttgccagggtagttcaaactgaagcaatcattaaacgccatctcactctcaagccggggtcttcttctcgcaccgggaggcagctgtgtgtgtcctggggtctctcttggcctcgcagctgccgaccttgccgccggcggccgc

SEQ ID NO: 445688 - DNA, 349 bp, Homo Sapiens
aaggatttgaatctatgtatatatattttacatttttcaacatttgtgttttattccattaacataaccatttacagttattccagaaatttcagtcatacacagtgctcttgaatccaaagagtggtctagtgtgttggcattttcatcaagtacagtcctagaaaatgtcaagttgaacaataagatattgaggcacattggtcactgtgtattctgaattctttagtatggtcagaggaagtagttaatatatttcatgttgattctttggctactcttgatttttgctttgggtaacatcctcatcctgggaacattcattaccacttaatagcaagataacatt

SEQ ID NO: 445689 - DNA, 820 bp, Homo Sapiens
  misc_feature (804)..(804): n is a, c, g, or t
cccctttgtttatggtgggtgggggggtggttatataaattaacttttatttctgtaacatataaaaggtataaataggacttatgtaaaaaccaatcacctgcacacacaaattatgtgaaattagtttatatatctctttaaaccagagggaggaagaagcaggatgaggtccacctggcccaccataagtccttccccacatgctgtcgtgtattaatagcttctgtggccaaccagggttatctgccaggcagtgcctcaggatggggtggggggtggtggtggtgacgaggtgtgaggcttctgggcatggctgtgagggaggcacttggtgggatacatgcctgagatggaaacagtctcgtcctcacccagcaggtgggacttgtcggtgggggacaagccaagggtcccgcagctgccagttggccctccttcacatgcttatctgatgtggtgcaggaacaacaggcggaggtgagaggtcagtccacagaagggaggtctgagggagcagccgccacgggtgtcccacctaacgcttggaaacatttctgtgcacaagggatgcagctgaatggtgctgacggtggagctcacagagctcctgctttttaaaggttggtacattctggaagggtgaactggggtagagtcacataatactggagggggtataatcaaaaacctaccaaaccccttctggcttgcccggggtgggagccggaaagaagtccaagtttggcaccgggcagaaggttatgttgctggtatctcccaaagcttactgcacttttgtantattaacaaacaaaag

SEQ ID NO: 445690 - DNA, 896 bp, Homo Sapiens
ttgcagaaccttgaaataaacatgttttacagtaagttcacacacaggcttaatgcaaaccagagtaatgcacagatgattgccaagaccatattgacaaattgtgattagattataacgcatagtagcctgccttacattcagcaagttcaaacaggacacaaaaccagtcaactgaacacagagcagctctcttcagaagcacttccaatgagtgatgcagagatttcaaaaatacaaagcaggcaacttatatacagcaaatcctcacactgcctggacatgtgccacttttttgttgtttttaatatatttttccttcctggttgctaatttagactgaattcttaaggatttatcttgatgacttagaaaaatacacctgtcctttctcactttgtttcaggtagtacagtcatgaaattgagtaagtctcttaaaaaaatgaaagtccacagatcccattgtggaaggtttcaggaacccctccccaggtaatgatcacgggatcttcaacagctcaaggagtgctccaacagctccaaaataaccctcgtgttccgaaaaaagtgctttcaactgccccttggaccaataatccaaagcatatgccaaaagccgcatggcgatcgtattaattctcaagaaatttccaacaaataccacctggttaatgttttcattaagggcacacattcttgctattgagccaatgttgttggtgatggtgatcaaagtcgctctggccaggtcctctttactgacagcctctcgcttctccttgctcatcatgtttccaaagcttgaagccacagcccagcctggcagtccaaacctctcatagtcccctccataaatatctcgtactagtttatccactttggtgctatctcccc

SEQ ID NO: 445691 - DNA, 438 bp, Homo Sapiens
  misc_feature (110)..(118): n is a, c, g, or t
  misc_feature (267)..(300): n is a, c, g, or t
  misc_feature (379)..(391): n is a, c, g, or t
aatgtatcacaatgagcaggaaacatacttgatgaaatattttcaaaggagtatattcaattaccatctacaatcaacttaactatgacaacaaagtttttgggacaaannnnnnnnncagtttgaaagttccatggggttctgtttgttagtctccatgtattttggtccagttcgagatcagcattgttacagtaacaaaaaagctaacaagactactttatagaaaaacaccaagaacatcatttttggtttcacttgctctannnnnnnnnnnnnnnnnnnnnnnnnnnnnnnnnngtacattgcaaaggctggtcatatacctcttcacctcaggggcacgttcatttatgctttctttcctacccaaacttgnnnnnnnnnnnnntgaagaaagtaaacaaacaaaaaactagtcaaagctttgtttcacag

SEQ ID NO: 445692 - DNA, 469 bp, Homo Sapiens
  misc_feature (142)..(216): n is a, c, g, or t
gaagtaaaaccagcactcaggcaaaagtttaatttctttcagcaaggtaatttacttttgcggaacggggccacttgtgtcaatcaaaatcacaagagcacagaaaacaaaggaaaccaggggattttaatccttaacacannnnnnnnnnnnnnnnnnnnnnnnnnnnnnnnnnnnnnnnnnnnnnnnnnnnnnnnnnnnnnnnnnnnnnnnnnngtacatattttcctaactatagaaggggagggggacatgagttacagaggtggagtgtgaggcgtgcagtttcgggggaacaatgggtacaggtaaccaagggaacagatgtgaattattgattaaagctgacgagaatggggtaggctgtttacagtaactaggggtaaggaagaacaagaaagttgaatttgagaacaaggataaggaagttagcaggctaaaccctttgaagagagactcagatttactg

SEQ ID NO: 445693 - DNA, 329 bp, Homo Sapiens
ttttttttcattctgcttttctttattgtctggctaacttacaaagatgcagatgtctagggtagtctctaccctaccacttacactatcctgatgacacagatagcaaaatgtgtctgtttacatagtgcatgatatgaaaaaaaagtttttcttcctctacggtccttgactataaggagggaaaaattaatttcatgccaacatttttggggaactttaacaatcatcccatttgtgttactaaaataacaaaactggtattacactttaaaatataaagacctaacagtttttacaaatatgcaaataatctactacttagacat

SEQ ID NO: 445694 - DNA, 516 bp, Homo Sapiens
  misc_feature (504)..(504): n is a, c, g, or t
gcggccgcggcgatcacggcggacaccacggcggcggcggggcccatctcctcgccgctgccgcccaaggaggcgccggcaccggccccggccgccgcggccagctgctgcgccccgcgcgcgtagccatcgaagccgccctggagctggtggctgttgctgatgagcgcctcgaccgcgtcctcggggctgaagcccagcgcctcggggttcagctgctgcgggtagccggtcatccagtagtagtcttccaggtgcgccttctgctcgctgcccgagcccgggctgggcgccgagaagctgggggaagggggcaccgagctgcacggcgtgctcatgggggtggaggacagcgagcccccggcgatgagacggccgcactggctgatgatgcggtcggtctccaccggttcctttttcacttcaaacttcatcagatcgaagtcattaacatattccatggccaggggactggtgggcaggttggagttgctcattgccagntctgatgccatt

SEQ ID NO: 445695 - DNA, 574 bp, Homo Sapiens
gctgacatgtcctccctctgatgtttctgcagtgttacctctttgaggatggaggtgtgagctatgactaaactggcaaatcctgtccccacctgcaaatggaaccacagccaaagggtctccctcgtccctgactctcaggcacagagcttttccccatcgtggatctgaagagcactcggaccctttagctgtggaagggattcacagaaggccaagaaagggttgggctgcgacctgtgacctcagaccttcgctggcttcaggactgggcttggcttccctccccggcgcaccttccgatgatgtccctgaaggaaacctggccccggggtgcagtctggtgctgcggcattggtcttctctgtggtgtggatcctctggtggtgcaagagggcagggcgctcacggaaggcgcggccacactgcgtgcacacgaagggcttctcgcccgtgtgaatgcgccggtggctgagcagcacggcgcccttggcgaaacccttgccacagtccacgcagcggaagggccgctcgcccgtgtgcaggagctggtgctgggtgaggttggagctgc

SEQ ID NO: 445696 - DNA, 459 bp, Homo Sapiens
tttggataaaaaggaatataaattttattgaaaaacaacaccagcaacaacatggagaaagcatactcaacagccaccggcccacacaactcaatgcacacattatgagaaggaatcacctttttcaattgccgactacttactccaaatgaaaagaaattatagacctaaaataaactgaggcgggcaatagaggcacaccatcttcgaaaattttgccaatagcaaatgatgtagtgatgctgttaaccctctgtttgctgcaggcagaccaggatatctcaggaattaattggtttggagaggagaaaacccactccttttagtgaacatggcatctaaaacctcagaccactgggaaaacttttctccttttcaagtcctttgagaagaggatttcacaaactttcttggcaacttgtccctcctgcttaacaacaggaaatagttctttatgtc

SEQ ID NO: 445697 - DNA, 420 bp, Homo Sapiens
tgggctcaagcagtcctcccctgggactgttttaagttggccttcttttcccccaaatgagctacaacatgacaggaaaaaaggaacatgtgcttttgggttgttctggtgaacagataactctaaggagggccctgtttgcctgaaaaggaagtgtgaaaccagaggattgcctccaatatccctttccattttaaatcactttttatagtgatgaaaacacttacgagaaaaacagacactgcctactggatcacatgcgttgtcagagagggcactctacgcttttagaggtagaccattgtgtggtatctctgtagggtaaggctctgtgcccatgcaggtttaggatgggtggcgcttccttcgccttctcaaaacaaacaccagatcaaaccccaaagcccaggaatttctcct

SEQ ID NO: 445698 - DNA, 694 bp, Homo Sapiens
tcttaaattatatttattatatgaaatacaaaatgtggaaaatttggaaattacagaaaaaccaaagatgaaaattacagtgactttgttccaccatacaaagataaccactcaacattttttagtatgccttccgtcttttttatctgctctacgtatacaagcatacacccatattttaaaaaacaaaattgaaatcacataacatgcactatttttacaaccttttaatattcaaggagcatttttctttcagtcagatgttcttttacatgacttttaatgtctgcgcggtactccaccatctggatggagatacaataatttacttaagcaatcccctattgcaaactttcgttacagcagaaaaggaataaattcccaaccaaaccattgcttcccatttttctccattgcaatgctgggatgaacatcttatcactaactaaatccttaagtattttcttaggataaattcccaaagatagaattcgtaggtcaaatgacatggaggcttttaggccacatgacacatatcacccaactgtcatccaggaagcctgcaccgatgtatactcccacacgcaatgtatgggaatgttttttcagtagtctctttgccaatattgggtcttatttttttctgttatggtttgctaagggaaaaatgcttccagctctatttgcctttctt

SEQ ID NO: 445699 - DNA, 439 bp, Homo Sapiens
tgggaaggtgggagcggaggcgctggccccgactcctaagctgtgcggaagtgaaaggggcgggagcggcggggaagggcgctggccgcgcgtgagaaccggcgcgggcgagccgggggcggggaggcgccgggagcaggtggtgcagcccgaggtgtgcgggaggggctggcatgtccgcatgttttgagattccgcgtgtgtgagggagggagggctggagcgcaggccggtgccgtctgggccgccctctctcccgggcgtgctctggaccgtctcgtcccctccgggcgcgtcatcctgctttcggaacccccgtgtcctagccccgggatccgttttgcgtctgcacttcaggccgcctggttgtcgctgctgcagctctcatacctcggtgcggggcgcggcgtctcccacctggacttccggcctcgtgccg

SEQ ID NO: 445700 - DNA, 2082 bp, Homo Sapiens
agcgaaagatagaggcaagagagctgcaataacgctggtagggaaggtgaggtgaatgtgctggataacctggcagcagctacagaccagctggtccagcagagagcaggatgtcagcacgctcatctcagatctccagcggaggttgaggggatcgtcagtagagatgctgcaggatgtgattgacgtcatgaaaaggagtgaaagctggacattgaagaagccaaaatctgtttccaagaaactaaagagtgtattccgagtaccagatctgagtgggatgctgcaagttcttaaagagctgacagatgtccagtactactgggtggacgtgatgctgaatccaggcagtgccacttcgaatgttgctatttctgtggatcagagacaagtgaaaactgtacgcacctgcacatttaagaattcaaatccatgtgatttttctgcttttggtgtcttcggctgccaatatttctcttcggggaaatattactgggaagtagatgtgtctggaaagattgcctggatcctgggcgtacacagtaaaataagtagtctgaataaaaggaagagctctgggtttgcttttgatccaagtgtaaattattcaaaagtttactccagatatagacctcaatatggctactgggttataggattacagaatacatgtgaatataatgcttttgaggactcctcctcttctgatcccaaggttttgactctctttatggctgtgcctccctgtcgtattggggttttcctagactatgaggcaggcattgtctcatttttcaatgtcacaaaccacggagcactcatctacaagttctctggatgtcgcttttctcgacctgcttatccgtatttcaatccttggaactgcctagtccccatgactgtgtgcccaccgagctcctgagtgttctcattcctttacccacttctgcatagtagcccttgtgctgagactcagattctgcacctgagttcatctctactgagaccatctcttcctttctttccccttcttttacttagaatgtctttgtattcatttgctagggcttccatagcaaagcatcatagattgctgatttaaactgtaattgtattgccgtactgtgggctggaaatcccaaatctagattccagcagagttggttctttctgaggtctgcaaggaagggctctgttccatgcctctctccttggcttgtagaaggcatcttgtccctatgactcttcacattgtctttatgtacatctctgtgcccaagttttccctttttattaagacaccagtcatactggctcagggcccaccgctaatgccttaatgaaatcattttaacattatattctctacaaagaccttatttccaaataagataatatttggaggtattgggaataaaaactccaacatataaatttgaggaaggcacgatttcactcataacaatcttaccctttcttgcaagagatgcttgtacattattttcctaataccttggtttcactagtagtaaacattattattttttttatatttgcaaaggaaacatatctaatccttcctatagaaagaacagtattgctgtaattccttttcttttcttcctcatttcctctgccccttaaaagattgaagaaagagaaacttgtcaactcatatccacgttatctagcaaagtacataagaatctatcactaagtaatgtatccttcagaatgtgttggtttaccagtgacaccccatattcatcacaaaattaaagcaagaagtccatagtaatttatttgctaatagtggatttttaatgctcagagtttctgaggtcaaattttatcttttcacttacaagctctatgatcttaaataatttacttaatgtattttggtgtattttcctcaaattaatattggtgttcaagactatatctaattcctctgatcactttgagaaacaaacttttattaaatgtaaggcacttttctatgaattttaaatataaaaataaatattgttctgattattactgaaaagatgtcagccatttcaatgtcttgggaaacaa

SEQ ID NO: 445701 - DNA, 482 bp, Homo Sapiens
  misc_feature (35)..(35): n is a, c, g, or t
acatgttactttgttttgtgctcgtggcgtttccnggttgtggagctgtcactagtaaagagtcgtgaacttcttcgaggcagtgcgtttgggggagatgtaatagtggggctcaatacctgaggtgttgtacttgtttgtggaccagaactttgtgtttgtgcaagaattggagttacctctcggctatttccactctgtgagaagacagactttgttccagtttggccgattctggcaacagacttttttgaaggggctccggtggatggcacatcaattacaggaggtgtattagtgtagttttgtaaataggatccatctccaggacttggggtttctaatggcaaaatcccaaaacttggggttaatggactaagagctgctggtcctcctaataaacttcgaccagtttttggtttattttgaacctgtttagataatatggaagttcctgttcccagtgggacagtatcaggtcc

SEQ ID NO: 445702 - DNA, 1746 bp, Homo Sapiens
  misc_feature (272)..(511): n is a, c, g, or t
tttgaaatttgaaatggcagatttattaagtatttttaagccatcaagttacaaaaggctattaggggtcttaaaaagacaaagagtatacaataaaacaataagcaattacagattgttttaggttgaacaatttttgtacagttatatctatagtacattactaatttacttagcaaactttatcctgagatttgcaaatttaaaaaaatgaagaatcaaactatattttcttttctgtttttttgaaacagagtctccactctgtcatnnnnnnnnnnnnnnnnnnnnnnnnnnnnnnnnnnnnnnnnnnnnnnnnnnnnnnnnnnnnnnnnnnnnnnnnnnnnnnnnnnnnnnnnnnnnnnnnnnnnnnnnnnnnnnnnnnnnnnnnnnnnnnnnnnnnnnnnnnnnnnnnnnnnnnnnnnnnnnnnnnnnnnnnnnnnnnnnnnnnnnnnnnnnnnnnnnnnnnnnnnnnnnnnnnnnnnnnnnnnnnnnnnnnnnnnnnnnnnnntgagccaccgtgcccggcctcaaactatattttctaattagtacagtaaatacacattaatcatgacacaattatttcttctggatacagcaggaaaaattaagttaagagaaagtgcttcatatttcttgatttgttataaaaaggagagatcctctagatttctgggtaagagggaaagctagcaatcccacaatgatttcctttatttcttgccatccgaatatatccttcttcaccaaagttgtggccccagctgtttttcacaagccagtattctttcccattaagatcaccatagccaaccacaagtacaccatgattcacattctgagtacaggatggttcatagtagacaccacttctgtagaggaagaaagaaggatgacgcgcatctacaccaacagacactgggcctttattggccacagcttctttcaggacatcttctctgccataaggaagttcagtgtactttgaacatgtggcagcacgatattttgagtcatattgacatttctgatccatggctttgtagggataggaagcgtctgagtcgatgccctttgttatcaatgatgtactggaaagccgttgtcatgaagccaccattgcagcctttgtttccatatttttcagttgagcaatccaccaggttctgggcactgagagacaccagctttcctgttttcagcttcagctgtgcttccagggcccccacagcactgaaagcccagcaagcaccacaagaaccttgatatttcacttcagtaacacaccctttctctctccagtccacagaatcaggcaatatccgattagggtttgacttatatgtgatatttctctgccactggctgggaactctcagggaactcatcaaagacatcacttcttcactggtcatgtctcccaggtggttcatgcccagatcgtatgagtgcattcccattgaatgctccaggttgtgaagcatcacaaactttagattcttttcccagatgagacgtcgtactgcttcttcattcttttccttgtattgtttgccataggttttcttccagagatgccagtggtgatccagggtaggatctttatgcaactgtgccactgcagaggagcacaccaagagcacacaaaccagccgtttcattgtgatagaaccagcagttgctcctacagtaagagtccttgaattagtgggctctcttctaagatttcaaagcaacaagccc

SEQ ID NO: 445703 - DNA, 596 bp, Homo Sapiens
aagaggcaatcacaataaatctttattcaaaaactcctatcaagtaagcaacaatgcgataaacaatttccaatcttcttagcccaaagaaacacactgagaattaaaatggctgataatatcagagatttgttttaaaatgctacctgcacagaaacttttcctaaatgttagaaaagaggcctacattagatgagcttcataccgtaaggtttttcttctgttaccttccccgtagaatctagtgtatcagtagctttccccagttctccaatggcagtatatctcttggaccctgacaacatactggtcaacatttttgttccgcttccaattccaacaaccagaactcctcgggctgcgctgtctagagtccctccatgcccaattttcaaagtctgctttttcctcttggtccattctggagaaggcattccagcttctgccagcagcttctccttcaaccgattcagcagctcggctgaagtgggccctttgggcttgtgcacggcgaacacgccgctcaaggacagcagcttggtagccaaagcggccttggagaccctggcttcggatccggtcctggccgcggccgc

SEQ ID NO: 445704 - DNA, 1857 bp, Homo Sapiens
  misc_feature (386)..(467): n is a, c, g, or t
  misc_feature (475)..(531): n is a, c, g, or t
  misc_feature (544)..(559): n is a, c, g, or t
  misc_feature (975)..(985): n is a, c, g, or t
ctttcaatgagcggcgcgcgggtggggtatttattttgcggtgcgcggtgtttttggtggtatgtagtctcggcggactcgttgactactgcgcgagtgtggcgatgtagcgtgactttctcgattggagggcagggtattagtagagaattaggggtttagtattaggcgcacgctgggaaggtgcggtgctaagtgggtagcgatagattgagaagagtgggggtctgcgtagggcggtttgttgtagccggagaggcgtcagatgcaggtattagggttgtaggggcggcggtgcggtatagggtatattcgcagttggtgccacatgatgggaaacggctcatgagggagtgggtgagtgggctgttgaggtaatgcgagcnnnnnnnnnnnnnnnnnnnnnnnnnnnnnnnnnnnnnnnnnnnnnnnnnnnnnnnnnnnnnnnnnnnnnnnnnnnnnnnnnntatgcgtnnnnnnnnnnnnnnnnnnnnnnnnnnnnnnnnnnnnnnnnnnnnnnnnnnnnnnnnncgaggttggattnnnnnnnnnnnnnnnnttgcgggaggggaatctcgaatgggttagggcgcgatagcagaggaatgtatgcgaagggggtgcggtgtaagcagatttaaagaatttcaataaaatgaagccaccaggaagcgtaaataaagtaaaaataacactaaattatggtcatttttgtgaaactaaagaaacatggagctcatacttttttctttgattaggaaatttgttcaactttttcacaagactgaagacagatcaaattcagaaagttaatttttctgaatccaatcatattcatattttcacaatacaaaaaatcctaaaacatttcacaacacagcaaacaactgagccaactgcaaggccatttataatgcatagaaaataaattatgtgctattgaaactgtaaatgatagacatttttcttcatgcnnnnnnnnnnngacatattgtttgtcttttgaatgcagcttgtcattctgcatctgcacacaggattcaaatgtcaactagaaaatgatgatattcccaggccaatctcgacacgtcttaattacatcatcttctctctttggctcatttagagttatatattcacagctcaaaacctgttcattagactcaggttttgattttttaagtgccaactctgctgggaaaagagatgagcaatgctcaagagactgtgcaatgtcatcaattgtccatttgtcttcaggaagggcatgttcttctagcgtaaatggtccctgtttggttcgggtcagctctagcacattggcacaggaagatagttcttttccaatgtcactgaccaagcttctgatataaaaacctcctccacattcaacatctaatgtgaaaaatggtggctggaatttttgaagggagatactgtatacagtcactggcctggcaggttttgcttctacgacttcacctctcttcatcaaagtcgaaagtctttgtccatctttctttaatgcagaatagagggggggcacttgcattatatttccagtaaatttctgtagaatgccttcaatatcttcttgtgttattttatcgtaaggtttttcttctgttaccctccccgtagaatctagtgtatcagtagctttccccagttctccaatggcagtatatctcttggaccctgacaacatactggtcaacatttttgttccgcttccaattccaacaaccagaactcctcgggctgcgctgtctagagtccctccatgcccaattttcaaagtctgctttttcctcttggtccattctggagaaggcattccagcttcactctactgag

SEQ ID NO: 445705 - DNA, 1847 bp, Homo Sapiens
ccattttttaattaggattttattaattatcttttcatctgttatagagatttaggcataaatgaatacagtggcaaattatacaagattttaaaatgataaatgaacatatattttctgacacattgtcagttcccaaatcatttacttttaaacacacttcaaattagtatcaagtgcttgattttaataactactttagtcacttgagaaactatggcactttaattattttgctgttagagccataaatttcacttaacttcataatctatgttaagagtattagcttaaaaatgtattttgaaaagattttacatacagatttaaaagatagtaccttgaaatggtttacagttaagcaaatgaaatatcacaaatacaagcagagctttgagatctgagttttgtaaatgctagaactttgtttcctaattttttagttcttcaaagaattaagaggctgcattatataattcattttagtatgtttacctcaagtacttttagaactagactgtatttttcactgccacagatgtatcatgcagggagtatcctggtttaaattctgaagtgctttcactcctacttggttcaccttgaaatcgtctaaaaagaagttggcacattattttgcgaatgttactggacatcaggaaatacatgactggatctaagcaactattgaaagatgagagaaccagcatgatctcattggttttgtgaacaatttctttccagtagcaagatgatacatttagcttgtgaagaaatgtaggatgaatcgaaagggcatgataggggaacaaaacatatagtaaaaatgataagtacaataaagggagttacgagctgtagtggcatatttaccagaatttaggaaattttgacctccttttagaaatcctcaatagattcttcccaatcttaatatatgaaaggattattagtaagaaaattagccagaacattaccacaagaatgaagttaaaaatggcttctccttttgcgttatgcttatctctgtaatggaaacacattgtggaattatgccctccgtttcttaagtgttaaaataatcatagttaggaatccaccaggagcaagcatccatactatacgacagacataaatactttgtttggttgttattgccttccgttgctgtatagaccgattaatttttatatagcgatccaaactgatgaatccaagcaaaataatgctaatgtacatgttcatataaaacagtgttcccacaaccttgcacagaatcacacctagtgtccacttgttttggttaatatgatacattattcggaaagggaggcagaagatgagtaggaggtctgcaatggctacgttaagtagataaatttgaatggaatttcttttacggtgaatacccagaaatacatagagggcgattatgttcccaaccagtcccacgatgaaaataacagagtaggatgtggttaacacagtagatagcaatttttcatccatgggacaggtagtaacatttggtgttgctgagaagttttgtggcggttggtcgctatgattggttataaagcgcattctgtgggaggagtaaggccagctgctgactgaagttgtcgtcattgttatggtatgacttctcattgtcttctgtggagatcaaaaagtgaaagtgctaaatgacatattcctcatgtgtagttcttatgtcttcaggtttttcctatttggtaatagtcgcaacctttcaccgtttttagtttgacttgataatgactgaatctattcagggcatgcttcaaaattgcattaaagttcaggttcgcctgaagtaaaaggag

SEQ ID NO: 445706 - DNA, 377 bp, Homo Sapiens
ttccagagtaggatgtggttaacacagtagatagcaatttttcatccatgggacaggtagtaacatttggtgttgctgagaagttttgtggcggttggtcgctatgattggttataaagcgcattctgtgggaggagtaaggccagctgctgactgaagttgtcgtcattgttatggtatgacttctcattgtcttctgtggagatcaaaaagtgaaagtgctaaatgacatattcctcatgtgtagttcttatgtcttcaggtttttcctacaacggaatgcccaacattgagtcatttgctattttaataacagttactttaactaaaagtgtaaataataggctgggcttcccagcacacgcctatggtcctag

SEQ ID NO: 445707 - DNA, 549 bp, Homo Sapiens
ttttttttacagactatttgtttattatgaaactaactggtaaagcagagtaaatcccattctatattatagcactacaaacatccttagtcattccttcatttgttcattcattcattcatgcattcagtgagtatttcttaagctcctacagtgtaccaggaggcactctgttcattgtggcattacaaagataaagattaaggcacgtactctgccctcaaggagctcccaatctaattgtgcagagagatgtgaaaatgaagcatgaaactccatcgtgaggagcgccgagaacaaaagtctgctcgaagtgaggcagaagtatggattcattccaccacaggtcccatgggaaaggtatgtggcatttctcctcctcttcagaataatgaatgcttgacatagctttcatcactgtctttcagttccagtgttacaagggggatccccagcactacagtgagtcgcagtgaacccagaaatgattagcattctctttattcatttatttatttatcaatccatttccgagacagggtctcactc

SEQ ID NO: 445708 - DNA, 1700 bp, Homo Sapiens
  misc_feature (655)..(655): n is a, c, g, or t
tgataagtacgaatgactcaagctaccattcaatattcactttacagatatatgaagcttgtctactcacgttcaaaggttttccttaattcgtcttttatctaaatcagtcaagtctcttctcataaatgagaaatattaaatgagtggcagctctcaagaaataaaaaagtgactagcagaaataatctgcaacttctgtgaataagatttttctcagtgtctaaaataacaaacaccatttatggaccaaagactaggtgccatgagttttagaaattggtccccactccactgttatgtgtaccattatcccagtggcagagatacacagaaagccaaggctcagaggcagtaagtcatgggtccgaggcctcttgctgatgacaaaactggaatctgaacccacgtcaggcttacatttacacatacatgtatacaaatgtacacatatacagcttagattccataaaatacagtaatctagtggtggaacaaattatttctaataaatgttataaaatataaacgcctctctgaatcctttagaaaattaattttgccatgaagtacaaaaaggaaagagatacaacttaagtatgaacaaagttataggatactacaaacagttggtaatatatactgtctttaaaanatcatttctcctttatcgaggccattaagccatattgtttataatgtgaaggagctattggcatcttattttcctacccataaccatgaccatcacttattcatcttttcatgcatccaggtgcatggaaaggcagtaagtacaatttttaagaaaatagcatcaaaagcagattttaaatctacctgtttttcttcgtttgttttctccaacagttaaggaaagtaatagtaatttctcattccaaaccaaagacaattatgctcctttgctaaggacacagctgtaagtctctacaagatcagggaagactacaatatttcagaaaaacactcccagtaaagtttatgcttgaatgggcagctggaaatgcatcgatgtacagggcctcttttcacggcctctaaaagtgcttgcatcatatgcccacactgtgtctatcccctcccccgtgacgtggtctggagtccaatgtgggaaagggaaccggcaagcaataactcgtgcatcatcctcaagttcacgttcaagtttcttctccaactgcagcatcatctgaggcacaccgaaaataacaacgttcgagtactgcgaaaaagtaaccttccacaaatctgaaatataaaatttggcagatccatgcacaccttctcgccaagcgcggtatctggaataccaaactagccatgggtttaattcataaccaactgctgtgaaccctttcttcgcagccgctatgacaatgcgtccgtccccactaccgatgtccacaagggatcctcttcggcatcgcaacattttcacaacattttcaatctgcttcgtagttgcaggtacaaacggcaaacagacttttcgaagggctggcgttacaaacggcgtggctacagcgtacacagccaccagggtgccacccacaagcccagtaagtaagaacccccagttgcttttctgcaaactgttgacttcaaaacttgcaggtagaacatgtcttgactgactttcttctttaagtgtttctaggggtatacctcctcctccctcc

SEQ ID NO: 445709 - DNA, 432 bp, Homo Sapiens
  misc_feature (70)..(70): n is a, c, g, or t
  misc_feature (111)..(111): n is a, c, g, or t
aagatcccatgccaacaccctttcctgcccaaagcgcgggtaatctgggaaatacccaaaactagcccangggtttaaattccataaacccaactgctgtgaaaccctttncttcgcagccgcctatgaacaatgccgtcccgtcccccactaccgatgtcccacaagggatccctccttcggcatcgcaacattttcacaacattttcaatctgccttcgtagttgcaggtacaaacggcaaacagacttttcgaagggctggcgttacaaacggcgtggctacagcgtacacagccaccagggtgccacccacaagcccagtaagtaagaacccccagttgcttttctgcaaactgttgacttcaaaacttgcaggtagaacatgtcttgactgactttcttctttaagtgtttgctcggggtatacctc

SEQ ID NO: 445710 - DNA, 436 bp, Homo Sapiens
  misc_feature (394)..(394): n is a, c, g, or t
  misc_feature (414)..(414): n is a, c, g, or t
gaccaatttttataagtttagttaaagatgtgaccatcttacttcattacatctccattaagacagtttggtatttcagttacaggtgtatgactgggagttcaattcttttctgtgataagtacgaatgactcaagctaccattcaatattcactttacagatatatgaagcttgtctactcacgttcaaaggttttccttaattcgtcttttatctaaatcaggtcaagtctcttctcataaatgaggaaatattaaatgagtgggcagctctcaaggaaataaaaaggtggactaggccggaaataatctggcaacttctgtggaatagggtttttctcggtgttctaaaattaacaaacacccttttgggggccaagggctggggtgccnggggttttgggaattggggnccccactccactgttatggtgg

SEQ ID NO: 445711 - DNA, 1204 bp, Homo Sapiens
  misc_feature (938)..(978): n is a, c, g, or t
actgatccagaagtgcagctgccgttctgacacccacattgacgttcatggctgcacaggtgggctccgtgccagaccaagccaggttggattgacatactcgggcagggctaccctggagctcatagccgccgatgcaggagaactcacaggtggctccataattatcaccgtcgctggagcacttcatgtaaccattctctggggcattgagtttgccacagcgtttgactcttactttaactcgaaatttgcaagtgcccttattctcagctctgtcataggctgtgtactggatcttggtggtctccttctggaaagttggagcctggggggaggccttttagaatgacatcagtaagaattccatctgctgtgtctcttccttcgggtgtctcccaggacacccggactgtcagtttgttgggttctgcaatgcgttccttcacacttgggcacttgattctaggaggttccatatccacacaggaggctggccggccgctccaggccttgttgtccatacatgtgacggtccgctcccctttcaacgtgtatcctggtgaacaataatactcacaccgggagttaaagtaggcaccatctacacacttaaaccctccatttgctggcatggcaagggtaggacatcgcttttgtttgcagatgaccttgtcagaccatcgtttgtttgactggcagatcagtagggaagagccatgcagctcgtagcccttctggcagcgaatgtcgcacctggttcccagggctgttttgtagtatcctccttgaggggccctgcagtacacatccccatacttcaccttgatgggggagcaccacggggtatctttatatctagggtgtgaatacccgacttcatcgtcttctagtggtgagtctcccgatcctgggaagctgcggctgggcgggacgcnnnnnnnnnnnnnnnnnnnnnnnnnnnnnnnnnnnnnnnnngcgggccgatgtgcgtggctccccatggcgagcgggcgcttagctcgcctcggcagcgcagcgcgcttcccgggggcggcaggagaccgaagagaccaagggactgcgtgctagcgggcgggcgaaggccggccgctctcgacgaattcgagctcggccgatttggcctgatccagtaagctgtcgtataagtgtagtgctagtggcgaaggtagtgcggccgcca

SEQ ID NO: 445712 - DNA, 642 bp, Homo Sapiens
ttttttttactgtgaaattctaaaatcatatttattcaccaattcacagaaagtgtcataacgaccaccaacatgaatcagtttgtaggcatttacaagccacagctgaaaataaaaatctgtctgtgttgaataggcatttaacaaattacttgaaaactgcaagaatcataattattataaatttaaagtttgtgattcaaacatgggtaagatcacagtcatggggagaagcccaacagattcctgtgatgatccttattttcttcctatatctttatatacatagagactctcagcgcccctcactctgtgtcagtctgaattggatatgacagctcagttaggcctgagagaggattctatgaaaaggagtggggaggggaaaggacattttctctgaccctctgtggctgggcaaccttgttgactgagaagacagtgcgctcttctgaaattagattcaattttctataaattcatacagtccttctaatgagatactccaaagtctgcattgtttcacactcatacacaatagtatatttatcaaataaacacattttctagactaaaaagattcattctttgaggcagcttgaagagctcagaagtctgatacatgtcaggtacacactggtc

SEQ ID NO: 445713 - DNA, 964 bp, Homo Sapiens
atttcttttattatgagtgaaagaatatttttacatgcgtaagagtgacttatttttgtctgctgaaaacatctcaattagtatagggacctagagcaaattatttaagctttctatgtctcagtttcctcacctgtaaattgagaataaacaatagtaagtaggattattggataattaaatgaaatgtatgtatggcactcagcacagtgcctggcacatggcaagcattcaataagttatgtgatggctaacaatcagaggagcaggtaggacagggcagattaaattaagaaagtagcattcacttccatgctccagtcacatggagccttgttcatttacattgccattcatcagagaagtacgaagtcagagctttccttgtcttttaatagtaaagagtcatttcccattggaacccatcataggctatcagcagagctggccagggagtaggcacagcctcatctctaatatttagacttagccaacatggtaaagaaatttaatctgatatgaaataaaaacaacagaagagaccagatgcacatttctttattccaccatggttctgaactcccagctagtttgggttggagtgagtctctgcttgtaagctcagaggaatgcctgccatcgttttctgaagggaaagggcagggggtttctgagtggaggggaaaaacaacattggaaatctggctgcttctgaacaagaccacactggaaaatagactttttacttttagcacatcaaactggttttcacaaaaggagatcccagaagaggtttgtttcctgtaagaagcagtgtttatgtaatagaggtctttgtagatgggtgctgtatcccatggcagcccgagctgctggtgcccacaggctatccctgggcggagtcagctactgaatattttctttagacgtataaagccatcccaagaattccggaccggtccag

SEQ ID NO: 445714 - DNA, 1133 bp, Homo Sapiens
agtagaataagtatccgagacatccaatgcgtgccaatgaggctggggggccgaatccgagtagagacaattggggtctgtgaatatggggagagtcgccgctgctattcttggtgtcccagggcggggaccgtgtttaccccctaatacccagggtttaccgcacaccctcgcctgaaaaatgccctgggtgttactgggggaaagccggggcgggccaaaccgaaaggtgggggccaggaaaattcggggggaaggttggagggggatggctccagccacgcggaaagggggcgggggccgtgggggttaggtcagcaagccccttggggggaggcttttcgggtgtcggggccgagcccccacacctggggcaaatcccacgaagaagagctggtggttggtgagccccacggctggcagttgctgctcctccccatgctttctcagccatgctttgtaagcattgtaggcagccttcagccccccgttgtcagcaatgttctcccccagcgtctggcggccgttgagcctctccccattgacctggtattgattgtactgttcctccatgcaggccgtgtggttccggaaggctgccagggactcattctgccaccagggccgcaggttcccttctttgtcatactcgcgcccttggtcatcaaaggcatgcgtcaactcatggcccatgaccacaccgatgccaccgaagttcagggccttggggtggttgcgggcatagaagggggcctgcaggatgccagcggggaagacgatctcattcttagttggaaggtagtaggcattcactgtctggggggtcatgctccactggtctcggctgggaggcttgcggagctggtcagccataaccttggcagagaagttgtacaaattcaacatgttttggaagaaagaatcttcagaaatttcgtacccgtcataaacatcatccagctctttgggctccaggataaagtctgggaaaccaatcatatcatagatggcatctgctttctccttggctgcctggcgggtcttctcatccatccaaaccagctgtcccagggcctcctcaaatgcggtccggatttcgctgatcatcccctcatcccgggaattccggaccg

SEQ ID NO: 445715 - DNA, 588 bp, Homo Sapiens
ttgttttttttaaaaagtctgtacaattgacaagacaatacaaactagctacgaatctgctagctacacattaggacattaacatagcccatggtttctgccctagaacaggcaattgtgctactccaactctctaagagagattttccagctcatgtcgtgtggcccaggtacctcctcttctgtaacttccacctctggaactgggcccgcaagcccaagctctatcttgtttacttttattttaggttcggcgtcacagagggtaactctgaggcttcaacttgtattcatcttcatatctgcttcaatggcacagtcggcgtccccttggttcctccatcctgtccaactgttggtccctataagaaaggcctttcctgcagactgaccctggcactagttccctagcacctcctgacagtaggttttaccatgagatcaggacaattagaaggcttctttccatactgctgctctctccctgcagcccagctccttcctcttgtgcaatattttgctgtaaagagagagagaaggaaggcaggagagcccattgggacactgtccttctctgaagcatcctgt

SEQ ID NO: 445716 - DNA, 589 bp, Homo Sapiens
cctttataggaatacacacacatttcactggtggttgttttttttaaaaagtctgtacaattgacaagacaatacaaactagctacgatctgctagctacacattaggacattaacatagcccatggtttctgccctaaaacaggcaattgtgctactccaactctctaagagagattttccagctcatgtcgtgtggcccaggtacctcctcttctgtaacttccacctctggaactgggcccgcaagcccaagctctatcttgtttacttttattttaggttcggctcaaagagggtaactctgaggcttcactttttcatcttcatatctgcttcaatggcacagcggcgtcccctggttcctccatcaaagagagagagaaggaaggcaggagagcccattgggacactgtccttctctgaagcatcctgtttgcgggtagaatctctccctcgaagacttttagcactgatcccagactcggatgtttgcataatcaactgcgtggccaagaattgctggatctgttccagacatctcgctgcatctccacttgcatgtgatagacatcatggtctgagctatt

SEQ ID NO: 445717 - DNA, 859 bp, Homo Sapiens
aatttgtaaataatagaaatttatttctcagagttctggaggttgagaagttcaagatcaagatgccggcagatttaatgcccagtgagagcttgttctctgcttcttgcttccaaaatggcacctgttgctgctgtgttttcattatttgtattattattggttaagtgtcccagtcctggatctgcactcttccttcttgtgctctgcttgttatagctctgcttgttcttgtgctctgcctgttatagctttaaaattttcttattctttcatcatattataagcacagtctcatgtcccagtaggattgtagctcattgaagacatggatcttgtcatattatttttgcatcaccttgctaactccggaggctgtacagtcatgctaatgagctgctggacaatggcagtttttgttctccagagaaaagctacaatgcagtgggagcctcggcaagttcaggtcagctcttctctgagactaagcttcggaattctcaaaataccacttagcagggagacggacttggatgcaaattcctcctggtgctgaacatgtcctgaatgaatgagaagaggacaaattacacagccgagccccaaattcccacaatgcttgttcagtgaaaaaagagccgctgggggtttccttccagaggtcttcaaatggacttgcactgcttcttcagctctgccctcaaactctacaggtccaaaagcaaatgcatgatccttcctcctcaagcctggtcttctttcagcattctttaactcagggaatggggtcacctttcatcaaacaatgcaagccagaaaatgtggaattattgacatctctctttccatcaccataagc

SEQ ID NO: 445718 - DNA, 604 bp, Homo Sapiens
tgagcataatgaattgatttaattaacagggggaatctgaggggccctgggaaatgcagccttcactctgctgaggcgagtacggccggcgcggaggaaggacgcgcgcgcggctcaggctccggctgcggcccggcccgggcagctgctgctcgcgaggctcccgcgatcccggcctggccgtctcgcccccgcgccttccccccagtccctcctcctgcgctccctgcccgcggggctgcgctccggactccggtccgtctgcccccgtcggcggtcgcggctctccggactcggcgcccgcgcggggccggcgggagcagcgcaggcggccggcggcgggagtcggagccacgcgcccctccgtatcctcggcgctagtccggctggagccgtcgggaccatggtgttggaccaggaggacggtaggtgcccggcgcccggtgccggtgcccgggggcacgcgggacgtggggcggagactgcggcgctggccctgcggagtccaccccgctagcggcggcagagccctcagcacccgcgggcctcctccggctgatgggtggcttcccggaagcgcggcggctgatgtgtgcgccggtgc

SEQ ID NO: 445719 - DNA, 628 bp, Homo Sapiens
ggtgcccacagatcctgcaggtgcaggggtgagggtgccgtcaaaccagcactgtctctgcggtctggcactccgtagctgcgggatggctgacaattgtctccgcccctggcagggctagggagggaactgccatcagttcacccagcctggcatgttgggaggtgccacgctggctggggtaggtgggtgggccatctagtccaaaatatcaggttcaactagaggcggttttaccttgaaggtaatgaagtttagggtccttcaggttccttcagctgccaggtccttggtggtaatttggtattagtagtcttgtagtccttttcttaaagagccccacgcccaaactacagtaagctttggacctcacaaaatttccatccatccctgggtccaactcctaccctttccactgccagtctcttggaagaactcacagctctggctgacccagagaccatccgccgaggctgggacaatcccttagtgcctgaaggacgaagtgctggggcaggaggctggaaggtttggggttgagaggcaacttctgggctgcagggaaagggtctggctgcctggccttcctctctggcccagctagtcccttgacccatcccctcgtgcc

SEQ ID NO: 445720 - DNA, 744 bp, Homo Sapiens
agcggggggttattgccccaggctgctactggcacaagccacagaccagcagtcccagcccagggaagctcggaagatgcctaggagggcctcaaggctcatccacaacatggacctgcgcacaatgacacagtcgctggtgactctggcggaggacaacatagccttcttctcgagccagggtcctggggaaacggcccagcggctgtcaggcgtttttgccggtgtacgggagcaggcgctggggctggagccggccctgggccgcctgctgggtgtggcgcacctctttgacctggacccagagacaccggccaacgggtaccgcagcctagtgcacacagcccgctgctgcctggcgcacctcctgcacaaatcccgctatgtggcctccaaccgccgcagcatcttcttccgcaccagccacaacctggccgagctggaggcctacctggctgccctcacccagctccgcgctctggtctactacgcccagcgcctgctggttaccaatcggccgggggtactcttctttgagggcgacgaggggctcaccgccgacttcctccgggagtatgtcacgctgcataagggatgcttctatgtgccgctgcctgggcttccagttcacgcctgccatccggccattcctgcagaccatctccattgggctggtgtccttcggggagcactacaaacgcaacgagacaggcctcagtgtggccgccagctctctcttcacca

SEQ ID NO: 445721 - DNA, 789 bp, Homo Sapiens
cagggagtgaagctaggcttcaaaggaaaatctggttataaagtgatgtcaggatacagtgggacgtcgccacatgagaaaaccagtgctcggaatcacagacactaccaggatacagcctcaaggctcatccacaacatggacctgcgcacaatgacacagtcgctggtgactctggcggaggacaacatagccttcttctcgagccagggtcctggggaaacggcccagcggctgtcaggcgtttttgccggtgtacgggagcaggcgctggggctggagccggccctgggccgcctgctgggtgtggcgcacctctttgacctggacccagagacaccggccaacgggtaccgcagcctagtgcacacagcccgctgctgcctggcgcacctcctgcacaaatcccgctatgtggcctccaaccgccgcagcatcttcttccgcaccagccacaacctggccgagctggaggcctacctggctgccctcacccagctccgcgctctggtctactacgcccagcgcctgctggttaccaatcggccgggggtactcttctttgagggcgacgaggggctcaccgccgacttcctccgggagtatgtcacgctgcataagggatgcttctatggccgctgcctgggcttccagttcacgcctgccatccggccattcctgcagaccatctccattgggctggtgtccttcggggagcactacaaacgcaacgagacaggcctcagtgtggccgccagctctctcttcaccagcggccgtctagagtat

SEQ ID NO: 445722 - DNA, 1547 bp, Homo Sapiens
agcaatgtcactccagccctggactcccgaaggcctgtccaggcagaggacggaccaaaaagggagctgggtaggagacagaatggtttggctcctgtcccagactctgccactcacaagcatgtgctcatgtgagccacgtcatccattttggttgttcccatctctaaaacaggaggaatagctgtccccccactttttaagggtttgcgatgacgcgatgggaaagaagcacttggaaaggggttccacaagtgtgatgtggttcccctcacacctcagaggggagttccaattcgtacaaggccccgtgagcgcgcggagaccggcagcagcccggaaggaacctcgtacatcctacggggcagtggggacagcgtggactggcccactgccacaggggagttgggggggtccgcggactggcccattgccgcttgcggggacaacgggatgatccattgtgagaagggggtgatgtgacagccgagaggcccaccctgtgcctgggactagctgacgcccggatcggcttgggagcagagtccggtatgcgggcttcgtggaccagggttcccgctcggattccgtattcgctgtgtgaccaagggcaacggatgccctcagtgtttcccacctggggaatgcttcaagcgccgatgttcagggctccagcgctcttgagaggataagggggaaggaggttagcaggtgttactcaaagaggaagtctagcgcctcaaggctcatccacaacatggacctgcgcacaatgacacagtcgctggtgactctggcggaggacaacatagccttcttctcgagccagggtcctggggaaacggcccagcggctgtcaggcgtttttgccggtgtacgggagcaggcgctggggctggagccggccctgggccgcctgctgggtgtggcgcacctctttgacctggacccagagacaccggccaacgggtaccgcagcctagtgcacacagcccgctgctgcctggcgcacctcctgcacaaatcccgctatgtggcctccaaccgccgcagcatcttcttccgcaccagccacaacctggccgagctggaggcctacctggctgccctcacccagctccgcgctctggtctactacgcccagcgcctgctggttaccaatcggccgggggtactcttctttgagggcgacgagggggctcaccggccgacttcctccgggagtatgtcacgctgcataaaggatgctttctatggccgctgccctggggctttccagttcacgcctgcccatcccggccatttcctgcagacccatcctccatttgggctggtggtccctttcgggggagcacctaccaaacgcaaccgagaacagggccctccaatggtgggcccgcccagcttcttctccttcaccagaggggcccggctccttaaaggtattcccttcccaaggggggccccaaggttttaccccggtaaccccagctttttcctttgggaccaaaaggggggcccccccaaataggggggaggccgtaata

SEQ ID NO: 445723 - DNA, 579 bp, Homo Sapiens
cagaggatcaaggggcccaaattcgcagaaaaggggagggtctaagatgagcagtcaccctgccaagaggtgtctgcctcaacattagtggcgtataacaatcccatgaggtagctttaacctcataggtaatgaccctaagaggtaggaaattcagtgcctggtccctcagcaggaaatgacacagccaagacttgaaccaggcttgtgtgatgctgcactagccaccgggtcatcccatcagccaagtccagcccacagctaccatcccagactccagcaggttacaggtccatcgagaggcatttctcaaaatcagcaatccggtgtttgcccggtacaccaggaaatgagtatcccagcttcacagggacactgactggaaggaaggaagacttctctgaaggagcacagagctctagaaaccagagaagtttcctctgagccccttgggtctgaggctgccaggttcacactgcagatacttgtctcagggcaggagaggaggctcatttgcatatacttgccaaaaatcacaagcagacatctagagatccccaggagaagctgcctcgtgcc

SEQ ID NO: 445724 - DNA, 687 bp, Homo Sapiens
ctctagtaaaaatgtttgaggaaacaaaaatggggaagaagatcagaacaaaaatattgttaacactggccgtcctcatgcaggtgggctactaccaacgctggttgttactccaggaaaatcgaggtgaacattattacatttaaggtcgccaaacccataatcaacaggttaaaaaatcctacattacaaagcatctgatcacttatcagttggtgttctggaatagtttgcctagctccctctgggctgctacagctcagattcacaagtagaaattacatttacacaacttaagtttgcaaatagctctccataaatagttaaaccaggcctaaccatccagtagttttaaagtattagaggcaattaaatagtgatttattctagctataagtaaaggtttaaaaagaggagagatgatttcagagaaggaatagcagtgatttggtttataaacagcatatttattgtgctctaattcaggtgcgagaagcttcgccaatttagcattgcacaagtgttggttttttataaatgctataaaattgtttcctgtcaacattttcttatactgaaaacacaacacaatttataataccttgaaaaatatattcaattcacatcaattcttgaatctctcactggaaggaatgtttgtccctcaactaagattccggaacaccc

SEQ ID NO: 445725 - DNA, 573 bp, Homo Sapiens
  misc_feature (73)..(73): n is a, c, g, or t
  misc_feature (79)..(79): n is a, c, g, or t
  misc_feature (81)..(81): n is a, c, g, or t
  misc_feature (518)..(518): n is a, c, g, or t
gttgggaaaattgtttttattttaaaatggaaatggaaatataatatacaggaaaagcttgtgctttcctttntttttntnacttcgcataaacaataataatgcaatccaggtcaaagcacgaggcagaaactcgagaaaagaacagttattaaaggtacatggtcttcttttcaaatatccatgaaaacatttaacgacgggatggctagtacctatagaaagctccaaagcaataatctggcctttaagtttcgacgggactattttgaatcttagatttatcagtcactcctttcccattctacttgttctaagaattaagtatataattaaaataaaaaggccacatcctgactttaaatctccactctcctaaaaacctgtttggaggaaacaaaaatggggaagaagatcagaacaaaaatattgttaacactgggccgtcctcatgcaggtgggctactaccaacgctgggttggttactccagggaaatcgagggtggacattattacnttttatatccaccaaccccttatccacagggttaaaatcccacattccaaggact

SEQ ID NO: 445726 - DNA, 531 bp, Homo Sapiens
tttcaaaatttccaggaatttattggaaacacaatacaaattggttagtagatggcatctccttacagacagacaatccacactgtggtatcatgctcagaacgaattatcctgcggaaacactcatgagcacaggtgcgtgctctgggtgggccctgagagatggaaactgggctgtgcacaaggggaattgtgaagggcaggctgaaaccttccggcgacaccctccagtcggccctcctctcttgcgcacctttaagaagtgaagggtgggcaggcgatgactgagccagagggggagatggcctgcagagcctgtgtcctcaccccaggggcatgtctgctgggggctgcgcagacagtctctgcacgtccacccatgtgctcactgaaccacagtgacatgccactgacacacagcagggacaccatggccccagaaagggagcgggtggctgggttgcccctcactcccctgttttgcctctcagcttttcttgttttgtgttaaacaaatctctgcctcgtgcc

SEQ ID NO: 445727 - DNA, 474 bp, Homo Sapiens
taaaatttccaggaatttattggaaacacaatacaaattggttagtagatggcatctccttacagacagacaatccacactgtggtatcatgctcagaacgaattatcctgcggaaacactcatgagcacaggtgcgtgctctgggttagcttccctggcagggaaaatcagagacatagtgcagaggaacaggaggggtggacagaaaactgggacatggccttcctggggggaatggtgaggaggggctgctaactgagtaaattcccccaaaggaaaacagggacaacagtaaagaataaaggcttccccctccctccccaaagccgtttcctctctaggcagagtaaaacagaatctccaaacacccacggggcagctcctccacctcccctcgccagggacttaggacagcagtggggcataaacaccaggctcagacatgacaccgagtgcactgaggccacgcacag

SEQ ID NO: 445728 - DNA, 612 bp, Homo Sapiens
  misc_feature (494)..(494): n is a, c, g, or t
ggcaggctgaaaccttccggcgacaccctccagtcggccctcctctcttgcgcacctttaagaagtgaagggtgggcaggcgatgactgagccagagggggagatggcctgcagagcctgtgtcctcaccccaggggcatgtctgctgggggctgcgcagacagtctctgcacgtccacccatgtgctcactgaaccacagtgacatgccactgacacacagcagggacaccatggccccagaaagggagcgggtggctgggaaaccctctcagcaccaaatgcttccaacggcaaagggcacagactagaggcgcctcggcacccttcctccattgcctgggggattctgtcagaacgagggggcagtttccagagacaaagggagagcgtgaagtctcagtcaacatcaccctcctaggatgactggactacagaaccacgagctttacttacaagaggaaggaaaagcctgcttggcacacgtggctcganacaatgcgcttttcccaaagccaaatgtcaactgggtagataggaggggcctcccttctcctgcttcagacctggcctgactcctgtctccaaatctcttgggcctgggtgagagggc

SEQ ID NO: 445729 - DNA, 532 bp, Homo Sapiens
taaggtttttttggctttaataaaatttatttgggaatctcattgtctaatcaaagaaaaaatacacacaatcatttcacagacacaataaagataaaaaaaagtaacaccaatgcctgccttagaagtttaccagtaatttctttcatatacatacatattaacagactggtgagagtcctttttcacaattttttagatgagggtcaatgtctaaaactctctaaggaaacatatggtcacagaagatagactttatcatgacttccagcaatatcttctttctctcaacttcattgctgtttacttaggaagacagaaaagcctattttcatctgctttatctaagattctatggatcacttgagatttaaccccaagaatatgctgacaggagtgaggttctcacatgtctactctaaaggtgtgaggagaagctgacactttacattgccgttttatagtcacctgtcttggtttgtcagtatatcacaaatatccccattcctattaaaatgtaacacaatcctga

SEQ ID NO: 445730 - DNA, 1124 bp, Homo Sapiens
tccaaggttgagcttgctttatggatgacaagtgggctaggctgggctgtcgggggcaggacgaagattctggctgaactttccaagggacgggacgcttgggatcctggctggtacgaggcctcccacactgtcaaatgtcaactccaccagcactgagacaatggcattacgagcaacattgggagaggtccctttccagaggccccggaacccttcctctcgggcaatggtcttgtaggcattgacggtgctttggtatctccgaccacctccagcccgggcctgagcttggaatcggacctttaccacatccgtgggctgggccacagccacagccagggcacctgtggtgctgcctgctaggaggcggctcccaatgctggcatgctcagagcccttggtgtagaactgtttgacagaatcatacaggccgatgcggacagaggcaaagctcatttggcgctgcaggccggcaaccagcccattgtagaggcttcgggggccctcagtacgcaccatggtcagaatggtgcccatcacaccgcggtactgggcgctggctgtagcgcgcactggcccctgactttctccttggatctgtaaccggactttagcagtatccagaggaaaggtgatgagatctgcgatgcaggcagctgtgccagccccaagaaacttcacagtggcagtagggggcacatctgtggccttgaacccaaccatgatgctgatttcctgctacgtcccaggagatggagaaaaactggagacaggggcacctttaatcagcaacaagacgagatagaggaactctgccggaatccggctttgtaaggtctcacggtgaggcctccaagatcaagcttctctaaaggtgtcccgttcttcaaagctgccagtggctatcatggcccgatccccttggttttccatagaaaatgggtgggagacgaaacacctaatggtcatactatgtgtccgagccgcagggagaacacggcagtgcgtgcggctgtgtctgtcggctggcggagggcgcgtcggacgagccgggcgagcgtggacagtcaatcccaaggcgcgcgcagctgggccctcgtgccgaattcgccacccaggcc

SEQ ID NO: 445731 - DNA, 1189 bp, Homo Sapiens
  misc_feature (187)..(282): n is a, c, g, or t
atcaaggttgagcttgctttatggatgacaagtgggctaggctgggctgtcgggggcaggacgaagattctggctgaactttccaagggacgggacgcttgggatcctggctggtacgaggcctcccacactgtcaaatgtcaactccaccagcactgagacaatgagtagatgagaatgtagaaannnnnnnnnnnnnnnnnnnnnnnnnnnnnnnnnnnnnnnnnnnnnnnnnnnnnnnnnnnnnnnnnnnnnnnnnnnnnnnnnnnnnnnnnnnnnnnngcatggcccggctagagacaaagccagaggtgatcaggtcagcagcaggagaggctcagaagggagcctctcgggaagtgcaggcagccatgagggctcgtttcagctgctcataggtgacgaacatcaccacgttccaggaacccaagcggagaaaggagggcatgaaccctttgtagaaggctcggggcccctccttctggagcatggtaagggcacagtggccagcgctactgtactggcccagggcagagttcatgtatctcgtcttgaccacgtctacaggggaggcgatgacagtggtgcagaagcctgccccaaaggcagaagtgaagtggcaagggaggtcatctgtcatgaggttggctttcaggagggcatccttgatgaggtcataggtcaccagctcagcacagttgacaatggcattacgagcaacattgggagaggtccctttccagaggccccggaacccttcctctcgggcaatggtcttgtaggcattgacggtgctttggtatctccgaccacctccagcccgggcctgagcttggaatcggacctttaccacatccgtgggctgggccacagccacagccagggcacctgtggtgctgcctgctaggaggcggctcccaatgctggcatgctcagagcccttggtgtagaactgtttgacagaatcatacaggccgatgcggacagaggcaaagctcatttggcgctgcaggccggcaaccagcccattgtagaggcttcgggggccctcagtacgcaccatggtcagaatggtgcccatcacaccgcggtactgggcgctgactgtagcgcgcactggcccctgactttctccttggatctgcaaggccaagacagggtagctacagggataagcatgttgcccccc

SEQ ID NO: 445732 - DNA, 487 bp, Homo Sapiens
  misc_feature (232)..(295): n is a, c, g, or t
gttgtgtgttttgtgttttcaaggttgagcttgctttatggatgacaagtgggctaggctgggctgtcgggggcaggacgaagattctggctgaactttccaagggacgggacgcttgggatcctggctggtacgaggcctcccacactgtcaaatgtcaactccaccagcactgagacaatgagtagatgagaatgtagaaagagggaaggtggtaggtaaaggagcggannnnnnnnnnnnnnnnnnnnnnnnnnnnnnnnnnnnnnnnnnnnnnnnnnnnnnnnnnnnnnnngaaagcatggcccggctagagacaagccagaggtgatcaggtcagcagcaggagaggctcagaagggagcctctcgggaagtgcaggcagccatgagggctcgtttcagctgctcataggtgacgaacatcaccacgttccaggaacccaagcggagaaaggagggcatgaaccctttgtagaaggctcggg

SEQ ID NO: 445733 - DNA, 341 bp, Homo Sapiens
acgaggcagtggtgggcaccattctgaccatggtgcgtactgagggcccccgaagcctctacaatgggctggttgccggcctgcagcgccaaatgagctttgcctctgtccgcatcggcctgtatgattctgtcaaacagttctacaccaagggctctgagcatgccagcattgggagccgcctcctagcaggcagcaccacaggtgccctggctgtggctgtggcccagcccacggatgtggtaaaggtccgattccaagctctggctttgtctctagccgggccatgctatccttttcttccgtctgtctcgttcaaatccttccggtctctccgtcgc

SEQ ID NO: 445734 - DNA, 653 bp, Homo Sapiens
tcacataaaaacatcatttattgttagaaatcatgacatgatacaaagtcaaaatccacttgtgtcttgctaaagactacagaaagccatgctcagcagcttcttctccaatgctggccagcagcgtacctttccaagtcacaaagcagttcatcccgccctcaaggagccgacaggcagcccagagcctcccactgacaagtgtggtcacccactcaagatactgggaaagatccctgttctagcatcacattttaatcagatttgtcaaaatcaggttgcttggggcaaaggctctttcaccgaggatgctagtcctggaagacttctccttcggcgagccgccagctcaatcttctgaaccaggctcacatcccagggatgggtcacaaaactgatgacggtgcctggcacttcgctccccacacggcccactctccctgctctgtggatgtaatcttgcagcgttggggggaaatcataattgacaaccagctccacaccagtgctgtccaggccccgagaggctatgtctgtgcagagaagtatgtctcgggagctcttctggaaggactggaagattcctaccctcatcaaggctggcatttgcccctgcaaccttaggtgttggattttgtggtcatccagaatat

SEQ ID NO: 445735 - DNA, 563 bp, Homo Sapiens
ggcacgagggtttttttcttttggaacacaaggtttagtccatcactcactcacttttccacttttgataagatgtaaatattgagaactatttctcttctccagtagaagaagagcaacaggccatgtgtgatggtaaatggcagctgacacttgcgacagtatcaagaaggcactaaggaatggtgagaaggatgacttgccctttctaaagtggcatctcagcttgagtctgcagaatgccttgcaaatccagctcagtactgctagataatccatattgacaagagaagctaaagattcagattttctatgtgaagtttcctggttttaaaatgttagcaacaaattccaaatttttacagaacactgtacaggccagaaagaacaatctgtgtgctaccagtttacaattagctatgcttcttcctcctcagacctggcatgccctttccacccccttgcctttgctcttagtaccccgtgtacactccaacctcttccacctacaaatttctaaatgcacagttcaaatgttagttcttcagattcctgtctctgta

SEQ ID NO: 445736 - DNA, 621 bp, Homo Sapiens
gtcgcagctgttttaattcaatcccacgcccctgtccagcaggaaaccccttatagaaaacccaaatcctcatcttggagtttctccttcagccagggcagcacttgaaagaggttgatgtgaaagtctcgggcgtgagcaggtacctgcttttgccgcttctggtttttgcagacatccactactccccagctgattacaccaacttgaatgaaacgacttctcttgtgaactatcaaggggccgccagaatcacctctgcaagtattggggtcagcatagggactcactcctccagtacaaaggaaccgaggggtgaccacctctgagatgtccttgactttgtcatagcctggggcatattgagcatctctctcacagctgcctttcttatccccattcttgatgtagacctccttccgagtcagctttttctcctcctcagacacaaacagagctttgatatcctgtgcagggagcagctcttccttttgttgctggcaagtggtagttggaggaagcctcaaagctcgagttgttccctcggtgcaggggagacaaatgggcctgatagtctggccatatttcagcttattcttgagcttgatcagggcaacgtca

SEQ ID NO: 445737 - DNA, 2157 bp, Homo Sapiens
  misc_feature (433)..(446): n is a, c, g, or t
acctcttaatatttaattaatttcatcatgtagctatacacacagtaaaaattaaagccatgtatattatttaaaaatctaaagtgtttaaataattctaccagttgttttatcactggacaagaaatgtattaggtttgatatttacaaagatgtttatgttgtctgctattttctattataggtttattcaaagagaatatcacctatagcataaataattaaatttttcaataaaaacaaactaaaaaaaccctagaaacatttgacatcaccaaattcaacagctctcactagaaatccaagcaataaacttagatatttgaaataaacataaattatgattatataactctaagtcacatacataattttgaattatagtaatagcactgtaaacatgaatacaaaggattacagttttatacagaannnnnnnnnnnnnncttcttttaggcttatttctccttgaaagaacagaatgatcttttaaaaaataagaggttatatagtaaatccagaaaaaaaattcaaatagctgtgaaactagatttttcctataaatgatcttgaatttagtttacaatcaagtatttatagtattaaaaacccaaaatcatcacatagaacttgatatgtctgttttcaaatgtgtcttaagtctctccattgaagtgtgaattaagatgccgaaggaattcccccctggatgtaatggatggtgggaaaactgcttgacagaattcacatactggaggtatatgcagttctgagtctgtgccacttagtgccaccgagtcactgtcttgattaggaaagggcttccaactgggctgctgtggtcctcggattgcttttcccggggaatcgagtgagggaaaaggtgcatcagatgggtccagagagtgggaagctatttacatataatgcattatggtctccaggtggcaaacacgcagctctatccagagttgtcctgatacaagtgtttacgagatttgagggctttgttttgtcagttgttttaaggttttgtatagctgaagctatggggtcaattccctgaatttcaaataaagtttcttctgttttaacaaagttccctgggttgtctctgaactccatattaaatttctcttggcacactgcctcagacgtggcaggactaaggatgccgggtctctctggagtgctatgtaagaaagttgagtcattgtccataggtggaaacttgacattgaatttagaaagtgattcaaaagaggtgtcttcctcatctctgcacagtcctcttggtgtgacagatgtgatggatggtgcacctctatttatatcatctttagcctgaggcttaaacagccgcttcttggtttatctgttttatccgtacagctgtataggcacagagacactgtgtttcagttgcagtgtctggtatattaagtttgcttaagtggtctttctgtgcttttgctagcatgcatattttatgaaattcttctttcagatcccagaaagtcttctctatattacccctttcatggagcaaaggactgccaagactccttgctgaagtttcttttctaggagaagaaacctcttgtcttcttacctttggtagtttttctcttgctattcctgaaatcactttatcttgtggctgatcaagagtcaaattattctttcttgtttcactgtcttcaagcagaggaacacagccataattgttatcttgagtggaattcacaagaagtaactgagattttagcttgtcaataatagtctgttgaagtgacagctgttcctgttgttcacgtattctctgctcatagttctcagtcttttgctgtaattcttttactgcagaatctctatccatgcatgcttgccggaagggtttcatacgctttattgagttgctcgccaatgtttttatccattcctcttcgtcctgtagcatcactataaaggatgggagtaaatgacaggtacagtttcacgctttcagctgcgttccctctcccctcagttcgccggcgcctggccgagtgactccaaccggaagttgcattttgttccagttcagagggcagtgcctgcgcgcggagccattaactcttcacctccacccacaaggccagggcccttccgcccgct

SEQ ID NO: 445738 - DNA, 1133 bp, Homo Sapiens
ttacaactttaaaaaatggtttatttttttctttaacaaaatcgtacagctttctcaatccccaaattaaaaaaacagaaaacaggaagaaagggaagaaggcaaaggccacacgcacaggccggcccggccgcacgcgcctgctggacggcacttcagggcacaacccacacgcgtttttggacttgcagacattccgcgaggcttctggcctctcgaaggcaaagcttttcagcgatttcattaatatttcattacgctgagatgagatgaaggcagatgctacagaaatatgtcagttaaagccacagaaacagaacagcttaagaagggctgggcgcccagctcgtcacgacacttacagctctggcgtcatcagaagcctctatcatctccctctgcaaagacgcagtctacacccagtgcgagtctcctgagcggggttagtgtttgggagtgggaggcagctgctagtcagagttgggtccttagggcgcagtgcttcacggaaacgcacagacgtctatggcagacgctctcagacacgtgtgcagaagcgacgtggcttctgtctggtaggggtttggactgttgggaggagtatgagggacaaagcaggccgctggctcagcatcagcttgttggaaaagggtcacaggcaggggagcgcctgactccagcggtgtcctttctgccctcacacttcagtgctgcttcccatcagtgacggggctgacgagaaaccgtgaggcccaggtgacaagcaggctcaggacatgcgacaccgtcttcgggatgctgctttccgctaagctgctgtctgggaaagtcaaccgtctatgtcccaaatcaatcaactcagtgacacaggtactattatttctcacaaatgccaattaaatcctttaagttgaatagaaatctgggttggattaagtgggaaaacccttccttagtttacattttctttttctcaggtgttttcattgaggctactcaggaaaccggtcaggctgcccaggacacctggaacctgggctatgccaggcctgtctgccacagccctgcctgccccgcttccacacaggaagagaggctgaggcgctcctcgtgccgaattcgccacccaggcc

SEQ ID NO: 445739 - DNA, 1018 bp, Homo Sapiens
ctggtttttgtttcatttatttaaataaatataaatataaattttatataaacctattcacatacaaagggacttccagcgacttagattttaaattctccccaggcgaaatttcagaaagcaagacctacaaggtctaattttctaaattattttcaacttgggtgtttttgtttgaaaacgacaacagaaaataatcaataaatcctgtgttcttatcgagttctgaaagagagtagggatggggaactgacatgtgctttcaaaaaccccatacagtgttaaacttaaaccaaccctgtttttcctctgttatacgacaagaatgagttgaattataggttatttacattttttaaaaaaatctgtaacttcaagttggagtcctagataaacaggtcaagaaggagacgcgaagggtcaggtcccggcttgtccattccagaacttccaggttcgtttcttctccagatgggaccactgcaatgagcaaggattctggcccctgggtgccccacgccttggcgttgcctggtctgccaggagcgggggatgtgagggaggaggccctccctcataagggggaaatctccttgtcatcgttggctgaggccggcgacagggagtcctcatcctcggagcgcgcgtagtgcacctggctcccgacgcacttgcagcccgcgtgactgttcctctgcgtgcccttcccctccttcttgtgcttcactcggcggttctgaaaccagattttcacctgcttctccgacaggttcaggtaagtggcgatttcaatcctccggagtcgagacaggtacatgttggaagagaattctctctccagctccaggagttgcgtgctagtgaacgccgtcctcatcctcttgccattgggtacctggctggcgtcagagcctcccatggtgaggcagtggaatctccgcgggtccgccacgttgtaggtggtggcggtgcagacaggtgcgtggtgctgcgggtgccccaaggccgccgcggccgc

SEQ ID NO: 445740 - DNA, 528 bp, Homo Sapiens
agtgagcccgcatcacatgagaagttcccctattcgtgggagattcttgtatacgaaaaacccccttccgggttgcccgccccgcggcgcggtttattttaatgtgggggagagaattccccaaagtccctttagttccaggatcccgggaattttccttaggggaaaacaagtttatgggccccagggttcccttacccttaatgggggccccgggggcccaaaaggaatggtttaggaaaagctttttcgaggggccgaaggcggccgaccatgtttatctttctttccgcgccgcgcggttttttccaagtaaatatatgaaactttaatatgtttgcatctgaaacatacaaaggcctaaagataaagtcaatatgtaactaaaattctctaaatgtatcttcattattataaagttaagtctttagtcaaaaattcaagctctaaaaatacagtctcaaaaaatcacatatctacatataatactaagacaagtaaattgtcggccaggcacagtggctcacg

SEQ ID NO: 445741 - DNA, 697 bp, Homo Sapiens
cactgcagcgtaaatggcttgattcctcctcttaattttctttctttgttcaggttcatgttcatcactcagcctcttcaatggcaccttggttaagtcctctccattccctgactccacagtcccaccaggtttcccctctctatcaattgtggaatccaccgtatcatcagaagatacaatcatagagcctggcaggatcctgacatcagagaaacttgcagaaaactcagaagcttgatcagaaggttctaccgatggtgtattcatgccactatgtgcacttacaatactatcttcatcttcttcttcatctaacattatttcatctggattaaatagaagacagagcagatgtgtctgtattatattcactctggtcttctccagagtctttactctccacatcatcctgttcttcatattcaccacacacatgatgttcttccttggacttctgaagcctaacattgatgtctatgatgccaagttgggcacaaaattcagttgtctgaggattgatcctatgaatcagctgcatttgtgtctgtggcttgctaggatcataacaagcagctgttacactaaagttacatggaaccttgagatcatgattcaatttttccaatacttctttcataccttcttctgttgcactataatcccaccttgcatgcaggccattattttctggcat

SEQ ID NO: 445742 - DNA, 1340 bp, Homo Sapiens
aaaaataaatttatttttatttggtaataggaaaattattcaaaccaaataagaaaaaatatacagtactgtatatgcaaattgaaacactgtcaaataaaacacattataatacatctaggaaactctacaaaaaattaggaagcccatttagaaattaatagaattaaggacaagtaattaaagcaaactcaaatcaataacattcttatttatttatttaattcccttgaaagtctcatatacaccactaagtagtcacattcacaaacttaatttttataaattcagcagcagtcttaggaatcctaggagaagaagaactccataaaaatgcaactgtaatagtcagtgagagaggtgaatttctgctccattcaatagtccaggtcttcatcaaggtatcttaaaggctgaactcactgggttataaattcccattttccttttcagtgtggctcagaatggcctcctgaggaattcattaggtccagatcatctgcattcaggcaagaattcatctcccggtattgaatttggtggactaagttctctcctcttgaggaaactgcaagccgctgtctctgtcttcgctttttagtcaagaagaataatgcgacgaaaatggccaacagaacaaccccaaggatcccgactgcaataaaggatgactgacgggatgagcgacctgttgtggctttttgtggggttttctgcactgaaatatctgtgcaattcactgcagcgtcttccttgtgcccacactcactatggccccagcgtctggcaggacaatcccacaaggaagactcattccctttgcacttcacttcattgagccatatcggtccagtcccctgaccaaactctgcttctttgaatgctttcaaagctggaccacagccaagttgttgacacaccacctgagcatcgtccaagtcccaagagtcatcacacactgtcccccaggaacctccatgccagatctccacacgtccagaacaggaagtgggtccttcctgaagtcttatcttgttgtcacatgtgatccaggtctcctccgaggggctggccagtctcttctcccatggagatgatgggcactgccacagcgtgtcaggtccttttggacactgaacattgtccacccacatgggaatggacatggccttgtctaaagatgcagggttgattttccctttgtctgcacagcccagctgcctgcacaccacacccacagtggtttcagacatgctactcttgccaacagtgccccaagctccattgtaaaaaacttccagacgccctgcacaggcctctctgctggcttcattggtcag

SEQ ID NO: 445743 - DNA, 557 bp, Homo Sapiens
ttttacatgatggtgagttgtgtaattatttcaatacgcatttcaatgtaataataatataaataaagtacacaataatcatcccgaatccacccccgctactccatctgtggaaaaattgtcttccatgaaaccagtctctgatgccaaaagggttggagaccgctgctttaagtcaataaggaaaacccggatgaaccgtttagccaagaccagcatccacagagagtggctccaggtgcaatgtcatgcaaagctaaaacccactgggtcttcttgagacagtgcaggtgtagtgggattcagacgctggtcccctacctggagtccttctcattggcatttgtccactgctaccgaggaacactcctgtgcttgtttctgcagcagacactgtgccaagggcttggtactcatcatctccttaaatcctcacaataggctgtgatcgaggtgattatgcccatttcagaagataaggaagggactctgagaggtaagtttttaaatgaaaatcaataatcagctccatcagcttcagctgtaacacagatagc

SEQ ID NO: 445744 - DNA, 535 bp, Homo Sapiens
gggaagagaagtacctttttaatagatatataaattatagttatttaacttagaaaacaataactttagtgtttctagaaagtagatggcatttctaaaaaatagttacatacacttgataaagaacagacattccttctgaatttagaactttatgagttattgttataattagtaaggctaaattttaacacaaaggactataataaaacattctttgaatattaaaataattcccccaaaacctatattaagctttacaaatttcagacaagtcattccatctgaaactctgtccaagatatacatggctgtgagtaatgtgtttctgtgaaagtcttttggatgaaaataatgaactttgggttttagaatatttgatttactgcctttgggttcctctgctgcctgtttctcttgctaaatattcagactgagactttactatgactaatcttactccattcttggacgttctgcctctgcagtggggaaggagaccctcctggattatggtgaatatttagctctgaat

SEQ ID NO: 445745 - DNA, 756 bp, Homo Sapiens
tcagcgacctgtgcacagtggccggatcaggggtgggggcctgtcatcctgggcgctcctttctctgacgaagtaactgtatgcagctcccaattgctacttcctgaagcacctgcttttcagggaaccagtgtctttcttggtttaaaaaataaataagtaaatattgggggacctcttaaaacacttaatacttttcagagcctcaaaggcaaaattcacctggctttgaagccaaatctgtatggtgctgagaatgaaatctgtccgtctaagatgacaataagaccttccagggaaccaggcagaaaggtgggcaggtacagtggccaatttcccagagaagatcctcaatatctgacttttgagagaatttaaatattcattcttcaaattaaggaatacaagtgaacaacctgaaaagatttttagaagctcattagctgtgtgttatttgaacgcaaaaatgaggaagagatatgagcaggaaacaggagagtataggaaggcaggccagggtgcagccaggccccagcaggggcagagcgggaagcagcgagcggaaagcaggggagagacaccgagaagctgcagtgtagacaaccaaaccctttattgtctaagttacattagacgcaacactgtaaaaaatcctgttaagaaacaaggaaacagcagatcgggagaggtagtagaaagtctgtaacagtcagaagacaacgtacagaagtgtatcatgcagaaattaccattcgg

SEQ ID NO: 445746 - DNA, 532 bp, Homo Sapiens
tttttctgaactccaagatgtttttatttatttcaaattccaatagaatgaatatgttttatctaaatatttttatcacacaactaaaacattgaattactttttcagaaatagttaaatacatcaatctagttacaaattctaatataaagagtacaaaatataatgttataaattgtattttaaaaaaagaaatacaaattctatggtcttttgcattttactgcctcaaagcagaattagcaaagctgatgaagaatgaacattttcccttgggcgggtggcccttggtcactcccacaggcacgttaccgggctccggcgtgtgctcccaccaaccacggcaaacaaaggcgtcctcctcacttgaagtcctggcctgtggttgtttcatctgtttttttgctcagtgaacaaaacgttctgaaattagaactcaccaaagttaaaagcagtaaaacaacatatgctacttaagacattttgaagcggaaagtaaagctatgtgaatgccgtccttccttccttcctt

SEQ ID NO: 445747 - DNA, 1308 bp, Homo Sapiens
ggcctgggtggcgaattcggcacgaggcatggctctaacgcggccggtgcggctcttttccctcgtgactcggttgctcctggcgccgcgacggggcctcacggtccgcagtcccgacgaacccctgccggtggtgcgcatcccagtggctctacagcggcagttggaacagcggcagagcaggcggcggaacctcccgaggccggtgctggttcgacccggaccgctgctggtttcggcgcggcggccggagttgaaccagccggcgcgcctcacactgggccgttgggagcgcgcgccgctagcctctcaaggctggaagagtcgacgcgcgcgtcgggaccacttctccatcgagcgcgcgcaacaggaggcgccagcggtgcgaaagctctcgtctaagggcagctttgctgacctgggcctggagccccgtgtgctgcacgcactacaggaggctgcgcctgaagtcgttcagcccacaaccgtgcagtctagcaccatcccctcactacttcgcggccgccatgtcgtttgcgccgcagaaaccggcagtggcaagactctcagctacctcctgccgctgcttcaacggctcttgggccagccaagcctggactcccttcctatccccgcgccccgaggcctggtccttgttccttcccgagaattggcccaacaggtgcgggctgtggcccaacccttgggccgctccttgggcctgctggtgcgggacctggagggaggccacggcatgcgtaggatcaggctgcagctgtccagacagccttcagcagatgtgcttgtggccactccaggggctctgtggaaggccctgaaaagtcgactgatcagtctggagcaactctccttcttggtgttggatgaggcagacacactgctggatgaaagcttcctggaactggtggactacatcttagagaagagccacatagcagaaggcccagctgacttggaagaccccttcaatcccaaagctcagttagtgctggtaggagccacatttcccgaaggtgtaggccagttgctgaataaagtcgccagcccagatgctgtcaccaccatcaccagctccaagctccactgtatcatgcctcatgtgaaacagacatttctgagactgaagggagcagataggtggcccaactggtgccattctccagcatcggacagaacaaaaaggactgtccttaagaccctgttctgtgtctgaatagcttccagcctggaactggctggaattttctgatgacacaaaatccacccctaggtgcaagggcaatgccg

SEQ ID NO: 445748 - DNA, 895 bp, Homo Sapiens
  misc_feature (183)..(193): n is a, c, g, or t
  misc_feature (474)..(508): n is a, c, g, or t
ttagtggaaaactccaaagccaaggttttttattactggtcaaaaggtgctcgctaacaaaacagtgttggggagaggtacattccacagctctgtaggagccccagtggggccatcctgccccaccccgccccgcctctccagtgggcattgtaaggcatttcacacattggtgttttcacnnnnnnnnnnnatatatataaaaacaaaaccagtcctggagtagaaagaaagaccctgtgatgaacttttaggactaaactgaaatggaaaggattggagtgtgggattctgaggggctgggtcagtggccatggtggtccagccccccatggttggcagaagccgctggaagggggcatgaggagagggaagggcacagctcacatgagggccaaactcagacaggtgcacccgtcttcatcattttttcacttttacatactgtagaaatttaagcaaaatagctatttnnnnnnnnnnnnnnnnnnnnnnnnnnnnnnnnnnnaattaggcaaataaagagttcaggggacactgagatggggcacccctaggggcctcctaggatgaggagggatgcaaggtctctggtgcccaggtcaccagcccaggctgggccaagggtttgttcattattgctgatttggggcctgggtctcagggcggggagcacctgcaggccctgccttccagcccttcctggcctcttggggctagggagccacccaggctggctagggtgaggccagggactgctgccctcaaatccacatgggggttaccatcagtaccccctcctgcatctgtggatgggagctccagaaactctcccgctctgctgggctggggcagcccccttctgttttgggctctgtggggccttggcaggtgg

SEQ ID NO: 445749 - DNA, 704 bp, Homo Sapiens
tcccagaatgtgaattttaatttcaaaaaattctggaggttggaaggaggagtgatcaggagaaggtatttactctgttctaaatactgagtggaggctcctcctctcccagtcagagaaggagaaaagaagtgaaatgtaagggcgaagaagcggatgaactgtcacagctaagactcctaacataaaagaattgccaagttaggtcagcatttagattcagcagaagtatcagcagaaccagctcccagaaagtacagaggcagaaagagatggcagagtcagagatggagaaaaaagtggaaataataagggacttcccaccctctgtccatctacctttagcacacatcccttggcttttccccagacccagccaagaaatggctgcatctgagaccctagtcacactcctacacagtccatttctgaaaatttgggagcaatctcctccttatcaactgaaaatgaaatgggctggaaactacaaaagaattgcaaattaggatggtgctaaagagctctaattagtaaattaggattagagctaaggagtttccaaatttaggcaggtctttaaactagaataggtgggaaagaggcaagacatacatccagagggctctctcaacatttcttgttaacacagtgtcacatcctgctctcccaagaccccctgctcctgattcattttaaggctaatt

SEQ ID NO: 445750 - DNA, 329 bp, Homo Sapiens
aaggtctcattctgttgcacaggctggagtacatacttgatcacagctcaatgcagccttgacttcccggggtccagtgatcctcccacctcagccccccaagtagctgatattatagcacataccaccatggctggcaaattaaattttttgtagagatggtgtctccctatgttgcccaggctagttttaaactcctgggcttaagcgatcctcccacctcagcctcccaaagtgctgagttactccactcaacctcattcctgctcttgattcttttagccactaactttgccatgcatgctattgatattgtctttcctcgtgcc

SEQ ID NO: 445751 - DNA, 900 bp, Homo Sapiens
  misc_feature (821)..(857): n is a, c, g, or t
gtctctttgtaacttgttttcttggtttttcggtaactgatttagtcagtctttcttgcccccttcaataagatttgtgctgctccagcaagtgacttctttttagatatcaattgcaacgtctgaggattctgttttggaggaagtgcatcctgagagacaggatcaagagtcataaattttttatccctaacaatactgagaacatcatagagaacacacatctctgtcagggcacttctcaaattgttcctcactgagtcccaaggccaaagggaaggctgaaattttaccactccttcctcgtcgtcctggtctgcgctggacccggcgcccggccagtcctgcgcgtccccctcggtccccgccgcctcctcctcctcggagcccgaaccctggctgaagtctatccgctgggccagacgcgccagattctgcgacatggacagcgggggcaggtacgtctcggtgccatccaggcccacctcatggacctgcttctcgcaggccgattcgatgctgatccgcactgcgcgcaccccggacatgctggctgcgtcggccagcggtgggaggaccccccacgagccaaaaaacgaggtacgaagaggaggcttccctgcggagagccgggaactcagaagcccgcagccgcggtgcctcagaagaccctcgggaaaccgaacgcaacgctcagactggaaacaaaggagctggcccagcaactttcccagaacgcaccgcaagctccctcctcggtaagtctttcggagcaaaactccgctctcgacgaattcgagctcggccgatttggcctgatnnnnnnnnnnnnnnnnnnnnnnnnnnnnnnnnnnnnncgccgccaccgcgataagcgcggtccccatatgatgaacattc

SEQ ID NO: 445752 - DNA, 538 bp, Homo Sapiens
  misc_feature (300)..(317): n is a, c, g, or t
gggtgattggaaatattggggctgtatgtttggttttggttttctgtgagagggagtaaagccagcctgcctttatgcccctattttaaaactggaaggcatcttattgttactttattgatgcagtatcttcttgaatctttatgaaaatagaagtaagagcttccgatgagttctgttctgagccatagctttttttattctgggattattattttctttgttcatctttgcatatcccttccatattttaggttctttttaaatgtctgttcatccttggttgcccactcacatttnnnnnnnnnnnnnnnnnntctgactgtgggctgtatgtacatgggtaagccttcattttcaggtgaccaaaagaggaattgcctactatacattaagatccccagaggccaaagatcttcaagtattcagtgggctatatcctctgagatgccgagctgtttgtgaactgaagtacaaaactctggtgctgaatttggaagaccctgaggattgttgagcaggtgtgtacatacctggc

SEQ ID NO: 445753 - DNA, 439 bp, Homo Sapiens
  misc_feature (336)..(386): n is a, c, g, or t
ctaaatgctttaattttttgtcacaaatatttctgcatctctcagtcccttcttgttggaaaaaggagggctagtgatacatttgttaatggcacttttaaaatgtgctttggtatatagaggtaacaatgtacttcttaggtatgttaataataaattaaggttataatggttgccatattagagaaaatgaataagattagtctcagcaaaaataaaaattagtttggaagtagataagctagaaatatcaaaactgaaaaaaatagcttcccagatagcgttctactatgtgcaattttttgaggaataatattcaattacagagtgtaatannnnnnnnnnnnnnnnnnnnnnnnnnnnnnnnnnnnnnnnnnnnnnnnnnntttattacttattaaacaaattactgagtaatcttccttagtaatcatttctg

SEQ ID NO: 445754 - DNA, 747 bp, Homo Sapiens
aatgtacaaagcaatgcaatttattttaaattggttctgaggatggtaaaattcttctgaacatggaaccaaattcactctgctttgactttaaccattagtcctaggtgcaccctgtggaatttggcagaaaaggcccaatcgccctttagagggtgaactgaagcctgttcctgcaatgttctaaggagtgcccctccaccagccatctgttcaagctcaacatctgcagttgctctagtcatttctaaagttacctggttcccagattgttcctcatactggtcaccttccagaatagtgtgacctcctattttttggacactgtatttctattgatggggctgggaccacagtagcactcatgtcacactgttggcccaggtaaactgagatttccaggtctctgattttgtaatggaggagctatttgttgtaactcttgttagagcttaaaccttattttattaaatttcgtcttgttactttgaacccatctctggaattgccaagatcttttgggatcccatttctgtcatccatcacattagataacctttcctcccttggttcatcagcaaatctttaagtggggattataaatcttttccaagattaggaaaagacactttgatttgctaatagccagtctcatgacatgtctcattttagtaactatatttgagtataaattgtccgcagaaacaccattcattactttacctagttattcctcctcctcgtgcc

SEQ ID NO: 445755 - DNA, 577 bp, Homo Sapiens
tttttttaaaatgaacaaaataaagctttatttgaactccctcccctacagatcattcagatgcccgggaccatgtccaggttcctctcagcaacatggaaagctaagccatttcacaaacgcacaactgtagctacactacagccccccatgcccagggcacagctttgttgctaagcctgtaacaaaagaccaccactcagtatttgtgtaccctgcagccaacaccacctcctgggcttcacaggttcactcacccaagaggccagcacaaccacgaccgagtgggtactcagtggcccagacaccccccgaacactggcactgccacaaggccctgaagggtagactgtggggcaaagaggacaaactctccctcccctaagggacccggctcactgggcctccttcccctgccaaccgccagcccctgcatgcctagcagggaggtaagcacccactggcgtcgtgatttccattatcttgctaatgttgacagcacctaagtcacattaaaacaaagagagactggatccagacctccaagtctcatcattggacctcagtggttctcact

SEQ ID NO: 445756 - DNA, 1341 bp, Homo Sapiens
aaaaaagggttcaaaaaggtttttcttggggggaggggttttaaagttaagaaaaagggcccggagacgggggagttccatccggccaggttggggaccaaaaataagggccccaaattccttttccacaggggggcgggaaatgatttttgcccgtgtacaattttcaggcaatgggtgggaaagaggattattggccaaaaccgggccaaaagtgttgggctttgccaaactcccaggggctttcagggtgaacccttcaagggataggaaaccctgggtggggggatgaaagtgtaggggaaaaaagagactagtttagatggtatctctgtgttgggaggggccatggcatatggaggggagggcagagaagaacacagtgggtcaggctttgggagacagagatgagcgaggagctgggctctgaagggaggtcttcttccaggcaaggactgcagctagacatagaagcagagccagatccaggctactctggacccctccaccatgacttccttcagcacttcctgtctagagctcacattgatgtctaaccatgcactgtcttctcactaagacatagtcacgtcatcagatatttccactcttcccatccatcttgctgggcatagtagcacaagtgttaatattcagtaggtatcagttggtacctgttgaattcatcacattcaatacatagttctgaatgcctactacatgctaggtacttcggcccaccaaaagaacacagggtgcagaccaaggctggtggaaaaattaaggtgatgaagagaaccagaaagtatttgagatggggagctggtatcaaggggaattattcagtgtacagatcaatgaggttaatgcagccctcctcccttcactccccagaaaactcctgacctctggacaccgggattttcccatcaagttttggccctatttgctggatcatccactcgcagaactctttgtcaaataaaatggcaggagcatctccctgttcctgagcccagtcagcaaattcgggcaggcgaggcacccgagtgttctgggaaaagtcgaagaagaaaagctggtcctcgtcgtaggcctcagagagtcccacactgggactcccatcctggcagtacactgtgtgcaggaatgtgtggttttgcaggtcatctggccacattggagtaggagcttcagggacggcccaggagtggggtagcagccacagaagtggtaacatctgtagcagcgcagctccttggttctgttcatgacccataccttcttgccacacagtaggtaggagctaccaacccagccaacccagcttccccaactccc

SEQ ID NO: 445757 - DNA, 1296 bp, Homo Sapiens
  misc_feature (187)..(187): n is a, c, g, or t
tgggggagaatttcaaggccacttgttcatgggcccagggtttcttccttggaaaaccagttgatgacccatgttccacttaccttactggggccccgcggcgcccaaacggaatggtttggaaaggtttttcggggggccgaggcgggccaacaggggggaaaaaagggataaaataatttttttntaagaaatgagatttattgccttgtggggggaagggatgtggttgtgataggcaggccactctgggatccctgggatgcaagcccagggacagcagagtccccaggtgggaaatctacacacacaccccagggatgtcccagagacttcttctaccctaagaggagatcctgggcaggatgtgagaaatctgagcatcctctgtttggatggccgaagctgctggcatcaaactctggtctggaagaatcagtcacctgagcaaggcttccggaagtagatgatgagaacaatgcccacgatgatgcccagcacacccaggccaaaggccacgccacacagcacattctccagcagatctgagggcagtgcgttccggggtacccaataggcaattgctgtgtagcggtcaatttcgtgagtcacaatgcaggagaaaatgtcagaaggttctggtgtgaagtttaagtaagaaaaggcctggaagctgagtccatcgacagctgagacaaaagtaggcccaaatccttccacagggacggaatgatgctgccagttcactgtcagcatgggtgggaagagattactgacaaaacagaccaaagtgttgggcttgccaaactccaggggcttcagcgtgaacacttcagcgataggaaaccctctggacaccgggattttcccatcaagttttggccctatttgctggatcatccactcgcagaactctttgtcaaataaaatggcaggagcatctccctgttcctgagcccagtcagcaaattcgggcaggcgaggcacccgagtgttctgggaaaagtcgaagaagaaaagctggtcctcgtcgtaggcctcagagagtcccacactgggactcccatcctggcagtacactgtgtgcaggaatgtgtggttttgcaggtcatctggccacattggagtaggagcttcagggacggcccaggagtggggtagcagccacagaagtggtaacatctgtagcagcgcagctccttggttctgttcatgacccataccttcttgccacacagtaggtaggagctaccaacccagccaacccagcttccccaactccctccccgagagccc

SEQ ID NO: 445758 - DNA, 889 bp, Homo Sapiens
ggccttccccggaaagttaagattagttgaggaaccaatggccccacggatggatggccccagcaccacccagggcccaaaagggccaccgccaacacaggccacatttttccagccagatctggagggccagtgcgttcccgggggtaccccaaatagggcaatttgctgtgtaggcggtcaaatttcgtggagtcacaattgcagggagaaaaatgtcagaagggttctgggtgtgaggtttaagtaagaaaaaggcctggaagctgagtccatcgacagctgagacaaaagtaggcccaaatctttccacagggacggaatgatgctgccagttcactgtcagcatgggtgggaagagattactgacaaaacagaccaaagtgttgggcttgccaaactccaggggcttcagcgtgaacacttcagcgataggaaaccctctggacaccgggattttcccatcaagttttggccctatttgctggatcatccactcgcagaactctttgtcaaataaaatggcaggagcatctccctgttcctgagcccagtcagcaaattcgggcaggcgaggcacccgagtgttctgggaaaagtcgaagaagaaaagctggtcctcgtcgtaggcctcagagagtcccacactgggactcccatcctggcagtacactgtgtgcaggaatgtgtggttttgcaggtcatctggccacattggagtaggagcttcagggacggcccaggagtggggtagcagccacagaagtggtaacatctgtagcagcgcagctccttggttctgttcatgacccataccttcttgccacacagtaggtaggagctaccaacccagccaacccagcttccccaactccctccccgagagccc

SEQ ID NO: 445759 - DNA, 1206 bp, Homo Sapiens
  misc_feature (686)..(709): n is a, c, g, or t
ttttttttgagacagagctcctgctgttttaaagtgcacatgttataaagtacacaaagtacaagtgtgtaatacatactgttaaagtcaatgtttaatttgtgacacaattatagaaagtcaaatattgactgggtatttgataatataaacaaaatactgttaatgatattagagttttattttgaataaaagaatatgttttagaaatacatagtgaaatatggatagatgatgtgacatttgggatttgcttcaaaattacctagatcagggtgcggcggataggttgggggttacagatcgggagttagcaaattttttctataaagcgctacacaaagtaattattttaggttttgcaagccatagagtctgctgcaattactcaactctgccaatgaagtacaaaaacagccaaaaacaataagtcaacaaatatgtgtggctgtgttccaataaaaccttatttacaaaaacagtcagagggccggattttgtccacaggccatcatagtgtgccgactagtttgtacagatgaaacaaaacccgccatgagttgataatttttgaagctaaatgttgagtatgtgggggtttgtaacattattctctctatatctatttgaaattttccataataataagaacattttcataattttcataacaaaacacttaaccnnnnnnnnnnnnnnnnnnnnnnnnctaatttgagaagtccatgtttaactttggtaacttcatttgacttcaagtcaaagtggaaaacacagtgagtcctgatgatgacaggttatgagtttcatcctccaggaggtacggaaaaaaggaaaactcaagcattctactggaaaactggagctaaaagcagcccatccatggagaattatgggaccagaagatgaggtgggatgtgtgtggcacacgcctgacagctgaaccaaacagggcacacgggctctcctaagagtccctacttccgacagcctttccctccacaaactcagggcaggggaagtgtgcatattttatacaggagcccttcatggctactttactgggaggtgattctttcttggagaggaatacatccccttttgaaagctctcgggaccaggagacacatgtggaaagaactttctgtccctggcagacagggaaccaaaccccttctccttgaacttggacagtctcctcgtgcc

SEQ ID NO: 445760 - DNA, 762 bp, Homo Sapiens
aggtttggaacgttctccgatagaacgacctttactcccttgaagtcacttatctggtcgtgcctttgttttcggggttatctgggcgaggttgccctggcttctatctcgcatacaaaaaaagctcaagcttgggcgtttgaggaatcgtaccaccgcctccgcgtcgtgggggaggatgccttttgattctccctccgttccctcccgccgcgtgggtcgaaccctacgaattccttggaattgacagctgagccccaaaccctgcgcccaaggcgagaggccagtgtcgggaggaaacgatcctgccggcgagggaaagggggcgctgatgctccaggaaccagacctgggcagagtggggcttcccagcgacagcgggggaggggagcgcgttcaccttcatcgctctctgatttttgaattctcctgttggggttgggggtcatccttcatccttctccctcaaccccaccccaacacacgcactctgaaaatggccaaagtggccaggttgggactggcatgtccaacagccgtctcctccttcaccaggagggtggacacagtgcagtggacaggggagagtcacagagaagtactccaacgggcgcggtgctgtgcctaaccaggacaggatcttgggatgtcagcctcgaaaacagggcgcctggggctgcgctgggggtcccattgccgcagttcttctacgcgacccgctctcgtgcatcttcagcttgggtgactgcaccgcctcgtgcc

SEQ ID NO: 445761 - DNA, 1615 bp, Homo Sapiens
ttcactgtgaaaaaaaataaatctattttcttgccttccagggcagccaaccagtcagaatgcctctcatttaggcctgcaagtcccatccaagggaaatgtgtggagatgcaagaaggcaacaccaaggggaccttatcaatagccctgtcccctgcccgcctccaaagtccccccacaaagtatgaaggaagccccacctgggggtctccaggaagtcgaggctggcctctgaggttccacagaaaagcaagatgggggagtgaaggggccggctggaacttgatgctccaacctccagagtttcgaggcacagcaagacaggttcagtaatgtccttccctccagagagcgggccttaatttatggactggtactctgagtacttcttgtggtgcagcagcagaaccaagccgccccctagcagtcatgagccctggggcacccagggccactgccatgatgcccaggactagtggggacaagccgtccactggagggaagcccacacccaggagcatcgaccagctgaggtagtgttggtcccaatagccagggcctgtggaagccccgaacgttcagatttgaaggcacagaacgttattctgggacccaaagaaggctcggacaatgggtgactgggcgaagagcagtatgctcaaggcaggcatgaacgaggggaagcttggcagggcagggctgattctcggcccccacggcttctgggagtaagccactggtcgccactgtgcaaagcctgatgggagggagccccacagtagctggtccaactggaagacggccggtgcatattcatcgtcgatggagttgctgctcctgcattgaggggcagtcagggccctggccccaatgtggctacctccagccccaaacagggaacggtttccccggggagaggctccaatcagggccacctctagctgacaggtgtctgctgtgtgcaggaggcgagggggttgggctggtcggctggacctggaaaaggcctggaccctgaaggccaggctgccattggcaaaagtcctggtaggtcgttcatggggtggccttgaaatgtggcactcagggtggcaggatccaatgaatcagtgatgttgttccaagagaaatcggccaaggagtatggaggatatggtcttcccaaaggctttgctgccgtatcggacacgttggtgctgtcaaactcaagcagcctggtaaaaacaagggcagaagaaaactgaatgctgtccttagggagcaccatcaggcccccatcgggctcaggggatagcaggaggctccagttgacgctcagggtgctgtgggggtgttggtggccaccattaccactgccagaggccccaggctgctccacacatagtgcagtgtggaattggtgcccactgcccgtatatgaagcaggttctgcagggggcccagccagttagggatgacctccagagacacctggcgggtcttctcccccagcaggccaaatggggctgcaaacagaagtagagtccaaaggagcagggggctgggggcacagtgcccccaaccccaggtgcactccacagagccgcgcatacggccgcaattcagccgacggaaa

SEQ ID NO: 445762 - DNA, 784 bp, Homo Sapiens
gctgagcctgttatgcttttctgcccttcggccctttggggagccacggcgggaggtggagatccaccggcgatatgtggcccagtcggtccagctctttattctctacttcttcaacctggccgtgctttccacttacctgccccaggataccctcaaactgctccctctgctcactggtctctttgccgtctcccggctgatctactggctgacctttgccgtgggccgctccttccgaggcttcggctacggcctgacgtttctgccactgctgtcgatgctgatgtggaacctctactacatgttcgtggtggagccggagcgcatgctcactgccaccgagagccgcctggactacccggaccacgcccgctcggcctccgactacaggccccgcccctggggctgagcctctccgaccctcgccctcggagtagggggtagcggcttgggtctgacacatctttgaaccttgtggccaggcctggacttcgcccccaggcctaggaccccgggcagccaaccagtcagaatgcctctcatttaggcctgcaagtcccatccaagggcaaatgtgtggagatgcaagaaggcaacaccaaggggaccttatcaatagccctgtcccctgaccgactccaaagtcccccaacaaagtatgacaggaagcccccactggagggtctccagagaagtcgaggctggcctctgaggttccacagaatagcaagatggggggagtgacaggggccggctggcacttgatgctccaacctccaga

SEQ ID NO: 445763 - DNA, 807 bp, Homo Sapiens
tgttctcaccaccccacgcccgctcggctcgactacaggccccgcccctggggctgagcctctccgccctcgccctcggagtagggggtagcggcttgggtctgacacatctttgaaccttgtggccaggcctggacttcgcccccagtgcctaggaccgcggtgggtggaaccctgctactgccccaacaggtactccaatcaatcggagttctccccttgccggagcgtgcccttcacctttggggcccgatgcagtcataagggatggacttagttttcttgcaggggaaaatggtggacagccgtgtttcttaaggatgctgagggcatggggccaggaccaggggagaggcacagttccttcgtgagcagcctctcaccactgctacaaggctccctaagtgctggtctctgctccactctccggcttacccgtgaggcaggaggcagagccacacgctaaggccctgaccacttctgtgtccagttgtctaagcagagcgcctcagggacgctggaaatgccttaaggatagaggctgggcatcacatcaaatgggactgtggtgtttggtgaaaaccttcctgaggatctggattcaggaccctccatgactggcctatttactgtttacagctggccagtgcagagctgctgctcttttacctttttaggcgcctgtgacttcccacctttaaactgcccagaaggcatgccttctcccacaggaagaggggagcagacagggaaatatgcctaccaagaggggtgtgtgtgtcttttgcccacacgtgtggctgggat

SEQ ID NO: 445764 - DNA, 1475 bp, Homo Sapiens
aagttttcacgtttattaatactcttctgttgccctttggaggtctgagggggagtccttgcacggcctctggtctgtccctgttcatggaaggcagtgctcaggaggcagcagcaaagtgccaatgaagcggggcgttagtgccgatggagcggggagccagtaccggtggagctgggcgttggtgccaatggagcgaggcactggtgccggtggagcggggcgttagtgccgatggaatggggcaccagtgccgttggagctggacgtagtgatgatggagcagggtggtagtgccgacggagctggacatagtgatgatggagcggggtggtagtgccgacggagctggacatagtgatgatggagcggggtggtagtgccgatggagccggacgttagtgacaatggagtgggacaccagtgccgatggagcagggcgttagtgctgatggagtggggcaccaatgtcaaaggagcgggtcattagtgccgctggagttggggcgttagtgccaatggagtggagcattagtgctgatggagtggggcgccgagtggggcattagtgccgatggagcggggccgatggagtggggcgccgagtggagcattagtgccgatggagcagggcgccagtgccgatggagcagggtgccggggccgatggagtgaggtgctagtgctgatggagtgaggtgctagtgctgatggagtgctagtgctgagtctggtgcagccccacctctggaggaaaagatggcagccaggcgccctgttcttggtctccagggttggcctcctgtcgctggagccaccattatcctcaccagattggtgggcaggtggctctcagagcctcatgctagggcaagtaggccgagggcaaaggcaggccgagtccgtatggccaggacagggcagagtggtcatggcctggaaacgggagtgggagggggccagaaagcccctgccgccgtgactaagacccgcggtcccacaggtgtgggcatgtctctcccaaagtccagcagccccctggggggccaaggccagtcctccacgcccactgaaaggcacaggttggtagggcagaggcctgacccatggacccaccccacagggtgggggccaaagagccacacagtcaaatgaggctcgggggcttctgggaagggacctagacctgagtccttgccaccctgctgtccctgccaggaatgtgttggggctccaggaaactatgaggggaagaggaacgctaggacgcagaagggggaaagaggacaagatcgggggcgggaggggaaggcttccgttccctattgagcgctgggcaggtcctcagagccaagcagggcaggcgagctccgagtgtgaggtatcactggggtccctcggacaagcccgggaggtggccacaagatggaaggagagtcccagtggtgaacaaagcagatgtgccgtggctgggc

SEQ ID NO: 445765 - DNA, 647 bp, Homo Sapiens
caagataaaaaatggattcaatttttattaaataatgtaaaggattttcttggcactattcacattctcttgcctgagtaaaacaagccgcgtttatctgcattggtagcagagggaaagctactggagcaaacgctaagtgaatgggttcccgtgccgagggtgtcctcattcttgggctctgtcaggcctccccttgtctgcaggactggacaggccaccctccccaggccctgcccttgccgcgagcgtgtccttccatacagacaacagccttgctgggtcacctggaggagctgcgctctttgctgacacagtcgtcctggggaggtggtgtccccgtttcccaccatgctgcacgtcctcctcttcttcctgcggtgcactgtcccatcgccctcggatccagactcgcactctgagtcggagtctgacgaactggagctggaggagctggaagagtcgctggagctgtcggaagctatccctgtggactcctgaaggtcaaccgagtctgcgaggactgccaactcggggtgctcttgcttcaaaatcctataccatttccttgataactttggtctccctcttaccgtcttgtgccataccacagggaagttggtgctgctggcaaaattttgggtgat

SEQ ID NO: 445766 - DNA, 1025 bp, Homo Sapiens
gtagcgaggcctgggtggcgaattcggcacgaggcagagttttctgctgctgtctgatttggctgagcactcaagcagcaacggcaaactgggagaaaaagcaagaggccacgcctcaggttctgcagaagatgccgggtgacttttccaatggctctccctacgctgctgggacgacgactctgtggtcaaggatgcacagcaggagtcactgctttcccccaagaccaccatgaggagaagagcaataagggaatgttctggtattctcaaaggaaaacatttccaagatagaaaatggattcaatttttattaaataatgtaaaggattttcttggcactattcacattctcttgcctgagtaaaacaagccgcgtttatctgcattggtagcagagggaaagctactggagcaaacgctaagtgaatgggttcccgtgccgagggtgtcctcattcttgggctctgtcaggcctccccttgtctgcaggactggacaggccaccctccccaggccctgcccttgccgcgagcgtgtccttccatacagacaacagccttgctgggtcacctggaggagctgcgctcttttgctgacacagtcgtcctgggaggtggtgtcccccgttatcccaccatgctagcacgtcctcctcttacttcctgtggtgcactgtcccatcgccctcggatccagactcgcactggacaccaggcaggacaggacaaacaaggcagtcaacccttggatgcagcccacttcttcattaaacaaacctctgacctcgggagacagcccagatattgggtcacttttctcccacatgcaaagcagtccattctgacaggtccacaatgacgctcatagccacctccttggatgtcccgggtccctaagaatatcaaagtcgctcaaaggcagatcctccactgttctctaacgagtggaaactgctgaataagaatccattgtacacgctttaagcaaattttggagtcatataagattcccttacacaaatc

SEQ ID NO: 445767 - DNA, 761 bp, Homo Sapiens
  misc_feature (651)..(651): n is a, c, g, or t
ccaggtaatagcttcgtcttgctggttccctccttcgtctcgggtcactttgatgagttccctgggagtgctggtaggaaacaggcaccagcgcttgtggccctgaactaaggcattccaggcactggttcccagagggtcgatgtgaatcccagttccggagcgtggtggccccatcacaaaccacctgtaagggggcctgcgcttctccccagcatactggaaaaggtcatcagtgaaaaactttggcaccttgtagtcttccaaaagtttccttcttttagggtgttcaccatagctgctgtcaaagatgtaaaggggactatcatctcgagtgctctccatgtactcgatgtagtatttcatcttcatcttcactgagtagccatcgttatcctcaccacacttgaacttctggttccgatatttcctttttaggcgctccagagtccatttctcctgcgcagaccagccctcttgcgcattcaacaaaaccacgggcttgtaaggtctttcataccgctccacaaattcttccacagacagctgtaaagcatctgccctttccacgttatccgccacggccgccgggctcagcgagaagctctcgtagtagttgtgccgggtccaatccagcgagtccttgagctnccggccgcgcactccgcttggcctcgcggatgcgcttcttgctcttgtggttcattctgcggggtcgccagctggttccgctacgactctcggcagcccgcttcctgaca

SEQ ID NO: 445768 - DNA, 489 bp, Homo Sapiens
  misc_feature (368)..(441): n is a, c, g, or t
aaagaaaacacagaacaagtcctaaatcagacaaattgcacaaaagagagagaagaaaattgtaagcttcctgggagaggaagagatgtccatgagaaaaccaactgggatgagcctacaaaagcatgtccctctctctcctaatttacttagtctcaactgagcccaacaggagctggcctctgtcccagctgcaggatgctcccaaggcagtgtccaagagcctggaaggaggcttttatcagcaggttcagtacagcaggaaaagccatcctggcaaagagtccagtggtcctattagcgtaggctggctgctgctgctgggcctgggagctgcccatacctgggtgggtctggactatgtcgannnnnnnnnnnnnnnnnnnnnnnnnnnnnnnnnnnnnnnnnnnnnnnnnnnnnnnnnnnnnnnnnnnnnnnnnngtgatctgaatcagatggtgtttctggggggacaggatcctgggtacg

SEQ ID NO: 445769 - DNA, 935 bp, Homo Sapiens
tggcaccgacccacaggagcgggcgacgcggcagctgcagagcttccaaggcagtgccaagagcctggaagccagctgttatcagccaggtgcaagacagcagggaaagcgcatccgggcaagaggtccagtggtcccaataagcgtagcctgctgctgctgctggcctgggagctgcccatacctgggtgatctggactatgtcgattcttctgcgttcttcttctctttcttctgtccgtgtgccgttcaggatcctcgttctcggtgtcttggttcttcttcttgtgatctgaatcagatggtgtttctggggggacaggatcctgggtacggctctgtttgtgcttgtgcttattcttcttcttgggaggctgaatatgcatcagacgacactgctccggcaacgggccagtgtggaggcggaagccggccagcatggtccctgtgataggattgaaagagctactgagaatagggggcttctcaatgagagagcggaggctgctgttatcatgggaaccaggcagatcaatcatccctggcaggtcaggcaggaagttacttagcttctccttcaccttcttcccacagaatttattataggcttgttccaagttgtagtgtgtgatcagattcgtgctgcctgtcagctctgtgctacctggcagttccctcatgaggtaaaaagggccacagccagctcctgacttgtccgcgccaggaggagccgtggccgcggtgggaggcggggccgtgccgggtcccccgcccgcaggaggcggtggcgggggtggaggctttcctggtccgaagccgagtgcggttgggggcggtggtgggtcagcctgagccccaaacagtgccgtgaaattctccatcgtaccctccgccccggcgctgtctccgcctcgtgccgaattcgccacccaggc

SEQ ID NO: 445770 - DNA, 857 bp, Homo Sapiens
gttttacataaaattaaccacaatagtgcgagaggttacactgaatgagaatgcatgatgaatgatggaaaaatgtaaggcttggaacagctgaatcattcactggatcttgggttcatccatcctgacgcactgaaatttattacagacattacaagaatggagggtgaggaatggtgcttctctgtcatcgcctggctaaaacactgattttgattaatctcttgaatacggtagttttctccaggttctcttgttaagtagacataaaagttaaatgaatgctggcttaaggtcagaggagttcatatccttctcttccctcacccctatactttagaactctcacacccaacaatttgctgttgggacctgactatacatctgctttcccacaatgctctggtagaataccactggggttgctgatccaaagcacatggaggcgcaacagtgcttaaggcttcagtcatggtgtggggctagacagcatccccaactagaattgagggtttgatctgtggggtaacacgagcaagcaggaagaggatgctggaattccttactctgtccagttggaatcaatccaacacatctgactaccacaaatacaaccggaaaagaaactaaaattacacactcaaacataccatgaaagagatgctattttgtagcttgtacatagtttaaaatttttttaactacaatttgatgttactaagagacaacgaggatacagaggggactgtcccttttctctcatctggttttgccataacttacaaatagtcccaggatgtttactgagtgtcctccttcaattttcacaatattttatacaaaatgacaaatatata

SEQ ID NO: 445771 - DNA, 483 bp, Homo Sapiens
tgaagtctgacttaatataaaaataagtatttcactccatgcttctacagcatcagactacatcagagtaaagataaaatgacctttttgttctgtggcaaggttattgcaacgcttctgtctctgggcatgtgctaggtattcacatggtctacaattctgcatctgccaaatagagttgttttggttttttcttaaggatgtaatacttcggatcatagcacattattatcctaggcacgagacgcattccaatcacccatttcaaatataatcaactaaagcaaacaatatacaactgactgcaaagtcgagtttttgtaaaatcccacagataaagaaaagccttatattgcatatcccaatttatctaattaagtgtgaagttccccagttttctattccttacattaatagggggaagctgtcagggcataatcacattcccagttaataccttattccgatggaaagcctcgtgcc

SEQ ID NO: 445772 - DNA, 856 bp, Homo Sapiens
  misc_feature (715)..(729): n is a, c, g, or t
ttttttggtggatcaaataaagcacatttattgtagcgatgtctgaacttttttcctatgtgttaagagaaaatagtgaccgctgtatcacaaaccctttcaggtcacaccgatcgttacaaattcctccatggagtcaaagaaaagacagtaggaaaggtaccgctctctgaactttgtacaaaataattcatataaaaaggaaaaaaggtaaacgtaccataaagtttccctctcaattccctaaggtttggttacaaaacttgaccaaatgttctaagtataaaaagtacagacgtcactctgcacaactcgggaagtctaagtcttgtttttcctaatacaaaagaaacgatcatttccctttcctggccctgcaggcacgtgagctttctgcgtggctgaagagcaccacactgagctcctgctaccagagatgtctgcttttgcccctaacgataaaggcttctgtggcatcagtggtgtcactcccgctgggcagagttgcggtggctctgtgagccgacaccatgtggagcagtgctgttcacagcccagcctacctgaccacagaaacacccacacagagcttctcaaacagctcagcaccagcactccacgtgtctaccctgatcccaggacgcctggacgacatcaaaattcaaacaggataaaaactcacaaacacactcattggagtataagatgtggggcnnnnnnnnnnnnnnnaaaaagatagttcaaaaacctttaaaaagtattctctcccagattataaaagggtagtttaaaactgttttaataaggaacaaatcttgcacaagccaaaaagagcctttgaatttggaggaattaa

SEQ ID NO: 445773 - DNA, 454 bp, Homo Sapiens
  misc_feature (209)..(262): n is a, c, g, or t
gggactgcgccatcatgtttattaaaagggtggattttggtgtgtgctctaaacagatacagaataaatacctgcgccttgagaacaggaagtccacgattcatacaaagtgctcactacaggaagttgctgtgtcaaaatccaggcaaggacccaactccgggcagcccctcctccctgctgacctcaacaagggctgtgctattggnnnnnnnnnnnnnnnnnnnnnnnnnnnnnnnnnnnnnnnnnnnnnnnnnnnnnngcttttgctgtggtcactatcattggcaaagttccttttcccctttcctggacataggggtcctgtctttaaaagattccactctgaggctgaaggtgccaaaagctgcttgagaagtggcctttgaactccgtctgggaagatggtgaggagaaggaagcaggagaaatcattcttggtttaaaaaaattt

SEQ ID NO: 445774 - DNA, 1610 bp, Homo Sapiens
tcacactgtacaaatttagatagaacattatcaatgctcagatttataaaaatgggaacagaaagactaaagctagcgaaggaacgtacatttctgttttgtctttttaaattaggaaggtaaaagtgattttttcttcaggtgcagtgatagtaaatgtctagaagacatccgaagagccagaaataaaaagcacaggagccgcctgcagactctcagagttctgtcttcacccactgaatccgaagtggatgcgtgtggcgctcccgcagggtggcctggccccgtggatccacgccgaacgctcaacgagattcccaaggctggctgtgtacagcctaaaactttgtgctcagagaaaaaccagcatgatgggttcatcaactcctgtttctcaaacaaaatgagttttctgtacacttgttacaaaggtctgtacaaaagcacgaagctgctgtgaggtgttatttccgaaagagttaaaaatggatggaagggagctgttcgtacagttccgcctgtacattcacagagggaggacaccataaaaaagggactcactcagaaattccagaccggagaatcctggcttcttaaaagattattttgaaagcttggaataagtttcagctctgccatttccaaccgcttcgcccagcatcgtcatagttcagcttcctctaaaactatattctccctttcttacacgcaaactaccaggaaaataaccgcaacccagtgaaactatggggcttctgtgaatataaggaacgaggcagggagaagtcgtaaaagctgcgggctcagagcccggagcgcccttcacattccgggtggccgtggcggccacagtcacagccaggggtgccaggcggggtccatgcggcacagattgtccaggctgtttgccgcggccaccagggtgttcaccttgctttccccgccttcgaactgggcgaggttgtgcaggcgggtcatgatggcggtgacggctttctgaaccagggacaccagttgctggctgtccatgttctctggctgcccggcggccgagagaggagaggacgtgtcctcttgtgtttttttgtgccaagcaatgatctcgtcccggagaaccgttttcagaatgccatccaccttaaagtttggctgggcgaagcaccgggcgaccgcaatcatggacgctgtcaacgggccggagaccccgatggtggtcagaaactcagaaatgttgggcgtgagtcgaaatgggacaggacggttggcatccaggtctccagtcgcgtcgtttatgtcaaatcgaaagtaggcaacattcagtttgccagtgtcctgagcgatctgtaacatctcggggttgagtctatttaaatgcaggacgaattccgcgaagcctatcagagccagctggatggtgaacatcttccggaacgtccagtagtccgtggcattggggaaggtgtgcagcgcccactccttgagcatgctgcgcggcaccatgttactctgaacctccttgaggatgtcgcggaggacctggtggctggcttgggttccccgcgcctgcaccgtagccagccggtcatagtaacgggagatggggttgtcat

SEQ ID NO: 445775 - DNA, 1093 bp, Homo Sapiens
cagggtttgctgtttttattttcgttgtaattattaaaagcgaggaagtcacatcccattaactttgggggacctcaaggcacacttttgtttacaaatccagaaaaaattttggttttagggaattttatttgcctgggaaaaatgggggaaataattgaacataaaaaagggttggggcaaggtaccaaagggaggggtggactcacttggggggctttgtggccagaacagggaaggacccctcgaggggccactgtttgtcacccaggcaacccagggactgcttttggggctggaaggctccccactcattccagggccggaagtcaccaggctttaggaggtactggtccccgcggtagccaggatactgatagccaccccatgttccactggagaccttcacgctgcccacgcggtcactgaagccgtagacccagagactgggtgcgtcgtccccctggatctctatggtgttgcccttgaagttggccccttcaaacagggagattttgtgctcctgggcatccattttgatgggccggaaggacatgagccgatcactgcggtagctgctcgaccatgtgttccagcgagggtactcgcccttctccaggatgaacatctccccgcggaagttggactgctcaaaggcgacccagggtcccgcggagacaatgatgctgcgcacacggtcgaagccacggtctgccagatttgagcactcccccgagaattctgctcgacggccctggaagttttccagttcgaagaccaccagcctgtagttcccaggaggcagttccgccgccttggcgctggtaataggcacggttgttggggccagggtagtgccgggactaggggatgttcctgcaggtggggcccccttccccttggtgtcaggccctgggttcaccgccactgtggccgaggccgaggcctttgcagcctgagacatggttcccgcctgcaaaagtctggggacttgctacttcctgctggaggacaggcaggcgggcaggtgctatgggtgactagagtccgaccccccattttatagtctggcagacatcagatcccgggaatt

SEQ ID NO: 445776 - DNA, 396 bp, Homo Sapiens
gttgagtacagtcatgtttattgaaattgctgacatatttggatatgctgtcaaatcctagtgcttccagttcctggcagtgtgactttggtcagttacattctctaagccacttcctcctctataaaacagggatggttgtgtgaggactgagatgtatataaattatttggtagactgggcagcacacacaggctctgagtagattcccttttttctccctcatctcctccccttttagacagacatggacagatatgtctcaacgaccaaatgggtgaagatgctcagagcatcaaggggatggagatccagttcttgtgacagagactgagcaagtaggaggcaaagagaggtgctgatgattgctgtgagtcagagacagtgcctcgtgcc

SEQ ID NO: 445777 - DNA, 1712 bp, Homo Sapiens
  misc_feature (638)..(654): n is a, c, g, or t
  misc_feature (1413)..(1431): n is a, c, g, or t
gtataggtgtttgccatttaggacactggtcaaataccactgaggaaaactgaaccgaatgtgagtcctaggacccacagaggttgaattgccccagacatgctattttgaaacacctctataagtggtctctgtttttttgtggaataaaggcattcttggcatccttaaaggtttcaaaatggtacaaggttatccggaagatgtaagccaaggctaatgtatccatctgtggagcactgtcccagatttcccgtgtacaattttgaaaagcaccataacttgtattaattgcacgtgacacaatggacccttaggtttcccacccggtttcaatctctgcagacccgggctttctttgttataaaaactgctttccaagggcatagagacaccacacatggtccaccagtaaattccaatagagaggggccaatagttgcagtggtaaacacaccaaaaaaatacatttttttgggactaaaaatctggtcacggataaaagcatgtgcccttttcaatcttctctgggatgttaccaacagccaacacgcttctaaaccattaagttaacaagcataatggctaaagaatgtgagccatcctataacccgctttaagccatctgcttgatttcnnnnnnnnnnnnnnnnngtaaggaacatatataggaaaagagaattccccttttgttccattacatatagaaaccttttgaagcttccaaatagcttggttttggtaaaattcaccactcttttattactttgacatgtagtcatcctaaactatccgtcatggtttctccaaaaatctccacatgaattatctgaaggacaattgaaaccacttaccaatatacaagtaacgttttattttatattctatcttccatttggcataagcctttcgatgtttgttttttaaaccagtgaaatatacaaatcacgcaagacagaaatatgtacattaaaagtacagaataaaggctagaagatatacataatatctgaatgacatgtagaatattttacattaaatagtttcttttaaaagctaggattgttaaactcaactctcttcataaacatgagtcactaaaaaggaacaatctgatttagcaaataaaaaaagtacttcatggtttttgtataataaaaaccaaaaaagtgacattttaaactaattagtgctttttgctttcaagatcttttgctcacaattcactgcaactgaggggatgtgaatatcattatgcaataaattaagagccacagttggctgaggtgatatgaaagccaacctgcctaaggggggtatgaaagatgtgtatctttccaaacttttaaaacaacgtaagtctgagataagaacatatttgatggcactgtttggaaagaggtgtccttattnnnnnnnnnnnnnnnnnnngctatctatgtagtgggctgaatattccttagggactcaattaataagtactgtcatttctaataggcatgggtttccattctgcagaatgaactaagaaaagagaaacattgctgatgcttctgagttttgaatatctcttaacgtccatgtctataacgaacaagtaatgccctctccacaaagtgaacagaaatggaggttggagacaaaggggtgaggcagaaaagaaaaaagacatcttcaacccaacacgcatttcagtgagtcagcctcgtgcc

SEQ ID NO: 445778 - DNA, 946 bp, Homo Sapiens
  misc_feature (84)..(84): n is a, c, g, or t
  misc_feature (437)..(437): n is a, c, g, or t
  misc_feature (782)..(825): n is a, c, g, or t
ctcctttgccttttctagctcctgaaatttgggcagcagggaggaaagtccccagaaattaaaaaatttaaaactcttatgtcnagatgttgatttgaagctgttataagaattaggattccagattgtaaaaagatccccaaatgattctggacactagatttttttgtttggggaggttggcttgaacataaatgaaaatatcctgttattttcttagggatacttggttagtaaattataatagtaaaaataatacatgaatcccattcacaggttctcagcccaagcaacaaggtaattgcgtgccattcagcactgcaccagagcagacaacctatttgaggaaaaacagtgaaatccaccttcctcttcacactgagccctctctgattcctccgtgttgtgatgtgatgctggccacgtttccaaacggncagctccactgggtccccttttgttgtaggacaggaaatgaaacattagggagctctgcttgggaaaacagttcactacttaggggatttttgtttcctaaaacttttattttgaggagcagtagttttctatgttttaatgacagaacttggctaatggaattcacagaggtgttgcagcgtatcactgttatgatcctgtgtttagattatccactcatgcttctcctattgtactgcaggtgtaccttaaaactgttcccagtgtacttgaacagttgcatttataaggggggaaatgtggtttaatggtgcctgatatctcaaagtcttttgtacataacnnnnnnnnnnnnnnnnnnnnnnnnnnnnnnnnnnnnnnnnnnnnctcattgcagccagtgatttagatttacagtttactctggggttatttctctgtctagagcattgttgtccttcactgcagtccagttgggattattccaaaagttttttgagtcttgagc

SEQ ID NO: 445779 - DNA, 557 bp, Homo Sapiens
  misc_feature (506)..(506): n is a, c, g, or t
ttttttttggccttgttcatgttttaaggtgtgtttttatttacaaagtgagataatgattacaaacagatgatgcagtaacaaacagataactgataactccattttcatgaaaaagtatataaatatattacaggaaattctatatagtaaacattagaaattgatacagtaaacatttgctacttttttctatgccaatattactgtcatttaaagcttaaatactggtttcaagtatcccctataaaataactactttattaaaatattggaaaacatttttgctataaacaagattggtgcattaaaaatagactcaccatgtccttgtaacaatgtctgctatcatcaaatgctgcctttaatcatccctaagatctgcattgtttggttagtgttaaaattttgtaaataattatcataggttaaagtagctgtaaaaatacagcatttcaatattttttattttcaagaagaatacccctctaagatagaggagaacntgcatgttgtatgaacttgctgctctgtgatcctttattttggatagagag

SEQ ID NO: 445780 - DNA, 900 bp, Homo Sapiens
ggcacgaggccaattcttcagaatggcagccatttaaatgacctaaaaaagactttaaagaagttagttagcaaataaacagagatgcaatccccactgctgcatctggtcttggaacttgtttttattcacagttgacctgtacttcaggctgtctggtaagacggactgaacctatatttaagtctttgggcccataagtgccttgtccttatcaggttatggttactttggttatccaatcacagttattactaggcgtggaaacaggaagtgatgccaattgagccctcattattctagacacacttctccctatagcagttccatgctaacaaggtcatttattctcatcactctagttacatagtctagtcattctattgttttcttgtgggaacactggaatgtgaatccaacatggccaggtggtagtcaaatgttcagttcagcgaagcttttattgtgtcccctcaatgatttttatcctaagtgtcagagtctgtaatttagaagatgctaaggatgaatggattggaagaataaattttgcaagtgagtttttaagagtgatggtgagaggttccaatcctgcttttagccttggtgacaaagttttggtatttcaactattggagacacatgcccatataccagccttttggttcacaacagtgaccacattttgacagggtggtccagctccttaaagttttgtccctgagttgacattttagttgacccttcaatatgccattcccctattcaattggtagaataggccaactacttttgggttatagaacatggtaatacaagtggatttcatgtttatgatcccattaacacactccttttgccataaaatggcaaggcatgtgtgtatgggtgcccgtgcat

SEQ ID NO: 445781 - DNA, 610 bp, Homo Sapiens
ttttttaaaaaatccccaggttattttattgctgtactcagaggtcagttaatgcccccggccgcctcaccctcccctcggcggtggctgagtcctctgctagggttcgcgaacggcagcgggtccgagggtcacctctgcatctcgccgccggaggcgcccccgcctcccctccccgccgccgggccagccggggtccgaggcccgcagcccccggctgggaaggcaggtctggagaggccgctccgggtctggagggaggggaggctctccggaaaggggtggcgagagacccccgccacgactcccaagcttcttcgcgcgcgctggaggggacacggtgggcgcctaattctcggcgtagcagtaggtcccataggctgcctgttggggcctggggaagccgaaactgcgcactccgggatccgggagccccccgcagcgcggcctcggcgtggtgattgggaagcgcacactgccgtcagccagccagccgccgtcgcactggtctagccccgaaaacttccaggcggcgtagaggtgcccaaccttggccaccacggcgccgcgtcgccggcacgccgcgtgggcttcagacagcgtcagccga

SEQ ID NO: 445782 - DNA, 1001 bp, Homo Sapiens
agcgggggggaggtaaaatggccaccggcggcggcgcggaggaagagaggaaacgggggcggccgcagcttctgccccccgcgcggccgcggcccggggcgaggaggccgacggcggccgcgagaagatgggctgggcccaggtggtgaagaatctagccgagaagaagggcgaattccgcgagccgcggccgccgcggcgggaggaggaaagcggcggcggtggagggagcgccgggctcggcggccccgcgggcctggcggcgccggacctcggcgacttcccaccggctggccgcggggatccgaagggccgtcggagagatccggccggcgaggcggtggacccccgcaaaaagaagggcgctgcggaggcgggcaggaggaagaaggccgaggcggcggcggccgccatggcgaccccggccaggcccggcgaggccgaggacgcggccgagcggcccctccaggatgagccggcggcggcggcaggcccgggcaagggtcgcttcctcgtccgcatctgtttccagggagacgagggcgcctgcccgacccgggacttcgtggtaggagcgcttatcctgcgctccatcggcatggacccgagcgacatctacgcggtcatccagatcccgggcagccgcgaattcgacgtgagcttccgctcagcggagaagctggccctgttcctacgcgtctacgaggagaagcgggagcaggaggactgctgggagaactttgtggtgctggggcggagcaagtccagcttgaagacgctcttcatcctcttccggaacgagacggtggacgtggaggacattgtgacttggctcaagcgccactgcgacgtgctggccgtgccggtgaaagtgaccgacaggtttgggatctggaccggggagtacaaatgcgagatcgagctgcgccagggggagggcggtgtcaggcacttgccaggggccttcttcctgggggccgagaggggctacagctggtaca

SEQ ID NO: 445783 - DNA, 603 bp, Homo Sapiens
gattttctgaaagcaggtaggtttattagcaaacagtacaattatagacatttttatgatgactatacaaaacccagacactgtccatttgaaacacaacatttttttgcagatgattttaaaatcatttttaaaacacattcatacttaaactctattataatgaacatctcaaaatgaatgctcatgcatggggatataacatctttgtgaaaatatttggttatgagtcttgggtaaaaggcactattcactgggaaaccaattctattaataccattttccaaatgaaggagcatgtcaggcccttatcaatcacccatgctcagagaaagcactgggttttcaccaacagcaaattccccaccaaagatgctgttgtcacaatgaaacacaccctccaccatcccatcaatgtccccctgagacagtgtttagagtggaaacaaaataacttccatcacttgtgtctagggagtcaggatgctccagtggtgacaagagttaagtggagaatccaggcaaaatcttccccttccctacgcccacttctgtcaatgttcaaagggaatttttccttaaaagaagcccacattttcattt

SEQ ID NO: 445784 - DNA, 542 bp, Homo Sapiens
ttaattatacaaaattttcagactttatattatcatatcaaaaacacaagatgccatcacacagtggccggaagaaaagccagcgcagaaagttccagtgggcccgggcaggtgctggggccagcgcagagtcccgctgccggcgcctgtctgcagtcaccccgggcgtccacctcccccagcagcgtctgcctcctggctgctgccggccacctcctaactgcgaatcgctgtctttctgtcgcggtccttgctctgcagaggggagggaggagtgtcaggccccggcagagcccagcgccagtctgcgcctctctggcctccctgctgggtgccatctcaggtggccagcgccaaggcacctccttcccggctctccccagcttccctcaagcgttttggggaggggagcatactgctgcacagccgaaattgtaaaattaatttcccagatgttcaggccccaggagctcgcgcgtgctgtcaactttctctggttgctgaggcagaaggtgcagatctgtttgggctggcctcgtgcc

SEQ ID NO: 445785 - DNA, 802 bp, Homo Sapiens
  misc_feature (615)..(623): n is a, c, g, or t
ataaaagtgatgtattgagataattttaaaaagtatctgacaattatgaatggtccccagttttacaaaatgtgatttccaggatacgaaactgaaaaaaagtcaactcttcagagagtgttttatattgtacaaacaagttttgtagaaaaatgatccagcaaatgcttgagttaagaatatttatattttttccaattctttacacttttattaacacacttacaaaaaataacattcaaacactgagaaaattaaataactttggaagcagagctcattgttttctgcttacatataagtgacacttttgggctgttggcacaaaataatcaacattcataaaacccttactactatatatcaaacataagttacaatcataggcactagtttatcaaatccacattttttttgtaagactaaccacagtaaatccttagattttcccaaacagaaaaattgcaatatacaaaggctttctagtaaaaaggcaatttttctctttaagaaactaaaagtcaacagtctgtggtagtacaacagcaggtaaaataatactttaccaaactcagatcaaaaatatgttttaacaagtgatgaaatattttaatnnnnnnnnntagacatttttttctgatgcagccatttaaaaacaaagttaaataacctgaatactccttttgaaactgattatctaacttaaaaaatgtaataagtttcataataggtaaaattccttttaattattagattgcagcatatatattttttgaaatgttgcactgaaaaccctcgtgcc

SEQ ID NO: 445786 - DNA, 1098 bp, Homo Sapiens
  misc_feature (385)..(385): n is a, c, g, or t
  misc_feature (420)..(420): n is a, c, g, or t
ttcgtatgggctgcctgcttttactgacacgcagaggatgaccaaaagcctctgaggggagtggaagcagggcctccccagcattgtaggtatgttggggtccaggggataggggcagtcgagagggcttgggttcagaagaagcccagctgctttttctcctgccgctgcctccacgtggccatgctgtagaattcctccttggatttcccaaagatatcttggaagtcagagtctgagagatagaactccctgcgggcagggtccacgccctctggcaggtcctcaacagcctggtgcatcagttgttcccggcgcaggcccccgttgatcgtggcgctggtgctgctgacggagctgctggttctgctgccagccgacttgnggcttcgcaccacatcattctctgagctgtcctgngagcccttgagggcctgcagggccacggcacctgccctgccattgcccggccatctggatagccgcaagttgttgacttctgctgttatctcagagatggttgatgctgctgccgggctgccatccaccactttcttgtgggacgggtggctagtccacttgtaggggtcccaagtgaagaaccatccaatgaagggtgtgaggctcatggccctgcttgaccagcacgatgggtgtggtctggctcctccctgctgggtgagtcttcatgtacttctggccccaggccaccgtctccttccactcacttgcagcttcctcaagccacaggacgatcttctgccaggtgtccagtaacatgatgtcatacttcgtccaggtcctccctggctgaagaaccccacttctgcgaggaccaggcaggccatgtggctggagccctcaaacagtcgtggctggaagctggggacctcctcagggagcctggccagcacggacagcaaggctgtgagccacccagaggggcaccccagcccatggcacaagtgccccaccccagggcctgggaagccacttctcaggagtgggagcctgggccctcctctgagccccgtggtttctccccgagcactccgctctgctctgggtacagggtccctctctgctcatggagccgct

SEQ ID NO: 445787 - DNA, 397 bp, Homo Sapiens
ttcaaactacaaacattttagtaccaaatatgattttatttgccactgttgttattttttcctcattttttcagaataaagaaggaaactactttaagtgatcattaatcttttttctacacacaagtctagaaagcaacaaaaagtggggccctgagtaacaaaaagaagttataattgattttaagtacagtaagttaagcaaaatttcaggcattcgaccactctcttttatttttcagtatccttaaaaaaattagttcgggaagtcccgtgtttaaatttaagaagaccaggggctgttataactgatggaggataagtcatttagcctttcccagcctcagtttccccttctgtaatagaaagatattagacagttcataggaatggaaaa

SEQ ID NO: 445788 - DNA, 667 bp, Homo Sapiens
ttttttttccatttaaaaatcattttattattaacatcatcttcccatgtagccaagtgtctgtcatgtataaggaatgtcggtaaatattccatttgaagcttctttgtacatatttccctcgataaataaactctgaattcacataaaaaagttaaacttaaataactcatatttccttctcttgtaacaggcatatattggtaaaatataaatattctcggactcaggctttgttctaagtgaggacagtaattgatcacatggtacaattattgacagtaaaaccaagaaattgtcagctggtgtcctggcatggactagtgctgaggtgggagacaggaagttcacatttggtttctgggccaaagtggggcaggaggggtggtggggagaaaaggacagttgttttctttacagctctgataaaaataatctgtgctgccactgaattttaactttgaatatattcttctacatttgctgattaattccataatcattttactgaaaactcagatgtcaactaacaaaatatggcacatgatccattttgaacaatgtcaataggttcagaaactaccattgggctggcaaaaaaaacaagagaaacgcacatggcgagagcgatgattcggggttggtttggttggttcactgtggccca

SEQ ID NO: 445789 - DNA, 1014 bp, Homo Sapiens
  misc_feature (932)..(968): n is a, c, g, or t
tgaagacactatcacggtagttaaattatgtcaaaaagcgccaataacattctcaccaacttttctttttaaaggaattaggtatagctagactgtaaaaggcaagttgtgtgaagcccaaacctaacatcctaagatctaggatgagtcaagacttcatagtctacatgagtagcggcagcatcttgaggaaaaacaaaaggtatgtggctatcaagattccaaagaagccccattttattacagagaaaatacaaagccgtttcctcacagggaaaagtacagtttcccttctccagggtgacagatgagccttttccgaagttctcagctttctcttctatcgaaacttcccatgtcggttaaagtgtttgtagagatagcggatgcgtttattaaggttgtgcaggtcatcagcgaacattctacttccaaccattttcctctttcggatacaacgttgcaattcattccctttccaacctcgaagccatatgggccccctgatcagttctttggggtgcttttcaaagtttcccaggatcccgatgttgtcatacactccgaacatggcccttttctcgttccaacgatcaaccactttggggggcgggagagtgagccttataccgatcaatctaggcacaccaagagagaagcttctgcacgccagaggcacccagtcccacaggcgcctacctgccccggataagaggttccctgccatttctctagtctccccccttcaacagcacaccaaataagcccaagaagatgacaggaaccgtccccgccaacttcacacgagtactaaggcgaagacagccatcttgggccttacccaggcagctgtgggcgcaccgcccacctacgccccatccgcaacagcacccgctctcgacgaattcgagctcggccgatttggcctgatnnnnnnnnnnnnnnnnnnnnnnnnnnnnnnnnnnnnncggccgccaccgcgtaagctccagttcccctatatgatctatcatc

SEQ ID NO: 445790 - DNA, 733 bp, Homo Sapiens
acgggcccgacggggacgtcgcggtgatgtgctcgccgctgggagatagtaatgggatcgggccaaggcccaaaaggaaagccccccatttttattttcccgggggaaaaattccaaaggccggttttccctccccaagggaaaaagtaccagttttcccgttttcccaggggtgaccagatgagccttttccggaagttctccagctttctctttctatcgaaactttcccatgtcggttaaagtgtttgtagagatagcggatgcgtttattaaggttgtgcaggtcatcagcgaacattctacttccaaccattttcctctttcggatacaacgttgcaattcattccctttccaacctcgaagccatatgggccccctgatcagttctttggggtgcttttcaaagtttcccaggatcccgatgttgtcatacactccgaacatggcccttttctcgttccaacgatcaaccactttggggggcgggagagtgagccttataccgatcaatctaggcacaccaagagagaagcttctgcacgccagaggcacccagtcccacaggcgcctacctgccccggataagaggttccctgccatttctctagtctccccccttcaacagcacaccaaataagcccaagaagatgacaggaaccgtccccgccaacttcacacgagtactaaggcgaagacagccatcttgggccttacccaggtagctgtccc

SEQ ID NO: 445791 - DNA, 887 bp, Homo Sapiens
  misc_feature (490)..(567): n is a, c, g, or t
gggcgccggggtttattatgggagggagtataatttttgtctcccgtattggcggccacagggggcaaaatatttcctaccggcaagagtttacaaattttttcctgatgcccgtttggggggagttcttgcttttatggagggcaaatttgtaaatggaatttccaactcgtgcagaaatggaataaggcaaggtccgggccgtaattttaattagtggctagggctggggccctaatttgataaagacgcttgattggccttccagttccaatatgcattgattaacctcagaacgctcctcccgaggggttttttatcggtggggaaccccccggcgttttttatccgggggaatctcaaggaaaaagtcatggcccaggttttctttccggaacggggccgcgccccgcaaagcaaatgtttttgaaaccttttcgccaaggcgaaggggccagaaaaatttttttagggtcgaggcggccgacannnnnnnnnnnnnnnnnnnnnnnnnnnnnnnnnnnnnnnnnnnnnnnnnnnnnnnnnnnnnnnnnnnnnnnnnnnnnncagataccaccaccaatatttattacccaaagcaatctgaaagaatcgggcacaaggtcatggctttcccaggttacaagaaaatcagaacctcttcaaactcaccctccacccatagccaaagtaaggaattaaaggctatagctcaagctatgtcatggctactatatcctcattcttgatgaatagtctcaaagtcacaagttggcatgatgcgatttaggtctaaatcttaccagaaaaaaacccaccattaaaataagacaagttcatagaaatcattccaacagaaagataccaagagcctttactggtaatga

SEQ ID NO: 445792 - DNA, 2317 bp, Homo Sapiens
  misc_feature (790)..(821): n is a, c, g, or t
  misc_feature (1243)..(1243): n is a, c, g, or t
ttttttaggagaagaagtcatttaagtttttattaaatatactctcttggcacaaatctttaaaatatataaacattagatataaacagtgtcttcatggcatcaaaatataactccagaccaagaccagtgaccagcagggaggcgagtgaccgcagagcctgagggcctggctgtgtgcaggggtgggggacagcactgtccccaactcctgccgggtcccactcagctaggagccatctccggggagacacactggggtcagcagggactgggggaccctcccacctaccccttgtctctcctgcctagcctgtggccccaaatccactcatttggtctcacccacctggggcagacccccaattcctactgctgttgcatgcttgtgggagttgggtgccctcccatctccctgtgagggttgccctgcctctcctgccaagtttaagtgctgggtaagggatacccacacagtgggacagcccctcacagccatcacaggctgcctgggcctctggggacaagatcagggatggttggtggccacatgcaaggaaggcagagagagcggtctgcacacctgcaggtccaaggcaagaacaggaggaggacagaaggaagggaaatgaagtcacgactggagatgaacaagctcagatcccttcacacagcgtgtgctgagccagctgtcgaaagcaacactcacggtcacgctcaccctggcaccaggcagaccagtcaggggttcgatgtgaatagatcatagacccggggtcagccaagttgnnnnnnnnnnnnnnnnnnnnnnnnnnnnnnnntcaagaaactcaccatgtcattaggaaatgggtgtttctgagtccctgtgatagctggcgggccctgggggactcctctgagagaccagttagctgggggttcccctgggtacctcagattttcctcacctcccacccccaagctatactctatcatgaggctcccacttcgggggattgaggctagcaggcaccccatgctccatttcatagaaactgaacaacccctgtgggctttaaattgctccatatcccagccaagtgcctgctcaagtggggacccaaggacctgctggataccacagctgggcagagggttggggcactgagatgctaggcctggggggcttctgggccaaaggaggtggtttgtgtgctcacatttcagcagatgccccaggatgcagggtctgacccaaacntgaggcagttccgtgtcatggcctgggcctcgagccctgctgtgcagagcaagcatgaatctcctgggaaggttacaaagcaggtgggcatgggcaggcaactctagggggagatgcactctttggggacccagctgcttgcagggttctaggatagacatgaggctctgggggaccctgtttcccagcaggaggctctagtgactgaggagtcgtgtccatgtgggaaatactggagaaggcagggccggcatggtgggtggcccaggggctgcatttgtggccaaagctgagcacgaggctggccccatcctgggcaggtccgcctgcaagaaaggcgcccccgcaccctggaggccgggcaggcacgtggagtcagaacaagaaggtccaggcgcagtctggctctgagcctggtggggacaggggtcactagaatcagcagcatgtcggaggacacacaggatcaggaggtggagctgaccacgccccactagggccttttgggcaacacctccggcagacagcgccagcgtctgcagaggaaggaagaggggagctgcgggaccccccacaccatcgccccaacactgcacttccagggctgccagctttgcgtttggacgtggactctgagcccaggcccctcaggcccacctgctcgttccataaagcgccccatgtgcctcctgaagtagaatcaagcgcacccccccaccgttccatgggcccagaatacaaaggggtcactggtccaccgtcctgagagcagctcagggtcccctagctctgcaggtgccgcagcaggatctgcatgaggtcgaacgtggtgaagctgatgcccacggcgatgggacccttgacccagttcatgctcaagcctttgtagaggccgcgcacggcgcccccctcccgcacgatggtgcgcagcgtgcgggcgatggaggcgcgcgggtagcccgtgacgccggccgtctgcatgcgccgccgcaccacatccagcgggtacgaggccgactgcccgatgaggccagcgcaggcgccgaagatcatgcgctcgaaggggtagggctg

SEQ ID NO: 445793 - DNA, 643 bp, Homo Sapiens
gaggaatcttggctgggattataggtgtgagccactgccgagaagctattattttaaatgacacacctcagagccaaatctcccagctccaacaccacatccagataaccatctatccaaaaaacaactctgatcacttcactctctgcctgaaattcctggtggcttcatcctctgaggatgatttcattcatcctcagaatgaaattctgattcctctgtggaccctgcagtagcctcagtgtaccttcctagccttgtcttctattctccctgccatgggagccccaacagtgctatgctcattctcatctccacgtgtttacacatgctgtaccctctgcccagagtgcctttcctaccctttccctgcccggaaaactcctcttcaaccctcaggacctggctcacaggactggcttcttaggctgcaaggagctcccatagcatcccatacatgtacaaatatccctcagccatggcaccctcacacctgaggtacctctcttccacactgggctggcctccaaaagcttagagactggtccttgcaatctcccaagccagtgtatgccacacagttggtgttcagtacataccccccgaatgaatgaatgagggaggaatgggctatcctcgtgcc

SEQ ID NO: 445794 - DNA, 841 bp, Homo Sapiens
tttttttgcatatttatgacacattttatttgcacaaataatactgcatcagtttcattgagaaaagttggaattttgttatcaaaatcattggatgggaaactgcattttcagaacccacttcttttcctctttcactaacggtattccttacaacttgtaaacattcatgaagaactctatcattgtgatccatttttaaaccaatgcacccacttggagttataatttccccataaaaactttccatgctgatcactttttttcctttaatacgctttgagcatcagggcacactgctccatccatcgcaggcgctgcgggtggagtttctatctcagtgcacagcatgaaagcttgggtccatctgtgccacacaaaaccaagcctctcttgaagtgatttgtttacagtgtcatttgatggagtggaatgttctgcaactcattcgaactgttacagaagctttgctaaaaggtcaccactgctctatagaatttccaaatctgggcaccctctgggagcttgttaaagataaggttctccatgggctttttccatacaaactagatcagattaacaagaggctacttttccatagaggtttgtgttcatgttgagaaggagagcaagaaagagagaacacaagtaaattacagttagttacctcaaagtgtgcaagcccactttctcccaattcagagggcatgtaacaagtgatagtacaatttaataggcctaaacaagtgtgttggtcttgaaaaagtcagaatttgcttttaaatgtccttcttgaactcaatgcattcttcaaatatagtcttgggagtcgcctcgtgcc

SEQ ID NO: 445795 - DNA, 776 bp, Homo Sapiens
ggtttcgtttttttggccctagagagtttattacaaaataagaaagagaagtctggggaaggttcactcatcatagaattttggcagttcattgcccaagatgactcgatggtccacaccggcagctgtaatagtgaccaggtagatgacacccccgcttgagccatcccggctcatggccagagcaatagcgtctgtggtgaagcgcctgcactcctcgggagacatgcctggcttatatgctgcatccacataaccatagataaaggtgctgccggagccaccaatggcaaaaggctgtcgagtcagcattcctcccagggttccatatacctgacctccttcacgttggtcccagccagctaccatgagatgtgcagacaagtcctctcgatatttatagctgatatttctcaccacatttgcagcagccaaaacaagtggaggttcctccagttctatcccatggagctccagctggtaggcggccatgtcggccacggcttgggcatcagcagctgaaccagagagtgcacagtagatgcgctcgtgcagcggggacagcttgtcaaacactcggttcaccaccgcctcgcctgcagacactcgggaatcagaacccatcacaacgcccccgtcaaactccactgccatgatggtggtcccggtgtggacttctcccgcccggggtaagtccccggttggtgctcccgcccgcagcatccctgcaaggcaccgctctcctcgccgcctggggcactggtttccctcgtgcc

SEQ ID NO: 445796 - DNA, 1414 bp, Homo Sapiens
  misc_feature (981)..(981): n is a, c, g, or t
  misc_feature (1012)..(1012): n is a, c, g, or t
  misc_feature (1015)..(1015): n is a, c, g, or t
  misc_feature (1026)..(1026): n is a, c, g, or t
  misc_feature (1110)..(1111): n is a, c, g, or t
  misc_feature (1162)..(1162): n is a, c, g, or t
agcgggttgtgcgctgtcccaggttggaaaccagtgccccaggcggcgaggagagcggtgccttgcaggtttgctgcgggcgggagcaccaaccggggacttaccccgggcgggagaagtccacttcgggaccaccatcatggcagtggagtttgacgggggcgttgtgatgggttctgattcccgagtgtctgcaggcgaggcggtggtgaaccgagtgtttgacaagctgtccccgctgcacgagcacatctactgtgcactctctggttcagctgctgatgcccaagccgtggccgacatggccgcctaccagctggagctccatgggatagaactggaggaacctccacttgttttggctgctgcaaatgtggtgagaacatatcagctataaatatcgagaggacttgtctgcacatctcatggtagctggctgggaccaacgtgaaggagcgtcaggtatatggaacccctgggaggaatgctgactcgacagccttttgccattggtggctccggcagcacctttatctatggttatgtggatgccagcatataagccaggcatgtctcccgaggagtgcaggccgcttcaccacagacgctattgctctggccatgagcccgggatggctcaagcgggggtgtcatcttacctggtcactattacagcttgcccggtgtgggcccatcgaagtcatccttgggccattggaacttgccaaaaattcctatgaatggagtggaaccccttccccccagaattttcttccttttcccccaaatttttgggcaaaataaaaagcctccccccttaggggggcccccctccgcacgacgtggattccaagggggggttcgccatatcctctaggggggaccccgcgccgtccgggcctgccaaaatcattgaacccaaggacctaggacggcgtttgtcaaccaaccaaccccaaagggcggtggggtcctcactancaaccgcttgggtcccaactatcatggtaanatnctaaatgcttntccgtggtcgagcgcgtagcgtaagcgttccgagtgttaggaacctttactcaccgatgcttaaagaaccttttcagccccggnnatgtaagagacaagaccgccgcacctcttccttaaaaagttttgccaaacngtcgttgtccgttcccggccagcgaagaaaagtggtagggtatttgggtacggggtcactgcactgtcatctcctctgtgtccctggttggaggatcgctaaccagagctatcacccgggcgtgactgaaaggccttcacaacgccgtatgaggataggtcgggggccacccggttgcaccacccagccttaagtataatccaggccataattttacatccacttcgtgcttcctctgtgcggggcccgcgg

SEQ ID NO: 445797 - DNA, 1179 bp, Homo Sapiens
  misc_feature (965)..(979): n is a, c, g, or t
tcgcaggggggttggaaaattccccgtgtggggataagaggtccccccgtgtaaattggccccttctccaaaaaatttccccgttttgggggaatttgggttttacaagaaaaggggtttgcgggggtgttgcccgcccccggggcggtgttttgtttttaatttggggggggaaaaattccccaaggcgcccctttgttttaatggaggcccaaggaaatttttcccttaaaggggagagcgaaaggttgggggaaaccagggggtccgacattagcccgtaatttggggacccgggtgggggggcaaaaaaggagatgggtttttagggagaagaattttttcgaaggggcccaagggggggccggacaaggttaaattatagtgggggaaaagaggggtgtttttccaggattcgtgtattaaactaggatacagatcacataaggcctttttttttttacaccattcccattgagacaagtacaatgctttgtagcaaatacatgattttaaaaagcaaaaccaaacaaaaacacctcagtcagagatgcctcagccttcattgagggctgaccatgcactaatcaggttggagcctcaaaaaacccacgatgtgtttttaaaaaaaagtctggaaattaagcaaacattcctaacaccagctagacgatgttccggttaaagcccctaaaatacaaagaaataattgttatactttctttacatacaggtcttcacttttgctgcgaaacagaattttgggcacacagccagactactaacacatttcaataccattaatatgttttgttttttctcagaaactcaaaatatttgttaattcaacatatataaagatcatttaacatgtgaaaatacaagtaccagaaaaataagctggcagcagcactattccaaattttcaaacaagttttatttccatacaattctgacatttccgnnnnnnnnnnnnnnncttaaatgtacacagggaacatgattctttttatgcaaacaataacttaggcctgtagcatcgctgccggctccgccacgggagggctgggggaggccagcccaggtcagcagtggccgaggtgacagaccgcctcctgctctgtcccccgcgcgcgccgcgcattggccacgctgcaccgaccgcaccgcggccgcaag

SEQ ID NO: 445798 - DNA, 475 bp, Homo Sapiens
acagatttacgatttatgagcacacagaaggtggatccaagggagagattaaacagggcacagaagagtttttaaaaataatatttttcgggaaaaaaaccccaacaaaacacgattctttcagcagaaaccagaagattttctcatagactctcctacagagagccctgataaagtaataaacatgctaacagtaagaaccccaaccaatttcatagggcagtttgcggtaactactcccagtatggagcagacagtcctcttgcaaaacccgatttagcaaactttgctagctccatgtggggcctccaaaggacacagctgggcactaaatcctggctgaaaacaaaggccgatttagaggatccgtagaaacggatgcacagaatatccctcagtcttctctatgtagcaggccctccatatacgcgggttccccaagaccgaaaatattaaacaaatgaatttctttttt

SEQ ID NO: 445799 - DNA, 2391 bp, Homo Sapiens
  misc_feature (188)..(188): n is a, c, g, or t
  misc_feature (201)..(202): n is a, c, g, or t
  misc_feature (229)..(229): n is a, c, g, or t
  misc_feature (249)..(249): n is a, c, g, or t
  misc_feature (254)..(254): n is a, c, g, or t
  misc_feature (398)..(398): n is a, c, g, or t
  misc_feature (476)..(476): n is a, c, g, or t
  misc_feature (580)..(580): n is a, c, g, or t
  misc_feature (685)..(685): n is a, c, g, or t
  misc_feature (711)..(711): n is a, c, g, or t
ggccttccaacgacagagggacgaaggagggtgggaacgcaagattgttactcgtggcgggcgagcgaaatgaatcatacgagaggccccagactatgtatcctatctgatatgacagacgagcgcgtggtactcgtattatggggagacgagagactaacgagggatagtgtgctaaatgcgtagtnaggcggaacgagnncacacatatatagtcacaggtagagtnagtcgaaagaagagtgtctnctcgnccccgcgacacgcaccacatttcagtagagatatctgacgagacgcgtcgggtgaagacagccgcgcaacaacaagaagtgatgtaacacgagcgcgctctacggtcgacgtggacacccacacaacgctcgcgtgtgattcantggcgacacgcccgcgggcgcacgcgacaaatgtggatattgatgagtatagcgcggacagacaagcaacgccgcgcntatacacggggatggttgccacacgagatggagcgcgcggcgcgagcgcgagaatattatttaaaggaggtgtgtgtatagtggcagataacgacagcgtgttngtgtgtagagtgtagcacgcgtgtctcccaccagatgtgtggcgcgcggaacaaatgtgggtcttatatatacgtaggaaggctggccgagacacagcaacatcncgggtgctcgcgggtgagacatatgntggacaagacgacgcgcgcggaggggagcgcgtcatatacaatataagagatgataaacgtgagaagcgcgacgccgggcgctgtggagagaatgcctccgcgtggtgtaagatagaaagacacacgccgcagacagataaccaccctcctcgaagaggagcctccacccatttctgtgaggaagtgtgtggtgcgaagaaagcgcgcgttgtgagtttctcgcctcccgcggcggcccagtgtctgttgtatttggtgtggagagaaataccacagcccgggctttgttctgatgtgcgcgcgaggagtatcttcatggaggggaaacagaggatagtgggggcacagggttcgggtggacctcagggtgaggggcgccccgggcccccaaaacaagaaggtgttttagagaaaagcttttttagaagggccggggggcggcccgaaccctagagtaagcaatggggcggcggaggagcgggggataccgaggtaaaaggaaggaggagggtggtaatgcggagtaggagagacaccggcacgggggggagtaagcgcgggctgcagcgtggttcggtttaagttaagaaaaaagcctttaaaatgtttttaatacaaaaatactcatacacaattttccaaacacagctttccattttaaatgctattttcccccaactggcaagtctcaactctctatttcagtatatccctccccccaaaaagtgaatttcaagtttttaagtctaactatcaaacctggtgacagcacccagtattcctaaaaggaatctgaccttacattgtatgaagtttagacaccaataggcacatttaagtttgtatttaatttctgacggggcatttcacacctcaacagggtatggtgaggctgtgacaccccgtggacacagcattttactctactgactaacaaacagtcatcaactacactcataggatcaagatatttggcaactgacagtcatttgcattaacttgaattataaaacaggtttaattctggaaaataaggtagtcctggaagatgggcactgcacacgccggggtttagatgtcaagacagacaaacactgcgaaggggacccagccagccatggacgggtgtcgccggaagaaaggccggcctgaggacggacagctgggttctcacttcaggtgcctgaagagtttcccccacaggtgaccacattttaagctgcccattcggacacatccccctgtgggcgcacacgggtgggtatgggtttaggtgcagatgctggtttcggatgccaaggaatcctgagggattggggcggtttttgtgttttgcttcacattaatgatggaggattgaagctgatgttcaggaagtcaccacgtcctcagaacaaagctgggcagggccgagagccagccacacccacggtcacagctgggggcgtggtcagccccagtggcgagaaaccctgcaagctcagggccgctaccccaaagcctggctccactgagttatcaacgggtattgtagagacattcaaagttagtgttacttgctcattagtttaacagtttttggaaagggggagaaacatatttaaaatgtttgcattatttccttcagaaaaatcataaaatttggaagtattatcaaagcgattaaaaatcctcgtgcc

SEQ ID NO: 445800 - DNA, 598 bp, Homo Sapiens
tttttttccttgcaagcaggaatatttattacacagtctaattctataggtcctcagcagaagctcctccccataagctatcatcaggactcataaatgcaaatgagacacaagtgatactgtcccagtgcagaaatcactgcggtcttgcttccagagatttccagtacaaagaaagttttcccacgttgaagtgggatccctccaacatgacccatacatcccagagctccccaaagagtggcagactcactggtttcacagtaggccccctcccagccgtcactacagatgcacttgtaggagttgacaccatcgatgcaagtgccaccgtttctacaagggttgctctcacagtcattaatattttcatggcagtatgttcccgtgaagcctttgttacagtcacaggtgaatttgcctcccgactgactcttgcacttcccgtgaggaccacagacgttggaggaaatataccgcaccccttcaggtgtgtcgttggaagccatggccactgtgcagctgtcaatcacttcacagggggtcgtgcggcagtggtctttcaggtgtgagcagttcttgccctcatcctcgtgcc

SEQ ID NO: 445801 - DNA, 497 bp, Homo Sapiens
tttttacgatttgcatcttactctcttaagtcaggtttctggagatggctgtcccaacactggaatccagcctgtctacagcaagggagaaagaggaagctgatgttgggctgagaggggcaggcgttacagggtaggtctcacaaatgccgacgtgacaggcagggcttctgagggggcttcagggaccagcagggaggcgagactcaggcactgacccgcagagagcatggccttggacgcacagtggtgacagcagcctccaagtgtcccccgtgccctcaggcatgagggacagaagcttctggggcccctgcctctttcctgcccatcccctggtgaaggaaaatcgcctctgataggaaaagctggggccagactccctctccctgcattagtgtcgccgtcctgcctgtgaggtccccgggcccagggcacctcccgggacacccgagtggtgatgcacgaccctcagtcctggggcttagcctcgtgcc

SEQ ID NO: 445802 - DNA, 880 bp, Homo Sapiens
  misc_feature (161)..(207): n is a, c, g, or t
  misc_feature (212)..(308): n is a, c, g, or t
cttttaagacaggggcttgctcctgtcactcctgagctctgagcacctagaataccgtggtgcaatcacacctcactgcagccttgaactcctgggctcaagcgatccccccgcctcctgagtagctgggaccacaggcacatgccaccagatccaactannnnnnnnnnnnnnnnnnnnnnnnnnnnnnnnnnnnnnnnnnnnnnngggannnnnnnnnnnnnnnnnnnnnnnnnnnnnnnnnnnnnnnnnnnnnnnnnnnnnnnnnnnnnnnnnnnnnnnnnnnnnnnnnnnnnnnnnnnnnnnnntgatccctggcacctggcctccatttttcatcaggtttaggataacatggatttaaaacacttttattttctgcctctctaagaaggaaaactcactgccaattaaaccatgatatgcatctcgtgggagatgttgaattttgagaaatgtatcctagagttgattaaaagcatgtgtgccagaggtgggatttggtactgcagggacaggggcactgagctgggtgggcttcagttctttgtctcaagttcatggcctatcagtgttgatgaaacagccacagaaataaatacagtcgcgaggcctcataacaagtgccagtggggatggggagggcccagttcaaaggaggaaggaatgaagggggatattcacaacaggttttgaagttcaagttagtttgggacgtgtggatgggagaaaggcatgagtgaggtcagcaggttaggaggcaggaaagaatggattcaagtttaatgaataaatacaggaggattggggatcaggctggaagaagtggctgatgaggcctgagggcaagttgggatcagtctgcagaaggccctgcctg

SEQ ID NO: 445803 - DNA, 896 bp, Homo Sapiens
gtgggtggagattttcctttatttgattttattttggagaggaagggctagagcaaaaagatgatgccaacacaccgggcactagaatgacccctgcacatgcagaacacacggacactcaagctggattagtgactgagcaaatgtgccccgtggagagaatgtcaccagagctgcaaaagccccccgaccccagcttttattagttttaagacccccaaccacacccaccccaggtctccttgttttcagtaagcagacctcctagcaaactgggcttttactcctgtgggctcagtgccacatcccctcaaataaacatgcatcctctagagcaaaagggaaattgacaggatgctggaacgccgagagatgggatgctttatttttcattatccaccagcttgggagaaaggccaccttccatcgcaccagtgagaggcgggaaagagcgatcgggccctttcccgtctctcaggccttgtgcaacatggccctggctgctcactccagccctgcctgactttaaacaaacccagtcagtacccttccacctcttgccttgggaagaagacatttgagagctcacagatatagtgcaaccggttatccaaaccaacatgttctcttgctcagcttctgttctatccaaatgtctcatcctgctcccccaaaggggatttctgatatctgaaaaaccccaaacctgactccaggcctccccagcaacgtgtgagccccatggaatgtatttattttcattgcaacaatacctcacaacccggcttctgcatttcccggagacggcatggggataactcaagcatctcttcacggtggcgtggttgtcggtggccctgaccttggagttcttccagttggaagggcaaatatcg

SEQ ID NO: 445804 - DNA, 1592 bp, Homo Sapiens
tcgggccagtactcctccgggttatggtagcgaggcctgggtggccgaattcggcacgagggcaaggcaagcagcagcccctgtaagcacacgagacaatcccaagtgtcagtgggaaggagatccctttcctgatggggctgcctgtgtccagtccctcccagcttccccagggccctggggctctgcaggcattcagaagtggaagccagccacagcctgggactgaagaggttaatgtgcatctgcctccgaatgttaatgtgtctaggtgatgtcagtgggagccatgaagaagggagtggggagggcagttgggcttggaggcggcagcggctgccaggctacggaggaagacccccttcccgactgcggggcttgcgctccgggacaaggtggcaggcgctggaggctgccgcagcctgcgtgggtggaggggagctcagctcggttgtgggagcaggcgaccggcactggctggatggacctggaagcctcgctgctgcccactggtcccaatgccagcaacacctctgatggccccgataacctcacttcggcaggatcacctcctcgcacggggagcatctcctacatcaacatcatcatgccttcggtgttcggcaccatctgcctcctgggcatcatcgggaactccacggtcatcttcgcggtcgtgaagaagtccaagctgcactggtgcaacaacgtccccgacatcttcatcatcaacctctcggtagtagatctcctctttctcctgggcatgcccttcatgatccaccagctcatgggcaatggggtgtggcactttggggagaccatgtgcaccctcatcacggccatggatgccaatagtcagttcaccagcacctacatcctgaccgccatggccattgaccgctacctggccactgtccaccccatctcttccacgaagttccggaagccctctgtggccaccctggtgatctgcctcctgtgggccctctccttcatcagcatcacccctgtgtggctgtatgccagactcatccccttcccaggaggtgcagtgggctgcggcatacgcctgcccaacccagacactgacctctactggttcaccctgtaccagtttttcctggcctttgccctgccttttgtggtcatcacagccgcatacgtgaggatcctgcagcgcatgacgtcctcagtggcccccgcctcccagcgcagcatccggctgcggacaaagagggtgacccgcacaggcatcgccatctgtctggtcttctttgtgtgctgggcaccttactatgtgctacagctgacccagttgtccatcagccgcccggaccctcacctttgtctacttatccaatgcggccatcagcttgggctatgccaacagctgcctcaacccctttgtgtacatcgtgctctgtgagacgttccgcaaacgcttggtcctgtcggtgaagcctgcagcccaggggcagcttcgcgctgtcagcaacgctcagacggctgacgaggagaggacagaaagcaaaggcacctgatactttcccctgccaccctgcacaccttcaagtcagggcaccacaaca

SEQ ID NO: 445805 - DNA, 1260 bp, Homo Sapiens
ttttttaatttaaaacaattactttattaaaaaatagcaaatctcacaaatacttatttaatttcttatcactggccattggaaaacacaccagcatgtgtactgattgtctaacataaactgaagctgggcttgccacaagacgcctgtgcatcaacagcttgcgatcaacactggaataagtttggtgagctcaggaaagagaaatccctccgccctgtcaagaacatcagcacaatgcatttcaagtataatcccataaggcaacaatatgaagcacagcagcacaatctctgcgtcacatttcctgatgaagccttcaacaaggcctaggcctccagttatggcgaattacagcgagtcacatttactaaaagcagtaagtgaaaacgatcattgaacttgcactttaattactttaattccttgttgtggaagatgattctgctactggatttggctggaaaagtaaagactgctgcttctcttcaaatcacaagaaagcaaactacatttcattttagctagcagaagtatttggaacatcttgtgcatctgccaaatggagtttttgtatggaagaattcaattcttctaaatctgacagaagcctatccagattggagtcactggctgtttttctcttatcctcaggaagttcctctaactccccatagagctccaaattcaagcgagctaatttctcctgcattccccgaacatgttccatctgttcaatggaacattcatttccaaatgcttgaagttttccagagtggaaatcattcaaaagactgagcagccctctctccatctcctgaacatctgagacatcagtgaggaaggagtgctggatcggagttgactgagcgcctttgccctctccaccctgaggtttggtcttttctttcatcactctttttaactttggtcgctgtgaagttgactgtgatgcaggatttgaaaaccctgtgcttttactcactggaatggcattttttttggcattgacaacctgagtacagtgggcactaaaagacttaggactcctcctcttcactttccgctcttccattgttttaagttccttattgcaccacggccagcttcttaagacctgaagaagaagggtattggggcccccttccgcaacccgcaaagacccgacagcctcagaagccaccgccgcagccacaagcagagccccggtcacatcccgggacccgctcctccgcctcgtgccgaattcgccacccaggc

SEQ ID NO: 445806 - DNA, 531 bp, Homo Sapiens
  misc_feature (331)..(346): n is a, c, g, or t
aatgaataagaaaaagtaataaggaaagaagcagcaagcagactgggtgtgttaacaagtctgggccactgcaggaggtacattgcccaatttctgcaccccgaggccctccaaagtctaggagaagctcctgggaggtccagggcccaagaccaaagcctctatcaactctcccacctgtgaactgcccctctcccaaggtaggcattgtcggggtgtgtagactgggagccacccacacacctgactctcccctcctaggaaatgcgtccaccaggtcatttttcctgcaaaccctcattttaaagtgtcttggatgctttcctgcccnnnnnnnnnnnnnnnnaacataaagaggggtgagagcccaagagctacagcagggggaatagactgaaactgctgcctactcacacgccagtttcccttcttagaactctaaccagaagccaatggtttcctcctaaaagaaaaactcaatctgttgactttctctctcctctcctgccagcttttctgcccgagccgggc

SEQ ID NO: 445807 - DNA, 959 bp, Homo Sapiens
ctcatgggaagagattctttatttgattttcatcacctttcaatgaaagagggggtcctgtcagcactacgtaaaatatatatcttaagagcattaatttctttttaaatgaaagacagtgaagaaagtctgtgttagaaaaaggcataatagaagcttggttaaatgtaagcaggtttctatcaagaaagaataaaagtcccattactccattaaaccagtaataaaaacatactattgtgcatgttctcaaaatagttgttcataaaagtgaagcttgttagtccttttcttctttttagtgaccaaatcaacatgctgtgtatctaaccatcctggcaagacatgagtcaagggaatgagaagcatggttgctaactctatgctcaaaggaggttcctgggtaggaataccagccctgttttccagaaggtagagagatacataacagtttcagatacaactaacacaagacctgtgagggtcatggctctggcccattaagtctgggtagctgacataactttagttctcttgggttctttctctggtctcagttcccttagcgctgacgatctggcaggaccgtagtcactgggattgggtattccaaggcattgcagtcatccaacaggaataccaaatctctcctgcagaacgagttcatgatggtgtacagcttccgtgctttgtccttcaaggaatctacctgggccactttccaacacgggggcgaggccacaaagtcccgcagcttgtccagcacacagtaattgtgtatgtccaggtacagcctgggcaggtatctcacacatggctccgagggctccgagacctgcaggaggttgaagtcgcgggtgatctcctggctcagggcccgcatgcgggagtagcaggtcgggggagtgggccgcgcgccgggggctcccgccaggagcagcagcagcacgcctcgtgcc

SEQ ID NO: 445808 - DNA, 1627 bp, Homo Sapiens
  misc_feature (62)..(127): n is a, c, g, or t
  misc_feature (188)..(384): n is a, c, g, or t
  misc_feature (1309)..(1369): n is a, c, g, or t
  misc_feature (1556)..(1586): n is a, c, g, or t
aaataaagccgttggttcggcccccgcgggcttttttttgtgtgagtgaataacacccaagnnnnnnnnnnnnnnnnnnnnnnnnnnnnnnnnnnnnnnnnnnnnnnnnnnnnnnnnnnnnnnnnnncccccggcccacaaaaaagccccaggaaactttttttgagagggggtcggcccccccccgnnnnnnnnnnnnnnnnnnnnnnnnnnnnnnnnnnnnnnnnnnnnnnnnnnnnnnnnnnnnnnnnnnnnnnnnnnnnnnnnnnnnnnnnnnnnnnnnnnnnnnnnnnnnnnnnnnnnnnnnnnnnnnnnnnnnnnnnnnnnnnnnnnnnnnnnnnnnnnnnnnnnnnnnnnnnnnnnnnnnnnnnnnnnnnnnnnnnnatttcaaaaaaagtcttttaattgttcaaaatagcacaaaacgacatcgcactatggtaatattgagtcacaggggttactctacaatagtgaacggtgtactctcctcagaaacaaatcaataggcgcgcgagagaagggatggggtaaaacaacaggaccaggtgagtgggctccaaggtgactaaacgtgacattttccacagcgaaatatactataatacaacaaaccagaggccctgggaggacacaggctgctgcgtctccaggccagaggtcggtagggggagggctggaaagattgggctgctcgggttcaaatccttctgacttggctggcaagcccttgctcctcgacagaagtttggggtggggggcagaaaactccaagcagatcccccagcctcggagccttgccttgagttccatgctgcacagctgctgctggtggcctgctccattgccctagcctcccttgtgggtgacactacacagtcaccctcccaagctgcctccaaggacgcctggttcccctccattctccaccctttccatgacgatttgggggaggtggagcagtggctgcggaaaccagcagccctgtttgggaggcggtgccggtggtgctcagggagggggcatggggagagctggaaatccaggacaaggaggccccagccctccctcaagctcccctaggctcgaccctatagatgcggagtgatcgcccatgaggaatgagctgtccttcctttgttccagcggcctgaggacaggcaaaagggcagagggcaggggccagcaacaggaagttgggctgggtggcaaacagcaggcccctcgtggcagatttcacacctctcctgccctggctggccccagcttttcctccagaaagatccctgccaagaattagccaagaagnnnnnnnnnnnnnnnnnnnnnnnnnnnnnnnnnnnnnnnnnnnnnnnnnnnnnnnnnnnnnttacacattctgtacacagctaacaacaacaaaaaaagggacaaaaccccacacgctaaaattacaatgaaagtgtgaacttcaccaattgcaacctaaaaaacacaacaaatgcagcagttggcagtgcggcctgcagggaggtctgcacaggcgctgcccaggccgccgcggggctccttgcccnnnnnnnnnnnnnnnnnnnnnnnnnnnnnnnaatgggaaagaagagggggagggtagaagaggcctcgtgcc

SEQ ID NO: 445809 - DNA, 739 bp, Homo Sapiens
tcagaaaaaagagactaatttatttgttttataaaatagaatgagcgcttagtttagataatcaagaggtgacagcttcaggtatcatcttcaccaagaataaatttgtagtgtttcatattcatttaaaggaatcaggaagaaaaattcatttaatttctgctgcctgcccagtcacttcaaaaattcttaagggaagctaaaataaaaataccttggattctggttactttttaaagtaaaaatttccagatgcctcaaaagcagtgagttcaatttggtgtcttgtgttctggcaaagaacagttaagtttacagcactgcagtcacagttttcaaatgctgtgaccaattatttgagagttataatctgcaggctccattttcaaaatatgtgggataacactgtcaattcgtatattgccaatgagacctttgaaaaacaattcttcagtgatggtagcattcatcagtcttaaagctggcaatctgagtagtagtctggataacctgtaggtgtcatctggatatgttttggttatataatcttggaattccacataagccttttcctgaaatttctctatctgttccatgttttctaggcttggatgatctggactgaagaatactattgccttcaggttagcattatcctattcatcaatgcggaagttaaccatgcctgtccaaaacttcctgagtttgaagagtgcttcatcgattaatagcttcttct

SEQ ID NO: 445810 - DNA, 436 bp, Homo Sapiens
gaagcaatttttatatactttttattatttagcaatacatgtttatcatagaaatttaagaacctaagtaatacaaagaaagtaaggattacctttaattaagaacctaagtaatacaaagaaagtaaggattacctttaatcaataaacaaagataaacttttggagggagcatataccattccagtcactaagtaaggttttaatattcagattccagaattctgatcaatcaatggctatgtttcacacttctttaaattaaaaaattttctatctttacatattttagtgactgaattaccatggcgtaattgagagtttggatttattatggtacattccgatttctatttaatacataaggtacctgattaaaattttagcctatttggttaaatactaacaatacaggttgctattactcttgtcttcc

SEQ ID NO: 445811 - DNA, 864 bp, Homo Sapiens
gagtggaaatttgataaatgtttattgacttgctgattcaaaaaaacagtgtagctgagaagtctgatcagctcagaaaagagtggaatttggcaacaaatatgttatccaacaaaatctgagtaatttatcaccttttaacatcttcaacatatttataatataaatattttttaaaaaaccgattattaaactaatactcccctggaagaacaagaggactaattttcggtgacgacagacttgtgctgatccatcatctggaactcctaaagacctgaatggctgactgggattagtgactactatctggttttactggttttactctactaagcccatgattttgtgttttaaccaattaagaaaattatcccaaagcacaataaaaatagcctaggtctgaataccaccagtttttttggcaacagtcctgcttcttgcctttttctcatcctcatctgcagctttcttgaattcatgttcaaaggagctagctagttcattgaagagtcccacctcctcacagttcttcaggaatctagttggagtaggcgtttgatctgcaatgatgactgagtcagttcgggctgggccaaatttcaatgtcatctcatgcttgtgtttatgaactgccaggtggtcctcgtttgtaaatctctgtccacagcccggggcattgcacacaaacggtctgtcgtctcccatatttcatatagcagagaggagcggctggtagctccgttgcctcccgcctgcccgcgctcggtcctacaatctgtctccagctcctcctttccccccttggcggaacggatactttcctcccgtccggccaggcgcgctcactctcgcagaaccgct

SEQ ID NO: 445812 - DNA, 761 bp, Homo Sapiens
  misc_feature (330)..(356): n is a, c, g, or t
gttttccctccaaaatgttttaattatatgtccatccaatatataaaatatatgcatcattttagctggataagaaaagcaagtcaaatgaaatgacccttctcgaaacttaagttaaataatcttgtaggaagaggtatattttgtctttttttaattattttagcattctgtacactgacaacgaggtaaaagaaaatgactgaaacttacaagtgaaagaacatttcacaattaaatccacaattgtatacatttatcttactcacatgtcagtgaaaaatcaccaactattataaaaagaggacaaattgtatcacaaaagaagcnnnnnnnnnnnnnnnnnnnnnnnnnnntatatccaactatgaaaagcgttgctctcttggtgtcttcacatccgtctcttctgtgtactgatgtacaacacattgtttcctcggataaatgcatccccatacttattcttcagttgtccatttacatattcttctgtctgctccagggctatattcatgtagccatccaggcaagccaggacccctcgataatccactccagaatttaattttaccacaactggtcgtccgatgatttgctttaagaagtcactaggggtttgcttccgaagactcattttaacaatcctcgccggcgggaaccagaaccctcactccaggcgccccacgagcccggccgccgcggatgatcccagccaaaaccgaaagcgcccctcgtgccgaattcgccacccaggcctc

SEQ ID NO: 445813 - DNA, 939 bp, Homo Sapiens
  misc_feature (576)..(584): n is a, c, g, or t
gggggttggccatcatttccatcattgctggtatgatactggattctcgggggtatttgtttttggaagtgttcttcattgcctgtgtttctttgtcacttttatctgtggtcttactctatttggtgaatcgtgcccagggtgggaacctaaattattctgcaagacaaagggaagaaataaaattttcccatactgaatgagaagttaaaatgaatgtgtcatgagaatgggcttaacacatcgttggtttgaaaacttccatttttaaaaatttagagtttagtcattagaaaaaataatggactggaaagttatatttatatccaaatatacctatttcaaagtgtatttgtgaggcctgttttagcctgtgtcttttgtattgtgtgttgctaaagaattctacttttagtaggctaatcaacaatgaaagggttagaaaattgctgtggaacatccaggtgaacttcaggaaagacagtgaaaaatggaaaacgttggagcttctgttgagataatcttcattaggtatatatcttagggatacagccttttctttatcttatagcaggnnnnnnnnncttttgagggaaatagaagggctgcgttacacaaaataaacaatggcattgtcataggccttccttttactagtagggcataatgctagggaatatgtgaagatgtttttatgaagtctctttctgatcacgaacaatagcttgcgctctactctgtagttatgtggattgccgagcaatgacccttttcaatttcttatttctgtgttactgaggaccctaatcacttagggatgtaattttatagtataaactttctgtacagtttttcttatagtctaataagtaaaaagtgtccttcaaattatgataattgcctatgtacatggataaattaaaacactgcccccggaaa

SEQ ID NO: 445814 - DNA, 1152 bp, Homo Sapiens
ctcattaaatgcattatttattaatttaacttctagtactctcgataaagagccagtgaaatgagttattgagttccagggaaaaaaatgagaacataattttgaatttattatctctctatacacacacagttcataattggattacatataataataatatcaacaagtctatcagtatcgaagttggatactggtaatttctcatgtgaggctcttgtgtcacagtcagcatagatttctggagcatttgtctgttgatcttttggtggcctcaaacctcattaagtggtgtgggagatgctgtttctgccatgtgagaatgtgatggcagaattaacacaaccccaccaggggtacaacagagcactttacatccaaaggcagagagggacacagcaatgcagaattccagcacacttaagaggagcaccatgccatccagacccattaagatggacatagtcccatgacaattatttgagttgccatagtagttacagtaagggtgatggaatgaataaaacgccaagctaaatgtgttgattaagatccctgatgcagccagtacagagctggtgatattcattcctagactacctcggaccaggccttttgtagttctaattcctgctgcaattgacaaggatcctgaaataataaacattactgacccccaaattgtgtacccgatatacacggaaatagggttacttccataagtattagatgccatacacatcattgttattcccatgctaaggctcatcagggcagtcagaatctgcacaaccccaaggactttgggttctcccttcaagaacttctcttgcaatcctttccacagatgtgaatgtatgacagccatgtttcccagctggggcacaccagggccagcccctggcatggcctgttccattccttgcatggttgtcatggcagcagaaaaggtgctttcttcaggcctgcaatgtctgctgtaggtctgatgcatgcagggctctgggcaagttcctcaaagttctgtggtctagacccaatcaacttcccccactgcacacctcactcagtttaaatcggcatcccggaaattccggaccggtaccagctttgtgtctggtcgggggcgtcgttttgtgggtgtttgtttgt

SEQ ID NO: 445815 - DNA, 786 bp, Homo Sapiens
  misc_feature (62)..(62): n is a, c, g, or t
ggccagaagaggggaacacaggcaatgcaggaaattcccagccacacttaaggaggaagcanccatgccatcccagacccatttaagatggacatagtcccatgacaattatttgagttgccatagtagttacagtaaaggtgatggaatgaataaaacgccaaggctaaatgtgttgattaagatccctgatgcagccagtacagagctggtgatattcattcctagactacctcggaccaggccttttgtagttctaattcctgctgcaattgacaaggatcctgaaataataaacattactgacccccaaattgtgtacccgatatacacggaaatagggttacttccataagtattagatgccatacacatcattgttattcccatgctaaggctcatcagggcagtcagaatctgcacaaccccaaggactttgggttctcccttcaagaacttctcttgcaatcctttccacagatgtgaatgtatgacagccatgtttcccagctggggcacaccagggccagcccctggcatggcctgttccattccttgcatggttgtcatggcagcagaaaaggtgctcgaatctctctccttttaatttttaaagctccaagtatatttgacttatttaagttgttccaaagacgtaatttcattcctatatcgagacatctgcatatattgaaaccatttgcaggaatgttccacccctcttgtgaccacctttcttcaggcctgcaatgtctgctgtaggtctgatgcatgcagggctctccc

SEQ ID NO: 445816 - DNA, 660 bp, Homo Sapiens
ccttaggggattattatcaagaacgccctatttaatgatggggacatgctgccccacttccatccctgggccttggtgcacaggccagaaagtccgagacagaccatttgtcctccctacaggggaccaacttgcacaaacaaatgggcatcagcccccactgggagcagccgtgacccctgggtcctcggtcccagccacaaagccagttctgagtttgttcagaatcctgcttagaatgaaggatgctcctacaccaaagatctcttaatacgaccaccaaacaccacgggattttcaaaggtagctgccacagccgccgcacacaagctctgttcctggcttgcttctgccatctgctggccagttgataaaaggcaccgggggttattttccagtctctctgaggctcttgttttgtgggaggaactcatcaccacctttatcttcacaagggctgcttggcagacctgtcccataagtagtgcaacttgggaagatcctaggcctcttgtgggtagggcagtcatccagtcctgcatcttatgacttcacacgttacaaacgttaacttgctaaacactcaatgtgaaaccgcgctgctgggtgttgcagtccacgcgatttcacaagactccatgcaggacacctcctcgtgcc

SEQ ID NO: 445817 - DNA, 728 bp, Homo Sapiens
gagacagcttttaccatgagaacggctttgctgcatattggaattcattggagaaactcaaattgcctgaggaaaaatggagaaaattatccaccagtcgattcaaactgaatttcactctttataggaaggcagggcaaacttgtaggagtacgaaacattttcaataaatctacaaagggaagccttactacaattccaaaaatcatcatggttggaaatttgggaggagattatttgtgaacttgttacccttttggtaatggtggactaattgctgtatagttatttttgttttattattactgttacattaatttaacatgcatttatagaagaatacattcaaagcactgatgtaggagatacacggtacttggagcagtcagccaaaaatcacagatactgctttcacttaaatggaaacaattctccgataatgctttgctttttttcttatgtcactcttgtgtactatctatttttctcctctctgggaccaagtttctttttataaagcaataatatctctgttttcatttcagaacattgtgctgtctgtcagcatatgtatatcagctacaaaatatattcaactttgacttcttttgacaaaggactttaggaaaaagaggaacaaagacattatttgagaattaaattatatatttttaatatgactgtgaccttgactgataataaagatgtaataagaattgcaagctaaa

SEQ ID NO: 445818 - DNA, 607 bp, Homo Sapiens
agagagagaaagagatttattattaggaattggcttacattatgatggaggctaaaaagtaccgtgatccaccatctgcaatctggaggcccaggaaagttgatagtgtagctccagttagagcctgaaggcctgagaaccagggtgtaaatcctcatccaaaggctggagaaggtgagatgcaatgtcccagcccaagcaggtgggcagcaagaaaaaaggtgaattcttccttcctccttctcttgttctcttcatgccttcaacagattggatgatgcccacccatattggagagggccatctactttaatgagtccacgaatttgaatgctaatctcatccagaaacatcatgtgatcttggccaagttagttatcctcttagagttctcttctgtaaaatgaggttactgcattagatttgtcgatgcctccagcgaagccatttctgctttttaccagcgacgctggaacagtgttattgtgggatatgttcagtgttgaacaggctcccagggcacggctgttactttggaggttatgctggggtacagaagttaggctggggcagggccatccacctaggagggcccagccctcgtgcc

SEQ ID NO: 445819 - DNA, 1290 bp, Homo Sapiens
  misc_feature (64)..(158): n is a, c, g, or t
  misc_feature (167)..(223): n is a, c, g, or t
cctgggcctccaaggcctttcccaggaggtagcctgggggatttaccagggtgtgcaacccacnnnnnnnnnnnnnnnnnnnnnnnnnnnnnnnnnnnnnnnnnnnnnnnnnnnnnnnnnnnnnnnnnnnnnnnnnnnnnnnnnnnnnnnnnnnnnnntcatcctcnnnnnnnnnnnnnnnnnnnnnnnnnnnnnnnnnnnnnnnnnnnnnnnnnnnnnnnnnccatcttcttgccagcaactcttagaccaggaagcctcggatggcagctatgaagtcctgtgggcggtcagcgtggatccagtggccagcgttcggcaccgtctgcatctgggcccgagggaagagccgcataatctcagggtggtggctgggatgcacgaactgggagtttccaccaaggagaaagagtgttggcccgaggtaggactcctgcctctgtgggaaagccaagatcttgtctaggtgctgggtcagggcatccaagttcaccctccacacgaagcgcccgtctacctctaccaggttagtgagcaggtgctgccgcacggccatgtcctggatgacagaactgagctgttcatccgccagttttcgggcacgggagcggggcagctcatctgcgatgttgatggccctcatggctgccacgtaggttgcaaagtgggagacacctgtgctttccactgggctgatatctacagcaatgagacgttccaccagctctggcctctgtagtgccagcagcatggctgtctttcctcccatgctgtggccaacgacgacgcagggcaccaggcccagctggggcagaaggtcctgcaggtcctggctcatgatctcgtagctcatgtctgggctgtgggggctgtcaccgtggttacgagcatccaccgtcagcaccctacggcctgtctgctgggccaagatcttggcgatggagttgaagttagttttgctgccgaagagcccgtgcaaaaagacgacggccgggagggctgcctccccgtccagaagcctgtaggaaagcggaagcggcctcggctcggcgccccctcggccgccgctgctgctgctgggtgcgacaggcaccctcgcgaagctagggccgtgggggccgagtccctcacgcgggagcctccaggctcgggtccagcggagcatgcttgcaagctgttggccggctcgcatctcacaaggtacgtcctccccgcgctccttctcccgccctagctcgcagccccgcccatttccgtcttcagcctcgtgccgaattcgccacccaggcc

SEQ ID NO: 445820 - DNA, 608 bp, Homo Sapiens
aacaattgcaaagattttatttagcggctttctgtgcttggcacttaaaaacagagttccgtgcataagggcaaatttttgtacaccttttcttcatacatattttacatacccttttattgccccctttttcatattcataatattggattccccactaggcacataaatacatttatctacaacacctcaaaaccagaaactttaataatatctgtattattttacttggtattatttgcatttccacaccatttaaaaattttagcttgcaccaagcttcacttgctttcttaccattaaaagatttgaagggaaagggaaagatgaaggacaaaacccaaaacttcaaaatgcaatgtactatttgataaaaatggagatctaagggcaggtagaagggtatagaagacccatctgcaattccctgggacatgaggggatatttcctgtcacagggatagcgggcaggcattctaggtcaggtgtctggatccggcacctggaggccaggcctctatttgttgcctctgctcttggtatcatcttccgagattataaaactattccttcttcacacccttttattttccttcccctaccaggct

SEQ ID NO: 445821 - DNA, 447 bp, Homo Sapiens
gctcttggcattttcctcgcctaggcctgtgaggtaactgggatcgcaccttttataccagagacctgaggcagatgaaatttatttccatctaggactagaaaaacttgggtctcttaccgcgagactgagaggcagaagtcagcccgaatgcctgtcagtttcatggaggggaaacgcaaaacctgcagttcctgagtaccttctacaggcccggcccagcctaggcccggggtggccacaccacagcaagccggccccccctcttttggccttgtggataagggagagttgaccgttttcatcctggcctccttttgctgtttggatgtttccacgggtctcacttataccaaagggaaaactcttcattaaagtccgtatttcttctacctctgcctcttaacccttctgggaagcctattgtgtacgccgcgagccctcagc

SEQ ID NO: 445822 - DNA, 762 bp, Homo Sapiens
  misc_feature (279)..(304): n is a, c, g, or t
tccaagaaatgttttatttggttcaaaatataaagggcaggttagagggctacacagaaaaaaggctaaaaataaagacagtaaaatgagggagaggaaaagtggaagtgcagcactactgatccagaaaaactgaggcatcagccacaaagaattcaatcaagtcagtgaggggcaaatggcacaaaagccaaacaagaaaaaggctgaataccatattaccaatctgagagcctcacttttggttttaagtcaaatattgaattagattgtgcaacnnnnnnnnnnnnnnnnnnnnnnnnnnaaaaatccaccaaaattacttaaatcatttgacagagtcatacaattttaaatgactataaaaatgtgcagatcagtgccaaattttttggcaaaggctgaatggcagacagtaatccaagacgcagacaaccttgcttttaagccatccgttacacagagaccagcaggctcccttctacctgtgagaccaaataatcccaaaatgtaaccaaataatcataactccccctactcctaaaacctacccttcacccttcactgtctacgtcagcctctggacagacctgatgcctggggtttggccatttccgccttcccaccctgtgttggtctccctcctccctcctcaggtccctcagttctcccaggcctaacttggcgtgcttccttcctctctcaccccaatcaatccggctctccttccctttctgggttacgccacctgcccgacttccg

SEQ ID NO: 445823 - DNA, 655 bp, Homo Sapiens
gaaacaggtgataataatatactttatttacttcaattcaatttgttcatttattcatttactcatttattcaacatttattaagcacttaggtgccagaaatgacatcaagcactactggaaaacaagagtggaataaaataatgtctttgaactttaaccaaagaaaatcctagttacagttctaagtgtcaaaatgtacggtttcagggaatgatgatgagagagaaaatcccagagctgtcgaaatcagggctgctgcctacctgactagctacctggctttaccaccattctcaggggcctcggatggggagagcacatgctaatagcaaacatgggtattctaaacttcaatgacattcctttcatgccctgctctttctgaatgcagaaaactaagtaagtcccagtatgaatgctattacttccgatagctaaactgcaccatgttcatgttgctcagcacataaaagatttgtttgctaattcaattttggagatcaaaatatttcatcacatagggattatcattttcatataaagttaaacaaaatatcattgtaaaatagttgggcaaaatgatgagcatctggaagatttatcttttcagcatttagtacctgtgggtaacctgtgacactttggcagctga

SEQ ID NO: 445824 - DNA, 1088 bp, Homo Sapiens
tttttctaccatcctcctatctagtagaaaaacggagggtaggtcttcgcagccatcaagttgtgaccacaatcctctgtcatagtggggtagcatccgacgtgctgcaggcctcaggacccacgtgagtcaacttgattgtttgaaaagtgctcaaaagccaggatgttctctaatgtgagttgtaggatgatgatagcccttctgagcacagctaaatgtgacatgtatgtgtctattgcacaggattttataagggtccagaaacagtactgtatttctttccttgcctattatatacatttttctgataagttcagtgtttcactgggaaatgtgacttgcagggagctccccttaggggcaggcccagccctgccgctcccaccagcctcatccaccagtaagacactctctgagtcctgaccctgtgaagagtctgaggtctctgatattcgcaaagtcctcagtgaggtggtgtcttcctgggccaggcccatgccaggcacacctggaagcaaattcctgcctccaaggccattttcactgaggtctggcagtgagaggtctggcaggagggtctgagatgtactgctgatctccttcagctcccgggagatgaaggagcgagagtggcctgacatggcagaagatgtcctttgactgtctgagcagtgctgtccggagcgctccctgcgggacccgccaatgcggcagaagaggcatttgatcttctctattgctttactgagcactgtctttctcaggaggatatatatccaggggtctaggatggggttcacagaagcaattcggatggcctgcaaatctggatttttactgacttctcgctccaaacttggctgatataactggttgacgaatactcgcaccacgagcgggatggagcagatgagcaccaccagggaggtggcaatgagtaagatgaccatctggatctcggcgcccgcgatgcggcggaagctccggcggcgccgaaagtcgctgaggcgcggcaaggctggggaggcagcggggtggccccgggaggcaaccgaggcggccgcaagctaattcccttagtaggg

SEQ ID NO: 445825 - DNA, 948 bp, Homo Sapiens
  misc_feature (65)..(101): n is a, c, g, or t
atatatatggcgcttagctgcgagccgaagaccgagcgcaggagtcagtgagcgaggaagcggcnnnnnnnnnnnnnnnnnnnnnnnnnnnnnnnnnnnnnagtcgaggtaccggacatatgcccgggaattcggccattacggcggggcagatgttagatatttttcataaacaagttcgagtcaaagttgaaaattcatagtaagattgatatctataaaatagatataaatttttaagagaaagaatttagtattatcaaagggataaagaaaaaaatactatttaagatgtgaaaattacagtccaaaatactgttctttccaggctatgtataaaatacatagtgaaaattgtttagtgatattacatttatttatccagaaaactgtgatttcaggagaacctaacatgctggtgaatattttcaacttttttccctcactaattggtacttttaaaaacataacataaattttttgaagtctttaataaataacccataattgaagtgtataatataaaaaattttaaaaatctaagcagcttattgtttctctgaaagtgtgtgtagttttactttcctaaggaattaccaagaatatcctttaaaatttaaaaggatggcaagttgcatcagaaagctttattttgagatgtaaaaagattcccaaacgtggttacattagccattcatgtatgtcagaagtgcagaatttggggcacttaatggtcacctttgtaacagttttgtgtaactcccagtgatgctgtacacatatttgaagggtctttctcaaagaaatattaagcatgttttgttgctcagtgtttttgtgaattgcttggttgtaattaaattctgagcctgatattgatatggttttaagaagcacgttgtaccaagtgaaattattttggagattataataaatatatacattccc

SEQ ID NO: 445826 - DNA, 754 bp, Homo Sapiens
  misc_feature (359)..(367): n is a, c, g, or t
gcactcaatataggaaaggatcggcgtgtgaataattacaaagtagcaagtatttttacatacagcaaatatgataaaaaccctattatagtggggcatgtgtaatgaacagtactttttaatttcaaaatagctattcattaaaaaagaatgggagattaaaaagagaggctcaaagctcaaggtaaaagttgatagacattgtaattacatggttaatttcaaagatttatatgctgttatgatttaaaaggaatttttatgacctgacattttcatttgagaagattttttatttaaaattaatcttcgagctcctattcttaattatttcttggcaagcgataaatggtaatacnnnnnnnnntgccctatatcaaattttaagcggaataaatgcatgcgaattttcgaaaagcaataaagtggtttttacttatttgaattgcgttacattgaaatcccctgttgggggaatttgtgggcgagagctggaaattattggcccatttaagggagcagcaatcttactgcagtgcagcgtttatgacacttgaaaacagattggagagtgggttttgctcgggcgacttgattgtctttcaagttggcgttaagagttttcaacaggtctccttccctgccagccgggaccccgggggtccctcggagcagggcgggtgggaccgctcggcctccttctctcgcccgcacgggcgccgccgcagacccggagcaggcacccggcggccgc

SEQ ID NO: 445827 - DNA, 1708 bp, Homo Sapiens
  misc_feature (122)..(158): n is a, c, g, or t
  misc_feature (228)..(268): n is a, c, g, or t
tggggcgccttttctccgtctccttcactctccgccatccagagagactgctacatatgtggagctggggaatggtttggcagggaggaccgacctggcgcagaggtgaaaggagacagacnnnnnnnnnnnnnnnnnnnnnnnnnnnnnnnnnnnnngaagggtgaaggaggtagcgaagcaaaagcccatgaagagtccagggaaaccaacggtcagaactttttnnnnnnnnnnnnnnnnnnnnnnnnnnnnnnnnnnnnnnnnncttctggctgggggatggccgcctgccctccagggctgggccacgttctctccggggctctcggagtccccgccgccctgggctggggtgcgaggggcgagggtggccgatccgaagatcctaagccaccacgaactctgacttgatgtcagggttgacttctggcttccacacggagtcctcgaagtcgaggcccaagccggaggcctcgctggggctgccgccgcccccgctgctactgctgtcgctgcggccggccttgcggctgggtgaccagtggtacggaccccgcgcgtcccgccgggcctttctacggagccgtttctgctgcagaagcagctgcagccgttccaccttgcagcgcgtggcgcggttttctgtctgccgaagccgatcccccgggggcttgcacatgcggatctggctctggccctgcagcagggaggctgagggggcagccgtgagcttctcgcaggaggtagttctgggggccaggtcgggggccggtgaggccggggagcactgggcgtggcagcggagctgggccagcgaagggggcatgccctggtagtgccgggtggcgctcaggaggtcgttcaggatctgcaggatggtgccgatgtcacgccgcggccgcccgctgctgtcttggcagttggggtgtagcgtgccagagaaggtccctgagaagacccccggggcgtgattcacaaagctctcgatgacggcgccgggttttcgggagcggggggcagggctggcccctggggtagacgtggtgctggcaccaggactggcactgctgctggccgtgggggagcagtccatctgctccgggcaggtggtggaggctgcgtgggaccggaaggagccggctgtgatgggcgagggagatgcaggggacgggctggtgggcaccggggggactcgggcggcactggacaccggccaggcagggcgaggacacgggggaggctatgctggggtccccccgcgcagcagcggcggcggccacgcagcaggccagcacactggcaggatgttgcagtaggagcgatgctgggccagcgagctgcaagctgcacgaacatcatgtggtcgcccacacgcaaggccagtgtcagtggcgaacggcccagacaggaagtcactgacctgcgtctccgtgagactctcgagagcttgcatcaccggactgttccggccttgaggcactgagacatgaggcccgcttccacggtgggtaccaaggtcagcttgctgccatcacccacgccagaactcctgcagcttccccgaactgagccggcactaattctagtcctggctcctcatttgtaggaaccacgggtttcggcccgaggagaggacactggggtttgcccctcgtgccgaattcgccacccaggcctcgctaccttatactgcgggggtactgca

SEQ ID NO: 445828 - DNA, 1281 bp, Homo Sapiens
  misc_feature (1050)..(1050): n is a, c, g, or t
  misc_feature (1059)..(1059): n is a, c, g, or t
  misc_feature (1156)..(1156): n is a, c, g, or t
tctctttaattttacatctctctcaatatcactctctcccctccaaggtagcgaggcctgggtggcgaattcggcacgaggcgacggctgttgctaagggaggggacgcgcgaggaagcgcgacccgggcggcagacggcacccagcgccaccagccgagcggcgccccctccccaggacccttaaccgcgccgcgtcccggtcgcgcccgccgccctttgaaggagaagcaagtgccgtccccacccccggaaggcgcccccaggagccggagcgacctcggagagccactcggattttggatttcggtctcgcattccgcggccgggactttctcgaggaggacgcgcgctgctccgcgcccccgagtgcccggaggacccggcatccggggagcctctcgcccctgtcccggaggcgcggcgaggattggcggcgcccgccgcccccagtcccccagcgcgcgccctgggatggagccagcagcccggcggcaccccgttaactgccgggacgggggcccccccggcggcgatctgccaagcctggccccccgacgactcgagggcgctcaccaatgttgtcgccccgcagccatcagctgcctcgagttcacgcgtccacatacactcgggccgggccacccccccctcgcagcgctgcgctcccgcgggcttgcggctgactgagatagtgaatccaccgggacatctgaaatcgtgaggggcgagagcagcgcggaggcagtttctgccgcaagagagatcgacctgaaacgatgatgaggccggaggacgtagtaagaaagaagccatcccccgactgcgcctcctctggcagcccaacccccacggtgggctatgtggcggcacgcactccgtggcacaaacaacgccggtacatgacactacttacgcggccgcatatgggcgtgttctcacaaagcaaactatcagactatgcaatcgtctgctgcatgggtcggcctaatgtaggccaagatgcccggcgccgggtgaagcgcgagctattatgccgtcggcgacgcangcgcgcgcngtcgactgctcgcatgcctatgctgacgtatacccgcgacgtcgttggtgagtcacacgttcacctaggtgtgaggcactgatgaggggtgtttganatatcccttgtactgattgctacaaatccattaattcaaagcagtactgtcggctggaccccccgcatccgtatgcgactccgtccgtgatccctgcgtagttgttgtggcgtcctctagtccct

SEQ ID NO: 445829 - DNA, 1159 bp, Homo Sapiens
agcgggtgcagcaaccgactccgcccagcgaggcggagcctagggaagccgcgggcggcccgccgctgtcctggagctgctgctgctgctgcggcggctgcaccggcggcgccgaggccgagatcgaggccggggtgcgcgcttcgcaaacgtgccctatccgtgcggcttggctgcgccagcccttgcggccacccgggcgtctaggcgggtctgtgcgccgcccgggcgaggatgcggctgttccggtggctgctgaagcagccggtgcccaagcagatcgagcgctactcgcgcttttcgccgtcgccgctctccatcaaacaattcctggacttcgggagagataatgcatgtgagaaaacttcatatatgtttctacgaaaggaacttcctgtgcggctggctaacacaatgagagaagttaatcttctgccggataatttacttaaccgcccttcagtgggattggttcagagttggtatatgcagagttttcttgaacttttagaatatgaaaataagagccctgaggatccacaggtcttggataactttctacaagttctgattaaagtcagaaatagacacaatgatgtggttcctacaatggcacaaggagtgattgaataccaaggagaagtttgggtttgatcctttcattagcactaacatccaatatttcctggatcggttttataccaaccggcaatctctttccgcatggcttattaatcagcacacacttctgtttgggggtgacactaatcctgttcatcctaaacacataggaagtatcgatcccacctgtaacgtggcggatgtggtgaaagatgcatatgaaacagccaagatgctgtgtgaacagtattacctggtagctccagagctggaagttgaagaattcaatgccaaagcgccagacaaacctattcaggtggtttatgtgccctcacatctgtttcatatgctatttgagttgttcaagaactcaatgagagcgacagttgaactctatgaagacagaaaagagggctaccctgctgttaaaaccctcgttactttgggtaaagaagacttatccattaagatcagtgacctaggtggtggtgtcccacttcgaaaaatagatcgtcttttttactacatgtattctact

SEQ ID NO: 445830 - DNA, 678 bp, Homo Sapiens
ggcacgagggctccttcattttgagccaaatcagataggcatgtaaaaagattttctgttggtatagctggcactcttgtttcagtaggaggaccacgctgggtatccaacttgagagacgttaaagtgaagcaggcagaaatccgcttctgagagagggcttcctgagagtgatggtgaaagttactggaagtaatgggagcagaaagggtttgtaccaaggctcctgaaatcacgcaggatgaagcagaaatctactctttgacaaacatggagggcaatattggaatcaaaggatgtgagttcaagtcttggctcttcaaattctatcaggctcgctctcaagttcttttgtgcggtgaagtcaagaatccgtacctgctcaccagcaacaaaaccacagtgaaggagcagaatgcctgtctgactcaccctgacagatcagctatggcaggtctgctgttgtagaaaattcttcaccccagaggctttatctctcctgcagggaaggctcatgagcaaatgctgtcattagcaaccatgcattgttgaagacatatagtgagaaaatatgtcaggtattgtttcaatgtaccaatgttagtagaaaatcctgaagaattttcgagatattaactgtagattaaaacaacctttaacctaaatcctgagaagttc

SEQ ID NO: 445831 - DNA, 794 bp, Homo Sapiens
gggataaacagctagctaagaagccgaggttcagtggtggcagcaggaaggacactgccacaaattttgtctatttcatatttgtcccctagagccagccctagcaaatgtgtgagttgggagtagttaatagtaaataagactctgactttacacaagctacacattttatacttttcataaaccacaaagtctctctagaattttttctgccttcactaaaattggactgtagccaagatataaagcaagtcatttggaacctgccgagtgagcactgaagctactttatcatgagatgtgtgttaagaaggctgcagcccacaggagtccagggaaggcggggaccacagaggcacagagtccagcacttggccgctcatgggccttctttctgcctcagaggacgggggcagagaagtgatgaagggaaatgttcttagaggaggaaatatcctttgtcctgttcagagagaccagggccctaccattaggcatactttcagaagcaacctggagaacagctatcaatcatattcaaaaccagtacaagaactgctgcctggtaccctgtgagtcatttctatgaaattccatataaagaatgatgataagtttaccccctgtgcaatctcccaatctgaaaataaagttgagttggctgtgttttctctgctcttgtcagaacattgggacaattggtcgttcaaaaacattcatcctcttactgcaagtttatctgggtactcttacctgtgtggtcaaaggcatttcttttcagcagtgatcattat

SEQ ID NO: 445832 - DNA, 676 bp, Homo Sapiens
actggaaaggctgatacattcctagatataaaaacaagaatcttcaatataaaagaagaactgcattgaataaaatcatacagcatgggcaaaacatcagagagctgccgttttccctgaaacctctgccatgcacaggagcagtgcctcttacagcacccgcttcaaagcccagctgccccaatcccatcactagttcatttacccacaccagtcgtgatgcactagctttccaatgtggacctctgccaacatttgcctctgctgctttaaaagatgattcaaagggaaggaaagaaaatagtggttctgtcctaacggatttgcctaaaagtcagggcagagtggggtatcaaacagatgtgtcttacacacaaagagcaatttaagaatagactgctaggccagatttctgtggaagaaagaacattggtctctagagttttcccagtaaatttacatgcatgtgtgaacaaaggtctgggcactggatacttttatagagaaccagctcaaccactgccatccacaggtgcatggacttatccctgcatagcagccagtgggatgcgggggctcagggtatccactcagttactggaccatgtaacttagcattcctcactgtgttcaggagaaagctgcccagtcagaggggcaacttaagcctcgtgcc

SEQ ID NO: 445833 - DNA, 288 bp, Homo Sapiens
ggtggggcaaggggggctgctgccactcagccggcccaggagccacacagatctcttggccctcaacagcatccagggtgttccaagggctttgcagctactgcctccggtcttccgtctccgacctggaaaacgccatcaccacgtcctctgcacctgggccgcccgacccggccgggccggcaggggcagcgggtccggcgcgcagcgcgcggcggcctgttccggggcgtgctcagcccgagcagccgctgcggcggcggcagtagcagcagcaggagcggccgc

SEQ ID NO: 445834 - DNA, 704 bp, Homo Sapiens
tcgctctcttccctcctggcctgcttctctgtggttcgtgtctgctcgggcggctgtttgctgcccttcgctcgtgctgcctgtccctcaccggcgcttcttcttgcggctctcccttcctgtcgtcccgtcccgcctgctgccactcagccggcccaggagccacacagatctcttggccctcaacagcatccagggtgttccaagggctttgcagctactgcctccggtcttccgtctccgacctggaaaacgccatcaccacgtcctctgcaccctggtcgatggagtgcggaggcagctggctgagctggctgttgaccacccctgcataggtgcgcaggaactcctcctcgctggctgtcaggtttgatcccatcttccgcagcatgagcagcactcggaccttctgctgaatgtacatctcctccggactcttcccgggagctccctcgcggttcatccccctgcctggctctggggactcctgcttctggaaattaacttcaggcaaacaggtgctcaactgtgaggggagggctgtggctgggcagaagtaggaaggtgccgccctgggccgcccgacccggccgggccggcaggggcagcgggtccggcgcgcagcgcgcggcggcctgttccggggcgtgctcagcccgagcagccgctgcggcggcggcagtagcagcagcaggagcggccgc

SEQ ID NO: 445835 - DNA, 758 bp, Homo Sapiens
aggagaccagggttctccattctttccgcccagattagaatgccaaggttaagagtccaattttcatcctgtgccatgtgaatatcccagttttcccaccacccaatttgttcatttcttcccccctgaattgtcttggccacccttgtcaaaaatcaactggccataagttggagggtttatttctgaactctcatttttgttccactgatctatatgtctgtccttatgccagtaccacccagtctcgttgaccttgcctttgtagtaagttttgaaattgggaagtgtgagtccaacttcttctttttcaaggtggtgttggatattctgggtcccttcccttcccatatgaatgttaggatcaccttgtcaatttctgtcagctgtgtagccttgagcaagcctctgagcctcaccctggcagccctgccttgcagccctacagcagggttgcaagccttgtccccagccaggaggcagggaagaccagaggggaggaagacttcctcggaagtactttgtcctcagagagtgccgcgatcctggtgggcgggggctccagcttggccgcagcctccttgcttgtcctgttcgcaagccaatgctgcaagccccatcagcgatccttgtcgccttatctgcaggtgcagaggacgtggtgatggcgttttccaggtcggagacggaagaccggaggcagtagctgcaaagcccttggaacaccctggatgctgttgagggccaagagatctccc

SEQ ID NO: 445836 - DNA, 406 bp, Homo Sapiens
tttggaaaaatgttttatttaaacctttttaatcttttacaacaataaaatattgcgtcaatataaaccccttgactaaaacttcacatcaaacattacagcgaattgttttctttttgacatccaacttatctgtgaaagaatttccttttaaacacaatgcagaatttattgaaaataaataattgttggcaactgcaataggcaatttgaataaaatagttgaaaaagcaactcttaatgaaaatagcgtttattatacatcagttactaaatgaataaactaaatgatctttctttaaattaataacttcaaaaacgtttaatatacaaaactgtacagttataaagtcggcagaaatatttgggttaactcaggttcgaaccatagcaattaactgcaaag

SEQ ID NO: 445837 - DNA, 1127 bp, Homo Sapiens
gctggtacggccgggatttagggatgcaaatctccggtttggaagcgcccctcccacctttgtagtgcagttcctaggtgtggtggggaatgtgccgtgctctcagcagacagaactgctggtgtgaaaggcagggattgtcagcccacctgaggctgggaggaagcaggaccaggcctaggatctccccagcagatgcaaacaagtgtcctcccctgaattgtgtgaaccaaagcgtcaggggcttggggcacagccccagtcagctcaacccagtcctgcttcagagccaagactaggccagggtggggacccccccagtaccctccctacatcaatgtggctgctggcctggaccccaggggtctggtacagccaagatgttctggacaacatccagctacttcaaaggccagagtgtcctttgggtcctcctagagtccccctaggtctctggctgcccatgaggctcatgaagcagagggtatcccagtcatagggagcagaaagagcaagtgggttaaggaagcctgtgggggacctggtggatggagttgaccaacatcgctgggtggctacggccctccttaggaagcccagaaggacctttattattaaaataatcattttgaaccctgctctatcccctgccctcttccagccccacccctccctggtcttgaaagaagactaatcagtgggcacaccaagggccctgaggggcagggagatgccaccatgcttctctgtcaccgtaagaaggctgaccagccacgcccacctcctctgtctgactgagttccttcctgtggccacagggaggggctggtccttccccttggtgctggctctctgtcacaatgcctcaaaagacatggaacccaggcctacaaccgtcccaactgctaattcttttcctttcattttgctttctgaaagcagtttgttatactattcataacattgtagagtttaatttcatgtcattttggatcttatataaaaatgtgaggatttggatttttaaaaagaatgactccattttaggtagccacttttgatgttaatatatagtgagtccaatgtatgctttagaagtaaagacattgaccgtcacagaccacaaa

SEQ ID NO: 445838 - DNA, 736 bp, Homo Sapiens
  misc_feature (541)..(552): n is a, c, g, or t
ggcacgagggtgggggctgccgtactcaaatctgtttttaatggctcagttcagggctgagggggagcaatgtcaaaattaaaattagagctctagatttaattggcagaagtttaagactttcacttttggcagtgctcaagctaaatgaccttaaggatagagatcttggggtcatgggggagcatcaccctaacccctaggcttactataccgcatctctttagggtctttacagtcactcctcaactttttggactcaggacccctttatactcttaaaacttatttaggacttcaaagacattttgtttatgtgagttatatcctttgatatttaccagatattccccaaccttcccattgctctcatagtccagttatataacttaacataaccctattgtgctttgtcataacgttattaacaagttttttgagatagattgtgaactccaccaagactgtgaactccaccggggtaggaagcatattttactcatttttatatacacaagtcccagcacagagcttgactctnnnnnnnnnnnncccagcaaatgttaattgaagctgcaaagtggaaggaattaacagactagatctcttttcactctggtctcctcttaattgcctactacaacttcttgttcaaagggagggactgcagagggcctcccttgtggcaatctgatcccagttccattcctcttccagcgaatgtcatggtaaccac

SEQ ID NO: 445839 - DNA, 1358 bp, Homo Sapiens
  misc_feature (42)..(42): n is a, c, g, or t
  misc_feature (44)..(44): n is a, c, g, or t
agaagaccacgcagatgcttgctggacctggtccattatctntntcacacggaaaggcttgtgacttttccctttgggcatagcagaatataatgcattctgcaagaatatcaccttcctctgctttattgtcatccaattcaggtatggttacagatgaggtttttcctccttgagcctcatctgtacttctgccttctgtaggaatggtatctcgtttttcaaattcacctgactgtgctcctcctctaactccttctccagcagctaactcatttggaggggattcgattgttagatcacttagagatgtagctgtggaaaagtttataggtgtcccttcaacacaatacacccgtggcatatcatcccccggtgtaaaactaacatgcttttggggttgcaacctgttttgtgatggtagaagtttgtacacaggcagctgacttggtttccttgccacaggtggaggtaattttgaagcagtctgggctggcttttttgctttacgtgatgactttgttggcatggcagaaataatacattccttcctagtatttccaatatcatcatcatctgaatcatcctaataggtccttttcagaatcaatagttttttctgcctctttctcttggttttcatttgattctttaggctgctctgattctgtttcattcccattgtcattttcctgaactggaggcattattcttaattccacatctttctgtataaatggctcatcgaggctcagagcactcaggctggatgaacaagaaaatccatctggagtactttctgtggcaaaatgtaataaagtatcagcatctggaagaacctggaccctctgaactgcagcatttactgcagcttgcttaggtccactctctctcttttcagcagtaggtgctttatttttaggtacttctcgcttggtttgagctgtttgaggaggtggtggaggtgttttacttctgcttggtggcatggtttgtccagggctatctggaagatcactggggcttataatgccacttaccattccactgcatggttcactctgaacggagctggcaatcgaacgactctcaaaactatcaagtgaactgacagaagtacatctgctaaacatgagtggggtctcctgaacatagtgttcaggtggacttttgggtgtctgagcaccacttttggagggagatttcgctcctgaagaaaattcaacagctttgtgcctggctgattctgaagataaactagaaccctgcagtctgctggatttggttctagggtgctgtgacactgctggaacttcgctcacaggatcttcagctgacctagttccaatcctcgtgcc

SEQ ID NO: 445840 - DNA, 369 bp, Homo Sapiens
gctgctggaacgttttattaagttaagaggttcagggagcagaagagaaacaccttttgggtggctttgggggttctgcacccagcacagcctcgaaggaggttgtggggccatggaggccagctgttagctccctttgtcctgagccccatggtacgggtccaaatggggcaggaagtgttagtaggaggtagggcaggaagagggtggcaggctcccgcctttcccctgtagagacaccccgccatggttgttgcctgggcctccgccagacctttgggccagggccaccagttcagaagcccaagcagagggtggctggagacagagggggaccagggttggaggcccacagccaccaggaattgc

SEQ ID NO: 445841 - DNA, 1105 bp, Homo Sapiens
  misc_feature (115)..(128): n is a, c, g, or t
  misc_feature (362)..(409): n is a, c, g, or t
gaggctggaccggtccggaattcccgcgatgctgagccgagagaaagagccgtcgggcgctgcctcgccagacctcgctgggaccccggggccaccgggaggcacttttgtggannnnnnnnnnnnnncgacctcggcagcctcggcgcacgaagcgtccgagggcagcgtggggcgggctgcgacctctgcatcggtggactgcatttttaattaaggattcccagcagctctttgggatttttacagcttccactcatgtgttgacacccgcgtccaggagaaactcgctccaagtgcatctagcgcctgggacctgagacggcgttggcctttcgtgcatgcaaatccagggatttagnnnnnnnnnnnnnnnnnnnnnnnnnnnnnnnnnnnnnnnnnnnnnnnngcagggagtaagaagggagctgggggtatcaacaagcctgcctttcggatcctgcgggaaaagcccatgtagttaagcgctttggtttaaaaaaaaggcaaggtaaaggcagggctttccagacacatttaggggttcgcgcgagcgctttgtgctcatggaccagccgcacaacttttgaaggctcgccggcccatgtggggtctttctggcggcgcgccgcctgcagcccccctaaagcgcgggggctggagttgttgagcagccccgccgctgtggtccatgtagccgctggccgcgcgcggactgcggctcggcgtgcgcgtgttcccggccgtcccgcctcggcgagctccctcatgttgtcgccctgcggcgccccttcgacgacaggctgtgcgcggtctgcacggcgctccgcggcggagcttcatgtggggctgcgacccgcgcagccggcgcctcgctgagggaacggacccccggtaaccggagaccgcctcccccccacccctggcgccaaaggatatcgtatgttcaggtccaaacgctcggggctggtgcggcgactttggcgaagtcgtgtggtccccgaccgggaggaaggcggcagcggcggcggcggtggcggcgacgaggatgggagcttgggcagccgagctgagccggccccgcgggcaagagagggcggaggct

SEQ ID NO: 445842 - DNA, 1189 bp, Homo Sapiens
tttttcggttaatagtagctgacgtttgtcgttttagtatttgtctctgtcgttcagactgttgtgttcttgcgttggtgttgttttcatatacttctcctgttgttgattcttcgttttttcttcatctttttactcgcttgtccagcgtttgtcttgtttgtactgtattgtgtgttgtcggttgttctgctcttggtgaccagtccgaggttcctctatggctttttgtgtagtctatccttggctatcttgttgatgttgcgtttgttgtgtagattcttgtttgtggtgtttttcttaggttctctttgttcctgctgtttgggtggtgtggtggcgcatagtcttgtttgatcttctgggtgttgtgttgcttcggtggagtcgtgtatttattctttcgtattgtctggtttgtgtctattgtggttacatcgctttctcagactcagtatgatatatagtagatgtcatgggctcgtggtagtggtgaaattggggagcgctgttgtttgaatcggtatagtttgcagtttggtactgagtaccaattctggagatgaatggtggtgatggtctgcacagcagtgttgagggcactttatggccagctgaagtaacagatgccttgtcataaaattatagcccgcgtgaaagtatcaccatagcataactcagcaatgacaatcagtttcagtgaaaatacaactttatattaatcatctcaataatacagattacagaactgagtttacagattacagaacttttcatactttgtgggtcagaaaggataaccataaattactgtctccgcgtttatgggtggtatatactgagccacagagaaatttctcgtaagattatttaaaaggaattgatgttcattaaatacatatcctcactgatttttttaaggtagaaaagtactatgcacagtgcttataaaaattactgtaacagcctcatgttcgagaagtctaaaatctttaaggctactacatgtgttaattttcagtacatgtcctaacagaagtacatcctttattccagttacatcctgaagataccgaagtcagtcttctctattggtgcgttgagggctgcactaaaactgagagcccaagatccagtctggtgtctgctggatcgatgatcccatcatcgcacgcgtgggtcgacgata

SEQ ID NO: 445843 - DNA, 674 bp, Homo Sapiens
  misc_feature (351)..(359): n is a, c, g, or t
ggcacgaggaatattactaagtttctcttgcagtgaattggaaagggtaagtaatagcttgaaacaaagcctagcttccatggtttactggcttttaggtatctagtatgtatttatcccaacagggctataggatttccaggtaatatcctaatatggccttaaagtgtaaccatcttgttaaggaagaaatcaagttgcttttatgcatgttatgttatatgccctcacagacctctggtgactagcctagtgtctgtccagcaggccaagctgttattaaaataaaaatattagctacaatttttgagtactgattttgggccaagtattgtgctgtcataatttcannnnnnnnnacttcagccccatagaaccatccctctgaaaatgcattaccaaacaaaaaaagctgagtctcttacatttctaaacaaaaatcagtgcacatctgggtgcagagcaactgacagagccagtgttgaagtttgctttcttgttttgacacatgcgtatacctggtgcggttttatttacagcaatgttttttgcttttagtgaatgtcagtatttcaggttgagtttgtaaggaacatttacattccttagcccaaaaacttgcattgtaaaggatgagatgtatagttctcaaaaagtcactattttctttgact

SEQ ID NO: 445844 - DNA, 1410 bp, Homo Sapiens
ggttggtggacatggatgtggaggtggaaggaggaggacgttgcgtggagtggtgggaggaggcgggagccgtgtgcgagagcaggtggaaagccttgaggggcagtgaccagtgatgcagctggcttgtagaagagctcagcgagtgagcctggcactccagagggctgcggcagggtggggatggcagcatggcaccagtccaggagagcttcgtggactgtggctcctgctgctgcacacccccaggagcacagccacgggctgcaggtgtggctggcctcagcactcagtcctcacccggagcctttgcctgctcctccttccaagagcactgaggcaccagtgggcttggcactccaccttgggcttccttttcctggagagccgccttgagggtccctcctgtgactggggtctctgcagcgagagccgcgggggttgcggagcccctgcctgggggagctggcggaatgtgagccgccggccgggggccgccacataagacctgcaaggtggtgcctggggccctggctccttctcggctgcccgctgcccacccagtaacaggccccaccagctacagagcccaggcgggtgccagccacgctgggagggcagaggacagacagccccggggctgcgacttggttctgtgtctactgttagaagttgagtgggaagctgcaggcccgccaggaccactgggtccctacagagcaaaggcctgcgtgttcccaaacagccgttgcccccgtggccgtggtaggtaatccatattggatgtcataaggaccagggggatatttaaagagagaaacagaaaatatatagagatataaaattatattcacagtttatctacagatttttcgtaacaatctttcttttccagtttgatactgtaaatctatcagagcagagccgggggcacgggcacaggtgggagttgggagcaaagcggaggcccgggctgcccgccgtcccccttcatctccccacggactgtaccaggcagctgggccccgcaggacaggccgcagcgggtggccggttctgtcccgtcttggggttcttggtgtccacgtcttgtgggccgtgggcttctacctgcccttggcctgcagtgctttgctggagaagggactccctggtccccagggtggacggagccgctgtcaccgcccagagctgggccggggaagcacggtgtgttctgctttttctttcagattgttgaaatttcattgtcatgatttaatatatggatttttttatttaagaaaagacgaaggactctttgtccccgtggggtttgttttctgtctccgtgcctccggctccccaaagagatccaggtctttgcggtttcccggggcgggggggaaccccggcccccttatgccggca

SEQ ID NO: 445845 - DNA, 541 bp, Homo Sapiens
tttgccgatgatgtaggagaggattaagttccagccggtgatgaaggcccagagctctccaacggtgacatagctgtagaggtaagctgagcccgtcttggggacccgagcaccaaactcgccatagcacaggccagccagcactgaggccagcgcagcgatcaggaaggagatgacaatggcagggcctgcattctcacgggccacagctccagccaggacgtagacaccagcacccagtgtgctgcccaccccgagggccaccagatcaaaagtgttcaggcagcgagacagccgcgtctcctcccggctacagtccaccaccttccgccgcagcatttgctgcccaatgttgagcaggactttgcaccccatgttgctgttcagagctggaatatgacgggaagcctcaccaccttctcaccagaggacagcctcgatcttgcagcaaagatgtctcaggagggatacaaggaaggtttcagaatcaaatctcagagaccccactattttcctccacagggatgaatatcctcgtgcc

SEQ ID NO: 445846 - DNA, 625 bp, Homo Sapiens
  misc_feature (95)..(95): n is a, c, g, or t
  misc_feature (553)..(585): n is a, c, g, or t
ccaagccggtgatgaggcccagagctctccatcggtgacatagctgtagaggtaagctgagcccgtcttggggacccgagcacccaaactcgccnatagcacaggccagccagcactgaggccagcgcagcgatcaggaaggagatgacaatggcagggcctgcattctcacgggccacagctccagccaggacgtagacaccagcacccagtgtgctgcccaccccgagggccaccagatcaaaagtgttcaggcagcgagacagccgcgtctcctcccggctacagtccaccaccttccgccgcagcatctgctgcccaatgttgagcaggactttgcaccccatgttgctgttcagagctggaatatgacgggaagcctcaccaccttctcaccagaggacagcctcgatcttgcagcaaagatgtctcaggagggatacaaggaaggtttcagaatccaagccggcggcggcggggctccggcaggatcgcgaacagacagactgtcggacgcgctcaaggaccaacggacgctcggccggcgagaccnnnnnnnnnnnnnnnnnnnnnnnnnnnnnnnnnagaggagtggaggctgcggttagcgggagcccgcggccgc

SEQ ID NO: 445847 - DNA, 572 bp, Homo Sapiens
  misc_feature (337)..(349): n is a, c, g, or t
tttttttcactgcatccaaaggtccaaagttttattgttttgaatacattctccagcggcccctctactccccccaccctcagtccccaatacagaataaggcttgaccacagccccccaccccaccccagaggccccagctgggaggcagagggggcttccagtttggtttcagggcacccccttcccatccccccacccgcctgcccatgggccagtcctaggagcagctggggatgaaggggttggaccggtgctggggtggggagtgggagagggatagcaggcacttgtagagatttgtggcccatgggcggcacccctcaccctcctccgnnnnnnnnnnnnnaacacatggaatttttggttcattataaaattgtccctccctcccctgctgtgaccttgtggggtatgagaaacctaggcactcatggccccctgaaggggcagggcaggcagggctggggctgaggagggctgggagtggggcacagcgggtgggtcagaggggtacaagaggcagagaacagggagggagacaaggctttacttcctaagcgcctcgtgcc

SEQ ID NO: 445848 - DNA, 1228 bp, Homo Sapiens
  misc_feature (312)..(312): n is a, c, g, or t
ccagggagacggcgcgcagcaacgtccggttctcgcctgatgtgtgtctagcgacgtgtttatgcgtctcctccgctgtcgcgtcaatgcgactctcgcgtgcgcccgggtcacgcgacttcgatgtgatcttgatctcctttcgcgacgcgtcactctagctcgtgcgtgcacgctcgttcagagttgtggcacgcaactctcatgtcttcgagcgcgcgcatgttactttaagcatttatgtcgtgtcgtgcgcggtggaatctttacacggtgcgaatgatggatcgtcgcgtggcgacgcgcctcgtntcaaggcgctcagagccctgcgcgcgcgcgtcggcccccataccccgccgcactcgggggtgcgatacgcatgtgtctgtttttgtgtatctcgcggggcgccgtgtagcgccctatcggagcctcaccacgcggtgtggggggtgtctgtcgcccgctttgtcgtcagaggacttctctccggggtggtctctttcgtttggtgcgacacacctgagtctgccgtttcgtccccccggatctccggatttcccacaacgggtgacgggtcccgccggggtatcccggtgtttccgcccgcgtctccggggtacggggagggcttttgcggccccgcctccctcgactttccacccgcccccgccaaattcggggggtgtctctccaatctctctgggtgttcccggggattttcccaaccccctgttcggtttttcccctctgcccggaaaactcccgtcccgctcccttttttccttgtttcccggcatcggggcttgctgggaccttgtttctttttcccggcgccttttcgttcgctcctcttcctcatctagctcacttttcacgggctggggcctcttgcccagtttcacctccaggaagtgcaagggtgcaatcatggccccgaggttgcggatgtcagcgtatttcagctcctccacagtcagggccgagctggggagcccggtcagggggccaagccctggcagggagcctgtggtcaccgaagggtccgggatctgcccaggcatcatagcaggaggagtggcaggccagccgtgcagaaggtgcggggggaggcggcgcccccggggccggggcccggctgcaggcgccgtgcccgctccgcgccgctgccgcccggccgcggagctccgcccggtgcccaggcctgtcccggcccgggagccgc

SEQ ID NO: 445849 - DNA, 598 bp, Homo Sapiens
gttgcttttatttttggcataaaatctaagaaaccactacctaatccaaggtcacaaagatttacagctgttttcttctaagagttttctagttttcactcttacatttaggccttcgatccattttgagataatatatgtatatggtactaggtactaggtaggggtctatttcccctatttttacaagggacgaaactgaatttcaaacatctagtgaactctccagagccaaactattccaatgcagcagtcctgctttgctacattgcctccaaaaaggcaagggtttttattcgcggggactggggagttggtagggtgtagggaggactacagaggcaaaccacggaggagtttgtcagagcatacacatgcactacgctcagtaaaaggggatcctgtagccacagagcagagcacagtcaatgagccccagcatatggcaggttgtacacaacctggaagggtggctaaacccagaggaggcccaggccctcactcccagcactttcacatcccgcctgaatccatccatgagttcctctagatctccatgctccaacctcaggccaggttgccttgtgccttttgggca

SEQ ID NO: 445850 - DNA, 1799 bp, Homo Sapiens
  misc_feature (53)..(80): n is a, c, g, or t
  misc_feature (106)..(184): n is a, c, g, or t
gggaaaaaatttttaggcccttttttattttccctagggggcccggggccccnnnnnnnnnnnnnnnnnnnnnnnnnnnngagggccgaaggcggccacacaagannnnnnnnnnnnnnnnnnnnnnnnnnnnnnnnnnnnnnnnnnnnnnnnnnnnnnnnnnnnnnnnnnnnnnnnnnnnnnnataaatcttttatgtatttattatgtttgttgcatcgagtggcataattgtttgaatacaaaactaaagaaattcagggaatttctccctaacatgcactgtaatagttaaaacacatacagacaactgcagattatgttagaatacaagattgttatttgctatttaccacaattgcaaaatcaacttgtcaaggaaagacaattagagtccttcaaatatcttgatgtttatgtgtttgatggctgtaatatacatgtaaattgtggagtatgacatacaaaaaattattgctttaaatatcattattgctagccccaaaaagagttgcaaaacatagctaagtgtatgtttttttcacatagcaggcatttgcctcccattccttttcctcaataaacaataggataaaggtctaaagccttgactttagatttggagttgacaatctgcacaatccttctgcccaaagccatgaatgtcttctcgtgtaagtgcgcgtgggtgggtgcgtgcgtgcgtgccacgcctgcagagacttaagctttgggatacagagtgaccgtgtcatagccctctgggggctttgtgcgggctcttgcgtgggtttcgcagtacagctccccttctatgaagaagtagcccttttgcttgaggttgaggttgcagtcggcacacacgaagcactcagggtgccggtacttatcccgggctttcaccacagcaccgactatgccactcccacattttgtcacagagcggcatcctctgtgccccgcctgaaccgccatggactttcgtcaccggagctctcacactccgcgttccagccggacggtcatcagagccatcgtccaccattccctggagcactctgaaggagcccgactggcgaggctgtgtgggctcattccgattgtcgtggagcatccggtacacgtccgactcggggggcaccgaggctgtgggctcgttttgaggtgagctaggaatgagaccccgcagctgtccgtgaagcgcatcttgtatattgctagttgaatagagcccaattggcgagttataggaagcgctcactacctgtcttttgtcatcaatgtttgcagctgcaacaaaaggctgggcccttctgttgtgcgcggtaccaatgggtttgaattcctgtggttctgattctaagttgattttgaaaggatgggctttcccatcttcagatacttgtggagaccataagtgagtttctcccctgtcaattttgagacacagctggtgagctgctgctttaatcctgtcctgcgcatcagcatgagtcatggactctgtcccaaagccgtcaatagccaggatgacatctccaggacacaggttggcagctgccgccttgcttcctggtgtaatcctggtgatgaccaaaggctggttgaagtctatgccccctgagagcctgaagccccagggcgcagggcccgggaggatcaccgtctggggcatgccgccttcctcccgcccaccgggctctgagtgtccccgcgcagggcagccactccgcgccgggcggcgtcctggccccgacccgggcgggggcgctttatccccgctgggggtgacgtcaccg

SEQ ID NO: 445851 - DNA, 515 bp, Homo Sapiens
  misc_feature (354)..(354): n is a, c, g, or t
  misc_feature (479)..(479): n is a, c, g, or t
  misc_feature (482)..(482): n is a, c, g, or t
  misc_feature (484)..(484): n is a, c, g, or t
aattgaaaaaaacccaaaatggccaaattaaatggaaacgctcaactacctgtcttttgtccatcaaagtttgcagctgcaaacaaaaagctgggccccttcctgttgtgccgcggttaccaaagggtttgaaatccctgtggttcctgaatcctaaagttgattttgaaaaggatgggctttccccatcttcagatacttgtggagaccataagtgagtttctcccctgtcaattttgagacacagctggtgagctgctgctttaatcctgtcctgcgcatcagcatgagtcatggactctgtcccaaagccgtcaatagccaggatgacatctccaggacacaggttggcantgccgccttgcttcctggtgtaatcctggtgatgaccaaaggctggttgaagtctatgccccctgagagcctgaagccccaggcgcagggcccgggaggatcaccgtctgggcatgccgccttcnctncncccaccgggctctgagtgtccccgcgcaggg

SEQ ID NO: 445852 - DNA, 573 bp, Homo Sapiens
  misc_feature (337)..(345): n is a, c, g, or t
caataatgaagaaatcttacgttttattgaatactttggccagatcagcccctttgaagggatcactaatttaggaaagaagaacaacaaaccatcattcactttcctgcaggttcatcgttttcctaattatttctatggatcctgctttattctttctgtaaattaaggggcaggatgagagtttctataatagatcagcaatggtctggttcttatccaaatattccacctaatagggatgtaaattctcatgggattggacaaccactctgcaacattcctgagaattgaataatataataatcttgaaagtcagcagagtggattatccacnnnnnnnnnctggacttgaacttgtgaactcaacagtagcactgcaaaaaagcaaacgtgctaagcactttgccggagtaaccttccatgtagacttttcatcttaaatacacacaactgaaaacaactacaatttttggaaaattatgtacaaacccgatacttcttttgattacatataaatacaaattagctatttttttcctaaaaagtggttataatagtaaacctcgtgcc

SEQ ID NO: 445853 - DNA, 536 bp, Homo Sapiens
tggggccatcatgcccagctctaggtttttaaaatgtaggcaaggaggtcagcatttacacaaaagcagggtttgatcttaggaagcttaataaagagaggggtctaatcaaggtttcctgtaggatctgggctttaagttaggccttaaagaacgaagaatgtttgtgggtgtagtaagcaatgacttggagcagagccctctagccattgggctcaccctcacaggcaggcgccactgaccctaggggggtgtaggcagctggaggaagtactgtgtgtcccccattccagcgatggtggcccctctcagagtcaatacccttccttccaagagactgaacatacaactggacaatggccaggccacatatgacaatagactctggccagaaacccataaccagcctgggaagccaaggaagccaaaccacagcctcagcagcaatcggacccagaacagtctgaacttagtggctgccagcttcttcccaatccccagccaccacaccccctcttccaactccacctcgtgcc

SEQ ID NO: 445854 - DNA, 662 bp, Homo Sapiens
ttttttcaaattttaaaaagcacaaaggtcttaccccacctactgagatcatccactgacattatgatgtttggccttaacaaaattctagcaaacagcaaaactcttttcatcgataagccagatgacacaaagtcagattttcaaaataaaaagataggaaagaaaatttaaacgtcatgtgcccatatcatttactgccaaatttgcaaaggttttaaaaataatattcggcattgacaagggtgcagtcacccttttctctgatgtggaggtcctccacagacgacacaagaatggagtatggaggatcatgaattttctgtctgcccatcatgaattttctgtctgcatccttaggggcaagactagcaaagagtgtgaggtccaatagggatcatttgaaatgaagagaagcgactgaacaaggtatggtggggctatccagacagccaggtgctgactccaccccctcctggccctcattctccattgcaagttcaaggctacccctaaagagggaggatgaggaggctgggggaagaccaagagcagtctatgcccatcgtatcctataatttgtttaaaagacatgttattagaatgtttattgcctgaacctacctgcgtagaatttaattctattgggcacacattatgga

SEQ ID NO: 445855 - DNA, 777 bp, Homo Sapiens
  misc_feature (33)..(33): n is a, c, g, or t
  misc_feature (35)..(35): n is a, c, g, or t
  misc_feature (54)..(54): n is a, c, g, or t
  misc_feature (77)..(77): n is a, c, g, or t
agcagtgctgggcctggcttcccccaggcagtncnacccactggggcccttgcnagctccttcccagcaccgctgtntccccccgcagaccccgcttgttcagcagcagaatggctcttccttcggggacttaggatcagccaagttggggcagaggccactgagccagccagctgggatctccaccaaccccttcatgactggaccctcatcaagcccattcgcctccaaacctccaaccaccaaccccttcttgtagcactgtgtttttggggggcctcttccctgccttctggggcccctttgctccctagagctctggtgaccacttgcctgtgggcatttctatgggccttggggatggtggaggtgctaatgctttgcttggggcctacaggtgaaaggtggctgccctcagattccacaaagcctttttcccctccctggtcccacccccacccaggcaggaagcccaggaggagtgcgggcagggcctgacctggaggagtgatggttgagggggagggatttttttcaaatgatcagtcccctgtggaacagcttttccctgggcctagctcgccagcgctgtgctcctcatggacgggagcgcagtggggaaggtaggggaaaaatgaggcccagtgttgatggggcagtgaccagacagtcctgagacccagaaggcccaggtggcccaagtgcttttggtggcccagcttggccagcacacactttcctcctatagcaccccctctaccccctttagagccaaaa

SEQ ID NO: 445856 - DNA, 793 bp, Homo Sapiens
  misc_feature (150)..(175): n is a, c, g, or t
  misc_feature (189)..(301): n is a, c, g, or t
gttcattctcaccatgggcttttattgattcccagtgcatatgtatgaagacaacctatgtaggaaggcaagtcatgcccagctaccatgagccagcacaggaaaggcagaaatgagaattgagccctctcctgacaccaaatatactgnnnnnnnnnnnnnnnnnnnnnnnnnnttgagatagagtcnnnnnnnnnnnnnnnnnnnnnnnnnnnnnnnnnnnnnnnnnnnnnnnnnnnnnnnnnnnnnnnnnnnnnnnnnnnnnnnnnnnnnnnnnnnnnnnnnnnnnnnnnnnnnnnnngcacgcaacaccatgcccagctaattttttgtattttagtagagacagggtttcaccatattggccaggatggtcttaatctcctgacctcgtgatccgcccgccttggctgctcaaagtgatgggattacaggcgtgagccactgcacctggccatactgttatttttacattaaaatagtgcagctgggtccaggtctctgtagttccactggaggtgatgatatgtctgataattatttctcttaatttcccacaaaagacgaaaagggtgagactacctccatagatccaaccgggcagattaccaagattccaagctcccaggcagggttgctgtgaacagcaggggactttggctttctctcaggccagaaaatgtataaaaataatcagtccattcccaggccattgtagaaacctgccggctactctcatggagtgatccaatcctacctgtagggtcacagtcatggtgcccatcctcgtgcc

SEQ ID NO: 445857 - DNA, 480 bp, Homo Sapiens
  misc_feature (267)..(314): n is a, c, g, or t
catttttgaaatctttttagaagcttttgcacatcaataggtatccctaggagggcctgattcagaagccctcatttttaaactcaattcttagatgaacagtcttattcatctggaatgttccacataatggtcatcataattctaatttatctttagtaagatttcaccatttttgtaagtatttgcagcttctaggccctaacacatgtaaaaggtaaacatagccagaaggtgaaatacacagttctttaaaaatttaaggannnnnnnnnnnnnnnnnnnnnnnnnnnnnnnnnnnnnnnnnnnnnnnntaaattccagtttttaattattctttgttaggatacagaaatgctttgtgtcctgcaatactgttaaatctccttattagttttagcagctttttttgtaaatcccttaggattttctatgtatgtgattgttatctgcaaataaaggcagttttatttctaaaaa

SEQ ID NO: 445858 - DNA, 816 bp, Homo Sapiens
tttaccattcacaaaataattctttattgcagagaaagcttttctctatctgagatctgcccttgttatctacagcagttatgctttccctggcttttggtgtttgcctacgtgtaatgaagtagggagtaacccagggagaacgcaggtagggcctgctccttcctctgggctaggggcgttccaccaggccctcaatcagcccccaggccataaaggcaacaaaacatttatcgctacacacaaacctacatatacacacttatgcacacgtatacatatgcgtacacacacacacgtatcccaggatgctatcctcgtggagctaacatttgatattctaagtattaaagtttgaggcaccaacaggctgtcttaaaaggctcattcagcctgtctgccttggagctattttatttataattcttcttgtcacgtcaaagaactctgtgtttcttgcagactgtgttcgggtggttgagtgtttggtttttggctacagccggttactttttccgaatctgtaggtccaggtgtgcgttgacaaggtttttcccaactcgagaagtttctcagggagccttggagtccttctataaatttctggcattctacgtgtgagagacttccagttttggagaagtcgggagagtgagggaaggagcgtgcggttctgagtccgctgcctcctctcagacagaaagtcaacgggcagcatcttgcagtatatttagaatgcagacttgaaaaactgacggataagatattattagcaaaggtacaaacctttgatgatattcaaaaacccctgcctct

SEQ ID NO: 445859 - DNA, 576 bp, Homo Sapiens
tttcgagtgaccagtattatatttgttcaatttctagctcatcgtgatgtttatatagtcattcacaatgtttcaccaaagcaaaacatgaaaaactataaaaataataagactcccaataacacaaagcttttataatagtaattatggaacatggacattttaatgaatttcatattgcaatgaagacagtcaacacttagagacaattatatcgatacaataaaaactgattccatggaacacttataaatgcatacattttcctccaaagaaatatgtttttcacagacttaagtaacaaatgatttacataggattcttcagattccaaaatatgtacagagtttttgtctctacagaaactgatgagcagtggttgaaaaagagttgctttgcccaacagcatggctcttatgaaattctgtatcatatacagttttcagtaaccacacattttccgtctatcattaaatgaaattctggacacatcagcatacaggacaaaactgttcccacttccaaacactgtttcagacgagatcacgtgtggttgacagtatgacttaatttagc

SEQ ID NO: 445860 - DNA, 358 bp, Homo Sapiens
caaattattgaaagttaaaattttttaacccatcttgtgccaaatcctcaggttcaagttaatttcaaaatttttcccggcttgtaatgaacttaaaaatgaaaaaactggtctggaaattgcaaagctccaagggactggtggaactgaactgaaaaatttaaatcattttttacaaactgtttcccctgggggcccaacattcaactgattcacaattttttagacctttaaagagaaacttttaataaaaagcccttggcacccctaacaattttttccataaatggaaatgatattaactgaatccattgttttctacaaattaagttaattttaggcaaaagggccctcaggg

SEQ ID NO: 445861 - DNA, 527 bp, Homo Sapiens
gcaagatacaagactatttttaatgggaaatccaagaaaaaaaacctgaaatgccatatttatcacaaccttagatagtcactgtaagtcaaggttcctcgccctctccattcaaagcaaagcatcactgtccatgaaaggcacccctcagtgacaggaggtgcacctccccacgtccgtttagttacaaacaggagcccacattttcttaatttctataattagtgttagcattgcctacatttgagaatgtttgatgatgatcaaagagagtatggaaacagatttggcaacacttctacggttacgaccgtgaacagttttcactgaagcttacttagtgtcacaggtcccgccatgttcctgtgaaggtcactaggttttcaggaataattgtcctgtttagtgcatttcccaagaaaatccaagttaggagaatgttcctgatttactactttaaatgccaaattaaccttaactagatacgtttaaataaagctatagggactatgttttaaataacaatt

SEQ ID NO: 445862 - DNA, 486 bp, Homo Sapiens
ttcttgaggtttattttctaggttgccttaatatttgaacataatagctattctgttgactatccatcaggataataattagttgctgcagtactcataatgagccctttcaaggaatagatgtaaattacccttaggggtagccactatattttttatactaaaaaaggaaatatttcttgtggacactggttatcttccatgtccgtgtctgtggacccacatacttactgccttttgtggaaattcacctagagtgagtactttccttgtgcaatggagggagacgatctagctatagattcttgatactcacctcactctcaacagcttattggtatttggcaaacctggtatcctgcagccgagcatgaacatgaaatacattagaacttggcaatgagagatcccatctgttggtttccagggatgtaagtgagtaataaaagctgtttcaagtttatccactatccactcttcaagtga

SEQ ID NO: 445863 - DNA, 895 bp, Homo Sapiens
gacacttagaggtggctcaggctgagcatgtttaattatcctcactgggagagttgaaaactacttgacaggttccataatcaataagtcagagattcagatcatcaaaaagggggattgtcacctaccccaaggccacatataggattctgggtcccagagtgagtctgggaggtggaaccctgtgaaaggcagctttgacaggtggtgtctgttggacaccagcttctggcctggccctgctttcttctcgggtaccagacagggtgtgagggcagggaactagctccggagatcactggaggactccgagttggggccagggcttgctgagggcctcacttacagttttttgggggaaattcccaccggccttggcccttgccaccaaagtttcgcacccgatggataatctgcagctgctgctcaatggtcgaggtgatgttcacgtcatctgggatgtggacgtagcggacattgcggcctgtcacaaagaggtcatccagcttgacctgatgcccccaacggtccgtgtaggtgactttggccaggcggatgttcatgaaagcatcgacattgtctatgcgtccgtgggccacgctctcatcccgcaggtccacagtggttacccggccctggaggccctgcagtaggatgatcaggctgttctcagagatggtccgctccttcactgaatggctcaccgccattcttccacaccagctgcctgcttgcacgcgacattccttccgctttccccgtctgggtcgccgccgaagctagcgggcgcctggactggctgcctcccgccggctgcagcaggacggagaaaccatgccggcgaccgggccgctctgtacacacgggcgtcagagtgcgttcagcgccccccgct

SEQ ID NO: 445864 - DNA, 800 bp, Homo Sapiens
tttatttcaaaaatgattttatacaggtgtttcacaatacacatttggattgattttacaagatagaattagattctcagcaagatactacacaatttaccactatactaaacaaacaaaaaatctaattaccattagcatagttcatagtttattccactgtcttcaaattcgttctccaccctgtcagcatttcaatcaacagttttactttcttcagcattgtcttcccttctcaaaatagaatgtcattaaattttgatgtctgaatatgtacatataatcattattctcattttataaataagcagtgtcttaaatagtgctggtcctgggtagccaaagggatgaaatgtgtttttaaaacatgcaacattatctgatattttaagttttgatgtttaaataaaaataatatacattaataatggaaccaactgaataccaagtatcaaagctattccttagactgtccaataagcaggccttgtagtttgaaaaataaagggtctgatctgaactgtggaaaaagcatgattcactcaccttgaagaagtgcattttctctttcaggccactgggagttgctaagagcaaggtacagtgtttccttgattcataccaggaggatcaagtctggtaattttcaaattagggctcactcaaataaataccttcatttaagccaacctaaaaaccttccttgtaaatctcaggtaggaaaataggtatctattaccatgacagaatttaccatcaaaacctttcctaactgaagcaagaagacaaagtatattgat

SEQ ID NO: 445865 - DNA, 503 bp, Homo Sapiens
ggaattaagtaacatttattttacataaaacaatttccagagaatacatttaaaaaccatctagatactgattttttagcattacaaaaaattgagaggcacaattgaagtattcaaataaattgtgaggggtggaggtggggactatgctcactatctatgttgttccttagtcacttaaaggctctgcgtgcaagagtctttacatgaggcagtagtgcactttcatttagtaggaataaatcacataaaatatatacttttatacagaaagtgttattgtgttgtcattttcaattacttataaaaacttcatttgaattgcacaaaagttctctttaaaattgataactcccagaagacagggcttagaactgtctaaataattcattacaaataattaggtttccatttatccatagattaaaaaaactatgaagaattacgttattcaagtgggacatttaaaatttttttcataggaaaataggtttacatgtttg

SEQ ID NO: 445866 - DNA, 463 bp, Homo Sapiens
ggtgtttcaattgttttattacaatccaaaagttggggcgggggttcctgtgccaccacacaccatccaggatgagagggtcagaagtcaaaggtccaagctgcaggagggtcagcccctgcctggcatgttgatgtagactttgccatcttcttgggcggggctgcggcgtgggcgtgcgcacaggaacaccgcccccacgatgagcagcgatgccaccgcatcagcagccacgaggcctgccaggagcggcagagagagggacccacatccggaacaagagcctgaagtgccagggtaaaaggcagggagtgatgatctctctcctggagtcgtctgagctgcagccactgggagcaaaagcaggaagaggatgtgacccagatggatcatggtggactggggtctggcaggggtctggcagaggactgtggtccagagaagtccagaggaacctgtcgct

SEQ ID NO: 445867 - DNA, 1942 bp, Homo Sapiens
tgaggctagctcctgggtgttagaggagtcagtgaggtagactggggagaggctgcaccttcacccacgcctgcccacagcatggcccatccacttcctgcacgggcgctgggatctgctttccatggagccccacggccatgaccagcccggtcctgggagaggacagcctgggtggtggtgtgtctgcagacacgaaggtctgggcacggggcccagacagtgacttgctcagcctggagtctcccccagcactagaagcagagctgccaagggctgccgctatggagaacatgggatttgaggaaggcaggagtcctttccctcatactttgtgagtaggcagatgtgccaggggagatggagtaagataaggaatgtgtgtttagctttaatgtctattaaataggttggaaaaacaggccaagtgtagggacctgactcctgcaaaagggcctaccgcagccctctgcactcaagcagcagccccatccagaccaggagtgtgttctgttctcctggcaggcagggctgataggtgtaggatggcgtctgtttcctttgcagtgtgggctggtcagaggagaaacagcaacttcctgctccttctcactgtgtcgttggctcaccatagaccacgtcctgcattccctctgattctctcatggggagagccctggaccttctggtggtgtcccagctgggtgggttcaaggctgctaccccgcttggggcagctggcctgcagggaagggccagacggcacctctcagtggagactgaatcttccttccttcaggaggctgcctccagggaagacctggggtccttcctgcgctcagcgctggctggctgtcctgttcatgcagtggcaagacattacagaagaattcatacgagaagaacatgaagcctgtggagagggcagccttcagcaagctgggggacaggcccttgaagaagcccagggcgccttccttttgtagcacctgcttggcacagtccatgaggcccttgtatctccgtacctggccaaaggcagctctggcatgctcaaaccctccaacctgtagccgcttcttgaagaggtccagcggatatgtcagggtcttgctgatgacaccagctccactgccacaaagcaggttttggaggttctcattttttctttccttcggctggtatggcccacttgtacaggtgcttcaaggagctgtagcaagaggacttcagcccggcgttacggggaagatggcgatcaaggtgggagccaagcctttgtagaaaacctgggggccttcgctcctatacatggtccccacggcgtggcgcagcgtattatagaccttgggctcaccctgagctgcaaagcgggtgcgcagaacatccacggggtgcacagtgagggtggccatacaggcagccaggccaccacatacaaagtgcactgagaattcccgggcgtcgtacacgctgcctctgtggaccagctccgtcagcatttcaaatgacaagaattggacagctccatagcctatggagagaatctgagctgggacgtgtcctttccagaaagctgtcggaccctcctcctgcagaatctgcctagaggcctggaggatgccatggtactttgcgctggggtcactgcgagacaggcgctcatgctgaagctggaaacggatcttgatgacgtcgaagggactgatcagcgcccgagtaacaagtccagacacagacccagccactgccacctggaacttggtgttattcctgccatctggtttggggtcatagccaaccatccctgcctctggcccacacaatgtccatcagtatcaagtttttcaaggctagctcctctcatccaccagagctcagctaaaaagcatcccttccaggagatgtacttttttcacggctcggcgggtgcggcccggcc

SEQ ID NO: 445868 - DNA, 478 bp, Homo Sapiens
tgtaagcttagttttcttttattcccaacaaattccatccttttatcactgggtattagcaagtcaggtcagaactattcattatttttggccaaagacattcccactaaagaagggacacagtgtggtaaaatacattctagagataagatgaggcagagtgcgagtgagtttgctgaatgtgaagatcacaaacatggtggagtctcggccttccgtggctctgtggctttcactgcagcatctaaaatgtcaccgcctccagttctcgagttgatcaggacacgagagactctcagggatgcgacgtgtcgaaatcgtcgaacgaccttgttttctccaggattcattctccacttttctctcgtccgtttgcaatatctgagaatacatagcaaggaggtaaagctgtcaccacagagcaaccttgggcgagccttggccctctcgagactttagtcatcacatctttgaaatg

SEQ ID NO: 445869 - DNA, 490 bp, Homo Sapiens
ttttttagcttaaaacaataacaatcatttatttcgttcacaaatctgcaattttttgcatggctcagcacagaaggcttgtctccactccacacagcatcagctgggctggcttgactggaggatctgcttctaagatggcccactcatatggctggcaagttggggatgactgcaggctggagctcaaccaaggctgtgggctggggcctcagttcctccctgtggatctctctataggctggtcaagagtgagcatctcaagagaaagcatttcccctagttaggcagaggcctcatcaccttttatgatctagcctcagaaatcacatggaatcacttccactgtagtgacgagcctgcccagattcaagaggaaagaacagagacacatctctctacgtgaggaatgtcatgaccatattgtaagaagagcatgtgggaagggagatgtggccatcctggaaaatacaatctaccacatattaga

SEQ ID NO: 445870 - DNA, 498 bp, Homo Sapiens
  misc_feature (485)..(485): n is a, c, g, or t
agcttaaaacaataacaatcatttatttcgttcacaaatctgcaattttttgcatggctcagcacagaaggcttgtctccactccacacagcatcagctgggctgggcttgactggaggatctgcttctaagatggcccactcatatggctggcaagttggggatgactgcaggctggagctcaaccaaggctgtgggctggggcctcagttcctccctgtggatctctctatagggctggtcaagagtgagcatctcaagagaaaggcatttcccctagttagggcagagggcttcattcaccttttatggatctaggcctcaggaaattcacatgggaattcactttccactgttaggtgacggaggcctggcccaggatttcaaggagggaaaggaacaggaggacacatcttttttacgttgagggattgttcatggaccttttttttaaggaaggaggcttttggggaaggggagttgtnggccttccggggg

SEQ ID NO: 445871 - DNA, 780 bp, Homo Sapiens
  misc_feature (170)..(170): n is a, c, g, or t
  misc_feature (732)..(732): n is a, c, g, or t
acatatcatacaataaaatgattgcttaaaaagagaacttacccacgaagagctgactgttgagctgtaacaggacatgcccccatcagcgggggcgggctgtgtctttggtgtcagctgatccacttgaagggaggcctccttcatgttcctttcaacccctcacatgngtgccactggttgtcgttgaagtgggtgggtgactgcactgagatttcaaaaggcccattccccacatcaaatgaaaaagtcactactgtcggagagcgaagctctatccgtataaaatcagcaatccccaggttctctataaataccccagatgaagctgttgtcttaaaaaagaaggatacgtccgcgttgagttctccgtggaaggtagggaaatgaaggtatgaagtctcggtgttgaaggaagctgaattccaaaatgatttgtctccgcggcagagcagtggccccagtttataatctgcttctgaatgcagtcggcctgtgtctgtgatcacgatcttagttactggaagatgttctttataagcaagcaatccagtgtcattggtccattcattccggtcagcatcacaattgcagtaatactgagaatcaatgcagtttccctctaatccacaagtacatttttgaagatcaggcggatagacctccccagtacgtttgtgtttcattggttcttccaacacaccagctcagtggggttccatctcgtgagtncgggcgccgcgctgtcccgcagcgcagagccagccgctgctcgcagcg

SEQ ID NO: 445872 - DNA, 546 bp, Homo Sapiens
tcttagttaatatctttaattttttatgtagaatatactatttttttctccaccaaaataacaatatatttgcaggcgggaacatgtatgattttaaatgcacttttgaaatcttagagtagaaccactactctagtaatacttgtaataaaattaaaatagttttaaacacttccataaagaattaggggtgcccagctccttgatttccccctagggataaagatatccatgtacaattccaggagcttccctgtaattcctcaaaaaagcactagtaaaactcttaggaggatattagataaagctcacttagcaatagccctttttccccacatattctggaaggttctacaaaagctattagatactcattcctggttctggaaaattaaataagccaattcttggtaggattttccaaatggcttaccacagaggatttatcctcttttgaaatatttcatcccataaagaatagaagctctgccttcatagcatttcaagcttctgtatttctgggacaaaaaatgtctaaacagaatt

SEQ ID NO: 445873 - DNA, 854 bp, Homo Sapiens
ctgcgagtagatacgaggagggagcgggtatgattatcgtgatcttgagacagagactagatcctcgatgtcgacgtcgtgcgcggggtttatgtgagatcaagcatatcagacagattctagaaacagtatgacatgtcactactacgggccgcgcgcaaacgatggtctagaagctctcgaggccgagcggccgacagttttttctctttgtttagggttggtggttcgtttttcagagattttattaagaataaggcatatgacagtcacccctaaagcacagggctctatttctgtgggtgagtgaatacactctgaaaagcattggatacaaaagcgcagccaacagagaatttggagcagggtccctctgccctgccacagggctcctgccaggtgggtttgaagccctgcacatcccccattcaaggctggcatgtccaggagaaggtgcttggagacccccggctccccgtgcttcgaagctgccccacaccctctaggcctccttcctctctccaccaggggggacgccatcctactgcttatatggggaagggttatcccattttggccctggactagtcccccaagctagagggtgctgtggctgagctgtgggggccaggggtacagagcctcaaaccgcactgcccagtgctccctggctgatttccagagcagggggaggtccccacctgcagctctgtgtcctggagctgtccatacttggggtgtggcaggagctccgcctagggacctgagtgtcctcttcaacactctctctcccaatggggattcgtgcagcagaggagagagaaatgcagtcctttcccttcttagtcaccaag

SEQ ID NO: 445874 - DNA, 780 bp, Homo Sapiens
ctcaatggcaacacagatttattgggagaaagacctgcggagagggggtaccagctagtgccagagcccccttcccgcttacaggctggaccagttacagtcccgggcaggagaggtctgggattgttgtgaaaatggggtgggggcggtgtgtttggctgctgataatgaaggaatttagtgcagccaggggttaggcctgggacctgcctgacaggatgtttctcacagctcaggccctggtggaattttccactctgaccagtttgtaaaatggtaggggtctgcaaaatagtgcagtttgggctaacattcttatttcttactttagtataaaaaggaaaaagggcgtcgttgatcatctggctgcttcctgctggataggggcgttgtgattagggcctgggttctggagcttccgaatggtttcctcgtaggctcaaagactgacagcgttaccctgggttccgaggtggtgatggcggtgggggcagcggaccctgggccccgtcagtcttcagcagccaggtctacaatgcttgccagactggaaccagggttgcaggaccacgcagtcaccgccatccaactgcatgtcactctccacttcgccacggtctgaactcttggccacaagatctaagccttccggatgccccagccagttcaggctgctggtctcttgtccctaagcctttgccgaggtagtcggcttacttgatgccagcacaccaggccccccaccacccgctggaagcacaggccccagctcaggtcccc

SEQ ID NO: 445875 - DNA, 887 bp, Homo Sapiens
  misc_feature (11)..(11): n is a, c, g, or t
  misc_feature (34)..(34): n is a, c, g, or t
  misc_feature (124)..(124): n is a, c, g, or t
caatggctttncagatttattgggagaaagaccngcggagagggggtaccagctagtgccagagcccccttcccgcttacaggctggaccagttacagtcccgggcaggagaggtctgggattnttgtgaaaatggggtgggggccggtgtgtttggctgcgtgataatgaaggaattttagtgcaggccaggggttaggccctggggacctgcctgacaggatgtttctcccagctcaggccctggtggaattttccactctgaccagtttgtaaaatggtaggggtctgcaaaatagtgcagtttgggctaacattcttatttcttactttagtctaaaaaggaaaaaggggcgtcgttgatcatctggcctgcttcctgctggatagggggcgttgtgattaggggcctggggtttctgggagcttccgaatggtttcctcgtaggctctggtattagacgtggcaaaggtgaaatatattatcaatgtgtttttgcatgcttgcctggataaaacaattcagccaaagactgacagcgttaccctgggttccgaggtggtgatggcggtgggggcagcggaccctgggccccgtcagtcttcagcagccaggtctacaatgcttgccagactggaaccagggttgcaggaccacgcagtcaccgccatccaactgcatgtcactctccacttcgccacggtctgaactcttggccacaagatctaagccttccggatgccccagccagttcaggctgctggtctcttgtccctaagcctttgccgaggtagtcggcttacttgatgccagcacaccaggccccccaccacgcgctggaagcacaggccccagctcaggtcaggttccggaacctagcgtcccc

SEQ ID NO: 445876 - DNA, 525 bp, Homo Sapiens
ggtagctaaggttgttgcagggatctcagttctaaaagtaacaggctcgaggtctgtaacaggaacgaatgttgtccctggagcctcttttataggagaaactggttcaaagattgtagcaggaaccagttcagtctgaagctcttcgggactcagtgtggttttaggtttgggatgtggacgatgagttcgttgaggcactttgggagctgctgttgtccctgaagcctcagttctaagaactggttcgaggattgtggcaggaaccagtttagtttgaggtacttctggatggggcgtggttttaggtttgggatgtggacgacgggttctttttgttgttgttgttggagctgaagatgtcccaggagtaataggtccaaagtctagtttggtctgcagtctctgggcgtggcgtggttttatgtttgggacgtggacgacgtgttcttgttcgttgcgatgtttttggagctaatgttgtcactgtagcctcagttctcacagttacaggctcaatgtctg

SEQ ID NO: 445877 - DNA, 410 bp, Homo Sapiens
  misc_feature (125)..(125): n is a, c, g, or t
  misc_feature (280)..(280): n is a, c, g, or t
  misc_feature (320)..(320): n is a, c, g, or t
  misc_feature (325)..(325): n is a, c, g, or t
  misc_feature (332)..(332): n is a, c, g, or t
  misc_feature (341)..(341): n is a, c, g, or t
  misc_feature (348)..(348): n is a, c, g, or t
  misc_feature (378)..(378): n is a, c, g, or t
  misc_feature (387)..(387): n is a, c, g, or t
aatgaaacgaaatataatttatttgattttgaagatgctgagaatattaaacataaatctaaaatgaagacgctggagacataaaatggtgtacaatatgaaagaatcaaaatagaacgtaaaanagaaaaaagactggaaaaaatcagtagcaaacgttttataaattcacttatttgcataataaaataattagttattcactcacacccccagcactcactgaaggtttttgataagccaggctctggtctgagtgtttcgtggtcactgattatcngaatgtaagcagcaattcatctttttcctcaacctctagntcagnaatttgnacggggtcnccatgtncaactggcaatatagtgcacgggttcaggngagacagtncttctgggtttccaaaatggggg

SEQ ID NO: 445878 - DNA, 122 bp, Homo Sapiens
tttttttaatttcatttccaggctaacctactttttatttaatgcaaattacagtaccagttaactatttccaaaccaagtcacatagaacaaaatgtatttacaagggaatggggaaaggg

SEQ ID NO: 445879 - DNA, 725 bp, Homo Sapiens
  misc_feature (439)..(515): n is a, c, g, or t
gaaggaacaagcattaagctaattttattaaatggccacagctggcagtgggggaagtagggaagagaagggaggataaagaaagtcattcaagtctgccagccatgacaagggtctatacatgaggcctggccaggagggaggccacccctccttcctgtctctccagctgagctagactggggaggggaagccagatgggacctttcctcaatgtagagccttgggattctccaagaggctcactccatggctgccgcccagggcagatgcttgtaaatacatcaggcgtctgcagggttggggtggaagtggaagggctgggctcaggctgccccggtgccatcctcagatctgctttggagatcccaactctgaaatatggtgtaccaggtaagagcattatctttggttcaaatactggcatttgcctgttttnnnnnnnnnnnnnnnnnnnnnnnnnnnnnnnnnnnnnnnnnnnnnnnnnnnnnnnnnnnnnnnnnnnnnnnnnnnnntaattttaaaagggcatgagataatttcctgtagatctactgcccacccctgcacacatatccatgagataatatttataaagttcttacgtagtacctgacatataatgggtgctctctcaatattagctattgttatctagaaatgccctgtgtgacatggcctccagttataggaagtgaggatggcagtggtggagtaaggggact

SEQ ID NO: 445880 - DNA, 559 bp, Homo Sapiens
ctggttgtcattcataaaatttattttggaaaaatattttaaaaaggaatttcttcattaacaaaacagtaaaaaactcaaataacatttgcacaatattccataaatacatttatatacaaaaaaatatagtcacatagacccgaagtgcctttgtacatatttaccaaaatttaaattataaaaaacgaacatcacaaaatactcaagctttacagatatcatgaaaaatatttttacaaatccaaaaaataacacacatcttttccatctagaaaaagcacatcttcgtatcaaaaaggacaataaaggcagtgtttgtgtttctaattcaagaaaagactggctcataagaatccaaaatatacactcaggcagtgcatgcttcttatgcgtaattcagttcacccatttaaatatatattctcttaagagcaactgtccatagtgcaacggcgacgtcacggaaggcagtgccgcaggcggccgggccgcgacaggctgtcggcaggcgtcgaggacctcaggaggagaacctgctcggtctgaactcggtttc

SEQ ID NO: 445881 - DNA, 841 bp, Homo Sapiens
gagctacatttcaaatttattacaatgaacatgagtattctgtaaattaaatattctgtgaattactgaagaataatacatttcttttgaagccatagtctgtgatagtaaaattacgtcacaaattaagacgctaattataaaaaggcaaaggcagaaacaataattatgaacataataaatttatagacgtaaaagagtttacggtggaagaatccaccttatttaacatgaaataatgtcattttccccctacatcatgtcacccattattcaatcttaaaaactcacatcagtttttcccaagtaaaattttttacaaaaaatctcgtacattaaaaatgaacattggccctttatgacatatgtttaaatactacataagttacacaaaacacagtaactgatttgtaacaaaggactgtatggtaggtacataaatttactatacatttttttgataaaaaatgagaacatgacaacaaaattaacaaaacaggagcctctatgcataataactatcctgaaaactacaaatatcactaaaaatagggtattggaaattttgaatgtatcattgaaatacttatactttatttaaaaagtgatataattttaaacagattcaattcctataaattaaatttgtgtctataaatttaaaaagggcaatcactaagagtcacataagtgctcctcaatgtaacactaataaatgaataattcaattgatcaataaattaactgatcaatctaaggatgagaccttgatagtctttaaataactaaatgacaactctggtatgttttatgtgtgcttaaaataaaagttttatgctaa

SEQ ID NO: 445882 - DNA, 606 bp, Homo Sapiens
actagtcaaagtagcttccatttattcacagttttaaaaacatttttcaagtttagtcaacttcccaatataatcaaaggacaaaatggcaataaaaaatatacttcatcagatcttagagttatacaatcagttaaaaaatagatattgggttttaaacaactgacatatgctttccttttccccctttaaaggttttcagtagtctatctgaaatcactgaatcacttttcttctcctccacagaattcagaactttttcacccggaactggagaaggagcactccgtcattagctgaggggaatggcaaggatccaggggtcctccatgactacacaaccatcctcctgagcacctttaggaaatccaatgctgtctgagaagcagcagggccagatccagatctatggaaaattaatatctgcagtgcttcctgaaggtcacctcagtctttatgccatttcaaaagctagcccggggcttgagaagaaaagggaagtgggcattccagccatatttggggtgcaatttaattttcattgcgtacctcatggacaggggcaataacacattctaggacattcttccagccaccactcttcct

SEQ ID NO: 445883 - DNA, 888 bp, Homo Sapiens
  misc_feature (348)..(358): n is a, c, g, or t
tacttgtattatttatttttggtcagaaatagtaaattaaaatattttttgatagtttataggtaataatcaacccataacttttaaaagaaacaaaacatttctattattgagttaacatttgattatacaaactaggaaaggcagggaaattccccttctccccagtgattctattaagatgacctttatgttaaactttcaaagtactttatgaatttagttaccagttactatttattaattgacaattttctgaaaaatcccgtttcagcagacttaatgaaggtgaaagcaacccttatgtgctttctacttatttgaatgttcctcaagtattttatattnnnnnnnnnnngaaggaaaagagaaaacagtgcctctgtttttagaaaactactgctcagtaaagttgtttaaaccatttctggtagctaatgacaattttatattaaattgtatactaactttagtgagactgatttttttagttgtttacagtacaaatacttgtatttgttttttaattgcagtatttccaatgtcgcagtaatttagtaaaactctgtggctgccttgattttgacagattttgttaatataaactgattgttaggcaattagttatatttatgcataaatcaattgcactataattcatgaattatttattacaatattttctaatgaattcatgtatctgtcttgtgttgtaaatgtactgtaattctgttcctactttgtgttgttatatatctaaatctgattgtatgaattttaattgttcagttaacgtgtttctaggttgtaatttgtagtaaagcacttcaatgcttttgcacttaaatttacaacactgttggtgtgtgattgatttactcattcagt

SEQ ID NO: 445884 - DNA, 647 bp, Homo Sapiens
  misc_feature (613)..(613): n is a, c, g, or t
catattttagtagttttatttcccctatgagaatctcccctgccctagccccttcttcctgcactctggaacagagcctctggcatctgtccaagctctgtctctaagggccaccttcccctcttctgtctttagtatccccaaaggggttctctgggctgtgcctcctttccttggttcacatgggagggggcttccctgtttcagaagtcccttatgggagaaatagagatccaagtttcacttcacctttttcaggcagttctgtttcctgtcctggggctggagtgggagagaggcctcacccctcagcattgctccttctccactagctgtttgggggtgggctggtctcagagtcaaaagcactcttgggaaggaatgaagcctgaagattgaaaagtgttagtgccaggtgagcagggttaggaagcccattatctgtgttttctcagtcaaccattttgtcaaggtggaatgtgctaggctcagggctctcagagcttcccttcgtctagcagcttcctgagtccgtcacagatcttgccaaggtgctgagtgaagtcaggcccatagagggccgtgagcagacctgggtcagagaagtgatcanacacgtggcggatgcggccatgtgactttggcgt

SEQ ID NO: 445885 - DNA, 534 bp, Homo Sapiens
ttttttgagggtattagctgtttactgacaaaagagacatttcaggacctcagaaggccagacactcccataggttggatggccctttggggagtctgagcccatttccacaaaatgcattcgttagacccacacacagtgcttgagccccctagacacagaatagtcttgtcctgttcttcaagtgactgggctatcatctgaggaatagtcagcttccccccaatactgggggtgacgggagacttttaagggtcatccccaggtttgtatggcattcttggggcaaacagcagaagggatgactgccctgatgcctcctcatctctggcagcattgcctagtgcaacagctctggccagaacccagcctggtctacagccataccatcctgaacatgccagatcttgtctgacctctgaagctaagcagggtcaagcctgggtagtacttgggagaagctggtgtggctagaccgtgacctgagggccccagttatttcacccatcctttgtggatgacagcacctggcct

SEQ ID NO: 445886 - DNA, 717 bp, Homo Sapiens
attatcaaatgtcaacttttttgaaaatttatttcacatttattactagtcacataatcctcaaaaatctaagttcacaaatgatcatcacatgagccctcttctccatatacacatttgttagtgtgaaaaaacaattttgtacagtattttagtagttacatgattagcaagcaacagagaagtagtgaaagctgaagaactccaaatgcattgctcataggacaaccactcaaacacaagcagctaggcaataaaggaaaatttcccatccagtcattgagaaatgctaaaggcattttatggtgacatgaatgcttaagttagtatgcaacctatagggcaaataaaactgctatataggttggtaattttgcatttaaatatttgtagtatggtactacccatttatctaacatttaataatacataaaattttaagtctgggttctcaaaacagttgcttggtattttggtatagtgtctgttatactcaaatgcttcattcagttatcttttcttctttcacaaggtttagtgggactgtgcaatgctggaacaataatccagaatgtcctgaatagtgaattccattgtaacaccagatccaggataacagcgagctatcaaaccttcaaagtgcttatactggcgtataaattcatcttgcatggagtgccacaccacgctggagtaagtctttgcttcacataaatg

SEQ ID NO: 445887 - DNA, 349 bp, Homo Sapiens
cttaaggtgggtttccttccgagaagagttcttgagcaagctctcccaggagggcccacctgactgttaatacacagccctccccaaggcccgtgtgtgcatgtgtctgtcttttgtgagggttagacagcctcagggcaccatttttaatcccagaacacatttcaaagagcacgtatctagacctgctggactctgcagggggtgagggggaacagcgagagcttgggtaatgattaacacccatgctggggatgcatggaggtgaagggggccaggaaccagtggagatttccatccttgccagcacgtctgtacttctgttcattaaagtgctcccttaatagtc

SEQ ID NO: 445888 - DNA, 408 bp, Homo Sapiens
  misc_feature (16)..(16): n is a, c, g, or t
tcatgggctgggaganagcatgaccacctaagggttgcagggctaagtatcttgctgacacataatactgacatcacaatgctaggtggtgcctctctggttttggctggaaggctgacttagcatcaacagtacagagctatgtgggtacccggctgtatttgccaaagtgattgacacactgaagtgcttaaattaaaatctgggctagaggtgtatttctatgggacaaagtctaaatttagccttgaatgcgttgtttttaggtgtgtaacatctgaatatatttttagatggactaattttcaataaacatatatagggtttgtgctggctgtagaacactgattttgggtgcagcatgattaagatgagtcatacatcttggctccagtctcatagaggaac

SEQ ID NO: 445889 - DNA, 1783 bp, Homo Sapiens
  misc_feature (1069)..(1086): n is a, c, g, or t
ttacatttcaaatatattttattactttccatcttagaaagaatatgaaacctgcatgcaatgctaatggtttctgacatgtacatagcatataacacagcagtacaatgcggcatatactggggggcagtgtgtggagggggcgttcttaagggtatatgtacagaggaaagggcgcatggtcatcttagctttcgaaagaggactgcactgtttaacattgaagaattacatggggaatcacaaatatattgctttagtactgcatgttctgttgtggtgagggaaagaaacatgctttgaaggttttcccttgtcaacagaatgtgtgtctgtagctgtgtattgcgcatgtattcatatatttttaagttttctcctaaggtttttgctgacagtgttgggaacctcacatgcttctgaagcattaaatattgaacctgtgaacctttcagaaatcctcaggttgggaaagaccccacaccttctttaaggatcatttgtctcgccatcacaggatcttggaaatgtttcctagggtgtgtaaaaattaaccaggggggaatgaagcacatttttctggcaaccaaacttgagttcctcagagaacagatgcagagagacctgctcctgcttgcccggctacaggggccactgtggagtcacactgaggctgtgaccggccataagcccaggagagcccgtggcagctgtgccgaggcgccaggacctctaagcggaagcttcccaagctaggaatggagcaacactgcaatgaaatgtgtccaccaagctcattgttcctcccgggcgcttataaagctcagatgtatagtgacgtatgggcaaatacacaaaagcattgtgtttaaaaaggaaaggcatgagttttcccctttttgataaaaagcagccctgtgaatgaagtctggggcacaagagagatgggtctcccatctgggagcctttcgcacgcagctataaaagtgtgaaaactggccgttggtaaaaagtgccttcataaccaaatatataatttgtgtcttatgccctgtgagaaagaaaggcnnnnnnnnnnnnnnnnnncgtaatcatgcaaagtcctttgcacaagtctcccaactggtttggagttttcccttctgaggtttttcaccctattcttcgtagaccctgcgcttctcgttccaggcgttgtaccacttgatgaagcgcttggtgctctgcagcttggggtgcaggcagtgctcctgacctcggtacctggacacgctcttggtggtgatgataaccatcttctcctcgcagtgcgggtactttggcttcatttccagcttcttcacgtcgctgtagcggatcttgggtcccttccgggagcacttgcatttggacccgtccacacgcgcggtgtacagcgccagcagcagcaggagcagcgcggccgccaggagcctcatgctgaccggaggggcgcggcgtgggagcagggacatggggagggcgctggcccgtcggagcggcggcccggagacgccacccagctctgctcggctttctctgcccggggcgcgccttccggctctgctggctccggctgcgccgtcggtggatgcccagggctgtctgtggccgtgcgctgcgctctgcgcttgtctccgcgctctctccacagcctccctccgcccgcctggcctcttttaaatccgctcctgccctcgcagcgagcgagctcattaatatgccccgctctcgacgaattcgagctcggccgatttggcctgat

SEQ ID NO: 445890 - DNA, 488 bp, Homo Sapiens
ggaaagaaacaaggaggtgtgggagcagcccgccatgctagagaaagactacattcctgccactaacagtcggtggccactgggcaaatcttaagtctgtggtgcctcagtttcctcatatgcaaagcgggtttgttcccataggccctctgaggaacaaaatgaagattgcagaagtgagattgcaagatggttagaaaagacaaagccacactggtgtgagttttcatggtccccgggaccacatcctcagaaggatccctcccacttctcctgggggttcctgcagttctgggacaggggcattccctgcagaccagacgtgaatgaagccgcttagccagcatcttgtgaacggcctgcctcatgtcctgagccacttacacatgtgttttttctccccagggtctacgaagaatagggtgaaaaacctcagaagggaaaactccaaaccagttgggagacttgtgcaaaggactttgcagatt

SEQ ID NO: 445891 - DNA, 533 bp, Homo Sapiens
tgagtctaggcttttggcttaagccaaaaccatttattttattgaaatggggaacattagtgggggcgtatgttggggatgagagggaaggaaccgagagttctgttagggttgagatgcttgttagatatctttgtgaagacgccaagcaagccattggctatgtgagtccaaaagtcaaagtccagtgtccttcaccctgtctggtgatgagatctttccaaatatccaggcctgcagtgagattggagagtttcttccttcctgttggaatatttctttctccagctgggtagatacccgctgggagtccctggataactgctaatgccaagaaacttgctaagtagcactgaagttttcaaatttcttcacaaagtgtattgtgcttccaaagcttcctgtggtgtcttcggagctgtgtctagctgcatcagcagagctgcgtctcttggggcttccaggataagctgagtggaaggatggggagagctgtaggtgaccctggaccgtattcccaggactccaggctc

SEQ ID NO: 445892 - DNA, 705 bp, Homo Sapiens
caaagggctagggctttattacaaagggagttgactgctaaagaggcccttctccaatcttttttttgtccctttttccctcccaaaaacatccctttaggggaggtcagtaggccattaggtaggaggaaatctggaaagggaaaaggggccttgcttttgtcaaagtcctttgaaacaaccactgagtctgaaggctggctccagttgaaaatcttctaggggaaaaggtttagctctcatcttcaaggcccttcatttctacatcctggggggcttttgtcttcttttgccttttgagctgtggttcactagtcctggctggctttgaaggggcttccactgagtaaagggaagaaggaagtattatcccaaataaatccaggattcccctcacccacctctgtcccagcctcaccttccatggctgtcttctctttctgggcaagccggatctgctggaggagttttctgcgcttcttccctgacagtgtaatgttggcacgtgcactggacgcccgcttcttgaggtggtgccgcgtgatcagcccttggtctatcacagccccgaccacccggtgcctcagacgccgctcccgattcaacacccgccggcgtttgaacagcttcttcttcagctccgttcggggccggttgatctttccccccggagctcccatagtcgcgattccactccagttcccc

SEQ ID NO: 445893 - DNA, 819 bp, Homo Sapiens
cacccctggggaagtttttttgtttctcacagctggtctttatttcttcaagagtgctaggctttattacaaatggagtgactgctagagagacccttctccaatctttcttcggtaccttcttccctcccaaagacatccctctaaggggaggtcagtagcccattaggtaggaggaaatctggagagtgaaaaggggccttgcttttgtcaaagtcctctgaaacaaccactgagtctgaaggctggctccagttgagaatcttctagtggaagaggtttagctctcatcttcaaggtccttcatttctacatcctggggggcttttgtcttcttttgccttttgagctgtggttcactagtcctggctggctttgaaggggtttccacttcccatggctgtcttctctttctgggcaagccggatctgctggaggagttttctgcgcttcttccctgacagtgtaatgttggcacgtgcactggacgcccgcttcttgaggtggtgccgcgtgatcagcccttggtctatcacagccccgaccacccggtgcctcagacgccgctcccgattcaacacccgccggcgtttgaacagcttcttcttcagctcctgccggggagaaagatgcgaatcagatggagtgggctcgccgcgacccggggcccctccaccaggcagccccggcccctcactgatcccatctcgtgcgagataaaagggctcaggaacgcttgaggaaacaaagtcgcggcccccacacagtcaccgttcggggccggttgatctttccccccggagctcccatagtcgcccc

SEQ ID NO: 445894 - DNA, 1140 bp, Homo Sapiens
  misc_feature (96)..(113): n is a, c, g, or t
  misc_feature (173)..(173): n is a, c, g, or t
  misc_feature (208)..(217): n is a, c, g, or t
  misc_feature (260)..(335): n is a, c, g, or t
  misc_feature (384)..(422): n is a, c, g, or t
  misc_feature (431)..(453): n is a, c, g, or t
  misc_feature (455)..(455): n is a, c, g, or t
taatttgggattttgtgggcgtttttgggggaaaagcccaaagtttcccctttggggaaaaaaagaagatgggggaggtcttttgaatccggggcnnnnnnnnnnnnnnnnnnttttataaaggggggtttttttggtttgccaagcaagcaggatttattggccagaaaaanaaagaatttccaaagaaggttccttttggatcccnnnnnnnnnngccccgttcattaggccggttaaaattccccgggtttctgcannnnnnnnnnnnnnnnnnnnnnnnnnnnnnnnnnnnnnnnnnnnnnnnnnnnnnnnnnnnnnnnnnnnnnnnnnnntaccactttgtacaagaaagctgggtcaggaaacagctatgacccatgnnnnnnnnnnnnnnnnnnnnnnnnnnnnnnnnnnnnnnngcctcgagnnnnnnnnnnnnnnnnnnnnnnntnttttttttttcagagtgctagggctttattacaaatggagttgactgctagagagacccttctccaatctttcttctgtaccttcttccctcccaaagacatccctctaggggaggtcagtaggccattaggtaggaggaaatctggagagtgaaaaggggccttgcttttgtcaaagtcctctgaaacaaccactgagtctgaaggctggctccagttgagaatcttctagtggaagaggtttagctctcatcttcaaggtccttcatttctacatcctggggggcttttgtcttcttttgccttttgagctgtggttcactagtcctggctggctttgaaggggcttccacttccatggctgtcttctctttctgggcaagccggatctgctggaggagttttctgcgcttcttccctgacagtgtaatgttggcacgtgcactggacgcccgcttcttgaggtggtgccgcgtgatcagcccttggtctatcacagccccgaccacccggtgcctcagacgccgctcccgattcaacacccgccggcgtttgaacagcttcttcttcagctccgttcggggccggttgatctttccccccggagctcccatagtcgcgattccactccagttcacggtccgtcctcgtgccgaattcacagccaggcctcgtacctagccga

SEQ ID NO: 445895 - DNA, 463 bp, Homo Sapiens
cctacctaatggcctactgacctcccctagagggatgtctttgggagggaagaaggtacagaagaaagattggagaagggccttgcttttgtcaaagtcctctgaaacaaccactgagtctgaaggctggctccagttgagaatcttctagtggaagaggtttagctctcatcttcaaggtccttcatttctacatcctggggggcttttgtcttcttttgccttttgagctgtggttcactagtcctggctggctttgaaggggcttccacttccatggctgtcttctctttctgggcaagccggatctgctggaggagttttctgcgcttctttcctgacagtgtaatgttggcacgtgcactggacgcccgcttcttgaggtggtgccgcgtgatcagcccttggtctatctcagccttgtccccgtcgtgcctctattcctcgttctcgattatacccc

SEQ ID NO: 445896 - DNA, 647 bp, Homo Sapiens
  misc_feature (513)..(521): n is a, c, g, or t
gccgttttggcggctatgcaggattggcaggagctgcgatgctcacacttgcctcgccgaccgccatttcacatccagcagaggaggcgggggcagccgctgagacggtttttcacaagtattcccacgagcattctgctgagatgaacaatcagatgacctcgtgtgagatttggaggagagaaggaaatggagagcatgcttctgccgcttctgtggtttctgtcggtaagcacagtgatgaggtgctgagttttccccagaaggcctcccagtgtcctattaccagcttcacaagcgtcgagggcagggcatgggcatctattgttcaccagtggagatctatctggcacagaaccgatccaaccattgcagtggtcacagcggtgttggctttctgattctcgaccttcctgaccgccagaggagacagcctctttggtggccctgttctgtggtattgtgctaaccggtggtgggactaaaactgtctctataatgttttatttcttnnnnnnnnnttctgaagcaaatgtgacaatatgttaacattcttaaaatctgggtagtgggaacatggatgttgttatttgtggtgtgtttgaaattgtgtcatattataaattttaaaaaaatgttttgactac

SEQ ID NO: 445897 - DNA, 920 bp, Homo Sapiens
  misc_feature (802)..(851): n is a, c, g, or t
aaaacagttttaatttttctttgtataagcaagatgcccccataaaacattcacttttcaaaaacctttatatgcaaataacttacaaaaatctgtgtaagataaaagaaacaactaaaaccagacaggcaccaccaccacagatcctaatagccaggccagatcaagatgcagattctcctggaaaaacaagctgctcacaattgccccagaacccacaaccccctgggggtggaatcttgtcttctttaactcgctgggtggtagagcccataggaattactcaaactatgaaaatcccaaagcatggtcaccagtgagctgtctctttgggccttttgattttcctatttgaaaatccacaacggttccaaacgagtagctctcacaccacttcaaatacgtggcaacctggtaaccactaaaatgcacatgtacttgcgcgtgcccggggacgcagcctgcggggccgaggaaaccaacgaaggatgtattaggacgagagggaaggaagggggcgggagaaaacacggtagtgggaaatccctgtgcactggatctgccaacccctcgcaaagctgagaagagccgtgcgtgaataaatctcattaaatggcccggcgcagacactgcagcagcaaagaggagggggcaccgcggctcgcgcggcacgttcgggaagggggaacgccagggcggcccttttataggccgaagcccgcgcccgcgcgcccccacccttcgcaccgcccccgggccacgcgcggagccgcggcgttacctgagaagggccggctgcgtnnnnnnnnnnnnnnnnnnnnnnnnnnnnnnnnnnnnnnnnnnnnnnnnnnaggccgcagcggcacgagatctgcgcctcgcctccctcctcacgcgggcggattttcttaccgtccgct

SEQ ID NO: 445898 - DNA, 555 bp, Homo Sapiens
attttaaaacagttttaatttttctttgtataagcaagatgcccccataaaacattcacttttcaaaaacctttatatgcaaataacttacaaaaatctgtgtaagataaaagaaacaactaaaaccagacaggcaccaccaccacagatcctaatagcaggccagatcaagatgcagatctcctgaaaacaagctgctcacattcccagaaccacaaccccctggggttggaatcttgtcttctttaactcgctgggtggtagagcccataggaattactcaaactatgaaaatcccaaagcatggtcacctacagggaaatgagacagatatgacttgagcataattattttcttctaataacagttaaagaaaacaaccttaaatagtaaaagttgtgtgagcttcaacaggtagataattgtgtttgtttttaccaaacatagcatttgttagcttaccaaggaggaaaatatacaatgtattgttgccattttttctttaaaataatattctctagggcacacatatatagtgattatagatacacttaa

SEQ ID NO: 445899 - DNA, 760 bp, Homo Sapiens
  misc_feature (51)..(132): n is a, c, g, or t
cagggtcttgctcttgctgccccaggctggttcttgaactcccaaggctcnnnnnnnnnnnnnnnnnnnnnnnnnnnnnnnnnnnnnnnnnnnnnnnnnnnnnnnnnnnnnnnnnnnnnnnnnnnnnnnnnngaaccactctttcatcaacaagcttttggactggactctgccacgtgacagtcagtaggaactgactccgtgctttacaccacgcgcagtcccagtgcttcatcactcaccggagttttgatgtaggtgtggggatcagggaactcaggaaaatggctggggatgtgcggcgggtggggtcggttctgccctgcagtgagggccttgggggtcactggctgattggtcaccggaggagcagtgatgaccatcctctgagaccgttttgcataagcagggagagtgtccacattgaaacccatctcaacaagtgtgaccacgatatcggacagtgtgggctgggtcctggctgtgtgctcacagtaagacttggcacttctcccaatttctgaaatgtagctctgcagcatctctgtcagcgtttccacggatgctttctcggcactctcaaaccctgcctctgtcagcaaggagctcacaaccacctgcagggttctcctccgggccagatgatagttatcggcagggttagtggactgtttacttcccgatctcgttccggagccaccggccccagctgtggccgccgcgtcggccatcttgttctggcgtagtgtgcgcgagcgcg

SEQ ID NO: 445900 - DNA, 407 bp, Homo Sapiens
gcagcaaaagaaaatgcactctaacttatgtgaactgagagaaaaaaatcaggttttaaacaggaaaacctatggggaatgatattttttgaaagacttttgtataaagttgagtacttagaaaaaagacaaaccagatgtaatatattttgtggatgtttttatttcttggatttatagtaccttatactaaggttaaaaaaatatgcttgatattgtgaaaaggtgaaattcttcaccaacatttcatttgctcctttgtcatattgtaatgccaatataatatagttaatgaaaacagcatttttaaaaaccgaaatattgaaatggtgtaatgttgtaccatttgcactgtgagcaaatgctaatacagtaaatatattgtgtttgctgacaatcaaaaaaaa

SEQ ID NO: 445901 - DNA, 425 bp, Homo Sapiens
  misc_feature (358)..(368): n is a, c, g, or t
ttaaaaactttttattgaaggatgacatacatatagaaaagaagatgtatgagaagtgtaagcttgatgaatgtgacaaactgaacacacctgtgaacccagcacccagctcaagaaacagcattatcactgcccagatggccccttttgttccccttacttaagactccataagggtgaattaattttgcctgtttttaagctttctatcaatggaatcatatactgtacacattgttgtgtgtctggatgcttttgtttaacattgggagagtcagcaatattgtgtatatttgcagaacactcattcttattgctgtaaagtattctgtgcatgcatacactatacatatacacnnnnnnnnnnncgagatggaatctcgcttttttacccaggctggagtgcagagccagactctgtctcc

SEQ ID NO: 445902 - DNA, 469 bp, Homo Sapiens
gttgtgtgaataaatatgagcatttatttggcacccgatggcaatacaaaatcctggcagtgggagtggaaaggttctctctctcaaatacttccatactatgtcgacccaaaggcaggacttggcagcaaggctcacaaaccacccaaacaaatatttattgagcaccttgactactacaggcctagcattttgctagggaccatgggagatgtgaaggaagttatctcacacatgatatgtcttcaaggagctaaaaatgccagtggataaaagcaaaacacatggaaaaacaaagtacaaataataatccgtgtatattgtcaaaaggaacattttatcaaaaggtaggattgtagctaaggttggcttgccttcttccctcttttattcaacaaacatttaatgaaggcccactatgtgccaagcacttggtacatgatggtgaataaaacaaacaaggtttctg

SEQ ID NO: 445903 - DNA, 629 bp, Homo Sapiens
  misc_feature (55)..(184): n is a, c, g, or t
caaaaggaacattttatcaaaaggtaggattgtagctaaggttggcttgccttcnnnnnnnnnnnnnnnnnnnnnnnnnnnnnnnnnnnnnnnnnnnnnnnnnnnnnnnnnnnnnnnnnnnnnnnnnnnnnnnnnnnnnnnnnnnnnnnnnnnnnnnnnnnnnnnnnnnnnnnnnnnnnnnnnnagtaaaagtagcatatatataaactgcaataaatgcaatgaggggaaaagacaagatgtggtgacagacacagaagtagactgctcagggactgaagggcccgggaattgtcaagacttgatgaagaaggacaccactctgagtcaagagtggtgggggtggagagctgagaaggcccaggcaaatggcaggatagagcacaatattagaagctgagaggagaccactcgggctggagcttagcaagaaatcagcatttgatgagagttcaatgggaaggcaagaaccagttctcataaaccaaggtgaagagtttacagttttacctgaggggtaatagaaagcagaagggttctaagcaggggggtgatcagatttttatttcaaccacccaatcctggccaggtgtggtggctcatgcctgtaagcccagctatttgagacc

SEQ ID NO: 445904 - DNA, 643 bp, Homo Sapiens
gatgaactgcttgctctggactcagagtactataaagacatcactaccatcaagcgctatgatggggacatcactgacatgggcatgacgctgtcatacgacgaggacgtcatggatcagcttgtttgccatgaactgattcctggagggtagaccattcctgttacaaatgaaaataaaattagctacatccatctgatggcacattttcgaatgcacactcaaataaaaaaccaaacagctgccctcattagcggattccgttccattatcaaacccgagtggatccgaatgttctcaactcctgaactgcagcgtctcatctctggcgacaatgctgagattgatctggaagatttaaagaagcacacagtctactacggtggtttccatggaagtcacagagtcatcatctggctctgggatattctggcctccgacttcacaccggatgagagagctatgtttctgaagttcgtgaccagctgctccagacccccgctcctgggattcgcctacctcaagcctccattctccatccgctgcgtggaggtgtcggacgatcaggacaccggggacactctgggcagcgtcctccggggcttcttcaccatccgcaagcgggagccaggcggccgcgagc

SEQ ID NO: 445905 - DNA, 698 bp, Homo Sapiens
gccaataaaatattgcaacctttatttaaaacagaacacaacttggcaaaccttgtgagaagacagagaaagcagtccctttcaagggcctcatttatttacatcaagtttaacactgttagcagttcacagtcagacaacagacggagagaattaaattagaaaaacaactgaaaatatattacaataacaattaagaacaaatacctgacaacactggtaatgtgacacacaattgatgtgtttttagttaaatcccacattgtctcactatgtccccttagcaatgcacacagtgcccgatgctccaaacctcaccctctgtgcaccacatacacacctgcggggcgggacctttggtataaacgttcaacgagttttaaggaattgaatccgcatgtttggggacaaagttctgtcaaccaccatgaaatgtttaaacttatttttactaagcgagcataaaactggggtttgtccagtgacagtcattagagaatcagactgcagagaaggaaaagtgcagggtctgggaggagatggaggttctgagtatacatcaacagctaagtcagcctgttcacagtcaacacaccaaccacgccactgctgttcatccaaggaaagatctgagcgattcctcttttacttactccccctttcttaatgggcacgacagcaatgcacgtgtatttacc

SEQ ID NO: 445906 - DNA, 412 bp, Homo Sapiens
  misc_feature (292)..(292): n is a, c, g, or t
atgaatcaataaaatattgcaacctttatttaaaacagaacacaacttggcaaaccttgtgagaagacagagaaagcagtccctttcaagggcctcatttatttacatcaagtttaacactgttagcagttcacagtcagacaacagacggagagatttaaattagaaaaacaactgaaaatatattacaataacatttaagaacaattacctgacaacactggtaatgtgacacacatttgatgtgtttttagttaaatcccacattgtctcactatgtccccttaggcantgcacacagtgccccgatgctccaaacctcaccctttgtggcaccacatacacacctgcgggggcggggacctttggggtttaaacgtttcaacggggttttttaaagggtttggaattc

SEQ ID NO: 445907 - DNA, 681 bp, Homo Sapiens
ccaaatggttctttcttcctcaaaagctgcatggtttattcagtgccttcgagatctggcagagagggaggaatgagacacaggtgttatccagagagggtgaacttgcactttgtaaaggcagaccagtttgctcccagaaaatcaatatctgcttccaatttggaccctttccaataaaccataaactctcatgagtctttgggaacattactgtagggctaagttggtggacaaatatttggtttttaaagttattgcaatgaaagccttaaatagtgaagaaattttcattttgaaaatgcagactggctttagcatgaatgtcaacacagagcatttgtgtagcaatttacagtttctagaactggcaagattcattatcccattttaccctcaagaattctatgggaagttaagtcgtctttacacaaacatggagtctgaggtcattaggggataagaaatttagccaagttcacacagctatatagagggcacaactcataccccagctgtgtttaaaatagctaatttatcatatattactggtccactacatagtcaaacaatttctataggtgggccgtacataggcacccagactatactcacatcaagaaatgtccttcaaaaacacagttgacaggctggtgctttcagaatggatccctggcagac

SEQ ID NO: 445908 - DNA, 470 bp, Homo Sapiens
ttttttaaggaaaaaatcagtatcttggttttatgcagcctttccacacacacacctgcccccaacgggcttcaaatactttttttcattcattctctaaacatccgggggtgataaggtaagaattaacttccctatttaatgttgggggaaacaggatggagcttggggacgttgtatgactttgacactgggtctcagggccataatattaacatgagaaccagaactcttattttcaacatctttcttagtacaaatgctacaggggaaatggaggaataatacacaaaaatatagctctgaggctaatttcatcatgacacaaatgatctaagacaacagtagttcagtaaaggttttcagaagaatttcctatcttgcaatgaacacagctagagcagggtaaagaagtatacccatctagattataaacataatataaatgttaaaatcacgtttttcttaaa

SEQ ID NO: 445909 - DNA, 545 bp, Homo Sapiens
ttcagccaatcacaaaaaacagactttattgaagtatttagcactaaaccccacacaattccagctctgtagctgaggacacagccacttggcaatggcaccaggtgttatacaagaccaataagttaatgtaaaggacgcttaggtgtggagggccagtgctcagccgtctcctggctcagaacaaggcactctgggctccagttaggacactgagaggccagggaaaccaacatgccctggagaaaggggcttagagacaaaccggaaaagcacagcatccaagcagggtattcacgcatggggggcagagtaggcccaaaagttgggggttgctgatgcggtaagagcacagtgagagaaatgccaggtgcatcccttcagcctcctgcatcctcccccaggttcctttgatgggccatcctgggtcttcccttggcacccttgtgcaatcggctacatcgttttctttccagtagagagaactgtgcctcttctaggtcagacaccagagttcttggaaccttctgctatattcacagtct

SEQ ID NO: 445910 - DNA, 981 bp, Homo Sapiens
  misc_feature (848)..(911): n is a, c, g, or t
agtgggcatccttgtcttgttccgttcttaggggaaaggctttcatcttttccccattcagtatgatgttagctgtgggtttgtcctatatggcctttagtatgttgaggtatgttccttctatgcctagtttgttgggaattcttaccatgaaggacacacccagatccctttattccagaacacataacttaaagtcacactttcctgagatcagagcagaggatggcagagaaccaaagtcacgagtgtgtgaaacaacggagaggagcggcgctgtgcagcctggagctcaagacacttgcatgagcgcctaggggagacaaccatctcagtaatgatcctaattggatccaactggggaactccagaaagtttcagtaacaaatttgcaatggttctgggccttttaatatggattcacaaaagataatgaggttatcctgtcatttctaccctatggatgaggaaagtgacattcagacaggccatgggatctacccactccctcgtaaagaactggaggaccaacattagcaacaggacctcccatttggcattttgttttcagatgtgcctagaagaaggagattacagcttcttggactgttgaagcctgggttcttcttgagttgtgaagatatcacctaaatcctatccacattttgtgcaccaggtttgtggacgcctaccaccattcattcattgcagtggctcagagaagatgaaaacaggactctttggggccaatgaagatccccaacagagctcagatgaccagagtggactggcttctaccctaaatacatacaacaatacttcccactctgaccttgctcactttatannnnnnnnnnnnnnnnnnnnnnnnnnnnnnnnnnnnnnnnnnnnnnnnnnnnnnnnnnnnnnnngccttactctcaaccaccaccctgctgcctcctattctttcctgaaatcttcagtatagtcattattatg

SEQ ID NO: 445911 - DNA, 476 bp, Homo Sapiens
  misc_feature (425)..(425): n is a, c, g, or t
  misc_feature (449)..(449): n is a, c, g, or t
aagttctcatttttttctaagaaaaaagcaacaagaaaataattcagagtttatacaaaacatctttacattattttttttccaaaaagactagtatttacacaaatggcaacagaaacaaaaacaaaaacccttccgactgccacctggaaggggctggctgttctgctccctctcccacctggcactggggtgggcagctggccaggaggcagtgtggaggtggatggtgtgagggccagctccttccatggctgctctgggagtgcctgcaaggcgcactcaagtggcagtctgttagcagccgtgctggcaaggaactgggggtcaaagtgcacagcgggctggcccagccccaggggagcctcttcctctttccaggccccagcccaagactgggacagcagcaggagctgggttgggtnggggttaccacctgtgctaagggncccagaaaaggagcaggccacctggtc

SEQ ID NO: 445912 - DNA, 817 bp, Homo Sapiens
  misc_feature (101)..(110): n is a, c, g, or t
  misc_feature (248)..(345): n is a, c, g, or t
  misc_feature (347)..(347): n is a, c, g, or t
gggagcccccctggggcccccgtgtggaaagattccggaaaggccctcccggaccccccctctgggttttttttcaaaacgcttcggtttccccccggggnnnnnnnnnnggtgggattcccaaccccttttcctttcccgggtttttctttgggaacacgtttggcccagtttcctttccttttggggcccggcgcccaaagagaaggttttaaaaaattttttagggggccaagggcgccccccannnnnnnnnnnnnnnnnnnnnnnnnnnnnnnnnnnnnnnnnnnnnnnnnnnnnnnnnnnnnnnnnnnnnnnnnnnnnnnnnnnnnnnnnnnnnnnnnntnttgcagcttttaaaatataacatttattgcttaaatggtttgatacagaacagctttcttctcattctgaatttggaagttctatacaactgaatacaaagaggaacaaaaagtaccaaaaccaaacttgtgattctctgttcatgtggcataaaccagttttgtacataacatgtagcagcagtttttaagttccctttagaaaaatatgaattctacaaatttattattgtttcctgtttaatgcatgggctgaaatcactaggatcaatttccttcttgaagaaagaggagaggaaagagacgaacagagggtcagaacgcatggtgaatcttccaaaactggcatccgactgttacgtagcttccccagcgctgcttggaacacagccctctgggttgttttgttttcacagccaggtgtttcatgtagtgattgaatctcagcatcatgtccattaatcaatgag

SEQ ID NO: 445913 - DNA, 562 bp, Homo Sapiens
ctttggtgagatgtaataagaatctgaatgagaacagtaacagagggatgaaactaaagggacagatttgagaagtattaaagagagagaccagcaggactttgcccagttttgttagtgagggtaaagagtcaagcatggagcatatttcttgcttggataactgagtgctggcatcccatttgatcattcgtagatatgctgagtttcaggtggcttcaggacatccaagtggacatccagtaggattctgcagatgtatggaggcattccgtcactgttgttggcttgatcagataccctttacagatatagcaggtaatgtaaggattaaaatctttcaccaagtgtttcctttgggtagccattcgtggctagtgaagactggctttagtagtctgggcaaagaggggtcctaagtagatgaaagtctgatcccaggagctggtgtgtcgttcccagtaggatgtcctgaggcatgagaactagcatccagatttatcatgagatcgttgatcatcactccttttggtggttccgctttcccatgtccagcggccgc

SEQ ID NO: 445914 - DNA, 752 bp, Homo Sapiens
  misc_feature (33)..(33): n is a, c, g, or t
  misc_feature (46)..(46): n is a, c, g, or t
  misc_feature (52)..(53): n is a, c, g, or t
  misc_feature (59)..(60): n is a, c, g, or t
  misc_feature (64)..(64): n is a, c, g, or t
  misc_feature (87)..(87): n is a, c, g, or t
  misc_feature (96)..(96): n is a, c, g, or t
  misc_feature (105)..(105): n is a, c, g, or t
  misc_feature (107)..(107): n is a, c, g, or t
  misc_feature (119)..(119): n is a, c, g, or t
  misc_feature (124)..(124): n is a, c, g, or t
  misc_feature (129)..(131): n is a, c, g, or t
ggggaagaacattgggaggaatttttttcaatnaaacccttttaanaaaatnntccccnngatngcccattattttgtaaaacaatntagacaganagccaattngngggtcaatttcnggganaatcnnnatcatcttcattttcatcaccttcttcatctactttcggtttgtcagcttttgaagtatcatcttgtccattttcttgaggcttatttttcttccaaaattcagattcacgctcaagttcttgttctcgtagtccagggaccagcttaaatataatttcctctaatgtattgtccaacctcaacatttctaatggatttgtctcatgaacttggttgccacaccttgggcaatcattgctatcttcaaagtgctgaacaatacaagtcttacagaatgtatggaggcattccgtcactgttgttggcttgatcagataccctttacagatatagcaggtaatgtaaggattaaaatctttcaccaagtgtttcctttgggtagccattcgtggctagtgaagactggctttagtagtctgggcaaagaggggtcctaagtagatgaaagtctgatcccaggagctggtgtgtcgttcccagtaggatgtcctgaggcatgagaactagcatccagatttatcatgagatcgttgatcatcactccttttggtggttccgctttcccatgtcttgctctcgagaggccacgatccgggcgggccgcgcggggcgagtccgct

SEQ ID NO: 445915 - DNA, 935 bp, Homo Sapiens
  misc_feature (521)..(553): n is a, c, g, or t
  misc_feature (865)..(865): n is a, c, g, or t
  misc_feature (878)..(878): n is a, c, g, or t
catgtttccatccatggccattatgattattaatattattattatctatatctccaccctcaaatcggcgctgcagttccctttcttcagaatggcgccctcaacgaggcactggggtcccaagtaccaagagcgagctggggacccagactgtttgttgcccgtctggtgtgcgtttttcttccagcctcagcacttggtgctaagtctcacaggcagtgaactctgtgggccacacagaagctaggccctttcctgaaaacacaaagccttgcataggaagctgggcaggaggagccagcaggaggtcccgggagagggtccagtggcttcacgccgttcctctgggctcccgactcagtggcagctcactgagggcttcactgcatggcagtcctgcctagaggccctggtggcccctcctccggccggtgcttgccgtgatgcgggagctcggtgttgtcgcggtagtcgcggcccttggagtgctggaggtgcagcaccgccgggctcttgactgnnnnnnnnnnnnnnnnnnnnnnnnnnnnnnnnntctgctggttgatttccgatctggaaggcttgatgggcctcttggccggcaccggggcctgggagctgaccggggtcttgggcttcccttggctcttgtccccgccggccgccctgccctcggcagaggatgagcacgtgaaggagcgcagccggggcgcgggcacctgcttgccgggcccctcgccgcgatcagcctcctgggctttggtgagcacgatgctgggcgacaagatgccgggttccgggcagggcgggggttccttccgcggcattttgggggattcctggtccttcctgggagcaggcttanggaaggaactcanggacccatacagggggttcttaaacatctcgggcttcgtcagcggcaagtccttctg

SEQ ID NO: 445916 - DNA, 508 bp, Homo Sapiens
ctctctttgtttaattttatcagtttcatccagtaggtatttggcctggaagaagagagagggagctgagatttcacgacacaaagtccattcagccaaacttgggctttttgacattcaactgaacttggagccaagcctttccattattctaacttcttacccacttctgggagaggtgttcaaatatatttccagattttgaaatgagccaaggtcctcagaaactgcattctcagttggtttgctttggaggaataaacttagtctcaaatccttcttcatccaggcagtcatattgaaactggatcagatggtgtttagatctttacagcctgtggccctgaaggagttcacctcactgagcattagtcttctcatcaggttagtatgcagttctgcagctcagggacctaggctcctcttgtctcgtagttctgctatgaatggcctccattctcatggttgttgtcatattctgagactgttgctccagcttcagcttttg

SEQ ID NO: 445917 - DNA, 536 bp, Homo Sapiens
  misc_feature (510)..(510): n is a, c, g, or t
  misc_feature (520)..(520): n is a, c, g, or t
tggtgcttacctttgattggtgtacattgtctaattgatctttctatcagtcatgttccaaactgaagttatgtgcttctttgatcatgggctgtatctgctttctttggtgtccttttcagttgcccactggaagagtctttcccatttgcccacactggatgcccacactggatgggataatcctaggagggaggaactgtggagatggtgcgcccttgggatgtcccagaagacagtgacccagaatttcaagagatgttttcagatttcacagtataataagagaaaaggagccaatcccttaaatgaagaaccttcaatcacttctccccaggtgcacgtttcaatttcatttcttttcatcaactccttccctttgatgatgggttgcattgaaaactgcattctcagttggtttgctttggaggaataaacttagtctcaaatccttcttcatccaggcagtcatattgaaactggatcagatggtgtttagatctttacagncctgggcccnaaggagttcacctcac

SEQ ID NO: 445918 - DNA, 1091 bp, Homo Sapiens
ggtccggaattttccggatccacggactgagactgatttgattaaagcaccagagtgcaatggccctcagagcagggctggtcctggggttccacaccctgatgaccctcctgagcccgcaggaggcaggggccaccaaggctgaccacatgggctcctacggacccgccttctaccagtcttacggcgcctcgggccagttcacccatgaatttgatgaggaacagctgttctctgtggacctgaagaaaagcgaggccgtgtggcgtctgcctgagtttggtgactttgcccgctttgacccgcagggcgggctggccggcatcgccgcaatcaaagcccatctggacatcctggtggagcgctccaaccgcagcagagccatcaacgtgcctccacgggtgaccgtgctccccaagtctcgggtggagctgggccagcccaacatcctcatctgcatcgtggacaacatcttcccccctgtgatcaatatcacctggctgcgcaacggccaaactgtcactgagggagtggcccagaccagcttctattcccagcctgaccatttgttccgcaagttccactacctgcccttcgtgccctcagccgaggacgtctatgactgccaggtggagcactggggcctggatgcgccactcctcaggcattgggagctccaggtgcctattccaccaccagatgccatggagaccctggtctgtgccctgggcctggccatcggcctggtgggcttcctcgtgggcaccgtcctcatcatcatgggcacatatgtgtccagtgtccccaggtaactgatccttctgagagaaatgacttgtgggagacaccctgcagatcctcatgggtttgtgacagcccctgcgtgctcagtgccctttaagtgcatcccgctgtgctgactttgagtgggatcaacatctgtcctacgggtcccctcttttttggccccagtattcatggcagggtttgttggacacctactagcttcccttcccattcaacacacacacacattcttgctctacccaaagctctggctggcagcactaaatgctttggtggtaaaaaaa

SEQ ID NO: 445919 - DNA, 433 bp, Homo Sapiens
  misc_feature (155)..(378): n is a, c, g, or t
aagtgtattatttttatgttaatttttttatttccataggtttttggaaaacaagtggtgtttggttccatgagtaagttccttagtggtgatttctgagattttggtgcacccttcacccaagcagtgtacactgcacccaatttgtagtcttnnnnnnnnnnnnnnnnnnnnnnnnnnnnnnnnnnnnnnnnnnnnnnnnnnnnnnnnnnnnnnnnnnnnnnnnnnnnnnnnnnnnnnnnnnnnnnnnnnnnnnnnnnnnnnnnnnnnnnnnnnnnnnnnnnnnnnnnnnnnnnnnnnnnnnnnnnnnnnnnnnnnnnnnnnnnnnnnnnnnnnnnnnnnnnnnnnnnnnnnnnnnnnnnnnnnnnnnnnnnnnnntccttgctttttaatatgtgccagtgtgtatgggtggagaaagagtggggtggcc

SEQ ID NO: 445920 - DNA, 962 bp, Homo Sapiens
  misc_feature (173)..(173): n is a, c, g, or t
gaaagggtcccctaagtgcccctccagaacccccattggggattttgttcaagaaccgcttgggtttgccgccccgggcgtttttttattgggtggggaaatcccaagccctaatccatgggcccgggatttccttgggaaaacaagttatggcccaggttccctttaccttnaggggccccggggcgccaaaaggaatggtttagaaaagcttcttgaggggccgaggggggccgacaagaacttgcttccggtcacagcatggtatgcctcgaaaatttaaaattttgtattaggaaagccacagtttggtaaaaggtagcattaatatcattcacatcagattttaatttgttacacatttttgtagttcagcaaaggcccctatgatgaaaaacaattaaaaagtgttatgacaaaaataattatctgtgtaaaaagggggagacccaaaagatttttcatatggttatttaattcagttaaatagaactgttatgaatttgagaggaatgaagatattcaaacactaacagaaaatcattagccttatattagagcattcaaatgcttatgtaactcttcaatccatctggcttcataaaaaccaaaattttgaacacaaaaaagtggcagagtttacattaccttttgtatgttcctaagtatgaaattgcatcaatttattatgaattaaatttgaaaagcatcacagatttaaaaacaaagtacaaaagagcctgattctttttaattccacaaatacctagcatctcaaagtaacatgtaaacaaacttctatgctgctcaatgaatccttccaatttcgataataaactaaatagtattggatctagtatatgactttcatgtgtaagttatggttctatccattactttaacaatattactgatgtaacagagaaaaattttcaactattgtatttatttaaaacaaactg

SEQ ID NO: 445921 - DNA, 852 bp, Homo Sapiens
  misc_feature (673)..(673): n is a, c, g, or t
  misc_feature (703)..(773): n is a, c, g, or t
tttaacctgaaagtatcactgtttatttcacatttaaaaaaatcatcggcagaaactaggtagctgtgaaaatagaatagtccactggtagagtttcaattgtgcaaacagacgtttggtccatcatttttcttctctgaacatttcttcatctgcaaatgggggagtgcctgtgcaggtgacaacagggtggtgaagggccacccttaaacctgctgcagcccttacctttcacatctgaacaggcagactcaaacttcattgggtggccacaaagacttggaagctcaaaatttgaaacatcaaaattaaacacagacccaatttctttgcatttttagtcctgtattctatgtttgacaaaatcactgtaaaataaagcagcagtaagaaaagaagcagattcagaggactaaaagcaggaacagatgggaaaaaaaggctggaaatccattcgtttatttactgagcctggtccaatgtcaacagaactaggattaactaggttaagagttggcaaaggacaggaaagcaaagtaataaaatttaaaagctgaattggtacagtgttatgaagaagtgtttatttagtatttatagtaccagattacagtcacttgttgatttagatatgaattttcatatgttagaagactcagggaaatacacaggntcccaaggagtgagactgagattctgggtnnnnnnnnnnnnnnnnnnnnnnnnnnnnnnnnnnnnnnnnnnnnnnnnnnnnnnnnnnnnnnnnnnnnnnncttaactaatcattatgtcctttgtaagactggaaatgtggattagcagttagacagtatgtatgtacccagttttgta

SEQ ID NO: 445922 - DNA, 1646 bp, Homo Sapiens
  misc_feature (140)..(210): n is a, c, g, or t
  misc_feature (1493)..(1547): n is a, c, g, or t
  misc_feature (1552)..(1552): n is a, c, g, or t
  misc_feature (1597)..(1597): n is a, c, g, or t
acagtgttatgaagaagtgtttatttagtatttatagtaccagattacagtcacttgttgatttagatatgaattttcatatgttagaagactcagggaaatacacaggatcccaaggagtgagactgagattctgggtnnnnnnnnnnnnnnnnnnnnnnnnnnnnnnnnnnnnnnnnnnnnnnnnnnnnnnnnnnnnnnnnnnnnnnncttaactaatcattatgtcctttgtaagactggaaatgtgggattaggcagttagacagtatgtatgtacccagttttgtaggatatgctggggacatagtagggtgttcaataaattatacatatacctgaataaacaaactatacattaaatattttataaattatacatataatcgaacatcatttaggtaaactctttaatgaaagacatttattgtcagattataaaatcagtgttgatgataagccctcctacccacaaaacaaaaatcgtatgtatgaaattccctttcccgtaagttatgtgcctgtcagccatcccacttcagtccatctttggatgctgaggctctggttgccagtccttatctctacacctgtccctggtctagaggagaaacgaaggtgctctgaggcccctgtaacagagacccttgtcatccatatttgcaataaagacatcatggaggctgtgcaaaagtatccttctccccaacttctgcaggcaccatttccatctcactacccagaggtacatcagagagcaggagccaggcaggtgacaaagatgtggaaggcttctaagtggttggctttgccgtctcagaagtgcgaagaaatgaaaatccatcaaaacagaatgccattccatgtttcaggcttttacctcacctcaaatcaaatgtctgttctttatttattggtcccataagtagacacgcacttggacttctggttttagaacattctattgttatcctttctccttttaataaacacacactagtttcgaggaatctccctaataatcctggcctgacatgctgcagaacttcaatttcataattttactaacaacagaggaatttcatcttattattaccaactaccacattaaaggatctgaaacagtaattcatgcataattctatttaataatggttttcaaagtactttgctgtttgaaaatgcttcccagatgattctgatcggagagttgggaaccactgcccctagactgtaaccactcaattggaactttactcaagtgctgcttccctgccccacttcaagtaaacaatgcttaactttttcgtttctaaaacaactgagattactttctcccccttagtttctacaatgattgttgaaaatttgtgggaaaagtttatccttacaaatgaaaacatgaaatctgaagtggataaactaacttttaagaaatacatatccttactcagtaagctgaggcaggaggaccacttgagcccaggagtgcnnnnnnnnnnnnnnnnnnnnnnnnnnnnnnnnnnnnnnnnnnnnnnnnnnnnnnnaaacncctgtctctaggaaaaataaatacctatctttcaaaacttgcatnaaaagcccttgtcttcacttgtacagcctcttctgtttcatgaatgagc

SEQ ID NO: 445923 - DNA, 431 bp, Homo Sapiens
tgccttttaaaccctctgaaacctgcctccttttccttacctgcctgcctttattttaccagtgattttgtcaaacatagaatacaggacctaaaaatgcaaagaaattgggtctgtgtttaattttgatgtttcaaattttgagcttcccaagtctttgtggccacccaatgaagtttgagtctgcctgttcagatgtgaaaggtaagggctgcagcaggtttaagggcggcccttcaccaccctgttgtcacctgcacaggcactcccccatttgcagatgaagaaatgttcagagaagaaaaatgatggaccaaacgtctgtttgcacaattgaaactctaccagtggactattctattttcacagctacctagtttctgccgatgatttttttaaatgtgaaataaacagtgatactttcaaaaaaa

SEQ ID NO: 445924 - DNA, 483 bp, Homo Sapiens
ttttttggcttcaataaaagaattttatttctcacagttctggaggctagaatttcaagatcaaggtgccagcaaaataggtttcattctgatccctctcctagcttgctggtggccaccatgttgctgtgtggtcatatcacctcttctgtatgtgtgcgccaggtaggcagagaaacagagcaagctctctggtgtttcttcttatcaggccactgagcctttcatgagggcctccctctcatgacctcatctagctctaatcacctgccaaaggcctcatctccaaagaccatcacactggaggtcagagggtcaacatgaatttgtggggatacattcagtccataataatatacataaagttattcaaggccctaataacataataagccagaacttggatatcagatgggtcaaaggctttcaatgcttaggaggcatattctgcttaaggcaatggtgtcccttgaaggctatctg

SEQ ID NO: 445925 - DNA, 434 bp, Homo Sapiens
aatctagtcattaaatgttaatgaagcataatatctttattttttgtaagctggaaaagaagtacaaataaagcactccaatttgtgtttttcttcatccctatacatgatcctgcacagtttctgaggacggtagcaattgctttcaaagaccactgtactagaaaacaatttctcaatgcatcgtgggtgtgggcagtcttctgtggagggtctttcacaaatcatttctaactagtaattgaagcagaccacagtttggagatgattgacttgctttagcaatcacagtgtatttaaaatcacttccagctcttcctctcactctttctcctgtgtgtttcttggtgggtgggaggctgaacgtcctttaacccttagtctatcttatctacacaagagtccaaagtgacccaccattcctgatacgatgt

SEQ ID NO: 445926 - DNA, 1498 bp, Homo Sapiens
  misc_feature (64)..(128): n is a, c, g, or t
taaatgagtgcatttttattatgtaaaaattataccttcatgaagttgactttcaaaagttggnnnnnnnnnnnnnnnnnnnnnnnnnnnnnnnnnnnnnnnnnnnnnnnnnnnnnnnnnnnnnnnnntgttagcagtgcttccaatctcccagtgcttatttctctcccagagcggtcttgcgaggaggtcgtgagaggagtcctcctcccaccgccatttctgtggccgggtggtcccaccaaaggcagctcagtgactctcctggctggtctgacccaggccagcctcgcagacccagtggtagggcctctggcagacgtcgtcattccacctgccgtctggatggaagtgagcacagtcctcgcctccacccagcccgtgcccctgccagtcgtctggctggcctggcttccagttctggaagccggtcgcatagtctgttccatccacccacttccaggctccttcagggtcactgaggcccatccaggtgtatgcggagcctagatatttctggacaaaattctggtcctccctgggagttgatgacccacccggtggggcgttcttcagtttggcagtacttctcagccttggccccaggacatcccagagtgagagaaccagtagcagctgtcttggtgctccacccagttggacgttcttgggctgcaggtccttctcagtgtcggcccaggacatcccagagtgagagaaccagtagcagctgtcttggtgctccacccagttgacgggcagcaggtcccttcagtggaggcattgttgttgagagtagccacctggcaggtcagtttcttcaggtcttgcaccagctgctggactcgcaggagcatttcagaatgaactgcctgccgttcctgcttgaaaccctccacctcagctttcagagatgctatcgtttcttccaagctgctgccctgggaagtcagtgcctggatctccgccacagtgtttgaggtgaagttgctaaaatctgttctcagggtcaccaggtccctctgaaatttggaattttggaatccaaccacacagatgatgaccagcagcaggaggccgaggcccagggacagcaggagatggcagggcccagagcagagacgctgcaggagggactggagaggaagtggcccatttttaaacccctggactttcaccttattctccaagtactggaagttttcatacgtccttgtcatgcttgggccaacacggctctgaggttgtcacagctgaaatggaggcagggccggcgcccagtctggggtggagctgtgggaggtctggagggtgtgattcccacgttggttgtgctgcaaggaccagaggtgggacgtcactcagagttgggagcgctgtgtcctggagagctggggtagaggtgactggagtcctgctggtcttgggtctgaaatcccaggagccctatcatctgggacatcccatctccatcccgggaatccggaccggtccagcc

SEQ ID NO: 445927 - DNA, 1297 bp, Homo Sapiens
  misc_feature (72)..(72): n is a, c, g, or t
  misc_feature (325)..(334): n is a, c, g, or t
  misc_feature (543)..(551): n is a, c, g, or t
  misc_feature (593)..(665): n is a, c, g, or t
  misc_feature (712)..(750): n is a, c, g, or t
  misc_feature (759)..(784): n is a, c, g, or t
gggggaaaggtgggcggagcttatttttggaagaagatctcaggcgaggttgaggtgggtctttccagtgtntcggccgagaagtggggtgtgggttcctacaaattgtgaggtttgtggtcaacgtgtacaccccccgcgtttaaagactcggagcggatggtgcgctattatcggggtgaaaggatttggttcggggaggtcccaacggcggggaaaggccaggaatattttcgccgtatgggcgggggggcccttggttagacatggattaagcgtggtcgaagggtaattaaggggggtgttatccagagttttcttgaannnnnnnnnncttagattgggggtttcctcttgaagggccccttttttggggattggggggttctggtgaaagcccagtttcctttgggaaaaaggaggggtaggcttttgattcgggcaaaccaaaccacccgctggtagcgggtggtttttttgtttgcaagcaggcagattatttgcagaaaaaaagggatttcaaggaaattcctttgattcccnnnnnnnnngcccggctcattaggccgggttaaattccccgggtactgcannnnnnnnnnnnnnnnnnnnnnnnnnnnnnnnnnnnnnnnnnnnnnnnnnnnnnnnnnnnnnnnnnnnnnnnnaccactttgtacaagaaagctgggtcaggaaacagctatgaccatgnnnnnnnnnnnnnnnnnnnnnnnnnnnnnnnnnnnnnnngcctcgagnnnnnnnnnnnnnnnnnnnnnnnnnncaatgtttcaccactttaatagaatattctaactattctgtacaaattgaaaacactgtattcagttacaaatgtgttctaaggttaggccgagcactctccacaggcctggtcagtgcggacacggccatccccggctgccggagagcgccgtcacccacttgaaaaccccacccaccagccgccaagcggtcacaccaaacccaggaccttcagacaggatgaatggtggggccccgcaatggggctactgagaaagcaggacttgacgctcatacgctccactgaaacgcaggacttcccagcccagtccctcagtggagaagactgccgaagcccggctccggcagcagggtggcgcctgcgtcatgaggacgggctcgcatcttcagccctggtggcagggagcggcgtttcttccgcacaggccttgcgcctgctaggaagtggcacatcttcctgctcagggcaccaaggtggttcagaaacgttaaggacgagccacagcgaaaa

SEQ ID NO: 445928 - DNA, 416 bp, Homo Sapiens
  misc_feature (276)..(276): n is a, c, g, or t
  misc_feature (315)..(315): n is a, c, g, or t
  misc_feature (384)..(384): n is a, c, g, or t
ttttttttcaatgtttcaccactttaatagaatattctaactattctgtacaaattgaaaacactgtattcagttacaaatgtgttctaaggttaggccgagcactctccacaggcctggtcagtgcggacacggccatccccggctgccggagagcgccgtcacccacttgaaaaccccacccaccagccgccaagcgttcacaccaaacccagggaccttcagacagggatgaatggtggggccccgcaatggggttactgaggaaagcaggantttgacgtttcattacgtttccactggaaacgcagggantttcccaggcccagttcccttcagtgggaggaaggatttgccgaaggcccggctccggcagcaggggtnggcgccttgcgttcattgagggacgggtttcg

SEQ ID NO: 445929 - DNA, 1040 bp, Homo Sapiens
ttaaaaaagcaaagtttgttaatatttattatcttatttttagaacagaaataacattaaaatagatgtttttagaatatcaacatacaatcaaaaacacaaagtccaaggatcctccccatctccaaggcttaaagggcagctatccagctgtagtctattttcctaaattttctcagttctttttcttcagattttgacaactgatgtataatgtcttctcctaaacctgtgttacttgtatcctggactttttcggtaaaatcattttcttcatctgaatcttcactttctttttcttcttccatatctacatcttcaggaatttccttagcactcttagtctctttagacagcagcaatgaatttacaaacatggagcacaggaaagcagcagatggcaggacatgggctggagtgtgaagaagctcactaattgcgggtatgttttctgttaagggtagttgtaccagctcattctctaaagtttcgtttagtttttcatcctgctgttgcctgtgttttcccaatatgaaataaaatggggttgtggggagactttcttctgctagcagctttaaggatttaagacaaggagaaattatttcagaaaaaaggaagaactgtgtttgacttaacagtaagtactacagaatcataaaaagtctgtgatgaaaggaattttacaaattatccagttagtatgatcctctcatttcacagagaaagcaactgaggcctagcatcccacttatgagaagagctaacagtgaacacttagatgacagaataatacatgcatttaccactgcttcttcaccaaatcccacaaaaatgacagcaaaagggttttcaaagggcacatactcacaatgatagaaaatgagggaaaaggccttaacagtaacatgttggaaactggagagcaggctgaaggatggtattgaacttagtagacctgagaaagcacaattctaagctggctgtagggaaagccaagaagcatcccaattcatactacagaatcctgcaaatgtagg

SEQ ID NO: 445930 - DNA, 672 bp, Homo Sapiens
  misc_feature (282)..(319): n is a, c, g, or t
ctaagggagcttgcccgagcccagctgctgattgttaccagggcttataacaggttgcggggtctgtgatttagtgctttcatacaggcacaggactcgggcacggagaggggccgtgctgtgcaagacggctgaggctgtctttatttgagagctgctcagtttgtcctttttcagctgcagggttttatggtggaagctgtactttgctttccagtgaatcaatgctgtcgtccatgtgttctctccttggcttgtttgtatgaatcactgaagggctcnnnnnnnnnnnnnnnnnnnnnnnnnnnnnnnnnnnnnngcttcctggaccgcaccttagaatgatgaaatattattttctggtatattttatcaaacatccccaaaggcttcttatgataatgaggaagcatgattataactgtctaactcttctgtgttcatattgatgttaatgggactaaattaccttgctagcttaatgagataagattttaaatgggtgttttatgtactctgtgtgtgtgtatttaatgaagacttggtggtcgcttctgatttacacttgggaatcaattcccctcttgtggctttttgctttgtttcctttcattcaccctcgaattaaggcatcctcagtatagaaaattttgaaaatacagaattatgtct

SEQ ID NO: 445931 - DNA, 540 bp, Homo Sapiens
aataacaaccctgcaagcaaaatccatgacgtgaaagattacatcacagatgttaacagctggctggtgacatttggtttccatctgcacaatgctattcctggattccctgttcccaaatttgatttaacagaaccttcttacgaacttgtgaagagtcagcagtgggatgatataccgcccatcttcggagtccagcagcaagtggcgcggcaggccaaggccttcctgtcgctggggaagatggccgaggtgcaggtgagccggcgccgggccggcggtgcgcagtcctggctgtggttcgccacggtcaagtcgctgatcggcaagggcgtcatgctggccgtcagccagggccgcgtgcagaccaacgtgctcaacatcgccaacgaggactgcatcaaggtggcggccgtgctcaacaacgccttctacctggagaacctgcacttcaccatcgagggcaaggacacgcactacttcatcaagaccaccacgcccgagagcgacctgggcacgctgcggttgaccagcggccgc

SEQ ID NO: 445932 - DNA, 526 bp, Homo Sapiens
  misc_feature (211)..(248): n is a, c, g, or t
ggcatggcttttttattctctttgcagccaaaacctgtttttacaattaaaaccaaaattttgaatcacaaggttcctatgtctatgcatacttgggaacttagtgtgaggaaataatagttaattgaaatactagtggaactgttaaaccacaaatttagactaccaggagaaactgaattatttgatatattacatgtaatgatgcacnnnnnnnnnnnnnnnnnnnnnnnnnnnnnnnnnnnnnnggggaaatgggcccacttgactcactgaactttattttttaaacaaaatctcgctctgtcgcccaaattggagtgtggggggtgtgatcatagctcgctataacctcaaactcctgggctcaagcattcctcccaccaaagtcctgggattagaggcatgagccaccacacctggcctacttatattacatctaaactggattttaagtacatgtgtatacactgctgttgccagtttcttaacttataccgtaaagggtagcagactatcatttttt

SEQ ID NO: 445933 - DNA, 974 bp, Homo Sapiens
  misc_feature (638)..(716): n is a, c, g, or t
  misc_feature (927)..(927): n is a, c, g, or t
acatgttgagggtgggagtataggtgttggtttttgaaattatttcataattctcctttattaggcacaggtaaacatacatactcatggtatccaaaacctagagtatggacctgggattgtggaccccaagtgtccccagaagagtcccacctgggactttccaggtggccacaggacagaccctgcctaatcctgtccctcaaccttggtgctcaggtcagaagccccatggttgacaggcctggaccctcattccagaacagtcttgagttagacaagaactagcctcatagtttggattcttatctctggcccaaatcccaggcttaggcctggaaggagaatctcttaatcaagaggacagagatgctgggaacacagttcccagagtgagctgggcttgggtcctgagttgcaggggagaggcctggagcctttggcacagggatacctccctttctctgaaaaggtacaagatacaaaggcagctggtttgtttgtgaaagggattgtccttggacagaggtgcctgagcaccagcatcagtggaggccgacactggtacaaaagtgtacccagtgtagacagtgacctatggtcatggaaaagtgttgtcagctcaaggatgccagttnnnnnnnnnnnnnnnnnnnnnnnnnnnnnnnnnnnnnnnnnnnnnnnnnnnnnnnnnnnnnnnnnnnnnnnnnnnnnnnctgataagcacccaagccaggaactgcatgggtgtgggaacaaagcagatgtggtacaccggcaccctccacacagggtttctgccttttctccctctgggagggaatgaaaggttggctccgtttccaaagcagggagaaggtttgtaacttcctcccaaattcattcccactgttgggaacctgaccgggtaaataggggggtccctanccctaccagacccactttctcgggcttcctccctttttccttgggtt

SEQ ID NO: 445934 - DNA, 884 bp, Homo Sapiens
aaaagtgtaaaacctttgtaacttatttttgtaacaccccaggcagttaacaaagaaatacagcagggcctactcactccctgcagatgacacacggaatccttggccattggagggaatactgcagagcctttgggctatcgctgacctcagaatggtctcacatctcccacaccatttcctgctttacactgtgaatgagggatgtaaactaaaagtgtttgcatgttactgtctttacataaagagacatgattgggagaaacctgcagctgcccagtgtttgtttcatttattgagaacggaaagagggaaaaaattagcagatagctctaaattttaaaaagctgatggagtgttgctggagaagtgtgttttggtctttttccaatcttcttttcctgcaccatacaactgttttaatgtgtttgcaatattttcttatacttaccctttttcgttccaaaaatctatccatgaatgctgaattttaactgactctttctattaaaaggaattacttcgattaaataactgggaaaaacattttgcacaaccaaatagaaaagaaatatcctgaacttatgacttagcatttaaacattacttctacagccttccaactgaaatattttttctaataaattagcttcaagaggtgtttcaaagataattttaataacttttcttatgaatcagttccaaatatattagagaccaaccatcatgttcttaaaactttgtaacttgcagtcaaatatatggattctatatagtacaaacatttccctacatcaatcaccttcagttggaaagtgcctctccttaaaaagagatcaaaactcaccttccaggtagtgattactgcgtaagtttcatggagg

SEQ ID NO: 445935 - DNA, 536 bp, Homo Sapiens
gctcatcaaaacatgatttattaattttaagcaagagtaagcatatgtgatagtggccagcttggggatagaactcttcctggttgatgcacagttcagcacctgttgggtcttggctgttgggatgataattcttttgggtgaggggaacagccgtggtcaaggctgcctgcacccccatccaggcacaggaccctgggcaaagtctcaaaagaggtagtgtttttactttcgcaccaacaatacaacataagtattgggtacaaaagaggagatttccttcccctctacctcaacgggcaaaaggccttccatcttcagaagaggcttgtgaggaccatcggttgatgacctcctagtgaattctggctcccattcagagcacagagaaacccacaaaaggggcctgtggctctggttccaggtctcaagggtacagcttggttacatccccaggccccaggctgattctcctgccatcatactgcaagccttcctgtaccacttttgacccaggttgaaggtctggcggaaaa

SEQ ID NO: 445936 - DNA, 509 bp, Homo Sapiens
cacagaacagggtggtttattttttcaatagcaaagagctgaaaaatgtcgggtcccataaaggagcagaacctgccccagagcctgcagtacttttcccccccacaggggtgcaggctgggccaggcagggccaaaggcagcaaaaatgggattaagagactgtgcccactgagaagctttgttgggtgtgggcaggtgggcatgagatgatgatgattttgtgtaaggcccaggtaggcaaaacctggtcaggtcttgttgagtgtccagagtggatccagaaggctgagggggtcgtcagagggccgggtggcccgcagcccttgcccgttatgggcctgcagaaagttatgcttgctcatccgctgtttgccccgcagggagctgtccagggagaaggcctttggggtcaaggaggccagcaattccagggaggaggaggggggccccgagctgggggcttcaggcactggcggctcctccttaggctggggagcctcaggtagt

SEQ ID NO: 445937 - DNA, 1251 bp, Homo Sapiens
agctattatttattgctttattagagcagagggaagtgacactcattgccttcacagagctctgcagaaatatatgcacagagtggtcaatgaccaacatctgagtaagtcttccaaattatcacattaaaataacctttcaaatttgagtgcctctcctttgcaaacaactgcaacctcataatgaataattttatatattatcaaaaagaaccagaagcccaggtgcttttttccccaaaatccacttactaaggacttgagtgaaaatccactctaagcagatcactgttactatttccctttcaaaacagttggaaatcctaaggtacgggtactaagaagatagcaatatccttcttaagctggtaagaatctagccccacagggacaatttggcaatcctgtttctggaagccaggactccagagatttgtcttagtgatggacagatactcctctaaccttaaggcatgagggctgtcaaaacaaggctctgaatagtgccttcctgctcatcaatgtcatcacaatgaaggagagaacaggttttcgtatttcctgaagagtggtcagtaggagtgcagtggtttggcatagatcggctccagaacataatggattaaaaccaagaagaggcctccaaggaagatggcactaaggaaagccagcaggacatagcggccaatgaaaaagtcatccacaatcttaacttccacttctggggctgggaattcaccagctcgcgggaaaagcaacagaactgatgtgatgatcacagcaccgaagaataaaaaaatgacagagaacctcgccgccccggaggctctggacagcagcacacacagcagcagcactgccacccagagcagggctaagatgaacacgcccgcaccgactccgagcacagtgccagccatcccgcggggaggcagcggcggccccccgccctgcgcgccgcacgatcgagtgtcctctgtgctccagtgcgacacactaggcactggatcagaagacagcaggttcccactgtgttgtcgagttcttattcaagaggttgaaagctctcaggttaaatccatggtgtgagctgtgactcaccaggcaatggatcacaagacagaaagttcccactctgttgtcgagttcttattcaagaggacgaaaactcccagtcctctgcccccttcacctggatccactctcccccaggctctactcacacctcagattccggcgcgttccagccca

SEQ ID NO: 445938 - DNA, 935 bp, Homo Sapiens
tgaggtgtgaagtagagcctgggggagagtggatccaggtgaagggggcagaggactgggagttttcgtcctcttgaataagaactcgacaacagagtgggaactttctgtcttgtgatccattgcctggtgagtcacagctcacaccatggatttaacctgagagcttcaacttctgctttggccctggagttcccatgccctggtgtcttctaccagttcttaggtagggttttgtattcagagagggttcagctttctcccgtgggctgggggaagaggtcaaagtagaactcaggtaccaaatttgaaaggaaacactcagaaaaaacttctgagcgcagagcggaaaacaccctctcagtccccaccaaagagaaaggctttgggttctaaatttccagtttccattaagggactctgggactggacatttctgaaaattaatgacctgtactgagtaatcctcctaacacactgatcatcaaaaaataacctgtaatgagtttaggctttctgtatttgtctgaatgctttcacgggagtgtgttgcactggagcacagaggacactcgatcgtgcggcgcgcagggcggggggccgccgctgcctccccgcgggatggctggcactgtgctcggagtcggtgcgggcgtgttcatcttagccctgctctgggtggcagtgctgctgctgtgtgtgctgctgtccagagcctccggggcggcgaggttctctgtcatttttttattcttcggtgctgtgatcatcacatcagttctggtgcttttccccgcgagctggtggattcccaggccccggaagtgggaaggtaaagattgggggatggactttttcattgggccggctatgggcctggcttgggttttccctaaaggccattcttccccttgggaggcccctcctttcttggg

SEQ ID NO: 445939 - DNA, 450 bp, Homo Sapiens
  misc_feature (192)..(192): n is a, c, g, or t
  misc_feature (218)..(218): n is a, c, g, or t
ttttttttattatttattgctttattagagcagagggaagtgacactcattgccttcacagagctctgcagaaatatatgcacagagtggttcaatgaccaacatctgagtaagtcttccaaattatcacattaaaataacctttcaaatttgagtgcctctcctttgcaaacaactgcaacctcataatgnaataattttatatattatcaaaaagnaaccagaagcccatgtgcttttttccccaatccacttactaagggacttgagtgaaaatccactctaaggcaggatcactgttactatttccctttcaaaacagttggggaatcctaagggtacggggtactaagggaggataggcaattatccttctttaggctgggtagggatctaggccccacagggggccaatttgggggaatcctgttttctggggaggccgggggt

SEQ ID NO: 445940 - DNA, 547 bp, Homo Sapiens
  misc_feature (470)..(470): n is a, c, g, or t
  misc_feature (533)..(533): n is a, c, g, or t
ttttttttggctgtatatagctttatttttagaaattaattcacacaattgttggggttggcaaacttcaaatccatagggcagactagcaggctggaaactcaggcaggagtcgatggctatagtcttgaggcaaagtttcttcttttccaggaaactgcagtgtttgttcttgaggcctttcaactaatcaggtgcagctcacccaaattatttaagtaatctctttcacttaaagtcaactgattgtagatgttaatcacatctacaaaataccttcacagccacacctagattactgtttgattaaataactgtgtgctatagcccaaccaaactgacaaataaaaccaaccatcacatccaccaaatcaaaactccaggaacaaatgtttaaattacaagcattaagattcttcactctggaagaagctttcttgggggcatttagcctggttccctttgcaaantttcatgtgcagttgtcaaacttaggcaaagtctacctaatctagggacttgcattttaaganggggaacccctgga

SEQ ID NO: 445941 - DNA, 450 bp, Homo Sapiens
ctatcagggaaaaaactttattcaagtagtacagaatttattatcctgatatctcagaagaaattgagatcaaaattctttctttttacattccaaattgttgcagtccaatgcagaatgttgaccatactttggttgttgtatccatcagcaattgctacaaataaatgcttcataacaaataactcctgaaactcagtgtctgaaaaatgatactttcttgctgctcctcagtctgtttatgggttggctgagcaggtctgctgatgttggctgggctctctcctgtgattaaagcagcaagttggcatggtggctggctgaggacaacctccaccagtgtaactgcggtgacttacccttcattctgtgtttctcatgtccctccagcaggcgggcttgggcatgttcacatggtgggggtaaggaagcaaggtgagcaaatgtaat

SEQ ID NO: 445942 - DNA, 480 bp, Homo Sapiens
  misc_feature (64)..(76): n is a, c, g, or t
ttttatgattattccagaatattttattttcccaaagaaggttaaggatagaattttgtagagnnnnnnnnnnnnnaatgcatccaacacataggagaattttattttaaagccctttttaaaaatgaaaattctagttggtcatcaattctcttcagagcaaacatcatttattctactctataaaaagaaacctaaacaaattaagatgacaagtaagaaaaacttattctctttatctcctttaaaaccaaaattttagttctgctgggctggttttcttcaaattctcattattttaccaatgaggcactttataatacaaatgcttaaagtgttgagggattctgactcccaaaaacatcatttgatataacaagatttgtactactgatgttgatatacacaattaaatctttcttctagtgaatgatgaaaataaatgttgaagtaaatactgatcaaataaatgcttttttg

SEQ ID NO: 445943 - DNA, 567 bp, Homo Sapiens
  misc_feature (512)..(512): n is a, c, g, or t
  misc_feature (529)..(529): n is a, c, g, or t
  misc_feature (536)..(536): n is a, c, g, or t
  misc_feature (544)..(544): n is a, c, g, or t
tttttatgtttaaaattctgatgtcatttattggcacaaaaattattctgatacaacatggtgtctagacatggctacactttatactttgtgcatttagttgagtatttgttctgctcataatttccaatatgtaccagaccttccctgtgttcagcacctccatgacagtatttctgttttctgagcccttgctctaaacagagtattttgaccactgaaaacatcccagaaccctgctgcagaaggccagtgagggtggtcccactgcacagtgatcccctctgtgcatctgctcagccgaggctgccagcgatctgaataaacctccctactagcggtcaggtcttgaattgaagcgtgtgagtcgcagcatcactggggtctgatggaagacagaccttttgtactcattttgggcctatcttggcaaacatttctggctgctgtccacagaccagtgaaggtcttggggaaaaggtggcaaggggtgaagtcagaatctccggggncttaaagtctaagatcnaatccangttcccangacctgaagcttcttggctgtgc

SEQ ID NO: 445944 - DNA, 1382 bp, Homo Sapiens
ccagtgagggtggtcccccctgcacagggatccccctctgtgcatctgctcaagccgaggctgccagcgatcgaaataaactcccctactagcggtcaggtcttgaattgagccgtgtgagtcgcagcatcactgggtctgatggaagacagacttttgtaactcattttgggcctatcttgcaaacatttctgctgctgtccacagaccagtgaggtcttgggataggtggcaggggtgagttcagcatcttctgtgtctttaacagtctaggaatccctaatccatgttctccacgacctgaggcttcttggctgtgctgagtttgctgtacccatgttgagaggagcaactaggtcattcttccatcagcaagtacttatgatgagttctcttgtgagttaagtcaaaacccgtatttctaaagttatggatcttctgttccccaaaatgaatggcttgatttacgtggtattactatgtttcactgtcctgggaaccaaatcaagccttgtgtttctgacaatatattcttcaacagcagctagaaagttggttcaaaccaacttttaatatacagtagttcttttcatttacatttcaaaatatttaacaaagtcaaactttctcaccatggttttcagtttagtggaagcatttattaaagtacaaaagcttcagaaaaaacgtgatgggcacatctgggcctccagttaccagaaagggcaccagccaatatagcactggcagaggttttcatgggatgtcgcttgtttgatgagcagctcaacttgcgttggaacatccaaagtgtcatcatgagagaagtcccgaccagtgagcttatctcgaaccctgttaataatctggatagctttcttatttagggcctctggtttcaccaaaccgtctccaatgaaagaatgaatagattctggcactgtggtccccgttttcttatgggctggctctccaagttccacaccgtccaaaaatttcgactgactggccaagcagagtaggaatccgtcctcgttcgggatcgcttgttgcctttggtatttgtgtccatcagcctccagttcagcaaggggtcatagacaaaggcttccagcacggccatgacactgtccttgtgctctcgcagcacctccatcactgtgtggcatgtgattctgtagttgccatcccaggcctgtaacctagaaatgggacagagccactcaccacaggagttactaactctccacccaaagcaagccgagggggtctgttaccctcacttaggaagcagacacaggccatgttgacgtatcagggtgagaatgtcttaggagaaggaatcagggcaggactgtgatccacaggaaaccagatccgga

SEQ ID NO: 445945 - DNA, 719 bp, Homo Sapiens
gagccaactatctctctgtttttggaaaatttcgtcccactccccctcggcgtatcttaaagaaaagtgctccataccccgtccaaatggccacgatttccccctcctgacccttttacacataaaataaaacatcggagatttttaatgattattgtttgttggacaacaagagcgagagcctgtctcgtcagttttatttttaaaaagggcagaagcacagctgaaaggtgtggtgctccaggaactacctcgcctcccttcccaaggctgagtgagagaggccaccccatcatcccatcttagagaggctgggaaaggaagtcccaactttgcagccatttgcaaagctcccgggatccttcaggcctggggcgggcgggttgcggggaccttcgggagtcacctgggacatttcctgggaatgggggctctgatctggtccctgtgcccacagccccgatccccatcgagccgcagatctgccaggccacctgtgctgttatgaagctgtcctttgatgaggagtaccgccgtgccatgaacgagctaggtgagtgtcccaggtcctctgggaagccatcctccagcccccgaacaggtggtggctcctcggccgctaaagggacacaggctgggtcatctgagcttgggctggggattggagcccggagaggcctcgtgccgaattcgccacccagcctcgtacctagaccgta

SEQ ID NO: 445946 - DNA, 526 bp, Homo Sapiens
  misc_feature (99)..(108): n is a, c, g, or t
aggtttaaaaatatattcttttcatcaagatagaaaataaaacaaagaaaaatgaacacatttcaaaataaaagtacttcccccctcccctctcctacnnnnnnnnnnggaggctgtgcctcccttttgtggttcaggattataggaagattgtgtagaatctttggtgtcccagagtaaggggaaataaccgtgtcctgatgggcagtgataattcaacacctttgttagtactccaccttcctctcccacctcccacctccctcctagccctctgtatttaagcctgtgataccgggcctttgcaactgaccttgtggtgatgtgctttggggtggtgaacagagctgggacccaggcaggaggggaggagacagagtgctgcccaggtgtgagcagtcagcctctcgagatggcctccctggcaggagggaaggccccatccccagaacccttgagctgagttctgtgctgccaagagaatgtatctctgttgttttctgtccctgctgccaccccagagaga

SEQ ID NO: 445947 - DNA, 511 bp, Homo Sapiens
aaatgataaatggagaccatttatttacttcccattgagaaagctctagccagataaacagattcctgcaaattggtccctaagataaattttgtaggggccagaggcagtagtgtccttagaccccagcaagaaaaaccgtgttctaggccctccattttagaggacaccaacctgactcttcttatggggtgaaaaatctccaggccagcacccaaagcctgggtacccactatgtccccaagacccaggaccctggaattccctgactggtattaccaaagccacttcttggccctgagctagcttcttctgagaactgtcctcccaatgaaggacccaacaactggtataggcacacctcagatccagacgcagacagagggtggctgttagaaagtgtgaacagaacttggttttgtgggctgcggtgttcacacacaggtacaaaaaaatcccctcttgtccttgaagatagctgggcacaggaagcaaagacggtgaaggtgta

SEQ ID NO: 445948 - DNA, 449 bp, Homo Sapiens
aaactttttaattttgaaatcattatacagtcacacgaagttgcaaagataatacagagaaatcctctgtactcttcactcagttatacctcaatgttacctcttacataactatagcataatatcacaatcaggaaattgatattgatacaacatatgtataattccatgccactttaccacacatggagtcatgcaacagtcgcaatcaaggtacagaactattctatcaccacaagaattaccctcattctacccctttattaaaagttctactcatccctctgcctctcccatctatacctagcccttggcaaccactaatctgttcttcatctctaaaatttcctcatattgagaatgtcgtacaaatggaatcacatagtatgtgacttttgagattagttttcttcacttggcataaaaatgcccttgaaatccatccaagt

SEQ ID NO: 445949 - DNA, 721 bp, Homo Sapiens
atggccaaaacattaagttatttattattcgactatctactacatttgctcctaaggctagacctgggatggcggcaagaattctatacagaatgagagataaataaatatgagaatagtaaaggattgccctctcgcatttatcttcctcttgaatattcatttcttctactgccaggtattcttctggactatgctgatagagtggattctagaagtatggacagagataccccatttctagaatccatcccatatttcactttttagttaacaaaaatgtcttggttaatcactgcagtcaatatttgttggtaaactctccagctttgagactcccctttcctcttctaaccatgctctgaattgcccagtattgtgctttgaccctgcttctcagctctagaagtgaacccttagtttacttaagccattccatcctttctggtcatgttgcctatttaacaatgaaaaaataatcaaatttgtttgctccatttgagaagcaaactctctaccagacagaaacaaggatgtatgaattgccaagagttggcagccatcttgccaacacaagaggaaagcctgcatgagagtgaggccaagaccagggaaatggatccaacactctggaaagggattcagaagccagtttatgcccatacttaattctagacacaacatttaagccctggtaaatagcccttgcccaaagcttaat

SEQ ID NO: 445950 - DNA, 890 bp, Homo Sapiens
  misc_feature (153)..(162): n is a, c, g, or t
  misc_feature (827)..(827): n is a, c, g, or t
tatttgcatctcttatggtgaagaatcttggtttctatcaacattagcctaattacttatttgctctatcctattatatatatagtgaatagtatcagaataataataccaatattattaccagcaatctgattactaaaatcatggagtccnnnnnnnnnnccttttgccaaccaaaccagcagcagcagtgaaagggagttatttttgccttaggataatctgtttctaacgcttgttgcagccctggttttacccactactcacacctcctactgggttcccagccacctgccagttctggctcctccaacaagacccacttctctaggatcagggattttccctgctgtctacttttctccaacccttctttgctcagctgaatcctactcatcctgcagtttaatactcaggtatcatttctcgagggaagcctttctgaaggtagcacctcccctgttgtggttctcattaaaccattatacaatcacatatttaattatcaattccctcacaatatataggctcttggagaaaggagggtgtctgtctttgttattgaaagcctcaagctttggtgtggggtcatggtaggagctcaattttctgatactaatctcaggttctgatatcttggccaacatcagaaaaagcagttgaggaggatgggaggaggcaagatgggaggaggagtggtgaaggcaaacagctgagtttcaaacagtcagagtttattgtctaaaactttgagggagaagcgccgatgctgagttttaggcaattcacttttgtataggaagcatggtgaagataggccacctaangattaacaaaatcgttagagtagcaacaacttctaattgaaagatgccattcctgaggtccaa

SEQ ID NO: 445951 - DNA, 329 bp, Homo Sapiens
agctatatcttaaacttctggaagctagcgtgatatgttaatcctgagtatatgcttttggctgtgtattgaccctgtggatttgtctctctaagaaaagaagctgagcgccttacccggtgcagtcctgcacctttctccctctctggagccatctggaagggaattcacactgtttaacatccaccttgacacacacctcctattgccaccaacagctgccaccaccaccgccacaaccgctgacaatgctttaaacgcgagaaacaccactcatcaactgaacagcacccctcgcctgcagttgaacctcaagatccagcttcgac

SEQ ID NO: 445952 - DNA, 879 bp, Homo Sapiens
tggaaaaatctagccacagccaagcatcacccatcacccttactctaagcgtctttgaacggcagagacaggcccattttcctctctgcctggcccagggctggaaccgtcctcaggtcactttttgtgggtcctgtacaaacgtgccgactggcagcgagccgctcttcacctgagccccggatttcagctcggtgcttttaatgtgaagaccagggctctcaccgtccgccggtacggcccattaatgaggcgggagcagagatgaaacgtttcccgttcaatattttcaaccagtaggtgatccatctttaattccaaggcttctgagagtaatttctgagcatttttcctcaacgactcggttttgggatcacttctaacttcaatagaaggtctatttgaatgtttttcagtgaaagttttccactcagtgtaaacttctctggcaagagaagccacttctgaatctgagtgtttacgcatcttgttcacagtgtgacctatccttgttgattttaacacttccctggagggtattttcttctttaattcttgtaaggcttcaacaagattctctttggtttgatcaggaagctccagcatagttttccatctttttatgtcttctacaaccacaactctcttcagagattcaatcgtggcctgcttgtaaacctttcctccagaatctttcttctgagggctattctggattctaggcgttcgaatgacgaatttatccattgttaggggactccgactaccttgacgtgcttgcagcgtgttcaggaaaagcagcctggtagctgctgttggcgccctccagactgcaacctcgtaggctcccaagcccagtcgtctgtgttgaaactaaac

SEQ ID NO: 445953 - DNA, 559 bp, Homo Sapiens
gtgcttgatccatttaattaaaatgtgaagaaggcatgatcctttcattcaccgagttagtctggtgggataacctgaacctatttgctttctacccaccctcaacagaactcacatggtgagtgatgggctcaagttgaaagacaagtgagtgtctaggtccttagtgatgttcaagctctcaggtgatgttcaagatgtgcttggtcaggaggcagacccctgccttttctgctcatggccacagatactcaactgaggtcagaaactgctcctgccatcttcccgcagggcagtctttagtcctgtggcgggggcagaatgcccctgaccttgtaggctctactttgtatgtgtacatgtctgctgagccaaagctgttgaaagtgaaaggtctgtcactttgaacccagtctacttgtccctggtctgtcagccagaaggttctactggtgatggcaggagaacaaggagcctgcaagggagcccatctaccttctggtaccactgacttccctctcccggccctgcctgctcttttggtttgtgctgccaaaat

SEQ ID NO: 445954 - DNA, 605 bp, Homo Sapiens
cagatggaatggtttatttaaatcagatgtaaatagtagaaagagacagattacaagccccacgggtccattagcctcaaagacaggaagtctgcccatcctcccaggttttcctggtcccaatctcctctgagagctgaaggtttttgctggtgtcccctcactgctccagggacaccgtcagctcatggcatcgtgttgtagaccctgtagttgtccttctgcgtgatgtgcagcttccaggggaagaggcgcttctgggaggggaggccacgagcctgccgcaccatgagcgctacgtcctcatccgacagcagccgaaccagatccccctcagcgtcccggtaattcagagctatgtcctctctctggaactcccgccttgtgagctccagcaggtctttcaataggggagtgctgctgagatcttcctccaccgcgatgtccttgatggtgctgatggtgtcttcgtagtagtagcaacgcagccagttggtggggcgtcctcctccaggaatcttttgagatcttcacgaaggagagaaggaagaatcccgtggctcccccgcagtgcccttccaccagtcttttgtgatcgaactgag

SEQ ID NO: 445955 - DNA, 774 bp, Homo Sapiens
cagtgtccataaataaagttttattggaatacagccacgttcgttcatgtatgtgttgtctatggctgcttttgcactacaatggcagaattgggtggttgcaacatattttatggcccccagccctaaaatatttactgtttggccctttacagacaagcttgctgacccttgctctaagtcaattcgtgacgatttttccaactgctgacatttataaaatggcagtcccctgggcttcattcatcagtaaattggttggtggcaactagccctgtgccattttgcttctcctcagcatggatctcacatgtgtgaaggcttcagttcagaaatcatcaatttccagtttaagtctgatgaaaataattatattttttccaccatgttcactctttaacttcttgcttaaagatcttcacctgggttaaacatgctgcccttagtcactgtcggtaatccattgtgtcactggaggacaagccacccacaggtttctcctccttggtttggatactttctgaggtcaagagctgagaaggtgatgtaagtcctcggggctgtttagttgacttggtgagcttcttgagttcacttgcgaaagaaatgcctttctttttatcttctcgagatgcctgcacctgctcctttagcttaaggatgaattttcctgcacctttccacttgctttgggcttgaaacacacactcctgatccagaaggacccgctgagaggactttggtgtggtatcttcttgttggagcttgggatcc

SEQ ID NO: 445956 - DNA, 570 bp, Homo Sapiens
cactcatgcatttttatttccaattaaagcaaagcactgtgctgtgctcagataataatagtttgtaagtaaaagtttttagttttcagtgttcaggttatagaatataactgaccataaaaattacctgcaggtattttctttttatgaacttgtttttaaattaccaagtaattactggtgtcattttgttttatgacagacacacgtatctaacaaacaaacaaacagtgaccttctccatgggtcaaggacttccttacaatttctcctgagttaacttttgtgaaaataatacctaaggttttctggcttattgaggaaatttcctaacaaacaaacaaacaaacaaacagaagagaagatcattaaccactgtatactttgtgtatataataggtcagtgtaaagaaatatgatttgaggtggtgcatgcaagtaactagggtttattctatataatgaatatttatagatctgtaacatttgtttcaaaatgctgtttcatttttataaagtaccagtgtttagctgctttttatacattaaattagcaatttgaaaaactca

SEQ ID NO: 445957 - DNA, 595 bp, Homo Sapiens
gagaaaattgttaaatttataaattatagttagattgatcaggaacaaaagagaaaataaaaatgaccattatcacaaatgaaatggataactttactacacattctacagatatttttaaagtctgaggcacagacctttaatataaaaacgctttatagttctgtctagggacataagatctcaggaaaaagaaaagaaacatcagtaaaagcacttttgctctgttttacaaaattgaaaatcaatcccgtgccttgtccaggttgttttaggtacacgagtgtaaaactgtatggtacccactgtaatagacgaagcccagctttccatttgatcatgtgcttatgttttcatctatggggtccccaggacccctgcacacagtaggtgtgcagtaaacgttgagtaagtcaatagatggtggtggttggcatcgtcttcctaatgtacgctagactctgtagtggcacaaaagtcagcacctggaatccacgtgggtttccgtatcctccaccaaatgttcacccagcactcctctgtgcaaggccactctaccccagtggttcttaaagtggggtcccacggcggccgc

SEQ ID NO: 445958 - DNA, 918 bp, Homo Sapiens
  misc_feature (230)..(345): n is a, c, g, or t
aagcaggttgttcattttaattgtgttagtccacccccacagagaaagggggagcggtcccctccctcccagttgtttagatccctcagagaggcaggtggcctcgtaaaggctccacacagagccagagggcaatgcccaagcccaggagaggagagtgtcggggcagcaccaggcaacgggtcagaatgtgaatggcctgtgctcaaacaccaggtctgtccacttgnnnnnnnnnnnnnnnnnnnnnnnnnnnnnnnnnnnnnnnnnnnnnnnnnnnnnnnnnnnnnnnnnnnnnnnnnnnnnnnnnnnnnnnnnnnnnnnnnnnnnnnnnnnnnnnnnnnncagaaaaatgagaatacagggagttaccgatgttggtggtggttgttctttacttttgtaatctgtgccattggaaagtgagaggcagtgagcaccctattgctggaggtgtgcaaacagcatctgaccttactgatgaattgataacaatgtggtatgtgatattcaaggggaggtggttcatgagaccgctctggtctggaggttgcagaactccaggatctgtggttaggccctgggacaggggagctggtgctctgaggtgcctggcagaagcttctgggagcttggggctagaggaggacaaagggtaatgctgtcttatggaagggccagggttcacacagaagcttggaccacaccagcatggctgacttgggcctctggagtacaggaagataaggtgggcctggtcccacccttggaggtgtagcctgagcaggactgtggcttaagctctgggtgcagtggagcacatgaaggtatgccacaggtgcttgagagagggtcctgggcagagctcatgggattcaagaagactcccggtcctaaacagaaaacagagagatacag

SEQ ID NO: 445959 - DNA, 492 bp, Homo Sapiens
ctgtatccagcaggctttattggctttttaggggagctgtgccgaggctggggggctgggggcaggggattaactctttccctggggcagcgctcctggctctgaacccatcaggggattttcttgggcaggggattaatgatcccactctcgatgtattcgaagactgtgtatgggtcctggtccccattgagggtgatggccgacccatacaactgctccaagtcagctgagttcctgtagaacaggtccattttcagcttgacctgctcttcagcatcctttgggttctgcaggaggcgagcctggatctccatggtgggaggtggcttgtacatgaggtggtacctttccccagtgactggatcaattcttctcagagtcagccgctccatgatggaatcaaatggcacattcaggaaaaacaccctgccatctccttttcaaagaagggctggatgagctcgccaaacgtggtcctatctgccacag

SEQ ID NO: 445960 - DNA, 561 bp, Homo Sapiens
ttttactatatgcattatggacaagtatgccaagttgaaatggcccaccattttaaattccaactttgacaaccattctttatttttcttctggctcagaacttgcagaatcacccaaatgtcagtgataggccaaattgaaacgtattatcaaagctctcaggtccactgaatcatcctaagagactggatagttccctggttctaagagccatcctcagatcaggaagtgccagctgcacccctctctgctcctcaacgtcagccacttgtgattagttgagtgtgaattgggcttcagacctgacctgtgagtgaccagttccatcaacccatccttcatcttagttaaagacccctgttggcctgacctcccaagaagacagtccggtgaagagcctggaacatctaaggcccagcctgtcacaaaaaaatgcagggatcttggggggaaaagtctacagccttttggagaccctagattatacatgatgaggggaaatgttgcaaagtttcttgaataatataaaaagcaaaatatttatgagtttatttgggagt

SEQ ID NO: 445961 - DNA, 586 bp, Homo Sapiens
  misc_feature (47)..(108): n is a, c, g, or t
  misc_feature (172)..(293): n is a, c, g, or t
ggcacacaattattattttatttttagcagggacaaggcctccctcnnnnnnnnnnnnnnnnnnnnnnnnnnnnnnnnnnnnnnnnnnnnnnnnnnnnnnnnnnnnnngcttaagtgatcctcacatctcagccacctgagtagctgggactacaggcatgcaccatcacannnnnnnnnnnnnnnnnnnnnnnnnnnnnnnnnnnnnnnnnnnnnnnnnnnnnnnnnnnnnnnnnnnnnnnnnnnnnnnnnnnnnnnnnnnnnnnnnnnnnnnnnnnnnnnnnnnnnnnnnnacaaccacaattgttttttctacctcaatgtaccgggggatgcaaaccattccagctgacaatagcttcatacaagagcaatagaaaaggagtgtattaatacaatttgcaaagctcctggtattttttgccttcttatgatacacatttccttccaatctataactcaactcctatagcccatcctcagtcccagctgagaatcacaggcttcacaacaactaaggcaaaatactgaatttattcagttgatttgaccaaccacattggacaaaagtattgggttttatttg

SEQ ID NO: 445962 - DNA, 232 bp, Homo Sapiens
ggcacttttttataaaagtttattgtttgatgtttttaaaggtttttgaaatccaggaattaaatcatcccttaataaaatattcaaaattcatattttattacatttttctaactcacattcttgttcatttgtgtaattgatagatgttttttactcggtcatttaaatgtttaatatttcatctacatatgaattaccacattttgtgtatgactttaattcctacttt

SEQ ID NO: 445963 - DNA, 564 bp, Homo Sapiens
gggcctttggactaatgtaacaaggggtcccgcccgatgtcccgcaggcagtaaaagccttgggttttgtaaaagaaaaagttcaaagcattgatctgcggcgacagctttagaaacctctcgaccttttggatatcagggaaggggtccctgatgaggcggtcacggtcaacaatgtgaatgtggcgcagggggaaaaagcgcagccagttctgcatgtgcacgtggtagaggctgcggttgagggccttgtagtccacattgagcctgccgtcgcgcaccagggaactccctcgatggacgggtagggcttgtgcttctgcatgtggttgtagaacacttgggtgtagtcagatagcacgcgctccgacgggtctcgcaggatgagcagcagccggatggacgggttcatgctgtagactcgctcaggcactttgggcgacgtgaaatacgcgggggtcttctccactgtgagctggtgtggccaggagaagggcatctggctgaggtaccagcccaagccgtggctgtaatgctcctcccagtcgaagaagtggacctcgt

SEQ ID NO: 445964 - DNA, 571 bp, Homo Sapiens
aacgcccgcctgcaaggtcctctgcgccctggcagccaggagtcgccgccacgaccgccgggtctcagtgggtgcctgcgccttctccccgcccgcctgccccgggccatccagaaacttgctctacccgccgcgggtgctcggcagtgctgcccatggcccagcccaggagcctatttagggcgccggacgggctggacagaggcgcggctcagtaattgaaggcctgaaacgcccatgtgccactgactaggaggcttccctgctgcggcacttcatgacccagcggcgcgcggcccagtgaagccaccgtggtgtccagcatggccgcgctgctcctgggcgcggtgctgctggtggcccagccccagctagtgccttcccgccccgccgagctaggccagcaggagcttctgcggaaagcggggaccctccaggatgacgtccgcgatggcgtggccccaaacggctctgcccagcagttgccgcagaccatcatcatcggcgtgcgcaagggcggcacgcgcgcactgctggagatgctcagcctgcaccccgacgtggcggccgc

SEQ ID NO: 445965 - DNA, 845 bp, Homo Sapiens
catataactagtatatatggcaattgtgaattctaatactgtacagaagtacctttctggattttacaaatgaagttataccttaaaatgcttttgttaaaattcttttttcccctcagatgtacaccagaacttacagtaggaaagtttctgagcttagcttattgcaaatcagtgccagtcaaatgttctgccaacaagctcgaagaacttcttatttggctcatgaaaatattcgtgcagtttattgagtagtttgggatcgacttgggggtgcgcccggcctttggactcatgtaagcagcggtcccggccgctgtcccgcaggcagtaaaagcccttggttttgttaaagtagaagttcgaagcattgatctgcggcgacagctttaggaacctctcgaccttttggatctcagggaaggggtccctgatgaggcggtcgccgtccacaatgtggatgtggcgcagcgggaaaaagcgcagccagttctgcatgtgcacgtggtagaggctgcggttgagggccttgtagtccacattgagcctgccatcgcgcaccaggaactcctcgatggacgggtagggcttgtgcttctgcatgtggttgtagaacacttgggtgtagtcagatagcacgcgctccgacgggtctcgcaggatgagcagcagccggatggacgggttcatgctgtagactcgctcaggcactttgggcgacgtgaaatacgcgggggtcttctccactgtgagctggtgtggccaggagaagggcatctggctgaggtaccagccggacgcgtgggtcgacgatatcccgggacttccggaccgtaccagcctta

SEQ ID NO: 445966 - DNA, 561 bp, Homo Sapiens
ctcgcgaacgtggttatccttttttcttcttctttatcttctcaccaccttccttcaacttccgcttctttggagattttttcttcttttctttaatgaagtcatcttcagactctgatgcttgtctaaactgcagggttcccgagttaatgtaaaatcctccatacttcgtagtcaaagaagcaggaacaagctcatcatacgcctcagagttatcgatgaaggagtcggattcatcataaccataccccatatcgatcaagtcctgtattcggtcttttctacgtttctttccaccgtatttttcttcaaattttcgggcaagggcctctactttatgcctttccttttcttcgtcattgaaaggatctgacagatctttcttcttatctccaggctgaaggccttttaccttccctcggatattcttcaccagctctgggtagaagaactctgggcagcgtttgtgatctggttcaaagagggtgagtgtaatccgaacagctgctgcagccggctcacagtcctgatgctgttctcctgccccagcctcctccttcc

SEQ ID NO: 445967 - DNA, 827 bp, Homo Sapiens
cgagacatccgtagggttattttctgtatgcaggaggtacaggtagtttgtgagtgtccaaaggacacccaaaggggtgctgccttggttagagacacctgtcaaagtcaagccattgtctccaaaaatcgacagcattccctgtatcgctgcttcacagactgcttctctgtggacttgcagacgtgccccacgtagtacaacgggaagaataaaaagttccagttggtggcaaaccacgtgagggtgaagggcgcgtcgaacttcctgaaggtcagcttggcgagctgcgtggagcccgcccacgaggagcacacgcacagcacgaccgccacgccccagaagatcttcttgagttgcgcccgggagcacgtccagcagcggcgactcgctctcccgccggcctccaccccggccggtgcctgggcctccgccgggcccggggagtcccgggggcgctcctccccttccactttggtaagggtcaggaccggactgttgcaggcgctgagcggggccacccgggccgagtgcttcttcatgatgagccggccgcctgcaggagcgctgccgccgatcgcctacatcctggggccggctggagcgcgtctctcccgggcccgtggccgacgcggccctctgccgccggggagcaccagcggctcgcccctctcagtcccggcctccccggctgcccgccgggctccggttgccgcgttgctcactgcggcggccgccctgcagcgcacatcctccccggccgcgcagccactccacacacacgcgcgcacagcctcctacttggaggttgctgcaaactccccgct

SEQ ID NO: 445968 - DNA, 504 bp, Homo Sapiens
cctttttaaagaaaggctttattgctgcaattagacatcccagtgtatagcacaaacccccctgtacagagaattattcaagtggtaatactgagaaacagtgaacacacacaaaagaatacaaaactagacatttagatcactagaaactttctaaggtaagaaaaatttcaaatgtgaagtgccttttagaaactacaccacacatgccagtgtaaatttggtttaacaatcaatttctataaacattgcatctaactgtgcactgatcaactgcacaacttcaacaattacttccaagacaaagataaatgcttttatttccctatgttttggtctttccttgggctagagacagaagctgcatgtttcaaaccagattcaaaagggaaagcacttcaaaacagaaagtacttcaattgtgtatttgccttcagccacatccagagacttgtggatctcacccggttggtcccagcccttctccaaccctgaagcccacag

SEQ ID NO: 445969 - DNA, 307 bp, Homo Sapiens
tggattaaagtcttcacgtttattaaggagtccatgacaatgctacatcttttacagataatgagtatggttagggttgtcttcacatttgaaaccctttcatttaaccagagacattacaggggagacactctataaaaagtatgtgctttaaatattcctgcttatgttatgttcatctttatgccaatatttttatgctgtccaattcatcagattttctttgttgtttagtgatttccacgccccccacccccaaatactagccttcccaagtttgtggaaacagtgtactattttgttatag

SEQ ID NO: 445970 - DNA, 569 bp, Homo Sapiens
aaagacaaaaccaatttatttttttaatcaaaatggtgaggcggcacagtagtttctaaataaatacacctcacctttgccaaactcacagagtggcaggcactcttgtgagaatttgtatgtactatcttacttagtcatcttaccatgcctgtggggaagtattattgatgttacatatgagaaaaggaaggaaattgagctcaccaccttacccggggttcacacaggtagaaagaggtagaaccaggattcacatggccaccatctgctttcaaacactagactcggcattctttgactgtcaggtctctgcagcagagacctggccttctacccctcgatgttccattccactcagcaatgcttaggtaaacatggactcactaaaaagtccaataaagcatgtactcatttgtaccttgagtgacacaggtattgcatttacaaatatatcatataaagaatttctgatgaagaaggggtgtcacaaagtagaaaacagaactctctgagttggcaataactatcatttggatcaacaaaatcaatattccaattcttacaga

SEQ ID NO: 445971 - DNA, 457 bp, Homo Sapiens
tatgttttagagactgtcactcatgagtgacatgaaaagaagtagtgagtgagggactcttactctgaatccagataaaatgttcgtagcacatccaatcataaacatcaaaatataattttccattttaatacttccttccttctcttttgtgtggtggaggtggcaaagagaaggtgaacacatgtagcatcgactttttcctctttaaaggacttcttttgtggcttgaatagatcgtggatattaagcaaaataaataaatttacggagcttaattttaatcagtttggctggtttcttacatattttcttgggtttgttggagtccctttccgtatgacttactagagaattctaaagagagtttatgatttgaagcaaaacatgttaaaacaacagctaggattcgagacccagtacaatcttgtttttacatacatgtatttaaaagctt

SEQ ID NO: 445972 - DNA, 868 bp, Homo Sapiens
  misc_feature (135)..(168): n is a, c, g, or t
  misc_feature (176)..(431): n is a, c, g, or t
  misc_feature (811)..(811): n is a, c, g, or t
ccccacctaaaatttatttgaaaataaattatggcaggaattcacctgttaagacaatggtataacttgtcacaacttcatcttagaaaatcggatttaattttcatagctattgaagttagaggctttattccnnnnnnnnnnnnnnnnnnnnnnnnnnnnnnnnnnaagacaannnnnnnnnnnnnnnnnnnnnnnnnnnnnnnnnnnnnnnnnnnnnnnnnnnnnnnnnnnnnnnnnnnnnnnnnnnnnnnnnnnnnnnnnnnnnnnnnnnnnnnnnnnnnnnnnnnnnnnnnnnnnnnnnnnnnnnnnnnnnnnnnnnnnnnnnnnnnnnnnnnnnnnnnnnnnnnnnnnnnnnnnnnnnnnnnnnnnnnnnnnnnnnnnnnnnnnnnnnnnnnnnnnnnnnnnnnnnnnnnnnnnnnnnnnnnnnntgtgagccaccgtgcccagcctgaagctagaggctgttttcaatatgtcattattctcatttggttaggataagattgaagggaggggtagaaagtttcaaaggcggagagtttcaaaggcatcatgttaacaggcagcaacacgatcaagccccacacgaaggaaccaccaagactggagtgtgcattctcattgtaggaagtcttctgctaacttgttgaattcatctgcaaaacgcaaatgcaggttgtgtttgccttctggcatcaaatgcagccgtgagcctttcacgtgcttatgaatgaagtcggcatgaaaccgtgggaccagaggatccttctcaccgtgcacaatcaaggcggggcactgggacccgggngcagcaggttgccgggcagatgttaccattcttggggaaatgttttaaaactgttct

SEQ ID NO: 445973 - DNA, 422 bp, Homo Sapiens
  misc_feature (218)..(239): n is a, c, g, or t
  misc_feature (409)..(409): n is a, c, g, or t
ccagtttgtcagaaagaaacatttaatagggacttatgcacagaagccatgtctcaggcagtgatccccacagttaccccccgacccagggcttatatgccatagagaaaagggggtacatgaaggaacatgtgagacactgaagtcacctcctcagggaaaggcaagaatgctgtttacaacttagcctataacttgcttaaggccaggatttacannnnnnnnnnnnnnnnnnnnnntcttttaatagataaaagtagaaatcttagagggcattccaggaactggttatcagaagtcaacatggtagattaggcatccaaggatgggaagttactttagcctcatactgtggcctgtgaatttctttgagggaggggttggggtggccccacacctttttccaggnttgttacataccc

SEQ ID NO: 445974 - DNA, 1043 bp, Homo Sapiens
  misc_feature (111)..(127): n is a, c, g, or t
acagaaattcaggtattccaacaaatttctttacatttcttggaccttaaaaaaattacacacaacttttggacgcaatacaacagaacagaatgagaaagggagtcaccnnnnnnnnnnnnnnnnnaaaaagataaaaacctacttcttatatttaattaacaattagtgatttacatgtgtattacctatatacaaatggtacatcgtcaatgacccatcttcagagcactgtggtatgctaaattacacttaggttttatggcaaaaacttttttaaaacattcacatgtggataggaagtactttcttagttttgttcataccactgttagtgatgtaggactcccgatggaatttgtagtttgcatggattagagaaagccaataccctttgtttttattgtagataaagtagacaggtacctcccttcaaataaaatacgaattcttgaaaagttgtgtgtaattaaatttagtaagtagggtgttatggatgtagtagggagctaatacttaaagcaacaaataatcctcagaatgactaatactttagttgtagatactaagtattcccttaatttggttctttagaaaagccacatctctgtgaattgggttttactcctttgagcatacccataatatgcttttagccatttgaaacataatgccatttatggtgaaaagatggcccgtaccagaaacatttggctaaaataggaatgtggtcctaacagagagagggtaagagaagtgaaccctgatctgtatcacttcttgtgttatcctccatctgatgttctagtgatatacactgatttgttctgattttgaatacatgaataaaagcattctacatgtccatgttttatccttaggtatagaacatggtttggcttccattaagtacccttgcatgtattttagcttgtgttcattctcaggcaatgggctatttcaatattaaatatttgtttgttgttggatattagcaggatatgtggtgagggtgatgatggggaagcctgggagcaaatgat

SEQ ID NO: 445975 - DNA, 596 bp, Homo Sapiens
attctgttactatttcttaaaggaatcaatcatctttccttctctggcttccttagatattttaaaattaaagtatatataacaaattttaagtaaatataaatttcagctacttcacatgtataaagacattgttttacacaaatgaaaaacactttctctttttacaacttttattttattctgttactcagaacaaaaaaatctagtattttgatgggtttaattcatgactatattctcctttaatgtaaataattactactttgggatttgaagaattggtcttcaaaaaggagtctatcgactacaaactaactggctaaatttattgacaaatcttatataataatatgctaagatcaggattgaaaaacacatattaaaaaaattatttttagtattttgtatgataccttgtacataaaatatattcctcaatttaaatagaagccatgcccaagagttagaaacataacctctggttaaaatgctcttattttagagcttcagtcactctatcaaattgttcaatatttttcaaaaaaaagtttgttttcttgtttagtaataaacttctaatcaatatgctttct

SEQ ID NO: 445976 - DNA, 620 bp, Homo Sapiens
gtaactgcaaatattttaatagacgttacagcatgctatggaaatatgccagagggtgactccatgagggtgtgccccaaaaatcagggaaagtctttactaaaaaagtgagatttcaaagatttgggaggactacaaattgcccatacaaagcgggatgggggagtagggtgaactcaatacaaaaatgttagcttctttcggtgaaggtcttccaaacgcaagtatctaacattcaccttatgcctgcagatactctacatttgtgttttggcatttaatttaatttcacagcgatcattcgacgtcagaattttggttcccattctacaagtgagaaaattgaggttcagggaggtcaaaggacccgttgaaggccatgaagtaggatgcgccagaagccaggcttgagagctgcatactcggcgagagtttctccaaggcaaagcctgaaacaggaaccacaggctctccaggtggggaggctggcgctgaggaatgttctcctgaacaaagggctcggctcgcgcgcccgcacacccgcctcccccggcgccggccttggtctccagagacagtggggtggggggtggagacgcccaggtatggctctcctccgt

SEQ ID NO: 445977 - DNA, 744 bp, Homo Sapiens
  misc_feature (496)..(497): n is a, c, g, or t
  misc_feature (584)..(584): n is a, c, g, or t
  misc_feature (712)..(713): n is a, c, g, or t
gcttaaaaatgaagaattttatttttgaccaagatttaagatattatccaaaatatcttaaatacagtaggatgacacatctgaataagctttccgcttccaggaatgaaagaactgaggaatgaggaattggtagcacatgtgggggtttgggaagtagatttcaacagagcagttctagctaatgtacagacctggcccagattcatagtctagggactctgtaacaggaatggaacatgtctcactgtaaaaactaggttttagaaggatatgtgttgacgtaagaaaatgggttcaaactgaaataagcaacagaatttttaaaaaggcattaaaaaaccataaaccaaatgcaatagaacttaagagctacaagaagaacgtggagaaaatacccataaactcacaagaaagtacctggaaactctcagaaatacaacttgtgcctcagatagccaaatattaacatatagattataaataagaagatgcnntggggtttttaatacaagaataaatacaacttcataggaatcaccaaagtttgaacagatagggtttaaacaggagtagagatacgnaatctccacctcaactcttgtattttaagagtcctccttgatggaaacctgaaggtaaatcatggtaaagaactgagagaggttaggggaaaatggacagagaagtgagagaatacccacactgctcnnctatctaagaaagtatgaatgatgtttcctg

SEQ ID NO: 445978 - DNA, 561 bp, Homo Sapiens
  misc_feature (65)..(74): n is a, c, g, or t
ggggggggcattataaatgcccaattattaaactggggaaactgctgataaacgtgggagggatnnnnnnnnnnaacccaggatcccggaatggtcatcaatgcccaagcatcgccagaaaactaaaagcaaatcttttctttattggaactgaaccaaaagggcaaaggcccccacatttgaagggaaagaattttgaaccatgccctttaaaaaacacaggctatgactttctttgcttttggggggggcatttgggttgggttttttctctggtaaatatcacacatcatcagagagatacgccagttccagcagacttcctacagaatagatcatcagccaaaggtaatattatgtggcttgcctctgcctggaatgtccttaactccctcttgccggcaatttcaccagatttttgatttcttatccagtctcacgggaagcctttccggcatctcccaccctaccgatcttcccgtctatctcgcctgctacactgtgagttcagacagcacggattgaactcttcatcttttcgtgtcggcgtcctgcacaggg

SEQ ID NO: 445979 - DNA, 576 bp, Homo Sapiens
gacccaaactccttttattgatgccaaccggatccaggttttccgtgttcttgagatgctttatggagccgaggcggggaggagggtgccccccactttccgtgaaccccctcttgccaggacacaaaagaccaacgcaggtggcttggtcaacaatcagttccacgagcaggaaactcttccctcgcatgaaaacgtgggagaaaatattgtggggaagaaaaaagcccaataaactcccaagagggcaggttctgtactgctgtactttggaaataaaacccaccaggggatagattattaggagggaaccgaagccttctattaggaacccagcccgtaaacaggctcccattcagagtcacccaacaaaacaaggggactaataatacctgcctggagggacaggggactcaggggagctgcacttcagaatgcaaatgggccccgtcagtctgtttgtgagcagagaattgggtgagcggtgagactttagatagcagccgtgcaagggaaaatgagagttttatggctgttgtcacaagcaaaggaagatggaatgcttccagggctgct

SEQ ID NO: 445980 - DNA, 687 bp, Homo Sapiens
ttccgttacacattttaattagacataacttctctttgaaagaacacacagatcatttggtgaagtttttccgttgaaacaccccataattggtgcaaggtttgcagaacaattttgtccttatgaaatcaacacctgccagttcacacatacacacacatatgcacgcatatgaaatatatatgcaaattatatatccttatggatgaataagcgcaaaggaggaaaaagcgcatctaccaaatgagctgactggactacggaagagaaatgctgcctcttcagttttgtttttggaatgtccaggaacattgccccgcctctccccttcattccaaagtcaagtctgaagcaagcgaaattagaaagtacaatctcaacccctccccgcaaaagtccttcctttttaagccactgcaacctcatatacaatgttcactccagacaaggattacagtggctgcccctcctccgccctgcagcgagccctcccctccccaaggaaactggacctgcttccgaaacctaggatctcccagagctccactccttaccccaaagggtcctctctgccttgctggctcacggttttatagttactgtgacctccaagaaagcagcaggacaaataatgcttgactctgatgtcgctacaaattcagcacacacaccaaccagcacaattac

SEQ ID NO: 445981 - DNA, 400 bp, Homo Sapiens
ttttttttgaaaagggctaggagccctgagatcttggttttattatatctcattgcattcagtagtagactgaagtacaggaagggaaggaatggagggcactgaaatttaagctgcttggatgccctatataatatttggtattctgaaaacactttacacttgccagtaagtgaatccagatggtattcaaataagtttagccaacatgattatcttgacttgctgatgtggaaagccaggacctgattgatttgcccaaggcctttcaattcctaaggagacaccatacagcttttaccacttcctgtacatccagtaggccaaagagagtcgagtcctggatggagaatgactttgatgagttgacagaagaaggcctcagacgatcaaacttctc

SEQ ID NO: 445982 - DNA, 694 bp, Homo Sapiens
ccgcatcgatcagatctttattaaagcaccacagccaactgcatcgcccacactttaaagtatactacaagagaagacgaatcaaataactactgccaagactgaatgaatggaacggtcgttctcggaacgagggccgaggcagggggatcagtgggattggaggcgtcgaggcggggctcgttcggtccctgtttcgcatgcgcctgcggcacaggaggggccacagcggccgacagcttcactcctcaagaaaacgggcctaagtgaaggcagggtagtttcactagggcgcaggacactatttcacgaaagtcagtgaagacgctgggagagccacctaaaaggcgcactgtgaccaggaggcccgctcgggtgctaggaacaccccattgtcctaagcctgaggccggaaccaaacgagcgggaggcaggtcctgtccagtcctctggctctatagagccatctcagggcagcgatgtcagaggggcaggcagtgtcaagaatctccaagcaggttacgggtgggaagccatctcagtaggcgaaaccagcatgtgtcctactgtctggtcggcagagcgctagctccaaagccactattccctgcgcccctggccccgggctcgcctcgcgctctcttctgcccactctcccccagaacgatcactcccacgccacgttgctcccgca

SEQ ID NO: 445983 - DNA, 937 bp, Homo Sapiens
cttctcttatcaagctttatttttacaaagtccagggcaaatattgaccatgttttataaatttcaaaggatcttgattagagagagctttcaggtaaacagctttatttatctcccttagtttcattgtaggattctgttcaggggagattctgttcaggggatattcatgttggtcaattaactattttttcattaagttccacttaacatacaattcgcagtgctctaaagataaggtaaccctacccctcagttagcatctggggttagcattttagcactctcaacagtgaacaagtttgggagaggactcacatgcttactctagaatttccatttggtgaaacacaatgaaaacaatggggtgggggaggttgggcagatgcggaagttcgaggaattcacagagcaataatgaaccaaagcccagtctatccacgtaggtggatgttcacatgagcacgaacagggagagggaggccaaggaaaggcctgcctgcgtggcagagcatggctgtgcaagacttaacagactgtgtcccgctccctgtgtcacacagtgggctcatcccatgtcctgtgagcttggttatggttaacaggagagcaccctggcccggctgagtatcagcccctgccaccagggtgccatgctgcttctcaatgggaaggtgcaatgggcagagctggagatcttctcagtccttcatattcttgtgatggaatcacagagtcactgctctccaggatgtttgtgatccactggcttagtcctgaacatgcctggacgtcactctgttcccacctcaccttcctgccggtgacacgctggggggctggtgtccagatccttttcccgcagctgctccgtgtgcccagccccagcctgtgagcccagcctgggaagaatccccagctggcctggtgtcaccat

SEQ ID NO: 445984 - DNA, 798 bp, Homo Sapiens
  misc_feature (587)..(654): n is a, c, g, or t
gtgtgagccactgtgcttggtctatctattacattgctttctgacatacagtagagctttcttatataaagagtatttccgttttacaattcctactttacgtcctaccttttcagtttgttcaggtctttatctatggaaaaggagaaaaacaagagttgagtagctcttaccacgtattttaatctcttacatcttttccaaataatcccatccattttttccatattctctccctaaacatgggcatttaggcctcctgctgttcttactggttagcacatgtccactgatgcacgccccaataagagcattacttctctttgcttctttttatcctcatgaaaattctttttctatgcacatgattctagatttccatacagatttgtttttggtgtggtatgttattcttctgacctattaggtcttttgaatatgtctttgtgttgctggttaacctgtacaacattccttcttacactaagcatcagtctaaatattctcttcctgctaggcccctcagaaaagggaagtcttgactgactgtgaccattagtttcagttgtcacttccttttagcattnnnnnnnnnnnnnnnnnnnnnnnnnnnnnnnnnnnnnnnnnnnnnnnnnnnnnnnnnnnnnnnnnnnntttcaggattttgtgtacattcatgatggttactgaaacatacatttccaggtacaatttcaaagtcaaaaggcaatgcttaaagcttctggtattgattgccagagatggtatgtatttattcatgtcttaccagcagcatta

SEQ ID NO: 445985 - DNA, 622 bp, Homo Sapiens
tattccatgaatatttaatattatcaaccaggagccaagattggagccatgaacaggacagcaaaatttttgccttcatgggggcttcattttagtgaaggagacacagccgaaggagctaagtgaaagaggcagccactctggggaattcactgcatgaaatgactttgttttgaaagtttcagaggcaaaattatccagattgtctgtcagcatctcccaaatgtacctggctgtttgctttgctcacgagttcattcattttagctatgaagcttttacccaagtgcttggaatttcctttcttgaacatccctttagtcagatccattcccctcctcacctccttgatcattcttctccagcatagttgctaatgatgtgtgcatgtgccagacttgcacaaacgttgggctgccaaccactctgtgcctgttaattccatcctcagctcaagccgggatccttgagttacaacagatgcttcttccctggggcttcagcccccatcgatcagctttgttgatgaggaagaaaagtttcctccttgactgccatttgaatataatttattgtgttctactgcgtgttcagctctcttctagacacagagcagggtgag

SEQ ID NO: 445986 - DNA, 702 bp, Homo Sapiens
  misc_feature (375)..(387): n is a, c, g, or t
ttctaaacaaaatgttttaatctaaaatattaatacattcatttcatacagatacaattgtaaaatatcacttttaattttgtatggaagaaggggtctaagatggcaaaactatctagggcccacaagaatcataatgcagctctgaatacagggtcaaacaaactgtaactgaagcaatgtaacttgaactggaaactgaagataatttaaaaggattagagaagaatggtcaaggctaaaataatggagatggagagtctgagcttactgatcctgttccactggtttttcttttcttgaatgttactttggaattagattaagtctaatattggggaagcgctagtgtcgatttccattagccaagccagnnnnnnnnnnnnnttaggtcattattttatagtcattgtgcaataacaaagacagaatcaggatgaagacacctgcatgtctttaagtcctttagtcctttctccacttctgtaaacattattaaaggcaggtgttcctttgagactctgcctcctgaacttcctgtatcataggccccctcagttctagacttcctctgtgcttctacaaggccctggctccattatcctcggtagtagcccaaggctggtagtgccagcaatgtgggtacctgtggttgcaaaattgttttaagaatatgacaaaagaaaaaggaagcagggaaaa

SEQ ID NO: 445987 - DNA, 178 bp, Homo Sapiens
ctggcttggctaatggaaatcgacactagcgcttccccaatattagacttaatctaattccaaagtaacattcaagaaaagaaaaaccagtggaacaggatcagtaagctcagactctccatctccattattttaaccttgtcttctccaaaattactgagtaggagttttattttta

SEQ ID NO: 445988 - DNA, 466 bp, Homo Sapiens
gcatttttagaaaagtttatcacgacatttaagaatgaatcatttctattccactcagaattttgttattcaaacatccaatgataacatgattttaaaatatccataaaaagatcttaccatccttagtactgtcaaaaacaacaactgagacattggtagaagggttttttggttttgcaacattgaaaatgtcactggcagaatgaaaagaaggataaagagatggcaggtccttcagggtgatgttggctggcagggctgggtccaggacaagcattggcaccttaatgcagtgtgttagcaaacactctaactgcttctcactcttcttagtaggttccgttgtgtttttcccaaggatttctctcattgctttctgctcctcctccatctgttctctgacctgctgtagttccttcagtagttcaagatctgtgccattcacccaggtgtaaacaacgtc

SEQ ID NO: 445989 - DNA, 1219 bp, Homo Sapiens
  misc_feature (28)..(28): n is a, c, g, or t
  misc_feature (112)..(112): n is a, c, g, or t
  misc_feature (163)..(163): n is a, c, g, or t
  misc_feature (1060)..(1116): n is a, c, g, or t
tggaatagattcgcaaaggagtaacttncaggttcttcggttattccttcaaaaccgacttggccagagaatgtctttcatccctggcttagactgggctgatgggcgctcnagatccccataataaaatatgcagggacttatgggtcagtcttttcccatncaatggtcatgttcttcttagtttggcttattcaattcttgaaaatccttggggttattcagttttagaagcgctacactggcctctgaatacaactgcaacagtttgactttagaggaaagattttctggcaattttgtttttagttgatttgtttccttgaatgttggtggaaatccactcaggaaagccaaatcttgcattagcactaatccagggacttctttatctgttgtcaagtagcccctccatactgtctgtctgctatttcctgttaaggcagtccagagtgggcatcttcaacatccttagtactgtcaatatcagcgactgagacattggtagaagggttttttggttttgcaacattgataatgtcactggcagaatgtaaagaaggatgaagagatggcaggtccttcagggtgatgttggctggcagggctgggtccaggacaagcattggcaccgttaatgcagtgatgttagcaaacacgtctaactgcttctcactcttcttagtaggttccagttgtagtttgttcccaaggatttctctcattgctttctgctcctcctccatctgttctctgacctgctgtagttccttcagtagttcaagatctgtgccattcacccaggtgtaaacaacgtcaatcggcatgggcagacaaagccgattctgaaaggactttccagcaatattgtctctataggaatcaaacaaaacatggtattgatctcggctccattccagaaccacctctccgaactggaaggcggagacgatggtgacaacgacgcccaagaagcacacgtagagcccatacctgtgggacaggcaggtataggtctgtctctgcaggagcttgaacagcatcaccccttcaccgccannnnnnnnnnnnnnnnnnnnnnnnnnnnnnnnnnnnnnnnnnnnnnnnnnnnnnnnnttcaggggccccggtcgggccgccgcgcgcaggtcacagcctccgggcgccgctcattgcagctccggcgacggacgccctctcggctccgcgccgcggccgc

SEQ ID NO: 445990 - DNA, 729 bp, Homo Sapiens
  misc_feature (132)..(311): n is a, c, g, or t
gggtcactactttctttttattgaaaagtatcaaaaatgtaatagtagtaatgaattatagtagccattttttaatgctgttattcttaaaatgtattttatgtcctacctcagagcaatggggaggcaatnnnnnnnnnnnnnnnnnnnnnnnnnnnnnnnnnnnnnnnnnnnnnnnnnnnnnnnnnnnnnnnnnnnnnnnnnnnnnnnnnnnnnnnnnnnnnnnnnnnnnnnnnnnnnnnnnnnnnnnnnnnnnnnnnnnnnnnnnnnnnnnnnnnnnnnnnnnnnnnnnnnnnnnnnnnnnnnnnnnnaaaaattttaaaaagcaaatgttaaataaagagtggaccaatgtcaagtcgaggcctccataggatgctaaacaaatgtgtaatgtgaggtcaccttggaacataaactcttcaaagacaggagtgggttccttagcacctgaaagtccatcccacactgggtaccacccatcgcctgtgaacgagggcacagcacctcctaacccaccctgctccccatgccatcctaagaccacaggcctcctgacaccctctggctccctctctcgcccctgccggctggctctcagggctgactcccttccagcccccactgactgcttactaagtctcagtgtcaacaacccacagcttcagaaggttgagctatgcctaattccctcaggccagggtcttggaaaaaagtgatgagggttta

SEQ ID NO: 445991 - DNA, 598 bp, Homo Sapiens
tcactaatatcattacactgtcatttatttggtaatcagcagatattatgccagggcagaggaggaccccaaacttgttcagtaacctttgctgggctttgcttaattctgtactcgtgctggggaagtagtggctgttggggctgaaatctatagtgaaatggggaagtattacctccccactgcccatagatgttatagcttcccttattaccactatctttggctacaggaggtgttggaaagggacgtgtaagcacagcccctcatgtttctcaaggatagcagatgaagcattgttctgaatagccagataatagggttcctgggcacacaggagagatgctgactaaatgtgttcagataagaaagctttggggtatttatcccaaagtcttcttgtttcatcattcctttgcatccagagttaataaaataaacagcaaacataaatgcatgtgtgtggggggataatcagcttcttgtcaagttacttcctccagcctttcttcttgatgatgctccccagaatcacttcagcctttccagcagcatagacttcggcagtatcaaagaggttaacacccacttcattagc

SEQ ID NO: 445992 - DNA, 773 bp, Homo Sapiens
aattttatattgttattttaatagaacacaagagctttaaaaagcagttactaacacaggaaggagaatagtggtctattcacttgcaaaaactaaactttagctctgtgataaaaacttaataataatagctctttctattacagaaatcagtgaaattagagagttaagggcttgaaagtaggcagtcaatatgcttccacgttaacatctggacaaagaggcaatgtgggagaggaagggagaaaggaagttcctcctaggaatattacaaagctacttatgggtagaaagctgtgcctaggttttcaactatactgctgtgatagagcaggctggccaacaggatgtgttggtaaggaggcccagagcccaagagaaagggaaggaaaaggctgtaaaatgaaattgggttatcactggaaacatgctgccatattcagatgtccctttaaatgacaagtgtttgccttcgtaggagcttgtgtccacatttgaatgtaacaaatatctcctcctgacaactgcctggcaggaacatatggccagcctggcctcgacagcatacatttattttgattgaatctcctcttcagtgccagagattgggcatgcccaggaacccttgtggttcccaccaacattgtctccaggagctgattggaggctaatttttgttggggggtgtagggggaggtgcaggaccacagagttccaggcttctcgagctatagaaccgtaggataatcaatgtgtgttcgcttaagcgtctg

SEQ ID NO: 445993 - DNA, 920 bp, Homo Sapiens
ctgagggaagccttagcttaatgtatgccggtccttcaaaagacatgatagcaatttgagagtctgaactgtaagtttttgttactttattcgttcaccaaatgtttttatggaagccttgccacgtggaacatgtgtcccgggttttaaaaaatgaatttgactcaccagctaacactgaaaaaataatgtacagcctagaaggaaagatcaaagtgtaaaagtggttagtcctgtcgcctcctgagcatttttgtattatatcacttggtttttcgtctgaagtggctgtaaataatcgtattaaaaatcttctggtccagacgcaggaaaaccttttccggtataaagcccaccttcctctaatgttgcgcatgcccactgtgcccagctgctccgctttcgtgcatcccagacttctgtcaccaggtaagggcatcttggaagctgagctacagttggctggggcacaaaaaaaccagggggtgccaagagttttcaggtacgtaagcgggaaaggggtgccaagtctcagctaaaaaatcccctatggcagagatccgagtacacatgcagcagtttccaccggtggggccccgaggaaggggaggatgatgggagaagacaagcaactacaagcccccgcacgcagtgcgcagctggcttcaggagagaggcccgcggtgctgtgctgccgggcctcggcgcagagccccggcagagcgccagacgctgactgccggcaccagaatgctcgcgatgaggaagacaggcggagcgctgcgagctagcgagccctcagctctcgtatccatgacgcctgctgcttcgggggacccctggcatgctggggagtgggtctctgtggtacatcctgtaccgccctggccggcgccggacccccatggccccagaacctc

SEQ ID NO: 445994 - DNA, 658 bp, Homo Sapiens
attttcaggctcaaaattttactgaagaggaaactggggctgacttaacttggggacagagctaaacagttgttggaagccaagggggcctggtcccaagacacatgggtgccgccctccttgccttccgtgcctatttaggctttgggagcaaccaggcgtgcccatattattcacccaaaggactgggtgaggttgtggtggagggtgctgagcaattctacctggctttgccatgaggtctttgaggtgctcctggacttgagataaaccttggggatctgggttttggaaacgcatcaggtatcaggcagggacccagaaggaagaaagcagttaagagctgtggagggtaaggtgtgctcagaggcaagagaggccagtctgagctggtggagggggcgcagcatgaacctgggcaggaggagtgggaactggcaggctggaataacctggcacccatgttggcacacttgggcacaaagagaacacagtggagggaggagaaggtgaccttcactgccccggggcccctgaggcctttgagttcttccgtcgtgggctcacttgccaagctttgagctcttggtgctgaccaagaaggcacaaattgtttatgggccttggtcaacgccacgtgaagatggtatcagaaatg

SEQ ID NO: 445995 - DNA, 892 bp, Homo Sapiens
ttgtcatttgaatattttatttctagacttccttaagtgttgaaccatcaatattttagtgaaaggagactacatagactagtttgatgatacctttgttctttttctacatgtgtttcaaaaaagtaaacttaatttcacatacactttaaatagaattttttttgcatatacaaggaaatgtgattacaaataccttttgaagaggattagtgataatctgtaccttttgtaagcaaaatgaatgagagtactattagaaacctgtggattgaagctttcattcatcaaagaaaatctgcagctctgtgcgcttccgctcaacccaattccttaggtcctctgaataaagcagtgacctgggagttcttgcacccgctcctcactcctgagaagggtcctgccaactctgtattgtcctgttggatttgcagtcagaagtctgaggctggcaggcactgggcaggcaatgagttctttccctgtaagttgggcacaaaaagatcggcatgggagcagcctcctttgagacagctgctctgagagaatgcaataagcagggagcagccagcaattcctcctagcagagggcgactcgtgggaggagttcagtttgccaagtattgtcatttgttgagagaaggtgtgtgctcaaggaggagttttaacctggaggatcattaactcttttagtcagctgaggagctgcggtggctcggcgagttggagttcatcctggaagcgtctgcacgacaaggtcagggaggaggtgtggaataactttttcatgggacactttgagaagggccagcacgctctcttccctagcatacatattccaccaaagcaatttagttaacagttcatcttcataatggcaccatcagatgca

SEQ ID NO: 445996 - DNA, 508 bp, Homo Sapiens
ttttaccccacactaaagagctgtgttaatattgacggtatttgcagtgtcccttgcccacggccccatccgccacccgtgactggggcacttccctcctgccctctggccgtcagcctcttgcagcaagcatttccatgaacaccaagtcggagattcgtccacgctggtgcctgcaggcctcatgggtttgtttcgggtgctctagaatattccatcgattgtgtaaaacacagtggcaaactctgcgtgagccctggacacctgtgtgggtcgggctgcgcccagcaggaagagccacttgctgtccgggtgttgctgctggcaacacagtcttacttctgttttctgatttttaaaataaggaacgtatttcacgtgtttaaagagaagcagcaggcccatttgcccccaggtccccttggggccggcacacgcggggctgggcctggccagtggctctccattgccgcccgcccactgccccagtacctaggcctgcaggtcc

SEQ ID NO: 445997 - DNA, 544 bp, Homo Sapiens
agtctaatcaaagtttattaatcctattttcttttccgaggcacactggaatacaacacttttcaggatcctttgtagttatgttagggctctgtgacctggatttcagacctaagaatggaagcagaaatgctatgtgccaactccaggcaggcctgaccacataaacccctgtgcatcctgctcatgctctgcacctgtatggtcactgcaaaggaggctgcaagtggaggatgaaggtggcagaccagagaagaatgatggtctgggtcgtcccctggtgagtatgatgaagtgtgcatgactcggccccgtatataagctctagaaagcttctttcccattgataaccacatttgttacaggaaccttttcctcccactggtgtttcacactttcaatttcctccttcacctcctgatgtagtggaagcagggtggagctgggtttccagggcagattgtggctttcaggctttatcaggcattgaaggctcgtgtcccacatggaagcctcgtgccgaattctggcctcgagggccaaa

SEQ ID NO: 445998 - DNA, 985 bp, Homo Sapiens
  misc_feature (577)..(845): n is a, c, g, or t
gttttgtttcattttatatttttatttaccagtttttcttgtagctaaggataactctttaaaggctaggagcatgactggggatgcaaagtcagaatgagagagtaaaaggaaagctggatggagaaaatagaagaaagactctaagcagcactaataacaaacaaaagagggttaatcagtgtgagcaagttaattcagcagataagtaaaaaggaaagagtggatgacagctgaaaggaaaagtgaaagtgaaggaattagtaaggagacatcagagaaaggaaggtcacaggtggggagtgaataaattaaataatgtaataatgtactgtgtacaaagaccctctacaacagaatgaagtattcagtcctacacaggggcagggggcaagagtgagagattaagggaaaggaataagactcttccagtaatgacataatcacatatacaactttaaaaaagcaagagaggatgaaaccaaaaaacaacctgaactttgaatataaaataacatttttaacagatccagagggtaagggacattttcaagagtctactgacattacattcacnnnnnnnnnnnnnnnnnnnnnnnnnnnnnnnnnnnnnnnnnnnnnnnnnnnnnnnnnnnnnnnnnnnnnnnnnnnnnnnnnnnnnnnnnnnnnnnnnnnnnnnnnnnnnnnnnnnnnnnnnnnnnnnnnnnnnnnnnnnnnnnnnnnnnnnnnnnnnnnnnnnnnnnnnnnnnnnnnnnnnnnnnnnnnnnnnnnnnnnnnnnnnnnnnnnnnnnnnnnnnnnnnnnnnnnnnnnnnnnnnnnnnnnnnnnnnnnnnnnnnnnnnnnnncagccacatttactttttgtatttaaactatacacccatcactgattacatggtaatcatttctgcaaggctaattcatttctgcaaggctattgagaaaaggtaggcccctttctttcagctactttattcaggatgct

SEQ ID NO: 445999 - DNA, 518 bp, Homo Sapiens
tttttggcttaaacaagagagtttatttttctcacattcaggtcacagtctggcttaccctatgccatccctgtggggcagtcctcaactttgtggtccaagcttgcattaaagcctaggcatcaaaatgaggagtgggaagtgggcagagaagaatccaagttcacctacatggcacctcaaaaggaagtttccagaagctgccacacagtgcctccatttacatgccacctaaatgcggtcacatgaccacgtccagctgcaaaggaggctggaaaatgtagtctttattctggacagcagatgcccgaccaaaaattttattccatgcttcctcaagcgtctgtacctttgcacgtcactcctgtcatctgaaactttcttctctttcagtcacttgattcgttttcatccctggctgcatagccgtagacaagttctttatctgctgggtctctcggtttcagtgaggataatagtgcctactcatttgtttcccttctctttgggtcacaatc

SEQ ID NO: 446000 - DNA, 1007 bp, Homo Sapiens
  misc_feature (920)..(956): n is a, c, g, or t
tttttgaagatcgcacactttattttgaaaaccaggccagggacagctccagtttggggggaggggaagagattataacttttaaatctactacgaaaatacaaaaagaggaatgtgacagggttccttcctgtgttatgtcaccgtctgtaatcagatcccacagtccagcccagaatcataattcacataacagcgaaactcatttgccaagttccgggtgtgtcttggaacaaacgtgcacatcttcactccaaggagttctgctgcctgttcttccatgatggcacctgtgcacagcagaatcttgccccgcgtcaggtacttgacggtttccgatgtttttctgagacattcctccgaaagatagggaggatctgctattacgatgtcaaaactatgtgcagcaattctttcgggtaagtccaatggattattgtaatcatagaaaataaactcctctccatacatggcaaatcttttgtcatattcaaagatgtatatcgaaaagttttctctgcacagctctctgagtttctggtaaacactaggggcactcacacatgcgattctgccaccttctcctacagctgcaattgcctcctgtgccagctgcagagcagtttcctgactataccaaaactggctcagttgccaattctcttctattattccaatgttatatttatcatcctcgcctggctcaatttgttgcttttgctcagcataaaattcctggagagctgctaaggcatgggcagaaagctggggtgtctcatcatcttccaaatcactcatttcacaagttgtttataacccagtccaaaacgcctcggcggcgcgcagccaaccctacagctgcgcccgaacccgccacccccgctctcgacgaattcgagctcggccgatttggcctgatnnnnnnnnnnnnnnnnnnnnnnnnnnnnnnnnnnnnncgccgccaccgcgtgaactccaggtcgccctatagtgagtcgtatacattt

SEQ ID NO: 446001 - DNA, 936 bp, Homo Sapiens
  misc_feature (759)..(774): n is a, c, g, or t
taccgagaaccccatccccatataacaccaacagtgtacatgtttactgtcacttttgatatggtcttatccagtgtgaacagcaatttattatttttgctcatcaaaaaataaaggattttcttcttcacttgatgaatgagtcttttgttacttctttttgggctctccatttgggaaagaaaatctagaaagtatgctcattgtaattgaaattgtattataattgcaagtcagctatactgtcatcttgtattattctgttaaaagcgattgtgaaaacttgaactccatgttaggatgacttatttagtcaagaggagctctttatcactattaagggagtttattaatgtctagtttaaaaaataacaatttataattttcatagatttttgtggactcctacctatatcgctaaggaatcattcagctaataacataagcaaaatgccttcattctctatcagaatgctttttatttctgccatctacccaacctcggcctacaaggaccacactggctctgggatgttagtcgtcacagtgaatccctagaaggagagaagcccagggctcttaagagagaaacctcacacttcattgtgcccagacaattcaactcattatagattagaagaatggttgtactgaattagcattatattatctattttttctaccattaagtgaccacgaatgaacaaatggttgtttctaatagtttaggaacctctacggcttgagggataaaactgnnnnnnnnnnnnnnnngtcactagtctgagcacaataaaggtaggtcatgaactcatggtggctaatcatgtttcatttattacacagtaaacatactgatggttgtttaatagggagggataccactgctgtgccatttgttcacccggatttcagctattcaggttaataagcttg

SEQ ID NO: 446002 - DNA, 728 bp, Homo Sapiens
agcgggggggtggtattgggcagagttgcattttactaatcctatatactttgagcttagtttttagaattgtgtcaaatacatcaacatatcaggattatagtgccaaaaatagttagagtgccttggtcctccctctgtaggcagcaaattgaaactaacatgggaccatgccatccttctagcataatggagaagtctgaactgaggagtatctttgatgaaagacatttaggaccctagaaactaaatcttgtcaccaagactttatagtaaagtagtagcaaaattatttttaaaagactttcttccttttactacccatttcctctcttgggaaagctgatgagcaaattatccaagactcatttctttattaggcaaagtcagaatatttcccctctgaaaatctgaattatgccctcattctttttcaagaaatatctcaaagagcaaatagaattaaacatgacacttgattgtctgattatttggcatgtataaaattatcatgtggcttaatgtgccttaagtgaaaatttaaacttagacctgaaacctttacagttggatgtagcgttgagcttttgcatgttttctgtataataaaccacttttgttttgtttgttttgtcttttaacctacacctttatcattactctaacagatttagggcttctctttctctacagctaagtaagggaatatgtgcaattatgagacatac

SEQ ID NO: 446003 - DNA, 414 bp, Homo Sapiens
cactttttatggaaaagttttatttgattttgtaaaacgtaatgttttgagtatacttactttactctttcaaagcaatgaaagtacaatgataagcatttgaataaaaagtaccctgttttatgagcttattttttaacatagtgaaggcatactctcactgaaagtagaaatatgtgatccaattacaaaacataacatttacgaataaacacacacaactgaatagtcatgaaaaaatagaggattagtcaaaatattctgtttaaaaatattaaattcaagttacatggaaattttatgcataaaaatcatattgtataatcagaatgaatcttcagtggtcatttctgaaaaacaaatactaactttagttaaaaagttaaacttttacttctctttttcaaagtattt

SEQ ID NO: 446004 - DNA, 517 bp, Homo Sapiens
  misc_feature (405)..(423): n is a, c, g, or t
ggaggtgcgcgggcgcgggcgagcagggtctccgggtgggcggcggcgacgccccgtcgcaggctggaggccgccgaggctcgccatgccgggagaactctaactcccccatggagtcggccgacttctacgaggcggagccgcggcccccgatgagcagccacctgcagagccccccgcacgcgcccagcagcgccgccttcggctttccccggggcgcgggccccgcgcagcctcccgccccacctgccgccccggagccgctgggcggcatctgcgagcacgagacgtccatcgacatcagcgcctacatcgacccggccgccttcaacgacgagttcctggccgacctgttccagcacagccggcagcaggagaaggccaaggcggccgtgggccccacgnnnnnnnnnnnnnnnnnnnactttgactacccgggcgcgcccgcgggccccggcggcgccgtcatgcccgggggagcgcacgggcccccgcccggctacggctgcgcggccgc

SEQ ID NO: 446005 - DNA, 401 bp, Homo Sapiens
  misc_feature (214)..(303): n is a, c, g, or t
gaacagtacgcaaggtttattatgaagagcaaaaggacaaagcttccacagcggcaggcgacctgaacaggttgctgctgctggctggggtggccagattttattcccttatttgtcccctctcatgttccgtttttgccctatcagagtgccctttttttcaatcctccctgtgattgtctacttttagaatcctgctgattggtgcattttnnnnnnnnnnnnnnnnnnnnnnnnnnnnnnnnnnnnnnnnnnnnnnnnnnnnnnnnnnnnnnnnnnnnnnnnnnnnnnnnnnnnnnnnnnacagagcactgatgggtgcattttacaatcctcttgtaagacagaaaagttctccaaggccccactcgacccaggaagtccagctggctagacccagg

SEQ ID NO: 446006 - DNA, 1527 bp, Homo Sapiens
  misc_feature (299)..(299): n is a, c, g, or t
  misc_feature (604)..(615): n is a, c, g, or t
  misc_feature (627)..(818): n is a, c, g, or t
cgagaatagtagagggtgtgtgggtggcggggaagaagacacaaataacgtgcgcctcgattggtcgccccaccacgggggcgtgtttgtatggaggagagagagagagtgttttttatgattaataaacaaacgagtattttgggcgtcgggcgggtttgtttttcaccgcgcggggaagaagtttataaccctccggcgcgcatatgatatagtcgcttgtttttgcggcggcgcccgggcgtttgttcatattttggggaagccactattttgttgcggagggaggggtgctgtangggcggggggaggggacagcttttagataaaattaaaagggccccttctgttgctcgggggtatgtatagagtggtggcgagggaaaattgcaaacaaacgtctattcgggagagggcgcctccccaaattacaggaatcgcgcccggggcggggggtttttattttgtaatgagagaaggttctcccagagattgttgttggtagaatgcgcggttaattctccttatggaaacttctccttattttttttcaggggcgggccgctgttggaaaaaaggttttttaaatgaaggaattccaaannnnnnnnnnnncgccagaatagnnnnnnnnnnnnnnnnnnnnnnnnnnnnnnnnnnnnnnnnnnnnnnnnnnnnnnnnnnnnnnnnnnnnnnnnnnnnnnnnnnnnnnnnnnnnnnnnnnnnnnnnnnnnnnnnnnnnnnnnnnnnnnnnnnnnnnnnnnnnnnnnnnnnnnnnnnnnnnnnnnnnnnnnnnnnnnnnnnnnnnnnnnnnnnnnaatagtaataacctttatttaaaatagatttaatttaggaaagctcattttatatgagtttccaactaattattagagtcagaaacaaagaaaataaaatcagagaaaatcctctgtagaaaaaatacacaaagaacatttctacatgtgaaaaaacagtaaacagtgttaacatccaagttattagtctcaattccacgtctcctagtgaacaccactatcaaccttgagatctgatttgttcttgtcattcttcactgagtagatgaaatatgttaaggtgtctttttcattcactggaatagacctaaagtggcaaccaactatctcaacaagttgtgctttattaagtcctggtctggttggtagcttgaagtgtcttttgtatctcctaagtgtatttacttgtaattggtataaatcaacctctggggtatcaatatcttgaacaggtgaatcacctccatcatcatcactcccttttctctttcttctgtttcgaacactctgaattaagtttttatgataatcacatatgtaaagatgccttgcgctcttatccagctcgatcttcaccttcttctgggagatgctcttctggatcctcttgctgaagctggcgttgcctgccgcccggccgcaccgctcaccatcctcccgcaggcagcacagttgcccggggcccggcccggccgcccccgggggccca

SEQ ID NO: 446007 - DNA, 401 bp, Homo Sapiens
  misc_feature (270)..(270): n is a, c, g, or t
  misc_feature (330)..(330): n is a, c, g, or t
  misc_feature (335)..(335): n is a, c, g, or t
  misc_feature (366)..(366): n is a, c, g, or t
ttttttttgattttggaagtaaatttttattgtgctgaagttaaaatgtttgttattatacatatcaatgataaattttcaacaaattgtatgaactcatttatacatgttaattttttctaggttgatttataccaattacaagtaaatacacttaggagatacaaaagacacttcaagctaccaaccagaccagggcttaataaagcacaacttgttgaggtatatatgagttttaaactatttgaactatctgcacaaccgagaggntattaagtgctaatgggagttttaatgtaggtgtatgtaacagtaccattttaattaggnaaggnccaaaggttaaaaaatctgttgtggggaggnatcctaggttgtgtagggaatgtttgtcctgcccc

SEQ ID NO: 446008 - DNA, 624 bp, Homo Sapiens
  misc_feature (49)..(57): n is a, c, g, or t
  misc_feature (331)..(346): n is a, c, g, or t
ccagcaaaattttgggctttttggggaaaaaagagaggagtccttgaannnnnnnnnaaacacaaaagggcccccccaaaatccacatggggggctgggaaccccaaaatccaggggagggcccatcaggcccaaattccaaagaggttttgaggggaatccctgccacaaatcccaccctttggagatggaggagctcccaaattttaaaattttccccaaagccaagaggaacccaattgatggaggaaacagggggctcattttttggggggggccccccaattccaaaaaaactggaaaagcacatggggcccccctcttttcccannnnnnnnnnnnnnnnatcctgaggcaccatcagggcaaaaacaaacattgattggttggtgggcaaggctccttggcgtggagggctgaaattggctccctggtggtttggccgggccctaaggcacaaggcggcctgccctgattaggcaggcaggcaactaatcgccctgggtgcggtgcagaggaggttccaaggcactcctttcaattttggggagtaccgttgcaacaacctaattgtggccaggatcgtggggaagagggccgttcctcccgctggaactggaggca

SEQ ID NO: 446009 - DNA, 719 bp, Homo Sapiens
  misc_feature (166)..(223): n is a, c, g, or t
atttggggggaggaaattccaaaacccccttagttccatgacccaggggttctccttagggaaaacaagctattggcccatggtccactttaccttcctgggccccgggcgcccaaacggaaaggtctagaaaactttttgaagggccgaggcggcccgacaaggnnnnnnnnnnnnnnnnnnnnnnnnnnnnnnnnnnnnnnnnnnnnnnnnnnnnnnnnnngcccagcagaattctgtgcttcttggtgaagaaagagaggagtccttgaatggcgggggagacacaaaagggaccccccaaaatccacatggggtgctgggaaccccaaaatccagtggaaggcacatcaggcacaaattccagagaggttctgagtggaatccctgccacaaatcccagccattggagatggaggagctcccaaaatttagaagtatccccaaagccaagaggaaaccaaatgatggaggagacagggggctcagtctttggcgggggtcccccaattccagaagaactggaaaagcacatggggaccccctcatctcccagggtggggaatgggggatcctgaggcagcatcagggcagagacgaacattgattggctggtgggcaaggctccttggcgtggatggctgatattggctccctggcggctcgggtatgggcctaacgcacatagctgtctgtcctaacttggatgcaggcaactc

SEQ ID NO: 446010 - DNA, 836 bp, Homo Sapiens
ggtcagggcatagtcaaaggcatcatcctcccaactacccacttgattatgtatttcagatccctccgtgggggccttcttctgacagagaattctttgaggtacgcagtagtgcttttgtcagcacagactgctaatctacatcttgctgcgttctgtttgctgaggttgggcttattcatttaacacgtaccaaccattatccagaggcaccatggagagttagtcatggaataaagcactgtccttgcagatgaaaaaagtctccagagcagacttctgacaggaaaggtttagatgctggagagttgaagaggtgtaagaagagatcgtgccctcatttttcacttatttttttggttattcatttataataaaaggttggcattgatatggtacaacctgcaaattacttgcagttctgagtttcagataaaacattataaaacattaaattcaatacatactgctcctttgaaatttgggtaaaaaattgtacaaccgtatatatagtcatttttgtattttttctatgttgtgaaaaccaaaattgtaattttataagtctttgattcactaaaattatataatttaaatgtattttttgtatatttagaaataaggagtccagagactacgcttaactttctatgcatgcatttgaaagctgtttttacctgataatgtagtaataagttgtattcataaaatactgatctgtgttgcatttcaaaataaactggtgtgtgctctgcctggatttgaaatacctaaagacaccaaaaaagacaaatacactaaaaacgggggggccccctccacaagtttcccccagg

SEQ ID NO: 446011 - DNA, 722 bp, Homo Sapiens
  misc_feature (58)..(58): n is a, c, g, or t
atccctgtcctttcatatacttaagaaagaggattggctactgaacagttcattgcangacacatgaagacgacatactgtggcatgagttgtttttgtttttaatttgttgtgctgttactaaagttctgagggctgcagttaaaacattccaatttctcccttccttccatctttctttattgattgattctcaagattttgcacagaaaactctttgggggctagaacagcagtaattgcatcacactgttttcaagacttcaagtttcaaaagcaaatcattaaaaaaaatacagttcctgatttgagttagatacagggacaaaaaagtagcacatacttgaaggttacgtggtctacaaatggtggcaatattttccttgggagagtagttctgttggtatatattttttaaatactcaaaaggctcaacctcaagcagtaataaacacaagcaaaagtgatttaacccttaaaataaatattcagaaaaacctctctgtacatacaagtgaaagaatatgtaacacttcacgcaaaaaaataattataataataataaaggatttgttcatatatgtagctgaaatctgctgttccagcccacatgtccccaataaagaagggaggcacagacataggtgactactgtggttgactatcttacagcctttttgtactgggacactatcaccaccaaaaatttatccctcgttata

SEQ ID NO: 446012 - DNA, 515 bp, Homo Sapiens
  misc_feature (249)..(267): n is a, c, g, or t
  misc_feature (272)..(375): n is a, c, g, or t
ttttttcattttggaagtgtaagtttatttttaagtgacaaatattttaataaggtggcatgattttgaagcacaattaatacctttaaaacaggttcctatcttttgaaagaaatattttgttcccttgaaactttcagctgactggaaagtgaggacagggaaggctgacggtaaagtccctaaacttgggaataggaagggaaaatgctggggttagagaggaagttccagaggcagctccattcnnnnnnnnnnnnnnnnnnngggannnnnnnnnnnnnnnnnnnnnnnnnnnnnnnnnnnnnnnnnnnnnnnnnnnnnnnnnnnnnnnnnnnnnnnnnnnnnnnnnnnnnnnnnnnnnnnnnnnnnnnnatgtaatgggctgtgcccagccagctccattctaaataggaagccccagcaattctcaaaggatgaggtgaagaagcaccaatatgctaggacaactaacaaacagaaacattttgagctcaacacactagctggaaact

SEQ ID NO: 446013 - DNA, 473 bp, Homo Sapiens
tttagttttttaaaaaatttaattttcttgtggcacataacaatgaactctggtgtcaccagcctattgtataattaacttctcgtcttttgttccttatgaatttacatatttaattatctttccatttaatttcccatggttttgctacgttgactaaactctgtaatgagaaagtcttttaatttaatagactttgcaggtcatgtgtaaccagctttggaaatcattttaggattactgagtgctgtttcataatgctgtatatttttcctgccaggatttggagtacctaggttatttgtccaccagaacaatggctgtaaaggagaaaattgagcagtggtcagaagctgctgagaagatgcggtaaaacaggttacataaaaaacaatgctggtttgaaataacctatgcgcttttgtcaagggattttgcattagtgcatttagtccaagtcagggccaattcaa

SEQ ID NO: 446014 - DNA, 855 bp, Homo Sapiens
  misc_feature (768)..(814): n is a, c, g, or t
catttttcttctgaaactgctttacttcacatttaaaattttgcatataaattggaaatcccaactaaagaataattaaaagttatccaatataaaattctaaaatatatttaaatgagaaaaatagcttttgtatcacaatttattcaaagtttatcagcataatttaatgacatttcaggttaaaattaaaatgagtataagaagttatagtcaaatatttatttgtattagcaattcaataaacaaacagaagctccatcacttttaagtagtattcatttagaggagtaataattggatgggaaggtggtgagcttagtagctcttacatggtgttctccaatctacaaaaacttttttccccttcaaacaacacataataataaagctaacaattatatagtgtttgccaagtaccagatactcatcaacatactttacagatttgaactaatttcaaccacacaataaccatgtgaggtagatgccatcataaactccattttgttaatgaggggcctgacacagagggcttaggaacttgtccaaagccacacaaataaaatgaagcagaggtgggatttaacccatgcacattgacttcagagtatacacacaaataaaaagctgttttgtttctcctgcatagcaaagtaataaacagtactatcaggtgggaatgggtaaaatttacatttgaataggggtttcgttatttcaaagttttggaaacaattgcaacaaacattgtactggcagttctgnnnnnnnnnnnnnnnnnnnnnnnnnnnnnnnnnnnnnnnnnnnnnnngagatgggaccttgctatgttgcctaggctggcagatttgc

SEQ ID NO: 446015 - DNA, 692 bp, Homo Sapiens
ttttttgtattttctctatttttggtatgtttgaacatttccatgagaaaaagttaaacaaaaaggaggaaagggttaataacagactcctaggctttaaagcagcctccaggctttatttacttagcccgtaatccttccttggaattctgttgtgccggcagtgccacccatgagatacaattttatgagcactttgaaatgagaaatgtgatgggcaaatatcaagtattgttaatgatttatgtaattatcattggattcatcgcagctgacaagtggctgcttctgtacactctctcagcaggcagggaggagattagaagaaggtcccccttcaaggttgctggctttgctgaccatccttgtcataggaacagagctgtgaggagtcaggagcactggagacccctagtttcaatggattcacatccaccgcagcggccccaatctggacctggtcagtgttgccgctgctgatggatttgtccagggagcaggagaacatacactggtgattaaaataatgttttctctaagttactgcaaactttctcctgtgtagttgaggcaacacttccagttgtggtgagagattgaacaaaagaaaaagcatacaatgttaaagctggcaggaccttaaagacactgcctagccctctcactcagcagtgagtcgtagatgattcctc

SEQ ID NO: 446016 - DNA, 526 bp, Homo Sapiens
ttttatatttcccaccttttatttccatcggtatcatccgtttaaaaagaatgacaagaagattcccatcagtccaaactggaccacccacactttgaaaaagttggagcatttcagccggctccgcatgatccatcctgtcttcagtcagtgccttctggaagggagggaaagtcttggatgcacctggcactcaatccactcggcacctggctgctgctgcggtcctggggctggaaggaactcccactgggcacacatctacagaggagtgcgtggcgcagtgaggacggttactgctggagccgacacacagcgaactacatacttttagaaagagcctctgtcacatggctagaacaacaacaacaacaaagaaaacccacaaaaaacctggagaaaatatatctaaatctctgataggtctcttagctagcagtgagttcagtatgacagcacagagtctaaaaatattaattaaaaataaattgctttggttagcatttaaacctttcccattcaatag

SEQ ID NO: 446017 - DNA, 355 bp, Homo Sapiens
agcattcactttctaggtttattccatcccgtacatttttgtattctgtaaatccaatgatcttaccaggaaatcttttcattcacttgaaaccaaacagataatcgaggggctggatctagtgttgtatgtacaatgcttctttagagcacaaaaggcaaattaaaactagactgagttttctgttcggtactatatgagaataattaaaattttaaaagacgacacaacagaattcagagccatcctgcaacagcggtctttaaatttatacccaattgctgataaaactcagccctggagttgtcttcctgttattctaacatctttttcacattcatcctaaaatcttagg

SEQ ID NO: 446018 - DNA, 409 bp, Homo Sapiens
gttgttggaaaaacatttattgcaattcagtgtcaaaagttttttacaaaaatatgccaccgtctggtacaaacaactataaaaaatcagttcatcatgcaagaaaagtgtgcaaataatttatacagaaggactcagctcacacaatattaaataaacatctctgcatgtaattggtctaactttatgctttagttacaatgttcaaccccctctaatacttttcatttaaaaaagtacattaaagcttctaagcttaggacacaggctgtaatatacgcccactttagccatggtgattggcacttggtagaataaagatggcaccaaggattcccaagtatagaatacagcttggagccttctgcttaacagacttgtgcttcgttaattaaacaaacacatctat

SEQ ID NO: 446019 - DNA, 341 bp, Homo Sapiens
  misc_feature (199)..(207): n is a, c, g, or t
tatttagaaaatttattttatttaaaaggtatatatatacataagtcccaagatataaagttctaaacatagatttaaaaagagcaaaatggaaaaaatataaatatttgctgttcctgtttatatcttttgtgcatttattgtcttttctaaggttggcatttttctttattttgcaatttgatccatacttacagtnnnnnnnnntctaaatattatagaaaggtataaagcaaaaagtaagaattcccttcactccatcttctcctcagatattggtgaatctcctcccaaactttcaaccacatagatgcatttttgttttcaaaccagaaagcccc

SEQ ID NO: 446020 - DNA, 564 bp, Homo Sapiens
  misc_feature (92)..(112): n is a, c, g, or t
tgaactgtcacagctttattttgtgactcattatattacaacatagaaatatgcattttaatacttcatataaagttattgacatacaaaannnnnnnnnnnnnnnnnnnnnaatgaaaatgatttaacttagaaatctgttgtgaaacttttgtctagttttgcaattctcagatattccagtgcaaaaatagatcccattacagacagcgtaaagtgcttggaatgagggccaatgatgaacaaagagcacaaaaacagcttcatcttagggtataagaagggataatagcatacctaaatccttatggaaatagaaacattctaagggggatgcaacaattttgaaaagaattagagcaatatttctacagtattacattattactagtagataataacaagggtacaaattaatgtctcaatatcaaagtggttcagtattacatgacacatggctctttggaaaatattttacctgatatatacaaccacaagaagaaaacacagaccaatggctttagtccatgattactatacagtgaatgaatgatgtgcaacatt

SEQ ID NO: 446021 - DNA, 2453 bp, Homo Sapiens
ataaaccaaccagagaggagggcaggaaaggtcctaggttgggagctgggagcctggagcacgtgccaggtgctctgcagcccggcttcattatggaggctcaagcgctgtgaatttccaaaaaacagtgaaccccacccttagctgtttgaattccaaaaaacatattccacagcccaaatgaaaatgacttttggatcctccacctaatttgggtgtttatgccgcttcgtccttcttttggcctggacaattgaaatatatctgctctcaggggagacgcccacggtgtcagggctggagttggcaggagacagggggaagaggactagacctggagtcagagatgaagttcttgtctgggatctgtcactaagtctcagcggggacccaggaagtcactccacctctcatagttcctcatccacaaagtggaaatacaagcaagtttaattctccatcgtaaggttggagctcctgtctgtgaaaggactggaaatgtaaaatgcgctcttcaagtacaaaggcagagaggatccataaacaggcacaggctgccctttggtataaactgttcacattaaatctatgttatgttgctcaagagttaaaataagctcaaaggagaggctgattccaatgtcaacccagggaagacagacactgaaattccaaactgagttaccaaaaacaatagatggatgagacatgcagacatgccacaatccggcacatcagagttcgatgtagtcctgctgcaaacacatggaatccgagaagtccaatgcaaacggaatagatttcttgggatctaatatttttcaaattgcctgaccagcttaccttctaggaaaacttatttaggggaggcaaataatttggggagatgagtataagaggtagtaggaggaagctaagggaaatcaccactacatattgcaggaatgtattagaaggcaaatatggcccaaagaaaaagctccactgaaaaaaacattgaatactgaccacagaattagcaccttgctcccaggtcaataaagtgaaccaaaaaaattacaaagaccttgctcaatcctgaggttcgtgaggaatataggagagttgtgtgttcacgtgactcctgaaaacaaagagcagtactattcgaagggcatgatgtcttgatcttaggatcaaatattctagaccttgagccggagaatctgcattacagtaggaaaaatggggagtgctttatgcctgtggattcaggacacaccagcaacatacacgtgtagcattctctaagtccataatgaccattctcatctccccactgagggcaggtgtaagactcttctcttgcagtgttctgatagaaagctgggtttcttcttcttctctataaatcatagggaaaccaaatatttgtacctgttacagccccaaagctgaaagcaataaagaataaacacatacagcaagctacgaggtgcgtctgtttaggaattgcctcaacgttgggtttctattgatagaacaggggaggaggttgcctctgaccttcctgaggctcccactgtaccctggctgagtagcccacagttaattttaagtggcaaaagaaatgagaacaaattcctccaggaagagaaattagatttctgctaaaacagtgctctccatagggtatatgagcacattcgactaccactggaaaataacctgagggcaggcacatggtgcccactgttagaaatcgtgcagttagattagaatggaagagtgtctgagtttttagataattttacacgtcaggatatggctaacaggtcacgttcagggcctatgcttgatactgtcgaaatacaaacaaaaataactgcctagagagaatattcacgtcctaaaagagaaaatgttgtatctgggtggaagaatgatttaactcctgaaactcgagaacacagaacaacaacaaaaataatttccttgaacatattcaactagaatggcaaggcattttcctacataaaacattagaatgttcccattactccaaaggaatccaataaataattttacagtgaaagagcctggatcaaaactggaagtgacaccggcccccgatgaacacaagtcacaggtccctgtgcaggtcccagggctgagtcatccaagaactccaccaccaccgtgagcccggcctccggtttcatctttcccgaatgggactggctggaggggccaagctgctttacagaagagttccatctggtaagcccgggtggtgagcgaagccaaagatgacaacacgagaaggggtcaaagccaaggtttcctcacgctgcctttgtcttcttcctgcagcctggcccgatggctgaagctgggtcccaggaggcgagttcttcagcggggcctcctcacccaggctggagcaagtccgctgcacccgtcaagcggggaag

SEQ ID NO: 446022 - DNA, 484 bp, Homo Sapiens
  misc_feature (50)..(90): n is a, c, g, or t
atggctcctttttatttcatttagcgttactttatcctttttgttggaannnnnnnnnnnnnnnnnnnnnnnnnnnnnnnnnnnnnnnnnatctgtttccgatggattctcttttcactttctgctcacttctcacctcagctccggagcccgcgctttcgtttcctcttccccgcgcacccgcggttctgcggctggcgtcggcggtgctcgcggtggtccagctcgggcgagggcgagggcgagggcgagggcgcgagggtcctggttccacccggagctcagtccgcgcgcccagcgagtccgcgccgggtgctgctgcggagctgagactttgtcgaaagcgggagtccgaatcgctgccgccggcaagaacggagagagcaggcagaggcgcctcgggggccctgccggcgggttccagcctggttttggcctggccccggggcacacagaggacccagacctgcagttcccacggagg

SEQ ID NO: 446023 - DNA, 893 bp, Homo Sapiens
  misc_feature (17)..(17): n is a, c, g, or t
  misc_feature (41)..(41): n is a, c, g, or t
  misc_feature (85)..(245): n is a, c, g, or t
  misc_feature (785)..(796): n is a, c, g, or t
ccttcccccctttcccnaggatttcaaagttgatttttttntgctttcagccttccccaaagtaggctggaacttaccaggtgcnnnnnnnnnnnnnnnnnnnnnnnnnnnnnnnnnnnnnnnnnnnnnnnnnnnnnnnnnnnnnnnnnnnnnnnnnnnnnnnnnnnnnnnnnnnnnnnnnnnnnnnnnnnnnnnnnnnnnnnnnnnnnnnnnnnnnnnnnnnnnnnnnnnnnnnnnnnnnnnnngaaggccatttttaaacaatagaatgagcaccactggttggtgccacaggattgctgagatttggatttacatggtaagattcatgggaggcagggacatgcttgctgtgtgttgagaggtaatcctaagcacttgagaagatctctttgctgtcttccacctaatggctcatgaaaaagggcccagtagatctgtttctcagagagtgtccagggcagagtagtttaattatatatagtctttaatttttaattaaagttttcttacaatccctaatatgtaatatttaagcaatatgagtgtgaaaataatacagaaacagcctgcagagtcacgcaacttaccaaattcacactagcatgagtgcacattttcccttctgtgtatcaccttctgctcagtttacccaaagcagtttataaagtttatgaccattttggaagactggctgataacatttattgacttgggctttgaggaaattattttcaagagaaattaaataacgactcatagtaaacaaatacaaaacaaaagcnnnnnnnnnnnnagtttgtttcacagtatctaaaatggcagagatttcaggaaagtctaatcacacttgaccatgagtgttgagttgcttttatgccgagaattccgga

SEQ ID NO: 446024 - DNA, 799 bp, Homo Sapiens
ggagcgaggcctgggtggcgaattcggcacgaggggcggccccacgcctcaggcgactggttgttaccgaggaagatggcggcgccagacccgaggcgctagggaagatcgcaccgcggacgcccgctgagcttggcgcacgggccgaccaggagctggtgactgccctcatgtgtgatttgcggcggccagcggcaggtgggatgatggacttggcctacgtctgtgagtgggagaaatggtccaagagcacccactgcccatcggtgcccctggcctgcgcctggtcctgccgaaatctcatcgccttcaccatggacctgcgcagcgatgaccaggacctgacccgcatgatccacatcctggacacggagcacccctgggacctgcactcgatcccctcagagcaccacgaggccatcacctgcctggagtgggaccagtcaggctcccggctcctgtcagcagatgccgacgggcagatcaagtgctggagcatggcggaccacctggctaatagctgggagagctcagtgggcagcctagtggagggggaccccattgtggccctgtcctggctgcacaatggtgtgaaactggccctgcacgtggagaagtcgggcgcctccagcttcggggagaagttctcccgagtcaagttctcaccgtcgctcacgctgttcggcggcaagcccatggagggctggatcgcggtgacggtcagcggcctggtcaccgtgtccctgctgaagcccagcgggcaggtgctgacgtccaccgagagcctgtgcccggctgc

SEQ ID NO: 446025 - DNA, 540 bp, Homo Sapiens
  misc_feature (203)..(248): n is a, c, g, or t
taataggtaatgttcttcttttgtcttattgaaacaatgagaatactctgtgcatttcaaatgcactccgattatgctgtggttttattcacataagcacaatatgtgttttatttataacttcataacaaacttataatataataatttaccttagcagacatgcaaaagcttattcttgtgtgacttactttctttaagcnnnnnnnnnnnnnnnnnnnnnnnnnnnnnnnnnnnnnnnnnnnnnnattagaaattaaagatatgtgctttttattttgcagatgagttcatttgcttctgtagatgtgttttcagagctaggtacagaggaatgtttgctacctttagcggtgaaaaaagaaagagagtcaagaattttgttggattgtgtttgtgtgtgcatatatttgatatcatcattatatttgtagatctttggacttgtaatcatagcctgtttattctactgtgccattaaatatactttaccttatacataacgaataaaatacctagatgtagatttattaacaaaaa

SEQ ID NO: 446026 - DNA, 836 bp, Homo Sapiens
ttttttttgtaaataaatctacatctaggtattttattcgttatgtataaggtaaagtatatttaatggcacagtagaataaacaggctatgattacaagtccaaagattacaaatataatgatgatatcaaatatatgcacacacaaacacaatccaacaaaattcttgactctctttcttttttcaccgctaaaggtagcaaacattcctctgtacctagctctgaaaacacatctacagaagcaaatgaactcatctgcaaaataaaaagcacatatctttaatttctaatgttttattatagatttttaagatacatatttatttttatattattagcttaaagaaagtaagtcacacaagaataagcttttgcatgtctgctaaggtaaattattatattataagtttgttatgaagttataaataaaacacatattgtgcttatgtgaataaaaccacagcataatcggagtgcatttgaaatgcacagagtattctcattgtttcaataagacaaaagaagaacattacctattagaattaaaagcttggccttcggctatccattagtcaaaaataattcatcatgaattactcattgattacaaaacaaaattgttaaaaagcaaaggtgactaaaataaacatgttcctgggcctttcatttaataagcattttggaataactggaggcaaataaacaaagttaaaccctcacgtgggaagaccaggctgcccaacagcattgtagcttgagactcaaagttaaagccagcttctaaaaagcctgttagtcctaccatcaatatgataaatttggattaagatggt

SEQ ID NO: 446027 - DNA, 556 bp, Homo Sapiens
gtaatcaattgttaattaaatttttattttgagataactgtagattcacatgcagttgtaagaaataaggcagagatatcccgtatacccttcaaacattttcccccaatggtaacatcttgcaaaactatagtacaatatcacaatgttgatttctacccctctacctcacttcagagcatatccatgtatatacattttatattttaggcttcataaattcctagtttaaaaacagtttacttggattgaactttgtacttttccaaggcattttctagtccactatttctcttaaggcttaaaacatctctgactaagtgaacaaacagatgaacaaatgaaacaaacatctatacaatcagaagttaagggaggtttgaaataggcactgccacagagtaactgttagagaaggagttccatggtacaaactttgcactctccatctacgaaaggtggcagagtccttgaagtgtttttcctctctccagccagtccccaccactactgataattaaatccttcttgtcaaaggacaggactggttctggaa

SEQ ID NO: 446028 - DNA, 609 bp, Homo Sapiens
ttttactaacgttttctatttattcattaataaaaagtgcatagtacaagccctttatcccaatccaagtactcagaaaaagattaacaacagaccctggatggcacagacataatttgtttggcgtgatttaaacatataaaatcagtaattaacatttagcatatcacacgaccacttttgcttttaacaaagtaatcttcacacatggtaacaaatacctatgatttttcatttagaaatattataagaagactaaacttactattgcaacaacaaaaatttaacccattaaactagaaactctcttcatttttccttcttcaaattactgttttgtgtcttaaactgagttggtcaaatttgagcacataattcatgtagagtgacagactttcatttagagtgatagacttccaaggttcctttgaaaatttaagatactggtaattccataaacactcccacaccacataccacaaaaacactaaaagtagccatagaatagctgtattcaataattattttggaaaatccacattatgaaatatgacttgctgaccatggaacagtgcttggatagataacatgaaaaaaatgaaaaacatc

SEQ ID NO: 446029 - DNA, 952 bp, Homo Sapiens
ttgggttttttcctcagatttttatttttgcacattcttgtgacatttcccattgtagggaacaggagtttagcaaaatcagcttcttagatgatgtcattctaaatatacatcttaaacaaacaatatcaaaaccaccagtaggaaactgaaaaacactcagtgagtactgttttgtctcagtaacaataaatacaaaaagactggttgtgttccggccccatccaaccacgaagttgatttctcttgtgtgcagagtgactgattttaaaggacatggagcttgtcacaatgtcacaatgtcacagtgtgaagggcacactcactcccgcgtgattcacatttagcaaccaacaatagctcatgagtccatacttgtaaatacttttggcagaatacttcttgaaacttgcagatgataattaagatccaagatatttcccaaagtaaatagaagtgggtcataatattaattacctgttcacatcagcttccatttacaagtcatgagcccagacactgacatcaaactgagcccacttagactcctcaccaccagtctgtcctgtcatcagacaggaggctgtcaccttgaccaaattctcaccagtcaatcatctatccaaaaaccattacctgttacagctaaaacaaaatcagcacatctctgtctgtattagaaacgacaaaaccttacaaagcagtcacctccataccagtctgacaatcactagttcatttggcagatggacaacaaaggtttaaacttgccattccaatcaactttctttccctatctgattcatggtgtttttaaaatagtatcttgaaagctgtgctgcatttctcctccacttatcaatgaagaaaacgtgctctccagaaactacctgcggtagccactcccaggacctggggagacgtgcacgccggggttttcgacggtcatcgc

SEQ ID NO: 446030 - DNA, 372 bp, Homo Sapiens
gtaaccggagatagtttttacaagtgaaataacatttcagctaaataaaacatcgctaaataattgatatttgatgaaaatctgctttgtataatttctgtaaattatccttgttctgaaaaaggtgtaatgccctaatatttttaaatccttatcctttgattttttaaaaactgacctattgataaaactataaattttcattttccagtgcagttagttacctttttaaacataaatgcacaacaagcaaatgaatttaagagaactaaactggaataagtgttcataaatgaaacccttggactatttaataaagttgaaatgtgaattaaggaaaacttttgttaataaaaactttcttttaagtgg

SEQ ID NO: 446031 - DNA, 654 bp, Homo Sapiens
tttgtttcttgtgtttgttgcctgtcacaataaagtttattatgaaaacaggctggtgtggggacatggggacagataagtacatttaggttgggtggctcaggtgaagtagtgcggcttcttcacattgatgccatactcgctgagggcaggggtcaagtcctccatggttagagtgtacttgcggtccttgctcttgctccgggagctgccggaggccgtgcccttcattttgcagtgctgtagggcatcattggcaatatctgagatgaatttctgggcagctaaggagatgagccgaattatgcgtgggtctgaggcctcaaagccagcacggttcaggtagtaaccagtcactgcatctgggatcgtaggcgtgtaatcttccagctgcatcaagaagtccaccaaaggcgtgctggacaccacgggcttcacgtctccgttggccgcgctcggcagtacgtaaaccccgttagatatggccccctccgggggcgccgagccacccgccgacaccggagccggcccacgccgttcatttggctccctgtcctcgccgtcaatggatccgtgcgacctaacttgtacagccccagtacccccggtgtacctcggggctggcctatatcttcgcgctattcctgagggaat

SEQ ID NO: 446032 - DNA, 490 bp, Homo Sapiens
ttaagcagtcttaaaattttattcatgagtatgcaaaatatatgttaaatgagagaaacagaacaccaaattgcatcagcaatatagttaatatctatgttaaaatacatagtacacacagcaataaaacactaaacagatttataaataaacattaatgatgcttgtgccagggtggtacaattggagtgatggttctccattttaaaaattgatagatattactttggttaattaaaagtctgcctgtagattttctaagccttcgaagcactaaaagcaatttttaaaaatagagtctttatggctaaggcattattgttcataaattcagaactagagacacacagaagaaatcattacatacttctttacatgaggagaatcatgactggtagagtggcctaagaggcaggcgtgggggctttcagacagcagaaagacggggctggtgtccaggagggcgcgggcatgggtagggcagcgcccg

SEQ ID NO: 446033 - DNA, 356 bp, Homo Sapiens
tattagaaaacagtctgtttattagaagtgactcttggccccaccatggagcagcaacagactgggtgacagagggttaggtgactaatagaagcatgcttaaggggctgtcatttgtgggagctgagctgagcccagcctggttatccaagctgagggcaggtagtctgggaggactgaactcagccaaggagccagagttgcagcatcagggccagactgagcaggagacccccagtcccatgaagcatctcaccagcattcacatgcatggctgcagcatagaacctcgccacttcctcgttggggttgccctgggctgaatcaaaccacatctggatgcagcggccgctccc

SEQ ID NO: 446034 - DNA, 211 bp, Homo Sapiens
gtcatttctttaatatagaattttatttctggttatagaaacaaatgctaagaggagaaacaaaacttccccatccacatacaacaatttaatagataaaagaacagttaaaataaatgaaaaacaaaaagtagaaattttaaactttgttatagctttaaaacattaacgtctgatacaattagaaatcacattcagatctcaaactctt

SEQ ID NO: 446035 - DNA, 559 bp, Homo Sapiens
  misc_feature (479)..(479): n is a, c, g, or t
  misc_feature (523)..(523): n is a, c, g, or t
tttttgtaagtcagatgttcatttattaaatacaagttttgaacaaacactgccaggcaagtttgacaagaagtaaccttcctggaatgtttcaaaatacagtcgcgttgatcaagttttatttcaatcaaccttttcattttctgtttctaggttcatttcctgttgagcagttagagcatgtgcattatttcctcacatgacatcaacagtgcagcatcagcctctggcatgtaaaggcacccagtagacttatgctctgtgcaatggctgcttagcaaccaccatcaaataaagtaatgaagcttttgtagagtgtgatatcaaatagcaactggcaccttcacttgcaccattaaaaaaccttttaacatttccttcagttttcacatatccattaaaaaggtatattaaaaaacaaaacccagactgcttggataaaacatacttaaacaattttcccaggttagtattagccncctgggtaagttatgagcaataccagagctgaggtaaaagaggnctcattttggcatcatactccagcaagccaatacac

SEQ ID NO: 446036 - DNA, 440 bp, Homo Sapiens
  misc_feature (25)..(25): n is a, c, g, or t
  misc_feature (56)..(56): n is a, c, g, or t
tttttaaaaaaacccctttttaaanggggatatgtgaaaaacctgaagggaaaatngttaaaaggtttttttaatgggtgccaagtgaagggtgcccagttgcctatttgatatcacacctcctacaaaagccttcattacctttatttgatggtggttgcctaagcagcccattgccacagagccataagtcctactgggtgccctttaccatgccagaggctgatgctgcactgttgatgtccatgtgaggaaataatgcacatgctctaactgctcaacaggaaatgaacctagaaacagaaaatgaaaaggttgattgaaataaaacttgatcaacgcgactgtattttgaaacattccaggaaggttacttcttgtcaaacttgcctggcagtgtttgttcaaaacttgtatttaataaatgaacatcttgactt

SEQ ID NO: 446037 - DNA, 629 bp, Homo Sapiens
ggcagcttcaagaacgagtgatttaagaacagccctcccatcttagcaatgtcccggggtggctggagccacggtcacttcttggtcctggtccagaactgtcggtagcgctccacatgcaagtcatcactgagctcctgctcgtactccttcctcgactggagctgagcctcacgcttccgcagcctggcccggcgctcctcaggagacagggtgtccagatctatgggcatcgccagcatgcgccgtggctccctgtagcggatgtggatggtggagccatcctgcttcaccagcagcacggggtagagtcgtgcataagcctggcggtgcacacgagtgagtgaggccctgctgctgtcagctcgccaggaggatgtgtgcaggcggcggagtgcaggtccggtggccttcacggtgctctgcctcagccggccaagcaggctgcccacggccgccattcctccttacagccccagtggcacgtggaggtggtcagtacaggccctggcgtgcaaccagcacaggagcctggggctggtccaggagggtcttcggggaaagctccctctcctttcctgctagatgcgttgggtgctgctgcgctgcagcccacgacgtcactcccc

SEQ ID NO: 446038 - DNA, 1095 bp, Homo Sapiens
gtcccggggtcgcctggagtctaacggtcacttcttggtcctggtccagaactgtcggtagcgctccacatgcaagtcatcaccgagctcctgctcgtactccttcctcgactggagctgagcctcacgcttccgcagcctggcccggcgctcctcaggagacagggtgtccagatctatgggcatcgccagcatgcgccgtggctccctgttagcggatttggattgtggaagccatcctgctttcaccagtcagcacggggttagattcgtgcataagcctggcggtgcacacgagtgagtgaggccctgctgctgtcagctcgccaggaggatgtgtgcaggcggcggagtgcaggtccggtggccttcacggtgctctgcctcagccggccaagcaggctgcccacggccgccattcctccttacagccccagtggcacgtggaggtggtcagtacaggccctggcgtgcaacctgcaacctctcccagcaacccttggacttctcagaaccgcctgtagaggtttttccaaaagcagaagttggtcactactcccaaagattctgagtcagcctgcggcagggcccaggctgtctgttctggccgttaccgagtctgcgaaacctctctgaatggactgcagcctcaaaagtggagctgaggtcatgccttgctttctaaggtcattgctagttttaataaaaactcagtgaagtgaggattgtcatgcttgcttaaaggagaatggaggcccagggctgctttgctgtgacctggattcccatgggagtctgtgctgaggtgtgcgaagtaaaagcccagttttcaatactcagattccaggagatgaggctgcacagaggccgagcgcccagcttcctctggcgtacccctgtctctcaccaaggaagggacctgaagacaggtccggctgcctctaaaatggaaatcctgctacgtgtcctatgcccacatccctctccctcggcctcaccagcacaggagcctggggctggtccaggagggtcttcggggaaagctccctctcctttcctgctagatgcgttgggtgctgctgcgctgcagcccac

SEQ ID NO: 446039 - DNA, 1172 bp, Homo Sapiens
  misc_feature (122)..(280): n is a, c, g, or t
  misc_feature (423)..(431): n is a, c, g, or t
agaaggggggggaaatagtggtcaggtcggggaggggatatagtcggaggggcggcggtggctaacgagaggggaatggaggaaggcgaggggtaaaaggaatgtctgagagaggggtatannnnnnnnnnnnnnnnnnnnnnnnnnnnnnnnnnnnnnnnnnnnnnnnnnnnnnnnnnnnnnnnnnnnnnnnnnnnnnnnnnnnnnnnnnnnnnnnnnnnnnnnnnnnnnnnnnnnnnnnnnnnnnnnnnnnnnnnnnnnnnnnnnnnnnnnnnnnnnnttaaaggatggaagagggcgagggaggaaaggtaccaaggcgggcgcataaagacagagaagggagggagggaattaaggataggtgcagaatggtagcaggggaggaagggagggaagtttcggggaaaaaggagttcccannnnnnnnnaggtttaggcaaagggaaagggtggggaagagagggacgggagcgggagggaggaaattgggctccagtgatgggaccggtttggtacaagaaaggtggggtccgggtaaagctgggggcccctcggagggatcctctaggagcggccgcccgattagggggaagtgctgtaaaggattttgcagcttcaagaacgagtgatttaagaacagccctcccatcttagcaatgtcccggggtggctggagccacggtcacttcttggtcctggtccagaactgtcggtagcgctccacatgcaagtcatcactgagctcctgctcgtactccttcctcgactggagctgagcctcacgcttccgcagcctggcccggcgctcctcaggagacagggtgtccagatctatgggcatcgccagcatgcgccgtggctccctgtagcggatgtggatggtggagccatcctgcttcaccagcagcacggggtagagtcgtgcataagcctggcggtgcacacgagtgagtgaggccctgctgctgtcagctcgccaggaggatgtgtgcaggcggcggagtgcaggtccggtggccttcacggtgctctgcctcagccggccaagcaggctgcccacggccgccattcctccttacagccccagtggcacgtggaggtggtcagtacaggccctggcgtgcaactgcgttgggtgctgctgcgctgcagcccacgacgtcactccc

SEQ ID NO: 446040 - DNA, 774 bp, Homo Sapiens
  misc_feature (109)..(109): n is a, c, g, or t
tgatcggtgcggtagttatatgttttgctttcaagaaacggagtggatttaaaggaacagcccttcccattcttagccaatgtcccgggggtgggcgggagccacggtnacttctgggtcctggtccagaagctgtcggtagcgctccacatgcaagtcatcactgagctcctgctcgtactccttcctcgactggagctgagcctcacgcttccgcagcctggcccggcgctcctcaggagacagggtgtccagatctatgggcatcgccagcatgcgccgtggctccctgtagcggatgtggatggtggagccatcctgcttcaccagcagcacggggtagagtcgtgcataagcctggcggtgcacacgagtgagtgaggccctgctgctgtcagctcgccaggaggatgtgtgcaggcggcggagtgcaggtccggtggccttcacggtgctctgcctcagccggccaagcaggctgcccacggccgccattcctccttacagccccagtggcacgtggaggtggtcagtacaggccctggcgtgcaaccagcacaggagcctggggctggtccaggagggtcttcggggaaagctccctctcctttcctgctagactgcggacgccacagtcgctgcggaggggtctgaggacaggcggtcctgactcccgctgcccggtggaactaagaccagggacgaggccacgcaggagatcaaggtactcactgcgttgggtgctgctgcgctgcagcccacgacgtcactccc

SEQ ID NO: 446041 - DNA, 468 bp, Homo Sapiens
ccgcacccaggcgcacttctggagacagggtgtccagatctatgggcatcgccagcatgcgccgtggctccctgtagcggatgtggatggtggagccatcctgcttcaccagcagcacggggtagagtcgtgcataagcctggcggtgcacacgagtgagtgaggccctgctgctgtcagctcgccaggaggatgtgtgcaggcggcggagtgcaggtccggtggccttcacggtgctctgcctcagccggccaagcaggctgcccacggccgccattcctccttacagccccagtggcacgtggaggtggtcagtacaggccctggcgtgcaacctgcaacctctcccagcaacccttggacttctcagaaccgccagcacaggagcctggggctggtccaggagggtcttcggggaagctccctctcctttcctgctagaagtgcgccaaggtgcggcccaggtat

SEQ ID NO: 446042 - DNA, 453 bp, Homo Sapiens
  misc_feature (62)..(62): n is a, c, g, or t
  misc_feature (190)..(190): n is a, c, g, or t
attaaatcctgctccgtaatccttccctcgaactggaaacttaaaccctcaaaccttcccgnaaccctggccccggcggctccctcaagaaaaacagggtgtccaaaaatctaatgggcaatcgcccagcatgcgccgtggctccccttgtagcggatgtggaatggtggaagccatccctgcttcaccnagcagcacggggtagagtcgtgcaataaagcctggcggtgcaacacgaagtgagtgaggccctgctgctgtcagctcgcccaggaggatgtgtgcaggcggcggagtgcaggtccggtggccttcacggtgctctgcctcagccggccaagcaggctcccacggccgccattcctccttacagccccagtggcacgtggaggtggtcagtacaggccctggcgtgcaaccagcacaggagcctggggctggtccaggagggta

SEQ ID NO: 446043 - DNA, 293 bp, Homo Sapiens
taataaaaacaaaataaaagaagatctaatcggttgtgaagtctcatcctttggtgaaaggtgctgttgagcctgatacaatatattcaactgccagagcacagacacttctactttgtctagctggagattctttagccaggtactccttgacagtgactcgttaggtaagcgacatttgcaaggtttaagtgcctagtgcacagaaatcagaaagcaaggcttgttttaggcaaacgtgccacatatcttgtaaggtaaagagacaaaaatataaccggtgaaacgcactg

SEQ ID NO: 446044 - DNA, 460 bp, Homo Sapiens
ttatccaatttgatttttaatgtaattaatagtgatttaattttcaaaggagcaaataattacaaacaagagaaaacattgctgagatggtgcctggttgcttctattcaggccattgctgaactatatagaaaaaaagtatattcatggtgtcttcattattatgaaaatcacagtaatatgactcatcaggaaatcacaataattttatgacagaaacaatatatttagaacgaatctgtcagtatttgactctcttttgagggaaaaataaatgaaaaccacgttctctggaaagaaataagacaagaaatgcccacagttgcattctgctgttgggaatacatctcccaaattcaaggttcaaagggttttacacatttaattttcaacacttatcaccttcttcttctctcaatttatggagatagatttctacgttcattattcgggattatta

SEQ ID NO: 446045 - DNA, 525 bp, Homo Sapiens
ggactaaaagttcaaagttttaatccaaatttagacagtgttgagaaaaccaaactttggccatagaaaccattcccctcccgggcccgcaatggggaccagaccacgccccctgatgccctgagtggtcccagatctccggcggtacctccagaccacgtcctcgcgctccgattggctgccgcttttgggcggattagaagctggattgtagcagagtgactcgcagaggccatgccccctcgtcttgtggcaggaccggaggggcgatcccggcatcccacgcgggcccccagggggtgggacctcctccacgcccactccctcggcgagagaaccccgtggaacccgaattagccaccgggggagatctggggggaggggtctcctggcgcgtggggtccgaaggaggcagcggcacaccgggaagagggtctccctgtgagtccaaatttccacctgtcatcattctgtgccactgcgacgcctcagtagccagggcttgggagaggctgagaacccgct

SEQ ID NO: 446046 - DNA, 910 bp, Homo Sapiens
  misc_feature (892)..(892): n is a, c, g, or t
tccacatataaaaatatattttttattgcaatactgaacagttaaggccacaacactttagggagaatttgagatacacatattttgaaatgacttgttaaaaatattagcataaataaatatcaaaactggtcacacttatagaagctgaataaaacatattaagtcttatatcttttaaagactactatcagaaactttacttcataagttataacatttttcaagtatacattacaatacacttggtgactgtgaaaacataaatatatatttatagtattgtacaggattttgatcttctctctgtatttgttggtgggatattctgatgattctgactcatgtggttctggtcggcatctttattatcactttttaaaatgatctggtctcctatggattttatctctgggagcggctcattgttattcttgacaatcttttgatttattgaggggactcttttgaacagaaaaatcttctttggtttttttcatgtctttgcttggtgttgtttcactgttttctaggatttctaatgaactgctatctgcatcatctagcatgtatccttttgggttttcattgtactcacaaatggcccgttcctctaggttggctttttctttctttcaatagtttcagctgagttatcatcattggttctttctgctccttctgttttactgtgataacctgtagggaacactttcatcatctcccacagttttcttcttgctttccacattttcagcattaatttcctcatccacatcttctagttttagttcctcagttttagaaaattcatgatcctgtgacaaaattgaccatcagagaagagtaagattttcttgttaaaaaacgagggcttgggtattgctgtcanaaataatttgtgtcatct

SEQ ID NO: 446047 - DNA, 1054 bp, Homo Sapiens
ctggatctcggccacggatcttttgctcgcgaaagttcctccgtctagctgcacacaacgctgctgcaggaaaccgaggtaagggatttgccgagacttagctccaccacactccccgaggccccgccctcctctctggccctcccctaggcccaggtgtctcgcgttgcacgtgcagttgttgtggttctacgtcacgtggtcccggaagtcaagacagacccgcctcaaacatggcggcgcccagcgcgcgaggacgtgatccgcttctgctccggcttggattgtagccttgacgaggtctgagcgaccatggaccggccggggttcgtggcagcgctggtggctggtggggtagcaggtgtttctgttgacttgatattatttcctctggataccattaaaaccaggctgcagagtccccaaggatttagtaaggctggtggttttcatggaatatatgctggcgttccttctgctgctattggatcctttcctaatgctgctgcattttttatcacctatgaatatgtgaagtggtttttgcatgctgattcatcttcatatttgacacctatgaaacatatgttggctgcctctgctggagaagtggttgcctgcctgattcgagttccatctgaagtggttaagcagagggcacaggtatctgcttctacaagaacatttcagattttctctaacatcttatatgaagagggtatccaagggttgtatcgaggctataaaagcacagttttaagagagattcctttttctttggtcccagtttcccttatgggagtccttaaaagccctctggtcctggaggcaggatcatgtggtggattcttggcagtcagcagtctgtggacgcttttgcaagtggatttgccgctgcaagtcacgcaccctctagacgtggcaaacgacaagaattatgctggcaaaggctggctccagcaacttgtgatggaaatgtgctctctgtcctgcatgcggtctggcggtcaacagggctgcaggactatttgccggtgtcttccctcgacatggc

SEQ ID NO: 446048 - DNA, 1029 bp, Homo Sapiens
cagcattaccaaacttatttattaagaggttctgaggaaattgttcagagtaccgccacagaccccgttttcttctcttagctctctggcatacaggccaatgacttcataccagccagcctataccacggatggcacaatctccatgccggtatcttagcacaactggtcttcagcactggggcctatagttcagacagctgctcagcggaagagggtttgcactgcaggcccctctcttgacagaagtggaggtgaggcttgtctctgcttcaaggactctttctgccaacttccaacagcaagctgtgcgttcggtcataagcccccagaaagatgaaacctcccagactgatggctgccattcgagggaagacacctgcaaataatcctgccagcccctgtgaccgccagaccccatgcaggacagagagcacattcccatcagcagtgctggagccagcctttgccagcgtaattcttgtctttgccacgtctagaggggtggtgactgcagcggcaaatccacctgcaaaagctccacagactgctgactgccaagaatccaccacatgatcctgcctccaggaccagagggcttttaaggactcccataagggaaactggaccaaagaaaaaggaatctctcttaaaactgtgcttttatagcctcgatacaacccttggataccctcttcatataagatgttagagaaaatctgaaatgttcttgtagaagcagatacctgtgccctctgcttaaccacttcagatggaactcgaatcaggcaggcaaccacttctccagcagaggcagccaacatatgtttcataggtgtcaaatatgaagatgaatcagcatgcaaaaaccacttcacatattcataggtgataaaaaatgcagcagcaccagcgctgccacgaaccccggccggtccatggtcgctcagacctcgtcaaggctacaatccaagccggagcagaagcggatcacgtcctcgcgcgctgggcgccgccatgttttccgct

SEQ ID NO: 446049 - DNA, 410 bp, Homo Sapiens
ttttttttagcttattaaatcgagaatattcctgcaggaggcatccgctatgggctaaaggtcccaacatcacaataataaataacagctatgtttacagagacacattcaggacacatgcaaaagcttttcctagcaggaggacttgggcctttgcaaaacaagctgcttgggcctccccagagggcccaccctcccatgcacctaccccaccaccctgccccaactcattacacaactcggccttctggccacctgaggctactttttagaccaagtgactcaggacgtttcaagtagaagtacaggatgggccactgccaggggaccttgcagcagaaaattaggtcagaggacttggagggtggtgaagaacaaccagatagatgtgagagcccagcagggaaatg

SEQ ID NO: 446050 - DNA, 1435 bp, Homo Sapiens
  misc_feature (317)..(317): n is a, c, g, or t
ccccagagggtgggtttttctgggcccggggggaaaaaaatttctggggggttttcagggaaattcatttggccacccgggaaatcttttggggtggggacccgggagaaaatgtcttcgggccccttccagggattctggggtgggccacaggtggctgttcaaaaaaagcctggcagcatccctgccaattagccacggggggcagccacttcagttggcagtcacacaggaagctgtcgctgctgatatggagctctttaagattcttcatcttcacaaaggcatcaaactggacagatctgatcgcatccctnccaaggttcaggtgctccagccctcccagccccgagaatgctctcttagccacagacttgatcttgtttccaaacagagtcagcttgctgaggctgtcgagccctgagaaggcgccgctcgtgtcctctattgtgcccgaaatctcgttatggtccagatccaagactcgcaggctcctgagtcccttgaaggcaccctccgcaatgtggctgatggaattgtggctgagacgcaggacactcaggctgctcagctcggccaggctctcctcgtccagccgtgtcaggttgttgaaggacaggaccaactcatgtagcttctggcagaagctccagcccttgcggtgaatgcgagcgatggaattgttgctgaggtggagctgatgcagggccgtgaggccgtagagcgagccgctgttcacttctaccaggctgttgtactccaggtgcagcacatgcatcttggacagtccccagaaggccccatctgtcagtttgctgatgttgtttcgctgaagcttcagcacctccaagctgttgagcccctggaaggtgaggccctctatcagccgaatcctgttccgattgaggtccagttgtgtcagcctgggtagcttgaatgctcttacaggaagctgggtgatcctgtttttgctcaggcgaagagttagcagcgaccgtgacagaccatcaaatgctcccaactccagggtgccaatccgattgcctgccaggttgagctcctttataggcggtccgtgtggaaagcaggtgttccgcacttccgtgatgttgttcaaactcagatctaacacttctaaggaaaggtaggccttcagctggctcccctccacgctgcgaatcttgttgtgctgcagaaagagagagacgacatgtgatgaagcagcgcccagggatggtaccgctgtcaactcattattattgaggtacacttcctgtaggttcggcaagtcctcaaaaccagcagggtcaatctcagagagtttgttgtaactcaggtttaggctccgcgtccaggagggcaggtccccgggcaacgcagccagcccgcgcccaccgcagtccagcgagtccccagcgcaagtgcaggcggccgc

SEQ ID NO: 446051 - DNA, 436 bp, Homo Sapiens
  misc_feature (388)..(388): n is a, c, g, or t
  misc_feature (418)..(418): n is a, c, g, or t
ttttttggtgtgtgtgttaatttaatcatacaaatattcatttatacaataaggaaaaacctcctcatctttatctcctcctaggcaccatgaggccccaccacaaacatccagctggctttctacacacaccactgtccaggtgggaagggcagccactgctgctcctgcattcacccaaggaaacaaaggaaaggtgcggcgaggcagggtggggtgagtaatcagcttgcacttctgagccctggcaaccctaccatcctctcctgctgggctcagattgaatttggggaggtatttattctcatgcccatttcccaccatgggccaccctcaggccacaccagctgtttggtgaggttctctccagggctggaagtaactttgnatgggcttaaggttaacagccagtcctttntgggggagagaaggttga

SEQ ID NO: 446052 - DNA, 462 bp, Homo Sapiens
gccggggtatcattcattctattttatttaactttaagcagggcttgatcagaaagaagagctcagaggagtgaggcaacaccaacaccagggcgtacgatacacccgaggctcctccgacaccagttccagcccggaagggcttggaatggcctgccacgccggggcaatggagcgcgtgaaagccaaaccttgggacccgaagagtaatttgactgcgaaggcaccgtcatcgtcgggcaccccctgtagacgggcgcataatagctacatctctggagatagtgatggaaactggggtccgatagatggagagaaggacgtaggataaggcttcttgtggggtgaagaggcagagggcacctggagagaggtgtggcatggagaaccaggggttttccctagcagagggcggcttcgtggacttcggccaaccggcgggtgcttccctcgagcggccgc

SEQ ID NO: 446053 - DNA, 619 bp, Homo Sapiens
  misc_feature (604)..(604): n is a, c, g, or t
acagtgtttgaattatttttattgaatatgttactttcattatttttaaaaacatcttcttcccaccttctcatcttgtctatttcagcctagccaactaggttttctcaggactgaggttatttattccatattaactctgtctcaagctcatatgcatctcccacgattatttttcccaaaacactttaggtttaagaatgacctttcctaggtctttagcttatgattacccaaatgaaaccatcactagatggactccctaattcaggtgttgaattacaaaaatgaattttcagggggaaaaaaatgctaactcaattatgttagttaaaatatcagtaaaattagcgatgccacagtgtcatgaagcagaaggtcaaagacccacacaccctttactgggcgccatggtgggacttaactggggcagttccggttctgccattaggaccatgagcactccaatctcagtgaaattgtataagacactgccattatccccggatcattgccacgatagacccaaacaactccagtctatcgtgtcaatgtgtatttggggagtctttaacacacggatcattggcgagctgcaccatanaagccctgtaggagc

SEQ ID NO: 446054 - DNA, 323 bp, Homo Sapiens
atttgttgttctgtttacaaatcaggagagcccctgtttttatatgctaggaaggtccttgggataggcccgaagagggtgtgcaaacgagcagtggaaggcccgggccctgtctctcaggaccacggcggcctgccccacacacagttctgcttctccctatctagaacgaggttttcctggcagattcctgccagactctgagtggagcccccccatgaccctataaaaggggctgtttgtcctcctcccaccctcctgtgctcttcctccctccccttgagggcacatggccgctggtaccacatgttggagcggccgct

SEQ ID NO: 446055 - DNA, 478 bp, Homo Sapiens
caaccgaagacagtatactgtagtttgttagaaataattttttatacactaggttataacttattcacatatataagcttattatcataataagaaaaggtttatatattttgggttttcttgttttaataaaataaatgtgctaaggttcctttttaatactttttgggaatatgttttgatgacagtagaaaatattcaacattaattcactaaacaaccaaagaagtaaaattttgatactacctccaaagttaaagatagcaggcatatcttaactacttcccaaaaagactagggagttaggtaaaagagtgaaggcatttgaggatttttcaagttccagatgaccagacagaaactgtaagccattggctacagaatgaatgatagcaaacactaaggtttttatgcactagacagtgtatgtaaacacttacttatcacagcttctgatatgagctgttaaccaataaat

SEQ ID NO: 446056 - DNA, 590 bp, Homo Sapiens
aacttttggtaataaaatactttattggtaccatttaataaatgtcaaaaacgtatagcatttccattgcttagcttccatctttaaacttaaagctagttaaaaacaacaggaacaaaagtaaactcatttgattctctcaaaaaacaagctgtaacttacctttgcaaataattaagttctctcactttaaatatcgtaattcactggtcttcataataaataattataataatatataaaaggagacagtggcctgaattattttgcagagaacatttcacacatcttttaaaaaaatcactaaactaccacaacttaaaacttgtaagaataattaggtaagagttattgtaatattgaattaatatagcacctagaaatttgaaatttgtaatatttcagatgatatgatttactgagaaaaagagtaatgatttttcttcagtgaattttcaggggttttcaacataggtctcttttaaaagggttaaaaaatttatgcatactaggaattgacctgatggtaacagatccatgtgtgacaaataatgtagtgcagtcctatctgaatataatttctttttcac

SEQ ID NO: 446057 - DNA, 514 bp, Homo Sapiens
ttttagtgaaacattttctttttattgagaacatctcaaatcctttgtctgtatttgacagcgtctcatgctcagttccagctggtcttgtgcgagaggaagctcatgcagttgtaacgtgtggtgtatacacagatttacatacagagaacactgaggattgcatctcagcaacatgtttctcagccgaattacattcatagaaagtgtccagattctaaaatcaaattaaaagcatgtaatccaaagcctgaaaaagcaaacagctttaggggctgactccattagcgttccatagactgtgcttttaaccgttcagttcatgtttaatggcccatcggttccttacataccatcagcttatgctgtggccaaaagaagtgttcttgtggcttggtactcgtcccttcaaacagtaaacaagaaagtgcagacagtgctgccagagacaggaggattttcacatgagactggaaaagccgacacacccttacaactaagtcatggtcgagtc

SEQ ID NO: 446058 - DNA, 249 bp, Homo Sapiens
ctatgcatgtagatgtattaaatatgtaaatgtttttcaaagttgaggtaatattgtatagaattttatagcctacattttaatttcttgatatcttaagcatttcacttattagatattgttcaaaaatgccatttttaatatttgtataataccctatcatgtgagtataccttaactaagccattcccatattcaacattttgtgtactgtttttctaattacatatattacaatgaacaacctta

SEQ ID NO: 446059 - DNA, 555 bp, Homo Sapiens
atcttgtttctattttccccctccttttcccccctcttgactgctttctcttctgccttttctctgaccattctctctttcatactatttgttttctttttgggttattagaaggctagttagctgctggagttccttatctacactgaacagaagctacccaagagtgttccttctgggaaattttacgacataaaacaatccccatttactgtttatgtgagtatgctgccagtgtaagagaagggcaaggttagacataattaccttggccatttagaaggtaggagggttaatgacagattgaaatatagggcacataggcaaatgagatgatttgaacatggaacagaaattaagtaaaaagaaaataagtgtattttgtactttctttgtgataactcacaccaccaaaataataaaggtttttatctgcagtcattcagtatatgtatcttgtttcaacaactagatgtaaactaaagacagatacttatattaaacttctttctatccttcaaaatgtagcgtagctcttcatatacaccaggtgaa

SEQ ID NO: 446060 - DNA, 462 bp, Homo Sapiens
ctttgtccatttatttttcaatggaaatttgggttgtttccataactttggaaacagtgattgtgaagagtgccacaatgaacatgggagtgtaaatattttcttgaaattctgatttcaattattttgggtatatatacagaagtgagattgctggatcatatagcagttctatttttaatttttgagaaacctccgtactgtttttcataacggctacaccattttccattccctccagcagtgaagaagggttccaatttctctatatccttgatgacacttcatttttttatagtagccattctacctggtataaggtgatatctcattgtggtttttattttcatttccctgatgacatcctgattgtccttttcttgaatgttctgtttctgaggaggctggatgaacattcttttctgggaaccttctttataagaaccccattaattccagaca

SEQ ID NO: 446061 - DNA, 532 bp, Homo Sapiens
caggaaaaattaagattttcaaaatatttttatatagaaattttttacaaagattttacaacatagcaaatcattatgtcatactgtagaaagatgaagcaaaggattaaactccaaggataaagaaagtgctcatagcaacgtattgcagtctccatgaaagtgcatataaacggttaaggcaaagtaccatcttggtacagacatgttgcaaactgacttttaaaacaattttttaaaatatatacaaactttttttcttctattcttctcaaaggcatttgaaagggatacttttatgaatattcttgctgtagaacaatgtagaaataacttctgggtataaaacagtaaaaataaaaatattctacctgagtgtgttaaatcaagtgatttgtaaaacaaaaccttcacaagtgtgggctttctacatgtaacttgccaggctgaaggcttacaccctcatgttctacaacacagatcactaatgatgataacatgagttaaattgggattcttgcccttctgtgtg

SEQ ID NO: 446062 - DNA, 501 bp, Homo Sapiens
aaatctggaaaagttgtgcctgagtgcatgagatagaatagagacaagttttctctttgtttattaactacagtgggtagcagaatcttggcaacccctgaatgatcaggaatctaatcggtaaaaaaatgtaactttggccccttgatctataaatgtgtctgaaagcattacaacaggactcacaaagctactaagtttgactttcgcagacaatatatctgtgactcccgcttgttttttacatttaccttcattccacagccctgagttactgggtgagtccaagacatctcctcaatataaagtagcacactgtgttactatatgttgcaaccgggagccagtacagactttattcacctcacagttgcaagtgttcaatgcagtcacaatgcccctcagcagtgctcatgcgctgcctgtttttaggaagtattcacgtctaagtggtgtgtatatcttataggaacacttagtatttttaaaacctgattaatt

SEQ ID NO: 446063 - DNA, 449 bp, Homo Sapiens
cagagattttcctttgtttgaataatatacagatttgtgatatttcacagttgttcttgagaaggatttttataaatgttgaaatttgaattagagtgtatgactttttatcctttttgtctcacttttattttgaaaattatttctatcgcaagaatattaagtggatgaattgtaaagaaaaaatagttcaaagaagctaagaagtaagataaagtgtactactaaaacagacaattggaataataataatagtcttgtgctttttggaagacttattggtggagaagtgacaattcaaatgtcattatcagtaaatatcatatattgagaattttatgatgtcacttaaatactaaacaggaaattggaatcctctaagaatctactgttatggtacgtgtaaccattaactttttgctcaataaaataattgccaaaagttaaaa

SEQ ID NO: 446064 - DNA, 1630 bp, Homo Sapiens
  misc_feature (156)..(156): n is a, c, g, or t
  misc_feature (188)..(246): n is a, c, g, or t
  misc_feature (1312)..(1312): n is a, c, g, or t
taagacgttaggctaggtacgaggccgggtgttaattggccgaggccgcttcagctcaataaggaccaggtggtgctgctcaacaccagctactccctggtggcctgcgccgtctccgtccactcggcaggtgacaggagtttctgccaaatcctngtatgaccacagcacctgccccctggcgcctnnnnnnnnnnnnnnnnnnnnnnnnnnnnnnnnnnnnnnnnnnnnnnnnnnnnnnnnnnntgaggcggccccagcccgttcttctgggtctcctgagccctcgcccgccattgccaaagccaaggagtttgtggctgacatcttccgccgggccaaagaggccaagggcggggtccctgaggaagcccggcctgccctgtgcccaggaccctctggcagccgctgccgtgcgcactctgagcccctagccctgtgtggagagacggcaccccgggacagcccccctgcctcggaggcacctgcctccgagcctggctatgtcaactacaccaagctgtactatgtgctggagtccggagaggggacggagccggaggatgagttggaggacgacaagatctccctgcccttcgtggtgactgatcttcgtggccgcaacctgcggcccatgcgggagcggactgctgtccaggtgggtgtggggcagtgggcgggccaaggacagtcccggggagctgcccggggggcaagttggcaccgtccccctgcgcctacccactcacccgcagggccagtacctgacagtggagcagctcacactagacttcgaatatggtatcaatgaggtcatccgccacgacgctacctggggccctcaggtcctggtctttccaggcactttgaccatcccccttcctggaaggtggcccaccgcgtggggcaagtgccggcgccttcgggcgcctcccgcgatctccgggggcccccctcctcctaccatatttctccctcctcacaccctccacccctcttcccattacctgtcttcttccacaccctttctctcgccacctcttcccacccaaaccatgcgttcttgttcccacggcccccccagacggtcaacaccatcagttattcccaacgatctctccgtatcggcaactggcgtttttctagcatctcacaagacacgctacagcactcgtgtcgccgattgcattagcgtacccgcctcgtctgcacccagtggcaaactaatatcgagggatctcacccgaacactctcccttgatccggttcaacacacaagatccatccatctgtcgactggacctaccaccgnagcttaacccctccacgtcaccattcccgcatttctcacgacgactcctccctcaccaaccctacgaaatacaccacatcgcgagaaacaacaactcatacccaccactgcccctcatcactatcttcctcgtcttcaccgtagttcacaacctacctccactctctctcctccaacctcggttatcgactgcactcgcggttgcctcgtcccgccttaacctcgcgttcacccacacaccgacagctcctctggacacttaccgaatcgtccaatatcagccgctgccctataaagagcaccaccaccacatcactg

SEQ ID NO: 446065 - DNA, 1100 bp, Homo Sapiens
gctgggtggcgaattcggcacgagggacatcttccgccgggccaaagaggccaagggcggggtccctgaggaagcccggcctgccctgtgcccaggaccctctggcagccgctgccgtgcgcactctgagcccctagccctgtgtggagagacggcaccccgggacagcccccctgcctcggaggcacctgcctccgagcctggctatgtcaacgtacaccaagctgtactatgtgctggagtcctggagaggggacggagccggaggatgagttggaggacgacaagatctccctgcccttcgtggtgactgatcttcgtggccgcaacctgcggcccatgcgggagcggactgctgtccagggccagtacctgacagtggagcagctcacactagacttcgaatatgttatcaatgaggtcatccgccacgacgctacctggggccatcagttctgttctttcagcgactatgacatcgtcattctggaggtctgcccagaaaccaaccaggtcctcatcaacattggcctgctgctcctggccttcccgtcccccactgaggagggccagctccgaccaaagacctatcacaccagcctcaaggtggcatgggacctcaacacagggatcttcgagacagtcagtgtaggcgacctgactgaggtcaaagggcagaccagcggcagtgtctggagctcctaccgcaagagctgcgtggacatggtcatgaagtggctggtgccggagagcagcggccgctacgtcaacaggatgacccatgaagcgcttgcccaaaggggggctcccttgaagggtcctggggcggacagcgagcggatataccgtggaatccctgcttggaagggcccaaggccggcccccggaaaactgaactccaaaacttccctccgctgggccctggggaaccgggcccccctttccctgggggtggggcctccttcccttgggcccggttgggccccacccgaatgggatggaccgggccactaagggttaaacctcgcccgaaaacgggcggcttgggcacagggcacactcccccggtttgggccccctgtggggagtttgggaacacc

SEQ ID NO: 446066 - DNA, 879 bp, Homo Sapiens
  misc_feature (696)..(696): n is a, c, g, or t
gagccactgcacccggcctgggttctttattaaagcaatgaattcgggatgtcctggcttaactagattaagagggaatgaagcttcttctgaaggatcagtgttaccacagccatttccttgcattataccgtccttctcaggacgtctatgagaagccctgggcagcctggacagggactgccccatgagtgctggtggctcacttggggctttctgcaggtgaaggaagcagccctgggagcttcttcctttggcacacagtgggcttcagctgggactgcaccaatcctctgctaacagcaaccatccttggggggtccgagggagcagctgcgtgacttttcagcagtggctatggtcactcctgaggcctgggaagagggtcactgtccagcagagctggcctgctccagagtgatctggaccttgtgccccttaacacaagaaggcccgactccaaaggccaacactgtcctctaagtttccaggacactaaatggccacttggtcctggttaactcatttctaaacacaaaggggacaggtctgagaaagtgcgttctctaccctaccctgagctcatctgttctgaggacaaaaaggaacgtgtgtcccagctgggggcaaaggctgccatttccgggtttccttgctggggacccccatgtctgaagaactggccccgggcccttngcttctggtttccgacttcaggtttcttcccttgctcctggccaggacggggcttcaaagttcctttgggacgggtcaatcgacccaattgaaaaaacctggtgccgaatcttgccctgaggcccaaatcccttagggaaggctataaaatcgaaatctgtctcttttgttcctggtcaaaat

SEQ ID NO: 446067 - DNA, 468 bp, Homo Sapiens
  misc_feature (328)..(359): n is a, c, g, or t
tttggctttaaataaagcgtttattgattagtagaagcatgaacagtgtgcataatattttcaatacaatatcagggagggatgatgggaacccctcaaaaggcactagaggcgcagatcttcgggacaagagggaagagatgcgccagagaccagggctggggcagctgggggtccctgagtgccaggcgccaccacacgtcctgtgggtcaaggcccctcctctggggagcaggtctacggcacggaggatgcagggctgggaggggaccccacctcggggacccaaaaggagtccatttctgccctgccccccgcaaagcagcannnnnnnnnnnnnnnnnnnnnnnnnnnnnnnnatcccaggcctgggcccatcctggcttgacccttgtcccaggaacaagaagctgaggagggacgacaggcaggcccagagtgactcacaaggacatccaaagaagggac

SEQ ID NO: 446068 - DNA, 1092 bp, Homo Sapiens
  misc_feature (159)..(190): n is a, c, g, or t
tggggtccctgagtgccaggcgccaccacacgtcctgtggttcaaggcccctcctctggggagcagttctacggcacggaggatgcagggctgggaggggaccccacctcggggacccaaaaggagtccatttctgccctgccccccgcaaagcagcannnnnnnnnnnnnnnnnnnnnnnnnnnnnnnnatcccaggcctgggcccatcctggcttgacccttgtcccaggaacaagaagctgaggagggacgacagccaggcccagagtgactcacaaggacatccaaagaagggactggattttcagagggaggtgacttggtgactgagaggcagcagaggccaaagcctgaccccagaccctcagggagggcccacccaacctgtacccctcaggagccccgtccggctccccaggcaaccactgaggacctcggggtggcctgtagaagacagaacccagccccattacaccccttgctgccgctccatccccaaccaccagagggacagggaccagagggagacctgtgggccaggcgggcaggagggaggcaggctggggccgggagaaggggatacacaggcccataaaacctcaggctccccataaccctcactcagccatctcactcactcactcactcccagcatcccccaggatgggggtcccctccttcactcaggacacttcccctccgcagacctgcacgttctgggcctttctcatttcaccccaggcctgcccaccccatgaggcaccccctaaatctcatctctccacccagcacccccagcctggctccagcctgaagaccccctccttccccttccctccagaacagtggggaaagcgaggctcggtccacccctaactgcggaaggagcagggccaggagggcagcagtgctccctctcccggtcctggcccagccagctcctgggtgagtgggcgggaacccactgggctcacaccagctttcacctccctctctccaggaaggatggcagcacccatgaggggatggaggccacagaaggacaggaagggaggggctttccagatcccgggaatccggaccggaccag

SEQ ID NO: 446069 - DNA, 571 bp, Homo Sapiens
ttttttcttgtattctgcaactactttattattttcaaatgcaaactctttgcatttagtttgctattttacaattttacaaactaggtataaaagaccataaataaatgacataagttatgtgtacctaaagttcatgaagggaagaaaaataccttgacaaattaaaacaaaatagaaaatctatgtctaactccagaaatcactcaaattttggaacgtgtgaaccgaacaatgttctgttaatttctttttcagtatgaactaaattataatatgccttatacattctaatttgaaccacagtccttgcatattccaacatacttagagtgatacaaaaaataaacgcactcttcagtgtgtatcaatgcttgatgttgtttggagaatgttaaataagtgaaaatattgcttctagaactttcctttatgggtcagaatttaagtgtcttcagacaaatattgaggctatacgggtgtacggattaatacacatatccttcacagattgaatacaagaggtctcagaatgcacacaccagcagtgtagcgagcacaacctttcttt

SEQ ID NO: 446070 - DNA, 1037 bp, Homo Sapiens
  misc_feature (81)..(179): n is a, c, g, or t
  misc_feature (182)..(347): n is a, c, g, or t
  misc_feature (991)..(991): n is a, c, g, or t
gggccctccccgcccccccggtttccctcgtgtgtgcctttttttgcgccgggggggtccccccggcgcggttcttctccnnnnnnnnnnnnnnnnnnnnnnnnnnnnnnnnnnnnnnnnnnnnnnnnnnnnnnnnnnnnnnnnnnnnnnnnnnnnnnnnnnnnnnnnnnnnnnnnnnnggnnnnnnnnnnnnnnnnnnnnnnnnnnnnnnnnnnnnnnnnnnnnnnnnnnnnnnnnnnnnnnnnnnnnnnnnnnnnnnnnnnnnnnnnnnnnnnnnnnnnnnnnnnnnnnnnnnnnnnnnnnnnnnnnnnnnnnnnnnnnnnnnnnnnnnnnnnnnnnnnnnnnnngagcttttgtcactttattgttaaccaatgaatattatccaaaattagagatgtaattgtaacttaattgtacaacacaaaattatgctaatggtaaaagcctactgggatttaccaaatactcattagtgtatttttacattgactatatgaacatgtgctcgcgactgctaataagttataattggtttaatctctaagaaatccatattgcaaatggttcttgtttagaaaaattcacacagccttaaaaatggattaaatccattttaatcctaatctacaaatagatcataaacagcaaaatataactgataatttttcaatactgtatcaaactgatgtagctatggtagtgcacataattcaaaatgaggaaaattaacaaaaatccaatgaaagttcaggtttttatctattatgcaattgctttaaagtgaacatttatgtctcaaaacatgaatagtagggtccaccatccattcctttgatgtactgcaagtaggaatattctcttccataggattctgaagcatgtgcacaaccagtggtacaacagtcacttcaaggttaaccagctatgttttgtcctacaaagttcaaaaaatatattaaacgcaagctttcttttacataatgtctgnccagataaatccttttaaagtcagcaaaatcaaaaaagcacaagag

SEQ ID NO: 446071 - DNA, 465 bp, Homo Sapiens
  misc_feature (32)..(32): n is a, c, g, or t
  misc_feature (72)..(72): n is a, c, g, or t
ccaaggggtcctgtttggaaaaatttcacacngccttaaaaaagggattaaaaccccattttaaacccctantcctacaaagggaccataaacggcaaaatataactgataattttttcaatactgtatcaaactgatgtagcctatggtagtgcacataattcaaaatgaggaaaattaacaaaaatccaatgaaagttcaggtttttatctattatgcaattgctttaaagtgaacatttatgtctcaaaacatgaatagtagggtccaccatccattcctttgatgtactgcaagtaggaatattctcttccataggattctgaagcatgtgcacaaccatggtacaacagtcacttcaaggttaaccagctatgttttgtcctacaaagttcaaaaaatatattaaacgcaacctttcttttacataatgtctgcccagattaatccttttaaagtcagca

SEQ ID NO: 446072 - DNA, 164 bp, Homo Sapiens
agttaagcaaagaaaactttatttctgctacacgtaacaacatattgctctaaggaacaactactatattcgttttagcattaatgtatggattcaaaaatacatgtcagcaatccctgcttcccagacaaaacaatgctgtacacagactatcaggtatatgg

SEQ ID NO: 446073 - DNA, 536 bp, Homo Sapiens
aagattgagctaaagatttttatttccactttattttgaaataggccgggacagagaaggtttatgtaaatacatgtactctttacataagtgacagaaaagcagaaaagaaaaacaactcaaggcagttcagaggaggctattatgattatacaacctgcctctaaaggacttttaaaggcaatgggaataagaatttggaaaaaaattattaaaattcattgttttagtgaattcaattgagtccaaagaagtcaaaactttcaactgttcataggcaagatagcctatgaggtttggaaataagaaagaggaaaaataatggaatcaatttcattgggttgacatgaggcaggatggtatacagtgtgggaaggaaagaagacaggagaggtaatctattttacacaagtcaaacttgcaaaatgcacacacatcatattttaacaatttgtccctataaacaattatattagaaaatgtcctcccttccctgtttctctgaaaaacaaacaaacaggaagagaggcaagagc

SEQ ID NO: 446074 - DNA, 472 bp, Homo Sapiens
gttttgtaaagatatgttgttatagaaaggaatataatgctatttaatgttgaaaatgtaaactacctcaaagtagtagtttatgtgatgtccaacaggtgttgctatgtttttctcaaaaattttaaaatattgtgtggcacccatgttaatttgctaaggtgccctgctacacagtttgggaaccatggctgtaccaaaagaaacaaaatactcctctcctttgtattagaaatctgaactttgcatttcagctttggacctactgacactattttattatacaaattatttaaagcctaaaataaggaatatcctaatactattattttgggaatcagaaacatctaataaagctggactttatacatagaaataaagcttacaactttgagaaagtagccatattttccccaagatacgtcttaacacactgagtctatataagtggcgtaaaatacagagttatctt

SEQ ID NO: 446075 - DNA, 311 bp, Homo Sapiens
caaaaagctattctggggccctggccccctcggctcctgtacacagctcagcttgaactcgtgtagcctctcaaatgaagaaggtggcctgtttatttaggactttgtggaatagcaaatcacagtgctgtttttaatgcctgagagaatgcactttaggggtagacttataccttgaagtgaaggagctgggggaggaacgaagcattcttaagtagaagcattttaaaataaggcaggattgcttttaatgttaaactacaaaactgtacagcctattttagtgtggactattaaaacccttgcactgt

SEQ ID NO: 446076 - DNA, 577 bp, Homo Sapiens
  misc_feature (171)..(181): n is a, c, g, or t
aatcaatacatatttattgagtgcctactgtgtgccaggtgcaccacactagatgcaacggatactaacagtaaataagatacggtccctgccctcagagcttacatttcaacagtttaaagtgcatctcaggtatttcagataacagaagtaattctaccactctcaaannnnnnnnnnnaatgcaagacacaacacaatcataggccagagttataaaatacaatgttagaaagaaacgtttggtatcattcgtccagatcccattttacagaaaagaaactacaggagtggccatttgcacctatgttctgatttcaagtttggtgttttacccattgccaggcctctcataaaacaatattcagatttgccatgtatatatcaatatccaaacgctggtagtatacctgtgcagttgtctcctgctagacaaggaccatataatttatagcttatttaagtgtccactttctttatcccatcctattctttgtgataaaccagagggatcaggcttaaccaagtgctgaactttggggcaacttcatgccctaggattcaagatggccagcgg

SEQ ID NO: 446077 - DNA, 567 bp, Homo Sapiens
gacaataaggtgtgagcttttattgcttaattctctgaataattcaacgtagacgtcttaaaacagtttttgtttcaagacaaagatgggggatattggattgactgattactttcgcacctaaaactgaaaggaaaaaacttaatacaagaattggaattgaaaaccctagcaggatacctagtaggtaagggtttggatatatctgtatctgctcataagtaaaacagtgattgtgcaaatggtactcgcctaagtaccattaggttattggtattaaggtactaagtacaaggcaggtatcagccactggtttgaaaaaattcaaaccagtaaaagatgagtcacaaaactcctccagccaaacctggtaaatttggtttgcttctggcctgaaggcagtgtgaaagtgaaataagtttcacacttaaaactagctgacacctttatatcttgaccacctaaatttggtcatctacctggaaagtggaaattcacaagaacgtaccctaatattttaactggtctttagttgggacattctaagaggagggacattgttccaga

SEQ ID NO: 446078 - DNA, 712 bp, Homo Sapiens
gtacaagtttatatgtttcccttaaatctttcaaggcagatggttcttaaccctggctttacatctgagccacttttggggctctctaaacaattagttccccgggccccagcccagatgttatgagttacaagattatggtttagacatcttttactttttccaagctttgtgtgtgaccaagatacatactttactataaggctctaccaaattcatcttaaaattgacagctaaatactgtaattatatagtaggaagaaaattcttttctgaacataggagttcctaggatcacctaaagtagggctcctacctggaattctccagtgactgaaaactataactgggcaggatttgaatttacctacaaaaggagataaatggtttagttggacaaaagatcactcttcagtcttatcctttctgttcctcattgttacaaaagaaagtggatgcttcactcataactaggaatggtactgcctttcccagttctactgaaggggaagttaaagggccacaccctaggctttaggggatagaactgcacccagcagtgtcagcaattcctgaaacaacttggatgaaactgcgtgatgccaccaccttgacagggcatttctgagcagagaacagtccttgggagatataaacatgcagtaagctcagctgcgtggcaaggataaacaggaacccatccttagggcat

SEQ ID NO: 446079 - DNA, 519 bp, Homo Sapiens
  misc_feature (224)..(397): n is a, c, g, or t
  misc_feature (426)..(474): n is a, c, g, or t
attgttacccagagggcagtttatttgtgccttttaaaagtaaaatcaacatatagtgtgatgtacagatcttaagtgacccatcaaatgactattgacaagtacacacacttgtccacccaaatagaatcaagatagaaaacactgttagctgccttttattagctctgcaattttgggctggttatttaacttttctggattagttttcagagttaaaaaannnnnnnnnnnnnnnnnnnnnnnnnnnnnnnnnnnnnnnnnnnnnnnnnnnnnnnnnnnnnnnnnnnnnnnnnnnnnnnnnnnnnnnnnnnnnnnnnnnnnnnnnnnnnnnnnnnnnnnnnnnnnnnnnnnnnnnnnnnnnnnnnnnnnnnnnnnnnnnnnnnnnnnnnnnnnntcagccataacactactttttagcaacannnnnnnnnnnnnnnnnnnnnnnnnnnnnnnnnnnnnnnnnnnnnnnnntactaacatttcctaattatttgaaaatctgtaaatatacttttg

SEQ ID NO: 446080 - DNA, 485 bp, Homo Sapiens
ctttataattaatggttattgatttattacaattttataaattaatttactaatttacaaataactttctgagctcttacatgtgcaggcactgtgctaggcctgttacaaactctggagaactgagttatccccatatacagatgcagatactgaggccctttggggtgggtgacagctcagatcccacagctagtgtggcacaggcaggaacgaagcccggggtcttttgatggtagctgaaccgcacccagacacccacccgtgtctgccagcactccgtattggctgggaaacactccctgaatccaaaggtgcctgtttagtcagttaccagccagtggtcctcaagtgtccccacctgtaagatgggggcgccctgccccagtactgcagcctcgcgaccccctggagggtgggggacggtagctcaggcgagagtcttccggctgccccggggagggaggaaatgagccggcggcagg

SEQ ID NO: 446081 - DNA, 800 bp, Homo Sapiens
gcttccaggaattcaaaacaatttattaattttacacttagatattggtaatgcacacagagagaggaaatctaaaagttatttagagcacctccatgattttgtgttgaatgttataaattttattttaaaatagctcaaaactatcttgcattttaatattttaaaataaaatctataatatcaaaatcttgagcatttaaaaaactgtaaaaaccatgattcaagtcaataattctgtgctttgagatttgattggtaagcatgatttcatttgtctatgaagaatctactctgttcctttctggctttttcaatgctttcaaaagtgatcattcctcttggcagctgcaatttactcttttctgtttccagtatgtcctcagcttcacctttcattctttctaaaagggttccatagcccaagtcatactggtaggtgaggataaagcttaatggaacaatcgggaccaggaaggctggcttcttttttttaatcgctccagctgttaaagagatggctgcaaggccaaaaaaagttccaaaatatttgaggaattcccgagaccacgcaatctgcatggccatttgtctttccctcatttcactctgcatgatgagctgcctttccagctgaagtcgagcattcataagcatgaactccttttgatttttcatgctttcattcatagattttgaaaatataaaccccattttgacctctttctgggccttgctctcctgggtctggacttgtagtctgaatgtgttagaggacgctcccacttcagattggtaac

SEQ ID NO: 446082 - DNA, 491 bp, Homo Sapiens
  misc_feature (289)..(334): n is a, c, g, or t
  misc_feature (388)..(415): n is a, c, g, or t
aataatatgttttatttaacccaatacatacaaaagattatcattttgacacatcatcaatataaacattattgagatattttacattccttttttatactaagtctttgaagtccagtgtgtgttttatacctacaatatatctcaattcagatgctaaattttaccagaaataggtgatctatatttagatgtcataaaattcataattgaaaaaaataggtgtatatacccaaattattccaagcgtacttaacattttccaataattgagctgagaatcagcttnnnnnnnnnnnnnnnnnnnnnnnnnnnnnnnnnnnnnnnnnnnnnncagtctctcagttgtactaggagcacattttaggtgctcagtgaccataaggtnnnnnnnnnnnnnnnnnnnnnnnnnnnngtctaaaggacagaatgtagtgattattataatgtatttaatcaagtgagctatttgcttttcttcttcctcacag

SEQ ID NO: 446083 - DNA, 540 bp, Homo Sapiens
gcagcagaaaaagagtttaataatcacaatgccattgggcaaagagatgaaggaatcctcaagcttcacatctgtctgcttgaggggttctgggccagggtttttaaggggattgtggcgggtgaggttctggagaattggggttgtcaattgctcaggtcaaggaagattaaatcatcatgatgtgaaaacttcattcttctgtgagtcggctccttgctgggaccttcagatcaagtatttttctcacaagggaggatgattgtagaggagtttagagcctgcatcgtggttccaagttagcatcaccattcctggtccttccatctttctgcttagtcatatttaacttgtgtttatttcttcatgatcagaatatgtgtctttctcaactatcatatgtatgttcatcatgacatatgtgctcatgaactcggccaggaactctcgcgccatcttcctctcatcttcctcgcaccatatttcttggatctttgctatcacggaccaggagaccattttggagccacgggtggacca

SEQ ID NO: 446084 - DNA, 514 bp, Homo Sapiens
cattccatttttggataaaggtatccatacaagattaggtttattctattgaaaattttattaaaatccttcatttatcttccagatagtagattctattaaccaagttgcataaagagttctgattcccagaggtaagaactgagcctggctttctagttacatgtttactggtaaccccgtctttccctataacacttaagcatatttaaagaatataccctcccctgcctccagccaggattgtaagctcctcaagagcatggctgtgtcttttaacatcaaggctccaggtgagaagagttcctgctgtattataagtgcccaatatgcatttgtaagtgaagaaatctattctgtggtgtctgctttaatattaagagatggcttggcagagattactaagcagcttcattgtctaaaatggaactagattctgtgggtagcaagtccattggtgccactcacaggaggcctcaaagaaaccaaactgccccacaaatctgcgggagtc

SEQ ID NO: 446085 - DNA, 575 bp, Homo Sapiens
aggatgccgcgcgaaaactcacgaggccacttaacacaggctgcgtgggaaacaggggctccgcgactgcgctcagattaacggaaaaagacacccctctagagtccggcagcagcgggcgggcaccggcgccttctccacacaggagaatctcggcgatttacacccccaggctacgcagaaaaagcggcttcggaatccgccgcaagtcccctcctcgggtcgccggggaagtctggcctcccgcgtctgggtccccttcgggacgccccaaggccccgtttaccacggcgactccccgcctctcgcgccaccgaaccacggcgcggggccaccagggcgggcctcgcctcgtgcggaaaagtcgcctcgacgggcggcgcagacggcggaggcagggggacgtagtccacgcgcccagctcggagcgcagggccccgcgcccacgaccgcccgcgccctccacgtgccgcgggcaaagctcggagccggtgcgccgaggaatgggcagcgtggacaagagaggagggggcggcggcgcgctccgcccgggctcggtacctgagcgcggccgc

SEQ ID NO: 446086 - DNA, 1066 bp, Homo Sapiens
ttttttttgatgaactttcgttttattgatttttcagtacccaagtgtggcactgtaaggctgccacatacagccagtgacatgacaccaaaaggaccttccgagagtattattcttactttggatggaagacatcgcttaaccaaaaaacatttaaagatgctcccttgctttttataattcctaactgtaaaatataattttagtacagaacaaacaaattctccttggttggtcacatcattcattattgaaagggaaacttagtatcaaaagaaacaaaacactgaaataaataactaagtaatttactgaaaggtagttttgttgcattgcacacaactgaccgcagagaattctaaagctgatttttttcttaaaggatgaaaaactcatttgccatttttagtttcttgctaagtgatacatgctccttataaggaaaactactctgtgtaggcctgagtttaaaatgtaaatatctgtttatccagagtttgttaatctagagtacacaggtgtggaaaactggtggtgaaaagagggacctacccagccttcagggtggctgggcaggggccccatgttactggcctcagccaccagcagcgtcttcactccgcccaggtcagaaagcactgcctaaagccggagcttaggatgaacatgggcaaaaagcactggtacagttccatgtgtttctcttctactgtaatgtccccagagggattgtgaaatgtctgagaacatcccctggaggaggtttaaaagtgagaagcccatgatatggctatggaacataagcacttattgctggcatgtttctaccaagattgaacacaatgcttttctttgataaagctttgggcaagttcctagtccaatttcttctgctacaagtacacagaatttactgccttcttggtcagctcttggtatgaattcttctcttgaattaagatcctccctggcttgtctctcacccaccctgtatctcttagagaaagcacctggctgtcttcacctacgcgagaccttctctggaaatcccgggaattccggaccc

SEQ ID NO: 446087 - DNA, 1150 bp, Homo Sapiens
tttcattcaacactggctaggaatttattggctaacaaaatacaagtgatttcctggtccccaatccagattctccacctcttcttcacttctgactgatggaatgcataagaactaagatcttgagatgttatttgagggcagccttgcttgggtgtggtctatcatagctcctctgactaccgccgttgctacctggctgcaaatgattgttgtcaaggatagagggtccttcagaattcctgggagatcagaatcagtctctgaggtgtgggccagttgtcatggtgattattctgttgtagcatcactttatgaactaaattaaaaaaatcttcagtcacatctgttcagtaggagccatttcctttggagtcaggacacgcgagaagggcttcaaagtgttgcctacccttctattcctttgacttctcctccttttggtcaaatgactgattacagagatgattcccaaacccgtgatcagtatgcaaatgatgagaatggacgtcctggagcggtcagccttgcggacaactttgggagccttgcagcttctggttttgttgcctgataggtctttcccagaccaaaagtcattggccagggttcctttgtcgtcagttacaatcagctctgtaaaatccatgtcatccctggcaaagtcccgctggatgccacaccagtaccagcccgtgtcctctttggtcaggcaggacatagtgacaatgagctggttccctgtgtccctcagggccacatgattggtgctgttaggggagaaggcgatgatgttgcagtagtcacggaaatagcctcggcaccagtatttggggtgattcttgtagtgggcattgtagttgcagatggcagaagccgtgtccagcacaaagcttctcttgaccttttcatccatgaccatggcatctgaaatgagagccaaggagagtagaatgaagagccacatgactggaaggaagcaaactttcaactggaatgatagaatgcacccagggagcccaggaattctgaattgtgactcaggactcaagcagcccagtgtccagtctggctgctcttcccaggagctttcccacctggcctccttctgctcaatgggtcctgctggaatcccgggaattccggaccc

SEQ ID NO: 446088 - DNA, 1582 bp, Homo Sapiens
  misc_feature (501)..(580): n is a, c, g, or t
aaacactcaataaaaagctttattaaccttaatatgtttcttcatagcccttgtaaaaccctagccactcttttgcaataaagcattttcaaaaagtaccatcgatccggggttatctctgtgttcttttcctggaggatcctgagtgcgggctgtgtcgacatcacgtcattaatgtcttctgctccctgcactgtggtcaaaggcttttcaacgtagccttggatcccctgggtttgctgcagttcagtgcacctcaaagcacgataacaggaactgaaatggcagaaactgaaagcaaaataaaattcagccaggaaacacttagctgtttttccctttgctatcgtttcatgcttggagttctgagagcacaaggggccccctttacttccttgtttatgtgacaacaggggaaatctcatcatcctcccctcgccaggctaacttttatgaggttcagctttgtggttctctttaattctctggcattgtggactnnnnnnnnnnnnnnnnnnnnnnnnnnnnnnnnnnnnnnnnnnnnnnnnnnnnnnnnnnnnnnnnnnnnnnnnnnnnnnnnctattccaggacggttcaactatgatttttcggctcctcttctcaagcagctttccacacctggttccatgatctcttctggcacagtagctggtatttggcaaacataggtttcatcctgggatctcagggattgaaatctgtcctaggtgtgcaccagaaagtggtggcaagagatgaagcttcggaggaggctgacctcggccaggattcttaagtctcaaagtttcagctttctcacccctcaacggacatgaaatctacctatttgtaactcccagggaaagtaaatgagataatgtttggaagatatctagtctaccagctgctcaggcggggggcgaaggttctgttccctgtcccttctctatcaaatggctttaaaatcagaagaaagtattacgggtaggaaatgggactgcgaaaaaaatggaggctgattctggcctaaaggatacttatctctatacaaagggcttctgattcaaagaggccccgggattcaaaaacacaagcagagctacaccacgtggggtttgggacgagctgaattccggataaagatgcctgtaaagaggagttgatgcgaatccagaaaagcacttgaaatgcccaggctttgcatggcacattccccaggattttttcgcaccgcatttagaggtttagacggagtgagctcgaatcaggccaaaagccttaggttactcctgggcggcagcggggcagaggtcagatcaacaggtgtggaaggctgcgaggtgagggaagaagcaggtgtcggtggaggccccagttcctccggcccagaggctccaacgctgctattggtgttccagcagcgggcggaggggtcctgcccggcatctgggcgcgctgggcccagagcccgggaggaggcagacggaggcggcgggtcagcggcgggccagccccggtgggcttccgctcccctccgccggcccggtccggcccgccgcggaggatgcctggaggttgacg

SEQ ID NO: 446089 - DNA, 623 bp, Homo Sapiens
  misc_feature (563)..(563): n is a, c, g, or t
  misc_feature (584)..(584): n is a, c, g, or t
tttttttgcaaattgttagaaaaaaagtttatttacagtattttgcttttccataccaattctagtgagaagttcacattcttaaattcccagtcagcaactgcatttctcccctccaatgtcctctccatgacttatctctgaagtttcgagccaatgtttaaaatgtacactatttacaaatgaagtgtccaaatgccatattcccagctctccagtcagcagggggacccttctgaagtgttgtcatgtgctgggattcagaacttgaacaagttgataaagtcctggggtgaaagtgaaacggagcagctctctgggttattggcagtgcacggatggtcagtgcccttccaggaaaggatgtgacagtgtttgcagagctgaagggtatctccatactgctctttccttgggtaacatcggacaagtttgaaatacatcttcttccaatccagctgccctttgtctgacagaattaatcgtttgcggatctgccgctcggagaagtggtactggcagagtttcttccacagcagccggtcttcgctgagcacgtgcanggtcggggcagcctggcccangctgaccaggtcccgcccgtcgctcagcctctgcatgat

SEQ ID NO: 446090 - DNA, 476 bp, Homo Sapiens
  misc_feature (408)..(408): n is a, c, g, or t
tttggatgaggtccagagatgcctgctttatttcctacggggtgatcgcatttcaggctggtaacatcacataacaagtctaatcgccaactagttgtacgcctctgaactacaagtcaacaatccaattcagcaaggaacaacagtgtcaacagctcattagcgggtggggaccggattttccaaatcaatggtcttggctggcagagtgctgagtggggcctgagtgaatgaggctaaaacgcttggccgaagccgtccatccccaatcctgagaacagagttgtctgtttctctttcgggggtcaggtcagcccaagtaagaggccaacaacctacctgggccgatacaaggcgacacaaggcccacccgtggctgacgcgccctccaccctttatttcattccnggggcacagttccttccgttggtgcttaggaaaaggcgaggcttctggtaatttctcatctttgtagt

SEQ ID NO: 446091 - DNA, 608 bp, Homo Sapiens
atattttacaaataattttattatgaagagtggcggaagtagtatgtagatgccccataaagtataaaagagtctgctgataataaaatgattttatttttaacagctaaaataaattttaatgtgcattagaaaaactacacattcccaagtaaactcagtctttcagatattattcaggattaaacaaggccgccccgaggttaatccacttacacagaccacgtgtgagttacagccggggtattcaggcatgtccgtgaatattcccaacttgtagtaacagaaccttcaaatacgtcctctcaagcatggacagtagcctgggtgtcaccatgcctcttctgcgggatggatgggaaggtgaatatggattacgtgtatggattctaacgctgcatttgtatgcaccttgcaggaagattcgggaattcaagctgctgcctgggaagcaagatctaagcattggtttcttaccttagcgggggacttcaattgccacagacaggggcagaccacgacttttaccccctccttctgcagcatggattttaagagacaaaacttataaggctgtttaaaatggtaaatcatgttagagacgttct

SEQ ID NO: 446092 - DNA, 495 bp, Homo Sapiens
tgttgagcatgaaatctctgctcccttaaaaaattattctcggaaaaagatattccccccggttttcccggttttggagccgcctctccttagggcctggtcgggggaggaaaagttgtaaacaaattgccaccttaaattcgcggtgcgagtctgcggagctgccgggttcattgtgtttacgaggctcgctgaaatgtgtggaatccagggaaggcgagcacccagacgggggcccgccggggccgcggccagcgccggggaaatgccgcgccggggagcagcctgcgccggcctgagcccttccctttgcactcggctgttttttacgtttaaccagaaaggaagggagaggagggaaagatccatgtggctgccctcttccgatcacaaatattgtcgtaagttgcagctggctgccccacttcctaattcagctcacacagcctctccccacgctatggaaatgcgtcgggagtgaactccggcggccgc

SEQ ID NO: 446093 - DNA, 541 bp, Homo Sapiens
  misc_feature (306)..(336): n is a, c, g, or t
ctacaagaaatgaacacatagatgctttttaagtgtcattagttatcggaatcaaagaatttgaggtggtgacaactggggattatctgtaactccccaaatttactgttcttgaatgacattctcaaactatttattaatgagttagtctcatccctgctttctgtttcctctctctgcatcttctcttggcataggaagttattttactcatgctgtgttttttaatataagctttacaaaaaaagatgcattcccttcctgttcacactcttaccatgtttttgttcttccttaagaatgatnnnnnnnnnnnnnnnnnnnnnnnnnnnnnnnaagtgtaacatcatgggttttctttcttcacttgtaaagttttatctagaaatacttttacaggttatgttgaggtacacaaagataatgttctaagattgtgtattggatttggatttgtgtgtgtgtgtttaaagcatttgataaggtttaaatgttttttatacagagatttttgttcattaaactcaatctgcatcatgga

SEQ ID NO: 446094 - DNA, 565 bp, Homo Sapiens
aaccctcatttattttttatttttctgaacctacggattatactaaaacttttatttctagtaagtccccaagtgataccaatgctgctggtccaggaccacacactttaagaaccacgggcctacattaagaaaacggcaggcagagatcctcagacacaaggtcaactctccactaacaccttggtggaagagcagatggacagtcgggggaagaagagaagaaagtgctcatataaagtccaattagctaggggcagagtggagttactgaaaggaagacttagtcctcacggtcattcaaagaaccagactgacaatctttgccatcttcggtggcttccaaacttatcctggatacgaccgtccaaccagcagctgggagaagagaatggaggatcatgcaagaaatgtttatggggcaagcctggattcctatgcccacatttcaccgcctacgacttagtcatatgttctcacagagatgctgggagtagggaaatgtccctggctggattgccacatcttgacaacatatcttcaaagagcaagaatctttggtaga

SEQ ID NO: 446095 - DNA, 276 bp, Homo Sapiens
  misc_feature (183)..(183): n is a, c, g, or t
  misc_feature (263)..(263): n is a, c, g, or t
tttttttctttctttacaattttatttacaaaatgtattaaaactttgtacaatacctcatggcaatgaggctctgtagtttatgcccacacatgcaaattacgcttttatagccattagtttgcttggcaatttttctgttcactgaagtacagctttaacaacaaaaagaaaagaattggngaaaaaatcctcaagtgactactgccaaactcccatagcttgaagttagtagcagaaatttgaagcaatcaacttttttnttaaacatgcaag

SEQ ID NO: 446096 - DNA, 323 bp, Homo Sapiens
tgtatccagcctaaatgttcctctttttataaggatagccgtcatattgggattagggcccacactaacgacctcattctaccttgggttacccctggaaggaaccctatctccaaatggcagtcacattctgagggtactgtggggtcagggacactgatatatctctttgggggacacaacttcataacaccaatagaatcaccattgagggctgttcttccttaggggcctcaggctgctggggagccctgggcagggtgggggcagagggacccacacaagagcagagactgctcttcctgggcaggccgggtctctgg

SEQ ID NO: 446097 - DNA, 413 bp, Homo Sapiens
gtaagttaatgtatataaaaatggcttcggtcaaaatatctctgagttctgtgtattttcagtcaaaactttaaacctgtagaatcaatttaagtgttggaaaaaatttgtctgaaacatttcataatttgtttccagcatgaggtatctaaggatttagaccagaggtctagattaatactctatttttacatttaaaccttttattataagtcttacataaaccatttttgttactctcttccacatgttactggataaattgtttagtggaaaataggctttttaatcatgaatatgatgacaatcagttatacagttataaaattaaaagtttgaaaagcaatattgtatatttttatctatataaaataactaaaatgtatctaagaataataaaatcacgttaaacc

SEQ ID NO: 446098 - DNA, 469 bp, Homo Sapiens
cagttttttaagatttatttcaagtgttgtgcaaagagggcttatgcaattcttcagaccctatttattttatttatttatttatgtacattcttctggaaaggattactaaagccaaactaagaaaagtatgtaagtgatggattatcaggcgcccttgtttgaggtcagagtaaacagacagactcccgataggttggtttaaaagtagatacctagattgcctggaagcattcaactcagctttgtgggagcatttggtcaaacttccaagtcattgttttttttgtgtgtgttcattttgttacttttccagttcttcctttgttctgtttatgtgccaatgtgcacagagaagatcaacatccccattggcccatgcggcggcatgtgtctttcagtcaagagacgctgtgaacccgtcctgaaggaatttggatttgccgtgccagagagtctgacctgcagc

SEQ ID NO: 446099 - DNA, 507 bp, Homo Sapiens
cggggccgccttttgttggcgccacgcggcggggggaggggcggcggcctggcccgggtcggggctggtgcggcccgcggactgtcgccgctgcgttcgcgggccgggcctggcgctgccactcgcgctggagtttgcgggagtttgttgggtcgactttggcgccgccccggggccgctcgcgcgctgccagggccagggccagggccggagccggcgcaggggcgggcggatggcccggaagagggaaagcgctcggacccggggcccggcggcgtcttgggccgcgccgggggctgcgtgggcggagttggcgcgagccggggcccggacctccctcctccgcctctcccgggggcggagtcacggtctgaaccctgggcgggcttggtccccggaaacatcgagttccttgaaacgagttctcaggagttggtggagacgctggccctttgctacatggttgtagaacacatgaatttccagttatgagtggttaggtcccat

SEQ ID NO: 446100 - DNA, 495 bp, Homo Sapiens
  misc_feature (101)..(101): n is a, c, g, or t
agcctggggggcgctgggcaagggacaggcaaccgggcgataggaaaggcaaaagttcacacagaaaagcccccccaccgcaggccgagctccggctgtcntggggcctggcccaccccactgcgcctagcgcagcccgcactccacgccctgcagcttctcctgctccagggcgcgcacgaggtcctgcacgaagcgcatctcggaggctacttgcttggccagcgcctcgtagcggttctccaggcggctgaagcggcgcttgaggccgctggtccccagcagcgcgcccttggcctcctcctgcgcctgccgcttgagcgcctcggtcttgagcagctcctgccgtagcctccgcaggtcctggcccaggctgtcgctctcctcgcggtaccaggcctccttctcctcgtagatggcggccagcgcctccacgtcctcgtggcagagccgccggctgcgctgcagctcgcgcaggccctcctcggcggccgc

SEQ ID NO: 446101 - DNA, 975 bp, Homo Sapiens
ttgagttaggggggggtaaactgtctgggagctggcgaactctggaattgttctgatgctgccgctggagagtctctggagcagccctttcttgggcggttccggagggtgttttctgttcagatctgggcgggagggtaccattagggtccaaacacgttcagttcccttaaagcattctgtttctatcatctcgttttgccatgggatggacacagagcccgtggagaacttggagtagaagtcgtcgtctgtgtggtccagattgacgcccttcacagtggagaactgctcgatgtccagcacgtccttacagtacacagcgcgggggtctggaacgaagggagggtccaacatcccggcttctaagcgcttgaagttcatgttcctgaagaaggggtgtctcttgacctctgcagccccctcctcctggcagcccagcctctgcttcgcatctttcgtgagcagcatcttgcagatggacttggcctcctcggagaacttgtgggagtacacctcctccgtctccaggacccggcggtccacctcctcccgcttcaccttctccttgcggccgcggaacggcgactggccctcgatcatctcatagatgaggcagccaaggccccagtagtcggggctcaggccgtacctctggttgttcaggacctctggagccatgtagccaacagtgcccacccggccgcggatcaggtctccctcggggatcttcacagccaagcccaggtctgagatcctaatgtggccataatcatctaacaggatgttttcaggtttcagatctcggtagacggtgttctcacggtggaggtcttctaagccgcagaggatctctgccgcataaaacaaggcccgctcctcctcgaagccagggttgcccatgttgtagatgtggaacttcaggtcaccccccattcatgcctcgtgccgaattcgccacccaggcctcgctcc

SEQ ID NO: 446102 - DNA, 1183 bp, Homo Sapiens
  misc_feature (86)..(86): n is a, c, g, or t
  misc_feature (234)..(234): n is a, c, g, or t
ggactttgccctcttcggaagaacttgtgggaagtacacctccctccgtttttccccagacccgggcggtcccacctcctcccggnttcactttctccttgcggccgcggaacggcgactggccctcgatcatctcatagatgagggcagcccaaggccccagtagtcgggggctcaggccgttacctctggttgttcagggacctctggagccatgtagccaacagtgcccancccggccgcggatcaggtctccctcggggatcttcacagccaagcccaggtctgagatcctaatgtggccataatcatctaaccaggatgttttcaggtttcagatctcggtagacggtgttctcacggtggaggtcttctaaagccgcagaggatctctgccgcataaaacaaggcccgctcctcctcgaagccagggttgcccatgttgtagatgtggaacttcaggtcacccccattcatgatggtcaggaccaagcacagtgcatccttggtctcgtaggcataggccaggttgaccacaaactgactgttgaccttctcgaggatctgcttctcattgagggccatggactcccctttcctctttttgatcctcttcttctccaagcgcttgcaggcatacattttacccgtggcccgaacctggcaggcacagacctccccgaagcccccttttcctagcactcgatactgcctgaaagtgtttttggtcaccggttgcctttccaaccacttccactggagaaagcggtcaaaaaacatgctgtccagatattcgtggaatggttctcccctcaggtactcgtggacagactgtgcacaggcagaaaagagttctttgcacggcttctgtaggagcttctcctccgtctgggagaccaggtcttggccaacttgggctatgaaaacaggggactttggggtgaggtacttggtcataatttccttccctttctctcccagtttttcatctggagtaacttcatattctgccacggagtccaggaactgaatgtaacactccagcccaggcctggtttcacaaaactgccggaaaagcagcctcccgattggctgcttgtcacataaactgcagtaatctctgtctatggtccttcggaggtcttcacctcgtgccgaattcgccacccaggcctcgctcttt

SEQ ID NO: 446103 - DNA, 494 bp, Homo Sapiens
tttttttgaagcttgttgctgctttattgaaacttcctccctgtcgcacacaaagcaattacacaagggggtattgccagggagctcttgcagagccttctccctctgtaccccccgacagtccccagagaccctgcctccgtggcctccacctctgggtcagctccctggaggaccccgacacacagggaagcaggcacaggagggctgttggggccaaacctccccagctgccacaaccgccatgaccccagtggcagggtcagtgcccacaagggggttgcctgctttgactgaactaacctgtgggtttagtccaacgaacagatgtgcctgatttcagggctgaatttttgcttgaccacaagcctcgggcagaacagattcgcctatgactgaatcgactgaatggatggccagcgacagcctggcctgggaatggactggcagctcatcactaaaatgactcctttcatggaatccactgttatgca

SEQ ID NO: 446104 - DNA, 752 bp, Homo Sapiens
ttccataggaaaaaaatattttatttttttaagaacaaattcagtttgaaacagatgtggaatgtgacttcacggatttcattttctggggctaactgcaatgtgaaactaaagcagatttaaaacctatgacaggctattaaaataaaacaaagaaagaaaaaaatatttataactcaggcataatactgtgttacttacaaattggacaacgaaattttaaataaatattcatggtacatatttacggcacaaatatgcagcattttgggcaaccttttataccattttttcctcattacagtgcaaaggggaatgacactgccgttaaacaagctgtagctaaatacattgcaaaattcagattttatacaaaacatcttgcttagactttataaaaaaccaacattgctctatgtacacaatctgggtaagacaagccatttctttcttgttttcatgtgtatttttattaaaaaggtgaataaggctactgtaacaccccaaatccatagacagtaaaatctgaacctatttacagcatcttcactgaaacatgatggtgcaaattccacagtcgggtgaccagggacgatcatacaagcaaggcatttacagtaactttccaaagctaaaccaacttcaaacaaagggacagttggtagattgtcatattctgcaccagacacaaaacagacgcacagaacacttttcaattggttgcagggaactcttttatcaattcatctgat

SEQ ID NO: 446105 - DNA, 850 bp, Homo Sapiens
ccgtgcgaatatacgtccgacgtatatgactttatttgtctcctttcaggagcctcacagacatatccaggtaaaaagatcgttaaataaatgccttcagccatcgcaatgcaaaaataaatatcaatcctccagacgcagtagcagccgcgctgcgcccaaagtcccaacggccacgcctaacaattataaaagtgttcagcgagagtgttggcgtgagtgtgaatgggtgtgcgctggggggcacggtggagcggtgtgcaaaatcggagttgcaaaccatcggacaagggcatggagtggctacccgccgccgactcagcgcgggcgcgcctccccgcacacactcacagcagagttcgcactgggaagagttaaaaaataaacatttacaaggacgaggaaagcggccccgctcccggcgctcccgggccagggcgagcgcggcgaggggcgcaccgaccggttcgcagcggggcgggagtccgagcgcgcgaggagcggcggtcccgggtccttgcgggtcccccgggagcagggcgcgggcactctcggggttcacacgccggtccccgcgcggaccgcggacgcgcgcgtccgccccgcgggcggcgccccttacagggccgagtcggagtcgctggagtccaggctgttcctcagtttgcagctgctgagctgctcccgctgcagcgacaggctctgcgtgctgcggcgcaggcactccaggctctgcaggaacgacttcttggccttctcctcctccatgggggacaccccctcctcctccacctcctggatctcgtcgaaggtcaccggctgcgtcttgaagcgagactggcgcggccgc

SEQ ID NO: 446106 - DNA, 571 bp, Homo Sapiens
  misc_feature (285)..(339): n is a, c, g, or t
ccatcggacaagggcatggagtggctacccgccgccgactcagcgcgggcgcgcctccccgcacacactcacagcagagttcgcactgggaagagttaaaaaataaacatttacaaggacgaggaaagcggccccgctcccggcgctcccgggccagggcgagcgcggcgaggggcgcaccgaccggttcgcagcggggcgggagtccgagcgcgcgaggagcggcggtcccgggtccttgcgggtcccccgggagcagggcgcgggcactctcggggttcacannnnnnnnnnnnnnnnnnnnnnnnnnnnnnnnnnnnnnnnnnnnnnnnnnnnnnnttacagggccgagtcggagtcgctggagtccaggctgttcctcagtttgcagctgctgagctgctcccgctgcagcgacaggctctgcgtgctgcggcgcaggcactccaggctctgcaggaacgacttcttggccttctcctcctccatgggggacaccccctcctcctccacctcctggatctcgtcgaaggtcaccggctgcgtcttgaagcgagactggcgcggccgc

SEQ ID NO: 446107 - DNA, 437 bp, Homo Sapiens
  misc_feature (74)..(236): n is a, c, g, or t
ttttttttatagtttaatgtattttaatagcaaacttacaggaacagaaagtaaaatggggttgctgaggctgnnnnnnnnnnnnnnnnnnnnnnnnnnnnnnnnnnnnnnnnnnnnnnnnnnnnnnnnnnnnnnnnnnnnnnnnnnnnnnnnnnnnnnnnnnnnnnnnnnnnnnnnnnnnnnnnnnnnnnnnnnnnnnnnnnnnnnnnnnnnnnnnnnnnnnnnnnnnnnnnnnnacaaaaatttcttaaagtagcaagaaataaataaaattgtaaaaacctgatgttagtggctatgtagggaaatggatatcatatactcacaacaggaagtgtagctttctggagtcatttgagtctgtgaagagagttataaaaccataagtgctcactgccgaggcaatgccactccaggagatacatgtgtacactaaa

SEQ ID NO: 446108 - DNA, 475 bp, Homo Sapiens
agtgtgtatagttcaatgtcatttcatcacgtaggtagatcagggtgaccacaactgtggtcaaagatctcccttgagcaatgcctttatagtcacacctacaccctcttctccctaccatccctaattcctggcaaccactaatctggtctccaaaaattttgtcctttcaagaatgttatataaaggcaattacaccctttaggtcaaaatgggctttttcactcagcataatgcccttgagatccatccaagttgttgggtttatcaagagtttattccttcttgttgctgagtagtattccatggtgtggatgtactggcttgtttaacaactcacctgttgaaggacatctgggctctttccagttttccactattgcaaataaagctgctatgaacaattatgtaagggtttctgtgcagacctaagttttcattgctttgggataagtgtccagaggtgcaactacca

SEQ ID NO: 446109 - DNA, 1251 bp, Homo Sapiens
  misc_feature (67)..(75): n is a, c, g, or t
gacgtgttacctgctatttttattccccatttgccatcttctgattgggggttgatgttttacagannnnnnnnncaaaggctttatttcagtttctgaggttaggatgcccctgtgcccctcgctccacacctgggcaggtctaaacttccttccaggatggcctccacacacagcctcccacctggggtcacctggcttcctgggggacccgcaagggaggggcagggagcagcagtccgggtgcggggatcgggggacctcggcgggggcatccacaggggctgcaagacctctggtcagcatggcgtgggtggggagagcgtttctccctggggtcctgagccagtgactcctgttaggacctttgtcccacctccgcctggtggaccggcagggacctggtctagccagtcctgcagcctccattcccccacctgcccctccccgctctgtggtgtggctgcccaggagagaaggggcccagggaagggaggtctccggcagggttggggagtgacaggccagggcagcagggctgagccggagctgctcacagctgccaggcactggtcatcatggccacgaactcctcatccgtgttcatggaggcactcacgccgctgtagtagtcctggaattccgccagtgtgacctgcccgtccttctcagaggagtcgaagttgtccaggaagcggcgcagcacctcgtcctcggtccactccccactgcgcaccttggggtgggcacggccactgtacaccccgcggaggtcgtccaccgtcacgacgccgtccccactgcggtccagcttggcaaatgcagctgcgatgacagcctcccgggcctgggacatggggggccgcagcgcccgaaggaactcctccagatccagcgtcccgctgccattgcggtcccacttcctgcacacaccctctgcctccgcctggtccagcaccagcccgagtttggccagaccctgccggaactcatcagcgtccagggatctgctcccgtcccggtctagttggcggaaaaacctggccaggccctggatgcccgaggccccgcgggacaggcactgtgcccggagtttctccatggtggcatccacggcgtccatgcttggtctgggctctgggcagctggcctgcgtctgtcccagagtcctgcctgcggggccttgtgttaagctgtgttgtgcctgcctcgtgccgaattacacacccagcctcgtacctagccgtatgg

SEQ ID NO: 446110 - DNA, 434 bp, Homo Sapiens
catctctttttcacatcacatttacattctggaaatcatttattaatccaactgggttacttttgaagagttttatggttagactaatatataacaaattgccaatcgttacaggtattacagagaacccagcaggcccctacggcagagaacagataaagagcttatagactggttgcggctgcaaggagctgatgcaaagacaattgaaaaggtaaatttacaacaaagaaattcttatgctgttgttacacagctgctcagctcttaaggatctgatctttgtttcagattgttgaagagggttatacactttcggatattcttaatgagatcactaagggaagatctaaggataccttcgactacggtaagagcctcaaaacagtttgtattaagggggatacaactttttatgtgtggaatatggcttc

SEQ ID NO: 446111 - DNA, 228 bp, Homo Sapiens
ttttacaacattgaagtaattatttaatgacacaggaaaataacatgtctatgaaacaagctggttacaagtagtaggtagatgacttaatttttgataaaaaaattaaaaagcatgaacatgcatataaaaattagattatgtacaaaataccaacagtatttacttctgctcagtaattaaatattcttccctttgtttttgtcttttaaaaaacattatttctgg

SEQ ID NO: 446112 - DNA, 351 bp, Homo Sapiens
  misc_feature (321)..(321): n is a, c, g, or t
tttcagagaaaacatcattgcatttttagggggaaaactacaaatttctaatttagctgcagaaaaaataattagagaacacaaataaaatgtactagtgaatacatgcttctttagacccaaacaaaaactatttgcaacgtaattaaaacaggtaagtgctgtgaaaaatagaaacatggtgacatagaagagcctgacgggggaacctaaccgagtcctgagagtgtaagccagcttccccaaggaagtgacacttcaaccgagatctgacggacagcagtctataaatgaagtagagaaaggcagtgctgagggcanagggcacctgcatgggcagaggctgggagc

SEQ ID NO: 446113 - DNA, 693 bp, Homo Sapiens
ctattaaaaactcacattgatttattagaatatgaaaaagattcagtttcttctgtacaggcagcagagtggcagcagctgcggtggcttggtacgtggttgtcgatgtcacccttgcatggtgactcctgcccaaacagcacttgcatggagaggaggatggacagatgggccgaggacccatggcccagtcccctgcaaaaagggacactctgactattgcacaatcctgggggagtgccccagggacaaggggaaggagtgtgtgtgggcaaaggtctctgggggcccaggattctgcccaatccaccagccccaggggacaggggatcctcaggggaggccttctcccccccaccgcctccacaatgggctccacagcaggcagggtgtggtacacacaagggaaaggttccaggggccaaacccagggtgggggaagtaagagcaggccagcaggactggaggtcaggcccaagagctaggcaggtgccaagaggccagcatctgtgaggctggagagactcttgattaggagtgggagttacttctgatgtcacagtcttcgagcaacagttaagagcccagcaggcagagagacgtgggggaggggttggacagacaggcacagatgaggaagggtagttctgaagagttgagctaggggatagccgaacagaaggggtagagtgc

SEQ ID NO: 446114 - DNA, 590 bp, Homo Sapiens
ttttgccatagttgcttttatttttccctaaaaaaaagagtccattttcttatacagacattcatttatgtaagacccacatcaggctttttctaaagtgccaaaacccgtgcaatccccataacttcaggtgagaattataatgggcagaagaatgtatcaactaaaatactcaaggccatctcaaatcctgaagagtccctggtttctgtgacaagggggaattttgctagcaaataagtaaaatccaggtaaatatgctctaaatcttcatcttcaggttcttaattctttaacatattgtatcagattttgtattcaaatctaattatattttgtaaaaaatgttttaaaaattcctagataaatttcattcattaattttctattttattctctatacccttctttgttttgtctgtcttcttttctttccacaaattcccaaggacaatccctaaaaaaactattagtcccagtgttcggttggagataaatttattccaacaatcctcaggtctgtggatgtctagagtgtaaatctggtgagtcagatggggctctacagcacccagggcaacgtagtagga

SEQ ID NO: 446115 - DNA, 951 bp, Homo Sapiens
ggtgcacatgccttgttatgcccagtactcaggtaggcggaggctgcggttggagccaagactgtacctctcagcggtgggcaactaagcatatagccctgtcttccaagataagagcgggggaaagatcgggctgcgcaccctgaaggaaagagacaggagggtgaagttcaggaagacaagatggaaacattgttatatccagatctgggtggtgcctgcacagagcacacatacatacttgcactgataagtatgcttaagacctgtgccattgccttatataacctacacctccatgtaaccctaacacagtccacaagctccctgtttgctatcctttattaaagggcccacatcctcatgggactccagccaaaccagtcaggtcccccaaatatagcaggaggcctggaaggggaggggaatgacttatgatcctaccatgcctcccaagaaacagaaaccaccacagacagagacagacagacggacaggggctggggagaacttgcctcactctcagtcctctcccactttcccccacttgaaaagaaagtcaaacactggctacgcagcaccccagccccccaccccacccatagcagcgtttgtgggacacaccccctttgcaaggggtggccccgaggcagcttcctatctctctcttcactttggtttgctcctggcaactccgtgccctcttcctttcctcagcctccggctcggtctcccccttgtcttctatcacctactcggaccttctctctcatctcctgggcctccctgccccagcacttctggggaagcagcgtctcgggcgtcttcccttctcctagcaaggggccccaaccaggccctctgcccaggatgtgggactcacacagctgccccactctccttgaggtcaggggcagaacgctgccgtctcattcgtgggggagtagtgta

SEQ ID NO: 446116 - DNA, 886 bp, Homo Sapiens
ttttttttaagctgaaaatcacaggctgatagctccattttaattaatattctactattcacacttctattggtttttaaagatggttttatataaggtatttcataattacaattttaaaatgcagtctgtattcacattaatgaacaatttcaactaatttttgacaagggaaaaatacacatactttgctttactctcatataaaacactgattatttggctgtagtaatccagatttaagctgttgacgagtcttcgtaaaggacttcatctaccttcatgtcgttttcattcactgggacctggaggcaaatctgttctttgaaagccaacgccagggtgtagggcttcacttcctgatgctgcaaacagcgcttcagataggcatcatagtagcccttgcccctccccagtcggttgccatgtttgtcaaacccaaggcctggcatgaagatgagatcaagtccccctgtggacaaggcctcctcccgaacatcaccctcaccaggctgagggatattccaggatgttttgggaagtaaagaaatttcctctggtgattctattctcaccatatccatgtgattgctctggaaccggtaccgagggatgaagcagattttgcctcgttggaaaatgtccttgatgatctcttctgtctcaatttcatcttgcatgctcagaaagatggaaattcttttggacttttgatactcactgtgggcaatcaccttctggctcagtacgcgggactggcgtagccgctcctcggcactcatcgcccgcagacgctgcttcagctctccccgcaggctccgcttggcgctgctcaccgctgccgccgccatctcacgcccaagccgagtccagtcccgccctcccc

SEQ ID NO: 446117 - DNA, 840 bp, Homo Sapiens
  misc_feature (796)..(796): n is a, c, g, or t
ataattagaggtcggatttggatttcccgttggggtaagtgccccggaaagggcccttcgaaaaccccttttggggaattgttcaggaaacccctcggtttgccgcccgggcgtttttttagtgggggagaaatccaaagccctttggccaaggccagggatctccctaggaaaacaggtaagggccaaggtccaggttacctaatggggcccgcgcggccaaaacgaaatgggtctagaaagtttttggaggggccgaggcgggcccgacaaggtttggtggatggaaaggtggttggtcttgctttaacattttgaaatttattttggtttctgttcaacaaaaccaaaccacattgggatggcatttacagaagctcagaaaaacattatgcactgaaaaatacttctcattagaccacaacaagctttaaaaaaataaaattaagtaattatagttaagttacaaaaagctgaaagtataaaacattgtggaaacagtgaccatctattaactgggaaaacacaaaagaagagaaacaatttcaaccattaatcatttatcaaacatgaagtctggtgcattaaaggaatatctatcagagggtgaggggctggcttactggcagtttgacatactatacagctcagacccaaacccttcacagagagactctaagtgtacatctgacttgcagaactagacgagttgagtcactgttagctctgggtataccgttaaattaaacctcaaaatctctccccagggctcttgctcaagcaagtcacgccaatnccaccttcttacaggggtttcaggaaatggctcaggagccagga

SEQ ID NO: 446118 - DNA, 980 bp, Homo Sapiens
tttcaatttgttaaatgaaattgtattttgcccacggctgcttctgtttgatccctggggacagaggggagcaagggaggggagtggcagggggaggcccaggtgtggggctggagggggtactggcggcagcgggaggcagtaggcttgggcaggggaggagtgcgctgcgcctcaggaggcaaaggtgccccagcctgggcaggccctggaccagcccaagctgagcagcgccgcccctggctggctctcagagcctgggctaacgtggagcccgccacgtcgcttggcactcagaggcccctgcttcttgttggctcacgtaggccacgctcaacacgtagcctgtgccacacccttcgaggcccgggtaggagggcagaggggctggtctgggctcttggtggacccctgctggtgctgcctgcctcctcctcccccacgtgggactcaagccaagggtcagaggcgcttccgctgctgggagcaagggaggagagtaggggtggagcagcctcccctctgcgtgggaacccggcctgtgtaagcagtagcgggacagggtggccggagtgatgccttggggcctgcggggaggagtggaagaagtggatgggctggctggctgtggcttgcatggcactggcagcccagcctggcttagaagtctggccggtccttcttcagcttcttatagtcagtggaaactgcaaggaacttgtattggtcattggggctcaggcggttccagggctccgggttgttctttctgtcccagcagacgtcggggctgcgaagggcgagtcgcagcaagtaaagcgcagcgctgcccatgcccaggcagattaagccgatcatcgggatgatccccggatgtcttttgatctgccggtagaagcgggccccaagactggctcctgccatatcgttgttttcccagtctggtcctctgcagtggctctgtcctctccctcctcctg

SEQ ID NO: 446119 - DNA, 818 bp, Homo Sapiens
ttttttcagtttcaacacattttattatatttctgtatgcattactctcaaaacatcacaagaaatgatcaaaccacttaaaaccttcaaataaaaaatctgaaacagtttatgcccacaattgtacatatttatagttaagaaacattctttataaatattgtttcctctgtagcaagttaataccataatttaattacaaatggataaatatggtaacgggtatttacagaaggaagggtgttattacggaaaaagctaacggcacgacgtttatttttcccccacaatctttcatacaggacctaacaaattgaacttgcaaaagcactaaaacatcacatgtaaacccagctaacagaaaaatacattcacaagcgttgttggtggtggtgtgtatgtgtgtgctatgggtcaatgtgctgaagaaacagaagggagactttggcacggctcattttttccagtctatagttacatgaagtttacaatcaggttgcctcataaaaaggaacacaatattcaataccacaatacaaaataaaccattttcttccacattacttaaaaagaaaccgggtaaactaaaaagagaaaagagaaagcccatcactttagggaagggaaggggcggaaggcggggaggaacgcaatccggagttttacaaatggacaaacttctatacaccaaaaagcctttaaaaccacctcggaggagaaaggaggagtccgctatgtacacagtttgtcagaagactgggaacagggtgggcaagaacgtgggcatggagattagcagggaggtttggttcaacatt

SEQ ID NO: 446120 - DNA, 442 bp, Homo Sapiens
  misc_feature (424)..(424): n is a, c, g, or t
ttttttttgcagtttcaacacattttattatatttctgtatgcattactctcaaaacatcacaagaaatgatcaaaccacttaaaaccttcaaataaaaaatctgaaacagtttatgcccacaattgtacatatttatagttaagaaacattctttataaatattgtttcctctgtagcaagttaataccataatttaattacaaatggataaatatggtaacgggtatttacagaaggaagggtgttattacggaaaaagctaacggcacgacgtttatttttcccccacaatctttcatacagggaactaacaaattggaacttggcaaaagcactaaaacatccacatgttaaacccaggcttaacaggaaaaatacatttcacaggcgttgttgggtgggtgggtgtgtatgtgtgtgcnttggggtccatgtgctgg

SEQ ID NO: 446121 - DNA, 562 bp, Homo Sapiens
tttttagtgggaagtaaaatgtttgtgatttattcctttaaagcaataatgtcgccaaataggatgttcattaaattgctaaaattgtaatgcatggatttaaatctgctgtaatgccttcattcaagagaagttcgctgttaataggattgtgggttctcttgccaacatctcttgggaaaggctgtctctgattctctggaattaaaatgggagataccacaatggacctcttttgtcttgggacaggagaagttcttgcaaatttaaatatatcctgcaaggagccctggatgtctttccccccgacaatcacgagttctgccatatcttccgcatggggggtccgtgcatggacgaacagagttttgcccactgcagttatgtttctcagagcaactaagccgccatcgctgttcaccttgaagtatgggcttgagacctcatagcgtagcttgtcgtttcccttacagtcactgaaggtcaagtttagaattgactggtcctcaatgaattcagctggctgattgatatggaacactttctgctgaaatccaggagt

SEQ ID NO: 446122 - DNA, 978 bp, Homo Sapiens
  misc_feature (56)..(92): n is a, c, g, or t
cccacaactggcagtattcatcactatgggcgaatggagcttacgcggggcggcgnnnnnnnnnnnnnnnnnnnnnnnnnnnnnnnnnnnnnatcaggccaaatcggccgagctcgaattcgtcgagagcggctctcctcaaagcctggctcccacggaaaatatgctcagtgcagccgcgtgcatgaatgaaaacgccgccgggcgcttctagtcggacaaaatgcagccgagaactccgctcgttctgtgcgttctcctgtcccaggtgctgctgctaacatctgcagaagatttggactgcactcctggatttcagcagaaagtgttccatatcaatcagccagctgaattcattgaggaccagtcaattctaaacttgaccttcagtgactgtaagggaaacgacaagctacgctatgaggtctcgagcccatacttcaaggtgaacagcgatggcggcttagttgctctgagaaacataactgcagtgggcaaaactctgttcgtccatgcacggaccccccatgcggaagatatggcagaactcgtgattgtcggggggaaagacatccagggctccttgcaggatatatttaaatttgcaagaacttctcctgtcccaagacaaaagaggtccattgtggtatctcccattttaattccagagaatcagagacagcctttcccaagagatgttggcaaggtagtcgatagtgacaggccagaaaggtccaagttccggctcactggaaagggagtggatcaaagagcctaaaggaacttttcagaatcaatgagaacacagggagcgtctccgtgacacggaccttggacagagaagtaatcgctgtttatcaactatttggtggagaccactgatgtcaatggcaaaaatctcgaagggccggtgcctctgggaagtccttgtgatgatcaggaatgacaaccgaccggatcttcgggaaaggccctaaa

SEQ ID NO: 446123 - DNA, 916 bp, Homo Sapiens
gtccaatagaatgaaccgggtccggtgaaaattagaatctttccgctctcggtccagcagccaggtgacaccaccaggaccatgtccctttctcaggatcgatgtagaacatgttggaagatgcttgtcaggcgtctgctgacggatattataccccaggagggcattatcggtgctggttcatcgcatcaaagctgtcatccgcatcactgtggtgcctgtgggtgacccttccatgacgtggccgatgtaggggccttcccgaaagatcggtcggttgtcattctgatcaatcacaatgacttccagaggcaccggcccctcgagagttttgccattgacatcagtggtctccacaaatagttgataaacagcgattacttctctgtccaaggtccgtgtcacggagacgctccctgtgttctcattgattctgaaaattcctttaggctcttgatccactccctttccagtgagccggaacttggacctttctggcctgtcactatcgactaccttgccaacatctcttgggaaaggctgtctctgattctctggaattaaaatgggagataccacaatggacctcttttgtcttgggacaggagaagttcttgcaaatttaaatatatcctgcaaggagccctggatgtctttccccccgacaatcacgagttctgccatatcttccgcatggggggtccgtgcatggacgaacagagttttgcccactgcagttatgtttctcagagcaactaagccgccatcgctgttcaccttgaagtatgggcttgagacctcatagcgtagcttgtcgtttcccttacagtcactgaaggtcacactgtctggaattccaccaactctcctgctggttatcctgtgttgatcagaggctctggttggcagctctgct

SEQ ID NO: 446124 - DNA, 839 bp, Homo Sapiens
  misc_feature (85)..(85): n is a, c, g, or t
caatttgcagctctgcctggctggaaacagcctccaaatgaagaaagaaaaggggcttttctaaagcaagaaggcctatacctantgcaaggccacagaaaagagcagatagtgccaatatcaggaaataatttatccaccaatttctgcctgacattcagctacttaatttagatataatagagtctgcaaatcacggcatgttctccattttttctcatccttgcattccttgcttgttatatacctaaaatgttaaccatatagtttttgggttttgtggccctctagctaaagcctcagcagaaagcactccaactgcataaatctggagaaatcaaaagaaagagaaccaaaaaacaatgcttaaaatgtttaataactttatgtttaatattataccaggacctacctttgttttcaattttaagatgattatttctaaaatctatttagcctgtaaatcattgaaatcatatatgcactccataggcaaaatccaaatacccagatctgtaatgtgtcaaagcatttttcacttttcaaataaagatacctataatgaacaaatggagttattttcagtattctgggtctgcttgttacggtaattttatgttatacttgaagaaatgtttcagtactggggaagtaaagaggcaatgttaagtgagctctctgggtaactggactactctaatttctgtttctggcacaagaatgtcaaaatctgccttacagctggccaggaaacctcagtacccacccacccacacatcatccaaaagagaaataggggcatgtgttattaatttcattaaatgaggccagaaccagtg

SEQ ID NO: 446125 - DNA, 759 bp, Homo Sapiens
  misc_feature (108)..(108): n is a, c, g, or t
gataactaaatctataacaaatttaataatgaaggctctgaaagatttctgtcagctctagatggaattattctatgacttcatttgaagcacccagttggtgctggnagtttcagccatgcactatatatattcagcatatcagaattctgttcaatattctgattttaagagaagctaaaaaggaaacataaaatatacatcatccaatttattttctttatccagaagaaatctgttaacattttcccaaaataacaattcaagtaaaaaattcctaccaacgagatgatgttgccaccatttttacacaagcacactcacggcttgagacatcctcatctagcattaaacctgtaagttacagctactaaataatgttaaggctattatggatgcatacaggaatagagtaccccaacccagctcttaatgaatgctgggtttacctgcaggtagggggttggctgagattaaaaggagaaacatagtaaaggagatactaaattgattcaaatacttcatttctaaactctacaaaaaaggcctgagaatagcttgagacacatcagacttatcaaaagtcttccagcaatgatgcttttagagaaacatggcataaatgatcctttcagtctcaatccctggagtacaggcctagggattatggaactggtttaagcatggagaatgcttaaagaatgagcctggtcaacaggaaatgtacatcagtgtgcaaaagtgacaatattaatacga

SEQ ID NO: 446126 - DNA, 556 bp, Homo Sapiens
gacatggtatgtttttattgtttaggggggggagtttgcaatagaaaaaaataacttttttatttacaaaaaaatccaaatattggatgctgtaaacaaaattcacaatctgttccctctagcactgattcaaacatgtcagttttttagtccattttccatcaactccttttctgcctgtgacgcagcctatagtcaaaatattccaaaagagtgacccaaggtgcagcttgctgcaacagaacacctcaaagcaggcatgattgtagagaggttggagggagagacagccagcaggcagagcctcctccgttctgcaaggctttgcagcaagtctcgttaacttgacatcttccaactttgtactttaccatttgctttgttagaaagccattattttaacaaaatataacatagagattctttcttagcactgaaaatgctatgctaaaagaaattttaaagaaagattatattcaaatagatgctatatatgaaattactttttttggctttttggtttcacctaacacacttcatcttcaacaacaacaaa

SEQ ID NO: 446127 - DNA, 496 bp, Homo Sapiens
aatgactttaataaaaattacatgcctatgtatttttcctttatgtattataatattcgactatatgtgcatcttaagtgcattgatttcgtgcttttccatcttcataatatgatttctgcctaattattgctgtatactagtttgttatttgcaaagaaaagctatatctactctaggaaaatcataaacattatttagtttgttaaatgttaattatgggggtcatctgaggagttttctagggctgatttatttacagatcatgcattagattactgagtgtgtgtgtgtattgtcttcctaagtttggctttggttatgtgcagtgctctttggcattggttatatgcagtactggagactgttttcttatcagtatctctgacctgacccttttgagctatgttgtatcattccattttgacaccttttatcaagctttaatgaaatgcccccggcaaacaaattgtcattgaactttccatcccttcga

SEQ ID NO: 446128 - DNA, 476 bp, Homo Sapiens
ttgcctcttttgttaaacagcaacagagctctgccactttggccaaccaccctcctttgtcctcttccttttccctcctgccaagtgtcctattctcaaaaggtctaaatcactgccttccagcttggtgggcaacctgctgggggccccaagtgaggtggggaggggctccctagctatttcccagtgacctctatcacatcatcgtctttatcctcatcatcattggagctgaacccaacctcggtaacctcatgagagtcaaatggaggcacctgggaccgtaggaggccaccagctgggtagcctgcatgtggggacatgtagcctggatagatagacatgccccgcgaaaggttgctgggcaagacaggggaaggaaaaggcgcatacatcctcggctcggacaggagtggctgtgagaatgggagtgaatagctgggtagtatccctggcacagaagggttgagcatgaa

SEQ ID NO: 446129 - DNA, 518 bp, Homo Sapiens
agtctgaatgaaaaatttattttaaacacctcaagtaatctttacatttctacaaaatcataacatagttcttttccagaaacatttattcttaaaatctacttaagtgtttcatagaaactttagtaataaccagaataattcatgacagtttagcaaactcttagcagcaagcagaaagaacttattaaaatatcctttctttacacaattagattagtattttgcttcatgtcttcattgcttgttagctttgcttttacacaggaatcttcagactactctctgtaacactcaacccctattccttttttaaccagtttctcaagaaggatatggagagctcataaaggaatatcctcaaatatcctaaatatccaacttttaaaataccttttttatccttaaaagctgataaacaatagatgtcacttaacaaatgtctcacagtatatggaaggagcttttttcccccccagagtgtttctaagcatttctatcaagagcaagtctgcatt

SEQ ID NO: 446130 - DNA, 786 bp, Homo Sapiens
  misc_feature (148)..(165): n is a, c, g, or t
  misc_feature (264)..(264): n is a, c, g, or t
  misc_feature (272)..(272): n is a, c, g, or t
gagaattgggctgtttactttaggtggagaacccatcttcagacctttggactattttctttcaactgcagtgtatagaaaaaccaaactacgacctcagagcagagtattaatgaaaagcacaaaaaaaggaactaagttcagcgannnnnnnnnnnnnnnnnnagatttttcttttgaaaaataatgactcttaggacatttgtttttcagttcaagtgctcttcagcactgtcttgtctcccaatataccaacccactggnacattttntttttgttttctctctccgattttgctctgtctcctcagttaagtgtttccttcctttgtgccccccgctggtgaccctctgcttccctctctctttccctttggcagctgcaatacacagtgttattttggggaaataaatctagcaaagcctcgccttccatgccgagcgtcctcttggctctgagagggaaaggtctgtccttgggatgctctctggtcttttttccccctaagtctttctctttcccatcatacccttccctgcccaccttgttttctgttctccttttattaggaattcccaagtgaattttattaatgtgggagtggaacagatgctaaaagctatccaggattttgtttctgtttgttttaaattttgtggttccttccctttcctccccctcccatgcgtaagacgttctgtgtaacctccattaaatttggtacaaaaccactcgccagagctgtggtgtcagaaaaataaaatatattgtttcttacaaaattg

SEQ ID NO: 446131 - DNA, 1697 bp, Homo Sapiens
  misc_feature (24)..(24): n is a, c, g, or t
  misc_feature (30)..(30): n is a, c, g, or t
  misc_feature (41)..(41): n is a, c, g, or t
  misc_feature (632)..(664): n is a, c, g, or t
  misc_feature (1050)..(1073): n is a, c, g, or t
  misc_feature (1192)..(1204): n is a, c, g, or t
  misc_feature (1442)..(1442): n is a, c, g, or t
  misc_feature (1556)..(1556): n is a, c, g, or t
cggggaaataccccctagtttatnccaaanattaagccccnaacgccaggccccagtaatgctagtctttccatgtgaaatgtgaaagctgccatgttgccttttctcttagtaggataactagtagctggtaccataatcactgaggggctatttcttaacatgcttttatagaccatgctaatgctagaccagtatttaagggctaatctcacacctccttagctgtaagagtctggcttagaacagacctctctgtgcaataacttgtggccactggaaatccctgggccggcatttgtattggggttgcaatgactcccaagggccaaaagagttaaaggcacgactgggatttcttctgagactgtggtgaaactccttccaaggctgagggggtcagtaggtgctctggagggactcggcaccacttgatattcaacagccacttgagccaaatataaaattgtatttacagctgatggactcaatttgagccttcaaacttgtagttatcctattatattgtaaactaatacattgtctagcattgatttggttcctgtgcatatgtattttcactatgtgctcccctccccagatcttaattaaaccagattttgcaattcgcnnnnnnnnnnnnnnnnnnnnnnnnnnnnnnnnncttgctcggccgctctcgagacctcaaaaaagctttcaaaaccattctatttggcccccgcgcccccgaaggaaagggaaaatggcccacacctcgctccctaggaaatcctggccatgaccagcggtttgaatcccgcacaaccaaaaaacgcctcgcgccacaacccagggtcctcgaacaactccaaatgcgagtcctgaggccctccctgggatctataaacagggagtccacacgaatctcgatattacgttagccccccgcccctgccacttttccccaggaactgtccgacatataataaaggaatttatgtccgaccccgcagacccctcaaaaaatggggatgaaccaaccccggaatcccccataggagtattctnnnnnnnnnnnnnnnnnnnnnnnngctatctccctcctttccccctgggtagaaaaaaacccggggcccacaccacccctcttttccacatactcgtctcccccccggtttaaaaattgtcaccaacttgggttgagaaaaannnnnnnnnnnnnatgaggcatttagtgtgttttccacccaacccagctacgacaactccacagtctccttccacaaataaacaacccgcgctcctttgcggatggatcaaatacgaaggcgcgctatacgattatctcttcccacaccgctcataaccaacggtcgcccactatctgtcgtggggggtgaaaaaaaccacaataggtgggtcatgcaaaatatcttgcgttagcgtgaaagtatgttganttaacacggggagcccgccccgaactaccatgcaagaacccccgccgaaaaacgagacttttgtgtatcgccgtgatgtcggggcggtggggaacactcgccggcgggtggcanagcgcgggggtggcacaaagattgattaccccgcaataagaccggcccgatcgtgcaacacggcgcgtcttcattctcgcgccacaacccctatattattgttctcatcagcgacggttctttgtacgacaatgcacacgg

SEQ ID NO: 446132 - DNA, 1202 bp, Homo Sapiens
tttttttgcccacctatgccctttccagggcagtttaattggtatcatttgtaaaaggtcttttccatcacccccaaagcctttgcattccctttccaagaagggggctgtttactggttttggccccatgtgcaacagtaggccttggtatgatgctgccataacactcccatgtgacactccaggtgacatccaagtgcaagtctatgttcagctctggacagcaggggggaaggtgaggagagtcaggtctgtaaattgaagctgggcagggccctggctggctggagatgtgtgggcaaggtgagcaggccccatgtgcaccccagctccagtgcccactgatgtggctgaagcccaggttggttgtggtcaaattagaggtcctgagagagaagcccttaggccaaagaagtgtgtgctgggaagcaggccagggcagaggcccagggaagatctcagcaggggcagtgtgagcatgagcgagtgtgtgcacctgtgacagtgcagacagcccaagatcagagatacaatgtgcaggggggcctttggtgagtgtgtagctgtgcccctcccttctgagatacaggcccagcccccgcctccggaggctaagggggcacacctagggggtaggaggagtctgggaaggaaactcagctggaaatggtttaggcctcagagcccacatcctgtgggaggggctgtcaaggggcctgctgtcccggtcctgtcgcagtcctcaaagatgctagagtgacagtcctctaggggtgctctttccctggatctgcacaacacttgctccctctcttcctgcaggtctttgctcaaaagccaccttgccaacaaggcccacctaggccaacctatttacagctgtaaccacccacccagccctctctgcagcatgccaggtcccacaccctgctccatttttgtccaaggcacttatcaccttccaacctcctctgtcagttactatctgctcattatctgtctctacactcagcatggagagacagatgacagcaaggaaggggtttttgtctgttttgttcacttgtgtaactgtggcacatagtaggtgttcaatatgtatttgtgaagaactaatgcatgaactaatggacttgccttaaggcaaccagcctcacaccctgcccccaaacaatgagattcacatggtgccaaccacatc

SEQ ID NO: 446133 - DNA, 435 bp, Homo Sapiens
aatgttttatttttagttttattccatcaagtacaggaaataattataaaatgcaaggtaaacaatatttaattctggccatatttgaaagggcaggccatgaaaacaagaacatctcatgctagaaaatgaaatgcttttagcacattgcccgatctttccgtaggaaacatacttcatataaaggggcactattatgctttaattaggtatgaaatgaattgaagaaataaatcctttgcttttagaactacttattagcctttggaaaatttgtcattaattcctgtgaatgcactggtaacagccaatggttgggaacactttattttctttctttcctttaaggttagaaaaatgttagcatttctaatattcctatcaacaaaatttctgggtctcagtacaatacaatgtttcactgcacacactttt

SEQ ID NO: 446134 - DNA, 470 bp, Homo Sapiens
  misc_feature (304)..(306): n is a, c, g, or t
  misc_feature (308)..(309): n is a, c, g, or t
  misc_feature (318)..(318): n is a, c, g, or t
  misc_feature (321)..(321): n is a, c, g, or t
  misc_feature (349)..(349): n is a, c, g, or t
ctatagaagtttattcccaaaacagagcgcggcttcacggaacaatttacacagacaggaaagagggccgctgggctggaggaggggaaccccagagaggggcatctacgaaacctaggacatagtaaagacaccctcccacccccagcaggccactcagcccttcaagagctggggtccttctcggtaaggagagtttgggtcctggctggtgggatttagctccagtcagggaagtagaatttctaatctcccaggaagctgcttcccaagagtatgcatggggtggtggtgaggaagggtnnntnnacagaccanccnccagccctgcacagccactctcccccgngggtagaggacgcctactctcaaggtcttctggatctgctgttaaacgggactcaaggctgaccttcggcctgggagacctgggggttatataacccctcaagatggccaggtcagggtcc

SEQ ID NO: 446135 - DNA, 494 bp, Homo Sapiens
  misc_feature (260)..(310): n is a, c, g, or t
cttgcggccgcacgcctgccccgagtgcggcaagagcttcatccgcaagcaccacctcctggaacaccggcgcatccacacaggcgagcggccctaccactgcgccgagtgcggcaagcgcttcacgcagaagcatcacctgctggagcaccagcgcgcgcacacgggcgagcggccctacccctgcacgcactgcgccaagtgcttccgctacaagcagtcgctcaagtaccacctgcggacccacacgggcgagtgannnnnnnnnnnnnnnnnnnnnnnnnnnnnnnnnnnnnnnnnnnnnnnnnnntcggacaccgccaggcccgagcccagcgggcgggggcggggcgccccccagcccctttgccgtgagctccccctctcctctcgtccctcctcccaaggacatgggggcagtgagaccaggtcccttgctgccgcgtttccccgggggccccaggggggagggcgcggacctggggaaccctttc

SEQ ID NO: 446136 - DNA, 562 bp, Homo Sapiens
gccaaatcacgccccccgtgctgattggtttcatccattttattgtcaaggaaattaacagcccgaaagggttccccaggtccgcgccctcccccttggggcccccggggaaacgcggcagcaagggacctggtctcactgcccccatgtccttgggaggagggacgagaggagagggggagctcacggcaaaggggctggggggcgccccgcccccgcccgctgggctcgggcctggcggtgtccgagggggggcacggcccgcgcacctggccgggcggcggcggcggggcgcgcgctcactcgcccgtgtgggtccgcaggtggtacttgagcgactgcttgtagcggaagcacttggcgcagtgcgtgcaggggtagggccgctcgcccgtgtgcgcgcgctggtgctccagcaggtgatgcttctgcgtgaagcgcttgccgcactcggcgcagtggtagggccgctcgcctgtgtggatgcgccggtgttccaggaggtggtgcttgcggatgaagctcttgccgcactcggggcaggcgtgcggccgcaagctta

SEQ ID NO: 446137 - DNA, 357 bp, Homo Sapiens
tttgacagtcgctacatttaatgaagtatttcaacgcttcgttggtctcgggaatacagctccacacgcaaaaaagtaaaaagtgcagcaaaacaacaacacaacgatcaacctcaaaggaaacaacaaaattaattttatcaaaatgcaatgtgtacattaaaactaaagttatggatcgttcctgtttggcatagaaatgtgatgactattaacagaaaggggaaaaagatttgccccctatccatcatcagacagacagacttctcttactaaaccccttatgtggagtgggatgagtgactatttcctgcagaaagatcatgcaacttaaagcaaaaaaacaaaccaaccaac

SEQ ID NO: 446138 - DNA, 324 bp, Homo Sapiens
tgtttgttttatttaagctgcattaaactccaatgtatatgaaaggggcatttttataattgtaagttataatgtaaaacttttcctaatgtaaagttagtcaagggtacaatgaggtgttttaaccagaaaatcgtaatcagaatattctagattgccattgtagtcgttcagtgtttcaacatctgaataaattctgtgtcattgtttagctgtcacagtgtgaaaaacgttttgattcacaaagacaagtacttaaaaagaggtaacagtttttgacagcttaccttgcacactctgaataatgttcatttaaattgatac

SEQ ID NO: 446139 - DNA, 356 bp, Homo Sapiens
aaagctatttacttatttaatgaaatatccttccgttaaaaacatttgtgaaaatcgtttcatgacttgggacaatgttcccaatgtaatacagagtgggggaaaacaaacaggatacaaaaattgcatatatagtatagattcctaattatgtaaaagatgagctcggacacaacctggaaggacatactctcaaacgtgaagcaatggttatttctaggtggtgggattagagatgcttctattttcttttagtgttttccatagggaaccatacattattctactaccagtttaaacaaaaacaatgtttttttcttttaatcaagctacaccaagatcctcaaccagctggt

SEQ ID NO: 446140 - DNA, 497 bp, Homo Sapiens
tttgggtccacgggctgtttattgatacacactaaacacaattttctcctaatcctagacccagcattttctgcattacactagcccagtggtcctttctgaaactacactgttcaagttacagacatatttaaatgtttaaatttaaaatgttaaatttaacattttaacatgtttaaatgttcatagacacatacaacctgcacttttactctttgagaaatgaatgcagtaaatttacttagctttctgagggaaatgatagcctgaaggcatgacgttttcaaataccccaaactccaactaagataacctggaacctattaaatggatatccaacattttgtactgaactctaaggatatgaacaccaggacaatggttattttgaggcacagaaaatacagtcaaagcagcagctcagtgtgtaccccgacagtgcctagaagagacttatgtgggagacaaagtttctggtcaggtgtatttgtatactt

SEQ ID NO: 446141 - DNA, 363 bp, Homo Sapiens
aggacatcatagcactttattttatgaaaacatgtagcagattttccacaaaaatgcttatttttaatccaaaagtatattgcttcataatggtattcagtgcacagcagagtaaaagaagttaattcatgatgtactggttaattttgcatggcttcttaaggccagcaaaatgctggcagttttctttatctttgtgaagaacaggcccttcctgtttggggaagttggcttttatgtcagctcttggccagtggtcacttccaagcctggtgtctccggccctgtagtctgtagtgccagactgtgctggcctggagagtgctggggcaggtggaggccagggaatggtcccatacagtt

SEQ ID NO: 446142 - DNA, 881 bp, Homo Sapiens
ttttgccttaacaaaaataatttattccacacacctcccaaggcagggggtagcgtgggaatcaagcatgtgtaaggcactgcccccgccagacccttctaacttctgcacactggaaggtgaaacctggagagagaagacactcccctccctagcttctacctggcaccctccaaagatgagcattcatcttggagaccaaaataaaaaaggacaaaagaccaggctcagagggagcagagctcaatggggggaagtgaaagcagccatcttctcctgcagctaagccagggcaaggcactagagacccacatccttcccatgccaccaactcgtcaggtcccaccaagcaagccactcaccctacagcccagcaaccatggtttgcctcacctgggagaccagcacgacttccagaagcttccaaaccccaccctgaagccaaaccccacccatggaggtctgaggagctggaggctggccaggcatagagggcccggggtggtccttcttcaccagggttgcaaaggcttcttcattgtccggaaagggagcatgggtgtggctggtagacccaagacaagactaagtgagcgagattcctattcacaagcccaatccaagtctgggaggaacccatccttctggcattgactttgccccaggtatgcagggccaaagaagacaaagcaggagaagactgagagacgcccaagcggagcaaatagaagagccagagaacgttccaggataaagccggcaagaccaacggggtcctcggagcaccggtccaagctcgggccaaccagactggcccatcagggaacgatgaccactgataggagcagggggccccacagcgccagaactacaaagagccc

SEQ ID NO: 446143 - DNA, 405 bp, Homo Sapiens
ccgggccctctatgcctggccagcctccagctcctcagacctcctgggtgggggtgggaagacccctgatgcagcctgtcctctgggtgtgggggtggaggagagggctccaggggacccagccagccttgaccctggaggaaagtcaggtgggctcagagagagccctcaaatctgggccctgggtcagggtggggtcaagtccagccttgaagagaatggactctggaatctgacgtctgggtttgaatccagcttccaacactcactggctgtgtgactttgggcaagataacttatcctcttgtccccatgtgtcattggagataaactacccacctaccagattgttgtaccatgctgggcaaacactaagtgcttaataatggtagcccactgctcatg

SEQ ID NO: 446144 - DNA, 666 bp, Homo Sapiens
taaatgcaccataaatttatatttgttaatcttgatattagaacatttttacatttcaaactacataaaaatataacaatataaaatagaaatttgttgacaacttacgtccaaaacatcactatttcttatattgcaactaagcaacaagacagcttacacagctctccagaaaacatagtgttttttgtgttatcaacaaaaatcagcacaatcccacacaataatgtcttcaatttattatcttttccacagtacacatttttcacaaaccgtaaatcctttgcagttattcaaagtgtgtaaacaattgcctgaatccccatatccccccacctcggcttaaggttgtgaatgttttaagtccttcaatcaagtttcaactcttccacttgcataaggaatcaagagccttctctctttaaattatgtgtgttttatcatacagcctgcaatgcagtaaatcacagtgaaagccctggggaaaacaaaacaacatgatctttacagcgggacttgaaacttcacaatagtaaatgcagttcaagaagcttcccataataaaagcgcgggttttcatttccagaaatcaagtcaattagaaaccctaggttctacttaaaaacccattttgatctaaaagtgaaaacaggcccctatccatag

SEQ ID NO: 446145 - DNA, 566 bp, Homo Sapiens
  misc_feature (15)..(15): n is a, c, g, or t
aagggttaggacccntgagccccagcccaggtcaagtgccccctgccctttttcaattcagcctcctgagggagtctagcccctggagcctctctggccaccacctggtccacctggtcccctgggctgtctaactcacctcccaggggcctggggtgccttcagtgccaattgccactcagatcctgggcttgccaaccacccgaaggccctgccagggactgcctatcacaagacacttgccagggacccacagtgccaccttgggagccaaggcacacccagaagtctctgcccaacctttgcccagcagttcaggattcatcgggcacccagctggggacaccagggtgtatctggatagagcagacaatggagggagcgaaatctggaggggtcctcctccggggagaaggggccctgtagcttaatgacgttgagtttcccctcaaagacaccgtagctgagggtgacctgttctgggagctgtgcagtcctcagcagctgcagggtctccaggtgggagtgaaagagggggctggctgcaggcggccgcaagggaattc

SEQ ID NO: 446146 - DNA, 411 bp, Homo Sapiens
attgataagctgatcctaaaatcatatggaaattcaaggatccagagtagccaaaacagtcttgaaaaagaagaggaaagttagaaggctcacactttccaacttcaaaacatactactttagagttacagtaataaaaatagagtggctgtgtcagaaggataaatatatagatcaatggaatagaattaagagtctagaaataaactcatacatctgtggcttactgattttctacaagagtgccaaaactatttcatgagagaatagtgtctcatggtacttggacaactgtatacccacatgcgaaagaatgaagttggccccttacatcatatacaaaaaaattaaagtggattaaagacctaaatataagagctataactgtaaaactcataaaagaaaacatag

SEQ ID NO: 446147 - DNA, 553 bp, Homo Sapiens; identical to SEQ ID NO: 233670

SEQ ID NO: 446148 - DNA, 379 bp, Homo Sapiens
agaaagtttctctgtcatcaggcaaagaccagggtgggaacaggaaaactagaaaactggtcaagggagaacaagtcccttttcctctcaccagtgaacagcaggtgaggaaacagactctgggaggaacgctgttcaggatggcttgctgcctgcatggcatgaggctgctgtcttgtgggtgctggcagccacaatctccatttttctgaagaccaccatttatggctagatccagtagaggtccagaactttcccaacactgctggagaggaagtgtttcacagtcagaggagagagccatggggaatggaagcagggggaagaaggggtggggaggggaggagagatgagtgggctctatgctaatcttagggtt

SEQ ID NO: 446149 - DNA, 620 bp, Homo Sapiens
ttcctttctcgctctttaatctcactctgctctcttgacacagttccagcaatgcagccccaggcaccagctccgagaaggatgcggtggggcggggtggggaacctgcccagggggcccagctctggggcggggcgggggcgcctccttccggcccgcggtccgggcggccctcgcagctgtccaggccccggcaagcccgggcgtggtgtccgagcggacgaataaataggggcggtcagtggtcaggtgggtcaggtgggcttgtgatccgggtggcttttgagcgtgtggaacttgacgctgtccagcttctcgaagcgcttcccgcagcgatcgcacgtggagttgtactgcacctccgcagtgtgcttcttcatgtgccagttgagcgacgcgcgctgccggcactggtagccacagatctcgcactgcaggggggtctcgccggtgtgggtgcgccgatgtacctccaggtggttcttcctcttgaaggacttgccgcaggtctcgcaggtgaattcacggacacctgaatggatgatcatgtgccgccgcaggtggttggataaatagaacttcttgccacagccaggatgagggcacacttttggtctttc

SEQ ID NO: 446150 - DNA, 600 bp, Homo Sapiens
  misc_feature (521)..(521): n is a, c, g, or t
  misc_feature (562)..(562): n is a, c, g, or t
  misc_feature (578)..(578): n is a, c, g, or t
ttttttttcagagattatgaaaattttattaataaagaaaatctgcattacacatatcccctttaaaaacaaccacctcaaacatgtagaaatgctttattttgtatttgctatttgatcaatgccagaaaaatgaaaccacaacaccaaagtacagaccagtatttttgaaggggataataatcatttgagataataaactactagaaaatcagaagaaatgattcaaggtattcatttcaaaggctaaaccactaattcttcatccaaatgaatgtttccactgtgagtcaatacatttgccatcagttctttttaatgctatcctgaatacacaatatacacctaaaaacatgatagagtgctctgagaatagcaagaactgatagccaacatgatttacagaaatttatggctatgtagcaacggttcagagacaatctctagaaaatatggagggactcttccatggatagggaaagggattgggttttgcaggggcagcttttaagttcatttcnggattggcccttaaataaccactccacccttggtcccctgntctcaccccctgggcnaaattttataaacatattcccg

SEQ ID NO: 446151 - DNA, 1283 bp, Homo Sapiens
gtgtgagccactgcgcccaacctccccactcctctcccgtccacaccaggcactctgctgcttggcctttgggcactctgcagccacctgtacctgtgtgaactggcacttgcctggcggtgtctgtgatccacaggccccaggctcctgtagctcctgcccacctgctcacccacactgtctccctatctcccatgccactttggccacctgtccccagggcaggcatgaagcccctggtctaatgctccaagacccatttgggcaccgtggtgctcctgtggccctgtgtctcatgagaagacagctggttgcaaagccagggctttctctgggagggtctgtaggtgcaaggctcaggcacttcctgagacaggtaggtagaagccagggttcggccagggcccagcccagggtgtttgtgaacaggtggacttgggtgtgtctgaaaaggagaggttgtaggaagctggccagagaatcagggcaagttgccaaaggtaaggggggtttgctcggcccacgggaaagcctctccaagacaggagtggaggaggcggtgcaggagggcacacgggctacctccttttctagtgtttgcagaagtgtttgggctgggggcagatggatgtaaggctatgggccccagggagtggtcagggctgaagatgaaaaagtggaggttgtccaagggttattggaggctgccccagaggagcggtcctgtgcctgagccctcagcgtgccacagttgggagaggagagaagcagcaaggaacctgaggaggggcagaaggtgggagaacccccacagtgcatgacacccagtggctgcgctcctcacccatcctcatcagccctgcggcaggcaggtgatctgtgtgaaagggtaagtctcttgcacgtgcagtggaagtcccagggcggcgctggaggtgacccccctccccaggtgtccacagagggcatggcaactcatcaggcatctgcatccgctaacctagagaaaggaccgtgtttgtgggccctgcacagctgtgtccctcacacagcctcagtttcccccttgaaagctgggggcttcatctgcctgggtcaaggctctggcctccacccccaccccggcccaggcgagaatggaaagccatttctgggctcagcccaggggtccctggcccttgagccatggctgtctctttcccaggatccgaggggttggggtgagaggaggcagctcacacagggccaggtgtcctggaacacccccacccaggggcttttag

SEQ ID NO: 446152 - DNA, 578 bp, Homo Sapiens
aaaggcaaagttgttttaatagatgctatgatttctatgtctgatatttcaaacattttagaaagtagtaattattattatccatatacatgttttcaaagaaaaatgctctttacatatagaatttgaggatgagctctatattttaaatacagtagactccatgtcctttcttggaggtttttgaggactaatttttggtaatatctctttagcataaagtgttctatgaagtccagcttctcgaagtgctaactcgaagcgaagtctagggtcagaaattatctgctgttcattgtatgtattcaatgtgaagagtggcttttgaagaataaattcttcttcaatttcaatgcccattctagcttttgatgccattgtatctgacatcattctaacaggatcaaattgagcaacaacagcaacctgtttcctaagggcttctagccgccgtgctctctctttgtcttcatgagcttcttgaagggccacttcctttttctccatcaaacgcctttccaataattcttgtctatatttaaccctttctctgtcttttagtgactgttcagcgatta

SEQ ID NO: 446153 - DNA, 581 bp, Homo Sapiens
  misc_feature (107)..(170): n is a, c, g, or t
atgtatactagtcattattggagtgactattatataaagacaaaagccactagggtagccatggttttttgccagttattagccatatatagtgcgtgcatgcacannnnnnnnnnnnnnnnnnnnnnnnnnnnnnnnnnnnnnnnnnnnnnnnnnnnnnnnnnnnnnnncaagaacttcattaacttgaacactcagaaataccctgagtgttttaagacataattgcaaataactcatgtaatgcgtatatttttatatctttgcatgtatgaagtttatacattcaggcttgtgcaaatgtgtttatatcatttgcctaagcccttgattatttacatgttcctatgtgggatcacagtccttcagatatgaatcatagcacagtgatttctttacatattcgtattctactattgagatactttaagaatcctgtgagttgtgtacctggaaatataaaattgatattattattaatccattcagaaatcatattgggcaatagcactactacatgtacatttagtagcaaacatagatagaatatttggagataatgaagatttcaatactgtgtt

SEQ ID NO: 446154 - DNA, 461 bp, Homo Sapiens
  misc_feature (436)..(436): n is a, c, g, or t
aaccgaaggggaggatagttttattcatttgaaacatcacaaaagcagtctgagttttcaacatggcagtgatacagattttaagcaacatccagtttatacagtttctggattaatattttaatgtttcatgcccagttcagtactttaaagcagaattaggaataaagcagtaaatattacaaaatgcagtcaagatacatattggaaatacaaatccattcattacagcaaatgttttgcaaaagagtaaagcagcaaatattaatttttctaaggtaacatgcactttatataattcaatgtaataaaaaagctgctcaaattaagtgttaccaaatctatactgtttcaggttattttgttaagtaaggaaaatacctaggaatgggccatggaatcttaacacttaaggaatgtgtaatgtggattaacngtgtatggggcctaaaaattaattg

SEQ ID NO: 446155 - DNA, 802 bp, Homo Sapiens
  misc_feature (214)..(215): n is a, c, g, or t
  misc_feature (254)..(254): n is a, c, g, or t
gaaaattaagcatttttatttctgaaaaagtgtaaaaatcttacatttagaatagtacaataataattgccagtaaaatttacaatactccttgtaaagaatacgcagtaagtacaaaaaaatccacacgtctgttatgatacaaaacacaggttgaaataaatgataattttgactttttttcttgtgtaaacatgttaaccatttttccttnncatgaaaaagtacaccagacaagtgtcctcaaataaaanagaattgcttcgctggcattcttcaagacctttactatttttgtattattcttttgaccattattttttaacgcctggacctgagaatctctacacctcaaaaaggcttagttgtttttcatctgccaaacgtcaagggagcctctagtgcctggacagggcggactcccttccccggcaccctcttcctccctaccccaggtcgggggttggggggctgtagcataggtcggctttgcataaatagagggacccgcagagccaaaaggcgcgcccgggctgttgacagttttgtccgagaattcgcagcggcgaaaatgggcgcgcgaggtcgagaggggccgcgcctggaggagcgaacaaaacaccgaaccaccaagacgagaaaaggagccgggattcctaccttcttcctcgagcgcgctaacatagcgttattaacaattggaaatcctagcagtaaagttctcgacactggacagggcagtcccttggtgcagagtccccaaggcggcggacgaggagactgaggaggcggcggcggccgc

SEQ ID NO: 446156 - DNA, 508 bp, Homo Sapiens
tttttttcaaaatatgaaaatttattttgcataggaaacaataatctctggtaaacatcattactgcatctaacaaaacaatgccttcaattaaagggggaaagtgagtttttaaacattagggttaatttagaagaaaatacagtatataataatctcaacatcatgtttagggtaaaaatgctataatgtgaaaaaagtccctaagaactggacagaacctacctaacaacaccatttaccgtgtatgttttcaatagacaaaacatattttgtaccaaattccaacagtggtaattctatagttgtggccctttaaaaaatggcagcattgtacttgaatcagaaagcttactgggatttcctcatcgaaagtagagattgcagctaatcctagtaccttttgttagtaattacttaaggcacagtgcaaagttgaaggactgttttggtacaaactcaagccagctacatgtatgcttgccttggtatccttgctagagcacat

SEQ ID NO: 446157 - DNA, 612 bp, Homo Sapiens; identical to SEQ ID NO: 233671

SEQ ID NO: 446158 - DNA, 527 bp, Homo Sapiens
tttttaagatttagtatttcattttattcctctacctacaaaaccgattcaaattgtcgctggattagtaggtttgaaacttttctgtgtattgagcacaatcttagtactttattcttgaaatataaataaatttttgattcaaagtaatgcactctaatttttaaaagaatctacttggtcaggagtgcattgctttgctggtgtctgtgatcagctggagatggtggtgaacagcctgtttgcatttcttggaagaagatcttttattctgaggctcaacccaggtctctgccttccttagagactgaggcccatccttcagttttcctgattctggagaatggcccgcagcctcccactcaggtcttggctgtgctcatctagtccatcccagggctggaagggacatccctggtggtccacaaaggtgtcccagcagtactcaaactcatcgtaggtcatgatggagacttgggccccagcatcccgcagcatttgcagcgcctccttatatagggggtccc

SEQ ID NO: 446159 - DNA, 530 bp, Homo Sapiens
ttaatcttcaatttggcttttattttaaaatacatttagcatagaactgtcataggacagaaaataataaaacacaaatggaacattttcaaataccttttaagctagacataaaaatcaacaggatagcataggcccaaattatgggaaacggtccctaaaattcaattcattaaacatacattttgaaagtaaagctcttttcacattttccaacgtaccaatattttcctacatgccttggtttccttttaactaataagtaaagggtaaatttagttgctttacttaaaattaccagcttcagttttggtaaaaattaccatgcccctaaattctcaatcagaattataaaaatatgagctcaaatagttatggtgcccaaaatagaaacatctgaagtgatagttctggataatcatacagatattgcactaaaatcagtaatttcatacctggtatttatttatatggaaagttaatctcttctttatgaaaaactttctacaaatacacttactattaacgta

SEQ ID NO: 446160 - DNA, 1008 bp, Homo Sapiens
  misc_feature (415)..(532): n is a, c, g, or t
gccgccgccccctttctttcgttcccccctcggcgtttaatgttcccgcttctagtctgctgcccttgggcgctcgtcttctctctcctcgcgcccgtactatctgtcgttttttgttcttcccctcctgctcttccactctcttttgttatttttcttcctccctcggggggccgtttgtttctcccttctgcgggcttgtgcgccccttgtgtgtgttcccctccccgtgtgttggtcgtcttctttctcttcaatctctccttgtttcgcactgttgttctcgctgcgcacgcgctgtttggtatcggtcgcgccgctcgtgcctcggttcttttatatgtccctcccgcttttttgtggccccctgtcgtatcaagtctgtgtgtggtcatttggggtgccccccgcggtnnnnnnnnnnnnnnnnnnnnnnnnnnnnnnnnnnnnnnnnnnnnnnnnnnnnnnnnnnnnnnnnnnnnnnnnnnnnnnnnnnnnnnnnnnnnnnnnnnnnnnnnnnnnnnnnnnnnnnagagatgtggaaccaggtcttattaggaaacggcagagtcaaggagcagtggtggcggcccgcaccccccacccccacttgttacaactttcgctcccacccatatcctctgctgagcagcacctggctcttccttgtggtccccatcctttcccttacccttccttctgcctcatcctgaggctgcagccccgaagtttcttgcttcttccctagggtcacttgagggcctctgcatggcgattcagggcctgagaaagggctgtcactgctcccatcacacggcccagctcccaggtctcaatctggcttcggaatcgctgcaggaagcggtcagggtgccagcggacctgctggaccctcaagtacctcctcagagccccctgttcctccaaaggggggcccctggccaccagggctgcagccatggcctctgggtcccctcccccagggcagggccagggcacatcaccaaa

SEQ ID NO: 446161 - DNA, 1789 bp, Homo Sapiens
  misc_feature (1065)..(1126): n is a, c, g, or t
  misc_feature (1168)..(1185): n is a, c, g, or t
  misc_feature (1346)..(1356): n is a, c, g, or t
  misc_feature (1499)..(1511): n is a, c, g, or t
acaacttatactcttactcactgctatcaacggtgggatcactcccatttatccatcttcgtagttgtccttccttttctatcatgtaatcgtaatcaagattcgtcagactgtgaaacttatactcagagactgtggagtaaagttgcagattatcatcgcgccagtcacctttcctcaaactgttgccttgaatagtacgcaattactctggtcaaaagtacacaaccctagtcgccctaaggtggactggttttccaaactggagtcaggctgcatatgcataagccgtgtttcccatgacaaggtagccttgtggatttggtttgtgctttgggttgaaaaagcaggtatctagtctaggcccagtagatggcagcagctgtttcattgcagacaatacctcttgaacccttcccccatggcacaaactcgcccatgatggcaagcatctagatttctgcctccttttacagttaatccaggagagggagtcctttgccaactgatgacctacatgttccaagccacgatagtctcgtgaacagtgacaatacagatataaggtgttatttctgttcagatctccaccggcctttgttcttttaaaacttgaatataggtgggagacataagaaaggaaagaaaagacttaaaactggagtgacaggacaaataatcattactttcaattcatgactgctttatattcatttgatgaaatcatttgtatacaaaccagggagagttttctttacacccttgacaatatatcacatactcttcaagatcataataatatcattaatataaatttaaacaacatggcttgttagaaaatatgctaattgctatggtctcattatgtttgcttagcttttatttgtttttctgtgaacagttagagagctaatttttttcaaaggtgattgtaagtcatattttatatagcattttgcttgattatttgctctgtactgaatttgtactctattgccattagatcttacaataatgttccactctgcaaatttttaaggttcaaataaagtttaattgtttgcnnnnnnnnnnnnnnnnnnnnnnnnnnnnnnnnnnnnnnnnnnnnnnnnnnnnnnnnnnnnnncacaacaaaacaaaccaacggaggaaacgcccccaaaacggnnnnnnnnnnnnnnnnnntgcttgtgcgggccgccccgccccctaaaaaaacttttaaaaaacttttcgtttggggcgcggggccccccgcataagaaagtgaaaacagggcaaaacctgggtttccaaaagaaaaaaccggggcataggcaaaaagggggttgggcgttccccccccnnnnnnnnnnnccccccggggggggaacaccgggcggttttttgaaaaaaactcccaaacggggcgtttctcggagggggtctttcgggggggtctcatccacacaagggggggtccccaggggacggccccccaaatattaaaaattatacannnnnnnnnnnnnggggacatttgtttcccagaaaaaaacggggggggaaaattttcttttaacgaatattcttttcgccgataagggggaagcccccccctccacaaaagcgggtttgtgggggaacccctgtaaaatccgccccaggggggaaataccacgcacacttttggtcgccccctctgtggggtataactaaaatttgggccccacacgcgggggaacaaaaacggcgcgggccacaaaaaaataatatgtgccctcactatttttgggccaccaccctctta

SEQ ID NO: 446162 - DNA, 1326 bp, Homo Sapiens
  misc_feature (991)..(1016): n is a, c, g, or t
ggcctgggtggcgaattcggcacgaggtgttaaagagcaatacttcaagtcagctgcaatgaccctaaacgagcggtcacttcgtatcagaaagccactgaagaacatagtactcggcaaaagagccctgaaatacacaggagaattgacatctcaccaagtaccctgaggaagcatacccgtttagcaggggaagagagagtttttaaagaagaaaatcaaaagggagataaaaaattaaggtgtgactctgctgaccttcggcatgacattgatcgccgtagaaaagaaagaagtaaagaacggggagattccaagggctccagggaatccagtggatcaagaaagcagaaaaaaactccaaaagattacaaggaatacaaatcttacaaagatgacagtaaacataaaagagagcaagatcattctcgatcttcatcctcttcagcatcaccttcttctcccagttctcgagaagaaaaggagagtaagaaggaaagagaagaagaatttaaaactcaccatgaaatgaaagaatactcaggctttgcaggagttagccgaccacgaggaacctttttttcgaattagaggcagaggaagagccagaggagtttttgctgggacaaatactggtccaaacaactcaaatactacttttcaaaagagaccgaaggaagaggaatgggatccagaatataccccaaagagcaagaagtacttcttgcatgacgacagagatgatggtgtggattattgggccaaaagaggaagaggtcgtggtacttttcaacgtggcagagggcgctttaacttcaaaaaatcaggtagcagtcctaaatggactcatgacaaataccaaggggatgggattgttgaagatgaagaagagaccatggaaaataatgaagaaaagaaggacagacgcaaggaagaaaaggaataataaatatgaagtaagattacaacagagcagaacttgcacccaccnnnnnnnnnnnnnnnnnnnnnnnnnncaaataagaatgtaagcattttacttaaattttactgtttgcaagtagtctatagaaattttgttttaagtcttcaaatatcttgagaaatagtagactgtatgttgaaaattgtactgaaataaagtagaaaattgttacgtaccatatttgtaactatcaacttttaaaacttttaacgtttttgttacatgcattgtaattctgctttgtctataagatatggtcaagtacagctctgtgaaagttctgattctcttccttccctgtttgtcaatgttttattctgaagtaaacgttagctctacat

SEQ ID NO: 446163 - DNA, 515 bp, Homo Sapiens
cttcgccgcttctcgtttttctttgtgaacaggactgttttcaccattgtagaaaacatctactttctcttgtaggattttccgagctagctttctgttctgatcaactgatcttgtctgatggcacctggctccaaaagatcctggaaacaggcttcccaggctgttgtaggaggttctgccttagggaggaacggctcagggatgggacgagatctgcggtgctctctactgcctggctggtagagggtggcccaagccagaaaaataatgcacttcggctgatcccattcacacttgggagaaatctctggaggctgtggaacccttgggcggggcctctcccctcagcggccttctgtgatctacctttacaacgatgcctgaggggatgtgcttcagcaccacgcagttgctggttttgttggttgcctggccccctggaccgtgtcctttcacaaactgctcttcgagttcattctcatccaaggaaagcagtgcagggtagtccttct

SEQ ID NO: 446164 - DNA, 750 bp, Homo Sapiens
ggagcttctggcagattctgtcagttggaatctgtaagtctggtctcagtggacctttttacttgactcccaccagttctttaagtagcttctttgttttccaggggtttcctttgctcttgtgggtcgctttcttgttttttcttcgccgcttctcgtttttctttgtgaacaggactgttttcaccattgtagaaaacatctactttctcttgtaggattttccgagctagctttctgttctgatcaactgatcttgtctgatggcactttacaacgatgcctgaggggatgtgcttcagcaccacgcagttgctggttttgttggttgcctggccccctggaccgtgtcctttcacaaactgctcttcgagttcattctcatccaaggaaagcagtgcagggtagtccttcttgcctgccatctggaccggagtgacagctattcctggggataacaacgtcagcttctcccaaagccggagtccccatggcgccgggcatattcgggtcagtggtgtaggaaaatgaaataaacccacggtgctcataaggaacgtggctctgctggctgaggacctggtctcaggacccgactcgtgccctcaacgttctagggatatccaaatcacctcagcggaggattcgcaatcgcgatccctgatctgcgcacgcgccgtactccgatcgcggtttctcttatctaccagaggctcatgtttactcactgcgcatgcgagaaactccgct

SEQ ID NO: 446165 - DNA, 707 bp, Homo Sapiens
  misc_feature (86)..(86): n is a, c, g, or t
  misc_feature (636)..(636): n is a, c, g, or t
tttttgttttcaaaggcaaaacgtttaataattttttttggaaccccagtgtaacagaattcaaatgggaaaagtgagagggagtntttaaacaaaggcatccccaagtcccttcccagttggtcctgaacaatggaggaggtcaaaccttcttttccacagcatgatggtataaatcagggaagtcctgggaaatctattccacaccctaaaatacccaaacccattaaaaggcacagatatagggcttttacaaacatttactaaataaggcaaaaccatacaaaatatgttcccgtcgggcaatttttcccataccatggactcaaatggttaaaactccttatcatcccagactaatgccaccttttcaattcccaataattccttccgtaacaagcatcattgctccaagaatctctcaactacattcaaacccgagtcttcagacccttggccctctgggacctccagagcctttgacagtgccacccaaggcagcagccagggcttctgctgggacagcccctcactcctccactctgactgtccccactgggcttctctggagcagaagccacgggcagaactgggcagactgcccagtgctgctgagtccagagaagcggcatctgnaggggagcggtggcagtgtggaccccacccttactgtattcacaggccccagctctccatcagccagcctg

SEQ ID NO: 446166 - DNA, 540 bp, Homo Sapiens
ttttttttcacaggctaggctgtgttttattccacatggatctgcacatttcacacaaagtcacacgtttgttatgtcagagctccatcacgttccagccccgttccatcacgttccagtttcagtctttgtggctgcaagtacgctgtcctccctttttcacaatcagacgtcccaaacacaaattgtcatcaccttctgtgagtttgtagtttgtgtgcaatgggctgcactgtgcatgccctgcaggcagtgatgtctgcgactgagcactgggtgggggtttgggagcagaagagggaggtacagggtgggaagatcagtgtcaggggaggagagagggagcagggaaaagttatctttatttctcacttccctgggtaagaacccaggaccctgactctggggcacagcaccataccctgttggtgtccctgggtcttgtttatgttgtcttggcatccattttttaaggtgtaaatttaactgcgtcacatcagagtgattcccatgtttgtcaccatcacagagtttccactg

SEQ ID NO: 446167 - DNA, 559 bp, Homo Sapiens
agtgtaaattggcaaattttatttaaacctaatgaatccatgtaagactggactgtactgtctcgattatggagtctcattataacagcatccttaggggttacattgtggcactacattctgccctaatggcagcataattaatagcaacaaacggccgtcttgctgcctgccgcagccggagggtatttttgcagacctgacgagcaaattttgtgaaatatgtagtatgaaggaagaaagcttggcgggtcttcactgcagactttggactcccagtgtttcggactggcattccctgcatggcctggcgggacacgtgacttctaacacgagggtcctctgtagttgggctaggagataacttctcttcttctgactgggtgggcattttcaagcctccatattttttccaataaagccaacaaattgcacataatctacactgcatattaggtgggccccaagaataccactggtgagactgtgtagcatagcagctctcacaggctctccctaagagaggattctgaggctggaacgtggtccccacagctcc

SEQ ID NO: 446168 - DNA, 413 bp, Homo Sapiens
gatttttaaaattttttattttcttggtagatcactcacagaacatgcatggacatttttacaggctttcaggagattctttgtgtagcagggttgagctacactacatctgagcctaggaccctgggaagaactcagagaaggcagcagtagaggctgggaaggagattgttatgaggtaggaggaatagcaagtaacgggggtgtttcaagaaccagagctgagtgctgctgagaagtcaaagtccttgttgcttttgttttggagaataaggttggtgactctaataaaagccacataatggcatcatggggatgaaggagagttaattgaggggagaatgggggtgagaaagtggaaatgaaagtaatcaacaactcttttgaacagtttttgctgtgaagaggaacag

SEQ ID NO: 446169 - DNA, 310 bp, Homo Sapiens
gtaattttggtttgtaactccgctttttattttctacaggatttaaaagacaaatgcataaaatgtaattataaatctgttaggtggtgtacaatgaataaagatacaatttgttacatcaataacctaaaaagagtagacctatatagcagtagaattttggtatgtgattgaagttaagttgaaataaattcaaatcagaatgttataactccaggatgttatatgtaattttcatagtaaccaaaaacgaaatctacatagaatatacacaaaaggaaatgagaatagaaacaaaacttgtcactac

SEQ ID NO: 446170 - DNA, 816 bp, Homo Sapiens
ggcaacagctcaagcacatagtagcccgagttgcggtcagcagggtggccaggccaggcggaagccgctggacgtgatctccgtggcatggagctgctgcggccgcatcgcgtcgagaatggagcccctcagctcttggacaatgatgtgcaggtcatccacgtccacaaagtgcaggtgcttctcggcaggggctgaggcagcggctgacagctccaggaagttgcctcggccggtgctgacaatgaacacggtgacgcccaggtccttgagctcctgcatgggggggcccacagggtcgctggagccgccatctgtcacccacaccagcactttgggcacccctggccgggcacctgatgcttcagcaaacagctgttccttggcatagaccagcgccaggccagtgtgggtgtcacccatgcgctgggcagaagcacgcaccgcatcctgggcagcctcacccgagctgtgctggccgaaggggaactcggtgtatggccgactgcccacgtgcaccagactggcacgcagggccccggtgcccaggggcagtggagccaccagctgccccacaaactcccgaacccgggagaactcgtagtgagagacgctggctgagctgtccagcaggaacatcaggtcccctcggggggctgatgctggtggaccgcgctccgcgccgctccgcgccagcgccagccgcaagctcagggccaggccgagcgccgtccaggggagcatcgcgcgcgagggacggggcgcgctcggcaactcgctcgctgccgaattcgccgcccagcctcctacctagta

SEQ ID NO: 446171 - DNA, 880 bp, Homo Sapiens
cagtagccgtgcccgcccaggcctgcagctggtcagttgcgcccgcgggcacatccacccgtgcgcctccccgccccgcagcggccccaactgcacgtggtagccgagcgccgcggctgagcccagcgctggggcccaactcacgcggaggctgcgaggccgcgcgtgggagatgacgatgcgctctggcccggcctcctctggggcggggagggcggcgagctgcgtgggggccggcccagcccccgactccgggcccgaagcccccggccctgcctcgccgggccgcgtgcgcacccgcaggatctggggcctcaggaggcgcacgttggactcaggcactagcgccacgtcgtagtccgtgtccgggtcgaggccggcccagatccagtccgtggcgttccctggcagctgctggcgtcttgcagcccccggctgggcgctgggcaccagctccagcacatagtagcccgagtctgcggtcagcaggggtggccaggcccggcggaagccgctggacgtgatctccgtggcatggagctgctgcggccgcatcgcgtcgagaatggagcccctcagctcttggacaatgatgtgcaggtcatccacgtccacaaagtgcaggtgcttctcggcaggggctgaggcagctgctgacagctccaggaagttgcctcggccggtgctgacaatgaacacggtgacgcccaggtccttgagctccgcgctccgcgccgctccgcgccagcgccagccgcaagctcagggccaggccgagcgccgtccaggggagcatcgcgcgcgagggacggggcgcgctcggcaactcgctcgcccgccccgctctcgacgaattcgagctcggccgatttggcctgat

SEQ ID NO: 446172 - DNA, 190 bp, Homo Sapiens
aaggtcttgcgattgctttaaagaaagctttatttactacatacatcctaagaatgtactgtaaatggagcaagatctaaataaaagcttttcaaatataaagcagctaaagttaactaaaccactagcaatgtttgaaaacagaactctaaaacttttttttacatttatatagtttgttcttaacact

SEQ ID NO: 446173 - DNA, 952 bp, Homo Sapiens; identical to SEQ ID NO: 137967
  misc_feature (393)..(408): n is a, c, g, or t

SEQ ID NO: 446174 - DNA, 546 bp, Homo Sapiens; identical to SEQ ID NO: 137968

SEQ ID NO: 446175 - DNA, 436 bp, Homo Sapiens
tttttggaaaaacaacacctcaacctttactgaaagggaaagttagcaaaaactagtgaatcaattccatcctgctattaaaaaggccagattcattgtcaaagggataaattctgggtcttacattctttttccaccatctgctcttttttaaataactttttcctaaatatgggagatcatggctccccttaactttcaaccgacaaagcagccatacctacctttttctaagatgaaattgggacactgatctcacaggtgcctatgccatgtaaacagcaggaatgtcaccttgggtaggcccagggtatggaacgtaataaagagccctgtgtataggacagggtcactccttagctgatacttctaaggacccatcacaggcaagtggaatttctctatcctgacttcattcccaggtcaatgctgacat

SEQ ID NO: 446176 - DNA, 343 bp, Homo Sapiens
atccagaggacgcggtcaccgcctctggcatttgtcgttctgcgcttctccgcaaggaccctctgttaggcaggcgcccaccgtaagcctcccgggccttgtgaacctgcaaacccaagtctgagagacgatccgccttcagcgctttccagcttggcagagaggctttcccggcggggatctttggttggcgctggcgatgcgcggggaagaaaggcgaggagcggcgtccaggctgggtgatgtcccagcacgagtaggcgggatgcgctcgcttggtcctccgggcgcccggtccctgcccgcgtcgcgcgcccacccctggggacgagaaggcggccgc

SEQ ID NO: 446177 - DNA, 475 bp, Homo Sapiens
accaactaccataaagcagtttatttttcttaaaaaggaaggtacatggtcacagtccaaaatgttttatacagctctcagcctggaaaatgcaactgatgaaaaaggccctgtttctagaacaaatggaaaaagaataaatatgtcatcatttaccctgcacagctttgagtaacaccataggaccctgtcacacgttcagggtcaattttaaaagcttgagaagacacagcaaggtgatgtcctagactagccaggctccgaaaggaagagctgtctgtccctcctcactaactgtcctctctctgtcacaggtgtccatgtcactgttcctctagcaaatgtggaaagtggctgctcagtgaggactcagcccccaccaacctgactgagggtcacacgacaccatggtggaaagtcacaaagggtaacgggccaaaagggtgaggggggctccctgaccctgaggacccct

SEQ ID NO: 446178 - DNA, 1142 bp, Homo Sapiens
ggactgatctttttctaaatcagaaagtgattaaagtatgcacaaccaaaggcaggtttttctttttcatttattcagcaactatttattaagcatcaactctgtgccaggcacgttactagctgctacatactgtctgaacatgacatacggttaagtaactttacaattattatcaaatacttcaatgtagatatttcttcagttgaaatagcattaactaggataatgctttcatgttattttattgtcttgtgatagaaattcaacttgtaccatctaaaactaggttgctataaaaataggaggatgaagtcaataaagtttatgccagtttaaaaactggaaggaaaaggtaagagctctccattataaaatagttgcattcggttaatttttacacattagtgcattgcgtatatcaactggccctcaatgaagcatttaagtgcttggaattttactaaactgacttttttgcaactttgggagatttttgaggggagtgttgaaaattgccaaacactcacctcttactcaaaacttcaaataaaatacacattttcaagagggagcaccttttatatttgataagttttcattataaaccttataataccagtcacaaagaggttgtctgtctatggtttagcaaacatttgcttttctttttggaagtgtgattgcaattgcagaacagaaagtgagaaaacactgccagcggtgattgctacttgaggtagttttttacaactaccatttcccctccatgaaattatgtgaaatttattttatctttgggaaaagttgagaagatagtaaaagaattaggaatttaaaattacagggaaaaatatgtaagtgaaaagcaataaatattttgttcactttgctatcaagatgttcactatcagatatttattatatggcagcaatttatatttttaatcattgcccattaatagacgcagtaaaatatttttgaatcagacatttggggtttgtatgtgcattaaaattgtcttttgtactgtaagttactgttaatttgaatattttattgaactgtctccctgtgcctttataatataaagttgtttctacaacttttaatgatcttaataaagaatactttaagaatc

SEQ ID NO: 446179 - DNA, 1496 bp, Homo Sapiens
  misc_feature (418)..(427): n is a, c, g, or t
  misc_feature (1323)..(1334): n is a, c, g, or t
  misc_feature (1374)..(1408): n is a, c, g, or t
attaaagatcataatgctatcatttattgaagaaagaaagcaaaaaaaactaacaattgtgatgggggaggagagacagcttggcaacattccttttaaagttaagttagcataaagaaaacaatatttagtaaatgaaatagattttcaaggtaggaaaagtagtactcaagaatgtatttttggatacaaaaattcagttacacaatcagtagcattcaaaattagttatgagtatttatacaattacaaaaatggattcatgttttaacaaagtattttaaaagctcaaacattttaaaacaggcacaatattctaaaggcatatgcattcaccatgggcttttgaatgtcctcactcccaacttcacaatcaaaatctacagaagcggcaaaagatcagagttcagagggctannnnnnnnnnccctttccttacttaaggttgcaaacacattgacagaggcaaaataaacacgtttcatagcagaaagaccaaaaaattgaatgtaaaccatagctctcccttgggagattacacaaatacaaggttcatctgtacttagaacaaggctcataacttcttgtagcatggacattcaacaggcacagagcaacaacattcacccaaataccagctgcaatttgtcctttaaggatgcctcacaaggatattatgtccaggtagctagtccatttatatcggggaccagttgtccttttgttgtttgtggctgtttattaaatgtagtggcacaactttgttgtgaatatgtaccatcatttgctacaatctagacagatcatcctgtctacaaaaaatcattttctacatttctaagaccattatcagtttatctgctcctgctagaaaaggacatactttttgtcaatttacattaaccaaaggctctgctactcccccatttactcgctgcaatgaaaactggtaagccccagggtaaagcttaagtatcagggactatgaatttagggtagaagtgaaaataaccaaagtggaactaaatcccctattcttgagtgcaactgagatcaagtaaacttcgctggactttcttcttaactataaaactattaaccagaaggtaaagtcacacaattttacctcccaacaaacttttaaaataaaaatttccaaaaaatttagatgtctaggttttgttatatcttaccaagagttacacagacataaatttgtatttaacttcagttaaacatctattcactttttaaaaatgctgtctgcaaataaactactggacatcttaagcttactaaaaaaaacttaagatttttaaattnnnnnnnnnnnntggccgaattcccgggcatatgtccggtaccgtcgactgnnnnnnnnnnnnnnnnnnnnnnnnnnnnnnnnnnncggccgcttcctcgctcactgactcctgcgctcgttcttcggtcagcgagctacgccctatatgaattattcaacgtttcgctctgct

SEQ ID NO: 446180 - DNA, 384 bp, Homo Sapiens
tcactagacaaaaatctatttttaattgtataaaattatacatataaaatacatagaatgtactaagaagatgagtaaaatctttgacaccagaagtggacagatcaggaaacaatttttctcaagttatttgggatcttactggttggtatttgagaaaaataataaatccaggaggtacgagggcaattcttcccacaactcacaccccttaatccacacgtcccagagaaaggagaaacaggagtgttgatgagtgccagcttataaatgtcaaacagacacacctggtgtgtctagctgtttttgcctttactccaacccgacgtgtttcatggaatacaaacatggggcttctaccccagctctcttctgattagtaag

SEQ ID NO: 446181 - DNA, 929 bp, Homo Sapiens
aaatcccaccttaacccaggcttggaaagtgttgaaggagaaggaagagggtactggaatgttgttgttggggggtgtaattaggaaagttagttcccaggaaaacttgtggagttttgcttgtgccaggggtagaaaaagggaagggaaataacagggccatctcaggtaggagatttaagaatgatttctgtaaataaaaaagacagatcaggaggccatgtgtacttccatgtggcttatctgttgtccactaaaataatcaagacaggttctcatccaaagcagaatttttactcagcaaggcaaggttagagtcaaccagttttggttgattcatttttcagaagcccaagggatagtatctctaatttggggtccttttatgtgctcaagaagtaaacaaaccaacaaaatgtaaatcagttctcaagagccattattagggaattcagaacatagtgctaacatgagatctgagaaataaaagaaggtaaagcataaaacagagaagagcaccaggccctcccctaaataaacaaacaacacaaggccttgcactcagaagacccttggaatgtaggtctgtctctctttctttgaatacttaaatctgaagggatggaaagaccacctaaaaatcctagttttttggcatgatgggggtctaattccttgttcactccaaagagctgatggcacatgttccctgtaaggatctccttgtgctaaaagtctgcagtggcctttagtttataggactgtgttcaggcttccccacttcgcagacagccatgaagtcagctgtcattcaactcaacgcttctcaaattttaaagtatattaagtaactgtggagctataaaaatgaagattctcaactcccatcctaggcctaatgaagcctcgtgccgaattcgccacccagc

SEQ ID NO: 446182 - DNA, 562 bp, Homo Sapiens
gtatgtgtcaatgttttatttaactcattactgaagaaaccagcaggaaaataaaagagctagttccatgaacatttgagaaatagagatgtatatagtcaatgggaaaagaatgccaaaataagattattaagttaaacataacaggaaataaaaccatatcacctttggggttaactcctctaccgggctataaaacaaaacaacttattcatttctgtaagttagcctctaaactttaagaacttcacagggctataaaccatttgcacctgcatcatttgtggattgtgactatactgtgacagctatgttatagtttccaaagaggtcagataagggtcaagcaggattattagaaaatactccagcatagaaaaaagtagccattcttttgccttttctcagattgggatccatttttctttcatattaggatctcctgttttccatttgccctgggttgcaatctttggatgcttcctccaactgctctataacttatccttgcctccagccccctgtactatcaggagattctgtgtagtcatagtgaaggggt

SEQ ID NO: 446183 - DNA, 434 bp, Homo Sapiens
ggacaataaaggcctacttatctctttcgactgaagagagatagactgaagggaggcaaaattcaagtgaacactttatttcatgtaatacataataatacactcgaggcatttacgtgtattataaaataaagaaagtttataaaataaaacgaacacttcgtttcatgtatataatgcaccttaagtgtattatatgcatttacatgtattataaaatcacctaactgcaagctagagaatccttaatatgtaatagtgagaatactaatgtctttcctcgagcgtttacagtatctaaaccttaaaatttaatttcgtgaagtccgttgtaagaagctgtgataaaagtttgagatgattgaataggaaaactctaattaggctacaaaacaatgacacgtataaagcatctccttgtgtgaaagaaatga

SEQ ID NO: 446184 - DNA, 473 bp, Homo Sapiens
  misc_feature (396)..(396): n is a, c, g, or t
ttttttttgcttttataaacattcaaccaacatgttctttaataatctcttctttaaagaacaaaataatcaagtacatggcattaagttaaatgtctctgcacatgaatttccaccttataaatctggtatattaaattgtgctgtaaatagatttgtatattttcttttttgagtactatgataggtgaaatggtatgactataaaaaggatttgtttctttttgtctcctgggaatgacatgatgcctttctagagaaagaaaaattgcaggctacaggaaaatgataaaaactactgggattcatttagactattcgatttagggaaggtacaaccacttctttaacatcaagctaaaagtgggggaaagtctcagtctcccgggtaggtcntcctctcacactgtcctgggtggcaggcgctgtttatacatgcccgctatcgctctggctgcactgtagatcatctg

SEQ ID NO: 446185 - DNA, 470 bp, Homo Sapiens
acatacaagtgaaaactttatttgtccacaccaggattaccgaacagaaaaacaaaggtggtgagaagttggtatacatagcaccttatttacatgatggacttgaggaggcagttaatcctatggttgtgtatcacaacctttattagcaatgccatcttctcttcctcctcctacttgaatatcccttacggtcaacagcccacgggcttggcacacaccagcactaatgtgctccagagtctttcccctacttgttacatgacagtgccttacatgtctgaaagtgctcatacattcatctgttcctttgatcctcacaacacccctgtgaggtaggtaggacaattatgagtttcccactttataaatgaggaacctgagttatggaatgctggaaaagcttttctaagggggttcaagtagtaatggttgggtctaccacataggcagattcctggcttgctttc

SEQ ID NO: 446186 - DNA, 476 bp, Homo Sapiens
ttttttttgaagcaaactttctttattttcaggtaaaaacattaacctgatggattattgcagatttgagaaatcagcacataaaatgactggacagcattgcttacaggtgcttttatctgcgtcgagacaaaggctgaactgttttgtcccaagtcagcactgggagaaggggaagaggagcgtggaataaagaagactatgaacaaaaacgtaaaacaacaaagggaaaaaaatttttttactccaacagggaaggaaaactgcttattttgtttaaaaaatttacattaatttaaaatcctctgggccacagattaataaataccggccagcccaagctgtagacttcttaaccttcattaaagaaacaaatgagctttccttgtctcattccagaggctgttgctgctggaattgccatgtaaacagtccttagtgtgtcacctgggaaaaagccagtaataccctaaact

SEQ ID NO: 446187 - DNA, 459 bp, Homo Sapiens
  misc_feature (434)..(434): n is a, c, g, or t
atggttaaattatttaagacatttactttatttttcttgtggccatccatttagtgaagaacatcagtgtattaagaaggtccctctttatcacatgatatttctaagcagatattcaggaatgctcagaagattccactttcagtctcctaagacataatttaaagtgggacttgaacagaaacaagtatcttcagactccagctgaaatcatagaagtagttttctgtttaaatcctgggaaaccttagataaggtatgtgaaactgaaaaaagatcaaatcagcacacacagataaaggatacaacagataccaagatgggtaaatgcccaattattttcagtcctcataatctgtacaaagctatgaggcaaccagtaggccatatctcactaggcagactttgaggaagatgtttccctatttgaaacncaagaaattatgaaaatatggagat

SEQ ID NO: 446188 - DNA, 1130 bp, Homo Sapiens
acctgaaacattttattcaagtatatttgctgttgtttatcacttacacaaaggagaaataaccagtctttctttcttaaagtacatctaaattcattaagctggcagccttttaaaaagatgcttcactaggtttcgtttgttgttttaatggattgcaagtaaaactgtttttatagactattgatttctagctccaaatgaaaacagtaaatcacacaaaggttttatttttgttgtggctgatgaactataaaagggaagaagggagtgctgacagagactggggcattcttttcagccctcacacttggctttcttggaagctggaagacaatcttcatctccttctgatggccgaggtttcttcactgtagagataattccaaaagcagtttttctagtttctccatggagaagcgctgctcggcagttggtggacaccgcagccttggcgtcactttcagagagcccaaacagcaagcctagatttgccacgtcatatggccctcttatttctaaaggcctttctgcagcactagatataattacattctttcctttgcagatttgcatcaaattgagggcactggaaattgtataccttctcattgtggagtctttgatagcagggctatagacaagttcaaaagccaggcctcggtcaatcgccacattaataggaggtcttttgaagtaaaatggtagtttctctgttacagttatgcagactaaatccacatctaaatgtgtgcaagcaatatgaaaaagcttttctgtctttggaaaaactgcaacaacatcatagagccgggcccttgaagaagttgctctcaaaacattgcagtgagatggatccgagacaataattgttaatctagttaaaattttaattggtcttgattttccctgtacaattggcaaagttgtgaagagttcagaaacagctactggtttttcaatttcctgtttcttttccttaaagtcaacgatatgattgatagcaacaactgaatagccaaggtgagcggctgtctccacaagtccgcgcagagccttcaggtcagaacccgctcgcaggtccaaatctgcaaacaccgccatgctgaagtcccatgaccgtccgcccc

SEQ ID NO: 446189 - DNA, 632 bp, Homo Sapiens
  misc_feature (561)..(561): n is a, c, g, or t
  misc_feature (569)..(569): n is a, c, g, or t
  misc_feature (589)..(589): n is a, c, g, or t
  misc_feature (600)..(600): n is a, c, g, or t
caactcttaaaaattatttaatagaaagtccaatgtcaaaatgtaacaataaacaaaaatacacatgtataaatatgtatatataattagacctgtacactttctcagacccttttcaaaatggaatagaatcatcattacatcttggtggtcaaatcaaaaataatattcaagcgacatgggcccactgctacgtggggggtagtactgctggagcacttcgagggttcaaagaattccaatcaggagagagctggggatattgccagtgtccttttctggagacccagagagggaagatgaacaatcaatcgcatggctctgtccagtgtacctgacttttgcttagcacctgtagccactactgtctagggacagctctcctttagggttttgaattatttacatttatgttgtttgtgagtgagttttctttcctcatctcccagatttgaagttcctggggattctgccctaggactttcctattctgcaggcccaatgtcgcacagtggtttgggatgctatttaggcgtgctgaattgccctaaagcaaggggntccaagtngggtgtgcacataccaggangtgcccaaggncccctcaggagttccagagagaaatgccagaa

SEQ ID NO: 446190 - DNA, 570 bp, Homo Sapiens
ggggtcaagcagtaagtcatttattctcacccacggagctggctattggaagcaggtggaagaagggaggtggggaggaatcttttattttaaacctttcctgttctgattaagcatttcttttccctctgaccttcactggtcccattttggcagatcaaacagccagcgagtcggagggaggcctaggccagtgacacatggattccggatgggccggcctgctgccgccccctcgctgctgtggccgggctgctgcccaggaagcggcaggagactgcggctcatctgcgctgggcctgcaggtgcttcgggaaggcctcgcggggctccaggctcctgcggctggacaggtcgcatgtggggcgaaggcggagatcagcagcccatcgcggggcccggccactcagcctggagacctggctgcccgtggttcctgctgtcctctgtgaattacaacctgccagtttgactttggggagaaacagtcacttgtctgacggtaacaaaaagatccaaatctctgcctcttcccatcacttggctggatagcctatgaagcatgtgtgt

SEQ ID NO: 446191 - DNA, 775 bp, Homo Sapiens
  misc_feature (460)..(481): n is a, c, g, or t
gagaatgagctctcacatttaatttgtattaatgggggagttatgtttgtagcctcaaacacactgtaaaaataatttcctaagatataattcttcttaaatattttatatatttttttcagagatggccacaataacttttatctttattttgtggctcttttctatatagttgtatcaaaacaaccatttagggacataagtcagagtatttttactgtgctgggtacttatttcatgcattagaaaaatctactatgttgcagaatatgaattttcatgttagcttaacatatagatctttcagttcaaccttgtcaggcagggatacacgtcaagttaatccaagctggacaaaagatgtccttggatctgcagcacctactaagagcagggctgtccaccttctcttctcttctttccaccggagaggactgtattataccattcaaggggcccnnnnnnnnnnnnnnnnnnnnnnctttgcccttcaattcaaactctgttatgccacatttggcataaaatgcttaccattacctaaaaatgattttttaaaaaatgcttatcattacctaaaagaaaaatgtagcaaaattcaactttggaggaaaatgaaaactgtacatatccttgagaaccacggaaagctaagagatatagaaaattgtacattcccacaaagttatttcaacaaagaggcattatctgcattccaccaaggtcagtcgagttgaggagaaagagaagcaaatgccaagaaattggctgcata

SEQ ID NO: 446192 - DNA, 289 bp, Homo Sapiens
actgtaggtttatttttattcaaaaagttactgtctcaagacataaatacaaatcagaaaacagtacaattaggacaatagaatgtggaggacaacaggttagagtaatatataaaacatttttagctggttgaaaacaaagctgtaagaactgctttcacaaagaagtactcctttcaagagtgagaaaaaaaatcaacttaggtttaaaatcatatatacagtcctctcagcagttctagttaatgcagtggtgtgtaaaacaacataggcaatacttttgcacacc

SEQ ID NO: 446193 - DNA, 229 bp, Homo Sapiens
ccctttttccccccgcctttttttaaacataatttgggtttaatgatttttgtcccttgggcctggcctttgctttccctccccagtaaatatgaaataattttctttgcccataccagacccaactttaatttcttgggtgttggggatttggccttgggtataaatggccccccgtttttgtttttgtgaactcttttgtggggggggtaaaaaaaatcccaaaccc

SEQ ID NO: 446194 - DNA, 547 bp, Homo Sapiens
ttcaataaataggtagtttattaaccatattaataacaatgatgggtcaaataatcggagattcagcccatctgggaagtacggatgaaaatgaaaggagtccttttttttcttcccctccctccctcatcctcataggtttttatatctaaattatgtgagagtgattcatacacacacccattatgaatcagtaagagaaataacttcaagacctttgctagtgatgaaagtgcaagttaagctcattaagccttagtggttatgatgtcagctgaccacagtaaggagagaatgtctggttgaatttttacacctaaagtcaaagttcaagaaaaccagctaagattcagcttaaaaagcagtgacgaaaaacagccaacacccacataaaaacagatacacacattctgtatgctttgtccccacccttcttttctttagcctcaatctgagaatctgccatgcaacacaggtagaaagaattataagagattcaaggaaaaggtcacaaggccaggaagcctcctaggttccctgatatcgt

SEQ ID NO: 446195 - DNA, 1229 bp, Homo Sapiens
catagagaagctcaggtgtcatttttattctgtggttttaaaatgaaataatcttggttagtcacttacaactttgacgactttaaccacctgatgaaacctaccagtttctgcagcctcaggtctccataagggtcttcttaaattggctcctctcatttcaccaccagcttttggggcccaaggtcctaaggttgtgttcttgaagccaaattcccacattaatccatgttaaccacatgtggttaaacccctgtttaccatatacagatctatcaggcttggtgctacagagatgaggaagacagtccaggcctcccgggggcttagagcttgggggtgagagtgggggtggcagacgttaacaaaatctcccatgcagtgtgatcagcattggcactgcgctgctgtcaccaaggttgatggcctcggattcccctctgcatccaccggtgggacagctggggttgcaggattgagaggaaccctgccagctgctctgcatcccaaggctctgaggctgagggagtcacgtgcgagatgttaggtccaaaccagcccgccctaagtagcaagaatctagaacctgaaggaagctggtgcagtgtccatcaaatcagtttccacaaagctactccccgtctgcagctcagtttctgtgagacttgcccgaggtcttttagaggcttaaaatggttggctggtgtcggattccctgagaagcagcagttaggaagcgtggttcctccagcacttagatggttttctgaaattgctcaagtatttcttcataatcatgttcatcatcatctagatcctgcctttggggcttagcgggcctgtggcccttcctgtgggcaggaatcttgctgtacgtactggagccatccttgatgaactctggcaaggtcttcgccttgggtttgggcagccgagcgtgttgctgcaatcctaagacttgagaagacctggaagttgggggcgagctccatggtctggctggtcttcgggttctcacagaccaccttctggaggcggacctgggtgaccttgatcaggtcccccgtggagaggcagcactcattcccagagatctcatagatggagccctcgaagtagacccccgagcagacccgcagcacgcggggagggaggcggggtccaaggcgcgcacgaagtcctgcagcggcaccggctccatggtccccgcggctctctgggctcccgct

SEQ ID NO: 446196 - DNA, 925 bp, Homo Sapiens
gttcctccagcacttagatggttttcctgaaattgcctcaagtagttcttccaaaacaggtcatcaatcatctagatcctgcctttggggcttagcgggcctgtggcccttccctgtggggcaggaatcttgctggtaccgtacttggagccatccttgatgaacttctggcaaggtcttcgccttgggtttgggcagccgagcgtgttgctgcaatcctaagacttgagaagatgtgcatgatggcttggatctcatactggggccgcaggatcagggaatgccagggcagggtggggcaggtgaggacgaggtctttcagggctggatcctgtaggacctggagcagagttcgaggggcactaggctcccatgtccagaagggccccttctgggataggggcaggtgcaggatgacctgctgaccctccatgcccaggacacagcgggcagagcggatcccgaggtgcatcaccacagcctcaagcatgaggagctggtcctcagtcaccaccctgccctctgtgacaatcctgtgggtcgacatgaagcaagtgggcagctgcttggagctctgagttgtggcagagaccagctcctccagggtttcatagctctgtggggtgttgaggggggtgaagtagccctggaagttgggggcgagctccatggtctggctggtcttcgggttctcacagaccaccttctggaggcggacctgggtgaccttgatcaggtcccccgtggagaggcagcactcattcccagagatctcatagatggagccctcgaagtagacccccgagcagacccgcagcacgcgcgggagggaggcggggtccaaggcgcgcacgaagtcctgcagcggcaccggctccatggtccccgcggctctctgatcccgggaattcgggaccggtcccac

SEQ ID NO: 446197 - DNA, 479 bp, Homo Sapiens
cagaggcaggtgtgaccagagactgagagggagagggtgcaacctctctgagtccagggcattgccgaccctctgaggacatccccacccttgaggctgggttgtggtgaatgtgagggccttgggagcaaaccccgaggggagggagtgactgctggacgtggcaagcccacgagcagcctgcgggtgtgccaggagagtgccagggcacatggggaggcagaggtgcccaccttatcctggaagttgggggcgagctccatggtctggctggtcttcgggttctcacagaccaccttctggagtcggacctgggtgaccttgatcaggtcccccgtggagaggcagcactcattcccagagatctcatagatggagcctgcggagacaaggactccatttccccattggacaagggcacaagtgctggtcagcctgtgccctgccgtctaggagcgtaatacgggtatactctagga

SEQ ID NO: 446198 - DNA, 482 bp, Homo Sapiens
gaacttcctaataatgactttattcactattttacatttggctcactgctagaagacagttacaagcatagaaaatggacccaaggacaaacatttacttgggagggaaataacacaaagaagcatatcaatcgatgtctttgtcagtcattctgtgaccaaccaggagcggggatggctttgctctagattctggcagccagtagaaaccatctctagaaaccatctcatctttatccataatggtaatagagcacagtgttctctagacatgtagatctgccacatggcaaagctatatcatgatttcttcttgcagagtgggcagtttcagcaggacctgtaagtttgcttaggttttctgaagatatcggcattaaagacttacacattcctttttgtcctcctaagcgtatttcgtaaccacactctcaacattccaataagttatgaacttggaggcacttagaacataattacat

SEQ ID NO: 446199 - DNA, 2515 bp, Homo Sapiens
  misc_feature (197)..(206): n is a, c, g, or t
  misc_feature (223)..(321): n is a, c, g, or t
  misc_feature (332)..(408): n is a, c, g, or t
  misc_feature (426)..(439): n is a, c, g, or t
  misc_feature (447)..(583): n is a, c, g, or t
  misc_feature (2429)..(2466): n is a, c, g, or t
ttggaagcctaattactctatagtgagtcagtgattcacgggtcatttagcaagctttccgtcccgggggaaaattttttccccagggccaaggggggatacccccgggggaattagggttaccaccacccggttggagggggtcccatgggggcgggaaggttaaaaaattccccccactttttaaaaaatgcccnnnnnnnnnnaaattttaaaagaagannnnnnnnnnnnnnnnnnnnnnnnnnnnnnnnnnnnnnnnnnnnnnnnnnnnnnnnnnnnnnnnnnnnnnnnnnnnnnnnnnnnnnnnnnnnnnnnnnnaatccaacccnnnnnnnnnnnnnnnnnnnnnnnnnnnnnnnnnnnnnnnnnnnnnnnnnnnnnnnnnnnnnnnnnnnnnnnnnnnnngttttaaaaaattttttnnnnnnnnnnnnnncccccaannnnnnnnnnnnnnnnnnnnnnnnnnnnnnnnnnnnnnnnnnnnnnnnnnnnnnnnnnnnnnnnnnnnnnnnnnnnnnnnnnnnnnnnnnnnnnnnnnnnnnnnnnnnnnnnnnnnnnnnnnnnnnnnnnnnnnnnngtaagtccaatgttttatttcctacaaagttaactaacattttttctctactacatagcactcatacaaatgatttctctttcttacatgcatacacacattctgtttcactaattgttgaacacaactaatattttgtcagatttattattcaagaattacatcattacagtgaattataatgtttctgaaaacagtaagcagaaaagatgattagtaaatgttagcataaaatgaaatgaaatgtgaaagtggctgatatctgggtgcctaaggaccttgtctcacagagttctcaaagtcagcagccagtctcagggcccgctcatagtactccagggcttcattcatatttccttccaatttgtagacgaacccaaggaggctcaagctttccagatctaatgcctttctccgaagtttccttaaaaccaatttcttcaaagaattgatacttttatcccttgttaatgatgcctgttctatttttatagcttttaaataatggataattgcattgacgtcagatttcttttgaaattcctgaaaccgaccatagtggaaatgtatgtcttgcattgtttcttctaccactggtttcatgcataacaatttttgaaaattctcttcagcttttctgtgattgcctgcttctatatacattcttgccaggtctagatgagccacctcaaatgtgggctttttttccactgcagattcaaaatgaaatatggctgatcttatcattttgtctagcttttctctgttctgccctctaggctgcccttttgtagccttccttgatttggatcatttgtgccttgtagcaaagccctatctggtgatgcagtaagacagaagtgggtgtttcctgcaaggcccttttttaataactcaagagctttatcccacagagccttttctttcggtaaaagcttggctgcatatcgaaagacataggttctgggaggacatgttggctaagagcttcttcaatgtactttttctccttcagcttcctgtccttcatcctgaagcttcagggcaaggagaaccttaatatatccattatctggatttaagcggacagcctgccttaggggaagcaaagaaaatggcttgtgattttttgtggctaatttaaagccatccaggcgataggcagagatcgcatacccagcgctggattcagggttttcagggtccacttcaagcaccttttcaaagcaggccttggcccgttcataattctttcctccacacttcagcaaggcccatccttcctcacagtctatttctggacactccattctatagcggaagggatttgaaagcttcttgcaaatgttctccaccttgtccaggtaagtctgggcttctgccagtctgcccatgtggtaatacatccaggcaaagttgccccaggtcaccagactcctcacatttgcttggttgtcatgttcttcctgcattaagttttcagcttcttttaagctcttcagggcttcctcattctggcctttcaggtgtttcacataggctagtaggttgtgtattcccacactgtatttggtgtctaggaattcaatctgatccaagactctgttttctaaatcaggcatttcatcgtcatcaatggataactcccatgtaaagtgacatctcaattgctccagactatccttgacctgatgatcatcaccatttgtactcatggttgctgtaaattaggcagccgttctgcagggttttgcttagccaggctcctctgagatctggctattctgtcttgtggattttcagttccgctctcgacgaattcgagctcggccgatttggcctgatnnnnnnnnnnnnnnnnnnnnnnnnnnnnnnnnnnnnnnccgccaccgcggtgacatccgggtcgccctatagtgatcgtatcatcct

SEQ ID NO: 446200 - DNA, 303 bp, Homo Sapiens
ctttgtcctctgtgaagaaaatcaacatcgagatacatgtacatttcctataataaaactaaatcgatgtgttattttcgcctgcgtaatattgagttgttttcattcatatttccttccaatttgtagacgaacccaaggaggctcaagctttccagatctaatgcctttctcccgaagtttccgttaaaaccaatttcttcaaagaattgatacttttatcccttgttaatgatgcctgttctatttttatagcttttaaataatggataattgcatgacgtcagattttttttgactact

SEQ ID NO: 446201 - DNA, 563 bp, Homo Sapiens
aaaaattgttacttacgttgctttatttcagctacaaataaactttatttgatgtaatgtaataaaacattttcaagtttaacaatatgtatctgaccataaataatcatttaaattatgaatataatatatacggtcacttcagcaaatttgcggttcaggaatttgtacaagctttgtctgaaaggacagtgccctcctcccctttcaggaaaggtagcttttccccatgtctggtaagaagcaatgtcaatgggagttagaagaagtccataatccatgtcagaattccactttatcctgtgagaggacagcttgctttattgtagggaaaataatattctctttcagttcactcttatcaaataaagaattgcattcatttttccccttgtaggtacaggtactcttctattctcatctactgtctttctgtctccttagctcttaattactacatagtgccatttaaaaaatatatatctgcaaagagacctttttctgtttcctcacctgcctttcatgtctaccattttttggtgggtaggggtgggaatcagagg

SEQ ID NO: 446202 - DNA, 1148 bp, Homo Sapiens
  misc_feature (140)..(189): n is a, c, g, or t
acgttttcattatttaatataaattttatcttatatttactattaaaattttgattgtgaaaggtattattttatcacatacattgtaagcaatcactgcttctttaacatttgttccagcatgaagaaaacttagaccnnnnnnnnnnnnnnnnnnnnnnnnnnnnnnnnnnnnnnnnnnnnnnnnnnaatgactgcacttagctttgttttctaaattagtggtcttttcaaaggtacattgagtccatctgtatttaataatactgcaattattaatacatgtttatagaattagtacataaattaatgccttttcagatccttcacatctagcttttttaccttaagttaatatccatatgtatgagaaataaacgtaatctgataatgcttagttaacttgatgattggacaataacaatatgacctatattggattcactgttacttcctctttattcctgcagtgaaaacaatattttcttatgtcagatttctctcaatctcttagtcaatgaagacctgaactacaacaatatagagtcccattttaaattcaaacaaagatatttaggtttgacaacagactcatggtaatgtcatttaaaaagatggatccaatgaacacagacaaacatcaaagttttcaccatggcacaaacctctgccacaatcactcataataattcaactgccttcatatttggcagtaacgtcatgcaagtgaatttgctgatgattagcaaaattacaaaatgaaagtcaaggtcacttaatcaagaattacagcaacaaagaaattctaggaatgcaggtcaaggcaagaggctgcagctggcctgataatgataccacttgcctaatgttcatttaggaatttgctatcacaaataaaacacgtatctcctctgagttactagaacagaaaaggaaacaatcaggtattacttatcaccattatatgaccatgaaattaaaatatttccttaataatgattaagagaaaaaaatcattctcatgtgttcataatagaagctctatttctgaatttaaaacactactcagtatttgcttaagtactgaaatttagacatacccggccgtaatggccgaattcccgggcatatgtcccgtaccgtcgact

SEQ ID NO: 446203 - DNA, 561 bp, Homo Sapiens
tgccagggcggaccgtctttattcctctcctgcctcaaaggtcaggaaggaggtctggcaggacctgcagtgggccctagtcatctgtggcagcgaaggtgaagggactcagcttgtagcccgtgcctgagtagaacttgttctggaattccacccagtgcagccgcagggcgtgcaggaaggctgagagtccctccatcaccagcaggatagccacggtcatcacggcaaaggcggcaaagatggggaccagcaccacagccgccacgcccacctcccggcccaggcccaggcctatgcgcatcaccatggcccacagaacctcggacagctgggcgtgggccaggctcagggcccacaggcgcaggtaggaggcggtgttggagacgcagcccaggcagaactcgatggtgtggatggcctggtgcatgagcacctcggaggggacgagctcggcctcctcttcatcatccaggccccctgccttttccttatcggagcttcagccattcacagatgcgtcaggcaggtccagcaacccggccttgttttcctctccgc

SEQ ID NO: 446204 - DNA, 625 bp, Homo Sapiens
tagttctacccatgtttattgctaccagctggtctccctccaccctctcatatttacacccaaccccttccccaaagctagcttttaccaaagttcctggtaggaggtcaagaagtgtgtccacttagccggcagtcctagatgtagtggacgctgtttgtccccaggccagttgggcaccaggaagggctactctggggattcagggcatagacttcgtactggggtcaagggaggcccccactcacagatactctcctttccttctggggctcaatgtacaccaaaaccttcagaaagcaaagttggagtggtggacccccaatgtcaagtttagtgctctctttgcttgtgaggacccacacaagtggccaactctggactcagatccacagctggcttccgagaggcaattctgtccttggaagccaggtttgaccatctgtaatcagccttgtgagaagtctcgtttgagggggccagggatggaacgggagggcgcatatcgtatgaggtatgggcattgtgttaagctgggggaagttgcagcttgtcctgaattacatggagaggaataaagtgggtgagtaggaggagccatttcatctgaaagcctgaggccccc

SEQ ID NO: 446205 - DNA, 387 bp, Homo Sapiens
tttcattgttttaacttcgttttgttttattttacattgttttaggagcttacacaatcagttctcccttgaatttaaggataaaacttgtcttgtttataggaaaattggtctcattggataagatcaaaacaaatcctatatatttttgtcctagctgtcaggatgttcagacctaacttagcattcaactatattaatacttcccagatgtcagccacattcatttgcctgttattttttaaaattatattaaaattatgcgtaaataaaaatgtactcacattctcatcatggacgatggttacggtttagcttgtagctagtgaaaagcaaatttgtgaaaagtattgcctttatggagcatgtttctaactagctttgcaa

SEQ ID NO: 446206 - DNA, 468 bp, Homo Sapiens
  misc_feature (27)..(28): n is a, c, g, or t
acaagattaggggttggagaggggttnnggttttggagaagtctttcatcggtctcatttattgcaatattttctagctttgcatccagtacaacacaatgaagtattacagtgatttttatcattgcatcagcatatacaaatacagatcaaatgcaaataaagtgtgcttacagtggtgatccaaacataaaattgcaaagggaattctctttgaaagtgtaattatttttctccaatgtaccaggtatatatttttctctatgccaggtatacatatttgtcttcatcacatgtgacaaacatttgatgacttgtcactaagtaggattcatttccatagggcaactttgaaatgtgtggtccaaatacagcattccagcacatgacctcagcatcactgggttatagtcatgtacacaaagataaaccaactcgtatatgcgtgagtgcagcccatatacaaat

SEQ ID NO: 446207 - DNA, 446 bp, Homo Sapiens
aaagccaataactctgaaaaacatttattcatccatttgaagactatacatccattacatgttaccttaaaaaaatttttaaacctatattttccaaaacaatatatttcatcagtaggagtggcatcgttttacatttttgcagatccttaaagcctggcttaacagaaggctgctgcatcctcatagctgcttccgccttcggtctgttgcagtatggtatcctgactgaagaaaaccacgtggggttgggaaaggaaggaccttgaggaccctcaggggtccttggaccacactgccgagggcatggtgtggcagccgactttaacccatacattctagaacagagagagccatgaccaaaccagagggagagacacctgcagatatcctgggttgcgggctggaagaagtattaacagttgatgaagcagcttggcattgcc

SEQ ID NO: 446208 - DNA, 782 bp, Homo Sapiens
ttccttgtccagtgctgtttattgagtccatcatcagaggcaggaaagaccccactcatcacagagggcatgtgggctgcgggcaggggcttagggtcctgcagaggacaagtagctgggacagcccttcaccccgacaccccatggccactgtgaggcaggctgaggagacaggacagggaatggccaggtgcagaatctgcacagccccctgccgggtcgcagatggccaccacccagcaggcccctggcactcacccacaggcagttccccaccccacttcccccttggaccctcccaaatcagggccggggagtgagacccaaacctggccccgatggcaggaggcaccctagctgcttccagggccaggaggggtgggtgggatacagtgaggccaaacaaggcaaaagcgggtgcagtagtccctggctactgcccagcttccgggactcccacagctgggctcagccttggtcctggcagtgctgggctcagaaatacagggctggctcgctgcggaagtccgagaggtcattctgactggcgggtgtgagcatggcctccacgggcggggctctgcctccctcggggcctgctccagcgcctgctcctgccacttgctgaaggccacagagtgcttcggggtgtagctggacaggcctgagctaccctctggcagccgagagctctcgggtctcacgctgctcacaaacgtggcccggggcaggaagagtgcaaagggctgctcctctgagccggatccctcttcctcctcttc

SEQ ID NO: 446209 - DNA, 472 bp, Homo Sapiens
attcaaacctagatgtaagttttccagagtcagggtgcttgtggtatgcttaatacaagcttttaaaagtgtcatggttaggtcccacagctagactacctgagttcaaatcctaactgccctcagtagtcacgtgttcttgggtaacgttcttaacttttctgtatctcagtttcctcatctctaaaatagtaggaatattaatagtctacacctcataagattgttgtgaagattaaacgagttaataaagtgctgtgaatgatgcctggcacaaagaaggcactcaataaatagtagttcttatagttgttgtatatgctttatttgttactcgttttcatagcaggattgtaactacttgtttcagggccaagataccagtttctttttatccctagagcctaaaatggcatcattccctaaaataaaattgtgtttcaaaataaagatatatacttatttctaaaaa

SEQ ID NO: 446210 - DNA, 777 bp, Homo Sapiens
ctctcgggtgacagtagtagggcgtcccataaggaagtggctgcggtgtctcagagctgaagagcggcccagaccagggtcaccgagttccacgacgccgttggctgtgatgaacacgttgccaggcttgatgtctcggtgcatcacccggcgtgaatgcatgtgctccacggcgctgcacagctgcacaaagtacttcatgactgtcctctccgggatgagccgcttctgcttcttaaagtacttgatcatctgcgagaggtcccctgcgtcagccaactccagcacaatgttcagctcgttgtcttcgataaacgagtccaaatacttgatgatatttgggtggttcagttgcttcaagaggccgatctccttgacacagtcctgcctcgccttggcgtccatcatctcaaagatctgcaccttcttcagagccactgtcttcctgtccagcaggcaggtggccttgtacacctcgctgaactgtcctcggcctatcttcttttcgatctggaagtccgccagcgagcagcgaaaagacagcgtgttgggatgcctctgtgggtcaggaggatgcacaggccccagggtgtggcagaggttgttggaactccctccatggggcatgtggccgggctgtcctgccatcctgcatgccagcctcacgagggcacgaacggcgcgcgggcgggctcggctgccgctgggggaccggtgcgctggcccgcgggcggctggagcggtgcgtcccacacgagtttgcggcgcagcggccgc

SEQ ID NO: 446211 - DNA, 352 bp, Homo Sapiens
tagtttttccccctggctttctgtctagtggctgtgtagggcagaaccgtctgcgtgctcttgtctgacactgtctgggtgctgctgttcctcgtgacccttcgagtctgttcaggggccaaggtagagcctgagtggcggctggtcagtggagagcgccgtgacttgtagggggctggggagggcttgtgggggcctgcatgggcctctgtatgggcaggctcagggggcaagcccacttcttcctcctccacctcctgctcaccgtccccctcctcatcgtcacagcacagagcatggtagagcactttgtcactgaaccgcaccctctcccgtgtccctggggtccgct

SEQ ID NO: 446212 - DNA, 506 bp, Homo Sapiens
acatacctcaccatgtttgagtgttcttctggcttccggggattgaacccagggccttgtgagggctcagcacagtctacaactgacagagaaaggcagacctctcagaggaagaagtgatgattcctggaagaagtaacaggtatactaagataaaatgtgtaagcagaagttagacacgggaaagtcagtagaatatgagttcaggtggggctcacaatgaaaagtgaaggttagaattaacaaaataaaaataagtccaaacacagcttacaagagaaaataaggtatattgctgaggttaaaagcatccagcccatctctgtctggtgcagttaccatcttcaatggccgtgcagtccacattagtaagtttagactgtattttaggagaacgggggaccttgcccttcctcatgagaaatcattttggtgtatgatgtgaaaacagaagacagtaaagaaacacggaaggaagcagctatgggttaagagtcaggaaggag

SEQ ID NO: 446213 - DNA, 679 bp, Homo Sapiens
  misc_feature (63)..(75): n is a, c, g, or t
cacctggcaaaggtttattgccttagtgatgacagaatgagcaaagtcacgcttgttaaggannnnnnnnnnnnnaactgtgcgttggcacttttgccaacagcacaggactcaagacccattttttaatcacatggcagttgggaggtagattctgctgttagtcccctttgacacacacagaaatggaaaatgggcagcaggtgtgatgttggaggaagaccagggcccaggggcgggggctgcagcattgaccttgtgacccaagggcctgggcaggactggaggccaaaggactggacttttaggctattgcagcccaggtaaacgaggctctcattggcagggcctggctccccaccaggccggcaggcagataggcgggcgaaagagaaggcagtatcccagggcccagctcagatcttctccacgtagtttcctgggaaaaggccctcctggccgtgaagccggcccttccaccagcccgagggatcttccatgaggatctcaatgacctcgttcacgttgaagctcagctcgtccacatcttggcccacgtactggtatagggcccggcacctgggaccatgtgtccgaggctggggcttggtcggcccacaccaggcacttgccgttgccccacgctgcgctttctctgcatgccggccctggcctggtc

SEQ ID NO: 446214 - DNA, 229 bp, Homo Sapiens
tttttaagttgtaaaatattttttattgtaaaaacaaagtcaataaaggttgacaatgtaaatgttatctcacaacatttccccttggttcctgaatttgctagattcctatgtaccagcaaatctccattagcatttctcaggtttcatgatccttttcagatatgttggttgattttatgtatatattgcttagaaacaaaaatccacctgatattaaaacaaacca

SEQ ID NO: 446215 - DNA, 543 bp, Homo Sapiens
  misc_feature (83)..(116): n is a, c, g, or t
gcttatcaaaatattttattttaggagacccctcaaaaaaagacccaccacattagacagacgccccaacaacacccttggcnnnnnnnnnnnnnnnnnnnnnnnnnnnnnnnnnnaaatcaactaaaacaatttgatgcttaaaataaaagacaggaaatatttcctgatgagactttagtcgagaatatagatatatttctgatccgggggcgggtgatcaggggcgggggaggagaaggatgtgccaccagtggttcgcgaggttccgtttctcagctcaggagggagcctggctgcctggacccgggctagggacccagagctggggctccacaggcctgaccagggccagggaagaagacggaggaggaggaagagaaggcggggctggcggctggggcttgtaatttacatgagaaccgtgctggtcactagcgctgtctgtgtctgtctgtcctgcgggacttctgctctggggagggaggctgggattcagcgtcgttgtcatttcctgtgtggcttcttttccagctgagaaac

SEQ ID NO: 446216 - DNA, 431 bp, Homo Sapiens
ttttttgcgtcttctctatttccagttttattctgtaccaagtgcacaatcccttcattttacttttgacataaaaaaaggacttcatgaacaagacaaaataacttatgattatatgaaacataactgtgacaaatcacaaaactatacatattaatagaaaaaagtgtacctaattctttaaaagatttatgacaataagcaccagatgtgcctctagagtaaaatcggccccatatccagtatgatatatgcagttcatttctctacgtgagtgtatataactatgtacaagagtctgtgtgatttatggaaaacagatttccacttttttcccccaaagtgctttatgtcagcaacattacacaggatactttgctgtctgtacaaaataaatctctttttacactcactatttctccaatgagtgc

SEQ ID NO: 446217 - DNA, 440 bp, Homo Sapiens
ttttttttagtaagaaaaactttatcaaaaatttaaatatataaaataaggccagaggctgcactggaggccacttcccagtggtgcactgctgcgctgggtgtccctatgcagctagatacatgttaactgcatagagtaccataaaggagcccactggtgagcttcactgtcacctggccctgctggctggggcttccattgtctactgggtctgtccacaccccagattgccttgtggtcctttcccctgggccaagaagataacagttttttaaaaatccccttctgatatggatgtgagcaagcagtggggttcagtttggggaccaagtagtgccatttacaaagagcatggggaagcacctccttaggaggggagcagggccatctccacgttgtcaggggccgcgccgttgcctgccagaccctgggcccac

SEQ ID NO: 446218 - DNA, 578 bp, Homo Sapiens
ttcactgcagacatttattgtgggtcatcttccctaaggcaccagcagagggggaacgggccacagcagggctgcagccacggtctccagatattgcccagcctgtccagctgcagaggaactgggctgagtgtccgctggtgttcccacaccgcctgctggactcgttccatcacctgatagaacacgggctctgaggctggtgtgaggatgtgggtctcagaagggtctcttgagaggtcaaagagcaaaggtggatcgtggtggactactttttccccaaagcacgggcagacctttcttccatagcaggcaccggctccctctggctggaacacaggcgtcacaaagtggactttccacattgttcctctgtcccgttgatgccacctggctgcgtgcagaaacctctcacaataatgcatcaggaactcgtggtctgagtgttgggctgtccccatgagcaagggcagaaggtcttggccgtcaatcactctgtcctggggcacctcggtgcccgccagccgtaccatggtggggaacacgtccataagactcgtgggctttgccataactcg

SEQ ID NO: 446219 - DNA, 470 bp, Homo Sapiens
aaaggtaaagtaatttattaaagccctccccggccccaagcaaaggggggggaaaccagtataccagccatcatttgatacaagtaaaaaaggggagcttaagggcccaaatacttttttgggcccatgggcaaagaaacggcccaaaccaggggtggggcccctggggcccgggaaggggcccaaattttttttattcattttcgaagccagggggaaggggattcacatgagggttatggaaaaaagtatgggtaccatctccccagggaaacggtttggccctgatgcggaaagggggggaggggaaaaacccgggtctcttgggctctccggggtgcgacattcagggacccattacaacatgctgactgcccccccggggggcgcgacaaaaaaggggaaagttttccacatgcgacctgagcccttttcgctatgggcgccacttaaaaaaggccgccccaatt

SEQ ID NO: 446220 - DNA, 863 bp, Homo Sapiens
  misc_feature (266)..(278): n is a, c, g, or t
gttggtctcttaagtaagtcttatttttaactaagcattgacagaatatcttaaaatggtaacctgggggtggcgggtgggtgctgtgtgcacggcagcctagccagtggggatcctgctgtttattataagtagttcacagactctgatggcattttggtaagctttccatctttaagaaattgaaccagcattctcttattaattctttaaactgtggaagtaatttccagttcttacactctgatacgcatcccttttatttnnnnnnnnnnnnntgctaataaaaggcgctggtacttaaactggtggctttgccaatattggtggtttgttcctgaaatggcttccggaccctgggcccaattatttggtgtgaatgtattattcctttaagtagaagaaaagaaatccttacacacctcctcttttggggccggagaaatgtgttctcttcttaaatggcgttcaccccccagggggaaggtggagtttcacattattgcgctataattgtgtgccaggtccacggggggagaattagagtggcgcctttttcactggagaagagaaaaggacctcctaaaggacacaggacctttattttctcctcctctctgcgggacgtcttggaactcctctaatccactcctgaagatttaggtcacagcgtacacaggagaaacttcttccacttttggtgcttcttacctcttccgcagaactttcacggtgtggcctctttggcgcccaaggggagaatttggcggcaacattaagagggccaaatataggtgtggcgtcctcaatttctaaaacggtagatccacttccccactttttaactcttttttttattctat

SEQ ID NO: 446221 - DNA, 449 bp, Homo Sapiens
acatcaacaacagtggtatatgttttaatagttttcagaatataagctgcatagctttttagaataaaaaatgatataacttcaggtacatgctttgggacacttggttaaacaaggaatctgtgtctttgatgaccacctcaaaagggtcgcagacttcacagtgtaacttgggaaacagacaaggagatagatgattacatcatgacatactgcctacaaaaggaacattctgacagaacattaagtaggaacagagcacacagtttcaagtattcaggcactgctttctgggccaagtaaaaactgcctaaaggtcagtttctttcgactggaaaaaatagatggagctgctgagttctggacacagcgtttctttcccagaatgagactggctcagtccagcttgaaagcagtgtgaggaatcactcttccccttgactgttaag

SEQ ID NO: 446222 - DNA, 1174 bp, Homo Sapiens
tgtgaccccctggcttcgtgcatgtattgccgtcgcatgacctgtggtgcccgtggtttctccattgcttccacatagggctctggatggggtcctgttgccaattgccccgggaaagaccgttggccaccaaaggtgcgcgcctactgcgcatgtgaggtttccccgaccgtgggatggtactatcggcctgtattatcaccaatgtgtgtctcaaccccctcctgtgtcggcgtccagggatatatacgacatcccgacgtaattggtggactcccttcggtcgcctgtgtatatccaatgcgccaacgggtgtgacccaccatatcccgggtgtcggagtttccgggtccccgctaccagtgtggtccaactcactttggcggttgtcgactggagtttgcctacctgcggagaccctagatataaggggaccattgggctctttcgccggaataggccccgagcccctaacgtacttgtgctccgaggtcccgctattgattgtggatatcccactctggttcctactgggccttgagccagcgttttgggctgggttctaactcgttatcgtacagccgctatcaatctcgatctcttagatccctagtccttcgcaagctctgagccgcgggctctttgctgctagaacagtatgcctcgctgatgcgaggccctagcactacgatgcgcgaggccaaccatacctagcccctggcaccctggcgcgcttgagcgctattgtcatgctttcacgtccaactgttttgcatgtgaccatactacggagaggaacagggcctcgcggactgttctcgctcagatccgctcagctcacccattgtcctccatgtccttcacgcccacctaaataggcccagagaggtccctggagcaacgctgcttgcggaccctaggcttcatccctatgctaaggatagtccacgcaggagcccggtgctaggggaagcatccaccaggcactgactgagcggacaggggagcacggcccgtgggtttgattgtacttactctgttccactggttttaagacgcagagcgttctcacatctcaatcaggatgcttctctccattggtagcactttagagtccatgaaatatggtaaaaaatatatatatatcataataaatgacagctgatgttcatgg

SEQ ID NO: 446223 - DNA, 652 bp, Homo Sapiens
cagtggttcccctcaccttctgcagaagtctccaatatggagtacatgcacttgggcatttaatatataccactggtgtgtgtgggagggagggaggaggaatactagccctttttatatatttacacaagcaaaacttttaaatatttgaattgacagttacatgtttcataactttgtatgtctattggttgtgcaggtgtaattttttccctttttgattagggttacaaaatttagagaccagtatgattaagttgaagctccttagcctccttcgacctagtctctgcatacctcaacttttacgtaccaatgctactctgctgttcacaattgcctcatgtaatctgcagattcctgcctccccactttggttcagtctgtcttgtgcacctggaacaactgttctcccttgtgactaattcctattttctagagtttaggcatcatctcttcctttgggaagttatctgattcacgactgccttctctgacatccccaccttcctctgtgcccccatagcactgtgtataccgctactaccactgcaattcacattatattggaatgaacaattcacatgtctaccacaagtctgtaaacataaccttatttgaaatgaattgcaataaagctctgttacaacgt

SEQ ID NO: 446224 - DNA, 485 bp, Homo Sapiens
  misc_feature (259)..(430): n is a, c, g, or t
cccgatttggtgaaacttttattcatgttgcaacgtttttaaaatttgttttcatttttctttgacccatatcatatgttctactagagcttaacttcttatctcaaaatataattccttatttttcctgttctaggaactatttggctaaattatttttcttcatagtcattgggattataagtacaaggatgctttctacacatgtatgtttcagcttaaaatgaatagcccttgagcatgttgcatgatgtctgcnnnnnnnnnnnnnnnnnnnnnnnnnnnnnnnnnnnnnnnnnnnnnnnnnnnnnnnnnnnnnnnnnnnnnnnnnnnnnnnnnnnnnnnnnnnnnnnnnnnnnnnnnnnnnnnnnnnnnnnnnnnnnnnnnnnnnnnnnnnnnnnnnnnnnnnnnnnnnnnnnnnnnnnnnnnntttgttctagagacctttcaaaggacagaattccttttctcaagcattgagctct

SEQ ID NO: 446225 - DNA, 711 bp, Homo Sapiens
  misc_feature (320)..(422): n is a, c, g, or t
ataatagactcccgatttggtgaagcttttattcatgttgcaacgtttttaaaatttgttttcatttttctttgacccatatcattgttatactagagcttaacttcttatctcaaaatataattccttatttttcctgttctaggaactatttggctaaattatttttcttcatagtcattgggattataagtacaaggatgctttctacacatgtatgtttcagcttaaaatgaatagcccttgagcatgttgcatgatgtctgccttctccgtcactctgtaatttctctctttttctctctctcatcttctgtatnnnnnnnnnnnnnnnnnnnnnnnnnnnnnnnnnnnnnnnnnnnnnnnnnnnnnnnnnnnnnnnnnnnnnnnnnnnnnnnnnnnnnnnnnnnnnnnnnnnnnnntgacagaataagactcctttgttctagagacctttcaaaggacagaattccttttctcaagcattgagctctctccatctttagagtcttttcagtctgtttcacacagtgtcagaagaaggttgcctcaaaagttggtagaattactgtaattccctccatgacagtagtaaagttggatcctggtagatccggaatgaaatgcagctggaggatggagcagattggaggtgggaacagggaacactcagcaggctcccagccccgaacaccccggagtctcaacagc

SEQ ID NO: 446226 - DNA, 567 bp, Homo Sapiens
cccattgtggttttattctgaggacagataaaaggttgaagctgatggagtggtagaaagaagtgggagccatagtgaatgaagacgtttaagggcagatattaacaccactgagtccttcattcgggattacaggttacactttacccctcaaactgtagaattcagtggaatccatggcctttacctctctatagatgacctttttcctacccctttacatctcctgtttttttcctctccaaactgccctaaatttagaggtttattttgaagtaataatcagtcacacacagcaaagtctctcccaacacatggggagcagatgtgctgggattatcactgccatttgaagggtgataaaactgaaggaaaggaatctgactaaagtggcacaggttagaactagcatagtcaggtctagaactcatttcatatttctagaattgtgtgatgatgtactgataaagttttacgatgcccggatctaagtattataatagtgtcaatttctaagttcattttccatcttttacctctcagtggcactcaactaatgttttttgc

SEQ ID NO: 446227 - DNA, 435 bp, Homo Sapiens
tatctactatgcctacttcaccatctcttaaggactcggcatttgtccacagtcagactgcaagagagggtaggtcatgaacagtcacccgtgctggctgtagcccccacagaggcaatcatgcccaatagattcaagagaagctaagcggaaatggagggtggaaggtgtgatctgtgggactgtctgggcctgttactcatcctgctatcaatttcttattaattaatcttgatgattcttattaattaatcacatttgcaggaaattcagatgaggcaagaaaattttattggcctgggtaagactgaaagcattccaaattaggcttagactgtgcaaagggcttagctaagttatcgagcttaaaccccgtcaattaaacaaacattatttgaacagttactgcatgccacgcactgtgttgggcttagt

SEQ ID NO: 446228 - DNA, 393 bp, Homo Sapiens
ttttttacctttatacaatttattgggtttaatattcataacaataactttttctactgaaatagcagtttgtgtttacctgtcgaaccccaatatgagaaatgtgtacaaaagcaacagactgtgatagaaaaaggtatgtgaaaaaattagcaaaccaaagcatgataaatggatgaagcactataaaattactttgctgtttacgtaactgtatctttaatctgtactgtgctaaacagcctatagccaagttttaaagagttacaggaacaactgctacacattcaaagaacaggcattcactggcagcctcctggatttgacctgatgggagggacaggagaatgagtcactctgccaccacttttcctgccttggatttgtagagga

SEQ ID NO: 446229 - DNA, 738 bp, Homo Sapiens
tttgcattttaaaataaaaatactttattgatgaagtcagacagcagctaacagtttgagaagcttgggaagaaatcactttcacatgggggatatatgcaacctagaacatatttggctaagtcataaaattaacatttttagtcatctgtaaagtgctgagacatttatttctggtgactgcctgtgttaggatttttttcttgttatccgtccagtaagtgaaacactgaaatacacgttcagcaggatggcgctcactaagtatgcaccttgacatgatggtgtgcactcattatgcacgttctcacgcggggctggctctgcaactgcagaatagaaactgatgcgttctgcagaggaggcgtctgcacaacagacaggctggcccgaggtcacgcctcttggcctgagtcccgctcagtgacagcagccagcatggcctagcaccaggagtcattcggagcgtgcgtgctaaagcagacacagcattccacgtcaacaggggcaagaagctgcacgaaggaactaagcaagacttctctgcctatctcctctaatactaaagcacacacttttctcctgtggatagtcactctactttatacgagaagggaggaataatttggtgttgatgcttgagtccaaatgttgataggcactgagcattttggttcaaagcaaacattatttgtgaaatgctacagataatacattgactgaaacattaactgttcc

SEQ ID NO: 446230 - DNA, 297 bp, Homo Sapiens
tagagagcttaggattttatttttcgtttacacagggaatccaagaaaggagacagacaaagtgagtctcaaggatgagagcagagaaaagctcgagataagagctgtgcagccgggtcaggaagtgatcggtctaggtcggaacaggagaatcagttagacacaacggatgtgtttgagcctttggaaaacggtatcgttaggcatgtggcaaaaacgttggggtacttgaaaaaaaggctggccatgggttagtaaaaagctagatatgtgaaaatattaggtaattattaactc

SEQ ID NO: 446231 - DNA, 608 bp, Homo Sapiens
tgggttcaagcgatgggattttggtgtgagctatttttaatcttataatggaaaaagtgggagaaatttatattacaaagcgatatgattatagtataagaactgtggcaatattttgactgaattgtccccttcctcctcctagaaattatgcaaagtgatagggagatatggtggtgagcgggggaatgaggcagaaatcccatattcaacgaaactagaagacaaaaagacactggaaactccaagacctgcacaaggcctaccaaagttacatgggaagaggcacatgcagatcccggaaaacaccagcaaaaacagactctctgaagatgagctgttcatgacacagtgcaaaaatgtgttgtttgaaacaagcagagcagagcagggatacaaagaactgagggcaagcctcaatcaagcagaaagggagtggaaacccttgtaacccaaggggtaaagggcatctctcctggcctgaacatcttatgggcagagttaaggtcccaacacccagctcaccctcctagggagggcgtgggaaaacaatcagccttccaagtaaattcagtgtgtgtctccaacattctgttttggccagcaca

SEQ ID NO: 446232 - DNA, 1109 bp, Homo Sapiens
  misc_feature (496)..(660): n is a, c, g, or t
  misc_feature (664)..(664): n is a, c, g, or t
tccggggctgtgcgtgcttgatctcatctcgttctctgatcacccatccttccttgcttgcctctctcactctctcgctttgcacgctctcgtccgtggtgcctcgctcttttccctgcgcggcggtccgtcccggctcgcttctccccgaccgtcgcagccgcccattcggtttgcgtcgctctgcgagtcgcttcttcgcgtcgcgcttcgctcgctctccacgtcgatatctcaaatccagacattccttcgtcctccactcgtctcgttctcttatcctccgctgtctgtaggcctttgttctgctctttgtgttctctgtgtgttacgtctattacgttgtcgcgtcttcctttatctcttagcctatcttttattgcttcggattcttagctgtagagtgtccgtggctgctgttccgattgcttttttatactcacatcgcgcctgtcacgattctgttcctctctcctcttgcgtctgggctatttgnnnnnnnnnnnnnnnnnnnnnnnnnnnnnnnnnnnnnnnnnnnnnnnnnnnnnnnnnnnnnnnnnnnnnnnnnnnnnnnnnnnnnnnnnnnnnnnnnnnnnnnnnnnnnnnnnnnnnnnnnnnnnnnnnnnnnnnnnnnnnnnnnnnnnnnnnnnnnnnnnnnnngttngcgccagggcctaaagatttttctttatttaggtataaaaaaatacagtacttgtcatgcaccagtttggccaatatatagacattatctgtagagcaattactacaattatagaaaatagaaggttacaggaattgtttttccaactaaaaaacctgaattaatattgttaacctaaataacaacctgcttattatgcaaaaacccttattctatatgtctgtgagagctagaaacttgtaagtatcattagtaaaaaaatcattataagaagctagttattggttaaaacaaacaagtcagtgttatctacaatcccttgcagtgtgaggggctttgcccagagtgggaacctcggtccatgacgaagggtgagcttggtgtctccttccctgcccctctctgttgactgatgccacttctccaaggtgtgtttgcagtgaaa

SEQ ID NO: 446233 - DNA, 910 bp, Homo Sapiens
  misc_feature (291)..(305): n is a, c, g, or t
  misc_feature (454)..(462): n is a, c, g, or t
  misc_feature (806)..(806): n is a, c, g, or t
  misc_feature (827)..(827): n is a, c, g, or t
  misc_feature (868)..(868): n is a, c, g, or t
  misc_feature (875)..(875): n is a, c, g, or t
gaaggcaagactgtacctttattaatttcctcatccccagaacttagcagagtacacccaacagagttcacaggtggtcaaagaggcagacaagtaaactggcccttaatgcacaacccagcaagtgtccttgaaaatgcacattttcaaggtgcttccagagccagaggagatagagaggactcacctccctatctgggcagtcgagaagcttcaggaaggacacaggcttacgcattgcttatcctttgattgggggatccaaaggaaagtcccatacaatgcatagannnnnnnnnnnnnnngagatagggtctcactctgtcacccaggctaagtaaagtggtgcaatgaggggtcactgtagccatgacctccctggctcaagtgatcctctcacatcagtgtccggagtagctgggactacaggcattcattaccatgtccagctaannnnnnnnnctttgtagagatggggtctcactatgttgcccaggctcttctcgaactcctggtctcaatcctcctgcctcagcttcccaaagggctcgggattatgggcatgagcatcacacccagccacggagaatcagagagtctcttaagagacctcccagctccttagggtctccattgaagcaaagagagaacatccagtgtatttctgcgtggtgcttgaagacagaggaaaggaacaacgagtcacagagcaggggacttggtgctctgtttctctaacatttcagccatctgagatttcattcagttcctctttttctttctgatacggagtctcgctctgtcanccaggctggaatgcaatgggngcaatctcactgggcccgggcattgactactttatctttantcctcanttttgaagagtctggggtcagatgtttagcagatg

SEQ ID NO: 446234 - DNA, 533 bp, Homo Sapiens
  misc_feature (51)..(65): n is a, c, g, or t
agggttttaattacctttattttattttgccaaacatacctgggaataccnnnnnnnnnnnnnnnaccttggggtgatggttccaaaccataaatgtgattatagttaacacatgacccttctagcgtcccagccagtgtttttcctgacctctcttctttggagaggaggatggaagggaggggtccggcatgctgctggcattttgctgtgtcctgcagcccctttccgggacacctgggttcacacagctttttagcttacataactggtgcagattttctgtgtggagatgttgccttgaccagccttggctggactttaccaggcatgcagaagcctgtaccaacacagactacagcacccaggaggtgcgagtgtggctgctcagcggttataacaggcctgactgcattgttcaccggattataatgagccaaaatgtttcccggtgtttgctggtttcagggaaggagtttgatatagcagattaaccaccctccttgtagctattggggcttaatggtttcctg

SEQ ID NO: 446235 - DNA, 365 bp, Homo Sapiens
tttttttcgtttgtccaaacatttattgaaatgccaggcattgtgctaagcactagagatataacagtgaacaaggcttatatggtccctgcccttacaaagcttacagtctagcagtgatcaataagcagtaacaataaagtgtgccaagtgtatgtctgggaaagaacagggtgtatagggaatggatagtaagggcacctaatctagagggcatcaatgaaggtttcctagatgaagtggcatactgagaccttaaagatgaagataaatttgtattgtaccctaagagcaatggtgaaagcaatgcagtgacatgatcagtaagtcttttggagcaatttggttgtagtgtagaaaggaat

SEQ ID NO: 446236 - DNA, 599 bp, Homo Sapiens
  misc_feature (482)..(482): n is a, c, g, or t
ttttgggagataataagttccttgtgtttaataattgccatggcaagtggtatttccattcatcataaaatcacttatttcatagtggagttcttccaggaacatgacactcgatgtaatcagatgaggagacaagccgagacgttctgaggttcagtggcagctctgctcctgctgaactcagggccaaggccccactggccaggggatggagtgagcccctggcttagtcttatgcctcaggacggtggcctgctccctggactcaaagaaaagcctgactgttattctcccatctctctcacagccattgccattcctctggcctcaatctcatgaccttaattctatgtgttcaatctttctgttccctaaattctcaacatggaagctgacatctcatctcttcctgccagccactttgctggccagcctacagcctggcctgctttggctcagaggcccaacactgatcccatcanttggggaagggctggaaaggggcaaggtttggtcctcataaggctgctcccttggcaatgaagcagtgtcacttaaaagaggataagacaccactagtgacatattcccaccagggg

SEQ ID NO: 446237 - DNA, 255 bp, Homo Sapiens
ttaaccaatgaagcccacattcctgcggggggggaacccccgggccccaacccccctgggcaggaaggggaacaactggttttggaccaacattttcacaaactggtccttggggcggatgttaagccccaacccctggggggaaaactcccccaattgccggaaagcctcccggggaccccccccattctggtagcggaactgccggaaacccttgcggaaccttttgggacccaatttaaaacccgcggggcc

SEQ ID NO: 446238 - DNA, 550 bp, Homo Sapiens
tgcaaagaatttacatatatttaatattttataaaatggccagtattttatattgaagattatcgatataaaccgtaacacacaatggcggctccctggcacttcttatttccttatattgataggagactaagaaccagtaaaatgaaggagagaaagacggtttgacaaaacagtgcttactagtagatatgtcagatacacagcagtggaaatgtaagagattaaggtacaaatacaggttgtgcttatagtcgtctaatgagccacacagggattttaaaaattaagatttcaaactccatgaagcagtcaagttagaccagcaaaggaaagattcaagcaatgaagtcacagtatatatccatacttctgtatcttgtaaaccaatctgccttacctcagccaaggccatatgaattaataacttaaatgtgtacagtgcttttaaacttttaaaccctttcacatctatgaactacgtgatcctcacaacaaccctgtgaggtaggcagggcaggagttattattgaccccattttacggatga

SEQ ID NO: 446239 - DNA, 354 bp, Homo Sapiens
gcttctaatttgatttatttttgctctgcaataaaaacaaacgtatttaacaaataccatatgttgcacatttccatatatgattaagatataattatgcccagtagaaggtgggagaagggaaaggaagaagatgaaatagaaaatataagttgaatctgatgcttaatatgatttttactccatgtatacttttactcaaatgatagctcgtgcacatgcaaggacggactgtgctacttcaaggtactttctatggggaaagaaaagcaggagaaggaaaaagggagggggagatggccatgcatctccacttcctgaaggaaaaagcactttggtccccataggtaggag

SEQ ID NO: 446240 - DNA, 837 bp, Homo Sapiens
tccattaagaaatattttattgatgtaagtgaacctggacatggagcaaaagaccctccaatactttcccagccctcagaaagttttccataattttgaatcagcctttactactgtcgtcatttgtgattgtcttgaggcagagttggagctcacagtaactgccagttgaatcccaataacatctgattagtctcttggctcctagcaatctcttctataatgcagtgttgttgccagaccaaatggagcttccgataccgctcacgagataaatgaagggggttgcccctcttcaggccagggtctgtttctccatattcatccaagtaaggagctggataggcacagcctctggctttaccttcaaccaggaccactcggcattctctgatttttaggaaaatgcagactccggctccacagtgaagtgcgtgaaaaatgcaagctccaacctcttccccgttcacaatttcctggcagcaaatgttctgagaacatagtatagccccacagaaaaggcagaggacaggatgctttcgctcatcatctgcagaccgtgggcacctgaaatgagaagcttgattcaggaggcagctatagtcatcaggaagctctatcaaactatttctttttctagggtacctgaccacggtgtttttttgcttcaaacagtttagtaaggcaggatctgcacaccacctctggagcaagggccttacagtatcccaatattcctggaagagcaggaacaaatttgtaggtaaagatagatagctacagagtgcactgtactctccttctgcagaattggtatgcagttcctcaggcggagtt

SEQ ID NO: 446241 - DNA, 1373 bp, Homo Sapiens
  misc_feature (832)..(848): n is a, c, g, or t
aagtttaaacactttaatcaactataagtcaataatcatatattatataacacttctgattcatgcatcagattacataaattatacaattgtcacattatacaatgcttacatacttttgaatttgtacctgcaaaaatgtatacaagttatgagagcatttacttaagaagataagtgttatactcttcagttataaataatgcttctatctttcaaatacccgctaaatatatgcatttctagatctgcagcatttttttgtacctcaaaacacaaaccatctggaagcttcgaagactaacaggcccacatgtatcatgtattagacttcaactccactgtgagagtgcattttttgatggataaaacaaatggaatgaaacatcaactctattttaatgcttgaagagcttctatacctcttattaaatatatcagaaaatgcttcatatgcagattaattagctaaggtgctaccaattgcatattaaatacttccaatgattgcatctggattgttaaagttctacatctgtgcaaatgggggctttccatgtgtgctgacagacccttctacataccatcatggcccagcagcactgtgatcctttcccttatttcaaagggaccaagtgaatgagcatgcatcatacttcacttacacatacacacaagtgacacctaccacctacaagacatatgagtacatgaacatcaaaaaagtttcagcttgatttacaaatccaaggtaaatggcttcttctgaaaagctacagaggaaaataaaagctctagtgtaacatttactgtagatatattagacaacagnnnnnnnnnnnnnnnnnagattctctttgttaaagaataagcacccttccggggatggtaggcagggaggcgtggtggtgagggagttgctggaggaataacaagaagaaaacaagtctgtcactaatgagcttagttttacttaggtttccattcatgaaacccttttaaatacaaggcaacattttcacagctggaaaattacaactaaatcttgatttaccaccaaaagcaatagatgtagttatgtataatctatagataatactacattcaggggacaatggcaaaactaggctcaatgcagaacatagcagcaaaaagcaatacttaaaaacgtttttcatgaatgggttacatgttgttttatatacaattctaagatatgaccctggtattcaataaatgaaacttgaagcgtaagtggtaggaaggtatgttcaatatttttaaagctgaattttagaattggttataaaataatactgctttaaaaataatagtcagaaatagtttaattatgtaacaggaagttacattag

SEQ ID NO: 446242 - DNA, 462 bp, Homo Sapiens
ctagaggaaggtttatttttatttaaaaatatgatacatcaaagtaaagcagtgacattttaaacaaggagacgtataaaatattccatagaattgggtaggagggtaatttgcttaagttcactgtcactctggatgccaggaataaaaaccatcatcattttcttcctctgtgagcatcaagtacgaagatgagaaattttagttataaattagtgaagtgttaggatttaaattttacttagaaattaaaacttctccagtgaaataccttttatccattttgttctgcatcttgtggaagtcctgaattcagggatgttattatattttccgagtttgcttcttcaggtcagttccaatgtggtttagaaggaatttattttctcatatcctccccatagatttctcaatagtataattttctaggggatatctggttcattttgggaattctggaaa

SEQ ID NO: 446243 - DNA, 855 bp, Homo Sapiens
atgaacatggagttagcttttattaaacacaaatgtaccagacactgtgccaggcacttcacatacagtatttcatttagtgcaacaatcctgcagtactggtcttaacctaatgttgcaaatggggaatctgagattcaacaaggttaattagcttgcccgtaatcataagcacataaatgtgattctcaaggattccaaggcccttgctcagtttactggccatgctgttttcttgcattttatgtaggaagaacaggacccagggcatctccctccaccattgacctccagagaagagatgacacagttggaagggctgtctaagacagacaggaaatggagttgggggccaaatctaagttaggggatctgagttaggggagcacttctcaggagtgaaaatgcacaggaaagtggtggctggagttggaagtgttagaggcctgagatctacggtcttgcgcctgctacagcacctgcaaggttctactgagcagacaggtatttcattcagctattaggccttaggcttctgggggggaaatgaaagggtgggtggtggagcctcaggggttaatgtccaagattgtgtctgtgggtgagcagtcagtattcaaacgtggtttctgtggctgagagagtggtatccaaggttatgcccgtacctgagggagtggtattcccacctgatggggtagtgtctatagtccggggacgacagtgcatccagttgtgggaaatatttctgggatagcctttctctactcgaagctgctggttgaggcgccagtagactttgcccttgaagaagtagactcggccataagccaactcatagcagccgagatccga

SEQ ID NO: 446244 - DNA, 553 bp, Homo Sapiens
ctgatccatgttaatgttatttctgctctgtgtaaggtacatcaagggaatttttcaagaaatggcaactatcagaaaatatccccacaccctccagtacaaaagacagccctgcacctcaaaccagaggtgaagacttctatggtccacaaaccatcagactaagtcacccaccagccactgtgctccatggttagctctctactcccagatacaagacctctttcctgatgtaaatgaccctttctcttctgtcaccgctggaatgaggagtcattgtttggttaagccactaaactcaaatgaaaattgggcatgagaagagtaactccacacatgaaagacttgtcaaacagtgaatgaggaaccagatccttcacagtggtacctcatatgaaaacaccatggggggaggcctagggcatactgggaaaaacatgcttagaggcacggccacctttctggaaggagtccaattgagaagataatttcagacctttcattccagtctccttttccctggaatgttccagcaccaaacaatctttccctc

SEQ ID NO: 446245 - DNA, 847 bp, Homo Sapiens
  misc_feature (97)..(100): n is a, c, g, or t
  misc_feature (103)..(111): n is a, c, g, or t
  misc_feature (113)..(117): n is a, c, g, or t
gtcactttaccctaggtggggcccggcgccgccaaaccgaaatggtctaggaaaagcttcctcgaagggccgaggggcggcccgaccatgttttttnnnnttnnnnnnnnntnnnnnttttttggccttcaatttttgtttatttttagaaaataaatggcaaaatatatacactgtggagtctgaatctcctcatcatagagtgtgaacgatggtccggctgcgaagctgctgaatatactctttggcatgggcaactgccgtctttggtggctcaggtggaggtgggggcccttccaccaacttcacaaaataatggcaataaaccttctccatgatcccaaagcgacctctgccatggtagcggatgcgtttcaggcactggcctcgtcctgaggtggactcagctatatataaattggacctgaattccacgttatggtctctcactgccatatcttgtgcttctaagagaacctctttaattattttggccccttttttgtcattgaattccaactgagccaaagcctggtcaatagacattcctcgtatcaattttgccaaataccacatcttgtctttgctatattttatttgtcttcgacagtggtagatttctgctggtctccgaggttctccaggcagttgtggaggataaacaattttattcttcttctcccattttcgagaaatgtcaagagaagcacttgtgtggatatatgattgaggtaaaacacccaaggccagcttcccccggctcctcaggttatgtatccataacgcacccaactgtcccagtactgccgccgccatctttcgccctcccgctacggaagccgccccc

SEQ ID NO: 446246 - DNA, 801 bp, Homo Sapiens; identical to SEQ ID NO: 126877

SEQ ID NO: 446247 - DNA, 558 bp, Homo Sapiens
aatgtttgaaaattaaagtttattaggatatattaatgtatgatattatagtattactcatcacatgtaagctttacatctgaagcaattcatgcttactgggagggaagtttgagtacttacttagcttttcctgctattcctaggtaaaggccctcctgtggtcattctgaacagaagagtgagcttactgcaaaccacaggctggacagtagagggtgcatatcctcactgagtggagctcagaaaagaattaggattctgcacacatttattccagactcagttcccactgttggtttttatattgagattattttaaaatcttttcgaaatataatttatttgctctttaagtatgggtggggtgttaagctaaatttaaattgttctgtgaggcacaggcattatacttaagcatgaacctaatgaagccctgaacataccaacaggtagcagtccagttaagctctttataaggccacatgcctaagctccaaagggaatcttaattttttattggggagacatttcgttactacatttagtggactttgt

SEQ ID NO: 446248 - DNA, 1215 bp, Homo Sapiens
  misc_feature (1175)..(1175): n is a, c, g, or t
ctgagagtgtgctccaagaggtttattagtatccacactggggagctctgggttcttgcccagaacaaggggctgagaacatccagtcaggatgcaaggccaccacaggctgaggggactggcactggggatatggcagggtttcgccttcaagcacagccaagacaccctcctttgcccttggagtctcctcctgaagagcatggctgtcttccccatggagaaaatgaggtctccagaggtttcctgccttgcccaatatccaccaaccccctcagaatctagaccccccctgtctgttcctcacctcggccaggatcgggggacacccccattttgcagagtcagccccacccccacctcagcaggccccagctcactcctagaacctagtgactaaagtctggagcggataaattctatcaggttctccaactgctcctccaggcgctgttcaactccatggttctcgatgacccagtcaaagtccccgaagttgtccaggccacattctgactcagcatcgtccacccctggcgtgaacacccagccccgctgctgtcggctctgctccaacgctacaacgcggaccgtctgcgtcacggccccataggcctcccgaaaccactggatgtcagacactctccgtgtgtcactcacctagccagatgggctgggagatgccctccacaatcttcctgcaaaagaagcctgggtcagcctggcgtttctcctctccccagcggatcatgtccttccgaaaggcctccttgtaggtgctggtgtccaggagtctctggaagttcaagccatgctcctgagcatactgttccttgagtggaccagagagccggaggacagcacagacatcagctccaagtctgctctgcagcgcctcggtcacgaagtccttcccggatttcctcttgccgctgaacagcagtaccagccgcggggcgcctcccagcggggccatggggccgccacgcctcgcgatgcctgaagctgacacttctccctacccctaaaatcgggacaccgcgcggaatggacgcggccactaagcggagcggcaacaaggaacaatcgcgcccctcctcgccgtagctgcgaacagggctgaccgcccgcgaccgtgccctcagctcatgtccaaacagatatggggagaaaangggtgagcctcgtgccgaattcgccacccaggcctcgcac

SEQ ID NO: 446249 - DNA, 909 bp, Homo Sapiens
tccactcccttagaaaccctagttgactaaaagtctgggagccggataaaattctatcagggtttctccaaactgctccctccaggcgctgttcaaactccatggttctcgatgacccagtcaaagtcccccgaagttgtccaggccacattctgactcagcatcgtccacccctggcgtgaacacccagccccgctgctgtcggctctgctccaacgctacaacgcggaccgtctgcgtcacggccccataggcctcccgaaaccactggatgtcagacactctccgtgtgtcactcaccagccagatgggctgggagatgccctccacaatcttcctgcaaaagaagcctgggtcagcctggcgtttctcctctccccagcggatcatgtccttccgaaaggcctccttgtaggtgctggtgtccaggagtctctggaagttcaagccatgctcctgagcatactgttccttgagtggaccagagagccggaggacagcacagacatcagctccaagtctgctctgcagcgcctcggtcacgaagtccttcccggatttcctcttgccgctgaacagcagtaccagccgcggggcgcctcccagcggggccatggggccgccacgcctcgcgatgcctgaagctgacacttctccctacccctaaaatcgggacaccgcgcggaatggacgcggccactaagcggagcggcaacaaggaacaatcgcgcccctcctcgccgtagctgcgaacagggctgaccgcccgcgaccgtgccctcagctcatgtccaaacagatatggggagaaaagggtgagacacgcggagagaaaggcggttccttcacagagcagcctcccctcgtgaagctcctcgtgccgattcaacacccagcctcgtacctagg

SEQ ID NO: 446250 - DNA, 963 bp, Homo Sapiens
ggctcagccctgccacttttattattgatgtcaaaagcgccaggctttgcagggacaccagtgggaggtacataggtgcgtgtctgggacccgagaatctcagttctgtaacttcgtcctcagtccaaggtgcgctgctgctgttgggagctaaggctggtcaagcacaggttgtagaaggagttggggtcaaaggctgcactcacctcttgccagcccacccacccagcagcctgtagttcactggggctttttggagtgccccagtagtgagggtccaataccaggacataggcttccgtgcctgacccgacgcagactcccagcaaggccttggacctggcatctgcgtcccccccaaccatgactgggcccccaccccctgcgaagtgcgagtaaagcctctccacctccccgtgcagccccactcccctgggttcgtggcagaggcgttccttgggcccttcgaagtgagcgaggcagaggctggcctccacgcagccgatccagtcccgggagccccggaagccggggggcttgtcgcccatgtcctccagggccgcctgtacggcggccagtccaggtacgcccgcgggctggccctctggccacgagcacagcgtctgcagagtgcggtagccgcagccccagccgcggtcgtccaggccgtcgcagccgtagtggtagtagaggtagtggcccgagagcagcgccaggcggacagggccgcggctcggcggggacaggcccacgtggacgtccctcagcggctccagggcggtgggcgggagcggaggtcccaggccaggcacagcgtcctcctagcggcgcggagcgacctcaggctccaacacttcctttcggctccgggtcttgggccagctgccgcaggaccggcgcgcagactggggacgcgctccccgggcctcgttgatcaccgcaggccgcaataggcagcccgct

SEQ ID NO: 446251 - DNA, 822 bp, Homo Sapiens
  misc_feature (629)..(645): n is a, c, g, or t
atgtgtggcgtgttggtcttcacacgtgctctgttctcgggttgttccattcatgccttcttggagggtgagggtggcttgggaaccgacccagtgatcatgcctactttcttctttgtatctccctccttcccagcccacccgggcagcagactctgatggaaggaaggtgccgtaggtgggcttttagaaactaacgggactggttttcaaagcagttatcttgggaaactgtttattccagcgatgtgacttttttcagaatatttcttggaatcatattcagagtctggggctgtgtgttgagcagccttaaggatgctagacactcatttagtgcccagggagtccagcgaatgacgtctgtggccaagcgaggtctcaggtgcaaagcaaaaggaccatttaaagtaaaatagcttggattcaatcatgtgacttttaaattggctcagaaagcaattttgtaatttcagagagtgttttgagccatggccacgttgtcattgtgagtctatagcttgactccttggagaacaatattcatttggttgtggagactgatttgctgggagaaatctgtcctgttactttctggtcatcccaggttctgacttttaccaggggcnnnnnnnnnnnnnnnnngcaagagggagataaatcccatctgtgagtttgtcttattggcgcctttttcctcagctgtcttccaagtattatttttactgttaaaaaattttttaaaaatgtgaaatgtaatgtttttacagcaacaatatgaaatatattttataaggaataaaatggtaccttgtctgaaaa

SEQ ID NO: 446252 - DNA, 317 bp, Homo Sapiens
ttttatacttgctttacttttattttttcagatttcctttacttacattccttattccctcaccaacagtaatcctcatttttatagaaggtaagagagaagaagtacgcagaggttacagacttgggtccaaagaaaattacagagtccaaactgaggccaagcctgccaatactctcagcagcagttttctcctctaacactcttcctctatctgccatgatgcccaggcatacaaagggagtttttcattgtttccttaaggttaactgctctggatgctctcagttcaaataagatggttttaaaattcccct

SEQ ID NO: 446253 - DNA, 595 bp, Homo Sapiens
ttgtcgttgttttatttaaaatgttattgtctctgattagaaaatacagtcatgagggctaaaaactgaaatgatgtgaaaaggcatccattaagcagtgttgccccaccaccctttccatcagtcttgtctcatggggatggggaaaatgaagacagaacgctttgccttgctttgcaatccctcctttgaaggccttctgtcccaggaagccaatgttcatttgatgtggaagagggacctgtgtttaaccagaagctgtcctccctcatccctttcccatggcttacacgcagaagggagaggagatgaccagaggagaaatcaggggaagaaaaggcaacaggggaggcaaagggaaaggagaggaatgcttaaaatatacagtgaaatttgagtaggattctctactcaaagacttctctgggaagtgtccagaattgaccacacaggtgctgacggtagaaagaacacagacccaaaaccctgatctagttgcattaactccattagccctgagttcctctgtaaaatgaagactgtggaggcaccaactagaggatttctgtgaccttctcaaactctaaaatttttg

SEQ ID NO: 446254 - DNA, 815 bp, Homo Sapiens
ttttttttctggtttccaaagtttattaaaaatcaaagaatagaaaaactttacataaaaatatgtcaattttagcttccatattgttgtccacacacaaaaaaatcgaaacatgatatctttttgtcaaacctgtagcacgcgaccacagtggtagccaggccaattcatttgcttcaccatgacggaaatggaacatggtacctgtgtctatgaatcgagttttaaaatgcacaccccacgggacacggcactgccaggacccgtagtggtttccttaatgtggggtttacagtcaatattgctaatgcgtagagattagtacaggcctacagatcagtttttataaatattctttatcaataggttcacaatttaaatattttaaatatttttgataactttcggtcatcgagaactgcagacacagtgtgctactctattctggaatgcctcctagagaacctgcagtcgcagctgacagctccccatgacagagtgagccagtcctgcttcaaaagggcagaccgcagacattttaaagcttgtccttgctgggcgtcgatcacattcagagatccatctagaactccccactgctgcacatgcatcagatgtcatggtaataagtatcttgtcttgacattctccactagtggacttcaaagaccaacctacctgtagtgtttagcaagaccagacccccgttttaaaaacaggaagtcagatggcctacaagatgcaacctactcccaggacaactgtgtgctcccaatcaggcttaggcaggagaatctcaaacagtaggccgaggt

SEQ ID NO: 446255 - DNA, 718 bp, Homo Sapiens
  misc_feature (117)..(117): n is a, c, g, or t
aagggcccagagagcgcccccaaaattttttctccggtgtcgcgcggacaatgtggatgatacatgcaaatagcttccaatattgagaactaagtatgatagtagcgttggaggggnatttttccagtccatggcagttttattgggggttctcccttcccatattttagctggagttgggaatggggaagagaagaagggtgggacaagagagtgagactagaatataaatatccgtaaacagcatctgagcattagtctttaacagggaggaggaaccactggtgtatattaatttaggacacaggatcattataggggtagggccagctggtgttaatggcatgcaggcatatgtgatgccaaccatgagggctggaagaaccagaagccaaagaagaatatgaccgcatctattctaaagctactgtggtggtttctcatgcttcagagtctcgtaagtctcctggttcctggtgctcaggcccgtgtaaacaccatctgatttctcatagctggttatagctgcctttcgcacttggatcttcagtcgacagtagaggagggtgaggacaattccatacagaaacaggatggcatccaggatatagcagagctgaggctctcccagggccgctgcttgttcaaccaaaaggagtaagagcaagaccactgctggaatcatcttgggctggagatcggccgttctgacagcccc

SEQ ID NO: 446256 - DNA, 397 bp, Homo Sapiens; identical to SEQ ID NO: 325198

SEQ ID NO: 446257 - DNA, 491 bp, Homo Sapiens
tctggttctttatggaaaataggctttgtagtggcattgtggagcaaaggagactgttacaccttaattaactttttttactgatgcaaataatttgaggatagagaggagggaagtagtgaaagctatgacctaaaacattgggaccaaatagaggctcacagatatttggattattttatgtgcttattattaaataaggaaagcattttgtgatatgtggaagacgctatgtgaagttttacctatcttctcaaagaccttttcttttgtattttcttttggtgtttcttaaagccaaacaaagaaatgttcttaaggagacagggtgggtttttctgtgggcctttgttggtttttctgtgggccatcgccctctaatggaattgatctctggctgtttgatttttttcatattgtatttttaaaatttgttgtacagtgccctgtgagcaccaagtaccactagatgaataaaacgtattatatct

SEQ ID NO: 446258 - DNA, 845 bp, Homo Sapiens
gcaaataaccttgttattttattagaagcatatttacattcttgtagttaactttccagagaacattttacaaaaattttgtataaagtctggaaactacataaaaataatttctatctttcataaagggaaaataaaagttagttacatttactctaaaaccagacagaggaaaaaaacccagttctgtctgtcccttatacagaaagcactaacacagggcacgaggaataccgcgtgggcctctcagagatgggcattgcacggtggctccacggtgaggctaggtgaccccgccagtccccatccagaaaagcacaggggagctctgagggctcaggcggcactgagcggggacgcggcaactccttgaagggcaaaagtgatgtgaaggacgagccacgaggggaatgatcacagactttcacctgaaccatgaaactggcatttcacctaatactttctcacacgccaggctacacatggaaatactgtaagcaaagcccaaagcagccctgtctggtggttcccaacgctggcctggcctggtagaactgggtctatgttctgcagttacactgccgctagttcatgtttccccagcaccaatgcaccaaagagaataaaaggagacaattgtttcgcttgtctcatttgtgagagacctaaaaaacacccccatctgggtcaaattctgcagcaggcaagctaaatgctcactaacctgagaaccattgctagctccaagagaatcttgactgtgcatttaagatttgggcagtccccttttcctgttgaagggctgcccctcccttcccaagcattcagttataaccaatgttgag

SEQ ID NO: 446259 - DNA, 724 bp, Homo Sapiens
ttttttcaggaagcattttattgttgctccaaggacaagagctcacacaggtgacagtctctcagagcatctcccgcatggccttgctgagcttctgaatcttgctctttgcagacatatcaacgtacttttccccaattcggacaatcatcccgcccatgattgacgggtcagtcttgatctccagtttcagtatttggtttggactcaggaagctcttcagcaccgtttttaactcagagagaacagcgtcatttagaggagatgctgtggtcactgtgcatggcacttctccgcggtggacactcatgatggtggaaaaggcagagatgataccctgggtgttgcctaggcgaccattttcagcaagtaaattcatgaggttggccgtcagcggggagaacttttcccttttcggtgatgtcatttaggcttttcactttgacggtgcgcttgatgtagggattcagaacagccagagacactttggggtccttcaggagttccctacgcgcagcagctccttctccacctggtccagcttcttctccttagatgcagcagagtacagggcggttgcatagcggccttcgatgccgtagacctgaacagggggccttacaagcttggcaaagggcctgaccacagatgtactgaagctccgaacctgtcgagacagtccggacgctgcaggcgcggccatcttttcccgggcggctgtagg

SEQ ID NO: 446260 - DNA, 436 bp, Homo Sapiens
gcttcttaaaacttattttaatatccttcttccctcccccaccccattgggaaaaggctaaaacaatctggatgggtttaattacaaattaatacatactgtcattgtgtaaagtaaatcaacattgtggcaacaagggactattcttggaaaaagtgaaacccatattaacaaaatatgtcatggaagaaccccacttagtgatttcactggctgcttgaaagacagtcaatggaaaggtcaatgttctgcatgttctctggggcttgtccatgcctcggaagaaggtcttgcccggactcagccaagcctagttagctccaaacaggccctagaccaaaaaagcaagggaagagggcatcctttcaataggacaagggtagaaagggcagattgaaagataaaatcctgcagcttcacttaaaagcccacgggg

SEQ ID NO: 446261 - DNA, 462 bp, Homo Sapiens
ccccgtgggcttttaaagtgaaagctgccagggattttaacctttcaaacctgcccctttcctaccccttgtccctattgaaaaggatgcccctcttccccttgccttttttggtcctagggccctgtttggagcctaactaggcttggctgagtccgggcaagaccttcttccgaggcatggacaagccccagagaacatgcagaacattgacctttccattgactgtctttcaagcagcccagtgaaatcactaagtggggttcttccatgacatattttgttaatatgggtttcactttttccaagaatagtcccttgttgccacaatgttgatttactttacacaatgacagtatgtattaatttgtaattaaacccatccagattgttttagccttttcccaatggggtgggggagggaagaaggatattaaaataagttttaagaagcaaaaaaaa

SEQ ID NO: 446262 - DNA, 497 bp, Homo Sapiens
tgcaagttataaaatgtttattgatatacattttgtcttttataaaacttccgttggccacattgggccactgtgcaccacagtgccagtccccaggtggccagggcggagccagtgtccactttcgggtgggggctggagccaagaggctgtccaggagctgcccagtgggtcctcatggcctgcgggatacctcaagtgctcccggaggcagcctaggactggctcgtcccggagtcagaaaaggcaggtcaactacccaaggcggccaaaggcccttcctgtctccagagccttgacataaccagaaatccccccatcaaagtcaccaaatgactcgacggggggaagggaggttgtttgcagaaagacttagctacaaggcatgtgaaccagaactttcttccagacaccatttccttcacatttgctcactgataatgccttaagaggatcgaatctctggaacagccctgaatggcagggatgaggctgct

SEQ ID NO: 446263 - DNA, 1109 bp, Homo Sapiens
  misc_feature (52)..(61): n is a, c, g, or t
tacaaggcgaagataaatttaataattttctttaaataaatttgttatgctnnnnnnnnnncctctagtcattttctagagacttctttttgccttagggattctttatagttcctctccatgtaaacatattgggtaatacttgtggttctgaaataaaatgcaagcaggggggtgtacacaaaaactttaccactgaatcaagggaccagctgtgcagacattatgtaacagtaatattctatagttctgaacatggcacttgtgaatcaataattttagaatattttagaaaggacatttaaaaaaatcacataggaaacaaagttaaaatttagaaaaaagtagaatattttatcccatcttctaagcacctcaagcctaaacaaaacacacagaatgaaattttaatgatgcctgttaagcctatttgaaaacaaattctatctggcccccataaacggatgttcaggtgttcaggcaatcaactccttggttctccaatctgaaatgttcaaaggaaggaggtagaacttgggcaagtttaaagcatgtagctctgttgaatcacttctaaccaccccgcccccagctgatgaccaatttttacactgaccacagctgaaaatgtaaatgcaaataaaaagcttgagatgttattggacgaggtgtattaaaataaaatcaaaaatagaaatattaggtatatacacaacagcataagtgaaacacatcatgtgatacagaagtttccattcaaagcttacaggagaaaaatttagtgaacagaaccgcttgaacctcctgccaccgtggcttattagagccttgtagtcacttatgttccttcatatccttgggtataaatagtctcatacacatgctacacaatttagaaaagattgctgaatcataaaaatagccccgaatgtggcactttagctttctagagtacaactaaaattaatacttgatctttaacataatgttcaaatatttgaagcaacaaaggaaactcttatgttttagaaggccctataaggttcttcagagattagaatcttagttcttccaaactacattgtcaaaacaaatctggatataggaaa

SEQ ID NO: 446264 - DNA, 497 bp, Homo Sapiens
aaaagtaaattttattggttaaagagcccaaatgggaggcattaaaccaagcatgggcttggatttgggggccccaaattcccatttggaaaaaaaccaaagcaaccggggacccatgtccagggaggaaaacaaagggctggggttaatcacatgggggttttaaaatttttcccgcctaaagctcactagccccgggtttttaaggtcctttgggaggccccacagggtattggcccttttttggagcggagcaacctcatcatcctttagcttggggtggaaaacgcggttaaacccccggccattggggatccagggaaggctaaggaagacttttttttcagggccatacttcccttttaccatggttgccccgggatgaatccggggaggattttccaccagggattcaataggaccagccacacttaatccaatggcccagttggtaacccctttagctgggggacttaataggccctttcaaccaccat

SEQ ID NO: 446265 - DNA, 385 bp, Homo Sapiens
ttggttggaataaatttattgatagattttgtttattcatcagtagattgacatttgggttatttccactttttggtattataaatacacttccatgaacatctttgtatatgtttttgtgtggacacaggtttttatttttcttgagtatacatccagctgttgaaatgatgggtcagggtaagtctatgtttaacattttgaggaaccctcaaactgtcctgcaaaatggctgcaccattttacatttccaccagcaatgtatgagggtttcaatatcttttttaaagacctagcatatgatctatcctggagaaagttttatatgcacttgagaagaatattttgctattgttgggttgagcgttctataaatgtttgctag

SEQ ID NO: 446266 - DNA, 534 bp, Homo Sapiens
  misc_feature (43)..(43): n is a, c, g, or t
ggccacatatattttacatgtgtatgttttacatatatggaanatacacataagccttacagtgaaagatcagctaaaatctattgtaagattgaatgcacaaaatgcttttattactctaagcaaataaatcaatcaaatcacatttcccattagacagcacctcagctcctctatacatacagcagttcgctggattgaatacacaatgaacaactgaaaatgatcaatttccatcattctgataacacgggcaaaaaattcaaactctctgttagaatacaggtactagtaatcaaaaagaaaatttcttgatatctcccactagcattttcagatttagaatttaaccatgaagtacatatctagaactaatgacagaaaatcgcattttaaaataatattacagttcttctgtaaacctcagagtgatttctgtgtggggaacttgctgaccagaaaattaaatgagaattttgtacatcctcagatagccaaatagagttaaagggccactcccacaccacccccttc

SEQ ID NO: 446267 - DNA, 352 bp, Homo Sapiens
ggcaaatattaatattcttttccagttctatgcttctgtgttaccggaatcctcacaaaacctctgcagtcagtattcttcactccttttttaaggtaaggagacagttaacataaagaactgaagaaacctaccttcttcagagcacccagctggacctaaagccacttcccagtgtttaacacactaatgactcatgcatgtggtagagttcttccacttacaagaggattcctatccttgcatacacacatatcaaaaatttttaattattactttaatcatttggaaagagaatataaagtaaattatataatatcttgctgttttctaaaagataatctacccaaga

SEQ ID NO: 446268 - DNA, 451 bp, Homo Sapiens
cgagataattaggaaagaagatttattgtttacccttgcagtgtttatggggggaaaaggtatttacagaattactgttgctagcgagaatatacagtaaagtttaaaacattttggagaattgattttgattcttaaaatgtgtctttttgcaacatatgctctggttacctataaatacattaatttggcccttgaaaacattcacatcctattctttgttagccttatttttccagtccttgttaactctctcagtgctggataataaacctgcatttcttttaaaacatttgttcagtttcggcatcagtgtcttcccccagcactcccttaatctaaattagtaacattttactgtatgaaaaatagttgctgttaactaaaaattcaataggtgagttagacatggcttttcaagtaggattttcagtggcttcagattccatca

SEQ ID NO: 446269 - DNA, 746 bp, Homo Sapiens
ctcacactcacacacacactagccttctacgaccttcagctacacagaaactgtttatcatgtgacaacaaaattcaagtcataaggaagctcgcacagtgacccatataaatctcccagctgagccaccagctttaacatattcatattcacctaaacatgaagaacgaggggttcagacaggcccagatgggtctctttcaggaccctccctcccgttgatgcagcgttaggactccgtttaggcgcagagccgcttcccattaaaactgcatgtgttagcaattactgcaaaatccacaggtggcggttaatataaatggaacttgagctctgtccatcagggaagcgccaagaccagggccccctccagcgaacgcacggcctatgatgtgagctttgagtagctggggggagagaaccgtcttcgcaggtacttgaggacatagagggggaggcagctgaccagagtgatgacggagactttccacaagaatgacaaggtggcgatgaagtacacatcgatgaactcgtgtaagaacaccagggaggcgatgtagcaggccaggctgagcagctccgccactgtcatgagccagtgccaggtctggatggtcagcgccaccatgagcagctcggtgaggatcagcgaggtgaaggagatggccacgatgtgccgaactccgactcaatcagcagcagcgccccgtacatgatggtgctcccttgatagatgctaatccaac

SEQ ID NO: 446270 - DNA, 1670 bp, Homo Sapiens
  misc_feature (61)..(61): n is a, c, g, or t
  misc_feature (74)..(74): n is a, c, g, or t
  misc_feature (102)..(102): n is a, c, g, or t
  misc_feature (183)..(197): n is a, c, g, or t
  misc_feature (213)..(213): n is a, c, g, or t
  misc_feature (244)..(244): n is a, c, g, or t
  misc_feature (353)..(353): n is a, c, g, or t
  misc_feature (444)..(446): n is a, c, g, or t
  misc_feature (525)..(525): n is a, c, g, or t
  misc_feature (551)..(551): n is a, c, g, or t
  misc_feature (560)..(560): n is a, c, g, or t
  misc_feature (577)..(578): n is a, c, g, or t
  misc_feature (585)..(585): n is a, c, g, or t
  misc_feature (688)..(688): n is a, c, g, or t
  misc_feature (692)..(692): n is a, c, g, or t
  misc_feature (697)..(697): n is a, c, g, or t
  misc_feature (1543)..(1554): n is a, c, g, or t
agttgtgggtaaccaacacttacaccgggtttacatcagtaaggaggaggatctgggtgtngagcgctagagantgaggtcgtgagtcggcctgatgattangggtggggggttgggctgggcacgggtatttgagtggagggtgtaggttggaggagggtgttggggtgttgtccgcgatannnnnnnnnnnnnnntaggactttacgctcnggtttgcacggagcgcgtcatgaagctttcngccccgccggggggcgtcgagtgttggtgttggcggtgtttccatggctggggggcgtcggggtggtgggttgcggccagggttgtgtggggggtgttggttcggtagnaggtccaggttttgatttcgtagattaatgataggcttttgtgtatgggatgtatattgggtaggggcggggtgtgggggtcgccgtggcnnngggcgccggatggttccaatcccttaaatttgttgaaattgatgcgtgtttttgtatgggcctggtagtgggccattanctgggaggatcgcggaaaacacaccncggcggttntgccttattttaggcannggtgggncggtggagttgtgtttaatgtacggggcgcgttgcttttgtggtagggaacaaacaggggtggtcggcagaatttggcggggtggcccgtgggatgtgacganaacntcctntttttggcgctcgtcttttggcctctcgagaatgcgttaggatagggcatactaagcgcgtggcacggctgcgttgtaggaacaagccgtgacgtaggatgcgggatagtggcgcatgctagtaggctgggttagacgggggcgaggcttggtatacaacgcgaaggtggtcatttggttgttgtacaggtgtaggggtggttgcaggttacgcaaacagggggtggtagagcgggtcttaatggcgtggttgtaagggggggtccgggatagctgtcgcgccgcggtgtgtcgagtgagcgacgagggaagatccggtgctgaagagggtgtcgatgttgttttgggtaatgtaccgaaaagcgaaggtaggttggtcccaggatgttcagtcaacgtgaaaatggagtgttgtttaatgtttttcctgtggcataagggtgcaaaataaaaggcaaaaagattaaaagcaaatttctatctttctgttgcctagtgcttttatgactccgttaacattacaaagtcaacagggactatgcaaaactttggtataaatgataatactactaccgtcacagttgagggttaaggggtggtcaaaagaaatggaagtgggaagaaagattcagtaacacccccatttattaaaacaccagcaaattaaaagtgaaataaatcacaatgaattataatacaatttacacattgagcacagaaaaattaataaatctaataatatttataaaaaaagcaaaatcagtctttttccagagactaaaaaccgtttttcagtctgatcaactgctgctacaccaactttagagccaaatttaatttcaagtnnnnnnnnnnnntttacaaccacagatttcgcataaatggaaactggtctttccttgatttcccatcccgagaattccggaccggaccagctgttttagaggtagataatatgcctcccgcgtggcgc

SEQ ID NO: 446271 - DNA, 1120 bp, Homo Sapiens
  misc_feature (195)..(223): n is a, c, g, or t
  misc_feature (879)..(879): n is a, c, g, or t
  misc_feature (911)..(911): n is a, c, g, or t
  misc_feature (930)..(942): n is a, c, g, or t
ccacgagaaacattatcaaaatttgctactaaaagatgacagtgctttcacaagaatagtacaagttagctcgcaagtacaagacaatgggggtaaacagtcttaaattttctaagtagtaattttaggcttttctggcaaccataccatacttaattatgcataaactttgcagtttgtaacctgaaatctgtnnnnnnnnnnnnnnnnnnnnnnnnnnnnngagctaatttcaaaaattattagatatttgataaccctgtatcatacattatataatttcatatttttagcctcaaaacataggtgtaaaatattgaatttaagacttgaaaaataaaatcatttttgaaatgctgaaaattctaaaatttgtttacttaaaatcttaaataaaaaaggaaaatgattataaatgaccttgatttagcttaacaatgtgcataaaagcactgtatgtctttcccatgttttcactcacttaaaaaaaagtgttctttaatgtttttccttttgcataatgtgcaaaataaaaggcaaaaagattaaaagcaaatttctatctttctcttgcctagtgcttttatgactccgttaacattacaaagtcaacagggactatgcaaaactttggtataaatgataatactactaccgtcccagttgagggttaaggggtggtcaaaagaaatggaagtgggaagaaagattcagtaacacccccatttattaaaacaccagcagattaaaagtgaaataaatcacaatgaattataatacaatttacacattgagcacagaaaaattaataaatctaataatatttataaaaaaagcaaaatcagtctttttccagagactaaaaaccgtttttcagtnctgatcaactgctgctacaccagctttagagnccaaatttaatttcaagtnnnnnnnnnnnnntttacaaccacagatttcgcataaatggaaactggtctttccttgatttccctttgaagtcactaatgagtatctaaaactgttgtactgcaggtttttaatcaacttcctgagggctgtgactgggaggaaggagccataacgatctgtgaaagagcaggctctgtactctggtccc

SEQ ID NO: 446272 - DNA, 422 bp, Homo Sapiens
caaagctaataacagaaatctttttgtatgtatatttaaagcataacaaaataaaagtatttcacaaaagatgtccatattacagtactattgaaatatgaggcacagggtaagtatgcatttgtgggttaaaaacataatacattcattttaaagaataaacatttaatgtgagtaacattttggttaaaataaatatcatagtaaatgttaacagcaacacctgaagtatatggatacaagaaaggtgttttgtaatagatactatgttgaatggtaaagcattcatgaaatggctgtaatatcttactaaatttacaatcattgcacattgttgagcactttatttatatagagatacccttcatccaccattcctaaaccttaccatacaaaacaaagttactccatattttcacctg

SEQ ID NO: 446273 - DNA, 513 bp, Homo Sapiens
  misc_feature (355)..(385): n is a, c, g, or t
tttctccgtttatttttaatattaatattctcacacaaaaatcaccgaaaataggggtagggttgggaagacccctctgcccctggggcagagagacagtgcagtgcgagggtgcgggactgtaaaccccccacccctccgcagccccagcgtggagaaaaaacaaccaacaaaacgaaaataaagccccagagaaactcaccccggggtgtccctgccccagtgaggccctggccctgggttgtttcacacttaaaaagaaaagggggtgggggtgaaggtctgtgttttttaaagttggccggggctgggaaggacggggttccttttcctcatagttctttctttaaaaccnnnnnnnnnnnnnnnnnnnnnnnnnnnnnnnacaaaataccatttcagttcccacttcttcccctacagtacaggagttgctcaccctcaggtggggctggggtcgggtcgggagtggggggactggtccgagaaagtgcaggacgtaggggaggggag

SEQ ID NO: 446274 - DNA, 921 bp, Homo Sapiens
  misc_feature (306)..(344): n is a, c, g, or t
tttttttagttttgaaatagtcttctggtgaattagtgagagcatttgaacatagaactgtggcgatagactgtagttatcacaggtggaatatttatggcttcagctacttcgattagaaggagaattagccttctgaagcattcagggggtgcaccatgtttgccgtgatgtcatagatgcatcatctatagacactcaatatacttattacttgttagcatgtttttattacaatcacatctacaaaagtatacagataataaaatgtgcataaatgacataagaaatatagtgcttgtgtgnnnnnnnnnnnnnnnnnnnnnnnnnnnnnnnnnnnnnnnaatctacagtatttaccactgttgatatatatattttggagcagctcagatactgctattataaactaaattgtacagcttggtttattacaagtcacagaattatggttatataatgggaattaatatcctcagctacatatttatatacatttatttctcagcttccacctgacctgcatcaacagcccagttatttcaccagaattttgtttgcgtttcaatgtagtgtttagctttaatacactgcacttgttttgctatttaataacatcattaccaagttgatcaaaattacattagactcattatatacataaaatatattgtcacattcactagctaaacaaacgttacttccattttaaaagacatacttttgtaccttgaaagtttaaagccccaccttgcaacaggaagaaacatcaatgtcgggttttctactattcaaatataagcaatgttgaaaacaagctccccaattaaacacgaagtcatactctcttggagtgcctaaatctttgtcagtgttttggtatctgtagtgtaacagaatattttttaaagacatcactaa

SEQ ID NO: 446275 - DNA, 928 bp, Homo Sapiens
attacaaagggcttatgatgattttattggctgccagaggaacacagtaaataactcccaggtgtcttgttggaaattaatcatgtggaaattatcacttctttggtgcaataatgccttccagttgggccttcagctgctgatttgttcgcttcaggaactgaatctcctcattgtgcttcttctcctccacctgccgcctctcgctctcccgcttctcagtggcttcacattttgccttctgctcgttcacttgcctctccaggtctctcttttccgtctccaattctgcgattttcctctccatgtctgacttcccctgctcagcctgcagtgccttcctcatgccaaacgccacgctgctctcgtacagggtctggtaggcagcgatggtcatgcggatctcgtcccggactcgcagcagcagcagccccctctccgcacagttgatggtgacctcccggatcaactcatcaaaacactgtgagtagagttccctgcggacagggcagatgcctgtttccctggcctgccgctgctgcagctttaagtctaactgctcctggaggtgcaccacgtccatcctggtgctaggggtgctggacacctgctggatccatagctgcgtgtcttccacccactcccttgggggtagtatggcattcaagatttcttctgcctgctttgtaggatctgggacacagggagttgaggggagcttggtcttgggtggctgtggggctgaacctgaaggtccaggctgctgggggctgactttcagtagccgagccttggggctccgtttctccgtgttccggctcaccagcactggggtgtcgtacttgagcaaagagtctgcgggcggaatcatggcggaggcgagagtagcaacccagcagctgcctgtccagtgtggcccttgttgccg

SEQ ID NO: 446276 - DNA, 349 bp, Homo Sapiens
  misc_feature (202)..(278): n is a, c, g, or t
  misc_feature (292)..(292): n is a, c, g, or t
atagaacataattcagcactaaaaagaaatgggctatcttgtcctcaaaagatgaggaaacttaaaagcatattactaagtaaaagaaggcagtctgaaaaggctacttactatataactgcaactatgtaacatgcgaaatgatggagatggtttgcagggttaaggggatgatatgtaataaacaggaagagcagggatnnnnnnnnnnnnnnnnnnnnnnnnnnnnnnnnnnnnnnnnnnnnnnnnnnnnnnnnnnnnnnnnnnnnnnnnnnnnnagcatgtaaaaccnccaagagttaacccctaatggtaaacctatgggcccttgggaccacctatggatggc

SEQ ID NO: 446277 - DNA, 453 bp, Homo Sapiens
tggcagttagaacatagtttattctttaagtgtaggagtgcatgacataacacttgcctggcatgaccttagatcttacgaataatttgttattgccacaaagggtctattctgtcagccttatgatctttattttgacattaatgctggtcagttgctgtgtctaaaccataaaagagacggagatataatgaagcgtgtctgacctcccatcccgtcatggccaggaactcagttttaaggtttttctggggtcactttggtcaagaggggttccattcagtcaattagggggcttaggattttaagtttacaacttacttcaccatctctagggtgttgtctttatttatgtggtccagaatgtctacatgtggccaactaaaaattgatgactataagaaagggaaagttgctttaaggacgaccccagtatctggcacactctggcaa

SEQ ID NO: 446278 - DNA, 416 bp, Homo Sapiens
  misc_feature (132)..(140): n is a, c, g, or t
  misc_feature (402)..(402): n is a, c, g, or t
aatgctaagggttttatttcctaaaaggacccccccctttggccttcccaaatccctccgggtttccttccaatttccaccactcccaaccgtaaaattcctttcagtttcctccaacctaaaaccaaccannnnnnnnnaacaggctcaaaccttccaaatttttaaaaaaggaataaaggttaaatcccacctttcatttttacaaaagggggcagttaaaaaagtttactttgggcacaaaactgcaaccccccgttcgaaaaagctggaaggatcctcttttgtagcattttcaaagcccacggggaaaatgaggtctgcccgggtgaatttcaggtaaacaggaaaggttaccacactggcctttttctgggggttggtttgtttgacccaacgaanttgccttgggccaa

SEQ ID NO: 446279 - DNA, 450 bp, Homo Sapiens
ttttaataaagttgttgtttatttccacctgccagctccttcatggggcgaggggtcggaggctggagacccgggaggaaagcaagtcaagacaaatgcttgacccacggggactccaggcctggcctgcagccactctggtggacttggctttgggtctggggtcttagtgtcttaggcttgagggagaggggcagtgaagaggtgccctcagcctccccattaccccgcctctcctccacagaacccacatcctaggctggcctagccacaagcaagggggctcaggaggggcccacgcggatgtgagggttcatgagtgggtccaggttgggatcgctgtcagctgcggcccggcctaggcgagacatgagggcaaggagggccaggaagcccagcagtcccaagagtagcagcagccccgcccgctggagcagggtcagcggccgc

SEQ ID NO: 446280 - DNA, 234 bp, Homo Sapiens
  misc_feature (183)..(191): n is a, c, g, or t
tctatttacccacgattcttctttatttggctgccaaatataggggcacgttagtattgcggtcagcttaatattaagtagaaggcattaaaggctagaacagtggtgcaaaaagctgtaggtaaatctcttctatgctggctgttagcagagcactgtgatgctatataattgcagcaaacnnnnnnnnnggttctgctgcactgcagctcataaagggagcactcattctgg

SEQ ID NO: 446281 - DNA, 608 bp, Homo Sapiens
  misc_feature (66)..(66): n is a, c, g, or t
  misc_feature (108)..(108): n is a, c, g, or t
  misc_feature (344)..(439): n is a, c, g, or t
  misc_feature (441)..(467): n is a, c, g, or t
aacgtagggcacatgggctgtcacaccaccctatttagagcccttattggcatagagatgataaangtggactctgtgatggcctctcatgatctcaggatagcaggntaggggaactctgagtcatggccaaaataattggtcaatgtacagcctcagacagctgggaataccaccccaaatcacttggataaggagatgttttccttatcctgtgtctttaactctgagacggatggagttgaacaatcaacgattgttaaaaatgtaccaaatgtgtaagcatcatgaggtgtttaagctgagcttttaaattaaaattctgctgggtgtggcggctcatnnnnnnnnnnnnnnnnnnnnnnnnnnnnnnnnnnnnnnnnnnnnnnnnnnnnnnnnnnnnnnnnnnnnnnnnnnnnnnnnnnnnnnnnnnnnnnnntnnnnnnnnnnnnnnnnnnnnnnnnnnngccgggggtgttggtgtgtgcctgtagtcccagctactagggaggctgagatgggaggatcgcttgaacctagcaagtcaaggcggcagtaaatggagatctgtactccagcctgggcaacagagcgagaccctatgtcag

SEQ ID NO: 446282 - DNA, 493 bp, Homo Sapiens
taattttaattcaaatttttatttaatcaaaagtcaaaatgtgaatacttgattagtggaattattgaattggtaaaacatacaatcaaaagtgaattcttagaactattattatgtcttaatccaatcccactgagctatatcttgatttcatatttttatcatgtctatagcttgtatcttaattgatataactcaaaagtaccatatagacatctcaaactaaagatcaccaggtgcttagtttcagagctgggttgtctgctatggaaaatatttcccagaatttagatgagattgggaaagatattgcccagaagagttcctccaaaatgccctttatatagagctcaggagaatctggaataatactgggctagatactgccctaaggccttggtacactttaaactaccacggtgtgcctttctgaatattacccaattactccaggaagtgagcataaatataactgccattctttattaacatt

SEQ ID NO: 446283 - DNA, 579 bp, Homo Sapiens
gagggtgggggcaccggccttccctccaagcagcgtcgggggccaagccccaagacggagttggggggcccccaaggctccctagggcgggcttctctctctggacccttcggccccgggcctcagggaggtcctccgagccgtgaccggagacatctgggcggtgggagggggcggggcctccgcgctccagggaagggggcaggaaaattctttctcaagcctctccaggctcggggtcgggaatgagcgagggtccggcagatttggggctccgaggccacaggtgaccggggcgcggggaggccgaggagacgccgggcaggtcccagcgcgtgagccaaagtcggagggctgggagggcgccgggatcccctcagcccacgcccggcattccccgggctctgcaccgtccgggattcgctctgtccagtccagatcggccgggtccgtgctccgctggggtctgccctgccctaccccgcccggagtgagctggcaccgccgggcgcccaggacgcgctcagcccggacccagaacgtccgtgccccggcacccgcggcgtccggagcggccgc

SEQ ID NO: 446284 - DNA, 411 bp, Homo Sapiens
agaatcttttaaaatatgctttattaatgtcaattttaaaaaatatttgaccattacaaggaatttttatatacccccactaattaagacaagaattttgtacttgttgatgctctatttacacagttttcattggaaaactgctcttcattgctttactgtgatgctgacattgcttttgtgatgctgaatgctgagtacaagttcctctcccatttcaacctggatgggattatctaaaacaactgcagcttgtttccagtgggaggcttcacttgaagtatccaacctaatctcttcatcaaggtacatatgataccaaaatggaatagcagtcagtcttccagatttacaaacgtatacctttacttctctgttagaggtgttcaaatacggagtcattaaatctag

SEQ ID NO: 446285 - DNA, 1100 bp, Homo Sapiens
  misc_feature (498)..(498): n is a, c, g, or t
  misc_feature (618)..(618): n is a, c, g, or t
  misc_feature (630)..(630): n is a, c, g, or t
caagctttctagtaattttattttatcaaaacaccctcccctcctatctttatgacaccatttcattcttgccaaattcggtccacccccacacacacacccccaagctctaccaaatgcctactcaaagagctgttggacccctttgtgcggctatttacatcctccctcctaaaaaatattttcatcgcaaattcagtctgtcttaattctctcgggaaatttcaggcacaataatttcttggcctttgctcagaagccactatcccagggaatcaaagaagaggtgcattcccagatgtagagaggggcctttttgtattgagtgggagcacaaaggctccagggctcctaagcttgggatttcctctgagaaagtgaaattggggcttgtggagaagagaagtagaacccagaagcttattggcgagctcaggattcttcatccatgacatctagaatattgctcagaagaattttgaaagtgggacgctcatnctgctttctcatgcccagcactgtacatgatggtatataccttctctgaagccagatgaggcctgtagagacgtaggccttggggcatgtgttcagcagtctcactgttagtaaatctcntcatatggcatncttccccagggagtaaatttcccacatcaaaaccccaaagcccaaatgtcagatttgctgctgaacttgctatacatcaggacttccggtggggaccaccggactggaaatttggagcctactgagcttgtgtattcatcatccaggacatacctggacaggccgaaatcagatactttaacaactccttgatcgtttacgaaacagtttcgagctgccaggtctcggcgaaggaactgctttgactccaggtattccatggcttcacagacatccttgcacatctctagcagctgctgagtctggaagcggaggcgcatctccctcaggtagttcaggaggcagccattggccatgtactcagtgatgatgaagatggggcgctgcttggtgcagacgccatacaactgcaccagcttctcatgggaaagattcatcatgactttcgcttcttcaatgagttcatcttc

SEQ ID NO: 446286 - DNA, 630 bp, Homo Sapiens
cttttaaatgagcaagtttgagagtctgcagtttggactaccatgagaattgataggaaggtgggagtcccaggcaatcccaggtcctgtagcagcagctggtggggttcccactccatgccgtgcagagcctgaactcaggatgacacctgcacctgctctctggctgggctctggcacaggaagccctcagcaaacacccccggcacagccatgccatagccagacaacagctcgctgtaccacaccatcatgggagacagcagttattctgagcatctcactgctgaagaaaccaaggctcagagaggaccatgcatgcacaaggtcccacagggacccaagaatccaccaagtgtcagacaacttgcccatgctcttcacggagcaccttggaaccctccccgacaggcaccgctggctctcctgacgtggcctgcaagtgcacggagccccttcctcctcggccattcccagtttagattcccaggggaagcatcagatggcccctctcccctgctggcagcagagcagacggaaccagccagagcccagggcagtgctcacctgcaggccagtccactgcggccagcaccgccccctagaacctactgcgggcatggcggccgc

SEQ ID NO: 446287 - DNA, 928 bp, Homo Sapiens
gtaggtcgtggtgtgtatggaggtttgggtgggtgggtggagatgtgtgtgtggtattgtttgtgggaacagtcaataagagtaataatgtgcttggaaagactttggtaggtactttccgaagtgtaataattaatgcgataagaatggttagtaatttcccctctagaaggtataacctcgtgtacagttcactggcctcatgaagttcacaagccatcattcgcgggggctttcccagaactcggtgtgccagctctgctgccgcccccggagccccggctggagcagctatggcctcttcttccgcagcagctgcccgttgccttctggcctgcttcttggcttctggctgtgcgaagttccagtccaccggattgagaagctgctgagtcttcttatgggtccaatatggattaatgattagcgtaagcagagccagtccgacaaggaacagtgtcaaatgaggcagatacaggctgctgaccaggccgtcccagtgccagaaacacacccaccacatgtggtaggttagaaccatgcggcagtgaaacatgtgaatcatcagccactggttgagcttccaaaacagagactcggaccagcccgccacttgggacattgatgtggtattgatgtttagggcatcgatgtgagtgagcgcctctgctttcctttcaagaactttattttctgccacagccgagtgactcctgaagtccggtgtttccaggtgagaggagtaggcaatgcggagcacaggccaaggcctcttcctccagcacacacctctccactccacactgatctcactccagagaaacccagggaagtcacagccctgacctgcatcccagaagtctgcactcttatggaaataacgcccacaaagagaaaactggaaaactgcaagctgcgtacaggatgc

SEQ ID NO: 446288 - DNA, 362 bp, Homo Sapiens
tgtcattctcagcatacatttattgagtgctcactgtgtgccaggaagtaagccaggtgctagaaacggcaaaggagcagggaagaggcgggtcagccgctgggttgaccctggttaatacagggtacggattaacccttcaggctcccttccgagggcctgggcggggtcttggggccgctcctgcccaggtgttctttccagcaatggaaagggattcagcgaggtaagacgcttcccctctcctccattcagagagcggcacacaagaaatctacacagtcttcccaacatgtacacaccctgacatgcccggatgcatctcacacttagataaacacacacgcacacagtcagaggca

SEQ ID NO: 446289 - DNA, 1597 bp, Homo Sapiens
  misc_feature (221)..(229): n is a, c, g, or t
  misc_feature (724)..(724): n is a, c, g, or t
  misc_feature (869)..(869): n is a, c, g, or t
  misc_feature (981)..(1012): n is a, c, g, or t
tggggacattgctggtggtccgcggtatgttactcacagcttggttctagccgccccgacggggcagccctgcgctgctcttcgtgactccacttgtgtttttctccctgcccatctcatggctttcggtgggtgattgttgatacgcgccgcgctcgctccctataagatgggggaaccaccaatcaactgctggtggtgtgtatctcgcggcggtcctnnnnnnnnngcttcggtagaatgtgttggtctcgtggctccctctcatgtttggccgtcggcgatttctccaacgcgcgctcttgtgtaggagagctgtttttgtgtgcttgtcgtatgttggtttgccacgttgtgaagcccacagccgtcgtgagaaggttgtagagtttgtggggacctgctccccaggtggttagccaacaggggggctgcgccgcgctgttgttcggttccccttagggaggtttcgttggaaagcccgggagttgcccaaattaacacaatgggtacccggagggtaggttataaaataaagtggtgcaagaaggggtctcttgtttcaaatgactatagagcgaatagccccccgagagtgctttgtgtgccaaaagttccccagttaagcgtttgaagatggttgtgtacccaccgttgtgagaagcccacgcacatgggcttgagcctttacccacaaacggttataaagcttgctttatgtatngccaacacgaggcgtaagttcttgccccgttcagaactggctttgcgttgttttaacacaggcgcaccacagaccctgggcccactggtgagaccacttagacaccactgccaatcacagggaacacaaataatttttaaagtgngaacacaagacacacacagttggttctaagtgaaaacattccaaaaagttctaaaacacacccgtgttaacacacagcaccacacttcacttttaaggaacacaagagaggnnnnnnnnnnnnnnnnnnnnnnnnnnnnnnnnacatatacaaaatcccacaaatttaatgtgcgtcaatatccatgcagtaaataaatgtttttacaaatagagttctttttaaatgataaaaatattacactggacccaaaattccatacaaacattaatacatgatttctcatccattttgactaaatataggattactgaaaatgtgctgtagaaaggccactctcctgtacagttgtgcaaagtctgcaaaacgatagtgattcaatggtggtttcaaaagcaaagaaaaagatccccgctgtggagtttttactttctcctctacagcaaaaatattcactggcatatatctgaactcttaaagatgaaagtacattcactgagctgtacaggcaacagtataaagctgattagaagtagattttaggatatagaatagtaaaggaggttccctttctcctcctgaaaaaaacagcaaattgtgacttgtacattatgcagccagacactaaaaagcagcacagtcattttcatgctgtgatcactttcaaaaacagacgcttataaatggaaatatatgaagaggacttttccttagacttcatccactct

SEQ ID NO: 446290 - DNA, 133 bp, Homo Sapiens
actccagcctaggcaacagagcgatactccgtctcaaaaaacaaaacaaaattataattccaggaggtgcctgttcttggcttctgccagaggttacactttccagcctgtgggatggccagatgcaggctgc

SEQ ID NO: 446291 - DNA, 419 bp, Homo Sapiens
gtctgcaaacatcaaagatttttatacaagtctaggaagtacacacttaaaatatcagactggaacacttaatcaaacattgttttcctaaagtagtatctatagttcatttctttattcatatttctttaaatggtcaagttttctttcatacatccaaaatgtaatgtgatgttttcttattcaccaaatgttagctctacttgcagtctggttccaaactaatcagcctgcttttaaattttaagacatttgttgaaaatttataggatcaaaccaaactcaagtggtataatttttaaacattggattgtacattattgtaagggtaccagtaaccattattattaagaataagttagtgattatagctccttttgtgataattggggggaagggtagatcaccatctggaatgg

SEQ ID NO: 446292 - DNA, 1166 bp, Homo Sapiens
  misc_feature (61)..(61): n is a, c, g, or t
  misc_feature (73)..(73): n is a, c, g, or t
  misc_feature (77)..(77): n is a, c, g, or t
  misc_feature (81)..(81): n is a, c, g, or t
ggggctctgtctgagggggtacctcgttgggggggcgccagttcatcgggttttcgttttngtagatgtgatngtgntttntttttcccccattaaaggaaaaaaatgctttatgggaattttttcttattttaaccggtttaattccttccccaattttttaaccaatccaaaattggttataaaatttaaaggtatatgcaaactttcccattttttggaggggccattaggttatttaccaattccaattcaaccatcctttcccaaaaaaaagttttatataaatgtgaattatcatgcaattcctatacccctgcttttttcactaaaaaaaatatgagttttccttgtcaaatgaatatagcctatatatcatcttccaatggctgtaaaaatattcaacggtgtaactgtaccataattcatttaatcccctcctgatggacatttcaattggcttcagtttttgcaactgtaaacagtgctatgacgggcatttctggttagtcatcttcaaggattggtttctagaagtgcctatgaggatcctcagtgaatgttctgacacacaggcaaatgcttcacatctccttacacttatattcccatctagggcattggaaaatgcctgcttcagacaggtgtaattctgagaatgaagatggggaagggagaaagggtgcttaaggtaccaagcccagcattaacccagcctcctcgggccacacagaagtgagaagtagcacatttgcaatcagtttccatgaggtgtcggcgctgttgggaaggactgggagataaagagggaaaggtgagctgggtcctttcacagacagtatgaacgccaggtggcagagcctgcaactggggaacaatcattcaacagttatctatttgacacctgttttgagcctgaacctttgctggggcccatggagttataaaggcgtaagaccccagagtttagcatttggtggagactgtaaatcacccaactttatcacaagatgcagttatcggcaggtgacacatgcaccagaagacaggcttcagttgttcttgtccatttatctcagatcaggcacgaccctgtccaaacatggagcagagaatcttagccagtgtctccaaagacagagtgtacatcccgggaattccggacc

SEQ ID NO: 446293 - DNA, 834 bp, Homo Sapiens
ttcggtgtacatctgatttactgaattttaaagtctgggatgttagtggggaagaggcgaggtgagcattgcgtgacgccgaggactaggcggggcggggactgcacctggctaggcacccccaccctgggcaacttgcccacggaccccagggcagtgagtagtgacaggaggtagcccggggtgagacctctcacagcaagaagatggtgtggttgctggggcctccctggagagtgtcgtccctgcggcccctgggaagtgctccctcacgacggaaggtttcctgtcagtgcggtcccggggcctgatagtggcggtgggcgggtggggtcacgtgtcctcaaggtcctgaatgcccagctctgccccattcctctgattcccagtggctgctagctggacccagctggtgtcctgggcatgaaggcagggccaccgtccccagcaggtgctgccctcctggccagctgagcatcctggccaccatcagcgtccaggtgcccctactcgcccttcctcttcttcagaagcctttgcggacctgacctgggccagcttcccgcgattccccttccgcttcctatcaacgtccaggacccaagctgcccgccccaggccagcccttgccacttggggcccggtcttcacacgtgggagtctgaccggggctcctccctgaacagtcctgggtctgacgctctcaattatcacccacggacccacacgacgcccggctctgggcggggatggggccggggctgctgcggggtcccgccaggcgaggccccagccctggagggcaggcgccaggcggggaagccctgcggccgc

SEQ ID NO: 446294 - DNA, 474 bp, Homo Sapiens
tttttggcaggtttccttttattggttctagacagtttgtggaaggaagagatgaggccatctagaggccggcaggtcgcccagtgccccaaacactgccaccctgaagtagtgttggaagctgctccagggatgttgcagccctaagcacagtgacaggtgggggcaggagcagcaggggtccccgaggtgttgagaggctggtgagggcacagagaagggacctcctggggctgaggcccttggtggccctatgtgttggagcacgctggcgcttgtctgtccggcctccagtcacgccaaggcctcctgccctgaccaccagcaatgctggcctcaatgtggctgaagctggacgtgtgactttgaccccgtgagggggtcctgggagggctcagttgctgccgttgctgtcgtcactgtccaggtatgcacccagttggctcagggaggacgcgccaggcgtcaggggtg

SEQ ID NO: 446295 - DNA, 559 bp, Homo Sapiens
ggagaaattcattaaatacactttatttaaatagcatttatctcagttggctctatgccagttggtcttggtattggggtaagggggtattgcaggtaaaaagaggtgaagcagattctggctttcagtttcttagctcagaaattccagcaatccctgtagttctttgcatcccctcaccacctctggaatagagagcagggtcttataaatatgctgaacaatgtcatctagtttttctaactccttgtcagagcgccgaaggttctcctctaggatatttctatggctctggaacttgatcatgagtttttccttctcatttttcatctccaggaacatcactctcagtttgtccacctcctgagagagccacactttctcctggatccaattggtggccataggctgggcagttggagtccagctggcctggccagggcctcctggagcactttgggtctctgtctccgcacgccgaagtgagcgggtaaggtggggtcacctcctctctaagggcttatgagctcgccactcttgtctatctgttctaggatct

SEQ ID NO: 446296 - DNA, 508 bp, Homo Sapiens
ggttttggtttgttttgtttattgtggtaaaatacaaaatctaccgtcttacagtgaggtggcgttcagtaccttcaccacgccgtgcagccatcccatctgattccagaacattctcatcacccagaaggcagccctgtccccattatgtcacctagtcacccccaggtccccctccccagtcccggcacccacgaatcctctccctgattctgtggattggtctgtcctggacatttcatagaagtgggatcacagcgtacccttctgtgtctggtgtctctcactgagcgtgacatcctcaaggtgcatccgcactgtggcctgggtcagagcttcgcacctccttgtggctgagtctcgttccagcgcgtgggtgcgtgggtggccgcgccgtgctgatcccctcaccttcactgggtgttcggtgttctccgcctcgggctgtcacaaatcgtgctgctgtgagccactgcgtgcaggtctcatcagcgtcgcaggcgggtcg

SEQ ID NO: 446297 - DNA, 573 bp, Homo Sapiens
ggagcttttccatgaaaagtttattagaagggcacttacaagaggaagagagggaatgagaggacacaaatctttaacaataggggtacaatgcttaaacaggtgctctgcttttaagatataaaagttagaaaaatctaaaacactataaatacatacatgctttttacaaagttattaaaaggtcaggctggccgaatagtgaaggtaatcaacacagtcaatgttctattccccatccctccacacacatcagagtccagaacagccgagttgcaacagcagcagtgaaggtgagtgaaggcttcttggatagatggctccatctctctgtaatgctttcacccctagcaagggagtggggcttggttcagaggacccttgtggaagggcccagatttgactcagagctgtctgtttttacacgcggccacttgtttagccagcctggtttggtgtttctggatgctgagccaaaaagccactacaccctccaccaacattcagaactggctgtgccccaactcttccagccactgtccttgggaggagagacctttccaactttcttaa

SEQ ID NO: 446298 - DNA, 206 bp, Homo Sapiens
  misc_feature (58)..(70): n is a, c, g, or t
ctttagcagcaaaactccagtttattaagacaggtgtgacaagtaaaataaaattcannnnnnnnnnnnngcctctgctaggccagtatatttctgtacaaacaagataatgcaagatttgacagttaaggctttgaagcacagcacacaaaatgaaacaatttaaaaccccttcataaaaatgggaaaaattcccaggccaaagg

SEQ ID NO: 446299 - DNA, 441 bp, Homo Sapiens
  misc_feature (82)..(179): n is a, c, g, or t
  misc_feature (207)..(319): n is a, c, g, or t
aattaaaagaatggcataatactgtcctatatatccacctgctgaacttggcaattgttggcttttgggtttcttttgcttnnnnnnnnnnnnnnnnnnnnnnnnnnnnnnnnnnnnnnnnnnnnnnnnnnnnnnnnnnnnnnnnnnnnnnnnnnnnnnnnnnnnnnnnnnnnnnnnnngggctgggcacagtagcttatgcttatnnnnnnnnnnnnnnnnnnnnnnnnnnnnnnnnnnnnnnnnnnnnnnnnnnnnnnnnnnnnnnnnnnnnnnnnnnnnnnnnnnnnnnnnnnnnnnnnnnnnnnnnnnnnnnnnncggcatggtggcatgcgcctgtagtcccaggaggatcgactgaacctgagaggtcgaggctgcagtgagccatgattgcaccactccagcctgggtaacagggtgagaccttgctaaaaaaa

SEQ ID NO: 446300 - DNA, 344 bp, Homo Sapiens
  misc_feature (1)..(1): n is a, c, g, or t
  misc_feature (333)..(333): n is a, c, g, or t
ngtgtgaaccaccttgcctggccaaaagtaccattttaaataaagaaaaggaggaattctgccaatacaaatctgtgagcttgccatgggtcacttggttacaagtgacaaacccattaaactgccttcagtgctcatttccagcattgctggtttccagctgtacaaagtcaaacatttgtctccttttatctgttttcttctttgtcttgcttcatttccaaagtagttctccctgcatggttgcaaagatggttgccagcaactccagcctttctaccagcttagcaacatagaggaaaaagatcaatgtctgggaacaacagacactgnggaatacaaga

SEQ ID NO: 446301 - DNA, 538 bp, Homo Sapiens
tttttttccttaacagggcattttattgaacaggaaaaaaacactgaagtgtgcaaggattaaccagacgtggggaggggttgcacaaaaattcctacaccaccatggacagcaagacttctgtcccctttcatttcaaactggactttggcatggtctgggtttggtcgttaaggtctggttcaagatgaggcctcacagagagcagatcaaatcaaaccaaccatctggtcaatctgtcgcatgtaaatgctctttaagggcagggagtaccctcctctcttcaggtacacgattgcagttggagctggagttgatgacttttaactcatgaggtttcggcctgtgcacagactttcccccttggtcctgccctccctttttagagaagaatttcttccatgggaattcccgaagatgctcatccacagatacaatgtgtccctttgttgggaacatgtatctggttccagacttgtgtactcggattgtctttatcaaacagcagatacagatatttacaggtttcactgagaaa

SEQ ID NO: 446302 - DNA, 754 bp, Homo Sapiens
tttcttatttaataataaaatttattagcagatctcttgtaagacagttgaagaattcatacattttccagccccaaaaaggccacacagaatcacaaacattcaacgtgttccacgataatgatatgtatgagatgctcttccttataaactttattacgaagcaaataaaataatacattcataatatatgaacaaagaaatcatacattaagaatcctgttgtgatttgctcttaagagcaaagagctgcagaatctctaatataaaaaagaggacattttcaatgtgtccattttcctaagaaacgtgtgtatgaaatgcctccaagtttctcatactatatatacttgctttaaagaaggaaattatttctcatttcattttccaaatgagaaacattgcctaaattcatgacatccctaggattattcttagtctcaacttccacacagagatgtctgaaatagaaaactcttaagtatcagaattcagggatataagctttcacattcaaaagtgcagagaatcccaacattaacaaacaaatggttccacaaaaatcaaaattacaacttagacatctctaaaataatagtaatgtcactttagagtttacaaactacagaaataactgaattgtaacacatgcagagattatttcaagtgcttctaaatacctattagaaaatgtgtatctatttgacaatatatgttctctggagaaagatatatagggatacagcagagactt

SEQ ID NO: 446303 - DNA, 504 bp, Homo Sapiens
  misc_feature (490)..(490): n is a, c, g, or t
ttttttttatggatatagtatgtgtgtgaactttatttcatcatgagaaaattacttctgtgcagtaacagagaatactgatatctatatgatgataggcttttctttgtattcagatacataccttatatttgtacacaatatataaaattcatggaggaaattaatttctacagtacagtttctttgttggaagagaacttgttccgtttgtttcatctagaaaatgacccccagttctgtgactgtggtaccaaggatcgcagttccaatcctgtaatttattaaattagacaccataatcttatgaacattaaaataaactgaggcgctacatcctcctgcaggatgaaacgagagacataagtgctcaggctgttatgctaataactgatttttaccagaatagtatggttcccatgatgtattatgaatagaaatagttttcccgcagatctgataacacatattagcaacattgctacaaatntctctctgctctgc

SEQ ID NO: 446304 - DNA, 404 bp, Homo Sapiens
  misc_feature (299)..(323): n is a, c, g, or t
ctcgtgggtattttttattgaaagatcttttcccttcaataatggacattttacattaaaactttatacaactaaaatatgcaaattatattaaaatcacactaaggtattttcattaagtctctactttactgttggtaaaaatattgtaagacacttgtaactaatgtttctgctttaaaataagcaattaaactaaacgtcacaagaagagacaatacatactatatatttgcagataactggctaaatgataatttaatagtaataatgtctgtgtaagaaacaattgcacttgnnnnnnnnnnnnnnnnnnnnnnnnnccctctagttttatatataagtctatgaacagaggttaatcatctataaccttgccaggagaagtgtatgtttgtttaaat

SEQ ID NO: 446305 - DNA, 425 bp, Homo Sapiens
ttcatgtgtacccctgaacctaaaataatagttaaaaaaagtatttaaattatattttgtagtctttggtatctttaaattactaaatatttatttgtgctttcttgagtaaaaggcaaaatagtaacagtatagcttgttttataattataataaagtataagaaataaaatctattcaaagttagcattctaccggatgaaacattttataatgccacgtataattttgatataaaatattttaaatacatactcaaaaaggagtatttatttcatatagtattaacttgtcttaggaacaactctgcaattgtaagataagatgagcagcaacaaaatgtaatacacctggatttaagaggctagctattcataacagcaaaagccaacaaaaagttgtttcaaaggcaatcaggcatcaag

SEQ ID NO: 446306 - DNA, 556 bp, Homo Sapiens
  misc_feature (439)..(463): n is a, c, g, or t
tttttttgttttccaagttcctttttattcaaatgaatcagaactgcaatctgcacatgaaaagacctggggggaatgcctacatctggaatttcattacatcaacgttaaattttgtccgaccagttcttcattgctgatcacttttgataatgacagatccaacatgaaactcctgaagcaaatgaatatttaccttgtgctttcatgcaaatttagggaccaaactcaaaggtttcatccatgctggacaccagatctaagaattgtgacaggatcttctcatatttcattttagaacacttgatactagtctgatgatactcatgttagctgcactccaattaatgtttatcctaatgcaacagaaaactctgttaaactgtacaccgtaattggcatctgttaaaacaactccacttttgaacgaacagcattnnnnnnnnnnnnnnnnnnnnnnnnntttgaatttgtcagatggagttacgcaggtttctctatgatggcttttgcatgccatttccaagtggaacatggccaatctttgataaagtat

SEQ ID NO: 446307 - DNA, 553 bp, Homo Sapiens
  misc_feature (450)..(450): n is a, c, g, or t
tcagagaatgaaacatgctttatgccctggggtgatcagggtagacttgagcaggggcccagcattcacactgcaatatagaaaagtggtctgtctccctcatcccacctgcagatccagtcccttgggtttcagagtattcaatgcacatttggttgttcaaagtatggagagctagattgtccttttgattcctttatcccagtggtccacagaaagtcaaaggaagttgcatggtggggctggtctgaaacaggagacacatctaaggatcacaggctctcacaaccgggaaggccacagcaaactaggattagaccaacccaggtgccagaggggtggatggagggaagttctgcatcccagagagatgcctcactggaagaacatcagaggcccagttggtatagtcagtggtggctggccagcccagcctcgctgccgggatgnataagtcttccccagctgcaggggtagctgatgggcctgaacccactgtgcctcgagagcaggatggaaccagcacctccccgtgatgttcattgccgctcct

SEQ ID NO: 446308 - DNA, 442 bp, Homo Sapiens
gggcgtttttctgggttttttaaaacttctccaatacattaaaactttttttctcgccacatagcacttctttcttgcctctttcatttctgctcctggtgttgcctgcctcctgcaagacccagatgaagaaaccttttcaatggtcgagatctgagacttggagctggaggggctgaaggcttgaaggaaggtggttactggtcaaaaggagaagttcatttgcacaaaaatataaactggggaggatgagaccagcacatacacgtatggattgatctacaatccatataaaaaaatagacccaaattgtcattttacatttgcaatattatacaaaataatatatatttttaaacaacacatacccacctacacacacgtgcgcgctcactccttcacacaaggtgcttgtgacccctctgtgcttctgcttgtgggg

SEQ ID NO: 446309 - DNA, 328 bp, Homo Sapiens
ggaggatcaccctgctttattgcctgggccttaaggtaatcaggggtgtccctctccagccaggacctgggattccgtttcaggagctcgggctgaacggccaccttcctggggggtctgacccccagtgcctggtgtgaaggggcaaacccccatgacaacagccaccccgcatgtcccggcatgtcccggcactgtgtgagccacatttgctgaagtctgggtcctggccctggcagggtgggctgggctaggaaatgacacagcagcagcatttgtggcagcggcaaaagggggggcagtggcagcagtggcagcaggggcagca

SEQ ID NO: 446310 - DNA, 1602 bp, Homo Sapiens
  misc_feature (645)..(720): n is a, c, g, or t
tacaagtaaatacataggcctttgtcccacaaaatgattacgatatcccctgtccctctacatgggcgcgaaccttcctctttttcgctacctcacgcactgaacacgatttatatttggcacactcctttttgtatggtttcatactaaacccactacgttctaatttcccccacccagttctttcacacaatgtgtgtatcataatattgtcttctcccctctacaccagcgaacttaatgcttaaaatcgaatgtctatctatactggtcggtaaccatgtccttcgccctccagacattattccttgtttgcgcacaaccgtaccgccgcccatagagcaaaattggttgctgttccttcccttctcgtcagaagtgggatcgccctccgcgtggttcggcccgttctcatggctcttgccgtttctccaacatggcgtgtctgcatccagcgtccggtctgcttcggcggcgtattgcggggtgcatcattcaggaaggggcccctctctctaattattggggtggccggactttcgtctgctcttccccaatcgtgtggtctagcgcgcgcttgtccatcttcgcgcgtcctccccggtgagtgaattctttctccatactacgcgcctcgatgtatcnnnnnnnnnnnnnnnnnnnnnnnnnnnnnnnnnnnnnnnnnnnnnnnnnnnnnnnnnnnnnnnnnnnnnnnnnnnngctggggctcaaggcaagcagcccccactgaggccccacccagcctccgggctgcctggcctgtgccatggggtcccaggctccagcagggagctcgtaccttccctcagctgagggcccacctggccttgggatgccgttggggtagccagggtgggggtagccaggggtggattcacagagaagatcccagcccatcccatgccagggtctggggagcctcccgaggaaggggaggaggaagaggaggaaggccctgcctggccttccgctcagtcaccccgaggtggcttctggacccccagcatgttgggcaggggcatgggggctgcagggcggcgtgaggggctcagtccagcctggggcgctgggcagtcacgagtctttcttgcaggagcaggaccccagctgctcctccaggaaggaaatctgctcgctcagggagtcgatgcggccgagctgctggaaggagtgcaccaggaggctgccggggtccgggagcccatgctccagtgcctgcgaggccaggctgtgcagtggggccagcaccagctgcagcttctcctccagcaggtccacctggactgcagcctctgcacttcttccttcattgcactgtccactcctgcgggcagagccaggcgctgggtcacggccggccggctccccacccacacccccaggctccctcctgtccccagggagaggcagagccagaagactcaggcccaggcctctgccgcccccgctgcctgcctggcgctggccagaggtctcagggctatgccgcctaagtacgtcggggcgggtggctctgcgcagaggctcagggtcccggccacgctgagggaggtcaaggctgaggtctcagcggcgttttcg

SEQ ID NO: 446311 - DNA, 941 bp, Homo Sapiens
aaagggaaagcagtttataaggcagtgaagaaataaagaatggctactcccatagagcagggtgttcccaaaagcacgaggaggaaggcgtccacctgggtacgctttgtttatatgtaaggatataagcccaaaaacatcacgggggaagacgtgctgtactacctgggctcgtcaaaggattgccaatctttgcatcaacgcctgtcctccgcaagcatctgtatcattatctttaaagcgaaacttcaactaagaatgcttcttgttcttaagatacccggacatcgggacctaagttccgggtctgctgcgtaaaagtttattaacctgttcccgtgaccgtaaacgcccgactcctggggatgcagccagcggggttcagcctcagtttacccagcgctgttcgagctggagtcgctctggttggagcgcctgaccgcgagggccgaggtcaggccggactggggttctccggagcgagcaggagaggagcgtggctcctgcggagcggcgcggcggggaggccgagggcagggcgggctcgagctcgggctcttctggcagcgcctccatccccgttccgttcacccggcagccgccccgtggaggaaccgcgccccatctttagccctgtgaaacagaaaggcccttcctccggcaggcagctgagggaaagatcgccctgcaggggatgtcgggcctgtcactgctttgttgcgggccacagttccctcccttctccgagcgggtcgcacgtccgaaggtcacccccgccaggtggctaggccctgtcgccactcgacagaggaccgaggaggaaccaacccactgcccagactgcagcgccgccacgctagggcccgcgccgacaaccgtcatgactgggcatgcgcaaaccggccccgccgggagccatttcgccgggctgcagggctcga

SEQ ID NO: 446312 - DNA, 329 bp, Homo Sapiens
acagtttaaaatgaaacaaatttatcagcttccagtttgtagggcagaagtgtaggcaagctgtgactggattctctgcccagtattccatgaggctgagatcaggggtcgcagagctgcgttgttttctggaggcactggagaagaatctgtgtgagggcccttcaggtcattgccagagttcaggcacagttctgcatagctggggaggcctcagcaaagttacaatcatggcagaaggggaagcagtcaccttcttcacaaggcagtaggagagagtgtgagcgtgggaaggaaagctctgcatggctggggaggcctcaggaaac

SEQ ID NO: 446313 - DNA, 472 bp, Homo Sapiens
tttttttcaagtttgctattgtatcagaaacatatcttttagtattaacagtttccaaaggattatgtcttccacattccttatactgatagatttccccttggctatgatttccctgatatgcaaaacagttccaatccatggtgacatgtatatacattcttaatatttataaatttttacttgtctatagtctagtattgttataccatgtggtcttgttataatcatggtttccattctgtgagtcttcagattatgagtccaacacacaaggggatgtccacactaacctgtgtgaactctctgatgtacaaggtgtttgacttcaggcaggagtttctgattcactatactgaaagggttctctgatataaaatgaggtctgacttcagagaagccttcccacatctattacattcatattgcctctcctatgaattctctgatggctgttgaatgctgatttgtg

SEQ ID NO: 446314 - DNA, 705 bp, Homo Sapiens
ctctcactcctcacccggcagcaggccgcgcctgcagcagctttgggcttctggatgggcggcagcctccggctctcccgctgcacggcctccagggtctcgatgtgcatctggacaatgtctggcaccatgacatgcagccccttgaggtggtcgctggtgaccccactctccgtgcagaccttgtccacaaagcggttgatgaagcggaccacagccccagctacgtcgcaggtctctgcatcctcgaagccgctctccgtgtcatagctctcggccacactgccagccatgctgttggtgaccaggctgttgctggcgctctccaggtcgcccagcccggcacgctcccgaagtaggcggctcttgctgctgtccaggggcaggaggaggtagctcatgcggttggcatagtggatggcctggctgaacaccgtgctctcctccttctgcaccagctcctgctgcttctcacgactcagagttggccacaagcgccgctgctcagaagccacgtctagggcagagcgctcgtcctcctgggaaggtgcctccccaacctcctgggcgggggccaggtcctccgtgggctccaggtagagggcccggatgtgagtctgcacatccccatagaacatggcctcccagaactgtggcgtgcagcccgctcatcgacgaattcgagctcgaccgatttggcctgat

SEQ ID NO: 446315 - DNA, 562 bp, Homo Sapiens
ccacattagaatataagttttttaatttttataaataacttatctgttacaaagatagtttacccagctaaatcacaaaaccatcaactcaagatatccaaattacgttttattaataaaacaagtaaaaactgatttatcaatcttcacatagaactgcagatgaagctgaaaaacaaggcctattttaaaaataaattgcatcaaacgtaagggctttgggtctatggtttaattacctaggattgtcatatttcttcccatatacaaaatgcaaagcctgaaagttagggctctgacattcatagagatcaactgtaataatcccatttaaaacacagccacttgcaaacatttacagtgggtggtagtctatattatcttccatcctttgctctatttcagcacttcccttagccccattctaagcactcatataatttcataattctgtctttttaaatgcatactgttctttttcttgatttcagttatatacattcctgatcatctgaatattttccttacaaaaatatatcatcaaaataaagagatgcttgag

SEQ ID NO: 446316 - DNA, 467 bp, Homo Sapiens
  misc_feature (449)..(449): n is a, c, g, or t
attatataaaatacaaactattttattgtcacaaggaatatacagtaataaatattacaatatgctatataacatactgtagacacaattttctatagtatgtaatgacaggcacatataaaattaaaatatataaatctagtttttacacttataaatcttttatcaaatgtaattcaagttatcacatggtttacctaaaatacaacagcacttttgagattcatccatgttgtagtaagtgtcaataaatcatttctttatgtctgagcagccctccatagtattggtgtacacaatttgtttaatcactcatccactgatgtacatttgtgttacttcctaatttggggcaattatacaattgctgtgaacatctgagtataggttttcatggtaaacagaatttttctttcatctaggggtaaatacctaagtgtggagttgcngagtcatatggataaatg

SEQ ID NO: 446317 - DNA, 503 bp, Homo Sapiens
agcccacactcttactaggttagcacggaggggcgggcgccttggcactcagatcttacggtcgcagagcataattgcccaaccaaccgcccaaagaaaaataacaagcggcggggggttggggagggaggagggccgacgtggaccacctctggcttagctcaaaccccctgaaatctcgcaaacgcagctagcactcaggctcgagctcctcccggttcccactgacacagagggacccccagactccggaggtggggggtccgagagtaaaaataatgggcagatgatcgtcgcatcctctgggctcctcgtggaacgtcagtgctggccagtggcttctgtccggatgctcagtagcaaactttaggcaagctcccctgagggagtggtggcggtgcaggctctctccttcccttgttcgttcgtcagacctgctgctgcagactccagagacgctttgctctctagtggtgttaccattctgatgttggagcggccgc

SEQ ID NO: 446318 - DNA, 231 bp, Homo Sapiens
ctcttaacaaggctggtttactttctgccaaaagggggccctcaccagcagtccacccacgaaagcccaccaaacaaaggaaacggggacatttataacctttacatcctgatgcaatcccctatggctgggtcccgttcccattggctgggatgggacctcacactctaaacttaactggattggttaataatttaaaactttcctaaatgggacgaagggaaaaaggac

SEQ ID NO: 446319 - DNA, 499 bp, Homo Sapiens
  misc_feature (18)..(18): n is a, c, g, or t
  misc_feature (53)..(53): n is a, c, g, or t
  misc_feature (90)..(90): n is a, c, g, or t
  misc_feature (352)..(400): n is a, c, g, or t
aattcttccaaaaagggnaacccggggccaatccttaaaacgtgggcaggaangggctggtgccaaaacttgacaaatccaagacctaangcaactttcacaccaagagactctcccagcgtccccaaacagacccctcactcggtgcttgaagcctggggtccaacctctgaagagggtggtcacatcccggcccgcggtgaggaactcggatcttccctcctccctcaacccacgctgggacctttcccagcaccctttgggacgcttctagaactgttctcagcccttcagagccttaaggaatccaccggtcccgctctaaggggttctaggagccagcaatcctggnnnnnnnnnnnnnnnnnnnnnnnnnnnnnnnnnnnnnnnnnnnnnnnnngggtccgctgaggtccagtccactagcgcgcctcctccttggggctgcacgcaggggccgcgcggtgcacgcgctggtgcttgagcaggtactgcttct

SEQ ID NO: 446320 - DNA, 865 bp, Homo Sapiens
tttactccttccaaaaatatttattggatgtctacgacgtgccagcagtggccctggtgctgggaatatgcttggctctccctcgccacagcctctggcttccatccttggtatcgccgagtcttggcaactctcccacaggggcagcccccggccatcctgaagcgtgggcaggaccggctggtgccacagctgaccagtccagacctaagccacttcacaccagagactctcccagcgtccccaacagacccctcactcggtgcttgaagcctggggtccaacctctgaagagggtggtcacatcccggcccgcggtgaggaactcggatcttccctcctccctcaacccacgctgggacctttcccagcaccctttgggacgcttctagaactgttctcagcccttcagagccttaaggaatccaccggtcccgctctaaggggttctaggagccagcaatcctggccacccccactccccacacacaccccgcaaacatcccccgcaccaccacgggtccgctgaggtccagtccactagcgcgcctcctccttggggctgcacgcaggggccgcgcggtgcacgcgctggtgcttgagcaggtgctgcttctggctgaagccgcggccgcaggcgggacacaggtagggccgctcgcctgtgtggttgcgccggtgccgcgtcaggttgggcttctggctgaagcggcggacgcactcggggcacaggtaaggccgctcaacccgtgtggatgcgctggtggatgagtgagcgccgatcaccacgcagaagctcttgccgcacatcgtagcagatgaactggcgcggctcgacaaggacaaacgaggcccgcatgtccac

SEQ ID NO: 446321 - DNA, 494 bp, Homo Sapiens
gaggaggggccacgacatttattgaactctgaggagcacagagggggctccctggcgcgtctgtgctctccagccaccctggaagacgctcaggggaccccaagagccttcccagcacgcggcatctctgtgaaggcagggcctccagcaggctccgccctccaccccactcctggggtcagagccccaacatcctccatgaccctcctctcctggcgctccccatgggtggcaggagagccaccccccgattccagcacacaacctggggcagaaactcgagcccagacaacaatgactctgaggggaaaccgagtcagcatggcagggctgtgtgagagaggaggggtctcaggcaacagttctggacggttctggatggcagaggagaagggcggacaggaagtgctgtcggaacgccgacccagctcctaagacagacagctacgctgacaccaaggaacaatatttctaaaataattaccactgcatgc

SEQ ID NO: 446322 - DNA, 275 bp, Homo Sapiens
ggggaaagggggatcaccttatattgataataaaacgtccttgggcggctacagggagaaggaaaaaacagattaaacctttttgaatgttaatttggaaggcgttgatcctggagtgaaggtccaaaatccctccagggatggggccctttccgaccgtcatctcgggggtcaggagcacccgataaagtccttcccaggttggctgagtttttcctctttccaacttctgacaaggaggtgatccccaggctggtgtcggtgaactgggaatt

SEQ ID NO: 446323 - DNA, 475 bp, Homo Sapiens
ttttttaagggcttaggcaatgttttatttccataatgaattaatctccataaatgacatttttcacactggtaaatacagtttaaatgtctcaagaactttgtctcatcacccaaacaagactaccagttccttaaagcagggaatacgatccttattttacattcattttagtatatacctcacagaggtagcacagacctctgagcatttaccaacaagattaaaaaatagctacacatctaaattccaggctaggtccatagcctcacggccactcaacacatacagttataggaataacccaaacttccaacagggtttgtggaagccatcacaggacaggactagatctctcaggggcaaagtgaacaaaagccagtggttcattttggtcccccaccgtagtgaaattaagagcctgacccagcctggttcctactggtctgaacctgatgggttgagactccagaaa

SEQ ID NO: 446324 - DNA, 538 bp, Homo Sapiens
aggttccctctcatttagacttggtgtccttcttttctttatttaaggattgggttggtaaataccaaaaattgggtataataatgatatataaggacaatgagaccattttcatctgtctggatgatgcactttttttatctgaaaaggttaaatactcaatcttataatgcttataagaagcattaaactcaacttataaagaatatatcagaaacataaatatgacccttatcctctactaccttagaatattcatttttctttgcttagagttggtccctgagtcacttaggaatacatttagcggtgagtaacagtcctgacatcagtggcatcaccacacaagggtttattctttcacctaaaggaggcctggaggtaagcaatccacagcaggaatggtagtgccacaaagttaatagacactcagcttccttaactttgctctgcaacacttggcttacatcctcaaactcacctcacagcctggggggcgctgctggagctctaaccattcctttaaatagcaggaagg

SEQ ID NO: 446325 - DNA, 550 bp, Homo Sapiens
ttccactgggcacatttctgcccaccttctttttattttttaaacaatacacttttgttagtgcttattttgtggcaggcaccaggcagtaccagggtgggggcagaaataaatcaaagtccttgtccttgaaaaacaatctcttgctggaaggctggattcagtagactgcttgggcaggcttgggaaggacccaggtgagcacagcatccaccaggctggctggcaggtaggaggcaggcagccagagcagcttggcatcccaacctgggctgtagcgggttcgggggtgtcgagcagtcagggcatgctccaggcatcggctcaccttggttaggtccgggtcacagatcaggttcatgatgcgctgttgcattttcaggtacttggtgaggaaggcccccccatagtgggcctgtgtggcaggaggcagccgtgcccagcaggcctgcagggttttctccagactctccaggttggtcacaggggttcggaagaagccaggctccacgatggagactcgtatcccaaaatgagctacatcccgcct

SEQ ID NO: 446326 - DNA, 1401 bp, Homo Sapiens
ttttttctctggtataatgtttatttaaatagtaatcttaaaaaggctttatacaaatcatataaacacagtttgacattgttgtttattttttacattgaagaatcacagtaaaagctctcaagttcccgtgatctggctcagccagtgaatggtcgaatacctctaactgcaaaccctgaaaaagttaacctgctatgtgacaggttaactctttcccttgttttcttgtcattcatgcttattccttggaccctcatccctgtcaactcccctgccccaccaaagacagaaagcaaccctgtggccctgttgaccacctagtccgggagagtgtggaggtaatgtgtcattcagtacaaggcaaaaaggagatcaatactggcagtggggtttcccaaagggaatgactcaaggagatgggtcagctagcctacccacagataaagataacaaacacaccaaggtgtcccctggccaagtcaaaattgggcccagcgtctttctttctgtcttacgacagagcagcctccagccttggtgtggtatctacatgtagccctccgtaccctgcttctttttagcattcaaggcccactcagggcctcaaattagccaatggtgaatatggatataggacttttagagggatgcaggttgagttgtacataacttagaggtgaagtgcaggtccgaaacagggctagactttggagaactgtaaaatggctcactgagcatgacagcatcaggacccctggagtggctttcaaacttaccttcttctgcaggctacttctggaaatccctaggacttaccagctttctgaacactgcgcatcatgggagggtgaagaggaaaaggggctagttaaaatcttgcttctactgtgggccgaactcaggaggagccctaaagctaagcccttgggcttgacagctctacttttcacctctaactaccactgtgccaatgagtgccgagtgccaagatcagctgtgacactcggaccctaggtcaaagtcacaacaccaccactgagtcccacatgaccattcacatacacagtagatacagagaactcaaagcagcaaagacacacacacatgaataaacagctgttggttgaactcttgctctctgcatacaaaacactgtgacattaccatttgaactagcatttccataagttaacatttaaaggaaccagccagtcccattcacccttcccctttcacctgggtataagacaaatgaaatcgtgggtgaccacagcagcaaaaatggtctgacaatgatatgcaataggctgggcatactggttgagtttcaaatatatttccagcacacaggcaatccttaggcgttaatatgaaatcaagatttggatcttgatgcga

SEQ ID NO: 446327 - DNA, 540 bp, Homo Sapiens
  misc_feature (423)..(423): n is a, c, g, or t
  misc_feature (481)..(481): n is a, c, g, or t
  misc_feature (487)..(487): n is a, c, g, or t
  misc_feature (497)..(497): n is a, c, g, or t
  misc_feature (505)..(505): n is a, c, g, or t
  misc_feature (516)..(516): n is a, c, g, or t
ctctggtataatgtttatttaaatagtaatcttaaaaaggctttatacaaatcatataaacacagtttgacattgttgtttattttttacattgaagaatcacagtaaaagctctcaagttcccgtgatctggctcagccagtgaatggtcgaatacctctaactgcaaaccctgaaaaagttaacctgctatgtgacaggttaactctttcccttgttttcttgtcattcatgcttattccttgggaccctcatccctgtcaactcccctgccccaccaaagacaggaaaggcaaccctgtgggccctgttggaccacctaggtccggggagagtgtgggagggtaatgtgttcatttcaggtacaaggggcaaaaagggaggatccaattactgggcagtggggggttttcccaaaggggnattggacttcaagggaggtggggtccaggttaggccttaccccacaggttaaaggttnaccaancacaccaggntttccctnggggcaagttnaaattttggggcccagcgtttttt

SEQ ID NO: 446328 - DNA, 525 bp, Homo Sapiens
  misc_feature (42)..(42): n is a, c, g, or t
  misc_feature (58)..(58): n is a, c, g, or t
cccttgggcttgaaggcccccaacttttcaccctctaactanccactgtgccaatganttgcccgagtgcccaaggatcagctgtgaacactcgggacccctggggtcaaagtccacaacacccacccactgaagtccccacatgacccattcacatacacagtagatacagagaactcaaagcagcaaagacacacacacatgaataaacagctgttggttgaactcttgctctctgcatacaaaacactgtgacattaccatttgaactagcatttcccataagttaacatttaaaggaaccagccagtcccattcacccttcccctttcacctgggtataagacaaatgaaatcgtgggtgaccacagcagcaaaaatggtctgacaatgatatgcaataggctgggcatactggttgagtttcaaatatatttccagcacacaggcaatccttaggcgttaatatgaaatcaagatttggatcttgatgcgaacaatcttatccttcacacagtttcattc

SEQ ID NO: 446329 - DNA, 1046 bp, Homo Sapiens
ggaattcccgggatcaatcagccacaacacagagaaaagtgggttttgaggcagcccctgcagcaggcaggtggaaggaagaagagagcgagctgacagctcagttctcacgccttctgtattcctcagaattcagattttggccgtttttggtgatcatcgtgattctaagcgcactgttccttggcacccttgcctgcttctgtgtgtggaggagaaagaggaaggagaagcagtcaggtgagtggaaggtccttagggtggtgctcctgcctgaggccttggatcctgtgactttgtcctgcgtccagtgggatgtgtctgggagcacagcatctccttttcctcaacgagctttgagaccagtcccaaggaatttttgacaatttacgaagatgtcaaggatctgaaaaccaggagaaatcactcttctgctcccacgtcacaagaacctgcatatacattatattcattaattcagccttccagtaagtttggatgcaggaagaggaaccacagcccttccttcaatagcacatgctgacctgataactggggtgttgagaccagctttgtccatggtatgatgtttgatttatgaagacgcattgttagaaatccatttggcttcttcatagaagtggcttcccagaggaagaggcctctcagaaaccatgttctatttaagttctgagtcctgatgagtgttccccaggatgcacattgaagggagggctcaggcagctgagggctgagaatgaggcagttggaatctagacactatgctgggttccctgagtcgtcaggccagacatttcaacaaggctgtggggagcagggctgtgactctggctgagcccaggaaagcgacaagggtgaactgggagaggacttactcagagaccccaacaggtgatactgcacaaagcctggttcttcaattttcctaccctgtatctaacataggagtttcatataaaacggtgatatcatgcagatgcagtctgaattccttgcctgaattaaatttatgtatcctctccaaa

SEQ ID NO: 446330 - DNA, 188 bp, Homo Sapiens
gtagtaacttatatttatgtattttaactcactgcccacaaacagtaatttacaaaacaatttataatatgaacacattttgtttaaagtatgagaaataatagttatttctggaaaagggagtacaggaaactttcacattctagggcagatagttgttttttcttaaataatgagcacttagttac

SEQ ID NO: 446331 - DNA, 1166 bp, Homo Sapiens
  misc_feature (68)..(79): n is a, c, g, or t
  misc_feature (673)..(673): n is a, c, g, or t
  misc_feature (964)..(982): n is a, c, g, or t
tttttcagctgtcactgcatggatttttaattaaataccacttcataatgttatttgcacctagtacnnnnnnnnnnnnaaataagacatgccataagtcgtgaagttaacaaaatataagcatccgcacagaatatattctaaggtgacttcatttacaccgcttctcagagaaacacacaagtaaccttttgtctgcctatcagccagtgttgaaacagctttggaattcacatggaaggctgccgggctggttccccaacactagcctgatggagtcctgtatccgcaccgtgccgtcaaactggctggtttccactagaaaagcaatggagagtcagctctcccttctttacccagcgttcaactccacactgcaaaaactgcataacctgaaccctgctgtgatggcaactgaagtttaaacccaagtttggtgaccttgctttaggtacctgggctgctcaaaaggagaccgaggtgtgatatttaacattgcttgcaacattcaagagggcttggggacgtcagagccatgagtaacaataacgaaccagggctatgagtggaatcctgatgtaccccttccccatcttaacagccagtgctgcgtatggccatcagcagacagtccatttataccactggacaaagattgggaggaaccagcccnaaagacagatgatggctccacacccactgtgcttcctgactactcaagtgacctacgtgtggcttccagtcaggaaactaccatttaactttctgctcagccctttcatggctcaggttggtgggatgatgccactgctccaaacccgaaggcaagggagcttcccaggcctcagcagcagttcctgggtggcactgtccccatgatctgaagcagacatgaaattacaatacgcttttattcactcatctcaagaaagctggctggcccaagcctaaaaggcccataccnnnnnnnnnnnnnnnnnnngggaaggaagggggcagagtaagtttgggagcatatatatgcccaaattattaatgatcacccgggtttgacacatctaaatagcctccctgctcaccttctgtttctccctcctgcctccactcccagctttagaaaaatcatttgggaaaggagaaatatataaatagcagtgaaacctgcc

SEQ ID NO: 446332 - DNA, 449 bp, Homo Sapiens
gaggctttagaaatttattacaaggccctcatagtagaaataaaaatatagatatctatgcttcccatctcgctctcagtggttcgaataacaagtgcaagtaacaaaatagattgtctctataattcgcaaactgggagttcatgggtacagagcaacttcagccccagctcccaagtcccaaagtgtggtcttgtcgagggtgcagacaaggaccaaccaagttcaaccaagtctctcgtatgcagacgccagctccagtctcaaggagggtggggcttgcagtcagtctcactccacccccgagtggacagtctggaccctccgtgatggggaaggcggcagcgtgccccgccactccggcttctgctccatcccaaggcctcagcttcgggggtcctgtctcctgctggcctgggtccccccttctccgtcggatcggcggccgc

SEQ ID NO: 446333 - DNA, 520 bp, Homo Sapiens
aaaggactaccacttttaataaatatactaaaatattcaatatttgcccatcattaaataaaaaattaatttttaacaaaattttatttagagcattaggaaaatcatattcaaaacacagaaataatcagactataacaatgctgcatagatagtggtatacaagttccctgactctaacttcttcctaacttaaaagttcaattttcaagtcaccaggtagaaaatggtggaggcattatttcctctttctgaggctataaaaaaatggcttcaatggtgagaaggcaaaccatttaaacaatgaagattagattataccccaatttaattctattcccttcttgtttgttatttctcataggatgaaaatttaggaatgtaataattattgggaaaggaataaggaagtgaattacctcttaggagataccctgatcagtgcctgctttaatcagacaaaacactaagttttaaaaattaccaaccacaatattatggcctaactaaaattggccat

SEQ ID NO: 446334 - DNA, 902 bp, Homo Sapiens
  misc_feature (351)..(351): n is a, c, g, or t
  misc_feature (354)..(373): n is a, c, g, or t
ttttccatgttttaacacctttatttgtcactttaccaacttgacacacaatgttaacgacagcagacacaggagcagtgtgcacacagacacgagctgtttcactacaggtttgcaagccaggctcaacagcaagtccaacaggcaacaccacacctctcacctgcaggaggaacagcagggccaccccaccccgcggacgtccggttgtagtgcggtttagacatcagcagaagtggctttcagagtcagaacagccatgacgtggacatcacccgtcacactgataaagtgatgcactcagtactccctaatgttaatcacacagtgttaaaaatatattggcacatnatnnnnnnnnnnnnnnnnnnnnaatttgtttccctttcttgaaaaaaacttagtacaaactagtagttacacgatccctttcaagtttctcttaagttgtgcagatttcctttgtggtttggcttggtttagttttttaagaggtcgaaagaaagaagtaaagcatcttgatgtgccccaggactccccatcacatgccccagggacaaacgctgcaccctggaccaccagagctcacaaagtgttcagtagtaagaggaggaaagatgcaggttcagtgtttgaaggacgttctagcctattgataacatcacggtccagcctcatcttccccctgtgccatcccctcgtggtgtgtgctgtggggtgggagggtggccagtgcacgcgtgattgcccacaggaggagatgagctgggccagtagagggacaggtaagtgtccagggccaaggcgtctccatctcaactcctccccactccatttgtacagcaggagccacaggcctgtgtgaaaacacaggacaggccctgtgccaacaaaacaccatt

SEQ ID NO: 446335 - DNA, 619 bp, Homo Sapiens
  misc_feature (476)..(476): n is a, c, g, or t
  misc_feature (494)..(494): n is a, c, g, or t
  misc_feature (503)..(504): n is a, c, g, or t
  misc_feature (530)..(530): n is a, c, g, or t
gcccttatgggatttatattattttctctgtgctggttaaaccaaggagcttctgctcttttccttagtcacctgggggaggcagaaacaactggagaatattgataaacctggaaatagggccggagagtatcagagaaggaagccttcgggaaagtaaagatgtggcagccagtattcccgttataaaaggatacaactccggcctcatagtccagaaaaattcccacaagcaggggctgctcatgcagatgaagggaagttgggggagaagtaagtgctacatagcctttctttttgcacagcctgagggtccagaatccagactgaggctcttgcttcatgccagtgcccctctgcacatttttcatacaaactcctaaattccatccggttcctttgccaacatctacttcaaagtaacgtcttccttgaggtgaagccttcacaacccaagacacagggggaagcagtanatctcctgaagatgtgtnctgattctnnctggtgtatccacgagtcacttgtcntcgatcctcagagaagattagttcgtgatgagctgtatctggatcagagtcacactaacttgatgactccttaacattttcttaccatc

SEQ ID NO: 446336 - DNA, 499 bp, Homo Sapiens
aaggcataaaaattgctttttattgggaaaaaagttgtttaaattcagagtttattagaggttgtttcaaatatggaaacaagacagaaaggaaccactaagtaggaggaggagagaaatatgaaggaagttaatgggtgtgagaatgtacctttggtaaggatggttacaaaattaacagaataattctgtatgagtcttgcatagtaactttttatcctaaagcaggatgaccagttgtttaaggggaagtataaaacaaagcagaaagtttaagcatgtcactgaaggtctgtgcagatcatgaaatgttcatgaaggatacatttatgaaaggagttgtgtgtaatgaagttggcaataggtcagaatgaaatcataagacactgagcttacatatatacttgtacatatgtatatgtacaataatacagtatattctatacatatgctatatatttgtatatacacgatagtgtaaatgctatacatgcactat

SEQ ID NO: 446337 - DNA, 833 bp, Homo Sapiens
ctgtcttaaatcaggggttttatagctccagaaatatacaaagttaggaatttcttttgacttgaacttggtgggatacctgtataactgatacataacacacgggcaaactgtgggagtaacctggttgattaacttttctcctcagtttcaccagggaacaataataggtacctgagtctttgatgaaaaacttaaccttaagaactagcaaaataacattctcaaataattaataaagaatcccagtagcagaaatgttttaactggcatgtttcttctttgtccgctaaaatgtattgacaccacacatggaataatgcattatgacaataattaactttttgaagtttggtgttttgagagtatgaaatgaatgaataagataaaatatccttgcatatgcatgtaagacctataaggaacgcagtattgaaaataaaggaatcaaaatttttacccatggaattttagggttgggtaaatcattcatttatcttaaatctatggtttgctggcagttatcaatctgctcaattttaggcattgttgtatacaagaaagtaaaaatttaggtataacataagccagcctcttaagttctctatagtgattatctgtgtactgactgaatcagtgaatgagaacactagacataccagaaactcgtgcttgtcatctccaagccaatggacttaactgtttgtggcatttaagtccataaaacatacttcactgtcaaacacataggcttataggtttcgtcagttttccatgtgtaagataaatgtctgttcttagccatccagatattcagtcaaatttaaatacaa

SEQ ID NO: 446338 - DNA, 640 bp, Homo Sapiens
  misc_feature (629)..(629): n is a, c, g, or t
tgtcatttcaaagtgaatttatttcacacttggttaatagggaattcatcccatttttaggtggctcccaatattggtccttgttttccacctctcaacacatcctactgtttctagaattgtttcctattctcctacttttcatatactgctagcactctttgctaggaaattaacccctctccgtctaaccatctcctatgcttctcgaaatctaactctggcaggagtcactcactgaagcattccttatgttcccagtgagattcgactgctgtttctctgtgtcacaggatccttgaggtgtcacttcaccagctggaaacctctgtggctggtggcgccttctgcctaagtattgctcatgcccactgggcttgttccacccactcggcccagcaggctgtgctcaggtcttgttaccagcccagatcccacacctgccaagggcgagccaggcacagagtggtgagaggtgtgtaaatgagtgagaatggggcccagccattgcgcacagccagacaggctagctgctgcagagggcaggcagctccagatgccaacacaggtgatggctctgtgcaaggctgcagctggaccagatgtgctacatacagcttctgctgcangcatccatatc

SEQ ID NO: 446339 - DNA, 732 bp, Homo Sapiens
  misc_feature (620)..(620): n is a, c, g, or t
  misc_feature (668)..(668): n is a, c, g, or t
  misc_feature (716)..(716): n is a, c, g, or t
tttttaaacaaatgaaagctgccttccctgcagccctcaggtcacctccagggaggcaggagacacgcggtcacactcagctcgggacctcaggctatgccactgctccacggctgtgcggtgcgtgttgagcatgcgcctccagtggttggtctcagaggggcctgaagagtactggccaatgacgatcctcccgatgaagtcattgctgctcttcatgttgtggccgaaaactgtaaacactaggctggcattttccagttcttcttggggaactttgaagctgaaggattcattgtagaaaggatcaattgtgccccttaagaaggacgtcttcttggttttcacaagtttgagtccatgcaccagctggattttcacaaaggggtctgaaccttggctcacatctgtctgaagaagttgcttggctcgaatgacatcaacattcagtctgccagcacttgggagataattcagtgacagaagcagctcccccagctccacttcattctgagaactgggaatcagcgccttccaccagtgcccgcccttgaccaggtcaacttcacaccaaggcacagaaacttttccaatgacacagtggcgggagaaactatcanaattcaccacggtcaggagcaggtttctcctctgggccttcagaaggngatctcgaggtgtacgctcctcaaccacggccttctggatcttgcgtntgaccccgtctcgctt

SEQ ID NO: 446340 - DNA, 579 bp, Homo Sapiens
cttgtaaaatgctttattggaaccaagaaatgttgcgcttaaagcttacaaaacagagacagctaaagctttctttcataagcaacaattgtcttctccatccccacctcattggaactgacatgatgaaggatttgaaagtttcataacttaactcagcgaagctcagtagtacatttagtattggttatacaacatttgtttaataaatgcaatgaacaaagctacacaggaattagatattgaagcagaaaaggtggttttacagtccctgcattaacctctaattcttactaccctggccaagaaagcattttcacctcctgcgctttccttcctgtgtgcttgtggttggttctttcttctcaggctttctcattctgatgctgagatagttctgttcacttagcaacttgggacagtgacacaggggtttggttctgtactttcttttccaccccaccccccaccgcaatcctcagtccccttcctaggaccattttctactcctagcattaagaggactcatcgttatatacttggagatggtccagttctgatagagtcccccggacgcgt

SEQ ID NO: 446341 - DNA, 403 bp, Homo Sapiens
tagaggatcccccgtttagccttaaccctggcaagaaacatttcatctcctgcgctttccttcctgtgtgcttgtaggttggttctttcttctcaggctttctcattctgatgctgagatagttctgttcacttagcaacttgggacagtgacacagggtttgttctgtactttcttttccaccccaccccccaccgcaatcctcagtccccttcctaggaccattttctactcctagcattaagaggactcatcgttatatacttggagatggtccagttctgatagagtcccctggaagactcaattctacgtcaccctcatgatttcctgttaattccactacggctaatgttctaggaagacacccttatctctgggctcagatgggaacacctccctt

SEQ ID NO: 446342 - DNA, 492 bp, Homo Sapiens
  misc_feature (164)..(164): n is a, c, g, or t
  misc_feature (304)..(304): n is a, c, g, or t
  misc_feature (410)..(410): n is a, c, g, or t
  misc_feature (454)..(454): n is a, c, g, or t
  misc_feature (464)..(464): n is a, c, g, or t
  misc_feature (470)..(470): n is a, c, g, or t
gtaaaatgctttattggaaccaagaaatgttgcgcttaaagcttacaaaacagagacagctaaagctttctttcataagcaacaattgtcttctccatccccacctcattggaactgacatgatgaaggatttgaaagtttcataacttaactcagcgaagtcnagtagtacatttagtattggttatacaacatttgtttaataaatgcaatgaacaaagctacacagggaattaggatattgaaggcagaaaaggtggttttacagtccctggcattaacctctaattcttactaccctggnccaaggaaaggcattttcacctcctggcggtttccttcctgtgtggcttgtgggttggtttctttcttctcagggcttttctccattcctggatggctggggatangttctgtttcacttaggcaacttgggggacagtggacacagggntttttcccgnaccttnctttttccaccccaccccccac

SEQ ID NO: 446343 - DNA, 805 bp, Homo Sapiens
ttttttttgtacaaatttgttaatttattacaaaattttcactcacagaaaaacacaagaaaacttttatacttttatatttgggaaaaggaactggtatctcagatacaaaataatttacacataagccatacaattttattttatatagaaataggtcattattacaacagctgtacaattcactacgcttcatcttataattacataaaatcttttctttagaaacatctcaacataacaaaacatacaaaaaaagcaaagtgcattttgaaaaggaaaatccaattctcagtattctcatgaagatatgtagaaagatgcagcattctcactcaaagggccagcatgtggcagggtctccttggggactgcagtcccccaggcctgtctggcttgtaaaacctctcccctcacagacttggagttctcagcagaattctggaatgttggctggcatgattgtgctttgctttgagtccacctttggtagttgcaatcaatggaagtaaacaggaaatagtccagtgttttatttaggggctaaaaaatcaccaccagcatggcctggggtgaaaagcctcatcccattagggtttaggccagaaagtgtgaatctgtagcttggttaataacaaccagcttctctgattggtgggctgctgttgttactgtggtctctgaatgaagccatgagaccttattattttttttaaaaaaacagaaagtgcctaagttatttcctctgtgtagctgtgcaaattaaaacaaaaacaaccatttaaaaataatgaaaaataatccc

SEQ ID NO: 446344 - DNA, 400 bp, Homo Sapiens
  misc_feature (26)..(26): n is a, c, g, or t
  misc_feature (170)..(170): n is a, c, g, or t
  misc_feature (177)..(190): n is a, c, g, or t
atagccagaagatgcctagaaaagancaatgtggaaggagggatacccctattaaatattataacataatgtttacaatatgagaaagtctaggaatttagtacatgataaagcatctcattcagagaaaaaggctttaaaaatggtgttgagagaagtgtggttaaccnatttggnnnnnnnnnnnnnnttgaatcgatttctcacaggatacacaggataaaatctgaatagaacaaagacccaatttttaaaatgaaaccctctttctaactagaagaaaacatagatgaattattgtataatctgacagtgagaaaaactttcctaggactgaaaattcagaagcaataaaaagagaagtctatagaagaattttcagccagatggaatggctcat

SEQ ID NO: 446345 - DNA, 451 bp, Homo Sapiens
gagaactgttaattgattactttatttcatataaaagttacattgaaagaagaggttgaaaagtcaagtatacttgatttgcacacacttgccaagtctcacaggattcaaccacttggataattgttttattgataacaggatatacatattaaaagcctcacactgaagcccacacgcatgtccaacccagacaacaatgtgcaaatgaatatgcagaacaatctcggaaactggcgtctccaggatcacccacactttgtccctctggctgtgacgcagctcttcccccaacggcgcacacgcttctgcggtgaccaagtccacttccaaaccccctgcaggtttgctcgcttggctaggacggtggctcaggtaggtccctttgtggttttgcatcagcagtggtagaagccctgattcggatggggtacagagtaattaaaaacaa

SEQ ID NO: 446346 - DNA, 577 bp, Homo Sapiens
tttattttgaatcctttttattccgaagtataaaatacagtgaagtacagaaaacaaatgtacagataatgaattctcataaatgaaatacacccattcaccactcaggcaaagagacagaatagtagcaagaccctagaaatcccattagtgtccccttccaatcaggacaccctccaaccccaagaaaggtaactgccgtccatatatggtaacacttctttacttctcataagttttactgcataagcatccatctctaaaaactatcctttttctgccttaaaaaatttatatgaatgcaattacacaatattcattctttagtatttgacttctttggctcaacactgtaagaatcatctgtgtttttatgtgtagccataaatcagtcatccgtatgattgcatcatattccagatgcctaaatatatttaatcagttttactatgatgcacatttggttgtttttactctgtagctagtatgaataatgctactgaacactaagtatgtacctagaaatggtattgctgagtcataagttatgtatagattcggctttcatagaaaatgt

SEQ ID NO: 446347 - DNA, 764 bp, Homo Sapiens
aacaaccccggacaatccagtactcagtcccatcactgatgccccacccagccacggaaacgacatggtttatatatgtggtgtcctggtattcggcatagatgcctccggtgtagttagccagtctttctgttgccattattccacagctgatgggaccatttgcgtagatttctgccatcatcttctccctcccagagagggagccgtagtctcccaccctccagagggtgtagttccggatggcgtggcactctttgaattcattgcatgtcccacattggttaaacttgtcacactcctggtccttggcctggtagttgttgcaggtctcgtcagggatgccgtgctggtgggcgtagtcccacacggacaggtcattacccccttcacaggagccagcgttaccgcagtcgatgacgttctgcacggacaggagggtggagggccacgctcccttcctcttgatgttgatccgatccgccatagcgctggtgctggcgtgggcccagcaggagccgcagtattgggggatgtgctggttccgggtgatgctggcatagttgacaccatccacattgcgccagtcccagctcttgggcagatccgctggggacaggtactcatgaggccgggggtatgtgctgcgccccagcggagccagcccgtccccccgcagaggccggtagcaggtctgtccccggcggaagtagaggccgccctgcgccgcgcccgccagcagcacgagcagcagaagcggccgc

SEQ ID NO: 446348 - DNA, 358 bp, Homo Sapiens
cagagctcacactttattcgacatcatagaattcatagtggagaaaagccctatgaatgtgacaagcatgggaaagccttcagatggagctcaaaccttgtgaggcatctggaaattcatattggagataaagttttggaatgtagcgagcgtggaagaattttcaatcagagctcaagtctaatgcagcaccaaagaaaccatacagaatcataacctgaaattcaggctctgtcaatttcatctctgtaacctttattgtttctgagtcttgagttttctcatctgcgcaaggactgcaattcccaggggcctccagggcacccggccgctccagtccagtcgtgcaggcggcgcg

SEQ ID NO: 446349 - DNA, 885 bp, Homo Sapiens; identical to SEQ ID NO: 137363
  misc_feature (231)..(249): n is a, c, g, or t
  misc_feature (281)..(341): n is a, c, g, or t
  misc_feature (395)..(398): n is a, c, g, or t
  misc_feature (401)..(402): n is a, c, g, or t
  misc_feature (404)..(407): n is a, c, g, or t

SEQ ID NO: 446350 - DNA, 631 bp, Homo Sapiens
gaaaacgccctatgaatgtgacaagcatgggaaagccttcagatggagctcagaccttgtgaggcatctgagaattcatattgtagataaagttttggaatgtagcgagcgtggaagaattttcaatcagagctcaggtctaatgcagcaccaaagaaaccatacatgaatcataaccctaggaagacagtaatgataaagatgtcagtatgtacatataggaagagagaaggagagtttgtttttgtcctaactatttggaaaattgtaagcttcctaagagcaattttcatctgattcagtgtatagtacttagtctcaggtcatgtgcagatatgtccttcccaaatgcttaccacaagataaatcagaaatcttgactggaataagcttctagttcctttgctttatcatgagaggttccacaccacaggaaaatcttgtaaatggtggcagctgcataaagcaccatcatcatcacaaaatggtgtccttgtgtgtcctgtttagcagcaccgagaatctaatagctttccccttgtctgtttttccttactatgaattgtgccaggggaacagtaaaatgggtatgatatcctgaactctagggtggatgtcaatagggcaggta

SEQ ID NO: 446351 - DNA, 1558 bp, Homo Sapiens
  misc_feature (191)..(231): n is a, c, g, or t
  misc_feature (233)..(234): n is a, c, g, or t
  misc_feature (236)..(239): n is a, c, g, or t
ccttccacaaaattttccccaaggtatgccgtttttccccgttcccggaggttttaaaaaagagcggcccaggggcctaggtttaaaattagggctccccttttggggggcccccttgtcccaaagaaaagtggggtacgggtaaacttggggccccctgggggggaatctttagaggcggcccccccttnnnnnnnnnnnnnnnnnnnnnnnnnnnnnnnnnnnnnnnnntnntnnnntaaagagttgaatgaatttttatgtatcaacacagatggattccagtattcattcactaagcagaaaggaataattaatttttatcatccaagtaccatacaaatatgaagttaaaatataattttcattgatggtcagtactgtagattccatgttatgatgaattccaagatcatcaatttctgcatctttagtagaaagtgtacttttcagtgttacgatgtcttcaaagagtcttcggtttgtctttatcttgctctttttgactgcaaagtgcaaaagattcctgaacaaactgcctgcacattgggcactgctgaaaatacttcacacagccatcacacaggcatgtgtgtctgcatggtaagagtacccagttcacagtcccattctggcaaacaacacagtccttgctgttctcttccgatggctcaacttcactttcagagagtcccaccttttccaaacaaacttctgtctgtgtttttttcttctgaagaggaattgttggagggagtgaaattattatttgcagacatgaaaagttgcttaagatcatgaaattgaccttgagccaagagtaaatattgatacaatattctgcaggatagtttataagtcctatcaggaatatgaatcactgacaccatggaaataatatcataaatttcccggtcatcctcatcagctaaggtcaatagcgctaccaatggatagcgagatctgggtactgtaccaaagtcttcaattttagtatctcttggtaactggcaatatatttcttctttgctatcctttttaataaaatactgttcctgatagagatattcactatacagagcatcttctaatgcttggggagtgcttattctgaagcaataaacatgcttctgcagagcttcatataatttttgaacactgcacccccagtagcatgtaaggaggctatcttcaaggcaatctgttgtcaaggttatgccagttgtaattgaagctgaagatggattagtgatctctaagccaaaaggattcttgacttgtctcatttgctttttgaaaactcttgtgctgaactgggtctcttctgaatttctcagaattactggaacatcccaaccaaaccatcccaataccaggccggtggtcacgatgaagcaggtaaagaccaccgcgatgtagaaaagcggcgagtattcataaagcgttaccagaaacaccgcagccatcagggtcttgctctgggtagagcccggctccagccgcggagcccagcccagaccggctgagccccgcccgctcatgcagggaattccggacc

SEQ ID NO: 446352 - DNA, 879 bp, Homo Sapiens
  misc_feature (802)..(834): n is a, c, g, or t
cacacagccatcacacaggcatgtgtgtctgcatggtaagagtacccagttcacagtcccattctggcatacaacacagcccttgctgttctcttccgatggctcaacttcactttcagagagtcccacctgtttcccactaacttctgtctgtgtatttctttcttctgaagaggaattgttggagggaagtgaaattattatttcgcagacactgaaaacgttgcttaacgatcatgtaaattgaccttgatgccaagagtaaatattgatacaatatttctgcaggatagctttataagtcctatcaggaatactcgaatcactgacacccatggaaactttcgtaattgaagctgaagatggattagtgatctctaagtccaaaaggattcttgacttgtctcatattgctttttgaaatactcttgtgctgaactgggtctcttctgcaatttctcagaattacttggaacactcccataccaaaccagtcccaatacccaggcacggtggtcacgactgaatgcaggtaatagaccaccagcgatgtagccaaatgcggtcgagtacttcataaacgcgttaccatgaaacaccgcagccatcagggtcttgctctgggtagagcccggctccagccgcggagcccagcccagccccggctgagccccgcccgcccggccagggtaaaagccactacagtgcccacggagcggacaaacatttgtaggtccgcacttgcctaggggttctcactgccgctctcgacgaattcgagctcggccgatttggcctgatnnnnnnnnnnnnnnnnnnnnnnnnnnnnnnnnnatgcgccgccaccgcgtgactccagtccccctatagtgattatcc

SEQ ID NO: 446353 - DNA, 540 bp, Homo Sapiens
ttcaggcgcgcgggcgctgcgactcccaccggtttttttggaaataaaatatttatttcagataaagttaatatttccataattaaggtaaagcaaacatatatgcttgagtccattatttaaggactataaaatgacttccatgaatattagagttcctgaatgtcatttgagtatctgcctacatgcttgttggaagcttctgtagccttttctttgtaggaattccagtttttctgaattcttccctttccttcaggtattccattttgcattcttcataaaaggctggatcattatagtaagcagttagacattctttcaatgcagaattttctttccggcattttactaccataagaactccagagttcttgcaacatttggtaaaatcttgaacttgttcagaacacctctctttggccttttctctcattattttagggatcaaaacatctttttcgacatgtctgagatgctggtctgcggggtcgagcgccatctcggcgggccgagaagaacgtagccgcttggcggctc

SEQ ID NO: 446354 - DNA, 612 bp, Homo Sapiens
  misc_feature (15)..(15): n is a, c, g, or t
  misc_feature (46)..(46): n is a, c, g, or t
  misc_feature (48)..(48): n is a, c, g, or t
  misc_feature (52)..(53): n is a, c, g, or t
  misc_feature (55)..(55): n is a, c, g, or t
  misc_feature (60)..(61): n is a, c, g, or t
  misc_feature (64)..(64): n is a, c, g, or t
cgacaattttaaaanaatctttaagtgtttcaaagtggaatattcnancggnncnctagnnccngaaataaaatatttatttcagataaagttaatatttccataattaaggtaaagcaaacatatatgcttgagtccattatttaaggactataaaatgacttccatgaatattagagttcctgaatgtcatttgagtatctgcctacatgcttgttggaagcttctgtagccttttctttgtaggaattccagtttttctgaattcttccctttccttcaggtattccattttgcattcttcataaaaggctggatcattatagtaagcagttagacattctttcaatgcagaattttctttccggcattttactaccataagaactccagagttcttgcaacatttggtaaaatctgcggggtcgagcgccatctcggcgggccgagaagaacgtagccgcttggcggctccggggcacgcaggaaggggagtggaggggaggggcttgggctcggacgcacgtgcgacccccgggagcttcccgcaacagaaacacgggccctttgcaaagcaccgccaggacccgttccctcttccttcccaggctc

SEQ ID NO: 446355 - DNA, 791 bp, Homo Sapiens
  misc_feature (149)..(149): n is a, c, g, or t
  misc_feature (440)..(450): n is a, c, g, or t
  misc_feature (457)..(506): n is a, c, g, or t
cgaaataaaatatttatttcagataaagttaatatttccataattaaggtaaagcaaacatatatgcttgagtccattatttaaggactataaaatgacttccatgaatattagagttcctgaatgtcatttgagtatctgcctacatngcttgttggaagcttctgtagccttttctttgtaggaattccagtttttctgaattcttccctttccttcaggtattccattttgcattcttcataaaaggctggatcattatagtaagcagttagacattctttcaatgccgaattttttttccggcattttactaccataagaactccagagttcttggcaacatttgggtaaaatctggaaataaatttggaaggaaaaaattaccttgtaattatatctatataaatacccacacacacaattttcttctttttagnnnnnnnnnnngaaagcnnnnnnnnnnnnnnnnnnnnnnnnnnnnnnnnnnnnnnnnnnnnnnnnnntgaacatctattatgtacattgtgcttggcacatggtaccgtgctcaacaaaagacatgtacaccagtaaaaggcagaataagatgagtgatattcactttgtataaataaatgtgatttgagaagagggagagaggacttctgagatgaagggcaaggagacttcatagagacaggatgtagagataggatttctagtagagaaacagtacaatcatgggctgcttaacaatgaggatacattctgagaaatgcatcatttggcaatttcatcgtggtccaaag

SEQ ID NO: 446356 - DNA, 683 bp, Homo Sapiens
  misc_feature (159)..(161): n is a, c, g, or t
  misc_feature (182)..(182): n is a, c, g, or t
  misc_feature (185)..(224): n is a, c, g, or t
  misc_feature (226)..(228): n is a, c, g, or t
  misc_feature (580)..(588): n is a, c, g, or t
ggtggggagttcccagacccttatttcctggccccggttttttcttgggggaacaagttttgggcccaggttccctttccccaggggggcccgcggggcccaaaggaaatggtttttagaaagattttttggggggcggaggcggggcccacaaagggnnntttgggttgtggtggttgttntgnnnnnnnnnnnnnnnnnnnnnnnnnnnnnnnnnnnnnnnntnnntttttttttatgagtgaacaatttttattgaaaccctcaaagattaaagaggaccaaatggtgagtttgggtaccataacagaaaatctcacctaactgtaccatcattcacaggaatgaacaaacccaaacacgacaaaattcaaattctcatgtaattgctacaagtgaatgtaaatgaactaatcattttatcataaccttcctttaatcatacgaaaaagggaatttacatggcataacaaaagatatgcaaaacttaatgaaaacacaattctcttaaatttcttaaacttatttttaaaggatgcagaatgcacttgaaatgattaaatgacttaagctgattcannnnnnnnnattgcaaactgttttaacatcagcttaacccccatgcacggtattcaaaaagaacacagctttcgaattagaaagatccccttaaattaaaaagg

SEQ ID NO: 446357 - DNA, 620 bp, Homo Sapiens
  misc_feature (501)..(501): n is a, c, g, or t
  misc_feature (515)..(515): n is a, c, g, or t
  misc_feature (526)..(526): n is a, c, g, or t
  misc_feature (535)..(535): n is a, c, g, or t
  misc_feature (558)..(558): n is a, c, g, or t
  misc_feature (582)..(582): n is a, c, g, or t
cctgaaaaagaaaccagaaaaaaatgtactcttactgagataccctctcaccccaaatgtgtaatggaaaatttttaattaagaaaaacttcagttttgccaagtgcaatggtgttgccttctttaaaaaatgccgttttcttacactaccagtggatgtccagacatgctcttagtctactagagaggtgctgccttttctaagtcataatgaggaacagtcccttaatttcttgtgtgcaactctgttttatcctagaactaagagagcattggtttgttaaagagctttcaatgtatattaaaaccttcaatactcagaaatgatggattcctccaaggagtcctttactagcctaaacattctcaaatgtttgaggattcaagtgaatgggaagggaaaaccacatgcctttaaaaactaaactgtaataattacctgggctaatttcagctaagccttcatcataatttgttcccttcagtaatagggaggaattntaattaccagttangttttaggttntttgaattngggtgcttggaaatttattgggntttgttggtaatttttataccggnttatatgagggggttaaggtactcatcaatttgccttt

SEQ ID NO: 446358 - DNA, 436 bp, Homo Sapiens
ctgggtgaaccctggctctattttgccagtgggaaggtctttattccattttctggtaaacattccaatccggtagcatatggttatcaccaaagaaaaacaagatgtttttgatcccttctggtaatttgttctgggcaaacaaacttgtttttcctgagtccagtccttttgcaatcatgctgatttcatcctgtgctgtttattattctctctggttcttgaggcctggcctggcaagacagtcctattttaggagacaacactctcccatagcaatctttgctttatcttcggatacgtttattacctgagacactaggtagccaatggggcatatgagaaataccctaagctctatggagaaagaaagcgggagctccccacaggaaccagtaggaaaccacagagaccagcctctaacgtttgaaattat

SEQ ID NO: 446359 - DNA, 1063 bp, Homo Sapiens
  misc_feature (59)..(59): n is a, c, g, or t
gctgttgagatacacccgcttctcggtgaactgcccattgccatggtgagggtcctcanagggctcattctggacgacctcaccccttctccccggtcactctgttcatggctgtgtttgctgatcatgtacagctgtccaattttgtactcggtctacggtgagcggcatgcagatccggttctctttcagcagcatggtcctgccggccgcggacccccggggcgggaagcggggggcgcccccaagaccagcaaggctgctgcccaggcgcagggcagggcgcccggagcccggcgctcggagccggagggcgaagcagcccccgcggcgcgctcagctcctggcttcctcctctccgccccagagcatgtcagggtttgggtctgggtgttcgcagctcccccgcctcctccctcgccgaggccggtcctcccggaacgcggtgttgcaaagtcagggaggcagggagggagacccgctggggacgactctgctcggctgcccagggtggtaggagcggccgccagatcaggacatgcccggcagcgagcgagggaggaaaaaagagagatttccaaaaattaaaacgaatgcacaaaagtcacccgctcgatccgcctccgaaagcagacgggaacctggcgacccccctcctccggcgggtctgcccgatgctaatgtcaccaggaacacattgcagccggagccggagatgctgactttccagacaaaggctcgatcggcttctctccgcgggcggtaaacaagatttcctgctctttttagggccggtccccgcgccgctccggggctcggctcggggagaaaagggaagccgccgccgccgccggcgctcggctctgcccggctggggccccgggcgcctccaacctcggctcgcggctgccaggggcgggcgggaggaagctggcgccttccgcgcgcgtcccctcccccgagtccctcggctccccgggcgccgtgcgtgcccgcgagtttgcagccacctcgccggggccggagcgtccgctccgatgcagtgtgcctggggccgggaccc

SEQ ID NO: 446360 - DNA, 1514 bp, Homo Sapiens
tggctatctggctgttctttaggcttcctctttgtctttgaaattctggagcctcagtcctgtgtgcatggattcatttttaatttattctgcttagaacttggtattctttacacggagaattcatgacttttacaattctggaatcccatttaccacattgagttctggacatcaaggttctccgggcatcactttctatgctgtgtcatcagtgaagcccataaacttacccgttatcagaaaagcgaagatttcgagatcttgttgagacgtacaaaattggacagctgtacatgatcagcaaacacagccatgaacagagtgaccggggagaaggggtggaggtcgtccagaatgagccctttgaggaccctcaccatggcaatgggcagttcaccgagaagcgggtgtatctcaacagcaaactgcctagttgggctagagctgttgtccccaaaatattttatgtgacagagaaggcttggaactattatccctacacaattacagaatacacatgttcctttctgccgaaattctccattcatatagaaaccaagtatgaggacaacaaaggaagcaatgacaccattttcgacaatgaagccaaagacgtggagagagaagtttgctttattgatattgcctgcgatgaaattccagagcgctactacaaagaatctgaggatcctaagcacttcaagtcagagaagacaggacggggacagttgagggaaggctggagagatagtcatcagcctatcatgtgctcctacaagctggtgactgtgaagtttgaggtctgggggcttcagaccagagtggaacaatttgtacacaaggtggtccgagacattctgctgattggacatagacaggcttttgcatgggttgatgagtggtatgatatgacaatggatgatgttcgggaatacgagaaaaacatgcatgaacaaaccaacataaaagtttgcaatcagcattcctcccctgtggatgacatagagagtcatgcccaaacaagtacatgacaatggatgaagtccgagaatttgaacgagccactcaggaagccaccaacaagaaaatcggcattttcccacctgcaatttcctaatctccagcatccccctgctgccttctttccgtccgcagggcgcccttctagtggctccatccaccccctctctccacagaaggcccccgcaatttccggtccctctccccaaaaatcgggccccgggaacaagatctgccccccgcaaacctcttcacactttccaaaaaccctggggaaaaaaagcccccccctggaaattttcccccgggccatgccactcctttcacaaataaggcccctggtccgggccccaaactcgggaggaaaacctttaatattaaaatatccctccctgggggttttctatgattttcgcgcggtcgcaacctacgtcaacgtcatatcgacaagataaaaatcttcgttctggtccccccctcggactcttttt

SEQ ID NO: 446361 - DNA, 507 bp, Homo Sapiens
  misc_feature (424)..(432): n is a, c, g, or t
  misc_feature (483)..(483): n is a, c, g, or t
  misc_feature (492)..(492): n is a, c, g, or t
gagacattctgctgattggacatagacaggcttttgcatgggttgatgagtggtatgacatgacaatggatgaagtccgagaatttgaacgagccactcaggaagccaccaacaagaaaatcggcattttcccacctgcaatttctatctccagcatccccctgctgccttcttccgtccgcagtgcgccttctagtgctccatccacccctctctccacagacgcacccgaatttctgtccgttcccaaagatcggccccggaaaaagtctgccccagaaactctcacacttccagaccctgagaaaaaagccaccctgaatttacccggcatgcactcttcagataagccatgtcggcccaaatctgagtaactttatataaatatctcatggggttttatattttcatttgttgttgttgnnnnnnnnnaaggaatcttctgataggggaaaaagactgctttgtcattcaaacatgttnccttggacntttcagtgtgcatgt

SEQ ID NO: 446362 - DNA, 469 bp, Homo Sapiens
  misc_feature (133)..(145): n is a, c, g, or t
aaaatagattttattgtatatatttaaactatacaacataatgttatagggcacatagagatcataagatgcttactagaatgtagcaaattattttaagatttacatattgcttttataattataaagctannnnnnnnnnnnnaaaagtagctaagtttgcaacatttcaaaaactttttccacatcttctgtctacttttctgtaggcatcccagtgaaacatgtacaattcaaatgaccacatgctggacagccaggcgcatccccatgcaggccacgtgggcctcttagaagcagcctcctgggactgtgtagcctcctgcagccatacaatcccgttctggtcgtccgttttagccttgttcctgagcagtctgtgggaattgtggcgaagggacagttcagtacacttctggacagcccctagccccagccctgcccgtctgttgggagagcagtcaccagg

SEQ ID NO: 446363 - DNA, 910 bp, Homo Sapiens
ctcatttattcattcaaattcaacaggtgagcttctggaggcttctttcagttttgtcatggtggtctgaaatgttccaatgagatcatgtgacccatcattgtcataatcataacactccaccttaatggttttgtccatatctccgtaacacagtgagttaagagagatcttgaaaggcctccaaacaggattcaagttgtttttaacaacctctgtccgatgaaccattagccagtttccatcagatgtctgcttgtggaattccaggtatgggtctgactttccaaatagatccttattatccagttttctggcttccatttcaaacaagaccactctattatcttttatttcttcagctgaaatcgtaatgctcccttttcctgcaggtctgccagttttcatcaccagtggtcgagttagcttcttgctggaaacaatttgtccaagggtacattcacattcccctaagaagtcatcatcactcagctcaatagttttgttgtcgatgtcataaaccccaaatttcaatttctgaaccacttcaaagtagtaatcaataataaatgtcttggaaaattggggattcaagcaattcttaatcctttctgtgcgctcaacctcataccactgttgaccacttgtattcaaaaacaacacacataaagggtctgactttgaccctatatctttatccaaaagattggcacaggaaacattcagcgccacctttgtgacacactgggcagccatgtcttgagttcagttgtgtaatttgacgaattattcaacctgagtttcgtgggagtcttagaggtggaagtcgagcgacggtggagaacaggttggcagcgtccggagcgacgctgggaccgcagggattcaggagaacctagggctggactcc

SEQ ID NO: 446364 - DNA, 906 bp, Homo Sapiens
ggggaaaaaggcctttgaacgcatcaacagcctcacattcaaaaaatttctggatatgaaggcgcggctagaggaagccattctgggtaccatcggagctcgacaagaaatggttcggcgaagtcgtgagaggagcccgttgggaatccggagaatgtgcgctggcggaagagcgtcacacactggaagcaaacctcagaccgcgtggacaagaccaaggatgaaatggaacacgaggccttggtggaagggaacctggcaaccgaggcaagcctagtggttctggacacactggagatcatcgtgcagacggtgatgctttcagaagcccgggagagcgtcttgggggcagtgctgaaggttgtgctgtacagcctgggcagtgcccagagtgccctcttcttgcagcatggcctggccacccagagggcccttgtgtccaagttcccggagctgctgttcgaggaggacacggagctgtgtgccgacctgtgcctgaggctcctacgacactgtggcagccgcatcagcaccatccgcacgcacgccagcgcctcgctgtacctgctcatgcgacagaacttcgagatcggccacaactttgcccgtgtgaagatgcaggtcaccatgtctctctcgtccctggtggggacgacgcagaacttcagtgaagagcacctgcgacgttcactcaaaaccatcctcacctatgctgaggaggacatggggctgcgggacagcaccttcgcagagcaggtccaggacctgatgttcaacctgcacatgatcctgacggacacggtgaagatgaaggaacaccaggaggaccctgagatgctcatcgacctcatgtacagaattgcccggggctaccagggctcaccggaccttcggctgacctggttg

SEQ ID NO: 446365 - DNA, 667 bp, Homo Sapiens
taaagatctaattggcttttattagcgattcatgaactgggtagcatccagcctacaaaataaaacagaagccccgccaggtatgatagaatggtctgcatttgtaaagcagcactagcaggaacaaggaaacagcatagtagacacagcagattggttaacatcaggttacttcaggttacgttccttgtgtggattaaagcagagggggcttcctcatcataatcacgcttgctcacgttgactggactccctttgatcagttgctgtgaatctcctgacttgttgaaactgtcctatttttaagttcactttgattacatggactccattcctggatggagaggtgagatcttggagttccattcaacataaatgtattgtaaagtttttgttagagggcttgttaatgttggccttgggctagtcctttcccatctctgatcctctgcttcctaacttgtaaaatacagattaaatgctcctaacattatgaatctaagaaatgtcaggattagctaaattgcttaatggcacaacaatattagagtggaagctgagaagcaaaattgttacactgagcaagtatttttaactgattgaaatgaaagataagagctttttaaaagtttatcttcccctcaaccctcccagcctctcaaaccac

SEQ ID NO: 446366 - DNA, 464 bp, Homo Sapiens
ttttttttaaagatctaattggcttttattagcgattcatgaactgggtagcatccagcctacaaaataaaacagaagccccgccagtatgatagaatggtctgcatttgtaaagcagcactagcaggaacaaggaaacagcatagtagacacagcagattggttaacatcaggttacttcaggttacgttccttgtgtgggattaaagcagagggggcttcctcatcataatcacgcttgctcacgttgactgggactccctttgatcagttgctgtgaatctcctgacttgttgaaactgtcctatttttaagttcactttgattacatgggactccattccggggatgggagagggtgagatcttgggagtttccatttcaaccattaaatgtatttgttaaagttttttgttaggaggggtttgtttaatgttgggccttgggtaagtccctttcccact

SEQ ID NO: 446367 - DNA, 884 bp, Homo Sapiens
  misc_feature (71)..(76): n is a, c, g, or t
  misc_feature (78)..(79): n is a, c, g, or t
  misc_feature (83)..(85): n is a, c, g, or t
  misc_feature (87)..(88): n is a, c, g, or t
  misc_feature (92)..(95): n is a, c, g, or t
  misc_feature (760)..(820): n is a, c, g, or t
gggccccgcggcgccaaaaagaattggtctaggaaagctttcttgaggggccgagggcggccggacagggnnnnnntnnttcnnncnntttnnnnccaaggtagaatattatttattattataaactcaggatgcaagatatattccaggatataggaagaatggcaaatatcggcttttctcagatatctttgaaattattttaatgcgtacaaaacatgtagaagatgcctcttgagatggctttaaaatgcccagtattaaagggggacaggtgcatggcagctaaatgcctcaacaagatcatgcagagaggggcatccattccctcccaagatcctaagaaaaggtaccttgctccagcctggctgaaagtggagcaaagatatgcattttctattggatttagggtcctagggtctgtcctggggcacagacacctaagaccatggcaccttctccccagaggacagcctgagggtaaagtataaattgctctgggaaggagagagggagagaacagctgtgtctgcagttcattgttgtgtgagtttaagcagctctcttcctctctctgtgcttcattagaggtataaatactggtacattgggtcctttccagagtttggtttcaatgagtagggacacaagagaaaaggaatagatgagtgcccaatttttgttcagggacatggttaggctccctcagtgatgggactttcccacctagctgttcctgggagctgtacctagaaaaacnnnnnnnnnnnnnnnnnnnnnnnnnnnnnnnnnnnnnnnnnnnnnnnnnnnnnnnnnnnnntatgtgagtctgtatgtgcccatgtgcccacaagctttggggcagcgggcttttatatggtccc

SEQ ID NO: 446368 - DNA, 588 bp, Homo Sapiens
  misc_feature (83)..(93): n is a, c, g, or t
  misc_feature (98)..(98): n is a, c, g, or t
  misc_feature (111)..(111): n is a, c, g, or t
  misc_feature (190)..(190): n is a, c, g, or t
  misc_feature (222)..(222): n is a, c, g, or t
  misc_feature (529)..(539): n is a, c, g, or t
ttttgtcattttgagtaagaaggtcctgatcaggattaggtcaaactcttttcatctctcctccagcggcaagtagctgttcnnnnnnnnnnnttctntcaggcccccccnctttagtcagaggtagaataaatgattgactgggctaacaccctttctgattgaaacaccgggagtggtttttcccctnggtagtagggcagaaatttatgtattctgttntttctgcccggagacttaaaaacttcctttcttataatggttgcactgacaataaccaggtaaagcgtggcttgcttatatgactacagggacttataacaccccctataagggcttctttgaactccccacaaagccaaaattcctggtccagattttagaggttcaaattagagacacaagcctggtcccgtgtatgaaaagaaggtggccctggagagttgggatgtcaaaatgtttcttgtactcccaatgtttgcttgctttttccttctcttgctgtatcacataatttgcatttttgtcnnnnnnnnnnngtaccctttgtgtaatttgatgaatcctttcaaatatatgaactgtggg

SEQ ID NO: 446369 - DNA, 605 bp, Homo Sapiens
ggggactctctgccatcccgagagacccgctaccgtggagctgtatgtggtcgtggacaatgcagagttccagatgctggggagcgaagcagccgtgcgtcatcgggtgctggaggtggtgaatcacgtggacaagctatatcagaaactcaacttccgtgtggtcctggtgggcctggagatttggaatagtcaggacaggttccacgtcagccccgaccccagtgtcacactggagaacctcctgacctggcaggcacggcaacggacacggcggcacctgcatgacaacgtacagctcatcacgggtgtcgacttcaccgggactaccgtggggtttgccagggtgtccgccatgtgctcccacagctcaggggctgtgaaccaggaccacagcaagaaccccgtgggcgtggcctgtaccatggcccatgagatgggccacaacctgggcatggaccatgatgagaacgtccagggctgccgctgccaggaacgcttcgaggccggccgctgcatcatggcgggcagcattggctccagtttccccaggatgttcagtgactgcagccaggcctacctggagagctttttggagcggccgc

SEQ ID NO: 446370 - DNA, 219 bp, Homo Sapiens
acagaaaacttagcttgtgtaattctgttagtttcagatttctctcctgtttttgcaaattgtgggaaagattgacaatgcaaatgtgtcaaagacatactgttgggtgcaatattaacaattttaaatgcaaatttctttggataaattatttctatattctgtaaatctgagatttaatgtatattttgtttaaaaaatgatttagtaaaatctttg

SEQ ID NO: 446371 - DNA, 465 bp, Homo Sapiens
gtattattttgatttttttaaagtaaaatattaacttttcctctttgaaataaattcccatttggaacatcagcatacagtttgaacatttattcgcctcctgagcttgtacaacagtcgtgggagttgctgcagaagcaagcgaaaagccagatgagcgcttctaaacttagagagaggtgagtaaggcttgtgggcgatcacttgtcggctggggcctctttggcctcttcccagaggatgtcctgaagaaacttccccagggcctggctgtgctgctggtacagaacccctgacagcttgattccaacatcaaagggggcgttgaaccggacttccagttcatcctctgccccttctgcttgacctccatcttccgggcggagccagcctgctagagctcggggctgcagcttggctggtggcttcttcgactcctttctctgctggactctctggtgttca

SEQ ID NO: 446372 - DNA, 1286 bp, Homo Sapiens
agaaaataggtggtttttaatggaaaattttataaaagggagagggcatgtaaaggggcccctgggccaggcccgggaccacgacatcagtgggaggcgctggtggaggcgggagcagtgcagggcgtcgcagcttccaggcgtccgtaggtcccttctccaggtccaggcgggcggccccgtgcacatacgcataagcgggctgcaggatgcgcggcaggggccccgagtggcgggcgcgggtgggcggccagcgggtgccagggctcaggcccggggccgtgcgggcgcacagtggtgcggctggtgcgtgggtgcgaatcccgggcggcagatgcagcggaaggagccatccgtgttgaggcaacgcgcgttgacgcacagcggggaggcagcctcggcctcatcacactcgttgatgtcaacgcaggccatgcgggtcatgtccaggcggtagccgtcgaagcaacggcaggtgaagccttcggggacgcgcacgcagcggccgttggtgcagccgtccaggatcccgcactcctccgcctccagctcctcgtagggctcagccagggaaccagcatagcttccaccttcaggaggctcctcgggctctgggaaggagcggcgggtgtcccgggaccgatagggccagcgggtgcccgggccaggtggcgcaggagcctcagattcgccataggggccaccatcgtcctcaaagtctggcatgtcgaagcggggtgccccataaggagcctcccggcgggcgaagggcccaggtggcggtgggtaggggtcgtagggtagcgcaggtggtgggtacaactcaggcccatatgggaggccctggtaaggtggacctaagtctgggccgtactcgtaggggagtccaaagccacctggtcgcggggggctatatgcgggggggcgtagcacattgcacagggcctcgaagtcatctgagtcctgcgcagggcagagggcgcagtccatgccccaggcctctccatacaggcagcagcactctgtgtaggtggcctgacggtccagccgagggtggctgcacacgaggtcagcccccacttcctgccagcacactcccagattgtcatcgaggctctggctctcgttggagacgcagcggcgctgcgagccatccagcaccagtgggggctcgcaggtacagtgataagagcccacagtgttgacacagcggccgccctcacaggccggttcctcatcggcgcactcgtcattgtctagggagaggatgattaagaggcatcccc

SEQ ID NO: 446373 - DNA, 1233 bp, Homo Sapiens
  misc_feature (101)..(109): n is a, c, g, or t
  misc_feature (164)..(164): n is a, c, g, or t
  misc_feature (176)..(178): n is a, c, g, or t
  misc_feature (1062)..(1087): n is a, c, g, or t
  misc_feature (1146)..(1182): n is a, c, g, or t
aatgaagggggcccgccagaaggggaaattcagtgggcgcaatcttatgctccaacaggatgagtcatggcccagtcatggatggggcaaagaggactacnnnnnnnnnagcgactctcgggatctgtatcgtgggctatgtgataaaagagtattgtagacgnaggtggggtggnnnggcagcttaaaaagcattttattaagcatttttggatgttgcttcctaccacttaagaataaaaaatgcattttaataaaaacaaatctatactgaagtcattttcctttgtgagaggaaatatgaatgaaatacattcatacttaaaaacagagtattttactgccaaaactttaaatatctcaagagcataccacattttaaacacattatggtcatgtagctatttcaatattcctgggagtggtgggcaattagcctgtctatggcttaggatctgtttccatgcttgcttcctgagcttcttctacctctgagagtttttcatcattttccaatgtttgctgaagttcatggatggtactaagaagaacatgaaactgtttccgtctcaattccagcttatcttcaacactttctttaatgtgtgaaagatgctctaattcttttcccagagcctctagttcctttaatgtctcatgcctgtctggatggtgctgaatcacttttgccaaagcatcatattcttggcgattttttcgtattcgttttgcttgaagaatttgctttttgcactcagcaattttttcatgtgctccagctatgctacattctatttccttgtaaattttttcataattttccatttctctgagattcatatcatatactagtaaagttttgcccattgaaaattcacattgagacagcgtgctcagcatacgttggtactggctatatccctcttcctgggacccagagttgcaccatttaatgaaactcttcactagcagattaattctccgatcatctccagcaccatctccatcaatgaggagacgcttccgtataacttcgtcgtcagtcacggctcccatggcgtnnnnnnnnnnnnnnnnnnnnnnnnnncaagctgaggcggcagttccgctctcgacgaattcgagctcggccgatttggcctgatnnnnnnnnnnnnnnnnnnnnnnnnnnnnnnnnnnnnncgccgccaccgcgattaagctccgattcgccctatatgagtctatcattct

SEQ ID NO: 446374 - DNA, 525 bp, Homo Sapiens
ttttattatttcacttattatttattttatcttccaatttcctcttgccagactcccatccaaagagtcatagcagccttcttccaccttctacatgaaatacatccccacctgaacaaaggcacacgacaggaggaggggaataggacttcgcaaactggacacggcatcgttcagatctggactctgaggttccgttgttactggtttcacagttacaggcttcggatggtctgcacgtgctgtttcaagactaatggtagtctctattgcttctgttatgtccttatccaacctgttcagcctgtcctctgactcaaatatggagtaatcaatggtgaaatctgcactaaagtcatcataactgggggtgactgtataataatagaccacctgataatattcatcctctcccagtctttcttcatcctcatattcttgtcccaggataagtggcacagcaaagatggctacaaagaggacatccattctggattctgcactattgctgtgaaagtaaaaaag

SEQ ID NO: 446375 - DNA, 430 bp, Homo Sapiens
agggtttagtggaactgacttcatttaatagagaaagactcacttctgatacttaaaacgtaggcattatccaattaaatgagacttggaaggagtccatatccagtcacctgctttgcaaattgtagatgtcctatgatgaattttaagtcaccttgacctttagccaaatatgcctcataagctgagtttcatgttcattgctggtgtccaaatgtccacagttgaattctcaggtttgtggtgaacagatttggtaacttctttttaggaagcatctgctgctgctcttgtttctttattttacttattttaaagatgattcgttaggtaaggagcagaaagtcactgaggcctttgtataaggtaattaatttaccaccacaaactgatatgctagaaatatcacctttcatcctttctgattttg

SEQ ID NO: 446376 - DNA, 1193 bp, Homo Sapiens
agtattattctatttttatataagtcaaaagtgagcaaaatgtaaaccatattgttatacacataactggtaaaataattcttaaaaggacagagggagaattaccatacgtcaggatagttagctctgggggaaacagtgagtgtcaagaggggacacacagagattttggagtgctggcaagacctcctctgcatctagtttgtgattacacagctgttgctttacccattaagctctgttttaagtacttatttgtaagttatatttcacaaaatttaaaagaacaagggagaacctgtgtactaccaaatattaacaccaattaaagcgataattattgacagtgtagaaaaaacccagaaggcccagaaattggcctaagacacaaaagacacataagaatttaatattctataaaaatagcattactaatcagaggggaaatggtggtttcacatactgaaccaattggtaaattcttcgaaataaaatcaaatccctaccttatataatataaccaaatacatttgagatggattaaaaatttccttttcaccccaaacttgtactgatttagttaatgtatataaacagaaatttaaattccttttaaagataggtgtaaaagtgaaataagaaaatactagaagaaaataaggacatttatccattcttggattacaaaaatactttcaagcacatacacaaaggtagactcctaaagaaaacaacttctatactgaaataccacaaactatgttaaatgacaaataaggctaaaaaaagttacaatatatgacaaaggacggacattcttaagaacttatatgccaaaaaaagagcaaattctccaagcaagcaacagaaaaaatatgaatgagcaattctcaaaagaatgaatatagcatggccaatgaatatgaaaaaaaacacaaccttcactaagtaagaaaaacaaatacaaattttaaatgtagcccttttctgtaattattcaatttgcaaagattttaagtagtaattttcaattctgagcattggatatattgctaatgggaatgtaaatgaacatgatctctgcagcgagtaatatatataaaaattctcaaaaacactttcacctaacaatttcatttttagagcggtatcttctggaaataagtcattttctatggatgtgattaagatcc

SEQ ID NO: 446377 - DNA, 501 bp, Homo Sapiens; identical to SEQ ID NO: 78890
  misc_feature (144)..(152): n is a, c, g, or t

SEQ ID NO: 446378 - DNA, 427 bp, Homo Sapiens
  misc_feature (288)..(288): n is a, c, g, or t
  misc_feature (350)..(350): n is a, c, g, or t
  misc_feature (373)..(373): n is a, c, g, or t
  misc_feature (400)..(400): n is a, c, g, or t
ccacattcacataatttttattacaatatattgttataattgctctattttgctgtgagctgttgttagtctcttactgtgcctaacttataaactgaactttatcatatgtacgtacatacaggaaaaaacattagggtttggtactagcagcggtttcaggcattaactgggggtcttaaaacatatcccccaccatggggccagggtgtgggtgactcacggcctgttaatcccaggcactttggggagggccaagggcggggcaaatcaccaggggtcagggantttcgaggaccagccgggggccaacatggggtgaaacttccccattcttcttactttcaaanttacaaaaattaggtcgggggcntgggtgggccgcacaccttttaggttncccagtttacttcaggggggggcttta

SEQ ID NO: 446379 - DNA, 470 bp, Homo Sapiens
  misc_feature (281)..(311): n is a, c, g, or t
ttcgccgttctggatgtgcaaactagaaactgaagacaaatggggatttcagcgtctagtcccaatcgttcagcacggaagtactccacacggtcggctgcttttcaaaaaccaccaggacgacgtcccatgtcgagccgaccgctgagccgcacgcctccccacggcgggggcgagatggtgcgcagacctagcggtgcgaggggcggcggcgaccctgggcggccgggagcccgggccttcagcgcagcttcttgccaggcgggccgtccctggcgctnnnnnnnnnnnnnnnnnnnnnnnnnnnnnnnactttggagagcgggcagtacttgatggtgtgcgcgttgtcgccgctggcgccgcacaggggacacgtgtagcggcgcagcacgggacacagcactcgcccgtcggggcccttgaggatatgggtggtgtagagcgccatcgcctccttgttgttccgg

SEQ ID NO: 446380 - DNA, 610 bp, Homo Sapiens
  misc_feature (106)..(115): n is a, c, g, or t
tttttttaacacagacaaccttcaagttgcacattttaatttacaatttttaccaataaaaaggattagtttacaaaaagggaagtcctttatacaaaataaggannnnnnnnnnccatttgtaaagagaatccactgtcatgttttgccttgtcaagtcaaaactcaaatagcttgttttggtaaaattattccagaaacataatccagacaaaatcaataacgtcatcagcttcctaaccatgtttaagaggaataacttcatgaacattttgccctgaactgaagagttctaaatacttgtaaacctttaggaaaaaatgactgctcgcaggcagctgactggtaagagggtacaccagagactccgggtcactcactgtcagaatattcttatacatacaatgagtctccacgcctgtacaatgagtgtacgtgcaacataattggagtaatggcctctaaaattttacaagtaaactttattgtggccacagatgaacaacaaaacatgacagttaaggttcagactctccccacctattttatcatataaattaaatatggagaggtacacacaaactctattcaaaatgagaagttgcctcgt

SEQ ID NO: 446381 - DNA, 273 bp, Homo Sapiens
caaaaatactttatttcctcacttataacagggatgtgattatactttactacttatttttaatttaatattttagagtctcacctgcctctaaaaagaaaattggatgagagatgtgtctgatctcaaaactaccatttattcccagtgatgtactagtctctggctaggttatttatatgaattatgaaatataatttacacatcagatatttttatcgggtaggtaatatccccactttgaaaatactgaaattggggtttcaagagggg

SEQ ID NO: 446382 - DNA, 511 bp, Homo Sapiens
  misc_feature (147)..(147): n is a, c, g, or t
tgacgcagagtgcaaagcaatctattttgttcagatacctgagaagcggacagagagccaacaggaaggtgggcaaggctctctcccagcaggaagaaggatgtatctgaaaagatgacactttctctcttccttgggtttggggtntgaggctggcgtagatataagtttcctggccctgcattgctgagcctgcataaagatgattcttgtggccacaaaaccaccccttggctcagttactgcagcagagatgagccccaactctaagcaaggccaggagacaagggtaccagccactgctgacagagccatgtcagtgagactcctgccacgcaggtcatgaggatgtgtaatgtgggctgggcgcaagtcaatggggtagggactggcgtggccacatccaggggtgcagaggtgttgtcttcatgcaacaatagtgaccccattctgctggtgctcccaaatgcctaagggaagccagaaatcctgatttcgatgcgaaatgcct

SEQ ID NO: 446383 - DNA, 559 bp, Homo Sapiens
  misc_feature (88)..(135): n is a, c, g, or t
  misc_feature (522)..(522): n is a, c, g, or t
  misc_feature (543)..(543): n is a, c, g, or t
taacgagcaacagtttatttattaaaaaagatatgaacaaacacctttttaacgacattttatagattaagtaaaaataccagtattnnnnnnnnnnnnnnnnnnnnnnnnnnnnnnnnnnnnnnnnnnnnnnnnacattaacattacatgcttctcaggacagaagaattaggacatgttccctcctatcaatttaaaactcgatcacaatttaaaatcatggaagaaaacttgcttcctttattttctgcttttagacttcaagtacaggaagttatgaaaccaggatctaaatgtggaaaccatctgctatgcaccaattataagggactgccacaaatgatgagtcaggggtcttctgaattcttacataggtctctgtaaccctacaactgtgtcaaccttctacctgagatgagagggaatgatgaagcatgacagtgtgtaggtttcatgtggacgttcacattgacattggaacaaaagcaaacggaaaaatgtcttcctagagcaacaacacngatcataaaatcaccctggangaggattcccttctcc

SEQ ID NO: 446384 - DNA, 478 bp, Homo Sapiens
ctttgcaccccacacacccatcaactcaggaatttacgcttccagtgcttcaggaaacattgtgaacaaatgaaacatctcttcctcctctccagctgaagggcttcagaatgccgggttgggggggcgggtctcacctgccatggcacacccactggccatttgctccatggtgccctgggagtcagccaggaaaatggaatctggaggccagagtctgacatgagctcatctctaggatctgagcccaattcctccagcactttccttggggtcacgttggtaggatgcatcagatgacccctaaccacacacgccaaacatgttccatggccaaacttgtgtcatgagtctttctccagttgcttcaatttatccagaacaagagtgcggcgaggttccaccacgggctgaccacagttaggaaaatccagagttttcctggagccatttccaacattggttggcatcatgagta

SEQ ID NO: 446385 - DNA, 452 bp, Homo Sapiens
gagagttctttttgttgttgtttattgaaaaaaatgcaatacaagaagcaagaccaaacagatatctaaacactacaaccacttctactacgaaaggccaaaacagcagacttgattattgcctgtgtagtctaaagattctgccaatctgattctgctgcccgagttcctattttttcaagaaatgtaaacaactacttgatatgattcataattttaaaaaaatttacaaaggctccttcatttttgtcaccaaaataatacatttgagagagatttgtagaaacaaccagcctggggctgagatcctgggcagaaatttcccgtgagcatcaaaaggcgtcagtcaggccgcagctctggctccagttcccgaggtttgttgtctcctcacccccagctgccaagcatccccccaacacacactgatgggcccagcggtggaggggggg

SEQ ID NO: 446386 - DNA, 776 bp, Homo Sapiens
  misc_feature (684)..(705): n is a, c, g, or t
tttgcactcaatgaacaaatctttgttgtttattttaaaattcaagacaatttttttgcaaatgctgattcaaaacgtaccaatccccatctatcatgcctatgccaatacaatctgtcacaaaaaagtttgcttctcattgtcacatagctatggggactggtggccttctaaaatcactgtccagctgctgcaagtgtgaggccagcaacccacggcagggatgcaggagggaagccatggctaagctgtgggcctggacaaaggccacagatggggttgaaaggtgagaagcggtaagctagaggagacagacggcgttgccattaaaaacaattcaacttcattttaatgttgctatgtaagttcacaataaaatccctggaagttcaaattggaaagagcagtttggggtcatgggctcaacaatataaaggcagattcagtgaggggtaagggtagtggctctgggggcagactgacctagatttgaatgccagttgtaccagactcaagacaccttgggtaagtggttttatgaagtacctcagttcttcatcagtagaaagagtgctaacacctccataagacttttgtatggattgagtaagataatgcatgttaaaccacttgtatagtttctggctaactgtaaacaagatgttctagaagttctagttatcnnnnnnnnnnnnnnnnnnnnnnatggagccgggtcccccgggggcccccagggtggagaggcgggggggaaaactcagggcacatggcaccca

SEQ ID NO: 446387 - DNA, 429 bp, Homo Sapiens
  misc_feature (26)..(26): n is a, c, g, or t
gctgcttcaaatcagtcacttcaatngcattttgtgtaaacccagttgtccttttttattcctctttagacataaatgtgctaactattcctttctatacacaatttattttctaagattaaaaataataattgctaggtttggtggcacatgcgtacagccccagctacttaggaggctgaagcaggaggatccctagagcccaggagttctgggctgtggtacactatgccagttgggtgtaagtttggcatcaatatggtgatgtccctgaagcaggaaaccacaaacttgcatcaggaggggtgaacccagcccaggttggaaatggagcaggccaaaactcccaggctgatcagtaatgggatcttgcctatgaatagccagtgcactgcagccaggacaacagagtgagaacctgtctttaaa

SEQ ID NO: 446388 - DNA, 905 bp, Homo Sapiens
aaaaataacaaattatttactgttttataatgttaaagtatttcaccaagacaagttgcagtcaaattaaagtgagttatggaaaatgaaatacataaagatgtatttatacaagtgcagactaaatattttccatacaagtatgtaaatgaaaagatatacagtaagtgcacactcgatatgactatgcaggcaacagttagtttcagatactcttgtatagttcatgcacaaaccttcccaaagtacgagttcagtcagtcttgggggatatggagggatgattaaaaaaggattgagttccttgcaaaaatatcagtatggactggatgagggtgagcgtggtcagttatatatattacttactgtaatttgtgattgtcgaggaagaggtgtggctgttggtgtgatagtaatactgctggtgactttattggttgttttgtttagtgccccgttaattaagccttgagttcggttatcctgcagtggtgctgaagggctggcaggtctcacagggctggctacagcttgcatgtaaggacttcctaagtgaatgtggattttattatcctcagtagttatcacacttgagctattgctgtttgaacgctgaaactgccatgatgactgccggtctggggagactctgaatatcgcatgcttggcactgatttctgttggttctggggagcgtccctgctcaggagagctagctgaaccagtcacagccaaaacctgaataggggacattgtcctttctggagttagagaaccacaagactctggggtctgtgctctggcaaaggttgccatggtaattggggacatgccttgttctaaattcatgaggtcttcggtagaggttttggactttactggtgttatggaggcgttttggagga

SEQ ID NO: 446389 - DNA, 535 bp, Homo Sapiens
ggtgtttcgtttggttaaacctcttaagtatttattagatacccattgtgtaccctctccccgctttgtatccctgccctgagggcctcacagccagatctcctgagagcagagtgaagaggaagctcagtatttctcaggcaggccagcaggtcggaagtgattggggtctttgccactcctgccccattcattggcagcctgatcagccagcgagtcctccgcaccatggccaaagaatctctggatattctctctggcatcgctgatcgcttctgcagcccaggcacccccaggtccccttttggcagcatcatagttcccccgagcatggaagtatttgtctgagccgatgtaattggcttctctcatgtcagagtaggctctccacatgtcccgagccccatcaaaagcctcgccaaggaacgaaaagaagcttcggctgctgacacccaggaccaaggagcagaaaaccaggcccgtgagaagcttcatggtgctgatctgtgctgtagctgagctgcgggtccctccc

SEQ ID NO: 446390 - DNA, 929 bp, Homo Sapiens
  misc_feature (263)..(273): n is a, c, g, or t
aggagggcctctgcacattttataagccacagactggaaagggcctggagcccaccttccaccccataacaaagaaagggatagtttcagaactgcttttatttggataactgactgaaggagtctcatttgtaaccaagatggaattcacagtatgttgttacattcacacttaaaaaatatatctctatgtacaggaatttgcaaagagatgtaaacatacattaatttccaagtacatttctccccttctccctggaggnnnnnnnnnnngccatccaatgaggcaaccccttcaaaataattttaatacaaaggatgcaaacatctataaatgaaaaatgtggttcttctgccccttctgggtgtcatgggagagaatgtcaccgaatgaaaatgacaacagcttggcttcagatggaattggactatttaaaattgagtttccaggaaaaataggcactgatttctagaaggaaattaactccttaccgaagctatttattgagccaatatggctggttaacgtcctcactagtataaagtaacccagtgcaggactctcagacattagctgaaccaagtgtacacagtcagactgcaagggcactgatgaggctactctgaaagctggttgtccccgtcctctaggtgtgaggaccactctgattttatcccaggggcccggtccattcttcccatactgcaactgtcgtgcattatacaaggtaccctgctgcttacccacttcaactactctgcaagtcgattagaaaatcttgttaaaaaaacaaagagggaaaaaaggctcacgttatctcatccaggctgcccgccccagccccccaactggaggcatgccgggtgggggaatgggcgggggcacaggaggctgtcctccaggggggacggcaggaggtgggtagccc

SEQ ID NO: 446391 - DNA, 738 bp, Homo Sapiens
  misc_feature (279)..(364): n is a, c, g, or t
  misc_feature (394)..(412): n is a, c, g, or t
  misc_feature (469)..(557): n is a, c, g, or t
ggcatgtagatagagtcaattattgtttgtggagtttttcagctataggggaggggaactattaaaatccatttgtttctattcaataggtaataaaaattagttgtccctgggtttgggaaacttaaatgcccattacagccctggggaagggttttctgtcttatggagtgagtcttagcatttaagttatacagttgctgccttaaaatagtagcctgctacaatgacttctttgggtagccattttcataagaaataaaatacaagatatgagtnnnnnnnnnnnnnnnnnnnnnnnnnnnnnnnnnnnnnnnnnnnnnnnnnnnnnnnnnnnnnnnnnnnnnnnnnnnnnnnnnnnnnnccttggcggcccccccggcccccaaaaaannnnnnnnnnnnnnnnnnnggggcgggggccccaaaggaaaaggaaaagggccaaaactgtttccaaagaaaaccnnnnnnnnnnnnnnnnnnnnnnnnnnnnnnnnnnnnnnnnnnnnnnnnnnnnnnnnnnnnnnnnnnnnnnnnnnnnnnnnnnnnnnnnnctttacgggatttttccacgggggtcccaccgagctcaatttcaatttaacccccgccctggccttttttgaaaaaagggtggaattccttaaacattctccccaaaggggaacccctccccaacgggttttattaaaccggaaatcccccggggggattaaaaaccctttggcccccttt

SEQ ID NO: 446392 - DNA, 327 bp, Homo Sapiens
  misc_feature (57)..(57): n is a, c, g, or t
  misc_feature (92)..(92): n is a, c, g, or t
ttttgtttgggttaagtaaaaagcctttgattgattaccagcatgagaattcacctnggtttctattttatgcatttgtaaatttttccccnaattatatggaagctattggaacttttgtattcagtgctaaatactaagtcaaggggagtatattaggtaagttttttcagtgactgtgcctttagcattcagtcattataagaaaatgatcaggacaaaatcattacattataaacatgtaattcttttatatagtgattatcatgtactgcattgttactttaaaataagctattaaactagtttttatggttcaagtaatgc

SEQ ID NO: 446393 - DNA, 629 bp, Homo Sapiens
gacacgatttttttctaggaaacagctatgcccagaaaataaaaataaagcggactttatttagaagataaaggtggtggttatcggttttggttaatcgagttgggctcaagtgttttacaggtcttaaatgccatcacagactggcatgccaagggcattctgaatgccaattacagattgaagttgtttcaaaaaccaagatgctatcaaaagctgatgagtttggatttttcttaaagttggactaacacacttcttaaatatttgtaagagtaaatagattgcttggttctgaaagttaaaacactacactgagcaattccccttctccacaagtccctaaggcaatattacagttgcctctgacagcaagtccaacatttcaacaaagggggggtgaggagaactgggaaaaatgaaaagcaaaattaataaatgtaattgatacaggcagctgccacttgtggcaaaccaaagcctagtccgatgcccattatcttcacatttgcactgacatcttcccaagcagacggtaactacattcttgaaggaatgtgccaagactagggtggggaaggcccagacagtgagtgaacagaatgcattttgcacccagttgccttagg

SEQ ID NO: 446394 - DNA, 723 bp, Homo Sapiens
gccagtacataagcctttatttggggagggatgcctggggagctgcctccagctcctctgctgcacagaggcaggatttcttaaagcatcttccctgaatgaggaagagagtgtagactctcctctgccaatgctagttaggtgtgccagaggccaaagcaccaaagctcggtggagaaggtttgtgatgcataggagggaggtgttcacgtgtctcagggccacttgtgaatgagggcagggaggtgaggggggcctagaagctgaatgggcatgtaagacttgatcaaaacagaaacctggaccctgcatcatgtcctgtgacccgctctccactgtggtataatcctggagcagtcatttttcttctctcagcctgtttcctctcatcgggggaacataggcagttgtgtctgccctggggtgagcagaaagaggattacttctgtccacaggccacctgcctctaccggtcaggccgaatgaggcaggttggatgccaccaagtttccagcaggctttagagctatcctagaatttgggtaagaggaagacaagggttctagtctcaggttttcccaggatttgtccaaggcttggggcccagccaggtcctctcctcttgtagatggcaggaagagagtgagacctggagaggtggacaggaggggctgggtttgggcccactcccacctggggagctggcgtcaaaggatgtgtgcg

SEQ ID NO: 446395 - DNA, 3143 bp, Homo Sapiens
  misc_feature (67)..(162): n is a, c, g, or t
  misc_feature (226)..(237): n is a, c, g, or t
  misc_feature (355)..(418): n is a, c, g, or t
  misc_feature (493)..(493): n is a, c, g, or t
  misc_feature (496)..(628): n is a, c, g, or t
  misc_feature (659)..(724): n is a, c, g, or t
gttataacggggggcgccaaatagtggaacacactttttttctccccccccttgtttctaccccggnnnnnnnnnnnnnnnnnnnnnnnnnnnnnnnnnnnnnnnnnnnnnnnnnnnnnnnnnnnnnnnnnnnnnnnnnnnnnnnnnnnnnnnnnnnnnnnncccccatgtgggggaaaaaagctttttaaaaatttcccacccctctttggaaaaaagtgtcacnnnnnnnnnnnnaattttattttgagacttcccttgggagcccctgtgtataaataccccaaaagagcccccagaaaccccccctgggggttttttcaaacacccttcggtttcccccccgggtcttttnnnnnnnnnnnnnnnnnnnnnnnnnnnnnnnnnnnnnnnnnnnnnnnnnnnnnnnnnnnnnnnncggtgcccttccctctgggggccccgccccaaataaaaaggtttaaaaaaatttttcgggggcctggggcgcccnccnnnnnnnnnnnnnnnnnnnnnnnnnnnnnnnnnnnnnnnnnnnnnnnnnnnnnnnnnnnnnnnnnnnnnnnnnnnnnnnnnnnnnnnnnnnnnnnnnnnnnnnnnnnnnnnnnnnnnnnnnnnnnnnnnnnnnaaatgaactgatttatttttatggcaaccannnnnnnnnnnnnnnnnnnnnnnnnnnnnnnnnnnnnnnnnnnnnnnnnnnnnnnnnnnnnnnnnnaaatagaacagaacataatcatcccatgtctccaacaagaatagacatctatcagtggtcgtgatttgctgttgctgcttggtgtggaaatgctgagctgggtgtggacaggacgctgtgcagtcctgctctgtgtagaatgggtccctatggtgtttacactttgatcaatctatgcagttccctgaagatcaaagaataaatggaaaggtactggcctcggaggaagagatgtgactgccaagaggcctggccagacagcctgccaggcaggctggagtccatctggctggggcagctggccttcccacagtgagactggcagtgtgctcagatggccacactgttcggaatccggtctggggacaagtagtaatatggcagctgcttcttcttgttgcgctcagcaatcacgctgacaatggcctcgaggttcttgcggaatcgggccatggcttccttcacaggcttctcgataaaatgctcttctgggtacatgcccaggaacagctcgttttcctggaactggctcagcgcccacactgcacccagatgccagcaggagcggccgcggtcgggcagtgtgtccacgatctgctcaatggtcaccacgcccttggcagtcggtggcggggctcgcatggttgggggcgcattggggatccaggagcaccagtcgtactggccgaagttgaccgcggcgtgctgggcggaggcggtgaagatcaccacggtcaggtactccgacagctgctcccggctcttgaccgacttggggaagcctgaggacttgcggccccgcatgccgtacacgtagacatcgttcacgaagtcctgcagctccgggtcctcctccaccacctggtcgccctcgtagtagatgtctaccacctcggccgtgaacgtcctgatggcttcccacaccaggagcccgtcgtcccggtagaagtagtaggggatgtcttctttgctctccatgccccgggccttgatggcctcgggaaagcacagggaggcataggtcaggtccttcatggccctctgcaccatctgcacgtgcccaccgccccctgtggcgttggccttgtcaaagaggccacactcgcagatgagctgctcacgggccttgggtgttgattgcaatggtgaatctcacgtgtgccaccagcagctttgaaaatgggggtgcacagcaggcagctggcggtacattgcaatgccaaaaacctcagacaccagatgtgttcgcagaaggtgggtgatggtctggtggacgtggaagtcactggaacgcacccagattttggccaaaagccagtcgtattttgcatccgaagggaggaaaatagggttctcatctcccgggatttggttgagctggatggcaatggggacaatcttgttggccaggttcttatacagcaagcagatgggagcggccaggaactggagtgtgcaggggtctgttttgttggcatcgatgccatccagcagctcaaagtccacgatgaaaatgttcccttgctggacctcctgctccaagctgagctgccgctccaggctgcacgtctaccatctcgttggtcaccgggagcttctcgggcagctctgtgcagcgccggatcaacacagggttgcagccattcaggaactggtagccaaacatcaggtcttcctgccagtgattcatgacccgctcagaaatagtgttgctgatcttgacaaagattttctcaaagtcggcgaagtcattccaagaagactggaacatgtgcatgaagcggttgatgaacaggttctccatcgctttggagtaattcagaacaaagtccactcctttttcactatcaaactggatatcacggggtaaatccttgtggcatttggcatcgatgctcaaggggaagccagggttccactccatccatcgatattgtttttgccgtgtttccagttctttacgtcggtgttgcttgagaatgtgaatttggtcatctcgggccaactttgcgcgtccatccctcaggacaacctcgacatcgccggtgatccagcggtagcaggggaactcgatgtagtccccgtggggcgtcttcagcgtgatgtacttcaggtaccagtcgtcattcagccagtacttgcgcttctcgattctgaccagctggatctcgcccagttcctcgtccacagtcacgtcgtatgaatccaccgcgccacgctcgaagtcgttgtagaagggcttgtccagcaggtgcttctcgctgcagcccgccgagcccacgaggctgaggtagatgtagtcgtcagtgccggcgaaccactggctgccagtggccacggtgaccgtgtaggagggcatggcgcgggccgcgggagcagcgagcgccgggagcctcggcgcggcggtccaggtgtccgc

SEQ ID NO: 446396 - DNA, 625 bp, Homo Sapiens
ttttagagagaaaatatttaatctatttcacgaaaaaaatgtacaaagctttagaaaagaggcattaggtttccatatacagtataaacacattctcaccttctatgatcacttgtattacacttctctttgctagtaaagaagccactgcactctcgttccaaacaatcttctgttaacacatgcacttgaaaaagtcactgaaaagtacagtcttgaaataaatgtagaaatacaatgttgtacaaaaatatattaatctgtctacatgaaacacttaaaaatgcacaccaagtacattcttttagaactagactatgtctagaaataccaatatatgaacttgtagattggattttcgctgcatttttaatcactggagaaaaaaatataatcaagcctttggaataagaaacatgaagttagcacagcagaccaactctattctcagaaatgaaaccataaactttatccatacaaaagatgggaaagagtttgagtttctaaaattgacatatttatgaaatgttataatttaaaactgcaatcacacagcaaactttcatttgttcataatccacatgtaaagatatgacaattacaacatttctaattgtctctcaat

SEQ ID NO: 446397 - DNA, 1506 bp, Homo Sapiens
tttgccagcaaaagagacgtggggttttattgagggcttacatacaggggagggagtccagaggtggcgggctggatagaattgtcttacatacagaaatggtcctgtggtgttgggctggacaacatatccgcatggcccggtggtggcaggctgggcaggaaaaccacaactgcctgcaaacatcatgcagtttatacagcattttcacttaacccctttccctaatgagcgacacctggcaactgtcatttaacccaaaacttaaggcctcaatcctctctacagcctgggtttcatgggatgggccaggggctcagatgtctattatagataagaaacgaatctccgattggccactcccggattttctagctcgaaacacacattcaggagcatctgccatatagggtcattataaaggtgtgcttaagttattgctatcaggtgcatttaccctacaccgggtaagacactgaccacatggactctttcttcataatgtgcaagaattcatgaataaaaggacacaaagacatacaatatctaataacagtgaacatttatagaatacttgcagcttgtttcatattcacattctcaataaatgcagacagatgatgtcttcacaatttagtagtctgaccctttccacctatataacatggacaaatgtttatcacctcctaacacagcaagaacatctagcacacatatccgcacacacacacttatagaaagaaggggactaaaatgattgagtcccatatttcaggtgctgttctaggcatctgacagatataaaacacactccccaaagtcctgctcatgtgtctgtgtgtgtctagttcaatcccctccctccccttttacccttgccttaccaccccttgtaccacatgtatcttccttttaactccacacatttattctctggagatataataatctcagtggctgtcatgggttgaattatgatcccccaaaaagctgtgttgaagtcccaaccctcagtactactgaatgtgaccttactaggaaatacagtctttcctaatgtaattggttgataagctcagatgagtggggtgggctccttatacgactggtgtcttataagaagatgccctaggaaagcaatacagtggcctaggaagggaatgtgtgcgtgtatgcatgtgcactggacactgggattatgccttgtgtgtggaataacaatgtatatgtgtatgtgtgtgagagagggtttgagtctgtgtgcccatgcattatgcatgagaagccaagggatgatttttgcccatttaccatcacacacatgtatactcttcagtcctgaaattctgagtgtcctctctgcctggaccattaattagaatcatgtatttcccctgcctccctttccagtgggcagaaggcagtttctgagcagtgattaagcctctatcaggacactaatgcaagtggcccataaaaggcatctaaccctgacactgttggagg

SEQ ID NO: 446398 - DNA, 539 bp, Homo Sapiens
cagattgaaatatatatttttaaataactgcaacttttgagaatgagctgaacacttcacagtgaaaattgaactaattggttaaatatccagagtctgtatctctattggaatgccttctaaagccccaagacaccaggaactaagcaaaaaggagctcaatgcaggtcctgtgatgaatctgaaaagctaaagacatactgtggttatgatcccctgggaagcagaagggtagggcctctctaagaggcctgcaggtctcctgggtgatgggtggttttttccattgtcccaaggatggaaggaattctgtttcccactagagatgtggctcttttcctcattcctgaaatccaagggctcattttttgtccatgtttcctcagatgatgatcatgctgggagccatctgtgccatcatcgtggtagttattgtaagtaagtatcgctgaagttgctggtggggtgaagaggtgggaaggtcctggagtcttctccctgcctgcctgcctgcctggggagtggggctgctctgactg

SEQ ID NO: 446399 - DNA, 1006 bp, Homo Sapiens
aggccctggtacggtccggacgttttcgggatatcgtcgacccacgcgtcgcgcagctagaccgcggggtggtcggcgcgaggcggagcttggcagttccgtccacttcagccgcagcgtccctcgccgggtgtctcgccgcagcctccggagaggaacagaccctcactctctctgtcagaaaaatgtctgctccagctcagccacctgctgaagggacagaagggactgccccaggtgggggtccccctggccctcctcctaacatgaccagtaacagacgactacagcaaacccaggcacaagtggaggaggtggtggacatcatacgtgtgaacgtggacaaggtcctggagagggaccagaagctgtcagagctggatgaccgagctgatgccttgcaggcaggagcatcacaatttgagagcagtgctgccaagctaaagaggaagtattggtggaaaaactgcaagatgatgatcatgctgggagccatctgtgccatcatcgtggtagttattgtaatctacttttttacttgagaatgtaccaccccttccctgttgtccattgccatccacattcatgtcctctgccctctgtttgctctctcaacacacttccccacccaccgtcctccattccagcccaggcttctccatcacccattcctcctttttcgttgcgttcatttgcactctgtccctcaacactagaaatgctgctcgtggcacaatctaagtcattacccgaagagcaacagctggcgcctcctccctggctgctttttctgtactctcaagttcccccaaagccccaaagagttggcaggccaagggaagggggccagggaggcgcaggtggctgaggcgaagtacccatggaagctggcccagacttggggacacgacaagagtatcgggggcccatggctgacctcttaaaaaacgctgggcccttggtaggagaccatggcaggggcgtggggacaaatgggcggccaccg

SEQ ID NO: 446400 - DNA, 511 bp, Homo Sapiens
aaatgtcctagcttggtttggtcttgaaaagattcataatcactccaaatgaaatgctcctcccttggccaccaatgtgaagggagggtagaaacctgaggctagacttctgacacaagaagaatctgtcgagagcacagtctcccagtcaataagaaggaaggagagagggggatgagctcgcacccttgagaagaaccttcatgagccaattcccaaagcatcaactccgcatggatactttgcacacacatcagccgtgtctaatggacacacacacgtgcatacacacgtgagcacacgccgggaccacagacccttatccaaaatatgaaagcagcagctattggtcaatttgaggaactcattttgtaaagaaagaataatccttcagcctggatgtgagacgaataacaaccacaagagccatcttgacgctcagcctgtaaaacttgaaattcgtctggagcagggctgggtgtctgtgtgatgtattactctcgaacatttg

SEQ ID NO: 446401 - DNA, 1256 bp, Homo Sapiens
  misc_feature (232)..(315): n is a, c, g, or t
  misc_feature (417)..(439): n is a, c, g, or t
  misc_feature (443)..(727): n is a, c, g, or t
caggcattggatatgtaactttattctgtcccattgatcttgtagtcaaccctggtctgttctgtattgttttaattacataatctttgtaataatctttaatacctggtggagtgctctgtttacttatttctgcgtaattaaccacccctaagcttaacttactcatggttctgcagggtgactgctctccatggttctaggtggttctgcatggggcctctcacatgtnnnnnnnnnnnnnnnnnnnnnnnnnnnnnnnnnnnnnnnnnnnnnnnnnnnnnnnnnnnnnnnnnnnnnnnnnnnnnnnnnnnnagacatatgtggcgtggtggaatggaatggtgactagattcaagaaagagcttcccaggaggaaggctaccaagagaccgaagtagaggcttcagtttcttnnnnnnnnnnnnnnnnnnnnnnntcgnnnnnnnnnnnnnnnnnnnnnnnnnnnnnnnnnnnnnnnnnnnnnnnnnnnnnnnnnnnnnnnnnnnnnnnnnnnnnnnnnnnnnnnnnnnnnnnnnnnnnnnnnnnnnnnnnnnnnnnnnnnnnnnnnnnnnnnnnnnnnnnnnnnnnnnnnnnnnnnnnnnnnnnnnnnnnnnnnnnnnnnnnnnnnnnnnnnnnnnnnnnnnnnnnnnnnnnnnnnnnnnnnnnnnnnnnnnnnnnnnnnnnnnnnnnnnnnnnnnnnnnnnnnnnnnnnnnnnnnnnnnnncccccctcccttcctaacatataccctcaccttggcgggccgcctcggccctcaaaaacgcttttcaaaaccattccgtttgggagacccgggcccccaataagggaaagtggacactggtttcataccttggtttcccaaaggaaaaccctgggactatgaaccctaggggccttgaattcctccacccaattaaaaaaaccgcccggggcgcggaaacccgaagcgtgttcctggaaccaaaatcccaaaatgggagtttcctgaaggcgcctttttactgggcattctttcctccctcggggaaccgccccaatccgactgcctctataatctgaaatttacccgtccccgccctttgcgccacttcaatatccaaagaacttggtctgtaacatttacaccaaagcctttccccgccccaacaccgtgggaaatgccctctccccacacacgcattcttggagagaaccctcttaaaatcccgcaggagcgggatattatgagaaccactgtgccgcagcacttg

SEQ ID NO: 446402 - DNA, 452 bp, Homo Sapiens
gtaactagtattttcacattttatttttctataacaattagaacataatgatcactaaagttgtaacttaggtttggggaaaaagctgttggtattaccatcagatgcctgtcttgttagtgttctcctcttctgtacccaggttcagactactttatccttatatttacagataactgttccaaaaagtggtacggatggggaggaggtaaacaaactgatcctaaccattcttcacacaaataacctcaccttctcaccctcctccactctattttctgctatattttccaacaaaaggaaggtaaatatgagaaactacaagcatagcctgtaagtctctagaacccaatgtcttctctatggaataagctttcaatcagttagacttttgttctgtttttgtccatgcctgctgtagtctacttttgtaagacatgcaaattataaga

SEQ ID NO: 446403 - DNA, 513 bp, Homo Sapiens
  misc_feature (423)..(423): n is a, c, g, or t
  misc_feature (489)..(489): n is a, c, g, or t
tttcccttcagaggaaggctttattgtaacataaaatacacaactttgtgactgtaactctgcataggatatatttcttttttttgaggcagagtcaaatttgaggccccaaattgtacacaatacttttttttggtggctaaataactaatctgccttgacactaaaatatgtatctgaaataatttcaccaagttttaaaaagaaaaattataaaaagtatactttcattttaagttatattcgattttagtctccccctaccccctagaaaaaacctgcacatctcacacacggagctgaaacttttgaggacttgtgtgtgtctgggagtgggtgagaggctgatggggtcgagacacaccactacctttatcttgtggtttgcaggaacaaggaggagagaagaaagatagaaccgcngaagaagcgagcacacctttcatcaaaaatctccactctctaaggcacagcctcgggtaacaccgnggacagctcacaactgggacaaag

SEQ ID NO: 446404 - DNA, 791 bp, Homo Sapiens
  misc_feature (583)..(583): n is a, c, g, or t
  misc_feature (742)..(742): n is a, c, g, or t
ttttttttaatcatgcttttctttattcacctcatataaaagtctctttagaatgcatttgaacacaatatataataataatactataacatacattgtgagaaacatttgaaaatgataaaatgtccacctgaaacaatgcagtgttcatagacatacattggtcatgcacatttgtgccattttctgtaattactgagtcacaatgctgaactgaaagcatgaaacatattttacaaactgaaactgacatcagtaagaggcctaacaagtgttatcagaagaggcttcacatttgcgtaatttgctacatcagttcacattttattataaaaattcacattgttttattgttttcttttgtaatgaactggaacatgacattcctgcttaatggcaggcaggaggctacctcttcaaagtcagtagttcgggagcattcagaagaatcatctgtgagcaaatgtagtgtttccttttgaaccaaagccacaatgatagtaggatccagttataacccaactcatgcccacatagatttggatagaacctgggtaaaaactacatcccattgccccctgcnccctatcaagctatacaaaagtaaaagctcagtataaaccatttagtatctaatgtgagaatattgtttccaaaactggttcataaaggggttgtgcagaagtagcaactcaggcagggaaagggcagaccctttgaacaaaagcccacccctgtcctntctgccaagggggccatatgtctctactaagtgacgtttgggttatata

SEQ ID NO: 446405 - DNA, 928 bp, Homo Sapiens
gttttttgttgttgttttaatgatagaaactaaatgttacaatttattccatcttcaggattacagacattacagggcaggatgagtaaacaaggcaaatgaagcgagcaccttcagcttcccccctaccccgacatttaaccagatgcagcattttgacatttttaggatatgcaggttgacaattcactgacttgggttgagagctggcaatagcagatctttgcaatttaggttcttcctccacagctattccaagtatcttaattcctgaactgcacactgagagctctgaaatggtgttcactgcaacattcttgcagctttcacatcttaatctgacacctcttgtgaaggcagggaactgtgttaaaagctgtcttcctctttgctaatccaggccaccatcaatcttaaccattagttactatataaaaataaaagtgtgctcaaaagcactcactgaaactgttgtgcccagatcccttttcagagcattagttccctgagaggaaaaaaagaggtcctaaccaattgctttcataaatagtgaccccagtacagtgtatatgtcttttgcagcagaaatcaagaggtcaggcagctctgctcatcctgactagtttatcatcgtttgcatacaaggtatatttatgtaaagctgattccacgccaagtattgcaaccataatctcaaaaaaattgttcaattttagcacacagttcctgcaagataccacagcaggtgagaaatcatctcaaagagttcatcttttacaactgagaggaaaacatcgaaggaggaaataaaactcctctctcctaagttcctcatcaaatctgatggctatgttcacagagttagtgacaaaaatccagagtcctcaatttccctcgtgccgaattcgccacccaggcctcgctcctt

SEQ ID NO: 446406 - DNA, 1063 bp, Homo Sapiens
ccttgtgccatttttaggataggcagggttgacaattcccctgacttgggttgagaagctggcccaaagccagatctttggcaattttggtttcttcctcccacagctattcccaagtatcttaaatccctgaactgccacctgaggagctttgaaaagggggttcactgcaaccatttcttgcagctttcaacatcttaatctgacacctcttgtgaaggcagggaactgtgttaaaagctgtcttcctctttgctaatccaggccaccatcaatcttaaccattagttactatataaaaataaaagtgtgctcaaaagcactcactgaaactgtttgtgcccagatcccttttcagagcattagttccctgagaggaaaaaaagaggtcctaaccaattgctttcataaatagtgaccccagtacagtgtatatgtcttttgcagcagaaatcaagaggtcaggcagctctgctcatcctgactagtttatcatcgtttgcatacaaggtatatttatgtaaagctgattccacgccaagtattgcaaccataatctcaaaaaaattgttcaattttagcacacagttcctgcaagataccacagcaggtgagaaatcatctcaaagagttcatcttttacaactgagaggaaaacatcgaaggaggaaataaaactcctctctcctaagttcctcatcaaatctgatggctatgttcacagagttagttgacaaaaatccagagtcctcaatttctggacttgcgaaatccttcaaggtgactgtcaaggtcaagaagaattttcaggcttttctttgccatggcccatgaactccagtccttcaataggaatctctttctcctttattgctttctgaacacactgctggtagcgcttgaagaggtcggtgcacgggtccccggagctgtcccccttgagaaatttctcggcgaaccagcgattgaagcactggtcgtactcgcgcttcatgtccgtgcatgcctcccccacactgttcatggcgacagtggtcctcgtgccgaattcgccacccaggcc

SEQ ID NO: 446407 - DNA, 1064 bp, Homo Sapiens
  misc_feature (178)..(178): n is a, c, g, or t
  misc_feature (272)..(272): n is a, c, g, or t
accccggaggcgattggactttttagggatatggcaggttgaccaattcactgaccttgggtttgagagcttgccaatagccagatcttggcaattttgggtccttcctcccaccaggtattcccaagtatcttaattcctgaactgccacccggagaggtccggaaatgggtttcantgcaaccattctgcgagctttcacatcctaaatctgacccttcttgtgaaggcaggggacctgtgttaaaaagctgtcttcttcttggctaatnccagcccaccatcaattctaaaccattagttactatataaaaataaaagtgtgctcaaaagcactcactgaaactgttgtgcccagatcccttttcagagcattagttccgtgagaggaaaaaaaagaggtcctaaccaattgctttcataaatagtgaccccagtacagtgtatatgtcttttgcagcagaaatcaagaggtcaggcagctctgctcatcctgactagtttatcatcgtttgcatacaaggtatatttatgtaaagctgattccacgccaagtattgcaaccataatctcaaaaaattgttcaattttagcacacagttcctgcaagataccacagcgggtgaggaatcatctcgaagagttcgtcttttgcgactgggaggaagacatcgaaggaggaaataaaactcctctctcgtaagttcctcatcaaatctgatggctatgttcacagagttagttgacaaaaatccagagtcctcaatttctggacttgcgaaatccttcaaggtgactgtcaaggtcaagaagaattttcaggcttttctttgccatggcccatgaactccagtccttcaataggaatctctttctcctttattgctttctgaacacactgctggtagcgcttgaagaggtcggtgcacgggtccccggagctgtcccccttgagaaatttctcggcgaaccagcgattgaagcactggtctgtactcgcgcttcatgtccgtgcatgcctcccccacacactgttccctcgtgccgaattcgccacccaggcc

SEQ ID NO: 446408 - DNA, 716 bp, Homo Sapiens
agattttgtacctgaagagttacctggcagggcaccacccttggctaggcccaggtgtatgtttctttcttgcctggcatggaccccgaggcaggtgatgtggggcctggcgcacctccccgctttggcagctgtggcctccctggccagtgcccttgcaggaggccggccggcagcctgatgacccgcactctttagtcactgacgtcagattatttttataacgttccctgacagttcagagtcccttcgaattgcacttttctggtttcgcttatttaattaaaagagatgagtgtaagtataaaaaatgaaggtgaaataaccattggaattgtatttggttacttaatactgttccacaacatcttgggacgtctgttttcctttggagagtgaggccttgttattattcttttctgataaagaaaacattttatttcctttgggcttgcattagctctttcctagcaacccattatcccagctcagtacctttcaaacagaaaactagagtctggggttttgttgtgatctgaatttgtaagttattaatgtgaaagggggagcaggaagctccccctttgcacaaagggggatttgtttgcacaaagttcactgtaaatactgtgagaattgaattctgaaaaggtcatatttagtgatttcaaaagcacacatttaaatgaagactgactaaataaaaggtccccccc

SEQ ID NO: 446409 - DNA, 920 bp, Homo Sapiens
gtacaaaaatcaatgcatatttatgaactttatttcaaatatattttcacacattttatctaaatacataatacagaagcctgtgtgacttgggcaatgtggccaggagggcctgagactaacaaatccaccttggcaaaaggacataaaatacgtcttatggtcagaaaaatcaacattttgtgtatttacttagtttacgaaaagtactgaaaatgctattattagctgaatttgtgatttccttttgaaattctgagttatccttatttttcccattttgtttttgcaccaaggagactgcagtcaaataaaacagatactacacgcactcgtcggggcagccgtactgcagaagcacgttgatgcactcctggctggaggcctgccgggcgtaggtcagcgctgtgttcccgtgggcatctcgggccatgacgtccaccccgtaccagatcaggagctgcgccaggaccacattccccttgcggcaggccagatggagcgccgtgcagccgtctccctccccacaggtctcgttcacctcctcacgggagccatgtgccagcagcaggatggctgtctgcaggtcctcatcagcggtggcccgcagcagctgctggcccagggacagctcagtgcagggtagtggggccagaaagagcttctcctcatatttggaacggatccatctgttccttctcttccctcgtggacttttttgagggttttgtctgcccctggctgctcccttcccagatgctgttggctaggtcattgccaatagatgacataaccttcctgagctcaactggccagtcatccaggctccagagatcgcacacgggaaaggcgggtgccaaaactgctgtggatacctgagcaattcatacacatgagactcccaagttcaaactggcccc

SEQ ID NO: 446410 - DNA, 1716 bp, Homo Sapiens
  misc_feature (102)..(102): n is a, c, g, or t
  misc_feature (125)..(125): n is a, c, g, or t
  misc_feature (251)..(260): n is a, c, g, or t
ggcccattagagaatttatttgggatgtatagtttggttgggtagaattgagccaggattttataaagtccctgaaaacccagaaaaccagtagtttagagnatatagaatagggagggggcatngtataatataaagacttgtactttaaaatgtacagtctaattaaagaaacaagacaaaccaaaataaccaaagaatttgaatcaacaaagaggcttaagcacacacaatgaccttatcttccttcnnnnnnnnnncttataaaatgtaaggtttaatatatgacagcaaggcgcaccccggaggctgccagcgcatgtgacttcgtgtttctgtgctacatgagactagtgtcctcatcttccatcgtgacaacccttctctctcccccaaccctctcccccgcccacagtgccaacaggctctgggcaaagctgccccgttttcttttaacctaagggatgccatggtttggctgactatgtttgactaccaccactgaaggcagctgatgtctcaagcagctggatactgtggcgatgggaatcaggcgaggtactagcgtggagggcgggggtgccgggtcaaggtcgtctgggttctcagtgagccagtctgtgccacagaaccatcggcagctgtcttcgttaggcacctcggtctggcattcggaaaaccaccctgtcttgccagagtcccttggtccttggttagcaaaaagctgtatctgatctaaatcatgctttcaatcagaagaaatcacattccttcttttccctttctaatatattccaatgtgtctattttttctcaattttaataagcaaattgtaccaccatcttattctgagatgctcctttttaaaagccgtagatcacattaatggaagtgtttactgctgggaatattttccatgtacaatgatctgtaaccctcttatctcaactagttgcacattattagttcacatccagttcaatttataaattaagagaggtgccatttgtctgtacaaaaatcaatgcatatttatgaacttcttttattcaaatatattttcacacatcttatctaaatacataacacagaagcctgtgtgacttgggcaacgtggtccaggagggcctgagactaacacatccacctcggcaaaaggacatcaaatatctcttacagtcggaaaaaacagccttttgtgtatttccttagtttacgaaatatactcgaaatgctattattagctgaatttgtggtttccttttgagtttctgagttattcttatttatttttcccattttgtttttgcaccaaggagaccggagtcaaataatactcagcgactgatttcctctctttggactgaaaaattaaacagatactaaatgatgacagtgaatttagagagggctccaagggcttgaaagaacatgtctgggataatatggtgcttctaagagtattgcaatcacatcgtggcaatcaccggcgcgtgccgcgtgactacctcctcggctaatatgctttcttctcggcgatgactaatcacgttctattaaacagcagtaatgcgggaagaactcggctgtacaagtgtaatgaagccagtattctccctggacagattagctacaactgatttgacacacaccatcataggggcttcaaacctgacaaactctgtgcttgcttctgatttatgccgtcgagctcc

SEQ ID NO: 446411 - DNA, 435 bp, Homo Sapiens
aggtcagaattttcctcttaatggtcatatattagttggggttgtagctgacaaaagtcatgaaatttcgtggttttcccagttaaaatttccgtctgttcctttaaaactctcctgcatgcctggggctcttgggatttgctttgtggcctaggatgtggctgttttatctcccgtataatgtacatcgtgctgccaatgccttggttttgtttgaaacatttacacttttattttcccccagtgttctttagaattgtttttgttttaggtgacttaaagttttaactaaagcatgagtaacgtttgttggcatccagtcccttccccccaaataattgtcttgccctgtttacaaagcaaggatcagttccctcccttgtccccttccctacccaaataaaccttacaacgctattctttgagactatcctg

SEQ ID NO: 446412 - DNA, 453 bp, Homo Sapiens
ccaaaaccatgggattgacagggggatttatttggaaaacccctttgggggagggaatgaaacaggataaaaaagggagagagcttaccccgggtgaaggctcaaaaaaagtttactttggcctgacccaagggggccaaagcagtcatagccccctggagttttttccgttttaatcaaatgaaccaggtgttggggtgtaaagaggaagtgactcctgggggaggggagatggctctcatttcctgagggcaattttccattttttggaaaacaaaagctgggagcacttgcaccccaaactcaaagcagttggggatgggggtctcattttggtaaaggggactggacagggccccacagtgtccaacacatatggccaacaaatatttattgggcttttattgtaagccaggcaagtcagcaaaaacggcctgagcagggcccaagagc

SEQ ID NO: 446413 - DNA, 344 bp, Homo Sapiens
acatctggaaaacagcggcacagccccatctgggtttgtgtggaggggtctgggttgtggacacagaactgtcatcagagagatggtgcccaccatagcatggatagtgttcgggcatggcagtggtgtaggcctggggacaccttcagtttctcatccaacacatatttactgagcacatactacgtgccatggaaggggagagagcaatgccatcctgcaggagaagtgctttccctacggaagcgaggggcatccagctctgtcttggggtgggggctaccaggggagccctctccttgaaggtgtctgttttcttcccaagtgacaacaataggtgggtg

SEQ ID NO: 446414 - DNA, 626 bp, Homo Sapiens
  misc_feature (50)..(103): n is a, c, g, or t
  misc_feature (390)..(390): n is a, c, g, or t
cagctgacctcatactgtctttattggatattcttgtttaaaaaactatnnnnnnnnnnnnnnnnnnnnnnnnnnnnnnnnnnnnnnnnnnnnnnnnnnnnnngactaaatccataacatacagtgatctgtaataattctattttataatatcaagtgttttgaagaactccaggaacagccatgagagaacactgtggtttagtaacactttatttcctcagtttgaaaatagttgtctttcttggggaggctggtttcagcagatgaaaacgagagtcatgatgaaaattacccagcagtggttagtgtgaccataggaacattgtcatcaggtcagcagaaaacatatcagcaaatttttctcatactgggcagtgtgtaggggtnggatgtttacagttcctggaagccccagtgggtcgtgtgggtcttttagttttgccatttattggcaacttggggtaactagctcaattagacacattccttatcacaaggacagagggctttctgtatcctagggttcttgccttggcattccagaagaatcaggtcacacgtggacgtggagaatgagtgcaaggttttattgagtggaagtagctctcagcagatgggggagc

SEQ ID NO: 446415 - DNA, 459 bp, Homo Sapiens
ctcttgggttttacaggcatactaccatatcatctggaaatgtacatagttttacttctgctctttcaattcttatgcttcaaattgcttccttctgcctaactgcattggctgataccttctatactgtgttaaatagtagtagatatacttggcatccttgccatatgtctgactttagtgagaatgtcaccaattttttccaattaaataaaaagttggcttttgacttaagtatttttattatgttaaccatatatccatcctcctattttattaagaattttttatttgaaatgagtgttgatgtttatcaaaatccttttcaacttttatagaaattattatataactgttcttacattaatatgatgaattattttaatgaatttgctaatatcaaaccattcttgcattcctgaaataaactctacttgatcatgatgtatttctaaaaaa

SEQ ID NO: 446416 - DNA, 600 bp, Homo Sapiens
gactttccagtcaggatttaagagcttgggcaaaggaatcaggtaagaagaaaattgttaaccaaaaataataatttcctccaaagttcattcattcaccattgtgtcatgtcgcttcttaataagagcattttgttcatttactatgtgctctgggaaaaacaaggaatcaagcatggtttcttccctgaaactgcttaaaatcaggtcaagatgttaccggatggtatagataactgtcaaatttgaaggaaatggactatgagaaataaagtagaaagatatacagaataattaattttgaaattagctagactttgtaaaagagattggtctctaaacttcaaaagactgataagatttgaaaagatgaaaaaaaggcttacatagtgagaataatataatttaaaaggcacagatgggacaactagatagcaaaacatggattgaaaatttttgaaaaagttcaaatagacatgttttattagaaacattacaggttttaaaagccaggcaaatgagttgttctcctttcttagaacaatggtttacattagaatttgtattaaagattccttttgttataaatgattcttaatt

SEQ ID NO: 446417 - DNA, 442 bp, Homo Sapiens
  misc_feature (153)..(169): n is a, c, g, or t
cttttttggtcaattgggtctctgtgaggattggagaaaaaaatctgtgattgtgaggatgaacaaacaagctctagaaagatctaagacttggtgcgttacagaaaatataaaatactgctaaaatgtaagacgtgacaaaacgctagagtnnnnnnnnnnnnnnnnnagctgagcttatagagagttttccggaagattccgccaccctgtgagtgcgtcttgtgctgttagtagtctggacaggagcgtggtgctacccgctctcaaggcaagcagcaaagagttattgcacaaacgcaaagaactaggtctcttattcaatgcaaagggatgtggggaaaaccaccttctttttacccccacttttattttataacaagctattctccaatgttttaagaattttgggtgaattctcacatctccagaatacacggga

SEQ ID NO: 446418 - DNA, 251 bp, Homo Sapiens
ttttttttgagttagacaaaacagctttatttgaaagacgtgggacagccaagttcccccaaccccgcggtcctggcgacgtcggtgtcaggcgtgggaggaccagtgtcctaagtgaagaggagagcgcaatggaggcgcggacgtttatagccactcttcgggtggattcccgagccgcggctggggacggaggcgccggcgtttatagtcgcttttcgggtgacgtagattcccgggccgcggctccc

SEQ ID NO: 446419 - DNA, 554 bp, Homo Sapiens
tttttcaaatgtaaaatgctctctttttaattactaaattaagaaagttaaacaatttaaaaatgtaaactcacaaataaatcataacaaaaaaggaattaagacttcagagttgctagtcagtattaaaaactcaatagaaataggatttttgatttgttgttgttaaacatatgtaatttaaggttggtacaaacagcaactaaaaatgtaatacttttttgtttttgtgcatccccatgaaatgtaaagtagtgcatagttattccactggagaactcctggacatatagaaagtcattcgttagcagtacaggacatttaaaacacttattttacaatgggaaatgtacaacccccaccctcatttcccccagaaattttagttgcatgagaaagtttagcgggttgccatgactacaatgctatgggttttagatcacttaaatgtggttacaggtttattaaattaaaaatgtctgaaacatttcagcattcatatttttatacaagaagtttgtgtggtatccatcttccagttctcttggtagtat

SEQ ID NO: 446420 - DNA, 130 bp, Homo Sapiens
ttttttactattaaaactataatttattgatcaccttttatactctgggcctggagctaaggatttccaagcattgtttcatttaactttaggaggttaggtacttatatgattcctattttgggcataa

SEQ ID NO: 446421 - DNA, 738 bp, Homo Sapiens
tttgggtcttatagaaaaatataactttaataaggaaattcaactaagggtaggagtactccaggaacaatggtaatccccacatgatgatctgattctcttctgggagcaaaacattgcaaccagacaggatggacaaggcatctaaaaacccagtatccttcaccttccgaaaggagggagggactgtagagttgcccaggaaaaaggtcaagagtcttccttctcctggaacttgcagttggtacaggtgtagaagacagtttgcccttcatcggctgaacgcatctgtctggtgtggtatgccattccttcatgaccacatcgagggcagcgcctgtcaaccacaggtccctggcactcaggcccttcctccaccgacataggcatggctgtccccagttggtggaacacaaccgaagtcttcacaaccttcccctcaaagtcccgaacgttgatgttgaagccacagcgaatacaggtgaccgtatcctgagccccgggcagaggcaggaccgagccgcaatctgaacagaaatccaggtccgactgaaagctggagcaagtattggcgaggtccatgacagacatgcggtcgggtgcctcctgcctctgcgaccaaggagccgaaacgcccggaattcccagacagcgtcgggtactaaaggacttggaaccctttccaggggccggtgagaggagttaaccaactccgtgggctagagcgccagctctccc

SEQ ID NO: 446422 - DNA, 579 bp, Homo Sapiens
gtatgtgttgttgttccgttatagaaaaatataactttaataaggaaattcaactaagggtaggagtactccaggaacaatggtaatccccacatgatgatctgattctcttctgggagcaaaacattgcaaccagacaggatggacaaggcatctaaaaacccagtatccttcaccttccgaaaggagggagggactgtagagttgcccaggaaaaaggtcaagagtcttccttctcctggaacttgcagttggtacaggtgtagaagacagtttgcccttcatcggctgaacgcatctgtctggtgtggtatgccattccttcatgaccacattgagggcagcgcctgtcaaccccgaacgttgatgttgaagccacagcgaatacaggtgaccgtatcctgagccccgggcagaggcaggaccgagccgcaatctgaacagaaatccaggtccgactgaaagctggagcaagtattggcgaggtccatgacagacatgcggtcgggtgcctcctgcctctgcgaccaaggagccgaaacgcccggaattcccagacagcgtcgggtataaaggacc

SEQ ID NO: 446423 - DNA, 503 bp, Homo Sapiens
aaattatattttatatcttttatttcagaatattgtctttaagacactttatctttatatttatttgcattacatttgtttcaaattctgctctaaaaatccacagaacaatttcaaacagagttttattaagtaaatactatttttctagaccaacaataacttcattagccttgaaaaagccccaaactgggaactgtttattgtgcagaacgcttagcttttaccaacttcattatgttcttacaaaactgtttcataaatagcattaactttgggaccatacagtcacatgaatactcaaactctccatttaaatactaaaaggatccaccatttcgaaacgatctcccaagtctatttatattagacattgctacagtttgattctcagctatgttaagtaataattatcatcggaaccaagaccattgaatactcctgcccttcatccttttttcaaagcaaacttgcacacactgtaattcttttaagaatcttta

SEQ ID NO: 446424 - DNA, 777 bp, Homo Sapiens
tttttttcaaatatacctctttgaaagataaatttctgctcaaagggacaatattcttgctggatgcgtttctgtaaatgcttcacagtttgaagacaaaggaatgcaacttcccaaaatgtgcccgaggtggaagtacttcctggctagtcggtgtaaacgttgcaaaaccagtctgtgggtctaagagctaatgcgggcatggctgttgggatggaggacctgctgtggcttggtcctgggtatcgaaagagtctggatttttagggctcatactatcctccgtggtcatgctccaataaattcactgctttgtggcgcgacccttaggtattctgcattttcagctgtggagcccttaaagatgccatttggcttggcttccttgggaaagaagtcctgctggtagtcagggttgtccaggctaatttggtggctgcctttctgggcccagtgggcagggctgtcgaatgtgctgttgacacaggtgggctggacagtgttgagatactcggggttgcccactgcagtgctgtgggggtcctggtagtgtgggtctctgctgggcgcggggttcagaggctgattgtgatagacaggattctgcacagagccagcgggccttttgggaacggactggtttatgtattcagggcctggagaggaaggtgtcgtctatgctagtcctacagtcaatgcgcctgatgagggtctgagctgtatcgctgctagaagctgtcttccttgatgggacagctttgcagtcccatatctatc

SEQ ID NO: 446425 - DNA, 1333 bp, Homo Sapiens
  misc_feature (791)..(873): n is a, c, g, or t
tggttgttcggccgttttgttgccgttcctgtggtgttatttgcgtcgcttgtagtcgctctgctttttccgaatggggtggtgtggctcacgtttcgtttttccttctctaggtcgtcggtttgtttatctgttgtaccattgtgggcttgtgccacttatgcgacatgttttctgctataattcatttgtgtgttttccagtacgctgtggcaatgacatgggttccatggtctacaattgagtccaagtgaagtcaggaaggatagttttacatttctggtcagtctcttggaaggttaaacgctgtaagttcctgccactgttctcagtgctccggggtccgtccctcagtcctcttgcggatctgggcataagctcttttggtaaagccagattgtgttggaaggtctctgccgattcctgcgttcacgccgagctgggcgtacccgtggtaagcttcatagttggtgccaagttttgtaagatgccttgcccggtccataggcctgcttttagctcatccaccttgtgatttaattcctgatactctgtagatgccttcacacttcatgccatacttctctacgtaatctatacattcacggaaaacggctgcaagccgaatgccatcatacatcatggtcctctctactgcatcaggccaaaggaattccaaaaatggtcttgagatttggaacatcaatctgaggcacctctggctcctgaattggctttttctttttcttctgtttccgtccactgtttaacagcatcagctgctgtcaagnnnnnnnnnnnnnnnnnnnnnnnnnnnnnnnnnnnnnnnnnnnnnnnnnnnnnnnnnnnnnnnnnnnnnnnnnnnnnnnnnnnaaaatccttttccttctttttagaaaagctgggcttcttgaaaacatggattcccttggacctcttcattttagaaggactttctgcctcatctccagagctatcttcctgaaaggctgcatagccttcagtcctcttttcctttttcttaaatttcccttttttcttcccatgatctttctcatcatcagacactacatcaggaggctcatggaggatgtcatggggaggtgagggctcgccagtgcggtacaatccaggaaacttagtagggctgatctcttcagagctgggggtccgggtaagcccgctgccatgctccaccctgcggtgttcactggggctgctggtggggggcaggaagcactcagtcatgctgatgccctgactaggaagggacgaggtcttctctgttacctatccattacacctgtgcctgccgccgcgcgaccgtccgccc

SEQ ID NO: 446426 - DNA, 510 bp, Homo Sapiens
acatatttcagaatacaatcatttattaatatttgaactaaatttatggggaaattttatagttaaatactaaatttgctctttgacaagtgttcctttgatttttaaaaattcatttatcacattaaataccaaccacgttagatgctgttaaattctttgggtcttataaagttgtgtaaaacatggttcttttctcaaaatgcttccagattggtaggggtgtcaaacatgttcattcctattatggggtagaaaccagtaagtgaatcaagggttacggaaattcagagaagaaagagtttccagcaggggaaatgagagaaggctgtcctagagggggtggaatttgacctgtctcttaataagtagatagaatatacaagtcttgtggttaggagaattaacattccaggtggatagggtgttataggtaagtgtatagaggagggggaaatgggtaagataaaatgaccatagctcagtttaatgggtacatgaggcaaccga

SEQ ID NO: 446427 - DNA, 476 bp, Homo Sapiens
  misc_feature (195)..(237): n is a, c, g, or t
acatgaaagacagctgcaaaatgcaagccccagtagagttggagagtttttcaaggtgagaagtcgctgttctctgcattgaacatggattgaattttccttgtctgatggtaacccatggcccccgccctgcggggataacattctcaggagcttctcttgtcctagccccttctcatttcaaaaatattagtnnnnnnnnnnnnnnnnnnnnnnnnnnnnnnnnnnnnnnnnnnngtagagaccaacccaagtagatgcaggtgggtgttagataaaaacacacatccccaggggacaagccatccagcggtgaggaatctctgccatgttctcttccctgctgcccacaaacgttacggagactcccttagcctccccctcctcttccccactgaggggcagcttgtggagatggaggactcgggcccatagatgcagaccccctaccaaatctagcaatagttctcaccctt

SEQ ID NO: 446428 - DNA, 544 bp, Homo Sapiens
ccagacagaagaccatctccaaatggttctttattgaacacccactttggctaggcaatatcctccccctgccctctaatccaggctcaggtacccccagtggagtatcctcagaaggcaactcccaagaccaggagtaatgagagattgggcagagggtaagggacagcagggagacggaggaaaatgaagacaccagggaaagaggagaggcctgaactggacagctgatgctttgtcctgcccagcacccattcgtcccttcttcaggtaatatcatctgccaccacaaccaccagcaccaactctcagtctctgtgggtacatgccaggcctgtccatttggtgtattccatcttcctggccacaatgatgacttgaggctggataccttcctcgtctggaccaatgagaaccaaatccagcagttctgtcagcaaaggggagctctttttatcaataactggtgctgtggggccacactgtgaagcccaagaataaagccaactcaaatgaaagcagagctgagagccaaagagacaga

SEQ ID NO: 446429 - DNA, 819 bp, Homo Sapiens
  misc_feature (200)..(375): n is a, c, g, or t
  misc_feature (733)..(733): n is a, c, g, or t
tactttcacagggaggagaagagaaaggaaaaagtcaggtaggcaggacagtgaaaacagccaaatttggtgccagccccatcacatggaggcgacttgtggcaggtggcttccgtcctgtacctgggtggtctccccagtgtcctagatggagagtttagagaggcagtggggcagagtgactttcagggcatagacannnnnnnnnnnnnnnnnnnnnnnnnnnnnnnnnnnnnnnnnnnnnnnnnnnnnnnnnnnnnnnnnnnnnnnnnnnnnnnnnnnnnnnnnnnnnnnnnnnnnnnnnnnnnnnnnnnnnnnnnnnnnnnnnnnnnnnnnnnnnnnnnnnnnnnnnnnnnnnnnnnnnnnnnnnnnnnncagtacgtattagctgttgttatctacaacatgcacaaaagataacgtttgctcagtttactccacagagtggctttgagaatcagatgagactgtgctggcgaaggccctgtgggaatgaggaacgctgtagtgtttgctggtccctgtttctgcccccaggaaagcagctgtgtgaggaggagcgccgggccatgcaggctgccctggactccgtcgtctgccacacgcccctcaacaaccttggcttttcccgtaagggcagcgcgctcaccttcagtgtggccttccaggctctgaggacggggctcttcgaggtgggctggggagggtctgggctgagtgctgagtgatgcanaatgctggggtggacggaggcaggacccttagattttggggatgaaataaaaagcagacaggcgcttgaagggcacattcatgccg

SEQ ID NO: 446430 - DNA, 457 bp, Homo Sapiens
agatgctcaaagcctgtttattaaattgtattgaaattgaaacgcttgaaacagatttcattcctgcttattttctaacagtggttaaaacttggtaacttcaagttgacatggatttcagaattcaatgtaatttcaataatattataatagaacaaacttagggttgccaacatttattttgctaagcaaggctattttaaaaacaactatcaataattatcttattttaaaaaatacattttaaccttatatatacatgtttggaataaaaacagtccttcctgagaaggaagagttggcagacctacatcaataaaataaatatattcaaatgctttggatatggaagtattacaagagaaacattttcaagtattacttcgtatgtagttgtttcttatttctcagttcggggatctgtattcaacagggacatggaatatggagcctgaga

SEQ ID NO: 446431 - DNA, 557 bp, Homo Sapiens
tttgccattagttacgtttaattttaaatataccatctttggcagcaaaaatcaagctgggctttccttctcctttataaattgcatatatttttaacatatattaacactttaaaaccgtggggtggaaagtttaaaatgccataaaataagaatcatatatgcattctttacactgtaaagcattttaccagacattagaatctgcattcagaattctttctcagaacgtaagtgttcttgaagacatatattttgtcttactaatctgtttcttccaagcactactgtactaggcatacggtaaagatatacattcaagttttaaaagtaaatactttttcctggtagtggccagggcctgcgttcctcagaccaaaaggcgcaaactggcattgctgtgatttcagaagagaagtgaaatgtataaaacgaagtaattctggggaaggaaaatgtcacaatttttcttcagtgttgtcaggcacactaacccgggaagccgtctctgggcctgaactatccaaattagtgtccgaggaagtgtgacaaatgca

SEQ ID NO: 446432 - DNA, 565 bp, Homo Sapiens
  misc_feature (536)..(536): n is a, c, g, or t
tttttttcagactgacacagaacaagctgttttattcctcagatatacatgtctctacaatgaaactgcacacaaggtcctacttattgcttgccccagagagtactgttaaatgtacagagactgggaatatatctaaatgtggagacactggtgcctgtcattgcttttggggaagaggcacagattaccccattgggcaccaataagactggagcacttcagaattagacagctgggatggaactatagagcctaccaaactgagaatcaaccttgtgtaccataaatgtgcttttcttcagaaggccaatcccacagggactaggacacagaccccatcagcaatggtagtggctgcattactaataaaaatacacatgattcagggatacatggtatcaggtgcaactgaccacaaccatctcatggtaaatacctaagccttgagagccttaaacgctattctaaatattctgaaggaatctcctttcccaacaaccacttcatatgcctaatattaaatactcaaattntcagagtatactagctagataagacacat

SEQ ID NO: 446433 - DNA, 489 bp, Homo Sapiens
acggggtaccttctaaataccaaacagctaatgactacggtgaatgagtaccggccgctgttcttctacccaggagaccacggctcagaccctggtccgggccctcaatcccctggattacatgaagtggagaaggaaatcagcatactggaaagccctcaaggtgttcaagctgcctgtggagttcctgctgctcctcacagtccccgtcgtggacccggacaaggatgaccagaactggaaacggcccctcaactgtctgcatctggttatcagccccctggttgtggtcctgaccctgcagtcggggacctatggtgtctatgagataggcggcctcgttcccgtctgggtcgtggtggtgatcgcaggcacagccttggcttcagtgaccttttttgccacatctgacagccagccccccaggcttcactggctctttgctttcctgggctttctgaccagcgccctgtggatcaacgcggccgc

SEQ ID NO: 446434 - DNA, 474 bp, Homo Sapiens
  misc_feature (54)..(54): n is a, c, g, or t
ccataccacctaagcttgtacttgagggagtagttggtgtggaggaaggtctcnccgtgggcccctggcgtccagcggcaggtcaagtccttcatgttcttggaccagcagctgatgttgacgggtttctctgggggcaggccaacatagaggcaggagccagccaggatgctgccgtcacgggcgtggcacacgaggttgtcccccgaccgctgcctggacccattgaggttggccagggccagagccaaggtggaggcgttgagtacacgggagagctcagggggcaggcggcgcccattgagggtccagtagaggccctcggcggtggctcctggtgggtctccgtgcactgagcaggtggccagcagggaggagccgatgagaagcgtgggatcctggggactgatcacagctgtgtgggctcctgatccggctcgcggcgccccgaggacgcagagcagcagcaggggc

SEQ ID NO: 446435 - DNA, 589 bp, Homo Sapiens
  misc_feature (460)..(460): n is a, c, g, or t
  misc_feature (535)..(535): n is a, c, g, or t
  misc_feature (578)..(578): n is a, c, g, or t
gtgatccaataaaactttatttacaaaaacagacaatgagccaaatttggcataggggccattcttatctgccaactctgtttcagatgatggaattccaggcaggtgttcaaatcatccagttctattgcaaactgtccgagatgccccttcagtcccatttggtccttttggaactatttcaaagcaatacttggttccagggaacaagccaccaatgataatactttggttggtggttatttctacccgagaattgccagctccctcctgtgtgatatgcatctgaaatgattctgcatcatggctgctccatgctaagccgatctccgtcgtgctgaccactgtcactcggaagtcagaaactggaacagggggggtgtgcacttggaggaagcccggcgtgccctcgatgtcacctaggacaggacacactgtgatgttgtagaaggtgctggangcggagtccggggatgacagcgcgaggctcactgacgttgagattggaagaatctgtctcccccggcacatgtantcttgaggtatagttagatgacgactcgttatcgctgactttncagatcagggc

SEQ ID NO: 446436 - DNA, 507 bp, Homo Sapiens
  misc_feature (79)..(79): n is a, c, g, or t
aggctccacgttggggttttcccattccatttgtgggcagtgcatgaaatagcaaagggtgtacagggcctcgggctcncagtacagtgccccctgcttgtggtgcaggggggtgccattgccgtggtgcttggcattgaggggctgcaggtgatgcattgcacgggacaccaggtcactcaattcggcgatgctgcctacgcgcgtggccagcaaagactgctcgatggtcctcagctccgactggctgaacatgggcagttcccctggcttgtttgaccgctgtgggtctctgtgaagattcaggctgtctggtaggcacagcaccccgctggcgttcttcccgcagatcaggtgctggtagggctgcaggagaccccagatctccgagtcgttgttgaccgtgtgctccagggtctccacggtgaacttgggcgcctcgtggagcgcatggtggtggtgatggtggtggttggcggcggctgccggcgggactgcggcggccgc

SEQ ID NO: 446437 - DNA, 526 bp, Homo Sapiens
  misc_feature (294)..(392): n is a, c, g, or t
aatttcacaaaagttttcacaaggacaacgttatagaagaaaacccccagcagtggctaggtcatgcagaaccattaattgtcataccttggcccattctattcatccttgttgcactttagagagagaagtaagctatgtgagttttacaatgcttttaaactgtcatatttcctgttgagcactttaactggcacattcttatagttataaatgttctgagggcgtaactttataacctcctttgcaaagaatgcatgaagagctcttcatgatccaatactaggggatacnnnnnnnnnnnnnnnnnnnnnnnnnnnnnnnnnnnnnnnnnnnnnnnnnnnnnnnnnnnnnnnnnnnnnnnnnnnnnnnnnnnnnnnnnnnnnnnnnnnaatcaatatatagagagacaaaaataatttgaaaaaattcttccactcatagggcttgataatttacatgtatacaattattccccaccacaatactggtttgaatactacgctgcccctgtctttggtgtggg

SEQ ID NO: 446438 - DNA, 1140 bp, Homo Sapiens
  misc_feature (43)..(69): n is a, c, g, or t
  misc_feature (117)..(125): n is a, c, g, or t
  misc_feature (195)..(256): n is a, c, g, or t
  misc_feature (317)..(326): n is a, c, g, or t
  misc_feature (352)..(363): n is a, c, g, or t
  misc_feature (376)..(520): n is a, c, g, or t
ttaatccccccgggggcgttcgagtgttctccccccccgtgtnnnnnnnnnnnnnnnnnnnnnnnnnnnaggtgtttaaaatgattcccccccattttttcaaaaaatacgcccacnnnnnnnnnaaattttatttttgggggcgcggcggggccacccctggaaaaagaccccggaagccccccgggccccccnnnnnnnnnnnnnnnnnnnnnnnnnnnnnnnnnnnnnnnnnnnnnnnnnnnnnnnnnnnnnncttttcatgcccggagtttttttggaaaaaagtaagccccctttcccttacctttgggggnnnnnnnnnnacaaaaagtttttaaaaattttttannnnnnnnnnnncccccccacagcnnnnnnnnnnnnnnnnnnnnnnnnnnnnnnnnnnnnnnnnnnnnnnnnnnnnnnnnnnnnnnnnnnnnnnnnnnnnnnnnnnnnnnnnnnnnnnnnnnnnnnnnnnnnnnnnnnnnnnnnnnnnnnnnnnnnnnnnnnnnnnnnnagctatcataactttattaaacaagaaaagccctgacgcgtaaataaaaaacacctgagttctgatgccccgccccgcccagtcccgcccgccgaggtccgtgtccaagtcccgcgctctcaggagctatgtttctgccgcttccaaaagcgcttgacgtcgctgtgcccggccggggtcaccaccatgagccgcttggccgagttctcgaacacgagcacgcccagctcccgcgcgtgggccagcagcagctcaaagtccacttgcgacaggaactggttatacaggacaccctcagtgaaccggagtctgtccctttccagctcccagagccggatctggtcggtgatggtggggggcagcacaggtgtctgtttgagcatcactgggtgggctcttgtccttaggaaatggattatctgctgggctgtgatgccactggcgattgcctgctgcacactctcccgggtcacctgcgccaccaccatgttggggaaccgatagagcatctcagagaagagggcaatgagggcaatctgcagctcccgactcgtgtaggcatacagtcggtaattggtttcacgacaatgaaacctggctgattgacagtgccccccagc

SEQ ID NO: 446439 - DNA, 1041 bp, Homo Sapiens
ttttttttcagcagacacagacacagatgtttattccaggaagaggtctaagaaacgagcttcttagagcatgtgtcacggggcagccagtcctggggctctcagagccagccccctcccttcagcagctgaagcaatagcgcccccattttacaggcggagcatggaagccagagaggtgggtgggggagggggtccttccctggctcaggcagatgggaagatgaggaagccgctgaagacgctgtcggcctcagagccctggtaaatgtgaccctttttggggtctttttcaacccagacctggtcaccctgctgcagctgaagcaccatgccccctgacaccacctggaagagccccttgttggtggtgtcacagaagcccagggagcgtcggacctggccccttgaggaggagacgatggacaggcagatttcccactgggacagcacctggaaggtgaagtagtagtagccgggtacagtgcagacgaatcggccggagtggttctggtacggttcttcctggttggtgatgaccgtgtcgaagatgaccacgttgccccccattggggggttccgccgaatggcggagaaggctggcctcggctggtccttgatgtttcctgggctgcccttggtgcctttaattcccgggatgccacgggccccgagggggccgctgggccctgggtagcccaccttgccggggtttccagagggcccaggttccccctggtctcctttaaggccttggatgcctgtccggatgccaggggcccccggctccccttgctcccccttgaggcctggccgcccccgtctgccaggtcttcctgcctcccctttcttcccgtctggtgctcggcacaagtcctcggtcaccatagaggccagcgatatggccagcacacagagcaccagccatccccggggaccctccatgatgcctctgcctcctgttgtcaactccaactggatgctcctgccctccgcccagggaccctgggaaagcccagcaggagtggctatctcggaaaa

SEQ ID NO: 446440 - DNA, 463 bp, Homo Sapiens; identical to SEQ ID NO: 409009

SEQ ID NO: 446441 - DNA, 1600 bp, Homo Sapiens
  misc_feature (422)..(431): n is a, c, g, or t
  misc_feature (593)..(618): n is a, c, g, or t
gtgaaccaggggaaaatccgacccatgtgcaaaaggtttctattttcccacttaattagcatcctgctacagggccacacctgccatcttggtgggtgagtttagataccatacacttctccacggaggagtttgacaacatggtcacacagttgcaaagtgcaccaagctcaaggcacagagtagaagaaagttgtgaactgatgggggaaagttctagccaaagcagagttagcattttccctttacacagactttctaatgctaaaccaagacccactcttttaaaaggggttgttttggttgtgggtgaaaaatactgtactgtaatgatctgcttggttttaaagccaaagagatcctgacatgtgaaacccatacacccaaatgcccagtccaccaatgaaccaaacaagtgcttnnnnnnnnnnttcttctgctcttatatttttggaggaagctgctgattttggctgtcagatttcacttagaaatggtcactttctgagatgctttttcctcacagaatctgtagataaactcattaaaagattgtcccatttcaaaatcacccccaagtctagcagcaacgnnnnnnnnnnnnnnnnnnnnnnnnnnaaaattacaaaccaagtaagaagtccaacatcctcttccatgaacagctttgtgacagagctcctgagtgtgtgcagcccccactgtgctctgaatacagtctctgcagctccagtgtgtcctcttttcaggaaggaaagcatattcaatacattcactatctgtaccccctggaacttgcacatgctgacgagctattataagccaactcatccccagctctcttccgggactggtcaccccttgtaaaaccattctgtataagttctctttgaaatttctgatcttgagcagcatattcagaaagttcagattccaccgccggagggagaatgtttggaataaatttagaaaatagagttggagccatctgaacccactctggtctgagggtatacaggcctttcacaatatttgccatagttgaaggtgtgacctgaaatggtgttgactgggcttctaaaagtaaaggcattaggctgtaaatgtgcttttctgcaacatgttccgtaaacagctttataaggtcatcttttaagtctctgttaagcttggtttcgatgtaaaacttattcatatatatgaaaagaggcacaatgctctgcaatgctcccatatattgtccaagagctatattaaatctttcaatatagagatctggagggctggcctgcagctcctttgagactctctctaagtgattagttatctttttaatcagatcactatacatctgttccgagtgctgctggcatacacatttatacacacaactgtatatctgttcataggatatggggatatagtcaccaggactctgagttaaaagttgatctatggcaccatccaattttggccagtatgtgctcttataatcttcaatagttataacattcattaagaacttggaggtggaggtgttgatgttgatggtggagctggcggtgggggcgggggccgccttggccacggcggcggccgc

SEQ ID NO: 446442 - DNA, 384 bp, Homo Sapiens
gtgtttgtattttgggttggtttacactcgcacatactcagttttcagttttcccctttacagtcttctcccctcacctccaggaccctccccctttttaaaaaataaatcgctgacaagtgtgaatcccgtgaagactttattttgtgttgtgtgtatcctgtacagcaaggttggtccttcgtaacaacggatgaaatggttcccttttttaaagcgccctctctccctccaccctcagcgcccctgtccttggcatgttttgtatcagcgatcattctgaactgtacatatttatgttgcgagaggcaaagggcaagttttggattttgcttcttccaagtttgtttttaaacgacaaataaaaaaagaacattttaaata

SEQ ID NO: 446443 - DNA, 1393 bp, Homo Sapiens
ttttttttaacacacagagcagctgcggagcgactttattgtcttctccttcgacagcttcgttgtacatagctgggcccccgaggccctgactgtccctgggaaccaagccacgtggggtgaagctactttgaaacctcacccacagttcacacgtggtgaaagagaaaatctagcaaagtaaatccaacaacaacccaaattaacagtattattaacttcctaccccaagctggctctcccccaggccctgaactggctcaggaaggaggcaggaatgagctgaccgagacaaggcatcctccacccacacatcccatcttctgagtggtcccagagctgtgcgccacccctgtgggacaatcaggcactcctgggtctctaccagctgtgatgagacgtacaagaggagggtctgagcccagaataaacaagagcatcctgaggctggagaggcaggcccagtgtgcccggaccaccctgctctgcctgagaggatgggctgggttccagctggcccggccgccacctagtgactgcttgggacagtggagatgatgacaggatgcccactcgccctaggcagtcagaagcggggtacacacaaacactctagaagccacacttagcaggaattcccagtcttccggcccaggggagggtgccaccagctcaggcagccctcaagaggaggccgggagcaacttctccagggccttcttctgcttctcggtggctgcagccagggcctcaaccagcttctcctcgggcatcatgttgagcaccttgagggcaaagaggagctggcacttagccgtgctcacgaaggcgttgctcaggaagttggggaagcctccgactcggtccttctgggtgtacagcgggacccgcacgaggcccagcacctccaggccgtggtcgcgcgagtgcaccgcgctgatctccacggcgtgcagctgctccagcgtcagctgccgcgcgtacaggtgcgccacgacgcggtgtgggccctcggtcaggtgcgagctcaggtagtcggcctcggtgaggcgcaggcagcccaggcccaggcccagcacccggttcaggccgtcctccagcgaccagaagcgccggtccacgaagcccccggggaagcccagcagcccgtcgaaacgcatctgcatcagcaccgagaagcgcatggggatgcggccgaagagctgcccagggttggcggcgtacagcatggcgtggcacgagtggctccagcccggccctaggcgcatcgcctccacccggctgatctgcttcagctccggaaccgccgccgtcgacatcttggcactgaccccgtccccgccgccgacgcgtggtcgacgatatcccgtaacttccggaccgtaccagccgc

SEQ ID NO: 446444 - DNA, 842 bp, Homo Sapiens
  misc_feature (465)..(500): n is a, c, g, or t
gctggtaccggtccggaattctcgggatgggacggggtcagtgccaagatgtcgacggcggcggttccggagctgaagcagatcagccgggtggaggcgatgcgcctagggccgggctggagccactcgtgccacgccatgctgtacgccgccaaccctgggcagctcttcggccgcatccccatgcgcttctcggtgctgatgcagatgcgtttcgacgggctgctgggcttccccgggggcttcgtggaccggcgcttctggtcgctggaggacggcctgaaccgggtgctgggcctgggcctgggctgcctgcgcctcaccgaggccgactacctgagctcgcacctgaccgagggcccacaccgcgtcgtggcgcacctgtacgcgcggcagctgacgctggagcagctgcacgccgtggagatcagcgcggtgcactcgcgcgaccacggcctggaggtnnnnnnnnnnnnnnnnnnnnnnnnnnnnnnnnnnnntttggctctggccccgtggaaggcaccgatgggtgctgggcctcgtgcgggtcccgctgtacacccagaaggaccgagtcggaggcttccccaacttcctgagcaacgccttcgtgagcacggctaagtgccagctcctctttgccctcaaggtgctcaacatgatgcccgaggagaagctggttgaggccctggctgcagccaccgagaagcagaaaaaggccctggagaatttgctccggcctcctcttgagggctgcctgagctggtggcaccctcccctgggcgggaagactgggaattcctgctaagtgtggggttctagagtgtttgtgtttaccc

SEQ ID NO: 446445 - DNA, 1068 bp, Homo Sapiens
cagcatcatctttgaggtccaagaccttgggcccaccctggggcaatcaggcactcctgggtcttgaccacgtgtgatgagaccgtacaagaaggaggtttgaaccccagaataaccaggagcatcctgaagctggagagcagggccccagtgtgccgggaccaacccttgttctgccttgagaggatgggctgggtctccagctggcccgccgccacctagtgactgccttggggacagtggagatgatgacaggatgcccactcgctcttaggcaagtcagaatctggggtacacactttcactctagaagccacacttagcaggtattcccagtcttccggcccagggtagggtgccaccagtctcaggcagccctcaagaggaggccgggagcaacttctccagggccttcttctgcttctcggtggctgcagccagggcctcaaccagcttctcctcgggcatcatgttgagcaccttgagggcaaagaggagctggcacttagccgtgctcacgaaggcgttgctcaggaagttggggaagcctccgactcggtccttctgggtgtacagcgggacccgcacgaggcccagcacctccaggccgtggtcgcgcgagtgcaccgcgctgatctccacggcgtgcagctgctccagcgtcagctgccgcgcgtacaggtgcgccacgacgcggtgtgggccctcggtcaggtgcgagctcaggtagtcggcctcggtgaggcgcaggcagcccaggcccaggcccagcacccggttcaggccgtcctccagcgaccagaagcgccggtccacgaagcccccggggaagcccagcagcccgtcgaaacgcatctgcatcagcaccgagaagcgcatggggatgcggccgaagagctgcccagggttggcggcgtacagcatggcgtggcacgagtggctccagcccggccctaggcgcatcgcctccacccggctgatctgcttcagctccggaaccgccgccgtcgaccctcgtgccgaattcgccacccaggcctcgcacctagcctaggtttgctccccccc

SEQ ID NO: 446446 - DNA, 576 bp, Homo Sapiens
agccgcaacctgcacagccatgcccgggcaaggactcaggacggtgaatggctctcagatgctcttggtgttgctggtgctctcgtggctgccgcatgggggcgccctgtctctggccgaggcgagccgcgcaagtttcccgggaccctcagagttgcactccgaagactccagattccgagagttgcggaaacgctacgaggacctgctaaccaggctgcgggccaaccagagctgggaagattcgaacaccgacctcgtcccggcccctgcagtccggatactcacgccagaagtgcggctgggatccggcggccacctgcacctgcgtatctctcgggccgcccttcccgaggggctccccgaggcctcccgccttcaccgggctctgttccggctgtccccgacggcgtcaaggtcgtgggacgtgacacgaccgctgcggcgtcagctcagccttgcaagaccccaggcgcccgcgctgcacctgcgactgtcgccgccgccgtcgcagtcggaccaactgctggcagaatcttcgtccgcacggccccagctggagttgcacttgcggcc

SEQ ID NO: 446447 - DNA, 1255 bp, Homo Sapiens
  misc_feature (1088)..(1117): n is a, c, g, or t
cacaattaatgaaggattttatttgaagataaagtcaaaattatggcaccgaggaaggtaataaacatttgaaatttttattgatttttaaatttaaaatccagttttaaccacaaaattgtttgaatcacaagtggtaatacaatgtcttcaatatttttctaaagttatttttctatataataataagacaacagcatagcatataggaagttttcattccagtggcttttttatatatttatccttcttaggaaggacaaattaaattttttaaattaaacttttaaaatataacaacatctaacagaactgtacaaaacaaagagacattttttaaacaacttgccaaacttacttatgagtgtgttttaaaaacaactttgtaaatgtctgggcaaagaagcaagctgtcctccctttaccttcatagtgagtttgtaaggctttgtctttgtaagcagaaagagtagactgtgttgttttttgccaaaaactgtttatacttaatctcactgaagtattgctatatggagaacccatactctgatcaacttgattttttgtgtgtaatgcttgatctaccaggtaacttcccaactgctcctaatgctagcgggctaatcccacattattattccactatcatccctgcagaaaggtcttggttttgatgaaaatcagccctttccttacctgctactgcctcaaaaagggaccaggaagattctagctggctaattcactgttccctttgagcaagaaaacggcacagggagaaaaggacttatctggtgagagatttggcatataccttcaatgtgtgccctataacacaacattgtctccgatctcatctttctatcaaatgacttccaacactcttaagtctcaggtattcttaaatctgtatcatcaaacatgaagcttctcttgtttgttagagtaattaatctttctttggattaaagtttccctttgaaataaaaccacctacctaatctgactgctaaatttctagcttctttgttttaaatatgctcaggagtcaacccaaattctgcagcaaataagtttgcttattaacnnnnnnnnnnnnnnnnnnnnnnnnnnnnnngatgactaattctacagatagctgtaaggatgaattactcaagttcaaaatcaaattctgattctaaacacataacaattgtttacattcaggattaagatgtctttaagagttgaaacgactttggagatcatcccc

SEQ ID NO: 446448 - DNA, 457 bp, Homo Sapiens
  misc_feature (376)..(376): n is a, c, g, or t
  misc_feature (444)..(444): n is a, c, g, or t
aacatttgaaatttttattgatttttaaatttaaaatccagttttaaccacaaaattgtttgaatcacaagtggtaatacaatgtcttcaatatttttctaaagttatttttctatataataataagacaacagcatagcatataggaagttttcattccagtggcttttttatatatttatccttcttaggaaggacaaattaaattttttaaattaaacttttaaaatataacaacatctaacagaactgtacaaaacaaagggacattttttaaacaacttgccaaacttacttatgagtgtgttttaaaaacaactttggtaaatgtctggggccaaggaggcaggctggtccctcccctttacccttcatngtggggtttggtaagggctttggtctttggttaggccggaaggggtaggcccgtggttgtttttttgncccaaaacccgtt

SEQ ID NO: 446449 - DNA, 462 bp, Homo Sapiens
ccggtgatgacaactgttcttttataaacaccacacatcttctaatgctttcatgttaaaagcgggagtggatcccacattcacctaaaggcccaggtagggactttttttgcagaaaaccaatttcttgtaacaagtactggaacctcattgtagccttgagtcctcactcctccttttgttctaagtctgggtctgagaagtgcaggcctcacacagctgtcagttccaagtgaccagggctgtaacaggtcctggctgaccctgggaatgtcaggggattctgggaagtaagaaggaggggcatttgcccatagtcccggggcagacaatgtgtcccgagggccaggccaggctgtctactccatctccctggggcgagtgcacctcgggtcacctggcagcatcctttccagcccttctggagacagtcagcagctgattcattccgggaaccagcat

SEQ ID NO: 446450 - DNA, 237 bp, Homo Sapiens
cctttgttacaaactaagagttctgttctgatagtacttggtatcactgcttctctgtgaaaatattcaacctaatttcagatgagatcgggtgtgttcagggtggtatggctgtagactattcaacctaatttcaaaaaatttcacctgatccagttttaaagcaaccaatggaataattgatttagtatcaattttatttaaagatgaacccttaaggccgggcgcggtggctca

SEQ ID NO: 446451 - DNA, 515 bp, Homo Sapiens
caagagaaatttcattatgtatcttctacagagccctaaactgagagcgccagcgtattcaaataaaccctgaggtgtgggaggcttcgggccagttcctcattagtagcctcagcatgggggctctggagaccaacgcaaaaggtcttccagggagagctgaaacgttcagataagtgagctctgggaagaaggggtagttggctggctctcgcaggctcacccctgggatagagcaaagagaacagacaggggagttctgagaggcaccagagctatctaaactcagggggatggaaccgagtgagcggcagcggtaattgagtttcagttacctgcagggtggtgaaatatagtagtaacttcatctgactgacatgggggaagtttagaggtgtccttggcatattcacagtgaaatccatcaccctttcaccatgttgggtgatagcaaccgtatggcgcttcctagtgacagccagtgtgcgttctgttaggcagcaccagcgcactgc

SEQ ID NO: 446452 - DNA, 654 bp, Homo Sapiens
ccttccctttttacacaatattatgacaccaatttgaaaaataaatcccagtttctccgctctccctcccaggtgttcacagaactaagaaaataaataccacatctaaggtgtgctatgcaggcagctctgggggctcttggagccgcctctaagcaaacatgtagacaccaggagaaggttcctggaaaataacaagtgcccaccgacggcgcagaaacccaagaatggaaatacagctttccacagcctttctgcctctttcagcaggttcacggagaagttgtcactcaaaggacgaccaagaaaccaacgtgcgcctgctgagccctgccaaggattatgctctgagagccggaggccgttttgtctctgtacagagggaactttgtgcaaattctctggaaccagagctccttcccttggccacatctgatctcaccataggcaggaaacctgcagcctgctcctcgcgagcgtccatgaggaaacttgcagggctggtagaaagaaagcgggatttcccttcagtctcagaaaattctgctcaaggcctgtgggaatgtggaggttgctgcctaagccagccacaacctcatgggccctaagtccattcaaaatgttttgttggcactggctctgttaaggggtgta

SEQ ID NO: 446453 - DNA, 393 bp, Homo Sapiens
cttgcccaaatctatttaatggaagtgggccgcagtatgtttcactataattagttcagggatctgtcaacactaggtggagaagaagccaccatctttctttcgggagtagcctccattggtggctgcagtgtgaggggacactatggatccttggatgctgtggatggactcctttttagggttgatccagtgtctgatgttagccaggaaagtgatgggtggagtgggaggggttaaaaattctccagggaattggatcttggttcttggaagcccgcagttctcctaagtaggaatcatcgttatctaatgtaggctgctggaaagggtcccgggtgggaggcatggctaaatgcctaactcttttaagagggatgggaggcccgctca

SEQ ID NO: 446454 - DNA, 1381 bp, Homo Sapiens
cggtacccggtgtttatcgatgccaccccactaccacgtccggctttctgagttgggtggcgggaaaggcgatgagtaaaggccgggcagaagctgcggcgggagccgccgggatcctcctgaggtacctgcaggagcagaaccggccctacagctcccaggatgtgttcgggaacctacagcgggaacacggactgggcaaggcggtggtggtgaagacgctggagcagctggcgcaacaaggcaagatcaaagagaagatgtacggcaagcagaagatctattttgcggatcaggaccagtttgacatggtgagtgatgctgaccttcaagtcctagatggcaaaatcgtggccctcactgctaaggtgcagagcttgcagcagagctgccgctacatggaggctgagctcaaggaattatctagtgccctgaccacaccagagatgcagaaagaaatccaggagttaaagaaggaatgcgctggctacagagagagattgaagaacattaaagcagctaccaatcatgtgactccagaagagaaagagcaggtgtacagagagaggcagaagtactgtaaggagtggaggaagaggaacgaggatggctacagagctgtctgatgcaatacttgaaggataccccaagagcaagaagcagttctttgaggaagttgggatagagacggatgaagattacaacgtcacactcccagacccctgaggggcccacggtcaggactggtggggactgcaggatgtcagaagagtgagatgtcttgcactggctacctgtgtttttggttggcttttgtctgttgttcctgctactttcaccttgtaagcagagcagtcaggagacaagcataaaccagagcactgggtagagaggatgagggctggtggtctgggggtagacccagcctcatttcattgtctaaattgcagtagcttgaggttaacatttagacttggaacaatgctaaaggaaagcatttggcaatatgttagttataactttaaattattactagtagagaatagtatgtaactcttgccttcttggtactatgtccagaatcactggccacgatatcataaccgtagaggtaacgcgcagacagtgaactttggagaacctagaggtagacgagaggttgctataaaagcgagcattataggaagggcccacggcttcactgcaggacctcctgcgcttgtgtacctcaggagccgttttaagtatcttttgtagcgcttttcaccccacccccaagtcatgggagaaatgcaggcaacactgagacatgggagagggccaagatatgctgacagaaagggtgattttgaggctcagtaatactcggatgtaaccggtt

SEQ ID NO: 446455 - DNA, 1250 bp, Homo Sapiens
  misc_feature (480)..(489): n is a, c, g, or t
  misc_feature (524)..(563): n is a, c, g, or t
  misc_feature (1056)..(1065): n is a, c, g, or t
  misc_feature (1073)..(1073): n is a, c, g, or t
cggtccggaattccctggcatggttaacatttagacttggaacatgctaaaggaaagcatttggcaatatttattataatttaattttatataaaaatatttaatttcctctggatagtcaaacctgccagatatcaaacctgaggaaggcagaagtgaatttggagaactagggtagagagaggttgctataaaacgagcatttggagggcccacggcttcactcaggacctgctgggcttgtgtaccccaggagcccttttaagtatcttttgtacgcttttcaccccacccccaagtcctgggagaaatgcaggcaacactgagacatgggagaggccaagatatgcttgacagaaagggtgattttgaggctcagttaatatttcaaaattgtaaccgtagcaaaactgcattggtatttagaaaaattaaaaatttccaatatgtaacaaaaccccgccacccacaactcccaannnnnnnnnngatcacccactccccgccgacaatctactattccnnnnnnnnnnnnnnnnnnnnnnnnnnnnnnnnnnnnnnnnaacttttcccgtaccccatttttctttggaacaaggggccccctatcagagagtcctctttataaatttcagggcctttggcccgtactttttaaaacattcttttgccggcgcaaaaactcgttactttttggcgacctctcgtagctggaccacccttacccttctggggggcccccattctcttgccgaacactcccccctaccagagaattccactaccctcgtcgaggccccccctttcggcctattctctaaccctacacaaccacggccctaacatccccactcgcccacagcccctttgctccgttaacgaaccacctctttctgtaccccctccccattttcttttctcccgcacattcctcaccacccgctcgtgtatgacctcccaccctccttatacatccctcctaggacttcacgcctgctcatacgcccatgtgtcccccatcacgcgccggccttctcaaaacgcttcgcttccgannnnnnnnnngtataccntactccgacccccttctcatcatctccatgctttaaccccctccgtgtaccctgatgcggaactattcgcccttgcgcatccctcctatataaattccgctgccactccgatttttactcccggtacagtgccctcattctcttcgttacaccccttcactcctcgacaaaccactt

SEQ ID NO: 446456 - DNA, 295 bp, Homo Sapiens
cctgtgtatagcacaatacagaatcttctgtcatccatcatattgtaaatctggaaacctcgtgaagttgggatcctaacaagaggagtacacaccttgatttaaggatggtggcctaagacaggtgagttttccatggggggccttgtccccaaagagttcacaccaggagtagattcacccgttgtcgggctctcatgggtgacaatcggcgcaagttctcctcacctgatccgcaaaatagatcttctgcttgccgtacatcttctctttgatcttgccttgttgtaccaca

SEQ ID NO: 446457 - DNA, 754 bp, Homo Sapiens
tttgccatgcaagtgtgtaattttaatttattctcttcctcagggtgatgtagtaccatgtaataattattccaataaaaatttttatttatcacatatacctttttcaagaagaatttaaactacaacatgacctaaagtgttctgaaataccaaccctataaaagtaccttatttcaaacaaatgtgatgaaagggaggaaatacaaacatgcaaagggggtgtgacccaatgggtgtgtgtcagtgtggacctcaaacagcaattctcatggtcacctaactcatatcagaatcgggcccagcagtcaacaggctgttttttataacactacactttgcctcatatgctaacaggcattcagcattggaaacatcacaaacatttactgtagttcagtcgcgttaatatataatagacaagtttatttgttcacctaaagtagttttaacagcataattctataaaaatgaacactaatggaagatttatctaagccatacaaaagtagtttaatggaaaagacccagtactttaaacgttttcatataaggaacatgatgcacactatggcatctatgcatcaccttcaaaatgtaggaaggtgtattaatttcacatatttaatgtattatataaatgtatttaacaacctatcaacttctgacattctgaagaattaaacattaagtctaatgatgataaaatgcttcatctatgtcttctcaaggtcaggacaactgcctaggccag

SEQ ID NO: 446458 - DNA, 652 bp, Homo Sapiens
  misc_feature (429)..(544): n is a, c, g, or t
  misc_feature (553)..(567): n is a, c, g, or t
ctaaaacttctggactgtttttttcttaagtgctctcttccttatttctacattactacattcacatttttgctgtcaataagccctaatggagtgataaactttaagctagtagatactgcaccatgtcttgtggtggtgttttcttaatgaaatggaagctgtacttcctgtttgtttttaaatacttttgaaacagacagttcatgtaccccatcatttagagatgcagtttgaatttccatggaaaaaggtgccaattttggattgggaaaggagctgaagccccagtcaagactttgccatttggggtaatgcagcagattcctgtgtctgtatctttccagtgtgtgtgttaatccatagtgttctgagcaccagaagggtcatgtaaatctgaagttgttattaaaggtttttctatagtgnnnnnnnnnnnnnnnnnnnnnnnnnnnnnnnnnnnnnnnnnnnnnnnnnnnnnnnnnnnnnnnnnnnnnnnnnnnnnnnnnnnnnnnnnnnnnnnnnnnnnnnnnnnnnnnnnnnntttttgggnnnnnnnnnnnnnnnaaaaaattttttaaacaatcttttggggggcgggccccccaaggaaagaaaaaagggccaaatttttttccaaaaaaaccccggg

SEQ ID NO: 446459 - DNA, 577 bp, Homo Sapiens
cgtttgtcgtctttctccatataaagtggtgaattttatggtatgtgaatcatatatcccatttgaaaagcagactgacaaaaatttgtttctaggcaggaaacaggaaactggggaagccaagtgtagctttaccctactcagggagaacagtgttggagagaaagctgtcagcttttagaacgcgatggcaaaagctgtgtgtgtggcagggagaagtcttggggctttttgcagcaaggaaagttctgggcaaccttcgtggcagtgactccccctctggagcctcagcttcagcaaaggacgagggcatgtccccagagcagccacagtcaggcccagatcaaggtttcaacccacggggaggctgggctgggggctccgtgcaggggtcgagccacaaggcatcttgagcctcccctgcaagagcatcaagatgaaagccagggataattaacgccgtcaggcctggggcgactccacaaaatcctttgtggcggcctgaggctgccgtctctcctccaagggctgggggtccccttctgatcatccttctctgcttctttgtcccctccac

SEQ ID NO: 446460 - DNA, 990 bp, Homo Sapiens
  misc_feature (59)..(59): n is a, c, g, or t
aaagaatcctataaaagccaatgcccacccctaatccttaaggtgccttccttaggtanttcccccaaagcctctttgcctctttttatactgccagcatttttcaggaggagtcatttagatactgtcaaggtcccaagaaataactaaaaacaaaaaataacctgagactctttttctgcaccgccaccagctgcccagtacactaggtcaccttttacagcagtgagcacagcaatccatgccacaaaaatcttcacaaaacaagaaggaaaggtacaaaaagaattatattaaaatggtaacatacacttgtatgagggagggatatttaaaattaaaatattatcatcacaagaaacaccagatattccttgctctgcccttgggcaaccaagaaacttaaagcctgttttatatcccagaaataaaagagagacgtgatagaagtaacagtgctcagtgcttgcaacccaagtcaatttatactcttgttaggtaagtccaaattctaaagtctacaaaaatcctgttaaatcaaggggaaaaaaaattcattttaggacaaagttattcaagatgaaaggaaggcatgtgttcagtgagagaactgcctgctgtcagatgatttcttgctaatgtgtttaaagattttggatttctcaactttcttggttttctggtagccaaatccaccaccacctcctcgctttttctgcttgccttcattactgttgacgttcagatcaacgaagggaggcaccttgaaaccaaatgacagagcaacctgaggcaaatttaggttattaacattaaagatctgtttcagagaatgggaatcataggctcgtatgtatgacttatatgcttcctgggctgacttatgaagaaagtaattcttttcaatcaatttctcaagctgagaactgaatgtagaaatttaaaccaggaaaagtcaaaatcacttaatggaaccctgggttgtttaag

SEQ ID NO: 446461 - DNA, 174 bp, Homo Sapiens
actgaattgctgaatttttaatctgtaacacaaaggttgccaaacattcccccaaaggagcagctctcagtggggtggcggtggatgcgaaacagctgaagacgcggggcagttggcctggcttccgttgcacgggctggcttgccgcgggagcggtggtgggtgggggagggg

SEQ ID NO: 446462 - DNA, 316 bp, Homo Sapiens
agatcaacattagtatgtatttatgcacaataaaaacatttacaagttgaactggaaatttaaacagaagtttaacagctcttattatattaaataaccaaaacaccttttattcccaaaattggtaaagaataaataatataatttacaatatggtacaaaaaataaccagggaaaggcagggcattctgctttatacatacactgtatatggcatatttataatctattaaaacaaattcatatctggaaacgaggcgggggccttcgctatgggctttaaccgaggtaggagagagagggggagcgggggcgc

SEQ ID NO: 446463 - DNA, 558 bp, Homo Sapiens
ccttgttctgtttttatttaactccaaatagctaataacataaaaacattttaaaaaaatctccaatacccaactattacttttggttgacaacatttgattatttagttcttgcttgtttcccacatgtagtacagaatctatcataatattttaaaagtttgcagcaggcttaaaacctgaatatttagatcctaatcaaaaaccatgatgtagttattagttttgattttaaataccttgctcccacagaacttactaaaacgaataaccataaataggctagctattaattagatctcaatgaaatgcccacatacagcacatacatataggtagtatatatgcttttatcctttactactcaaaggatgatgtacagtggagttatatcataaacacatttaacttacattaactcaacaaatgaggtcagtgaaaaggaagccgtagggaaaataacatgaaatcctgtggcgatcccacctaaaatgaatgcacacccttgagtaaacccaggtgggtgctgtccatccgctgggtgggcgcttcactccc

SEQ ID NO: 446464 - DNA, 362 bp, Homo Sapiens
ggttttctttctggaatttctgttactcagatggtggacccagaattacctctcctccctgtgtgccccaaccccaattttcttttcttttgatcataatttatggaggattactccaagttgattctctgattgttcctttatatacgtagatatatagggacagtaccttgttccttgttgcaacatctttgaggatattaatatgctctgtagaagctttcatctccctgcatatgtctttctgctttctgttcttcaatttaatctttcatgttacagactttctttagctgcctggcaatcgttggtaatcttgcttatatttaagagtggagtattaaaaagaactatgtgattgt

SEQ ID NO: 446465 - DNA, 797 bp, Homo Sapiens
gtcccccaaaggaatgctttattgacaaattacccattattataataactttaaggaaaagatacatcggtcaacacccgcacaacctgccttctcaccacaccccacaggccgattttaaccctggacgaagggcaccgagcgctgggcttccctggcccctgcatctctgtcgtgtgtggagtgccatccccaagggtgtctgaactgtccggggacacggctgtcagaggacacttgctctaccgaacaggacaccttgagctgagcagcccttcccctcccgggagtggcagagccgggcacaccacaggcaggccctcagtgtcctgccaagagccactaaggcacagagctccccctgcagaccacgccatctgacatgcagggccccggtgtgcgagagaggctgctggggtgcgaccatttagtaacaggaaagagatctttgtagctcctgagaaaaagactgtaacggcaatcctggttgatgcccacgccccaccctccacctgacctgtggggtcgtttcatcccaagtacagcaagcaggagggttggagtcactgacgagtgcgagccgggccagtgcccatgcaaaggcagcactgagaaggggggcacagttcttttaaaagggtgctaaagacagggttttccttctcttggcccctcccattcccagaggctcaagagccctttagggcagggcataggagccagcgggagatgccacggttgagaagagaagcaggttttgtacactgggatggagtgtgcgtgacataaaacacctc

SEQ ID NO: 446466 - DNA, 493 bp, Homo Sapiens
gttctcaggcgtgacatttatgagctttgcaccacagtgcaacaacagcaaaaacagcttcaagaacaggaccagaaactgctagagcagacccagatcataggtgaacaaaatgcacggttggcagagctagaacgcaaactacgagaagtaatggaaagtgctgtaggacattcctcagggtccgggcagaatgaggagtctcctcggaaacgaaaaaaggccacggaagccatagactctcttaggaaatctaaacgtcttcggaatagaaagtaaattggaatgtggttctagttccagaggaagacacagcttagtagcttaagcagttatgcatatcaggatactgtgagcaacatggtgtcccttaagcttctaggctttcagaacacaacttaaacttgaactcttatggttgggacattcttttcctgcttctcctgattgaactgatgcacagaatctttttactttgcaatagatttgtact

SEQ ID NO: 446467 - DNA, 719 bp, Homo Sapiens
  misc_feature (559)..(559): n is a, c, g, or t
  misc_feature (653)..(653): n is a, c, g, or t
aatatttccaccaaagtttatttctctgaaacaatcaccagttgctgtcctctatggcacactgagagccccaggagggtctttaactcccttcctcagattatattcatcccagaaatatagccttggacaataatttggttacagcatagtcccaggaatgaggtcccccaagttgctaagttttacataggggagactgggaaattcaaagaattggatggagaaaccataggatccaagataatgtcagggggttgaagatgttggagaggcatggtagcatcattgagtttgaatctccttctcacttggagtggaagttgtaggattctgcctctaggaaatgtgccatccttctgaataattggacccaggaagaggagtgtaactagagtggccagctctccgccagctgatcacaccaagagagaagatgatgaggcccaggcccagagtcactgcagacacagaaaccttcagggtctgcatgggggacagcccaggtgtccagtcccgaaggatgggctcaggagccccaatgtgctctaccacacangtgtaagtgtccccgtaagaaggggttaaggctaaatgggagaaggtctggtatgtcattctccattgggcttggcagtcttgtgcgcactgcntgtgagcatgacaggcctcccgttctcccctcacgtatagtctcttctgcttgatagaggccccac

SEQ ID NO: 446468 - DNA, 462 bp, Homo Sapiens
attatgtaaatgcctttatttgaactactacattgctaccagattacatcacttttcagagttagagtaacataataccttggaaactatagcaaacagcttgacaaagcaagagtacattaattcctacatatatacttttatttttagtgaccacatttctttgtttcaggtgtaaaattaaaaaatatattgtacacttagcatacttggcctaccaaatcccgtctaagttctgagcacactctctcctcaaaagtatcatattcaacagcattttaaatttagagagagagtttgatgatacaggttttaaaacaaataagcatgtattgaaccaagtgatttaagacaaaatatttcaattgtttacagcttgggtatgagagggaagatgcaaatttaagggtacatttttcttctagctacgatgtatgttttacttacttgaagaccccttaa

SEQ ID NO: 446469 - DNA, 984 bp, Homo Sapiens
  misc_feature (335)..(344): n is a, c, g, or t
  misc_feature (898)..(934): n is a, c, g, or t
taggtttgtccgtaaggcttttattataaagaagattccagagtcccagctgcccccctccagcccccatgggctctgagccagtcccaacactggctgagttggctgcgaggggcccgcatggcccatcggccacagagggtcgtttctggcaggaacggagtgggtggtagtctcaggcgccaggggcgctctgccaggtctgcccgctctctggaacagtcatttccagtgttgcatggggagcctctcgggacccctccccgggtcctctgcgcaagcggcagctattcacagttggtgcatgatacgttttttaatatataaaagctttnnnnnnnnnngtggtgctatctttagaaacactttcagcaagatcaagtagcccagctacagcctcggtgcatcttaacccctctccttttcctggagacggggctcccagctcctgtgccccccatccctcccctccaccctccctgctcctggagaagcccacagagcaccccatggcgcgggcactgcccactctaccaacagccgcccaagcaacaaaaatctgacactacttgaaactgtctgtggccaggatcctctacgggtgagggggaagtggagataacattttggtagttgaagcagaaaccaatcaaaggtcagttcaaggagggctccctgcaccagtgtggatgaggtagagtttctgggctgcagcctccgggctggcggcctcctctcccccagtttgtgcttggccgcctggatgcacggggctcttggcagcaggaccaactggacgttgtggggcgagtgggtgggcacagtgcaggccgtgctgggcagatgggggagccggaccgctctcgacgaattcgagctcggccgatttggcctgatnnnnnnnnnnnnnnnnnnnnnnnnnnnnnnnnnnnnncgccgccaccgcgataagctccagttcgccctatagtgagtctatacatt

SEQ ID NO: 446470 - DNA, 514 bp, Homo Sapiens
gtcactgatctttattccgtgtttttagcgcaccacatccagacagcacaccccgaacattccagatggatctgctcagacttaaggcccgcggccaacacctctcacattcagtcttggcgtttacatacatgaggaaatgcacacagggctgaactccgtggagcttcctgtttaaaacatcaaccacctcgagaagcaggtcagttgtgtccgcagccttctggccacacggcatgatctgagctagagaaggaggcggcaggaggaggaggcatggctggtctgaggaacccttgaccctggggtggggacacggaaggcaggggtaaggcgtgcccgcatctgatgtgaagcaagcccatccctttgctggtttgggagcatctgacgtttgcacagcattttgtgctaatttccatgctgtgtgtaatgaccctggatttttaaaacagaagcagaaacacacacatcacttatgcctgtatgtcccacagtctctggcagtgtccta

SEQ ID NO: 446471 - DNA, 687 bp, Homo Sapiens
ggctttgtcactgatctttattccgtgtttttagcgcaccacatccagacagcacaccccgaacattccagatggatctgctcagacttaaggcccgcggccaacacctctcacattcagtcttggcgtttacatatatgaggaaatgcacacagggctgaactccgtggagcttcctgtttaaaacatcaaccacctcgagaagcaggtcagttgtgtccgcagccttctggccacacggcatgatctgagctggagaaggggatcctcccagggctgatctcggcaaagcgacatggggcttcctgcacacggccgaggggcggctcttcttgtgacggaatcccctccccatctagaaaaggaggcggcaggaggaggaggcatggctggtctgaggaacccttgaccctggggtggggacacggaaggcaggggtaaggcgtgcccgcatctgatgtgaagcaagcccatccctttgctggtttgggagcatctgacgtttgcacagcattttgtgctaatttccatgctgtgtgtaatgaccctggatttttaaaacagaagcagaaacacacacatcacttatgcctgtatgtcccacagtctctggcagtgtcctagggcctgggagaggacacggctgctcctgagggacagaggagagtctgggaagtcagtcacccc

SEQ ID NO: 446472 - DNA, 342 bp, Homo Sapiens
caaaccctttctgaactttcactttctatgtctacctcaaagaattgttgtgaggcttgagataatgcatttgtaaagggtctgccagataggaagatgctagttatggatttacaaggttgttaaggctgtaagagagtatacaaaatatgcagagaagtagacttgctgacctgaggagctgagtgggaagcatggacttgccaacttacctaagtgaccttgagcgatccagctaactttgcatagtttcctcttgtgtaaagtgaggtgcaagtacagatgaaaatgtatataaaacatagagcttagaatcctgtaccagaaagctgccctcatcac

SEQ ID NO: 446473 - DNA, 769 bp, Homo Sapiens
  misc_feature (276)..(276): n is a, c, g, or t
  misc_feature (653)..(673): n is a, c, g, or t
ttattgggggagttcaggcccccagccactgattccatattttgggatccggccttactgggggttgggccccgttgttatgtaagctgtgaataccaagggaggggaacagcaacatccctagggaaacggatcccggaaaggcagctcactaccccacagtaaaaagaacctcgagtttcccagttcagtcccctgctgggtgcatgctacccccctcctctctcagaggctctggacctacacagctgctgaaaaagagaaaatgtccttacntacaatgaaccatcacaggcacccacctagaaattaaggtactgtggtcatttatcttatcccagaataacaggagtgtgtataaacaggaagctttagtttagataaataagattatccattacaaaaattttatattgaataacctgtaagtaatttgaaaaagagacttctggctagttttcacttatgtccaagtcagtgggggtaaatgcattgtgattcactgtaggttttagactcttacagccttaacaaccttgtaaatccataactagcatcttcctatctggcagaccctttacaaatgcattatctcaagcctcacaacaattctttgaggtagacatagaaagtgaaagttcagaaagggtttnnnnnnnnnnnnnnnnnnnnncttgtccagagacatagccaattagtggaagagggtttgaacccaggttcctaactacaaaatccacgggtttaactgctgctctcctgaaatgcc

SEQ ID NO: 446474 - DNA, 795 bp, Homo Sapiens
  misc_feature (155)..(155): n is a, c, g, or t
cagggggggcacaaaatgattacatttttctcaagaaataaaatattgtgggaagaaagtaaaaggagggtagggaagaagggattgtgtccacaaggtggtgacgggaaaacaagcaaaaagggttattggaaaggggaataaagtaccaattnagggcaaagagaaataggctcgtttatttattcattgatcaactggcacttcttgaaagcctgctgtgtgccaagcctttccccaaaggaggatatcagtggtggagccaagtctcagggtggaaaggacctggaccacacagagcaggactccagagcctcctccatatggcaggaatcaagctttcacaggggaaacgcaggatttcccacacatgcccatgcaacacttcaagtcacgcttgcactggccatccatctcacagaaattgggggggttaagcatcaaacattggccataagtcactgggcacttcccaggcttcctccttgttgggtttggggtgtcaacaggatccaggcatttgatgccacaagtgtcaggacaacatctcttcttccctggacactgccagtcactctggcactcaggtttcttgtatctaaggcactgggcagatttcttaggaggacagactccagctttgaaggactttccagagccttccacagcccaaggtgccagagttcccagggcaagcagcaccaggaaggggaagaggccgctggacttcatggtgaaggcaggagtgactctcagtgtggagagagccagtgtggagtagatggtaccactcat

SEQ ID NO: 446475 - DNA, 514 bp, Homo Sapiens
tttttaactggtctatcctgcagtgaattttattgaattcaaaggtagtattcctatttgagaaatgaaaaactaaaatcaagttttacaagcaagcatcatgagataaagcagtgaagacgccttttcagatcacaccagagcagacaccagtttctaccccagcccacatgaagatgtttttattcaatacaaacagtaacagaggcaacacaatggccatagaatgagaacataagtgcatttgaattttttctgagttctggctataggctctgacaagcctatcattcttttcttaccaggtgaacagaaatcatctgctaatgccagaaactttaaagctcttaattcagctggaaacaactacaattgagggcctttatactagctacttgcttcccaatttagggttgcctagcaagttaatttcaacataacaaaaggtgtcatctgtctggccacagcatgcactagtgataggggcaggtttaatgagttttatgctcagacc

SEQ ID NO: 446476 - DNA, 726 bp, Homo Sapiens
  misc_feature (559)..(559): n is a, c, g, or t
aacagggtgagacaatcatttatttattggacagggcaaggtcatttaaagattggaaacatatcccaaaaacacgtgtttagtttggtgttacaggcattgatgctcacaacaaacaacattattcaatacatcatgtaaacaggccacatacaaccaggaagatgctgtcaagccactgagaagccacaatgcttagaaaacaatcattagggagttacagagaataatcacctccaactcattgatatgcatattctgcggctgcacagtatttggctggttccctggttattaagtgagtcgttccgtattttaaagagccttgattggtacacacttctgaatatcactgaaatcagtcaagcaaaggcttaactagctcacatcatatttttgaactaccctaggcaataattgactgtctcacagtactgtagataaaattctggtactttagcatatttagcagtgttacaacgcatcccaaatcacctttaagtcctatggtacatacttgaaaaagacagcagaaactcactggagtaaatgaaaaaanaaatttggggagctcacctggcctgaggtatacaagctgctagcaaagatagacacacgtgaaaaccactttgtcaattatttgccaagtcatttggcctgatttttggcctgatttttagcctgatttttagcaggactcttcccgactgaggaggcaaagatttc

SEQ ID NO: 446477 - DNA, 534 bp, Homo Sapiens
gcaacaattcatctttatttcttattttcctctggagatgcagaatttggtatatttcaccccaggtatatttgggatagttggctcctcgctgggtcaggatggctgggtgccttctcccctggcatggttctcttctctgcagggcgaggggcagggagctagtagaacctcgcaatgacagccgcaatggcagacccaatggagcccaggatgaacttggtcaatccggagagtccagttgctcccagtgactgcagagtagccacaaggctgcccgaggcaactccacccccattggcaatggccgccgcggacatcatcttggctgctatggaggacgaggcgattcccgccgcagtgaagcccatggcactgagcaccatgggcacagccacaactgcagggaagaggagctgggtcggtgcgtgggctcagaagggacccccccagatacactgagtcaggcttggggaccccaggggatctggagaaagaggtgaactttgagcttgggagagactatgggcacgg

SEQ ID NO: 446478 - DNA, 908 bp, Homo Sapiens
  misc_feature (102)..(102): n is a, c, g, or t
  misc_feature (213)..(280): n is a, c, g, or t
gatcccagtaaggccccccggtgctccctttgtgatgggtcccgcccccccggtatcctccgggaattttttttgggggggaatccgaagccatagtcatgnccaggtttttcttgggaaacaggtatgggcccttttcactttcttttttgggcccgggcgccaaaagaaatggttttgaaagtttttttgagggccgaggcttctttctannnnnnnnnnnnnnnnnnnnnnnnnnnnnnnnnnnnnnnnnnnnnnnnnnnnnnnnnnnnnnnnnnnnaagagttgcaacaattcatctttatttcttattttcctctggagatgcagaatttggtatatttcaccccaggtatatttgggatagttggctcctcgctgggtcaggatggctgggtgccttctcccctggcatggttctcttctctgcagggcgaggggcagggagctagtagaacctcgcaatgacagccgcaatggcagacccaatggagcccaggatgaacttggtcaatccggagagtccagttgctcccagtgactgcagagtagccacaaggctgcccgaggcaactccacccccattggcaatggccgccgcggacatcatcttggctgctatggaggacgaggcgattcccgccgcagtgaagcccatggcactgagcaccatgggcacagccgccatggccacaactcctccaatcacaactgtagcaatcctggccaggggcaaaactacggcagagccagaggccaccctgaccactttggccacactggtcactgctgatgaggtgagagcagaggcctccatgcctgctcgggttaattccgtggcccaaagaaggagagttcctgagaatgtgaagctgacctcccaggaattccggaccggtaccagcctt

SEQ ID NO: 446479 - DNA, 571 bp, Homo Sapiens
  misc_feature (492)..(528): n is a, c, g, or t
tacatctgcatgtgacctttattcctcatgtttctctgacttgagtgggggttttggaggttcaccttggggtacattttctcttgcctcatcttctttagcctcgggttcagctgggagagaagaagaaggtgaattccccaagcaggcccccaacactgacccaacagaggccaggaggatgttggatgatgtggagagtccagctgcccccacggactgcagagtagccaccaggctccccgcagaaacaccacccccgttggcaatggctgctgcggacatcatcttggctgctatggaggacgcggcgattcctgccccagtgaagcccatggcactgagcaccacgggcacagcccccactgccagggctcctcccactgcagcagcagctgcccgtttcatcatggtgaggccgtccgggtcccaacttggcccaggaaatgccccgctctcgacgaattcgagctcggccgatttggcctgatnnnnnnnnnnnnnnnnnnnnnnnnnnnnnnnnnnnnncgccgccccgcgtgaagctccattcccataggattatattccc

SEQ ID NO: 446480 - DNA, 377 bp, Homo Sapiens; identical to SEQ ID NO: 347370

SEQ ID NO: 446481 - DNA, 750 bp, Homo Sapiens
  misc_feature (158)..(158): n is a, c, g, or t
tggttctagaaaaagttttctcgaggggccgagggcgggccgcccatgtttgtttgtgttttaaattaagggatattttctgtttgttgttttttggcaacaattcatctttatttcttattttcctctggagatgcagaatttggtatatttcaccnccaggtatatttgggatagttggctcctcgctgggtcaggatggctgggtgccttctcccctggcatggttctcttctctgcagggcgaggggcagggagctagtagaacctcgcaatgacagccgcaatggcagacccaatggagcccaggatgaacttggtcaatccggagagtccagttgctcccagtgactgcagagtagccacaaggctgcccgaggcaactccacccccattggcaatggccgccgcggacatcatcttggctgctatggaggacgaggcgattcccgccgcagtgaagcccatggcactgagcaccatgggcacagccgccatggccacaactcctccaatcacaactgtagcaatcctggccaggggcaaaactacggcagagccagaggccaccctgaccactttggccacactggtcactgctgatgaggtgagagcagaggcctccatgcctgctcgggttaattccgtggcctagagagtaagagatcctcaacttcagccagacccaaagaaggagagttcctgagaatgtgaagctgacctcaccgtcttaagcttggatgtgttccc

SEQ ID NO: 446482 - DNA, 692 bp, Homo Sapiens
  misc_feature (568)..(581): n is a, c, g, or t
tatctccttccccggcaaaaaccaaacaaactggcagacaggccagggatgtatgttgcttgcttgagagggtttcttttacttcaaaatctttcttcagggagcaagacatgaactgactaattggtatccactacttgtacagcttacataaatgagttgatgatatttaacccagtttttataaacttcatttaggtctctaaacacagactttttaaattgcaactgtaaatatgaaatggtcatcacatctgaccttggtcagtggggaggggaactggtatcctgccaagcctggttgtaatttgtaaccattttctatttgtgcaaactctgtaaatatgtgtttaaacaaatgtaatattttgtacaagatacactggagaacaaagggaactcaagattcttccagccacatgtcacctgtaggtagaagtaaactctgcagtgcagcttctgctcttggcccctctggccagggcccctgtggcttcctgcacactggacaggtgactgtatggtagagactgtgatctgggaactttttgctgtacaaatctgtttnnnnnnnnnnnnnngtaactcattgaattaacttgcagtggtgtgtttgattcttttttagactggcttcagcattgtgcagtttaaaaataagtaagtaacttacataaatcttcaattgtatg

SEQ ID NO: 446483 - DNA, 559 bp, Homo Sapiens
  misc_feature (22)..(22): n is a, c, g, or t
  misc_feature (46)..(46): n is a, c, g, or t
  misc_feature (54)..(54): n is a, c, g, or t
  misc_feature (90)..(90): n is a, c, g, or t
  misc_feature (335)..(335): n is a, c, g, or t
  misc_feature (338)..(338): n is a, c, g, or t
  misc_feature (369)..(369): n is a, c, g, or t
  misc_feature (435)..(448): n is a, c, g, or t
tggaggattttaaccccggttnaaaaaccctccattggggcccccnaaaccccngacttttaaaatggccaccggtaaatatgaaatggnccatccaccatcggaccctgggtccagtgggggagggggaactggtttccctgccaaagccctggttgtaatttgtaacccattttcctatttgtgccaaactctgtaaatatgtgtttaaaaccaaatgtaatattttgtaccaagatacactggagaacaaagggaactcaagattcttccagccacatgtcacctgtaggtagaagtaaacgtctgcagtgcagcttctggtcgttgccccntcntgccagggcccctgtggcttccttgcacacntggacaggtgacctgtatggtagagacttgtgatctgggaacatttttgttgtacaaatctgtttnnnnnnnnnnnnnngtaactcattgaattaacttgcagtggtgtgtttgattcttttttagactggcttcagcattgtgcagtttaaaaataagtaagtaacttacataaatcttcaattgtatg

SEQ ID NO: 446484 - DNA, 648 bp, Homo Sapiens
ttaatcaaacagcagtttttactgagctccaggtggggctggcccagcatggccagtacagcaggctgccctcaagggccagtctgtggcatgacaggaaatgcaggggtgcacatgttggggctgccctttggcactcactggggtgggtcaagggagagcaaacaccaaggtcctctggagaccagaatcggccagtgcagccatttggcttctccttcaggaccagctgggtcagttcccaggccctgaggcaatgcctgcatcctgggtccgtggggcactactgctgtcactgctctgagggagaaagacgaccagcagcacaatcaggatgatgagcaggacaccaaccaccaccagccccacgcagatccggtaacggatgttctcccagcacttcttctgggccaggttctgtgtagtcttgttgaaggttgagctcatatccaggagttggtctgaacgctgctgcagttcggccagcttcacaccacgctccaggaccttgccgaagttgttacgcataatttccgtcacctcgttcgcctgctgctggcaccgctccaactctattcctgccatcgctgctgccgccgccgcctcgcccgctcccggaattctctagcctgcggagcggcccgcaag

SEQ ID NO: 446485 - DNA, 151 bp, Homo Sapiens
aaatgcttgtggctcttttatatatatttaaaacacacagtaagaacataagaacatctcaaatcatttagaaggtaaaagggggttatcaaccaaaatctttggaaatttcataaaatttaaatatctgcaaacagtccaaccaaaaacg

SEQ ID NO: 446486 - DNA, 308 bp, Homo Sapiens
ggtatttactttatttcaaactgagcaaaacaatacaaccttttacttttttatacattttaaaatttctctcatattaacattccttcctaccccaatccatcccatcaccaaacaggaatgagataaggagtgaaaaaaagatgtatgtttctcattttccttcttttcccttgaagtaaaccagtaatttattaaaatattttataggtcagaggataacaaaagactcaatgtagtaaataagtaaataggcattcaaatatcagtaacctaacaggccctaatacagctttaagattttcttc

SEQ ID NO: 446487 - DNA, 368 bp, Homo Sapiens
acacattagtaccaccaattttatttatataagaaatgcctggtccactggacttttcaatttaactcagtaataattactgctgtttcttgacagaccagtgatatttcccccatagttttaaagtacaaaaaacagaatagttaggggaaaaaaatctcaagtataaataatgcaacctttaacctaccaagggtcactaaattgttaacactgattattataaatgattcaatttatttaaactaaaaagcattaattaaacatttcctcttccatttgggccaagggacatgcttaacaaaacacaaaaaagcaatagaagcacaaagttgtatgattttttcagaaaacaaaacaaaacaaaa

SEQ ID NO: 446488 - DNA, 128 bp, Homo Sapiens; identical to SEQ ID NO: 409010

SEQ ID NO: 446489 - DNA, 1487 bp, Homo Sapiens
tggcaaagttcaaccttaacagaggttacaattttaaaggttggtttaagaaaatagaacctgagggaaattgacacgcaagagtcaatgacaagcaagagatttggaggaatatttttagtttgttaaattaaaaatgttttttagagtgatacttttcacattacaaaaataaaccaaaatgaagaaaaggtcactgtaaaatgatggaaaaaggatctgtagatttgcttttagtatttcaaatagccaacaatgcatgtcagaaaatgaatgcaagatcacaacagtcttgtatttactttgtatttgaagaagatagtgaaataagtggccacattctattttcttttaattgctattaatatggttgatctgattggctcttcgatgaatttcatccaagaagttctccagttgttctattagcattcgttttttaaaccttgatgcttctttaatgacattttgtaaaaatattagtcttgtttgtaaactgccttgcacatgcttcagtaaagtgaagattctttcatattttcttcctggctttcggatctctttcattatttgtgcttttagttcagtattgacctcttcatggcttctgcaatgcatcaatttctttcctttgttgagtgaagatgctggtatgttctcttcagcacattgttctttatctcttggctcctcatgattttctaaaaatccaccaacagtgaggtcattggttcctaaatggtcatgaccaagagcctccatatgattggtttgccgttccagtaaactggctggagaagatgctgaaaattccgtatccatagcatttggtgtaatgtctgatgaaagttggtctgcaacatgattttcaaccacatcatgtattatcgaatcattagtggtttctgaaattttatgaagaggaagaggtttaataagatctggctgtgcttgagttgtaggtgcaggtggtccttttcccccaatatgattgtttacaacaggattctgctgtctgcctcttagtagtggagacatacaccgacgtcttttagggatcccttgcatatttggttctccgggtcgtttatgtttattttgaggtccagccacaaattcatctgcttcatctatcatcatacccttcttatccagcttaaaggggttgccaaatgtatgcaaccttcgtggctgatcaggatcaagttctcttagtggagaaggtacttgcttgaggtattcctggtagttccccatttgtgctataggaacactgtgcacttgatcttcgtcctgtcctttcagaaatctgcgagtgctcttcaaaagattagatctcattcttgttaagtgatccaaaagatttcgtcttggtatgtcataagcatttctaaatgtctgtggcttcaaatccttattcagcaaagcaacttggaacccagtgtattccttcatattaaggtctagcagtctgtgagggacatcct

SEQ ID NO: 446490 - DNA, 475 bp, Homo Sapiens
aaccctctggtgactcataggacatctctctctctttttttaacagccaaatactctttttttgttttgctgcctgtcactcaatataagaatgagagtctgattaatcattagagtctgataaacaaagactctagtttatccagggcattcctgatacaggcttttaaaaatagggagttccttcaatgtattctctgtggttttataactacatgagaactacttgtaccagttccccacaaaaagagaaatatatgtgcattatagtagacctttatttgagtaccacaaggtgcctggcatgtagtacattatctcagagtccatctaaaaatcaaatgggggtacttattatactatttaatggaaaagaaaaataaagctcagaaagaaaagggaaggtgcctaaattcccatacttggagtagatagcagagatggtattaaaacccaggcctatctgatgttatat

SEQ ID NO: 446491 - DNA, 617 bp, Homo Sapiens
gcaaaatttgttcacataaaaaaattatttttctttccagtttctttcaagtgtttctttgtttaaatttccttcagtttctttcaagtatctttttttcccttctgttctcctggacagatggaaaaggcctcactgaaatcccaaaattagacatggggaaaacttctcttctccctgcttacccagcaatgaggacagaatcctttggtgccccactgtggaaaaagggaatgtgcctgtgtgcagccttccactgctgtggccacaccatctcaggcagggagaacgcttgggtctgtcctttcgtccccagctacatcccagtttccagcaggcttggacactgcagcctccccatggcaaattggccagactcggctggagagcaagcaggcgatggggagcatcagatggaaggccttctgtgttacagctggcccacagagaggcggtgggtaggagctgggcctggatggagcctgtgttcatgtggaccaagaaatacagtctccaatgtcacatagctgctaggatccagaggagcttgtgttccatgctgtgcatcttgatgaccacaagcactgaacggtcaacaagtggtggcacagttgggc

SEQ ID NO: 446492 - DNA, 471 bp, Homo Sapiens
gagcagaaaccaacagtgtgcttttaataaaggacctttagctgtgcaggatgcaaacgtctcggggtcagtgactgcctcctgcccctgttggtccctaggcagtgggggcagaagctcccagctgacctgtttctttgggatgagagggaggagagaagggcagttagcaggggcagctgttgcagatgggaggaatagtctcccacaaaaaaggtttcagtgacagacacggggtctctaaaaatagtcatgctgagagcctaatggcccttggcacaattgctggtgttggggtagaagatgtcttggagtttgctcaagtggttgagagggagggaggtgccatcgacttggaggaactggcaccaagccagggagatagacatccaggcaaggctgtggggcaggttagggagcaaggctgcaggagtgactcacgaagaaggtgggggaggtgacaagccccca

SEQ ID NO: 446493 - DNA, 2176 bp, Homo Sapiens
cagcagaaaccaacagtacacttttaattaaggacctgtagctgtgcaggatgcaaacagctgggcatcagtgactttcctcctgcccccggtttgtccctgatggtggcagaagatcccagctgaccacagcccctttctctggggtcagagggagaagacaggcgcagtcagcaggggcagctgttgcaggtgggagggatattttcccacaggaacaaaggtctccgtgatgacacggggtctctatagtcatgttgagagcctaacggcccttggcataattgctggtgttggggtagaaggtgtcttggagtttgctcaagtggttgagagggagggaggtgccatagacttggaggaactggcacgaagccaaggatacaaatccaggcagggctgtgggacaggatagggagcagggccttctactgaaggagtgactcaggaaggaggaggggaaggtgacaagcccctgggcaggagccctgtgccatggatcattttaaattgagaccagagagtgagcagtccagggcagctataaccttggctagaaagggcagaggcagatgggcctgctccatctcgcctcttaagaaggtgggcaggacggagatgccacagtggatgccacagctgccacagcctcctgcggagaccaggaaggaagcctggctctcagccatgcaggatggaaagaaagattctattcccaggaggggagctgccctggaacgccccaaggacagccaggacccactgttcattcaggattcccccattttctcctacgggagctaacgcctgtgcctgggtcctggcagcactctggactccacactctcctcctgggtttcacctttgtaacaggatccccgcagaccacgcccacgacaaacactgtctccagcgggcaggacaaaggaagggcacggcgccaggcagtggtgtggttgcccatcaggaagaggccgacttctcccggtgaaacttctgcacagcagcaatggcggggccaaaggtagctttgacctccacacgggctcggatccaggccggcagcttggccaggacagggggccgggcatatcgctggtccaggagcactacgctggcaaaatccttctggtgcctgatggccctgcctatggactggttgacggccttcatgcacaggttctccaccagagccttccctgggggtgcctggccgggggctctggggaggtttgatccaagtaggccatcttctcctgcagctctgcagacctgatgttggggaagggcatgcccaccatcaccacacaccggcctaggttgtcagagaagttgatcccttcactcatctttcctccaaccacagagaggagcagggcccctgtcacctggcctctctcctggccacaggcctggatgcccctggaatatgccagcagcacctgctccacctggtgtgcgctcttaggttcctggaatatcttcttcctggcagccagacggcccagcaggccacccttctcccagtgggcatggacctggcgcaggtactcgtaggaggggaagaaacagaccacccctccaggaaccacaccgcacaggttacagagaatgcgacccacctcgtccatcatctgaggcagctctcttttctggaacgtgaattccagcggctggttggagatcccgctgcagatgacgaggggcaggatgttgtctggagggatcacgtgaccacaggaaaactccaccacgcgctcagcttccaccccggcacaggccagcagctgctgccggaagtcagacaccggctgcatggtaccccccgcaatgaccactgcccggcattccttcaccacttgggcaaagtgcacagctggattcaggagcaaaaacttcagggtgctctgactgaggctgccttggcggctcaggatgaccctgccgtcctggttggccgtagtgagagctgccaggaagccttggatgtgcatcagtggagaagctggtcgcagggtgctggcctgactctcgtctgcaggggctgcaagagcttcagtcgtcctgggctgcaggctctgcaggaattgctgaaacccagccagtttgggctgctcccgggatgagaacactgctccgtaccgttcagtgaatccaaagagctttctgctgatca

SEQ ID NO: 446494 - DNA, 439 bp, Homo Sapiens
ccacgtgggaggttttattatgttttacaaccatgaaaacataggaaggtggctgttacagcaaacatttcagatagacgaatcggccaagctccccaaaccccaccttcacagccttttccacacgtctctcagagattgttgtccttcacttgcaaattcaaggatgttggaagtagacatttaaagtagcaggaacaccatcagtgaaacagaagcagaagtacgatgactttgagaaacaactgatgaaaaatacactacagaaaaccatttctattgtgttatgatgtcagggtggcagatgtgcccagggcttagtgtccatcctcccaggacactggtcataccgggccttcggtgatcccctccagaggcaagctgggtgcgctgtcagctgtgggcctctcctctttcttcagtgaggctgggactcgca

SEQ ID NO: 446495 - DNA, 1030 bp, Homo Sapiens
  misc_feature (171)..(250): n is a, c, g, or t
gtcggagggctctacgcgcgttgtgtaatagggggtatagtttgggtgggggaggggcttcaaaaggataatgtgggggacgccttttcaaagaggggattatatggtttctccaaggaggcgatttcactgcggggcggggcaattttttggatcgtctgaatattttannnnnnnnnnnnnnnnnnnnnnnnnnnnnnnnnnnnnnnnnnnnnnnnnnnnnnnnnnnnnnnnnnnnnnnnnnnnnnnnttttgtcagggagcctatactctatcattgggatttatattccgggggcctggggccaaccgcattgtgagtggttaaatgtgggggtcagtttctatagtccttcccaatcttttgtaggggttgtggttgaaatgctcaggtgggggaggcgattccaatattgtgggcatcgatttatttaggtggggcagatacacgagggcccggtaggctcccgatttcaagctccaccagcctgttgccgtcaaggtggaggggaggcaggctgtcgaggtccccaaaggcgcgggccccgatgcgggtgatggcattgcgagacagtgttaggtccaccagtcccgtcatgttgcggaagtcagggggccccaggtcctggatgaagttgtcagccagccgcagctccactgtgcgccggtccacgttgggcggcacaaacagcaggcctcggtgggcacagagggtggtgagcgactcggacaggttctggcagacgcagggcagtgggcaggcggccgctccactggccagcagcagcagcaggagcggcggggccatggtgagcgccctgtaggaaggggccacagcccaggctcaggtggggctggcgcaggtgcccacttgggcccaggacagtcccagaagccagcttctgtgagcctggcccggggaggggctgggtcagaggcccaagagggccgccagagatgagggaaggttggggcctgcagggccaggccccccagcctcgtgccgaattcgccacccaggcctcgctac

SEQ ID NO: 446496 - DNA, 302 bp, Homo Sapiens
ctggacagtccataggttttatttacattgctttgagaaacagacgaaagacatgttttttacaattgtcttacagcaatctgttctgagagtaacatgtaacacaaatttttatatgcaatatatgaaaacataaatatttatatatacaataacataaccagacaaataaatgaagttactattaagtctctttaagtataaatttacaaactgaccaccagccacagaacttagccctgtaatggagaaaaattattactggcttaaaaaaatattaaaatatcactgtcactaacatg

SEQ ID NO: 446497 - DNA, 529 bp, Homo Sapiens
tttgatttgtcacattttattcagtatttctgctgcactgccagcctagggatgcacttgattcccaagaaatgcaactgtcctattcgcagagccgtccacaggtacctaccccctggactgcagcaactttattaccttaactagcacagaacagaggttgatttaaactccttacactcacttctcagatcaatgaatgggcaaagaaacacctcatggctctgggaaggcatgctgagacccgtttttgcaagtcctgaggaatggaagaatatagctgccaggtatcccaagtctagggcagggagggtagtatcggcatcactttcactgcattctgttggtcaacgcaagtcagaggctcagcccagatccaagggcaggatcttggaagcttccatgctgaggtctgaaggtggcagctttaagacacataccacatctagatttcaacctccagaaaagtccaaagatgcactcacaggagcccgttagtcaactgaagctggttcatggctctcttctt

SEQ ID NO: 446498 - DNA, 801 bp, Homo Sapiens
ggaaagaatttcctggcatttgatgaaaatggctgtgggttttgctatctttaagctccctgggaagcaggatataagcccagggtggcaggctctttctagctacctgctcttgcacatagagtttgcctcatggttgcaagaaggctgccatagctccagatggcacatagacattccaggcagcaggaaaaaggaaggagcacttaaccgaagagggtcagggagttggttagtctccacctgaagaagagagccatgaaccagcttcagttgactaacgggctcctgtgagtgcatctttggacttttctggaggttgaaatctagatgtggtatgtgtcttaaagcagccaccaactcctcccattaccttccaagtgagcccaactacacgatggagcctcttccctgcccttggatctgggctgagcctctgacttgcgttgaccaacagaatgcagtgaaagtgatgccgatactaccctccctgccctagacttgggatacctggcagctatattcttccattcctcaggacttgcaaaaacgggtctcagcatgccttcccagagccatgaggtgtttctttgcccattcattgatctgagaagtgagtgtaaggagtttaaatcaacctctgttctgtgctagttaaggtaataaagttgctgcagtccagggggtaggtacctgtggacggctctgcgaataggacagttgcatttcttgggaatcaagtgcatccctaggctggcagtgcagcagaaatactgaataaaatgtgacaaatctccctgg

SEQ ID NO: 446499 - DNA, 458 bp, Homo Sapiens
agccggtgtgagatctctgccagcttcgtgatcgatggctccttgtacacaaactcctgctcatccaggtcaccgaagtgggcgccgtagaagcccacgcggaaatacgtcccgaacacgcgctcccagccggaactctggtgcatgatcttggtgaaggcctcctgcagtttgccgtgcaccgcggccagcttcttgtagtcacggtgggcttccaggatggggatgaggttcttgtagacctcattcaccgcctcgtagagcccgcccatggtgaagtagccggctgcctgttccagcaaccctaccagccccagctcagtgaagtgcttcccggagcagaagccctcctcgtcgggcgacaggatgtcgtcggagatggcggactcctctagcacattggatgagatgttctggaaggaaacgcagcccacgggcaggtggcggtggtcctcgag

SEQ ID NO: 446500 - DNA, 575 bp, Homo Sapiens
caaatggaagaggcttttatttgtaaagaaatgaacttacaactgatctacaatatattattgtaatataaacaatataaataaatgatcctgtaggcccactaatcttccatccagacccacatgaagcaatgttacaacaatattctatatgaaaatgtgcaggtaacaaaggtgcaattacaagcaagttaagcagcagagtataaggtgctttaatttaatagttaatgttgccatcaacaaacatttaaatgctcaatttacttcactgaatacagacacaacaaatatgaaaatctaaattcatacacatgctacttaatatgaaagtgctttctcttttttaaaaaaatacaccaaatggacactttttacatagatcaaatgtgctcttacaatgcaaaattaaccttcattttcaggttatacattttaaaactgtagctatcaacaccaatctaggaactctaatgctaagagtgctaaaaactatttcatttcttgtaaggaggactctaatacaatatccaatgtaaagaatacatctatatataatcttaacatgttttctg

SEQ ID NO: 446501 - DNA, 1023 bp, Homo Sapiens
acagtaaaatattaccttttattttctcaggcacacaagtgatttggataccaattatcaagacattttactgatttccctttagaatgatctattttaaatcttcagccaccttagaaaaagtttgcagcaatcactttgcaattcataagtatcaggttagaatttagttgtggaataagttaacagtttatgttcaatatgtgaggttatttgaactcctgagttttaaatatcctgtggaacagtgattcctctcccttctaatggcttttcagattaaagcaatgactttaaaaagattacatcctaaatacttgattacaacagaaatcgaccaatctaaaaatcagatagtgttatactgaacatcattctgatataatgagtagcctctgggtgaaacaaaattccaccaccaaggccatcaaccaggttagtactgtttttcctggggtctatgtaaaactctccttttctctgcaaatgctgcttggctgtgaacagcatagatttacctgcaccaatgtggcacacacctagcaactttctcaagcattctaaagatatccccagagctaacaaatattgacatatgtcacagcacctttctcaagaacagtcccaaatcagcagtgcacattcacacacacaggaatgctggggatatgccttatacctgcacccacttagttacaacaaggggaaataagagtaactaatgaacttaatagcttcacaagaaaaatgttttatagtcatatacttgaccctatcagggaaaagccacctaaaagcatgtgtagctggttacaaagtgcatcaagggagagaatggctggctctgaataaacccacagtcacttctgaacataaagtacacattctaatgacagagatttggtaatattattttcacaaaccaaacagtacaaatttcaagttatttcacaaatcagatgatcaaataaaaatggacatgaatatgcttagtaaattcctcgtgccgcctcgtgccgaatt

SEQ ID NO: 446502 - DNA, 524 bp, Homo Sapiens
agccgaaacccgccctttggagccgcctgtgcgcacgggccccgtcgagtgggctcagtacgttaggactcagcgtggccgccaaagcattggttgggggcgtctttcactaatttttcctaggttttctctcctatcgggctctgtggtcctttcaccacccatcttcactttggtggcctgacgctaacgctgcgagttggggaaaccgtagtaaccccgggcctgaggggcgtcccgggcggcggtgctccgtttcttccagcggttgcccctttaagaaaaagccccccggagaggggcccgtgtggctgagtaaaggtggcgtgcgcccgcacaaaggcgccgcgttgttggcgggctccggaccctgttgcccctgggcggggcggcgtgggaagaccggggcgcctgggcggggagaacgacgttggcgctagcggggcagggcagggggagggagtcacggcatttagcaggtgcttctccgcgaccgagcgactgccattttgtggtgcggccgc

SEQ ID NO: 446503 - DNA, 1670 bp, Homo Sapiens
  misc_feature (41)..(41): n is a, c, g, or t
  misc_feature (417)..(464): n is a, c, g, or t
  misc_feature (945)..(945): n is a, c, g, or t
gcccgttcacaagggagaatttttacaacaccaggttaccnccgccacaaaaagtggggcccaagggccgcggggggcggttaaaaattggagataactccgaaggcttcccccttttgagacctccccccgttgtgaataaggatttcccagttaaaaggcaccttccaggaaatttcccattctgggaattttgtttccaaaaaaccgcttccggttgggcccccccggggcgtttgttgttaattggggtgaggaatttccaagccccttagttccatggccccagggattttccttagggaaaacacacctaatgacccatgtttcaatttaccttactgggggcccggggggcccaaaccgaatggttctagagaagctttttcgaggggccgagggcggcccgacaaggannnnnnnnnnnnnnnnnnnnnnnnnnnnnnnnnnnnnnnnnnnnnnnncccgccccttcaatctcatgggatggtctgcaggaaacctcagagtcctgccaactcgcaggcttcgctgatcgcatggcacctgggccccccgccaaagagctgaaactcccaaggctcagccaggactctccagctgtggtgtttctaaaagccgttctgggtgaaaatgtagagccgagttttcccagtcgctcagtcctcctcccgtggaggacaacactgcttgctctcctggcttgcctcacccatccaggaaaaggtggggaggggctctaggcagcggcctctcctggttgaaagaaactgagacctgggccttccgtccagtttaacctggagcaggcctggcccctgggcaggctcagagcaggtcccccattcagcaaatgagggtatcctcctattttgccaacatccatcttcaccgacttggcctgaacccattctgagtacagagggacacccatgacagaaatcncaggtcaactctgctggaagccactgtgctggaagaggacttctttcactttgtccacgatggtccccacttcagccatggccccgagaccttcatctccgcacaccagcttcttggccacacaggggatctcgacatagccaaaggccttgagctggtctacctgctgcgctgtgatcgggtgctcccacatggcggtgttcatggccgggcagaagagcaggggcttgctgcggtcccaggcccgcatgacgcaggtaagcaagttgtcacagatgccactggccaccttccccagagtgttggcatcaagaggagccaccagcaggaggtctgcccacctccgcaggtcaatgtgcagaactgggtcagagcggctcttccacatctcccattcatcagcgtcgctgtagagggtgacaggaatgtcctgggggctgtagaaatgtttggctctctcagttgtgaccactgctacttccagcccaggaatgtccaaaagctttgacaccagaagaggcaacttcagggctgcgacactccccgtgacacccacaagaacatggaattttctctccatcaagggtgcagcagctggacaggaggcctttggttccatgtggggtctggtggcttcaagttctgggagcctgccaggcctgggctctataaagctgtcgggatttagcctcgtgccgaattcgccacccaggcctcgcttcctt

SEQ ID NO: 446504 - DNA, 488 bp, Homo Sapiens
  misc_feature (140)..(140): n is a, c, g, or t
  misc_feature (143)..(143): n is a, c, g, or t
  misc_feature (151)..(151): n is a, c, g, or t
  misc_feature (418)..(418): n is a, c, g, or t
  misc_feature (426)..(426): n is a, c, g, or t
  misc_feature (456)..(456): n is a, c, g, or t
  misc_feature (472)..(472): n is a, c, g, or t
tatgagtaaagttaaactttactttacagtaaattttttttctatatacaaagaattacagtacatgtttatggggactcctaacacagggctcccctctttttcactaggagtttcacttacagctgacaatctatggnggncggggggngggggcgcggcaaaaaagcaatgatggaccttggctgatccccccgacccctttcttaacaatataggtagatgtctatcgtcagcttgcctctttgccaagacctaggaggcggctctgcatgagctgctgtgtgctgccctccccaccttcagcacactcatctacacacacacaggtaggcacccacctcgatgaggaccgccttgctctgggcctgccccaacctgggaagttgaaaacataggaaccatttatttctggttntaattttntgtggcccaagttttgttccaaaaaatttngtggaatttcaggggncttaaactgagggcca

SEQ ID NO: 446505 - DNA, 351 bp, Homo Sapiens
ttagccaagaaaggtaagacattttattttacatacaaaaagggtgcaaactgagtcctttcctccccaaactggggaagaggtatacttaaagatcacatttgtgttttccatggtgccctaggaaatgggctactctgagatcacatatcagaacccattttccattttctccaaagaaggctacttcctctgcagagaagattttcctaatggtgcacaaatatctctcctggaggaaccatttcaaatacacttgaaattgacattcatgtttaaaaatactacaaatttcattttcacagctgagctttgtgaccagtgccagggtttatgaaacattatacatct

SEQ ID NO: 446506 - DNA, 1127 bp, Homo Sapiens
  misc_feature (68)..(68): n is a, c, g, or t
  misc_feature (81)..(173): n is a, c, g, or t
  misc_feature (268)..(409): n is a, c, g, or t
  misc_feature (1090)..(1090): n is a, c, g, or t
ggaacgacggaggtgcgccgcgggcggcggcggagcgcggttcgggatagcctatagcgcgggggganggatggttctgcnnnnnnnnnnnnnnnnnnnnnnnnnnnnnnnnnnnnnnnnnnnnnnnnnnnnnnnnnnnnnnnnnnnnnnnnnnnnnnnnnnnnnnnnnnnnngcggcggcgacgctccgggggacggcaacggggggggcggaattggtcggggcggcgcgcacagggagtgggggggcgggcaaggcattattctnnnnnnnnnnnnnnnnnnnnnnnnnnnnnnnnnnnnnnnnnnnnnnnnnnnnnnnnnnnnnnnnnnnnnnnnnnnnnnnnnnnnnnnnnnnnnnnnnnnnnnnnnnnnnnnnnnnnnnnnnnnnnnnnnnnnnnnnnnnnnnacgcagggcgcgggccgagggggtctgccggcggcgcgaccaccttggggatgatggggtgaggctgagctccctcggggtgccaggcccagggccacacccatcctccagggccagccttagtgccagcagctcctgcaggaagctgactgagtcagcttcagggacctggctgagattctggcgggctcggctcaggcggctgcgctgttcctcctgtcgccgcaggtcaccctgggagcggcctagcatggcagcttccccctcctcgatgaagcccagcacctgggtctggaagccctgcagggcggccgcagcatctgcaaacagccggctcaccctctcccgctctgctacggctgcactcttgatgagggccactgtgcgcctggactgtgcaatgccagcacccagctcgtccatgcggtcctccacggcgctcaggactttggactgctcagcctcctgaagcgcgcgctcctgctccagcggcaccagctcgtggccgcggtgctcctgtgcggcgcaggcctcgcacagacacacgcgctccgcgcggcagtagcgctcgagcggccgtaggtggcgcgggcacaggctctcctctagccggcgcagcggcggcaccaggcggtgtccgcggagggcggggctgcgctcgtgcgggcccaggtgcgcggngcaaaaggaggcgaggcaggagaggcaggacagcgcg

SEQ ID NO: 446507 - DNA, 481 bp, Homo Sapiens
gcccccgcaacagctccctctcagcaggacgcggaaaggtcctctgtggacagtgagctggactgacctcacaaccctccagtatgtgcagtggctgagaatgacccactcccagcaactttctgcagccaaggggttaatcctccttgagctgaagcctgacatgggggcttgtatgtgtccaggaagtctagtgaattcgaccatgaatccagacatggccagtggctaaatcctgtgggaagacactgtgcttctctctgacccatgaacactctgctagtcaagctctctgtcacaaagacaacttgaagagacagagtggacctcacagaagataccatcgtcactcttaccaatgcaactgtggtgaacaggaccactattattccttagatcaaaaggacagcacattcaacagcatcctcatggcatgccagcaatttgcataggatgttcacaattaaactttgattatcta

SEQ ID NO: 446508 - DNA, 1008 bp, Homo Sapiens
ggatataaaaatatgtattttttagaatagatacaattaagaaggttcttaaaccacttataaataggttataaaataggtataggtcctcatctcttactctgtaatggtcaaggatgtcttctggagttgggagacccatgtaacgttctgtgtacactgagtcatagtactcccaccgggatacaggcgccacggctattccacacttgaacacgccacttcccgatcccaggaccattgaggttacgtaccctccatatgaccagccccaaattgcaatttgtttgttgtccacaaatccccatttttgaaaaattgtctggctgcttcaatttgatcttcaacttcaaatgttcccagtcttctgttgattgcatgcatgatcttatctccttggtaaccacttcctctgccatcaaagctagctactatcatgttttctgtgcttgcaaggtaagtggcccagttcagtctgaagacagtgtctgctttttgactacatgtgcctgcatacacatctaatagtagaggatatttcttggatttatcaaaatgatgaggcaagatcatctgataccaaagttttgtttcattcaaaatactggagtccagttttttggcgggcatctggacattctgcagcattttatccaaagctgaattgtcttccaggactctcagccctttatcattcacgctgctgtgtagagtatagaggggcagaccaggaccggaacatctcagctgataatacttcgcctctttactgaatgacacagaatagtactgacacctttccggattcagctcacaactgaggcatgtcacttttgtatagtcactaagttggattttataaagattccttcctcctggcattcctttatattcattactaatgtagtatagataatcactggttagagcttctatcccgatgacttcccaggtgccttttgtaataaatgtgcagtcttttttatctatttggaaatagcaaatgcc

SEQ ID NO: 446509 - DNA, 800 bp, Homo Sapiens; identical to SEQ ID NO: 320744
  misc_feature (444)..(471): n is a, c, g, or t

SEQ ID NO: 446510 - DNA, 632 bp, Homo Sapiens
tttttttagccacatgaattaagcattttatttaattatcacggaccaccttaaatattactttacaaaattcaggcctatatttaaaataggtgtcctgataacttccaggatattattcggaacacccgtttccccaactacgataagtccattgccggatgctgaataaacttcgcccattaccacttggatttcttgatagtcttatgtttccatcatccatcgtaatgtgttcagctcagcttccatctggctcaaactgacggttctcggggtgctagggcacaagagcgacagagtagactcaagatggccacatgacacagacggctgaacaggcttcaccggagtccccgagtgcacggaacctttccccgagggcccacggcccacgcacgccggggttcagggtccagggctgcacgtggacgcccggcgacctaatgagcactcaagtccgcgcatgcttgtaaacttaagggtttccaaagccgcccccgacctaccaatatcctgactgcgctgccttttaggtaaggcagtaagtttcggcccaattatcattttaacttacgaaagacaactacgtactttcacctaatcccgacgcttcccgaatgtgaaagccc

SEQ ID NO: 446511 - DNA, 491 bp, Homo Sapiens
ttaaagtttatcatttatttccaatacattaggataaaaacccactttatgcaactgtaccctttaattcatttcttctgaagaaaagtacaaaagaccagactaaaattgagacaagcatttaaaggaaaatcctttgactcagagtccaaaaccgaactgtaaatggttcattttaccaaaagaattagtttttgtacaaaatataaagaattctacacttataaacaaagacggctgtatatgtaattaaattaggaattctagtatctgcttttcctctatttcttctggagtacaaacatatttgcaagtcagaaatctaatattctcaatggacagactgtcttagaataagcttttacccttaagatatctggaaagatagtactcattctttcccttggctcaaagtccaatatatcagtaagttttaatttagtttacaaaactctgccatattaacatgaagagcacactaatgcttaatg

SEQ ID NO: 446512 - DNA, 1382 bp, Homo Sapiens
  misc_feature (221)..(242): n is a, c, g, or t
  misc_feature (421)..(445): n is a, c, g, or t
  misc_feature (454)..(597): n is a, c, g, or t
aaaattatcctgttctgatgccaattcaatttcagctctgcaagttcttgtcaggctaatctttaaacattgagtgatcttgagagattgttaatgaaagcagtgagtcattttttgatgattgatttgttggaaaaatgttgatgtgttttaaaaaatgtaatcttcaaaaacagaatataacctgagatgcatttgtagagacaagacggtacgagaannnnnnnnnnnnnnnnnnnnnnagagagagagacttttgatgaagaactaaatcttggattgctgatagcaaagatcatagtgctgttggaatatcagcaatatagagttattcttaaacacattctattaacatgtttttgtcattgggtccaaaaattttgctgctgaccagaatttactatttgttacctatattccnnnnnnnnnnnnnnnnnnnnnnnnngagacagannnnnnnnnnnnnnnnnnnnnnnnnnnnnnnnnnnnnnnnnnnnnnnnnnnnnnnnnnnnnnnnnnnnnnnnnnnnnnnnnnnnnnnnnnnnnnnnnnnnnnnnnnnnnnnnnnnnnnnnnnnnnnnnnnnnnnnnnnnnnnnngttacctacactctaattaataatcaataatttcttattttaaaaagtagtactatttaatataatcaagataggagatttaaaatgagcaagtgattcatttgctcttttaaagaagcccgttgacttacgcttttaaaaaagaagttggtgggttacctcaattattgttcatgcttaaacatatccatttgtacaggcttatttctacgtgggacccaatcatatatactatatttctcaaataatttttctaaaactctggccctatattctaaacactttgaccaacaccttagttattgaataggtaaccatttttaaagtacatgtggttcattttttaaaattcaatctctcaagaccgttagatatttaataatttaagctgataagggtatcaaaatgcacattaactttgatcatcatgatttaagttgtaactttgtgttattatataaatattaggttgtttataaatatattgcagaaagtattcttgttaagctcttttaaatgaggggactgtggtttagagttatatatttttgcttatttttaaacttcaattattccattcttctgccttataataaaacttttaaggcagagaactgaactaattatagaatttctcctttggagagttataatgttacatagtgaacattcttataaaagaaagaataagtttaagttgatgaatatttagctgcaaagattttttacttaaaaaaatccatgaatatctttgattttattataaagcatttgtaaattatttc

SEQ ID NO: 446513 - DNA, 650 bp, Homo Sapiens
  misc_feature (42)..(43): n is a, c, g, or t
  misc_feature (46)..(46): n is a, c, g, or t
  misc_feature (60)..(69): n is a, c, g, or t
  misc_feature (89)..(89): n is a, c, g, or t
cagcctttcttaagaccaagaattcctccaggcccgtacccnnccntgggcagacccatnnnnnnnnnnacactcagggcaccttctcntgctgtagatgcagagatcagagcccaggatgctcctctctctctgctccagacacagggtgggaggaaacaggctccagagcccctgcgggctgaagccagggtggccattcctgccagcgtcctgcctggaccagaggagcctgggggccagcggcaagaggccagtacaggccagtccccagaggaccatgcctccttggcaccacccctcagccctgaccactccagtttagaggctaaggatggagaatccggtgggtctagagtgttcagcatatgccgaggggaaggtgaagggcaaatctgggggttggtagagaaagaaacagccatagagggcaaagtggtaagcagcttgcagcaggaaatatgggaagaagaggatctaaacaggaaggaaatccaggactcccaggttcctttggaaaaagaaaccctgaagtctctgggagaggagattcaagagtcactgaagactctggaaaaccagagccatgagacactagaaagggagaatcaagaatgtccgaggtctttagaagaagacttagaaacact

SEQ ID NO: 446514 - DNA, 557 bp, Homo Sapiens
caagtttcattatagacatttattttagttttattttcaaagtcattgacctcttgtatcagatttaaggcaaagaagaagatacatgtcccaggactataggccaggctgttgactgcactgggatttagatggtgtaatctcccttagttctaccagggagacctcagcccaggtcttgttgccggggcacagttgagcactggattcaggtagagggctcccaggtcagtctgagagttaatgaagagattaaaaagtctggcagaggacaggactcttacaggtgactggcttggaggggaacctaccagtccttcttccaacttgctgctgaaatcccagtgttcttgaagacagggttatgatcctcttcaccaggtctggcgggggtggggctcagaatgctcaccttgacctcaccctgtggctcgcctagacccagggttggctgtgcaaaatcatgcttagggaagggttgcagagaaacctttgcaccagtttcctgggtcttcatcccagccagtcaatgtcatcgtcatcatcatcatctcccc

SEQ ID NO: 446515 - DNA, 2105 bp, Homo Sapiens
  misc_feature (1362)..(1416): n is a, c, g, or t
cattatagacatttattttagttttattttcaaagtcattgacctcttgtgtcagatttaaggcaaagaagaagatacatgtcccaggactataggccaggctgttgactgcactgggatttagatggtgtaatctcccttagttctaccagggagacctcagcccaggtcttgttgccggggcacagttgagcactggattcaggtagaggagggctcccaggtcagtctgagagttaatgaagagattaaaaagtctggcagaggacaggactcttacaggtgactggcttggaggggaacctaccagtccttcttccaacttgctgctgaaatcccagtgttcttgaagacagggttatgatcctcttcaccaggtctggcgggggtggggttcagaagggtggccaacccaccctctgagcccaaatattgttcccagaatgctcaccttgacctcaccctgtggttcgcctagacccagggttggctgtgcaaaatcatgcttagggaagggttgcagagaaacctttgcaccagtttcctgggtcttcatcccagccagtcaatgtcatcgtcatcatcatcatctccaaaaaggggcgttgggggcgggcgtcccttcatgctcacctcgtcttcatcctcctcctcaggctgtgctttgggccttagagctttcagagttgcccctttaaacagttcatcctcttcatccccagagagactggaacgctgggaatgatggctgggtctgagggctgctcctgcaactgtggaacctgcctctgtgcttgacagctccttgtggggaccggtggagctagtgacatcatctttcttgagctgtggaggctgaggctctcctgggctttcaggccctaaggccagtgggtccccctcctcggggtctgaagtcagggacagtcttgtggagctttcttgtagtgggccatctggtgctacttccctgacacagacctttcttgatgggttgtcgggcttagctgccattgggctggcagcaagtgactcctcacactcagagtccatggatacagggcctaggggctcaggtggaattgaagtcgggggccctagaactctgtgggatgggatgcaagacagttcgggtggaagggaaccatcttttatctctgagagtgcctcagcttctgagtcccctttccttctgtgtccatcctgggaagtggtgagggcctgaggaggcaacgggacagcttcctcgaccacctgctctgagggcaccatgggggactctggcctctccctattcaggggtgcttgaggctgcccagaactggctgaggctgactgctcctgggaaggtcttcgtggccnnnnnnnnnnnnnnnnnnnnnnnnnnnnnnnnnnnnnnnnnnnnnnnnnnnnnnnctgttggtttaacagctgaagagtcaccatcttgatcgtattcatgatggttcccagaatggtcctgccattgtaagattcctccagctcaaactctctccgtaaggactggaacacctggttcatgatcttcttgaccttctctgaggggtcagatgcagcagcttcaaccccagacatctgggacttgttcttctctagttccttgatgtgctgttcattttgcttggtgagagctgtgatttgggcctggagggctaaacacttttcctgaagttgtaccagcttctgctggtaggcatctctctgtgcgcacacctcctggtactgctgcaggtgcttcatccttgggcggaggccaacaaaatgttcacattttgcttccccctgggtctgtagctcagcctgtactaaagacagctgctctgcagctgcttggtctgtggacactcgagtctttttcaagagctgtcgaagtttgtccaattcctcctggtatgacttgcgaatttcatctatctcctcctcggcctgagaacgctcttgagctgacttctttttcctttctgagaggttcttttccaaggactccttctcaactcgaaggtcagtcagttcctcctccagggatgtcaccttgagttccagttgtttccggttctgcttttcacttttgaatttggactgcc

SEQ ID NO: 446516 - DNA, 657 bp, Homo Sapiens
gtaataaagtaatttaatactgtaaaatggtttcctatcacagatacaacagataattccaagaacttgttcttgatagctattttaaatcaccatgactgattttactatgattcacttaaaacgaataaaaactatatatactgaaatattcctaaattcaaactgtaaatctatagaatacatttttcctattcaaacctgtgcaattctttattgatactaaaatatacaaacctgagtagtcacttccacaaaatgtgattcgtgccagaaagctgtgtgtgatgccttctagatcacagtcctgacagggaggtctgtgatgaggacgattcatcttctaatacgtgaaacactctagcgatcccaattcctgatactggtttacaactattcggtagggctggtggcaaaatcaggaagggacaccactttctcaatttgggccaccagcatgagagagcagcctgtcttccgggctgaagcttctagtagtctcctgagagcagtctgcctccaatggagacaccaggtgcttaggggacaggtgttctctctcaggctgactggaaggaaggaaggcctttagctattctgaaggctggctggccactaaggaaacacagtgacatattacaagatcaaacctttcct

SEQ ID NO: 446517 - DNA, 418 bp, Homo Sapiens
  misc_feature (141)..(150): n is a, c, g, or t
  misc_feature (330)..(339): n is a, c, g, or t
cataaaggagatcttatttcttattatttaataaaacaagaaatatctttaatcatatattataaatagtgttagtacatgagaaatgtattcactacagacagaatatcttattttattgtgtcgcataatcctttcctnnnnnnnnnncactgcttctccccagttacaagagactaaaagcatactaaaaacactttatcgtcattactaaatgcattaaatacacatcctaaatggaatatgctgtatatccgatgaaatacatagaacgttcatcaaggcaaaagaaaagacgtagccaacaatggaaagatggcacacacaagnnnnnnnnnngaacagttctcaaatattgcagtaacttttcaatgtatcatagatattctatgacttttctatgaaacagaggaggacc

SEQ ID NO: 446518 - DNA, 666 bp, Homo Sapiens
ttcaggccgaatattgtggtgaccgcctgtgatgcttttgaggaggatacgtgggatgaactcctaattggtagtgtagaagtgacaaaggtaatggcatgccccaggtgtattttgacaacggtggacccagacactggagtcatagacaggaaacagccactggacaccctgaagagctaccgcctgtgtgatccttctgagagggaattgtacaagttgtctccactttttgggatctattattcagtggaaaaaattggaagcctgagagttggtgaccctgtgtatcggatggtgtagtgatgagtgatggatccactagggtgatatggcttcagcaaccagggagggattgacttgagatcttaacaacagcagcaacgatacattcagcaaatccttatttattccagccttcaactatctttaaaccctggaaaacaatctcgatttttgactttttcaaagttgtgtatgctccaggttaatgcaaggaaagtattagaggggggaatatgaaagtatatatataaattttaggtactgaaggctttaaaaataattaagatcatcaaaaatgctattttgaatgttatcatggctattacacttttacttcctgactttaatattgatgaataaagcaagtttaatgaatcaact

SEQ ID NO: 446519 - DNA, 565 bp, Homo Sapiens
tatgccaaacagcactatgcttttatttgaaaagcaaatagtataaatatttgatgttttaaaatgtagttttttaatatgacaacttccatatcagagtcgtaaacttttagtcccctcaacttttttacaagacagacattataatttatgtaacatgttcgtctgcttattagaagttaacctagcactgagatttatataaaaggttacatttattgcttattaaaactttactgtactttcacagattcttcagagcatggctaacccaacaagactaaaatatccccaacaagactaaaatatctaataatcaaacattaatcaggaagtgttttattgagagcagtggtttaaagcatagggaataatccagtataaaactgatttgaggcatattacttcccaattagtaatatgtagaatgcaagtaatttattttttaaagttgatatgaaataaataataggtaagaattttgaccatgacccagcaaatcagtaactgagctttttatagaatggaaggtgatgatcagagacagaaaccatagaataaataa

SEQ ID NO: 446520 - DNA, 352 bp, Homo Sapiens
tgcagtaacacacagaaagccttattcaaacaaataagctacctccgattgttcattcaacaagcatgtattaagaacctagggtacaggaacccctccaagggctttaattcggctgaccagttgctcacttgcctagaagtctcagtgtatgcctatcaccctgcatcctgtctggtttattttgtcctggatttttcatttctttattcaaaatacaagtagttattactaagacttattaaaatgagatggaagaattggatagactttcactttctatttcagtggtctcatctaggaacatatgaggttatgtgcagtgaacagagttagcactttaagacataat

SEQ ID NO: 446521 - DNA, 864 bp, Homo Sapiens
ggatgcttctatgtcttcatatgtttctccttcactgtcttgttcctcatctagatttccagcaccatcagagtgcgtgacaccatcttgattgtcttcattgacagggctttttaggtcaaacggaggtttaatgtttctgggaggtaggcttgggactggtggttgtgatgggtgagatgctggcaatggtggttggctggccggatgggatggttggaggtggtggcaggggagttgttgagtaagacgtctggcctttgctagtactgtttccagaagaggttttgtggaatttcgtcaggtcaacattttgtgttctgttgggttttggtggaggtggacccaaggtaaacaagggaggcaatggcttctttttcggggtggctgaattcttgtctccctgtttccttttcctgactttggccccctggcccgcccactgtcagcttagaaggggccttagggaacctggcaggaggagtccctgaggccaactcttcctgatttattttgctctggaaggtgttcttagcagcatctatcttcctatcttcctttttttcttcaccatttttggagagacctgggcctcccctgctcgcagcaggtttcaaaaccactccaggaaagggcaaacttgaaatctcccctgcatggtctttattttctgagtcttcccttgctggttttaaagggccgcttttggacctgactcccaggggagctggggacccttttgatgaagacacattcttcatggggctttcgtcttcatgggagttctcggtacttaggggcggcttctggccaaaggcgggtttggggaagaggggcttgggttcaagatcttgtgatgctgac

SEQ ID NO: 446522 - DNA, 531 bp, Homo Sapiens
gtgtcaggtaatttgccaggcattttcatgtatgcctttatttaaccctcaaaatcaacttgcaggttaggttaaacaattgcccaagttcaaaagctggagctggcacctgtgcctgactccaaagcccgtgtgcttcccattaaggcacactccctgcccagagccagcgcagctcagctgcttctcgggtcggcgtggaggagggacaggatacagaagggatatgcaaggctaactccaaaactaaactccaagactaaactaaagcgtgtgtttgtaaagagggtaaaaatgaaatttggaagcaaacttgcctaatttccaggtactcctcctcgtggaataaaaattggtctgttatgcggcttgacagcggcaggcaatttggtagggattacagcagggagttactgaagggtcctgagtgtaatctgcgctggagatgttgtcgttgggcattttttgggaggacgtttgcaagaacctttctgacctcgggcagcacagcctggtactccgcaccacctc

SEQ ID NO: 446523 - DNA, 308 bp, Homo Sapiens
ttatttgaagacatttattttgagacaaatatgagtgaccaatggcccaaggtacagtctcaagaggtcctaagaacatgtacctatgatggtcgggctacagcttgggtttatacaatttagggagacataagacaccaatcaagacatgtaagatgaacattggttctgtgggaaaggcaggacaattccaagcggggatgttccaagtcataggtgaactcaaggatcttcttatgggccactggctgaaagttattgtctaaagacctataatcaatagaaaggaatgtctgggatgactaagg

SEQ ID NO: 446524 - DNA, 538 bp, Homo Sapiens
taacgcaataggataattgtctttgcgctgtgtgttttcacaagcactagttttgtgttttgtttctgtttttaaggggaatgacaatctctgtttggatatttatgaaaatggttacatatcaagacttaaaaagaccaggacatgaaagggaatgatttttttgaagtttccacttgtactgctgcaaaaataatgatgaatatatatataaatcttctgcagtgtgaaagtaagcaagggacaaattttaaggtcaggaaagactctcgaatctaagcatagtgtgtgtagtctggaaggcatctgaacgtgtcctatcctgaggctgcaatctcaagcctgcagctatcaggaaagacccacggtgcaggaagcagggctgcactgggtcctgtggccagcatgctctctctgagataaaatgtccctctggggctccacattgatttcctgctgaggaaggagggctgcaggtgcctctattgcttacgccctctttagagtccctcttgcccctgtgaggtaagaaaggggc

SEQ ID NO: 446525 - DNA, 508 bp, Homo Sapiens
gaatttcacaccaggtttcaccgaaacctcccgagggtgacctctacgcctcagcacggtgcctcgcgcgtagtttcctaagactgggacacgaaaccaccccaggtccacagccctgccgcgcggcgtccggtgttgtgagctgcttccgacttgttcgggaactctctcttcatcctcttcgcgaccgcggccctccgctcccggccgcgcccgcccgccgccaggtaacccgctggactcgggctccctgcaccgggcgcgcgggaccgcgcagttaatgtgtaacgcgcccgtgcccgggggaggagccgccgcccgacgcccaccagcagcccagggggcggccggctgacccgggtcgccaaagtcccccccacacgccgcccccaagggcccggagcccaagtgcccaggcggagagcgagctcaccgggcctgggcatccccccgaacccccgcgtgccgcgccctgcacggcgccagcacctgcacctgccgcggccgc

SEQ ID NO: 446526 - DNA, 1074 bp, Homo Sapiens
  misc_feature (925)..(925): n is a, c, g, or t
tgacacccatgcccggcctcccagtttcctgatttgtaaagcacagataaaaatgaaaatatcaacaacctcacagagcagttcaagatagtatctagcgagtgagtgctcagtcatagtagtggggtgctcagtcagtagtcaatgtcatcactgctgggcattcccatcactcccccaatggcccacatgggcggctcaggcaaccctccactcctccctgatggggttacttcccccttctcttgtccctgcccctgcacctgaggagtatgaggcaccaggccactgtagcaggtccacaggccatcaatgctttaattttgtcagaggcaggcactgagcagccctgctgaggtctccccagctactgtgccacaaccagctcggagctgccactctaacagcagagtggagagctggggtcagggccatagcccccgggctgaggaggccttcttgcaggaccccaaccacagaacgagtggtcttcacaacacctgcggcctgcggactccgttttttgccaaggagtctgagatgcttcatgcccatcagaccatggggtggccttcatgggagacctgcagggccaggctggccagacttggccagaaagacttcccagggaagatgcttggctctctgctccaaggtgggccatggtatagggccctcgaagggcttgtggctggggtgatcccagggggcattgctcaaagtgcacaggaggtggcagcagggtcaggcgagttcctgttccagggacatcaggagggagggtagaagcctagggagtgtgcgaggctgctgggatgagggagctcaggggctaccagctaaccagcctcagctcaatggtttctccatcccttgggtctgtagtcagcaatacctttgcaccagtggggtgttggtgtcttcngagaagctgccagaactccctttctccggcgcttcccccataccgagggtaagaaggggcccggcacggaggcccgggttaaatattgaaaccctccaacttagggccttcttaggacctttccccggggggcccggccaaacagaatg

SEQ ID NO: 446527 - DNA, 332 bp, Homo Sapiens
aataataaatacattgcaaggaaaaaatgtggaaagaggcatatcgaacaaaaaagttttaatgaaaaagaaaagacattaaaaagttctgcaaacaggaaggtttgggcatggagctggctgattttaaaaatcctatcccattcgttcacatcaagctgtccaaacctagtaactggaaaggtcccaagatgctgggctataaacatctaacacgaagactagaattctagaattatctagtattttccctttcctgaaaattccatcttcaactggggtctatgggttcaagagccatatttatgaaccaaagttcaggatacatactc

SEQ ID NO: 446528 - DNA, 763 bp, Homo Sapiens
agcctggagaatttttttatttgtcacacaatataaggatattgcaagttatttaacactaaaagtagtcatgcttcatatacaataaaatatattacaatgatcatttttaatgctttattcattgattaaaagaatatacatttaacataaaccatacaacatcagtcatcaggtcaaacattcagctggtttccttacagtttctgtcaggagttattttatctgatcacatttataagataaaatctcaccacatctggcatttacacacactgtgccagtggattcacactactgatgtacatataaaatccgcatggtatgtgctcactggagacaaaacagtgcacacctgtcaaaaggtcattttaatataagatggtaaaaccatttgtaaaacacatataaacttttttccataaatagaatcatatctggacatctgttgcataaattgtgtttccaaagcttacaatagagcagccaggtctcagcactgctgggcacccaggttggctacttactttattattccagactgtcctttaacattaaatgcacaacattcgtaccacttaaaactggggtcaggtggaagtctcacagagaccacgtctgtaccgcggttgccctgaaacagttaataggcttttaaagcctctcagatataacaaggttttaaaacatacttcatggaatgttcttcatgtatcatagcagctcatacctgtgatagaacaagctttcagtttatcccgct

SEQ ID NO: 446529 - DNA, 1333 bp, Homo Sapiens
  misc_feature (113)..(127): n is a, c, g, or t
  misc_feature (136)..(247): n is a, c, g, or t
gtggggaatcccaacccttttccttgcccggttttctcttgggaaccagtatttgccccgtttcccttccttttggggccccggccccaaagaaaggtttttaaaactttttnnnnnnnnnnnnnnnccgccaggnnnnnnnnnnnnnnnnnnnnnnnnnnnnnnnnnnnnnnnnnnnnnnnnnnnnnnnnnnnnnnnnnnnnnnnnnnnnnnnnnnnnnnnnnnnnnnnnnnnnnnnnnnnnnnnnttacttaaaaatagttgtatttatattccacaatttgttcaaatactggttttcttataaactttctacaggatgtttttaaacaaattcttcacattgtgttttgactatgtacttacggaatttcagggaaatagttctgtgtatttttaatagcttaatttgtactaaagggatggtaggtggtcacatgcagtccatgtgggattctaacatgacatttagtgagttttctgatgtggaccatccctttgatgctgaaggtaatgcatctgttgaaagaagtgactgtagatttggattactgctctctgcatcttccagtttttctgtgttatcttcccaattaatgtggaatcttgtgaccctgggattagatgccaaaatattcctttgaagcttagaaaagtctggttttactggtggattttcccttaattctgtctcagtatattcattatttacataatagccaactctaataaattcttgtcctcgataggtacaagtaattagcacaacagttacgcctactgcatctgcatctggaatgagtcctggattaggtgcatcagcctgaaatacaaacatatgccttcctgcgggaacaggacccactaaaacagagtctaaaacttgatcgtattcttcactttctgcagagcccacatagataattttccattccaagtcttcagacaggtcctcgatgcactcgaaggtgatctcgaactggaacgggttgtagaaaggagaagggttatccagcaccactacattgttcacctgaacctttgccatattttgaaaaaaacacaaacaatgggaactggggctggttgcggcacaataaagtccagcgcgcggccgctcgggagagcgcagacccccgctccagcgccggccagacgtcgtgcagcggcgacttgagaaacttttttcctctttttatttacacgggagcactccacagtgtgttgcagctttcctatttcactaaactacagcccattctgctctgataagtagcagcgttgccctcgattccgctctcgacgaattcgagctcggccgatttggcctgat

SEQ ID NO: 446530 - DNA, 624 bp, Homo Sapiens
  misc_feature (119)..(135): n is a, c, g, or t
cagttcaaaaataatttttaattgctataagaaacatcaaccactttcctaggacttttgacacataagacaaagtctacatatactaggtaaacacaagagcattattaaatgagtcnnnnnnnnnnnnnnnnntcccatattctcttctggggaaactcagaaagatttcaagtatgagtgttaagaattagaaaagactatcataagctttaacattctaaataataagtaattgaattatttcagtttagttacacagcatcttttaaagtccatctttgcaaattatacgttgctataaatacattgtgtatttggcattatgtgaatttgtttaatccagtgtcaattgtctaatggtctaaagtgtcccattgaagttataatctggatgaactgaacaataagagaagttttcttcattagcccaattgtttatcactcaattcctactcctgcccatggtttcttccaccttcctctggagaacataaagagattctagatctctgtataaggtggttggcttagcttgaaacatcagtgaggatatacatgggcaatgtccagaatcacattattgtcatagaccggtagtctgatctaatgataactgtacat

SEQ ID NO: 446531 - DNA, 460 bp, Homo Sapiens
  misc_feature (439)..(439): n is a, c, g, or t
taatattacaccaacgaaaaattttattaaattatagatcaccagttatttaaaaatacacgggaaaagacagacatacaaaggtagtatcatacaactgatttctaaactcaatacttttgagatacaaaacaatgatcattacccccaaaagtcagtttactgacacgaattgatgtttaagttggtctgtaactcttttcattcaattctgtttataaatgttactgaatttttaaattttgtcccatatctgaactttgttttttttgacatgtttacttctcaaagtagtatatagttatttcttgcaattaatgtcagcaactataagaagctttcctaagtcacaagaattcaatgtggttgctgttctggagacagttaccattttgggctatatatactaaaacccacgtattcaaaggcaaaatatggnggttgagagcaggaggactaa

SEQ ID NO: 446532 - DNA, 438 bp, Homo Sapiens
taggatgaatactgtatgtgattacaactgtaatgatttatcgcatagtacttgccagaggaagatggttgtgggagcgacgaaggattggacaaccgatcaagagccacaggagactgtaaactgtaagtgggcctagcttgggattagcaaggctgatggaacagaactttgtcactttcctttgggttggaaggggagggggggttggattgaaatggaggaaacaaatgggcactttacgaagcacaagacacttgcactgcaaaggaacacaatgaccaaattcattaaaaagatctggtgatatataacaatattttcattatttacatgtgtaacaatataagccttagcacaaaacctctcagttatatctgccctcttttgtttttcaaccatgaatttcattttgtaattacattgaaagggttgatt

SEQ ID NO: 446533 - DNA, 811 bp, Homo Sapiens
cccagttcaagcatggaagaaaatttattcaggaactacagacagagtaaataatactgtgcacagacgagttaacaaattaattttcctaatatccctcaaacaatatctgtgaagattatttagggagaagtgaaaatagacaaaacccaattatccaacatcacattaagttgcttaacttgcaaagttttcaaagaaatattttcacagaattagagaatgttatcaaatatataatgaaaaatatctcagtagcccagctccattttccatcaggtgagccttcgactagatttgaggcatctttttatcattcttctgaatagcaatctataccgattatctggtatagattttcgttgcacaaggaaaactggatctctcagagacttgagtctctttacaggctttacaacaaggggctttcacgcaacagtattgttccgttgcttgtaacaatacgtaggattacaagtggtacaattagcttgctgaccttcaaatcattagctggcatgcttgttcatgccttcagggctcaagtcagaagatctttgtccatgacacacagctttattataggtgtaactcatccaagttatggccaagcttctgcatttagaggtttagggcagtaaatgtgtagaatcagccttgtgaactcgtcaatcctgtgaccatagtggaaggtgtattaggactggaagtgactgtcactgagtgagcatcaggaagagcactcacagagagacttatgtaggttcatctattcaagcgcaagatccacagaccagctccttaagaagat

SEQ ID NO: 446534 - DNA, 546 bp, Homo Sapiens
tttgcaggtgagaaatggtctggttttattgagaagctgttggtcatttgatggaaagacacatacggtacaaaattacaggtggtttagttcattacatgatacaaatcattagagtctttacaagtcattagagtctttggattttttaaactcccatttactgtgtaccaaatcaatataatcacagaatcaaagtcacttctttatatgtgaactcttcgcatttacacgaatccacacatagagaagctgttccaagaccccccaacaccattagtgtctgcagcccaccaggaaggcaccacggactttgtggagagaaagatgctttgggggttcaatgggtcagtatcttgggcaggaagcacagggtgactcccgtcttgtgtgcgtgcgcacagccaccaacacacactctcaggacttcccgtttcacatacagggaacttttaaggcaagaggagaaaatgctaggaagtaacgggggatcagaactcctccacctctcaggctccagcagtcacattcccagctccgttctct

SEQ ID NO: 446535 - DNA, 569 bp, Homo Sapiens
aaatggtatttgctttatttttattgttattgataatacattagacattaccctcccatcaggtgcacagaagaaagtcaaggctggaatttcattctcttatctaaatctctctgttctctctcagggaatattttcagagaataggtggaatgaagtgaggctgtggagaatgttatctatgataggatagagggcatagaaggccaggagtcaggagacctgggttctgtcctggattatacaccagctcactgaggagctttgtcctctctggatcaagagtcccacctgaaaatgaaggaactggtccagataacactggagccctttcccccaagatgcactggcattcagaggatggtgcaggtccagtcctcttctgcctgtggggtggatgctgcctggagtgtgctgggtctatgagagaaatgagggtactcatgtgttccaatgtaaccatatttctgatacctcctgggatcgtcggtctcatcgtctgcactgttgctttcagccagcagaatccaggagctcactggggaccccatccaatttctaaggcatgg

SEQ ID NO: 446536 - DNA, 592 bp, Homo Sapiens
ctacatctctttattgcagaatttatacttgtttgaaaaatacaaaatgtagcgttgataagattgaagcatgttgaaaggtaagtacagggaaaggtcctttcagaatgactgcaacagtgcagcaaggattcccattccccgcctaaaggacaatacctttttaatagaaataaatgagttagttagttagatttttattacagattgaattaaacagttagttacaaagacattctctgatacattcattcatagaggtcttaacgtataaatacatagtaaatatcctataaaatggtaggcaatctcattgtgcattatctttttgtgctcagacttgacttcacattcagtctctacatacagcttgattagaatcataaaaacaatatgaagacgattgcataaagggatagtttgacgaagcatattcagatattgtaacatttatggtgggtaaaaatgtatcttttgataacaatatattagactccatttttagctgaaatgaaatttactgattcaatctttttaagaatttgtggatgtttaaaggaaatgtatattagcatgatgtgtactattaact

SEQ ID NO: 446537 - DNA, 546 bp, Homo Sapiens
  misc_feature (463)..(463): n is a, c, g, or t
  misc_feature (484)..(484): n is a, c, g, or t
  misc_feature (501)..(501): n is a, c, g, or t
taaatatggctctttattttccttagtgtccattatgaaaaccagtatcaagtttaccatggaaattaatatatccattcagttcctcattctaaggctgttcagttgatgcatgtagactttattcccttacatttttgcttagattagattaggctgtattacttttctgtcaataacaaattaagcttggacttacttacttaaactattttaaaataagttctaggctagtaagatgaacagtgtctactactataataaatattccaaggatacttttggattaacatggtccataattattaactccaacaaaaatgctcccattgttgaacatattttacctaagtatataacctatctggaagctgaaagtctccaaagctattgcttcctaggactgctgtgtcttaacagctgggcatatgaatgcctcatactgggtttggccctagactcnaaaaactttttaaaggattcnaaccatatacaaactcngcttccacaaacaaatacagtgacggcatgatatgctgcaggttc

SEQ ID NO: 446538 - DNA, 277 bp, Homo Sapiens
ttttttttatttgtaaacatttattctcttgaactgaaaaaggcttgcatcagcacacattgtacagccttgcaaattacacagaaattgaaaagaaggttccttgttcataagtgcaatgaatctttgatgtccagtgatccgctgcaaacaatgaaaacaaactgtaaagcacttaagaagtttccagcactcatcaaatgcatttccttaggtgacaaaaaatccacaaggagaatgcaaataagtggcatttagttattagagagatacttga

SEQ ID NO: 446539 - DNA, 525 bp, Homo Sapiens
ttacattttaatttcattttatttttagagtaataaagccttctctttatggcaaatgatacagttttctagataaagtagtggtctcaagtgtagtttacaagcaagtcatttaataataaaaatatagcttataaaaaaagaatacttagatgatttaaggaactatattaaatgaataaacgttcatggggaaaattatgactatgttatagaaatgattgatatttgggaatcattaatttatcccaactctatatccacgcttgatccctttttaccaccaagcctacacctctctgtttgcatacctcctgtgacaggaggttcatcgtctctgaagactgtaaaaaagcagcatccttagtttaaatgcccttctccgttctcctgacctgtgtgccctttgcagtctaactttgtgatgtcctcccaccgagggcaaagcataatttcccatacccggggttgagcatgtgacttgtcttgaccaatgggatgttagcagacatgccagggccagcc

SEQ ID NO: 446540 - DNA, 509 bp, Homo Sapiens
ctttcaaaatatattttattagcggcacatggaatgtcaagttaagcaaattctttccagagagaaggtgagcctgacagactaaaacgttgagcacggatgatacagcagaaataacatttccagtgtaatgagagataaagaggaatactgtccaccaaggaaatgactttcttcaccatgctgaccacactgcacagcgcccgatccggctggtgaggatggggaggtgggaagaatctcaaagcactggacagggtgaggactcaggaagtcacggggtcagccctacagcatcagctcctctctgttgttggagaggccctgagccccattactcactatacgaggaccagagtgtctttggcaggtggaggctggctcacgggagaacaccaagtgagggggctcctctgtgaacccaagaaacttcaaggaaccccacagcgtctcccttatgacctcccatctccagattaggaagctatggattcccagagggtcctttg

SEQ ID NO: 446541 - DNA, 404 bp, Homo Sapiens
tgtatttgatccccaaatttattcaagatacaaaagttccaggtgacaacaacaacaaaaaacatgtctaaaagaataaccaacatatgtcggtatggtgtgagaagctaaaaataaaatagtaaccaacaaaaggaaagcagctccaaagaaagacaatgaagaaaagcaaattaatttccaagaaaaccaaggatgacagtgtagaaatgtcaagacggagtgagctagaaaactgagattgtttgggtgacttctcatgattccagaggaggcccacgaaatagctgctgtcactcacaggacagcctgggcaatttgagagggaacagaaactagacgcaagttcatgaaatgcctgggaagattgaatttgaggagaaggccccatggattctaagcga

SEQ ID NO: 446542 - DNA, 526 bp, Homo Sapiens
  misc_feature (333)..(333): n is a, c, g, or t
  misc_feature (448)..(448): n is a, c, g, or t
  misc_feature (488)..(488): n is a, c, g, or t
  misc_feature (491)..(491): n is a, c, g, or t
gtttctatgtccaaaacatttatttcaggaaatatttgtgcctgcaaacaggggaactttgtggggtgtctgtggcttgctacagtgacatctggcaggactaactgggtcatcagagccacagaataaggactgggaaggtggccacaactgcaaggactggggccatgtggggggaggactctgagactgaccacttggctggtaacttggctgtccagtgtatggggaatctcagtgagttcctgggcctgaagtcagactctgtctctgacgcagacgtgagaggtcggagtgggcaggaactgttcagctgctcatcccgggaacttntcctccaaggggctttgcattttgttttcttcctgtaccttttccacttgtctgaagacccgcagcaggtttccacgaaggacaccctgaagctcttcctcactccagccacganttagcaactcctctatcaggaccgggtatttggacacgtnttncagcccctgagggaattttgccggcccattataat

SEQ ID NO: 446543 - DNA, 607 bp, Homo Sapiens
  misc_feature (577)..(577): n is a, c, g, or t
gaataatacactggatttattaactattctttgagttctaacagtccttccaccacacagtatcactctgaaagggtgtgcatgtctcacagctcacacacacaccacttctgatcttagggtaccaagcgccagcatcctgggtgactcttcacaatgacaaaagcaacaagaactggaaaagcaaaatatttagaaaagtctcttctgaaggtagagattgctagagaggacccagcctcaacaccctggggctgacaaagggagttcaggagagaaaaatgtggtaaaacattgaagttctgcacagagccgggcctgggaaggagtctgtatgtatggacagcaaggcagtcagacacacgatgcagttcagacaggaaagagccgctgcagttgtttagaaacatcgctttctaccaccaagctctcggcagcttcacagagaagagcccttcatggttgtttatccagtcaagagggcccagggtgacattcaaccagaaagccgtatatcagagatactggaaagattacagcacctctgatacaatgtgcaacccagacttcatgctgntaagccaaaatacttgcatttctacaccac

SEQ ID NO: 446544 - DNA, 652 bp, Homo Sapiens
agagtccttctttctttttattgaaaagaaatcatttctattctagcgcaaacaatgtatattttacaacataaagcaagatataatttacatattacatttcttatgagatctttataccctaaatgtcattcccttttttattaagtcacctcttctggtttaatttaacctgccaagtaccctacaaatcagcatcttgtttgaagggagattgaggacaccggccgatagttcctatgtattcacctgtatctggtatcatgatggtgaggaaccgggttatgtcttgacctttgcagccctgaggacctcccctgaccactggcttaagatcccgaaggcatcttttcccaatcacatacccaacttgtattttaaaaatttgataataaatggaccaaattgagagcttgtaccacatgtatatttcttgatccagtgcttagataatacatgcttatggtattggttcacccgccgtgaatgtttctttggctgacccgcacttgttactctatgatattccccgaccttgcttgcttgagaccttggataaaacccccccacttcacctatcatttcggtttatgggttcaggctttgctgtttgcccctggaaatggatgtctgaatccaattccacgtggca

SEQ ID NO: 446545 - DNA, 1972 bp, Homo Sapiens
ggcaatgtcaaaaccaagtgcaacaaacgtttattaagcatttaggaaatgttatgtaaagaacctcttatccttgcatgccaggcactctttcaatcacttcagtgacatttttccaaaattctgaacatccacacttagggttttctttgaatttgggggtgccctccccccacccggcagccttctgtgtcagcgggatacgatcttgatatagacaccattttttggacctagggcagatttggattctagctgcagcggtacctgggtctcagggcaggcttggaaccggaacttgtgcagcacgtggagcagtgtcaacttgacctcaagcagccctagacgcaccccgaggcagctccgtgggccggccccgaagggcaggtacgtgaagggccggtgctgctgccgggcctcagccgtgaacctttcagggttgaaggtcttcgggcttggccagtgctcatggtcatggtgcagggcacccacggccatctttagcacagcgcctgcggtgatgcgctgccccagcacctggcagtcctgagctgcctccccgtgtgaatctgaaagctggcgggtacatcctcagcgtctctgcaatcaccatgtccaagatagggcaggctttcctcgaggctgcagaactcagggggccatgtgtttctccttaaaaacgtctacctctctcagaagcttctcttggcagtcagggttggtggccagtaggtaggtggcaaaagaaagtgtgttggtgatgatttcatagccagcgatgaggaagatgaaggcctggcccacaatctcatccacagtcaaaggcctggccatagggctgggctggtgttgccgggaagggttcggcttgcacccagtagaggagaaaacgtctctgacgatgtcaaagtcttgcacgcccatgggacttgcagaatgtcgggcatccaggaccatttggaggaagtctctccgcctctcttcggcagcttgctggtcccgcaaggcaatcacattcctaatgagtttgttaaaaaagccattcagttcgtctcggttcttattgggcaaaatccgggccagtgggaccattatggatggaaatgataagagtaaaaccaggataggtctggggatgcagaatttcgaagaaacgcttgcagtgtttcacaaagggatcctcaggggcctgccaggagtccaccggggtgccaaaggcgacgctggcaaccacatctgtggtgtaattgcagtagcacctctggatgtcaaatgcgtccccagattccgcatagcgttttaaatgagccaggagaaggtcgcaggcttggctgatgaggggaaccatctcgttcagcttttcaggactgaaagcagacatcagggcacctctgacctcttcccatcttttgtcacgtaaaaacagaacgctgtcggctaccgacttgaactccaaacccgacgccattctgttggtaaagttactgaagttctcaaccaacacctgcttgatcatgtctggctcagaaataacaataaacatccgacgaccaagatagtacccacacagaggtccatacagctttctgagctccatttggctttcccaaaaaccctggcggaaaaatgtcaagtttccaatgaaaggagaaggcttgggatgtctgaggcctaacttctccagtcttgagaatgctgatgtggagtaccatttcaggagggccaagagagccactgacagggccaccgtcaccatggggccattcacttccaattttagaaaccccaaggcttccatcattcctctgagaccccagagtggtggtcttccagatgagacaggaggctgatctcgccgcccttatgggaaccgtgctctgcaggtagaaaagggaacaggcaaccaagcaaacatcacatggagtgggcccccacaatgtgctctttctcagatcccgggaattccggaccc

SEQ ID NO: 446546 - DNA, 134 bp, Homo Sapiens
acaaagtttattaatttattgaatctgtgatttttacatccaatctacagaaataaaaactggtaaaatcaatgggttccttcaggtatagaaactagaaatggtcaactcaatgcctctaaatttgtgctatg

SEQ ID NO: 446547 - DNA, 1199 bp, Homo Sapiens
ttccaaaaccagaagacgtcgtatgcttgggatgggggccgtgccacccgtgggaatgctgcccgctctgcagactgctgctagagccagcaactccactaaggtggattttcatcaggggcctgcagggccctcccttttcccattgttcctgcgctgcaaattgcagaccccagcaatcgtgactgacgtttgctccttgactccaagaaactgagaccaaagaagctgctgttcttagcaagatgcgcactgcattccacaggtgggaggagtcggagaggcaggggcttgctttgcagccccacagacaacagttgcacagtgcctcaagccccagagtggctcaccctgtccagacctttgaggatatcaaaggacaaagtgcccaagtctttcctaccttgggggaacctggaacttggaaaggctccctgtcctagtcttgatctgttctgggccaggtcccagcttgagctgcctctgagatttgggctgtgcggatctctggagtgagctctgtttcggttgacccaggtcatggaatggaaacggtgaggccccagtggctgttctggaagaaacagatctcctggcaaaggccccagcatctccctcactgaaaccaggtggccggctcctcggactctgctttatgttgcggtgagaactctgcccaggtgtgcagggtttggcttgtgggctgcttgctgctcatctgatttttgtcccagtagtccctgcgttcttcattcaaccccttctgggacttcagctcagagagcaccatcccgggggtcagggcctccccacaggagccctgcagtgtggtagcgccatggctgtctcaaaccaagcaaaggaaggaccctgaggccttcaggctaaccctcctcgagcaactgctgttggaaggcctccctgggcctggcccccaccctactgccacccagtcctcccagctgccatgtttcaaaagacgacctttacctcctgcctttggattgactactgcatttgaccacggactccaagtctgtgtgtacgggagaagagctgagtagggaggccttccagtccggaatcgaggcctgtatagggggctcgtattcccaacacatgcctaatttctgaagaggcttctgtcctatttgaaggccagccaacccagtactttaaaaccagggtttatgggacaa

SEQ ID NO: 446548 - DNA, 1190 bp, Homo Sapiens
  misc_feature (133)..(191): n is a, c, g, or t
  misc_feature (324)..(382): n is a, c, g, or t
tcagagaaacctctctctcaccacgcggatgtttgtcttgggggaatatgtttaaactctataaaaggccctccaggggggccctctccctttgcgtttgggtttggaagcacaggcccaagggggggttgtnnnnnnnnnnnnnnnnnnnnnnnnnnnnnnnnnnnnnnnnnnnnnnnnnnnnnnnnnnnggggaaagggtgggttttctttggaggccggaaaattcccacaaaaagggggggttgaaaagggaaggaacccgcaaggggaactttgtggggggccaaaaaaattacaaattgaggccaggccaagccgagnnnnnnnnnnnnnnnnnnnnnnnnnnnnnnnnnnnnnnnnnnnnnnnnnnnnnnnnnnnggcaaccattaaaagccgggagttccggagggagcccgggcccaccctggttttccagtggaggggagattgcttggggccctttttccagggagatttggtttcttcccagaaacaggccactggggccctcaaccgtttcccattcccatgaccctgggtcaaccgaaaacagagctcactcccagagatcggcacagcccaaatctcagaggcagctcaagctgggacctggcccagaacagatcaagactaggacagggagcctttccaagttcccaggttcccccaaggtaggaaagacttgggcactttgtcctttgatatcctcaaaggtctggacagggtgagccactctggggcttgaggcactgtgcaactgttgtctgtggggctgcaaagcaagcccctgcctctccgactcctcccacctgtggaatgcagtgcgcatcttgctaagaacagcagcttctttggtctcagtttcttggagtcaaggagcaaacgtcagtcacgattgctggggcctgcaatttgcagcgcaggaacaatgggaaaagggagggccctgcaggcccctgatgaaaatccaccttagtggagttgctggctctagcagcagtctgcagagcgggcagcattcccacgggtggcacggcccccatcccaagcatacgatgtcttctggttttggaaactctgcagaattagcctctgacaaaccacaccaaaacccacagcctgcaacaagcccctgctggcctgtagaaagtggcttcggtgcctcgtgccgaattcgccacccacg

SEQ ID NO: 446549 - DNA, 1931 bp, Homo Sapiens
  misc_feature (910)..(954): n is a, c, g, or t
  misc_feature (1455)..(1455): n is a, c, g, or t
ctgtgtttcaattttattttcccgtctataaaatgggataaaacccacacaaggtagggtgcacatggttattggaaggttcccacgagatcataacatggaaaagggctttgtaaaaggcaaagttatgtccgagtaagggacattatcattaaatggcagctggaagctgtaatttggttctgccctctcacgcccgctgctactccagacgtcgtaagttgctcttttatgggatatctctggcttgactgcgggttccgttctgaggaggtggggtcagcaggggcctgatgtcttcttcctttccctctggtcactctagtgatataacccaggccatatagtcaggcagactttggcgaaactgtcagcgagggcagctcctcgattcggcccctttgactattgtctccagtcctgaaaccctcgcccagggccgctccgccgccgggctccggcgctcagcccatgtcacccggggaaaggccggcgcctccgtccgaccctctttcctgtcgctgggggcggtttgtgggcctggccttgggattaggaaaatagggatggtgctataacggccgaatgcaggcctcagggaatcccgaaagggggaatgtctgggtcggcggatcggggggcttgagagggcccgctccgtgggacgttcaggccccggaaccggcccccgcatggtcgccgctccggcccgggcgggcgcagcgctggcagccccgttttccgccagccgggctgccggagagttagacctcccagcctcacggggctgctgtgcggctgcgacgacgccggcgactgcggcgctgcagcggagacggaaggctcgggaggcggcgccatggactggtgattgcagctggaagtgcccatgaccgagctggcgtcctcnnnnnnnnnnnnnnnnnnnnnnnnnnnnnnnnnnnnnnnnnnnnncgagcgaggcctggtcatccaccaccctgcagaggagcagccctaccgctgcccgctgtgcggccagaccttctcgcagcagcccagcctggtgcggcaccagaaggcgcacgccggagcgggccgcgcggctgccttcgtgtgtcccgagtgcggcaaggccttcagcgtcaagcacaacctcgaggtgcaccagcgcacgcacaccggggagcggcccttcccctgccccgagtgcggccgctgcttcagcctcaagcagaacctgctcacgcaccagcgcatccacagcggcgagaagccgcaccagtgcgcgcagtgcggccgctgcttccgcgagccgcgcttcctgctcaaccaccagcgcacccacgcgcgcatgcccgcgccgcacccgcgccgccccggcgtcttcggggagcggcggccctacttctgcccccgctgcggcaagagcttcgcgcgcgagggctcgctcaagacccatcagcgcagccacgngcacgggcccgagggccaggcggccacttaggacgcgtgctatgatgcgcccggggcctgctgccgacggctgcttcccgccccgcacgtgcgtccccgacccctggagatggccctgggccgcagctccctctctagatgggatcccgggagaggggcagcgctggcttgggctcttgaaggtgtgggccgctgcaggctccggccgcccgctcgcgttcctccctcgggaccctctggctggctgcagcaacagctgcttccggctcctgccatggttctccttctctggcccatccggactaaagcagttgcagagtgggcaggatcttaagacccgataggtgcagaaccatctggacacggagaccaggacatggcgtacatggaggcctggtgcgctgcaccgggcatgacgacccatccacaagcagacctgctcagaggtgcatgcggtgaaccgtggaggtgactgg

SEQ ID NO: 446550 - DNA, 798 bp, Homo Sapiens
tgggtggcgaattcggcacgaggggaggacgcgcgaccgaatgcagccgcgcccgccctgggccccgtgggcctggagagcgacttgagcaaggtccggcacaagctccgcaagttcctccagaggcggcccacactgcagtcgctgcgggagaagggctacatcaaagaccaggtgttcggctgcgcgctggccgcgctgtgtgagcgcgagaggagccgggtgccacgcttcgtgcagcagtgcatccgcgccgtcgaggcccgcgggctggacatcgacgggctgtaccgcatcagtggaaacctggccaccatccagaagctacgctataaggtggaccacgatgagcgccttgacctggatgacgggcgctgggaggacgtccacgttatcaccggagccctgaagctcttctttcgggaggtgcccgagcccctacttccccttctcgcacttccgccagttcattgcggccatcaagttgcaggcccaggcccggcgcagcggctgtgtgcgtgacttggttcgctcgctgcccgctccccaaccaccgacactctgcggatgctcttccagcacctctgccgggtgatcgagcacggcgagcagaaccgcatgtcggtgcagagcgtggccattgtgttcgggcccacgctgctgcggcccgaggtggaagagaccagcatgcccatgaccatggtgttccagaaccaggtggtggagctcatcctgcagcagtgcgcggacatcttcccgccgcactgactgctggcctgtgactggggcggcggccgc

SEQ ID NO: 446551 - DNA, 851 bp, Homo Sapiens
atcctttttacagaatatagctttatttatagaatcttacaaataaaacatttacagtccacataagttaattttcttttctaatttcttctcatacacctgagttatttaaaaaaatactgtgatggaactgcagaactgtaaagggaaataagaacaataaaatcctaacctctcttgcaaaaatcagacaactttgttttaaagtagatgcccagcatattgccatctctttggaagaggacttactatactcagctcttacgctacccaaacagagaagccttctttttaaaacccaaggttaaggaccagtgaagaatagctccaatttgacactagacacaaaatacctttgggggcaaagacaggggcaagctgtgtgccggtggtgaagtgagaaggagcagaacccctgtccctgcctcactgttcctgcacgtgacatacactttccttgctaacttattaataggagctggtgcatctggaaaatgaggtcgaagctgctaatgccaggggtgaaaaagtcctcccactgacttgctactccttagacttctaatatgtacaaatgcttgaaacagcaaattcaacaactaaaaatcaaaagaaattgccaatttttgactcatgaggcaaagctgttgccacaatcagtggcgactcaagtcagacgatgtgagcgtctccgcccctcctaagctccgactaggactgacctctgcgccaactacggtttaaagaggatttccctttgaggcagctgtctatggaaggaaatttcttaaggtaatataggtgtgcacaaaaagggaaaacaccctatttcatttttcaatttgttaaag

SEQ ID NO: 446552 - DNA, 560 bp, Homo Sapiens
  misc_feature (38)..(38): n is a, c, g, or t
  misc_feature (82)..(82): n is a, c, g, or t
  misc_feature (88)..(88): n is a, c, g, or t
  misc_feature (102)..(102): n is a, c, g, or t
ccacaaccgtgccgacctcaagtcagacgatgtgaacntctccggcccctcctagctccgactgggactgacctccgcgccnaactanggtttaaagagganttccccttgaggcagctgtcctaggaaggaatttccttaagggtaatataggtgtgccacaaaaaggggaaaacacccctattttcatttttccaatttgttaaagattatagttttgagctcctctccctaaactagaaatcccactaactctaacttagtattctactccaagacaaagggtattatgtttaaggaatgataggatctattgggaatgctaaaattataaatttaatacatcaatgcgagttaggttaaagcaaaatcttccagagtcttcaactttgagttattttctgctagctcctgaaagcagcttgagaaaaataaaacagaaaagacaaagaaccgtttaaaaacaacaataataatgacaatataaaaagttagattccaacattcaaggaattggttctttggtaaaactggaccataatcccaccaggaaatcagtc

SEQ ID NO: 446553 - DNA, 619 bp, Homo Sapiens
aaaaataacaatcattaaatatccattataaatattaattttattttaaaagaattggaagatgttacatatattacatactacatataatggcacatgtcagccttttaagcttaaaaataatcttttcccaaactgggattgatttatacccaagtataaaatgacccttggcctatagcaccaacccaggcccagaggaaaagccagttttgaacctgtctgtcctctggcactgggcttcctgatatgacactgagggtcctctccctctggttttattccctggcagtattgaggcctggcacagggacccatcttactgtatgctgcaggcctggggaaatcagggaatctagagggggtagggtcctctaaccattttataatgaaaaaaagttaaatatgttccttattctgtgtttttgatttatacaactataacaagactctacaagacagaaggagcttaaaattactgaaatacaatttctctgctagttcttctctttggaaattgaagtctcataataggaggagccttaaaagtcatctagttctgattggtagcctgttccactgtcacctccctgtcccagatttaggtataattcattca

SEQ ID NO: 446554 - DNA, 417 bp, Homo Sapiens
aatattctgatggttttattaacaagtatataatatatattgcatactgtatatagtatatgaggactgtacagtacaaatttatgttcacagtttgacatgacaaaatgtcattactgaattcccattggactacagagtagaaacagagaaggtacattaaacattcacatctttagtaagaaagattaccaaaatgtttcagtatctgcaagtatactaatgcatgctaaaaacctttacccattcagtcttattagcttataaaatatattacactttattaaaaatttctgcatagtttatacaagtattaaagtactgtaaatgtaataatcctgctatatttgcaggtatggtttaagagatgctaagcagaaagattattttgaccctctaacactaagtacataacag

SEQ ID NO: 446555 - DNA, 435 bp, Homo Sapiens
aatattctgatggttttattaacaagtatataatatatattgcatactgtatatagtatatgaggactgtacagtacaaatttatgttcacagtttgacatgacaaaatgtcattactgaattcccattggactacagagtagaaacagagaaggtacattaaacattcacatctttagtaaggaaaggattaccaaaatgtttcagtatctgcaagtatactaatgcatgctaaaaacctttacccattcagtcttattaggcttataaaatatattacactttattaaaaatttctggcataggtttatacaaggtattaaaggtactggtaaatggtaataatcctggctatatttgccgggtatggggtttaggggatggctaaggcagggaagggtttattttggacccctctaacactagggacataac

SEQ ID NO: 446556 - DNA, 485 bp, Homo Sapiens
ccaaggacaggacttctccttatctttctatactgaatatctgccattatccttcaccctgttgtactgtgaatgcttgagatagtgctgtcattcccccggttcttgtgggccactaccaggccattacggttcccattttgctgtgaaaaaaccttcctcttttccagctcataccatttgtatttaccacctcttctcctttttcattttccttcaacatacaagtgatatctgcggttgaagtccacagtccttccctttcctccatcatgatgtgtgacttgcatatgttgcttgactcatgttttctgaccttctggagtctaatggtcttcattcactctacttccttagggcacattcagggttataccctggatcttattatatcctagaatttttccctccttggctgggcgcagtggctcacacctgtaatcccagtgctttgggaagccaaggtcagaatatggtttgagccc

SEQ ID NO: 446557 - DNA, 266 bp, Homo Sapiens
tttttccgggcacacaccttggccgtttatgtatacagaagtggggtgccgggcgggaagggcgcggggaatgagggaacctagaggccgatgacgtcgttcagcttgaggtccgcgttggggcggcagcgggcctgggggggctgcgtcccggggcggggtttcgcgtcgggcttggcggcagccgcctccgggcgcgccacgtccatgactcccatcaccgggtgcacgatggaaggccccatatccatttgaaaggacggcag

SEQ ID NO: 446558 - DNA, 498 bp, Homo Sapiens
tcttccttaaaacatcaaaactttttaagcggagggttgaaaggaagcgggctgtattcaaagcacgaatacaaaaatgcaccaggagtgtgcaaccctccagggtatcatgaaaccatcactgtgaaacccaaaccctcccccaacttcaaaacctgttcttttccccagttctggaggaatctggcctccttccctcccttccacccacccacaggctcttccctggttccagtcggctgggctcagcctgcccaggcttccggcttcctacctcgccctggggcagggacaggagcaggggagccttgggacctgctggctcctgcttcaggggcgatgagtcagtgaggggttccaaaggaaagccagaatgtcaatctcctagcaggagccctgtttctatttccacataatgttgcctgcactggatttgctacagatccaaaaagcagggtttcaaaaatgcctacaggaaacaggatttccacttccggt

SEQ ID NO: 446559 - DNA, 636 bp, Homo Sapiens
  misc_feature (16)..(16): n is a, c, g, or t
  misc_feature (55)..(55): n is a, c, g, or t
  misc_feature (81)..(107): n is a, c, g, or t
ataaaaaatttattgngatgatgtaattataggcttttctttaaaaattatttgnaactcactggccctgagaaaaggcannnnnnnnnnnnnnnnnnnnnnnnnnngttacattcatttgattcagtcccttataaaccccacacctcataaacaagagattagaaactaaacaaaaaggggggcggggaaggaaattctagagtcgttctggtttgcaggtggttgcggtcacaaagagaaatcatcaagaatgttcacttggcatgtgtgaaagattcagggggtctgcagctgtttagtgttgatgcagttgggtcaaaagagtatcaggttagtcttctgtgggttttagggagggattatggtgcctccctcccaccccactggcttccttgtgtcacagcctttatttctactccgaagaggagcaggagagagtgaacagcctctaactagcaccaaatgcttgggcaaagaaaactgcccctttttcttggtgtgttttcccaaatcttttatcttcagtttcctgggtggggaatgagccagacagggtgagcccaggctggatcctgaggcctaattccattcttggcatgctgtctgctcctagggcaagtcactttcacctcc

SEQ ID NO: 446560 - DNA, 672 bp, Homo Sapiens
  misc_feature (386)..(394): n is a, c, g, or t
  misc_feature (622)..(622): n is a, c, g, or t
  misc_feature (632)..(632): n is a, c, g, or t
gaaggacccaaaggcatttaattattgaacacataaaaggaagtatatttaaaaaaaattggtcaaactgtcctgttagttatcattttaaaggaatttacagggctgttatagatgattcttttggaatatttcagtttatagcaaatgcctaaactggtttcttcattgcacagtattttctcttaaaatgggtgctttaaaacaattacatacagattaaaaatcatttctttgcttaattaaaacgttaatactcttagacaacacagatctgaaatggtgaaaccagcaattccccccaccccaccttacaacaaattaaattgagacaaaattacaaacacatttcactacatgattattattaataaaaatcagtttcnnnnnnnnnataaagttgcccaaaatgcaagggatgtgcataggtttacaacttagtcataatagcattttattcttattcccctgggtgtgccccatgaacggaatgtagaatgtactttgctgtagattacagattgttttgtccaacacagacacaccgacagcataaacgctcgcgactgtccacatgcattaagagtcaagacccaacttcaaatctctaaaaggtttacangggtgcttcnaaagagacagtatcacattatctgggatgttacttaaggg

SEQ ID NO: 446561 - DNA, 458 bp, Homo Sapiens
  misc_feature (319)..(369): n is a, c, g, or t
  misc_feature (377)..(377): n is a, c, g, or t
gcaacttaaatttattttctcagagtggttctacaattgaagttttgtttgtcagactgctcacaaaaatctgcttacataagaatgtgcatttaatatatcctaaacaatatatatatcctaaatgctgtgcataacagtgcttctctggttaaatgcattcaaagttctaacccagatgccaacagctcagagcctctcttgatagaacactcttcctgtcaaggctaaaatgagagcaggagaggttagtttccatttaactcccggtagctgcaacagacaagcctcactctatgtcaatgattcttctgaggtnnnnnnnnnnnnnnnnnnnnnnnnnnnnnnnnnnnnnnnnnnnnnnnnnnnctcattgncctggagattaatctcgctgatgttcgactgttgcaacaggaccgtgaggagcctcatatcgggctcagcagtggcagcat

SEQ ID NO: 446562 - DNA, 1227 bp, Homo Sapiens
ttttttttgccatttaaacataatttatgtacatttatggctttatacaattatagcaaagattgttcttgtgtctgtaagtacatcaacatcaggcacttctcaaagtatcggaacaagaacgtggaatctgcactgttactaaactcgggtagcgaaatgcaggaggcatgactacgtcctgatgggacttacatggccacccctggccacactgccaggctgtgcccacctcaaggagaggccaactgtaatgccaggttggtctgttcgcataaaccacaatacattttttttaatgaatgattattcccaaactaaaaccagaaaagaaacttctcttttaaaattagttataaattaagaactcttaggagcttgaatgtaagaattttaagttggggctggggttattggtagcatatatccagcagttgaacaagtccaatttgtatatcgttggagaatgatttccattttaagcatccttatcctcttcttgtgggatgttccatttgatttactgctcactgggatacatgtgctcatttagacctttgtcagtttgtcaaagcagtacttttccaagtaatacatctattacctaaatatattccatacgtctatattacggaaacaatacatctttatatttaaaatatctgaatagctctataatacaatatgcttttaataacagtacaaaccagagaaaataaatcaaacaaggctgcataggtgatatcatttgcacatttcacaaagcaatcatgtacaataactgatatatactcattactccagaaagtcagtattcttacaggaaaaaaactaccagaggccacataatgtttgctttccagacagaccagatgcctttccctggacttcactgttctcagagagctaccaaggattcatgacaggatttcaacacacaatgggggcttgggagaggtataattacccagactcaggaggaagatatattttcctaagagctactccatgaagtagtaagattttaacagtgattttggctgtagttgcctctttaatgaacaaatgggggctctgaggttccttgtattatgatgcagtaatggcacgggaggaaagtgacagtacgtagtaatagaaattagtacacaagtactttggcaccaagttcagttacatacccgggaggctgtgcttagaggaacttgggtttctaaaaccagctcc

SEQ ID NO: 446563 - DNA, 722 bp, Homo Sapiens
atcattaatcagagattttattttgtgccactgactgcttaaattttcagtaagcctttggatccatgctaaaactctgatgatatcaggcacatggccatttaatcagcactacaagaggaaacagaaaagggggtttaaaagaaatgattaaagcataaagctacaacattctacgttaacgaaagttttaatacacatttgacttaaagatgcatacaatgactactgaatctccattcataggcagccaacaagatacgaatgaatttattaatttcaaacaaaatttcaggtagtgcacttaaaaaattacaaagcacttgaaaatggaaactaacaatggaagcaacaatgactataaaacatgatgggataactttaaagaaagggttcaagtattgtttgtaaagttcttcagacactagtctttgaaaagtttgtgcatttcccatctttgcatagtaaaaaacaaaaaccacacacaccacttggtaaaactccactgctctatgtgattcatgtttcataacatgcacttatgtgtactgctcagttatctagtaggagcagctctaattcaatgggctcatgcactatcccagatgagcaatgaagttagcgcacgtctcctcatccgggtgtcattaattaatgcagcaaaagtagagcaggtgaaatgggaacttgatcatcacttaacactaactcttgttggagct

SEQ ID NO: 446564 - DNA, 471 bp, Homo Sapiens
  misc_feature (16)..(16): n is a, c, g, or t
  misc_feature (24)..(24): n is a, c, g, or t
cttcaaaacgttgtgncgtttccnatggccccaaagttgtgttgtccgtccaagctcagctgcttcctctttcagggtttgacgcccatggtggacctgctggaccctggacccactgaagaggtcgggctccatggagcagaggttggcctccctggaggagcaggtggcccagacagcccgagccctgcactggatcgtgaggacgctgcgggccagcggcttcagctcggaggcggacgtccccactctggcctcccagaaggccgcggaggagccggatgctgagccgggaggcaggaagaagacggaggagccgggcgacagctaccacgtgaatgcccggcacctcctctaccccaactgccctgtcacgcgcttccccgtgcccaacgagaaggtgccctgggagacggagttcctgatctatgacccacccttttacacggcagagaggaaggacgcggccgc

SEQ ID NO: 446565 - DNA, 626 bp, Homo Sapiens
  misc_feature (406)..(483): n is a, c, g, or t
aaggcacagagtgaatatttatttatcacagaggtcaagccgaagctctaattttataaatcctggaaaagctggccagaaaagtacagagacttgcccaaagtcaaagctaaagatgcttccagaggccaggagagaagaaaatgttttagtagcactccataactggaccctcaaatctactcactccaagcatcccttcaagttcctgaccccaaagtaagaatctcagtaagaaaaaaatagagatggtttccaaataggaggtaggacaccatgagtggcatcgagcaataactgcaacagtctggctaaagatagctgccacttatgacatctgagcatgaaactagctaattttaaaatggccatttaatacatgcatgtaagaaatcttgtatccccnnnnnnnnnnnnnnnnnnnnnnnnnnnnnnnnnnnnnnnnnnnnnnnnnnnnnnnnnnnnnnnnnnnnnnnnnnnnnnctgtggcttccaatcccttatcttttcatttattcataaagatttctggtcccacccatgttccaggacaagcgacgcgtgggtcgacgatatcccggaattccggaccgaaccgcctgctttttgaaccactggttaatgac

SEQ ID NO: 446566 - DNA, 523 bp, Homo Sapiens
tttttttccttcattttgtttttattatagcatgtttgcttaatttacagcaagcagaaaataagctgggtcttgttttgatccaaacattgatgttttaaaggttgtacacaatatttgttaaaaagaacatataaaaatacctttttagaagcctctataagaaagaaaatacaaagtttaaccccacaactttcctctttgctagaactgtaaactactgctacagttttaaatagactttttgttgtttaaactatacatccaggaaaatctaaaaaaattaaagaaacgtgcatataaacgattgcatagcagaacatgaacattaactgcaaacagtaaagaaatgaaagttagaaatactatcaaatatacaaaggttctagaatcaatcctttaaacacattccacaaacagtatttaaaatccatcgttgtattctttacaggcaaagcctagattactaaaaccgaaattgaaaaaagtaatcctctaaaaggaatcgtttgtccataacgct

SEQ ID NO: 446567 - DNA, 1012 bp, Homo Sapiens
gtcaaggattttgacggtgtgttgcctagcaagtcccgcttattttgagagtgggctttcaccaggttcaggtccaagagagggcctgtaagggaaattggaccaaacactttcctcgcggaatgaaggtggccaaaggcacggcggtgggtaaatcttatgtttgcgaaacctgcgggtttggggtgtcccggtggatatagattccacgttgaatggccctccaggaagctccccttttggggattaggttcagggagcgctcgggtttggccggcggggcggtttgtttataaggggggagatcccaaaccgcttaattccatgggccaggatttttctttagggaacacagcttatgggccaatgtgccgttggcctaatggggacgcgggcgccaaaaggaattgttttagaaaagcgttttggagggccgagggcgacgcgacatgtctattttttttgtccactgtaccatctcggaataaaacatctgttttaattggccagtaaaatacattgcaaatcattagtattttataaacagaaacattaagttataaatccatgttaaaaattgcagctcagtgcagccccaacagctgtgtgtccaaaagtctatttttacaacattttcctccagtatttttgtgacaagaaagttcctatctgccatctagatcaagagcctgaactacagtattttcaaacaagaaccgggagaagtcggtacaaggatacgtcgtgctgtgtatttaaacggcgcttcccacacacctgccgtctgcatcccgggaggacgccctttgggaaaggcctcctcggcagtgtgaggtctggaggggtctgcctggaccccatttttaggatgctcccctccccaataaaacagcagcccccgcccctgccctgcacagcatctgggggttcataacacaggtgcaatactgaccatgggccctggagggacgtctgcactccgaagcccctgtacctcaaactcagagtttct

SEQ ID NO: 446568 - DNA, 1474 bp, Homo Sapiens
ttcgcaacaatcaaaaagaatttattccggacacgtggcatgcggtgctgggcagtgcccaccgtgggggacggggtggagggtgggttgggggcaggtaggaggccgagccccgagcccccgcccggctactcgcggtagtgcacccgctggtgctggatgagctgggagctctggccgaaggccttgccgcaggcgccacacgcgaagggcttctcgcccgtgtgggtccgcaggtgccggaagaagtgcgagcggccgcggaaggctttgccgcagtcggagcactcgtagggcttctcgccagtgtggatgcgctggtgctcgatgagcacggagctccagatgaaggccttgccgcactggctgcaggcgtagggcttctcacccgtgtgcagccgctggtggcgcaccaggttggagctctggctgaaggccttgccgcactcgccgcacttgtagggcttctcgccgttgtggatgcgcaggtgctgcgtgaagtgcgagctgtggctgaaggcgcggccgcactggccgcactcgtagggcttctcgcccgtgtggatgcggtggtgctggatgaagcccgaccagccgcggaagcgcttgccgcactcgtggcaggcgtagggcttctcgcccgtgtggatgcgctggtgcttcaggagcagcgagttatacttgaaactcttgccgcaggcctcgcacctgtgcggcttggtcccccgcgcgctgccctgccggctccgaccgaagttgactcccagctcggcagcccgctcgggcgcaccctcgggcccggccgctgcttgctgcacgagcgtcacgcgccaggcgccccgcggctgggcgcaagggacggccccaggcggctggcccgccggccgctccgcgctggattcaggcccgaagccggcgctgcaccgggccctgcggggaaggctcctcaggaggctgcgcagcgccccgcccgccccctcgtcaggggcctgagagccaggagagcgtggagcctgctccggcttgggctcggaggtctgaactgagaaccggcagaggccggataggtaacccgcaattgcccccaaccgttggcacggaaggggcaccggcgacacgggcggagccggagcaagcaagaatgtcgggaaccacgcgcggggcccttacgcacgcgggcaccacacgcgccgcgggccccaggccacccccacgtgggaattgggccagcaacaaagcccgggacaccaggcgcgcctccgaagtttgcccgtgcccctagtgtaataagcttgaccattagtaacccccagggctgtttggcgcaggccgttggcaggtgttgaacccccaacagccctgcctgggaaacacaattcgacacagtccacacaatcgggcgtgccgttgctcgcgtgtcatcgcaaaccccacgcgtgtgctaccagaacaccaccccgtgtgcgcgttccac

SEQ ID NO: 446569 - DNA, 445 bp, Homo Sapiens
  misc_feature (265)..(353): n is a, c, g, or t
  misc_feature (385)..(385): n is a, c, g, or t
  misc_feature (433)..(433): n is a, c, g, or t
attatttttattattacttatgaaaatctgtttttcagaaacacgttgtcagatatccaaggaatgtatttttaagcatgttcaccacagtaatattgtaataataaaaaatgggagacaacacaaatagaggataaaggattagttaaataaattttagcacatctgtgggaggcaatatagagaaaggatggatgtgggctctggagaagacatggcctgattccaaatcctgcctcagccctatgagctcatgggccttggnnnnnnnnnnnnnnnnnnnnnnnnnnnnnnnnnnnnnnnnnnnnnnnnnnnnnnnnnnnnnnnnnnnnnnnnnnnnnnnnnnnnnnnnnaaattcgtttagaagagaaacagggcatagtngagcatccccataaattgtagtattacacagattatggacttaccccnttagaagaagaa

SEQ ID NO: 446570 - DNA, 470 bp, Homo Sapiens
cgccgaccaggtttttattttcttttcaactattgttcttaattcccatcacaaatactgtatttgtactacttgagcaattttgtaatttattttctgtcctctgctgttcagtttccattcccatgtttcagagccctttgcagcattcattgggattatagccatttcgggttttgtccattgttctcagattctatcagccctttgaatcttggattatttctttaggaaacattcctagaagtgcaatttctgggtcacagtaagcaacacaaattgctataatacataaggccccaaacctcaaagacttcacacaataaaagtttatttctcactcacagagctgttcaatgttgagtatttggtgggtggcctttaacatggtgatttaggatccaggttccatctagcttgtcactctgccgtcttcagcgtgtaccttgaaaagccacgcgagggtccgc

SEQ ID NO: 446571 - DNA, 346 bp, Homo Sapiens
catcttcaaaataaaaatttattcaatctgtaacaagaacattgaatctgcacatttgcgcacaagttcacatttaaaaacagtggagcatatctgtaataaaaaaatctatgatacaagtggaacatcccaaccaccaggaagattaaggaaggagatgagaccactctatattctgcttcaaatgcctcaaaaatgtcccagagattccagggagcacctgctttaataaaacatgagcataaaagtttggggtggcttggggcaaaggtaacagtcagaggagagtcttctggacttgttttccatgttagaacaagtcctacaaaacaaaggcaggaaagga

SEQ ID NO: 446572 - DNA, 492 bp, Homo Sapiens
cattttgaaggcatcgtcattcttagaccagctaagagctgagggcattctctatctttgccagcagacagtgagactccaggattaaaattaaaagcccgtggtgcatcctttccttgacattaactttccacaaaaccttggaggagtcaaatcccacactgcacatactccggtgtctccagctgtgaagtgggaccagtatcaatacatgggaaagtgctgagaaggaagaaaatatttcaggtataatactaatccatcaaacacgttttattcaagaagcttggcaccaactttgtgccacatcctcaactcttcaatgaaaagagcggtgaccaactcgctcccgttggtccctatggcaggtgttggaatgaggtgaggctggcctcctctgtttgctcacagctttattcctctagcttcagataaaaataattataataggcaataaagtctcttcccagtgtatttactgtaactccaaaa

SEQ ID NO: 446573 - DNA, 196 bp, Homo Sapiens
attatattaaaatcaggcaatggtctgacaataaaaaggctgcttatggaatactgttatgttaaacttcacttacaggatgttaaatccttagaactaaggtattccccccagaaaaagattaatggaaacatcaattgcttttcagacttgatagttgctgcttcaaaaggtggttttacacaaatactaaatt

SEQ ID NO: 446574 - DNA, 576 bp, Homo Sapiens
caaattttaaatttttattaaaaatcacagtttttaaaaatgtccagtgacacaatgtagctcttctgaaatgaatggaaaacacaacacactgctaaccagtggagggagctctctgcagggcggggagacctgacaatgcagctgtagcctctgcaagtgaaaatccaggccgacttgcagtcattggactgatgtccaagtgcaatcaccatacagcagctacaggcagggctggctgatagggagtatgggagaaggacacgctcagatgaaaacatgcatgcaacgattttcaccactgaacacactgttttctgtgatagaaactgtcggccctgctgggggacaagatattcacggcctcactagccagtgtgatgccaccagggcagcctgcccctgatgctcctttgttacctgctaaagaaggaccataaggtaaaaggcaccttaccttatggagtgagcccagaccccagggaaaagcttgggtagaacaatccaaggggcagcctgggtgtgagaatccagcccaagctagctgctctagaagcctggaggcctttcccagct

SEQ ID NO: 446575 - DNA, 480 bp, Homo Sapiens
caggggggagttgtttatttacttatccatgtatacaagcttttaagacttgactattatttacatgaaagttgataccaataaggacgattagagagatcaacaaatcaatctcagtggtagaaaggcacaacctgaaaatgtaatggatttgtcgttcttaaaagtggaaagaagtaatattttccccatgaataacaataaagagatggctatttaaccagatagcttactcccagcttaattggttactgatgttacaaatctaaaatggaggtgtttttctcagttattgacaactcctctgtcagtatcctttaggaagagtgtttctcaaagtgatattctcgagccccttcagatggtctgtgagttaaataatgtgtatatgattaggctacttttgtgcctggcatgaaccagaattttaccgatacatttatttagagatgagttcattgatgtttcatcttcatgcat

SEQ ID NO: 446576 - DNA, 474 bp, Homo Sapiens
  misc_feature (164)..(271): n is a, c, g, or t
  misc_feature (310)..(310): n is a, c, g, or t
ttcgagtatcttgcaaaggctttatttgaaaattttgaaacttacatcccacagtaattcaagatgatcaccacaagaagaagaaagagataatacaaaaatatatatcacagcctaggagccagggaagaagggaaggaggaaggtggaaaaaccagtgagannnnnnnnnnnnnnnnnnnnnnnnnnnnnnnnnnnnnnnnnnnnnnnnnnnnnnnnnnnnnnnnnnnnnnnnnnnnnnnnnnnnnnnnnnnnnnnnnnnnnnnnnnnngtagacttggaggcagagctcccgatggccttgaaccanctgactccggtccctggcagcctaggtggagttagggaggcccaaagggaggctgggaagggaggactggctcagggggctctgaagtccaaagaatggcacacacacagacagccaggacagacaagacaaaagggactgtaggagaaagggaagggcaaatg

SEQ ID NO: 446577 - DNA, 1058 bp, Homo Sapiens
  misc_feature (288)..(341): n is a, c, g, or t
  misc_feature (1035)..(1035): n is a, c, g, or t
aaaaaaaaccaacagaggaggagttgattacgccggccccccggccgatgtggttcacggggaaagacgccgccccgcggtgcgagtagaccccgtgcatccctctcacgggggtcaaggaacggcgagcaggcacccgtaccgcacttgggccagcggccgataaaggtccgatcgaccagccggccacctggggaaccccgcccgtaaattgaaattaccgagcatgctgtggcaccgtaatccagctacagggagccgagcaaggagaactgccccgaaacccannnnnnnnnnnnnnnnnnnnnnnnnnnnnnnnnnnnnnnnnnnnnnnnnnnnnncgacacagcgagacctccgtcgcaaacaagcagactacacaccgacagagcatattcttaaaggttcctggtaggtcttatatcttactcagtagtctcagtcaaccagaggtattagtttaccaaacgtggagattaattcatgcaaatttatggttattaatgtatccaggccagggagtacattgttcaatcgggattagtttttagatattttgttgtttcacacggttggcaattaaaacatatttatacactaattgcattaatgcaaactccatcaacccaaacctttctaactatcctttttgaagtctgcccatgcaacatcagcgaggcaagcagaagccctgggcaccaggtgggaggggactgcccttcagtccatggtagcctaggcccctgggagcacaggctggggcagcgagagggtggatgcttccagacagaccctgactccctccacatggctgcctggatgtgacacaggcccaaccaaagctatggacaaaacccccagctcactcccacaggaggggatggctggttaggagactgtttttttgagggttggtttcatcattttaagcaatgtgttgatgttttaaacatcctatcaactctttgaagaaagtaaacttatggatccaatcacaacatggatgtggaaggggcgggaggcccataccagtgngcttctgcctgctgtgaacacag

SEQ ID NO: 446578 - DNA, 627 bp, Homo Sapiens
cacccattattcctcagtcccaacacagcagttcttttcactcttgctcgtaactttcaggccttacccacatgtgttcctatagagttgcatgtagctaaaattatagtgtgctgcctaactttgtgctaataacgaaggacacacattatcattgcctctcagtggatggcacctgaccccatttttccaaggattctattttccagtgaatttttgtcaccgagttaatttcccaagtctgatagcatgaatgcttatttgtgctgtgaaaagcagagcagcctgactcagctttccattttcataggataatatgtgccaaaaaaggtttattttcttggtaaaatcagaattgtagaattgtgctatttttaatttttaaaatttttggttagagcttatagacattacttttatgattattttgcgtgctaaataagttaaagggtatgttttgaactatagcactaattaatgtgtgtgatcctagtatgttgatagctttgattttgtgagtggtttactagtcatttattatgattcccatgaactctgatatgattcattgtggttttaactcaggttgaataaaagcatccatttcttttataggaaggtttgttt

SEQ ID NO: 446579 - DNA, 501 bp, Homo Sapiens
tttttttaaattagtatacatgcataaaaccttgtatcatcaatatacaaattattctgttaggggacatgtttttgttctccatgtttctgtttctattgtggtatgagttgtatttgtatcactgagataacctattgttatattctaattcattgataatatgttttgtaagaaaagctgacatccttcattgcaagtgaagaacaggtttaccatgaaatgaatgcctttattcaacttagagtcctaatgtttctgatttcacattcttgttgctgaaatgcagaagaaacagctacagcaagagcagaaggaaaactcttagacttaatgtctccaattgcaagaattgtttcactaaagaaacagtcatcattcaactactgaatttgaaagcctcagcagtttcaatgacaaaaatcatttttgattttttaaaattaatcccaatggcatgataaattttcatataaaaagtaaagtttcaatttagttttt

SEQ ID NO: 446580 - DNA, 693 bp, Homo Sapiens
actggtgagaaccctatgagtgccaaggaatgtggcaaagcctttagtagtggctcagcacttactaatcatcagagaattcacactggtgagaaaccctatgattgtaaggaatgtggaaaggcttttactcagagctcacagcttcgtcaacatcagagaattcacgctggtgagaaaccctttgaatgtcttgaatgtgggaaggcctttactcagaactcaccacttttccagcatcagagaattcatacagatgaaaaaccatatgaatgtaatgaatgtggaaaggcctttaataaatgctcaaaccttactcgacatctgagaattcacactggtgaaaagccctataactgtaaggaatgtgggaaggcttttagtagtggctcggatctcattcgtcatcagggaattcatactaataaataataaaaattaaagcccctgtcaccttcctcatattttaaaccataaatcatgtctaatagttaccctcttccgtagttttttttaaaactttgtatttaaattttgtatccaaatgtatttcattccaggttataaattcggagtctaaagtgacattccctctctcccccagtcatataccgatgccagctgttctataattctttcattcattgttttgttctactttcttggtgacacattatactcatgtttatattt

SEQ ID NO: 446581 - DNA, 563 bp, Homo Sapiens
  misc_feature (488)..(488): n is a, c, g, or t
acaaaagaaagaagtttattgaacttacagttccatgtggctggggaggatacacaatcacagcagaaggaaaggaggaggaagttacatcttatgtggatggcagcaggcaaagagagaacttgtgcaggaggactcccgtttttaaaaccatcagatctcatgagacacattcactatcacaagaacagcacaggaaagacccacccccatgattccatcacctcccaccgggtccctcccacaacacgttggaatttatgggagctacaagatgagagttgggtggggacacagagccaaaccatatcaggcagtgaatataatcacatgcacctgagggttgagggaactaagagtgacagcagttaatccctgggcccaaggggtcacagccagcaagtttcatcaggtttcaaacccaggtccacacatttacccactgtgggagacttcttctgtttattcatagttgcttttgcctacancacaaaaatgagtggtacttgctaagtttgacagtaactacattagaaaatagtaaggcagattaagaggaaaaa

SEQ ID NO: 446582 - DNA, 501 bp, Homo Sapiens
gactctcataaacaggaactttattaaactacatgttacataaaagaacatataaatggaccattaaatacattcagtttattttaaacaaatttacatagatacttatttacatttctccattgtattcttaaattatttttccaagcttactaccgataaaaggtaatacaatgatcatctgctcacacagatgcatagagaagttgtccacagggctaagtaaagcaccacttcccaggaaacacagcttattagatcttccagcaacaactcatgctgaaggtgctctcttctgagcagcccttgaggtgaggcttttgctttagagatgctgggggttggttctgaggagctgacccagggcagagatgggtccttgctgattgacctgacttggactcacagaggtggaaagacctgtggagaccatcatcgaggccatggccccacatctgtgatatgggaaacaggcttgggaagaggtggtgacttcccaaa

SEQ ID NO: 446583 - DNA, 189 bp, Homo Sapiens
accaacgaagtcagggattctgtcaccagcagactctcactaaatgaaaatctattttggggtaatgaaaatgttctaaaagtgattgtggttgcacaaatctgtgaatatgctgaatatgccaagagccattgaattgtacactttaatgggtgggctgtatatgtataaagttgttttttaaaaatg

SEQ ID NO: 446584 - DNA, 502 bp, Homo Sapiens
  misc_feature (76)..(89): n is a, c, g, or t
caattaactttattgaatagccaagttgataagttagcatagatcaaacaatggtctgcatgggttacaaatgacnnnnnnnnnnnnnnaacaggaataaaacagtgaaaattacaaactgttaaaaggaagacaaatcttgtctccaacttttcagagaagcaagatttaacacagcacattgaagatcaatacatatttgaatttaagaacaagaatttaatattacaatattatacactactttacaaaattaaaatttctatataaggattacatttgtaatagttaacaaaattttgaaatcacatttggtggtcccctagataatagctgttatgcatctttgattagaagaaataaatctttattctaattattgcaaaacagtctattagactcaatacattaaattaaaaacagtgaaaatatatgcaaactaaaataaatggtactgcttgagtgactattagtatgtcagacttacagaaatgttatttta

SEQ ID NO: 446585 - DNA, 567 bp, Homo Sapiens
tgcaaaagaaatgttagctgttattattcgatatttttatacattgttactcattatgacatttcatttctgcattcccttcttccccaggggatgcagtgaggggagagattgttggggtacagttctttctggggacagagggatgcacaaggtaaccttggggactcctcccgcccaagtattcttagattacctgtgcccgctttgccccccttccttctagcagtagctgtggtctctcacaagtcagtttccatcccagcaccccagtttctgtggctccctgcctgtggtacccactggctggatgctgttgctatggcaacagcattttaaaagccgtcggccctctctgaggcaacaggcatggatggagatgggctgatcaacgcctcttgcatccttgggcctgtctggatggaaggcagggaggggaatgcaagaatcaaacctggctttgggtggaggactcaggccccagccccgggtgttccccatatgcacccccactttgctgagtcacacaggaagagcacttggctacaaacgcagattccagccacc

SEQ ID NO: 446586 - DNA, 560 bp, Homo Sapiens
  misc_feature (522)..(522): n is a, c, g, or t
ggggagtaggtgagtttattgggacttacccccaggtcaatcctgggcggcgacaggacagctttagagatctgtgcttcctcccaatgctaaactgctttcatgctaatcttctgactgtttacttaccggctaagagcgatgggactgttttcattggttggttctcagatactctctgggaagtttgggttctcagggacacctgctcctcagctggggattgtggccatggcctaccacctgcctttcagggttcaagcaggggacatgcaccctttagtaacctggaggggacccgtcacatgatttttaccccaatgaccatcatgaggaagccgctggctgactgtgatatgcccccaggaggacaagggagagtggatgctggaaagacagagcgggggaccatcaccagggaaagactttattcttgggaggacattgaacctggggctgggtctgagtggagccgctgttcttctcctgtatccactgttctactcttgggctttctcattntcagctctttcctttcctgccttctcattgctgggctc

SEQ ID NO: 446587 - DNA, 476 bp, Homo Sapiens
  misc_feature (314)..(322): n is a, c, g, or t
ttttattaggaatttagcttttattcaaaattaaataagcaaaagcaaaaattttaagaaacttttacaaattacttacataaaagaaagttaataaggacagtcacaaatttgcaacaaataattacaaaagtttctagggcagcatgaatataaaccatgttgcagcatggtgatctaactgtgatatgaataaggcataactaacatttgcaccgagaccagaattaaaaacaaaaacaaactttaaaagcttagttctatattaaacttcttctcttttcccagatccttaatgggtttatactatgcannnnnnnnnaaaacaaacacatcatgtcaaactataaattacacaaatgggcagttaatgtgaaaagccccctaaaatgtacaaactaactggtactgaattgagttctccctttacctttatgtacaattaaatgtaaaccatattttcacagttttgagtg

SEQ ID NO: 446588 - DNA, 1004 bp, Homo Sapiens
gtccaacatatactggtaacactgtgcatagtaagtcatctgggcttctacaaagtcattcagacagcgaaggtgatgggcatgtgtactgctgattccctctagcagaagtctggtaatctctgcttgacgatcaaattcactttgagttattcttaattcctgttcagattttgtcacctcctctgcccaaatcataatgttatctccttcaaggcgagctgagtttagttgtgaatttctagtttctgcagcttttgccttttttagtctcgtttttgcagcatccagatccagtctcttattttgcaatagtttcctttctttagcaattgttttgtaatcttccttctataaagtttcttaaaggagtaagaaaatttaaggctgacgtttgaatcagttctctgtctgctgttccaattcttttttgggtttctccacatttaataagggcattaccataagctgttcctgggccaaactcagtccctgcatcaatcatatattgtcccaaaagttctgggttgtttatacgacttggagcttttctatccagtttctcataaacaaattcttctatcctggcatttggatttggctgcaataacacttcagtttgtttcattattttttctgtccatattttggtacattcagctttgctaaggaggttctctaagtgagcatccaattctgtcttctcagcctggccaagcttttcttctgtgaactgcacggcgcgactgaggaaggtgcctgcgtcggccgccagcttcttcacgttgaagtccatgatattcatcctaggcggcagccgggcggagccggccgacctagcggcggcgaggcggaggtgccgcggccgggctggggcgcagggctagagcggcgagggcagacgtggtaggtggagggaggcggcgccagccccgcagccgcacctgtcgtttccgtgaacggggaggatgaaggcggggcgagggaggagtacaagcgcgcgg

SEQ ID NO: 446589 - DNA, 1803 bp, Homo Sapiens
gtctctagagcgtccacggctcatttgagatacaatagatttattttacataaaagaaaaagcttgctgttaatgaaaaatccagtagaaaacagttctgctttaagttgaggctcaaaagtagaagctgcttattagtgaaacctcaataaaaagagaattttgtaagaaaacattcttggcatgaaagctctaacataaattctgtaatgaaatatttaccatgcaactttattggcagaaaggccagtttctgatggctggtattttcagtctcttaacacattaacatggaagatacttaacctgctttatttagagttaattgtatataaatacaaagtcatgatgggcaacctttccatagtccacctacttaattgagcagttctaagtaggtaattggcaccttgcccttctggtttcccctttcccccattagccagtctgaatccattccaacaacactgaacacagtgatcacctcatctgccagaagtgataattcagtactgtttgctgcatcataatcatagagaaccctggcctttctgctgccactacactccttaaggtcactgaggttggaaggagaggtgattactaggccacttgttgaagccatggcagaagaaccaatcgcatttggtaaaactgatggtacaggtgtcacagaagtctgattgttgttactaagataattggatggaaaacttcccagttgtttctggaggtccaacatatactggtaacactgtgcatagtaagtcatctgggcttctacaaagtcattcagacagcgaaggtgatgggcatgtgtactgctgattccctctagcagaagtctggtaatctctgcttgacgatcaaattcactttgagttattcttaattcctgttcagatgaatttctagtttctgcagcttttgccttttttagtctcgtttttgcagcatccaaatccagtctcttattttgcaatagtttcctttctttagcaattgttttgtaatctccttctataaagtttcttaaaggagtaagaaaatttaaggctgacgtttgaatcagttctctgtctgctgttccaattcttttttgggtttctccacatttaataagggcattaccataagctgttcctgggccaaactcagtccctgcatcaatcatatattgtcccaaaagttctgggttgtttatacgacttggagcttttctatccagtttctcataaacaaattcttctatcctggcatttggatttggctgcaataacacttcagtttgtttcattattttttctgtccatattttggtacattcagctttgctaaggaggttctctaagtgagcatccaattctgtcttctcagcctggccaagcttttcttctgtgaactgcacggcgcgactgaggaaggtgcctgcgtcggccgccagcttcttcacgttgaagtccatgatattcatcctaggcggcagccgggcggagccggccgacctagcggcggcgaggcggaggtgccgcggccgggctggggcgcagggctagagcggcgagggcagacgtggtaggtggagggaggcggcgccagccccgcagccgcagctgtcgtttccgtgaacggggaggatgaaggcggggcgagggaggagaacaagcgcgcggcggcagcgccaaggatgggtcagtcggctcggagaacggccgctaacgtcgacgatgggccccgcgggcgagccggagatggacgggcgaccccgccgtgtggacccgggtcccaagggaaaaacccgct

SEQ ID NO: 446590 - DNA, 407 bp, Homo Sapiens
tttaggatgtttacagataatgctttttaatatttcaaatatttttttaaatctcatcaaaaatgttatcaccttaacagtactttgcacatgtggaatttcatacctaaatttgatactattttggtttatttatggctacttacaagagtcacagtaataatgtccactcatcagagtctttctttggtagagcctaatgggaccagacagatgaactgttatgcaaatgagatggataaagcaaattcatgatagtatgaattataagggtttttgtttaatggaaatacaacttaaaaaggatttccatatttatccccatcattattttggaagcttaataccctgttcaggggttgaagagtttgaatagctcacacaatcctgtaaaaatgacaactggc

SEQ ID NO: 446591 - DNA, 453 bp, Homo Sapiens
caacaatacatttttaatatagctttaaaaaggcaaacgaattttaagatcaccaggggcaaatgcagagcataagacattcactggatccagttacgtgtgtaaatgccctttaccaagtcaatactattaaagagactagtggttgtggcagaaattgtttctgcttataagggaggcaagccaggttctagtgtcctcagcaaaggcacaaactcatagcataatgccaggccagtcatttaacttcccagagtctcattcccttcgctgacaaaataggaagattgaatcagttgatttctcatgattaactattttcatatccagtgaattttcagcttatcagctactcaattgccatctgcttttcttctctgtcttccatcacaatgcaaatgccctcccatgtgtatctcgtgattggctggttgttccttctaccactcttgg

SEQ ID NO: 446592 - DNA, 1035 bp, Homo Sapiens
  misc_feature (155)..(156): n is a, c, g, or t
  misc_feature (595)..(605): n is a, c, g, or t
  misc_feature (809)..(928): n is a, c, g, or t
gattggggtggatgcgccacagaatgttatttaatgtgttgactggacgggggtactctctcatgtgggggggctatggctctactggggtcgatattgatataatagtgaagagggggggtgcgtatgttgttgtgtaaagattcttttttctnncccctcccatggtgagattgtaatgtgttacacggagggggacgaattattaagtttgcaccacgcacgtcgagggttcatcaaatgtgtttgtgtctggtcctcgcgcgacacaatagataaccaaatatgtgtttgctacttccttaaaaccctccgttgttgttgtggggagagttatagctcgtttgtcgggtgcgccgaacggttgcggtatctggtgttcgttatatctcatcacgtcgtctgctttcgttatttcagataatgtcatcgtgcggggacgtggtagagtataaatttactttctcaagtgttttgccgtggtagaaatctcaaggtggttttatttagacccagattaggcggtctttgtggagtacattagatggcgtggggtttgtttgtaaaacgagagtgtgttattgttccgccgcgnnnnnnnnnnnatgtggaagaatacaacgactccgtctaacagggtctgaagtatggttcatttggagaaaattgtttacgctccttttatttatattttgttggggcgcccgggacgcaccaaagaatggttataagacgattttggtggggttgaggggtcagccgacacatgtatttgaaatatggtgaatattataggggtgtttggaaannnnnnnnnnnnnnnnnnnnnnnnnnnnnnnnnnnnnnnnnnnnnnnnnnnnnnnnnnnnnnnnnnnnnnnnnnnnnnnnnnnnnnnnnnnnnnnnnnnnnnnnnnnnnnnnnnnnnnnncaaaaactttattcttttctaataaaaatgatatatgttcattataaaaagtttcaaacacacaagagtctgaagaatgtaaagatcacccaaataccacagcccag

SEQ ID NO: 446593 - DNA, 485 bp, Homo Sapiens
actgctgtgtagtggccagggctgcacctgccatccccggctctgccactttagggccttctagaggcagtgtccttaggaagttaggtctgaggcatgggttttctgctcctgtgcagggcagctgatgggataaggtggggaaggacggtcagtgcttgggccccagctggccagcctggcgatggggaaaccaaacccatgtcccccagcgaagggccagagtgggaacctgtcctcatgcccttcgtcctgaggagccctgaggtgggcagcaggggccaggggaagttttcagtccttcatcaaagagaacaacatcctcagctccgcacccctcatcctgtatcagcacttaccggtgtgtgactgcccttgtcagctagcatacggtgggcccacctggcccactggctgtttatgccactgatttatgatagggaatattatctttgaacccaatgaagtgttttctcccccatcac

SEQ ID NO: 446594 - DNA, 491 bp, Homo Sapiens
  misc_feature (116)..(129): n is a, c, g, or t
aaaattgagattgtctaccaaaataaatcattacaaaaagtatcactatagactggcctccctaccaataagttttgttggaaattaacctttccctatactaagcctgggccagnnnnnnnnnnnnnncaaatgcaggtataattattctacagataagaaaatgaggcttttctcagagacattaaaaaccttgtttaaatggtcactgtactggtcatctcaggctgccataacaaaacacaaaacccatagactgggtggcttaaacaacagacatttattgacatttatttctcacagttctggaggctagaagttcaagatcaaagttatggctgattcggtttctgatgagggttctcttcctgcctcgcagatggtcacattctagctatgacccatatggcattcctcggagtgtgcacacagacagagaaagctctggtgcctcttccttgttttatacgggcaccacccctactggatta

SEQ ID NO: 446595 - DNA, 491 bp, Homo Sapiens
tagccttgctgagacctgttttatttgtaaaacatctcttggagttgctgtgaggataaaatgacaacatatataaagagccaggcttcttctagaagaatgtccttgggtagcatgtacatttccatccttccttttagagagtgggggtaataggataccccctcctccaggggtatcccctctttctagggacctacccaagctaggcctttcttccagtgaaacgtgcatcccgagggcttctaggatgaagtagtccactggaaggcaccagctcttccttttatctctccagagctggacagtgcaccaggggccggtactggttccccagctaggagacaccttgggcggggctttgctcgccggaagcacgcagagcgtggggaggagggccccctctgcctgtgtttgtgccaacagcacccgcgctgccgcgtcgggttccggcggccggagtcacacatgatgtcacagacaatgacaca

SEQ ID NO: 446596 - DNA, 586 bp, Homo Sapiens
acaatatgcacagaattttttaatgaaccagtgagtgttgtttcaaagccaacacatatattctaattatttcttcatgccaagaagctggaagtactttatagcaattggctccattcctgacagttattgggatttaacagctttattggctgggggaggaacacatgaactcctaagggctaatacaagcatttgggaaattatctgttgtctggcgtcagcactggaacagggcagcagagctggagagtaagaagcagagctggagagggagaagtgtttgctaagtcaccgcgcaggaggagacagaatcagaggtgacgaatgtaagtccacccattggcttaagatccagtatcctgagtgagttgcacagatcctctccttcagtcctctcaggtaggtgcagtggtgtctccctggagcacagagaggccaagtatctggcttcaaatcacaagacttgcagagggtaaggctggtgtctaaggtcccatcagttgaactccaaagcaggctgtctagaaattgggttcagagacctcccagcctggaacccagtttgatggagtcccgcattcag

SEQ ID NO: 446597 - DNA, 446 bp, Homo Sapiens
catagttttagataataaatgatagcttttgtttaattacaacgtcattaatacctggggatttctattttatcatttactcgactttaggcttaaaaaatatttttttgaggatttctcagttcttccttctatttttggactgtagtgttcatgcccacctcccttgcccaaatcaatctgccaaaaaatccagttctctatctcttttcatcttgtgaatctgtatcttattatgctgatctcttactgtgttgtaactctacttctgtgctgcccttttattctttgtcaattctgaccttatctctaagaagtgaattgcaaatatttctgtctttctgtccaagttgaatttcatattttctgaatcatgtagctgccctccatgtgacctagaaagccctttgatgatccatatttagctgtatccatcactcaacaga

SEQ ID NO: 446598 - DNA, 523 bp, Homo Sapiens
ggaaaaaacacgctttattgggtagacaaataggcctgatgggaaggcctgagtcacagtgcactggggagtgaacaaaagtaggcaaagtgcttgaagcttcccctttgcccccaccttaacctcctggggaggcagctctggacactcagtacccagacctgggctcagcaaggcctggggtgactgtgcccctcactcctgctgcctgatctgggcagccccacccttcactggtaagacagaattctcaagggataggcgcagagaggagcccgcctccctggttcattggagagtaacagggttttagcataatgctggccagagccagtgtgccaggtgctgccacacaggaagctgacagccctgctggacgggcgggagcctctcgggccctccggactatttatagctggaggcctaggctgctgacctgtgacattcctctgctgccaccccatcctggagcaaggcaagtgcagagcacactcctcctcctcccctcctgttctttcctcac

SEQ ID NO: 446599 - DNA, 923 bp, Homo Sapiens
  misc_feature (29)..(29): n is a, c, g, or t
  misc_feature (99)..(99): n is a, c, g, or t
  misc_feature (156)..(156): n is a, c, g, or t
  misc_feature (179)..(179): n is a, c, g, or t
  misc_feature (820)..(838): n is a, c, g, or t
tagtgtgcaccagagtgacagcctgctgnacggcgggagcttctcggggccccttcccggacttattttatagcttggaggccctaggggctgctgacncctgtgacattccttctgctgcccacccccatcctggagcaaggcaaagtgcagagncacactcctctttcttcccctcntgttctttcctcaccccagggagtagggtggttttgattttcttcctcctccttgagtttcccagctctcgagttgctggtgttgtcagtacctcacgagaaggccctcattcagcaaagagagctgcccttggaatattggtgcccaccaacataggaatctgctcacccttccctaccgttcatcagcctttgggccactctctggcctgctggcttccagatgccaggcatggttagctggttaccctggccggtctggagcagctgaggaagaggtgcagagtttgggaggaagaaaggggtggagtcagggatgtcctctggggagatagcacaggaggggcccagctgacacctcccccagctagagctactgagaaggaagcctgggtgaatacaaaggtcacagggagctgagtgatctgagcctgttatgaaaggtgtagctctgtcagcagattaagttcctgctccccaaagagggtgctggcggggagggtgagggaaggcttggaaaggtcgcacagagtggggaggagctggcaaagaactaggaaccgggaagtccctggggagaatgtcaagccaccgagctacagatgccagcatggcagcaatttgggtgccagggcagcctnnnnnnnnnnnnnnnnnnngaaccagaggtttctgaggacacagatgttgctaggagaagctaaaaggggtttgtttgagatctttgtattttgttaacaaaca

SEQ ID NO: 446600 - DNA, 805 bp, Homo Sapiens
  misc_feature (21)..(21): n is a, c, g, or t
gtgtcccaaccgtggtttatntgggtggggccaagggaaaaatccaaggcattctttttcccggtaattaattttacttcttcatttcataacattcgatatgctctggaattctttaaagtatctcaaagtgttttctggagaaatctttttactacatcattatacttgatattccatagcattgctatggactttagaataagaggcttaacaattaggctttggttttaatgtcatctggacagaagttggacatgctttgataacacaattcaactactacacatattattgtaatgtgaaataacacatttaaaaagacgaaggttcccctttcagtagttataatctgtattattcaagactgctgcaaaactcacaaaagaatgatatggataacaagaaagtataggaaaggggtaagacactcacttaaagctttaccagaacacaacacaaagcaagaacatcaattctctacatttgtctataaggcagatggcaactttttatacaagatctaaaatatggtgcttattaagaggtagaaaatactaaaacagcatttaagaaaaacatgttgagttatccaaaacaatcagttattttgctaaacttttacaaagtccaactgctgtgtggaataaactgtatgttttatattaaactgggacattccatactcaacagggaggtgatcaaacggagggacaaaaaacggggtggggtgggaagcaggaaacagtctcttaacttctcaaggactcagctctcactaaggagaaatttcctactgtctccc

SEQ ID NO: 446601 - DNA, 614 bp, Homo Sapiens
gcacctagacctttctttggaaattattatccttctttaaattcaacctttagaagctcctttaatgagagggttttagggtcttttggttgtaaaccctctcagagttcatttgtctaaaaatgtctttattctcattcttgaaagatagtttgctggatatattgttctaagttggttattattttaaaagatgatactctatcatcttctagcctccgctattgaatgctatcaatctatttgtcattccttcataagcaatctaactttcctctctggctgcttgtgaataacttctttgtcttggatgttttgcggtttccttgtgatatttattctgctagagatattggtctttctgaatctggggaataagtagttttcatcagttttggaaatggtcatccattatctcctatcaaacatccatttgcacccattctctttattttctcacaactcagatcatatagagttggggtcttttcattctatcctccatttcctttagcctctctttttatatcttccatctctttgtctttctgggacaagtactttcctcaaatatctcttctagttcattaataatctcttcaactttgtcacaa

SEQ ID NO: 446602 - DNA, 767 bp, Homo Sapiens
  misc_feature (517)..(612): n is a, c, g, or t
gcactcatagttacagtttattacagtgaaaggatacagattaaaatcagcaatgaagaaaggcacataaggtaaggtccaagagaacttccaattatcctctcctggcagagtcttcaggataatgcttaattctcccagcaatgatgtgtggctacaatgatgtgtgcacagagtattaccaaccagagtagctcacccatgcctaggtgtccagggcttttactagggattgatcacattggcatgcttcactgcccacatggctaacttagtctcctcagcttgaccttgcaaggtcaagctgatactgcatggcccaaggcccacaggtaaacaaaaacactcttatcaggcaagatattctaatggcttagaggttatctcccaggagccaggcaggggcctattctttatttggaatgtccagggttcaaacatcccaagttcatcctgtatcacacaaaaggattaacttcaaaagtggtattcttggccaggtgtggtggctcacacnnnnnnnnnnnnnnnnnnnnnnnnnnnnnnnnnnnnnnnnnnnnnnnnnnnnnnnnnnnnnnnnnnnnnnnnnnnnnnnnnnnnnnnnnnnnnnnntcgtaatttttctaaaaagtggtattcttaagtcaagttactaccctgattgatgacagggagagagaccaggaaaccactgtgttgtaatcccttaggaaaccttacacctttacttgctttattatcaggtaatttccctcgtccgaatcgcc

SEQ ID NO: 446603 - DNA, 915 bp, Homo Sapiens
gggccttatttccttttattttgggaaaagtcccaggggtttcaaaacattcccaaaggttccatccctgtatccacacaaaaaagggattaaacttcaaaaagtgggtatttcttgggccagggtgtggtggctcaccccctgtaattccccagcacccttgggaggctgagttgggaggactgcttgagacccaggaattcgaccaccagcctgggcaacgctagtgagatcccatctctatcgtaatttttctaaaaagtggtattcttaagtcaagttactaccctgattgatgacagggagagagaccaggaaaccactgtgttgtaatcccttaggaaaccttacacctttacttgctttattatcaggtaatttccaggatgtaagccatacagccagaaggcagggtacaaaggagaggaggcagagatggtacactcatacagaagcttctcctgattgtccactgaatagaaggcaagctttccctcctcaaggttcagccagatgcccaccaccccaggtctgtctgagccaaggacagtttccttgaccatgtgccatgcagagagctggctagtccccttccattccacacaacaagagtccatagtccttcccaggacctggtcgcggctcatctcccaggaagccaccccaactgcccagtggctgcaattcctagtgtccacttcccagtaatgctttccagaagacagggcctgggaacataagacctggctggtagaaaacctctcacagctccagcgatagggttgtgggcggtgagacacagtcactgtacgggaatccttggacacctccaggctgcaggaaaggctcttcaagttaaaggttggatggatggcccactgagcaaaccgagaagctctcctgagtgcagggtgg

SEQ ID NO: 446604 - DNA, 460 bp, Homo Sapiens
aattacatatctttcttgactatactgatttcttattttggtcactattactaaatctctgttaatattctctcttttaactgaaaagggatgggatagaagggtttgcaatgccatattattggtggagggctgttttaacatctttgaagtatggcttgctgaatatctttaccaacatcttgaatatatattctagtgtccacaagatttagcaaaaagataaagcttgggtggaatatcattttaaaatgttcatgttctgttctatattttcttcacctactctccaaatattgtaatgcaaaaagtctcagtaatgatttggtagtattaattttgtggtcattgtttctcttcgataaatttattttcattaaatacttattagagggttttgaaatgtttttcaaatatgtgaaatgtgaaactgctgtcttttatattaaagtaattaaag

SEQ ID NO: 446605 - DNA, 730 bp, Homo Sapiens
  misc_feature (153)..(153): n is a, c, g, or t
  misc_feature (157)..(208): n is a, c, g, or t
ggggggggaagcccgacccctattttatgttccccggggtttcgttgggaaccaggtttggccccgggtgccgtttcccttatgggggccccggcacccaaggaaatgttttgaaaaagcttttttgagggcggaagggttcgaacatgttgngttnnnnnnnnnnnnnnnnnnnnnnnnnnnnnnnnnnnnnnnnnnnnnnnnnnnnttttctaccatgaacatttatttttgttaaagcagattataaattttcatcagtacaaatatatataacttacatttgattgtaaggccaacgttcaaaagtaaaaatgagatgagctctcttattgttatccgaggtcaagaggctgcaactgtcaaggggatgttctcaccaaaagggggtttgggggaagaggacacacacaaagctaataaaaccagaatccccatccccacaaaactcatgggaacaaaatttaaaggataaaacaaaacccaccaagacccatattacaaaccaatatggtaacctgtgttcccttctatggtatgattatgtcatgttaccttagtgttaaaggattaacataaggaaactgcagcaatatataaaagatatattctctatagagcatatttcgattgattccattaaaataatgacattagaattccatcataggtttaaaaccaggacaatactgcttttcctttatttaaaaaaaactacaacctagtgacc

SEQ ID NO: 446606 - DNA, 411 bp, Homo Sapiens
caagcagtatctactaacttctctaaggaggctgtgttatggtgaaccatttccagaacaagcttctcataccaggcaggaaactcctccttcaaaagctcagcaacttcctgttcttcctcccaggcttccttgtgtgttagctgactgcttccagtactcttgcacgtccaaatgcgctcactgtacctttccaagcgggcttcatactcttcccgggtgcggaaggcctcctgagtgtgcgggatggtgaagagcggctcctctccgggcaacggcttcaccagcgggaagggcttgcggcccaggagcggcgccatcgcggcggcggcggtggggactggcggctgctggggccggccccgcggcgcagcactaggccccgcggcccggagcgagcgccaggcgccc

SEQ ID NO: 446607 - DNA, 478 bp, Homo Sapiens
cttctccttccagggccggtgcgcgccccccgccggatcccctggaaggatcggcgggcgcaggctgagactcagcctccaggcccgcgagcggccggggcgcgctgacagctgccccgggccggggatgcgcggctgacctggtctcgcgagccccaggccctaccccggcccagcccggcccagcccggcccgcgcggctggaaaaggatactcccgggtgcggaaggcctcttgagtgtgcgggatggtgaagagcggctcctctccgggcaacggcttcaccagcgggaagggcttgcggcccaggagcggcgccatcgcggcggcggcggtggggactggcggctgctggggccggccccgcggcgcagcactaggccccgcggcccggagcgagcgccaggcgcccgggggtggggtggggcaagggaggggtgagagggcggcgcgaaatccggctccctcaccgaccctt

SEQ ID NO: 446608 - DNA, 520 bp, Homo Sapiens
  misc_feature (184)..(192): n is a, c, g, or t
taaattttaaaaaatagtttattttttaaaaccattaaggcaaaactgtaccctgaaattaactctgtacattcatcagtcttacagtaggacatcccaaacacagaagttcccatatattcaggatataaatcaatacatgtggtcagttcagtctcctaataggaaaacgaagacccaagannnnnnnnnaaaattaaggttattttatagccattttctaattgcctggaaccaatcagttcatgtgactagaaaaattactttcgctcttctctgcacatccttgattccggaggtcctgggatgcccgctccccccaccgggagagaggtatgaagttggagagaggatgctggggcctgtgtggcagttcctactttggaactgcacctttttagcacaaataagaagctgtaagccccaaaatactgagagtataaggcactcactagtagagcacatgtggagagtctgggcccagtccttgctctgggatctgcctcattctcgcgtgtgt

SEQ ID NO: 446609 - DNA, 410 bp, Homo Sapiens
  misc_feature (26)..(27): n is a, c, g, or t
  misc_feature (31)..(31): n is a, c, g, or t
  misc_feature (48)..(113): n is a, c, g, or t
ggcgctgctcgcgtccccgcgccatnngctngcggccgcatcggttcnnnnnnnnnnnnnnnnnnnnnnnnnnnnnnnnnnnnnnnnnnnnnnnnnnnnnnnnnnnnnnnnnngaaaaagtctttttggggaaagcgttggctttccccaaataaaaccattggaacacttattttggtacttattttggcaagattttgttgccaggaagaaaaaaagtctaatttttttaatgcattcttcactgagcatgctggtgaaggatttgagtgatcttctcgctgaatactagcggctttctcttccaccaagcttctctttgctcctctgaggaggcccctggcccaccatcgaggtcatgcctgtcactccccaggctgcccctcccggggaacagggtcatgcagggt

SEQ ID NO: 446610 - DNA, 145 bp, Homo Sapiens
ggaaaaaaataatatttattaagttatataaatgtaaacatttagtataaatttaaccagaaagagaaatatggctatactggtggaatcagtggagggaaagagtgtgtctttgtgtgtttggtgagaggtgggtgggaaaggt

SEQ ID NO: 446611 - DNA, 438 bp, Homo Sapiens
actggggggtttgactttatttgaaatttttggtagattgttcatttggttgactcctcccaagttgattcctgatgctgggtgaatacatctgtgcactgagctccgtaccacacactttggaagggtccaaggaaggcagtctatgcccccaaggggctcacaggctgtcagttcaagtgggagggccatcaatctttcctctggccaggaaaagactgaccattggtctccaaagatgctggatagcattgccagatcacatctaaacaactccgactgcagtttcacacaggtggtggtccaaaatttgtaaaaaagtgaaagtgatgtgtgaagatagggctgagatgtgagtactatggattcaagcctcattggaaaagctgagttattttgttactttaatttgagcatagacaatggggtcaaaagtct

SEQ ID NO: 446612 - DNA, 518 bp, Homo Sapiens
gacgacgtcagcgcccgccgcatccccgggtgccccccagccgcgggggaccgcgacggctccgtgaccgtcacgtgccggaggccgcggctgctcgcggccagaccttcgcatcgagggacgtgagggacatttgtcctagagggcccaagataagaacgaggggaagaaccgggaggcaactctccgtcatcctctagccccccgcatcctaggaaacgtatggaaaacaatggaaggttaagtgtgtgcacagtgatctggccctgcaggagtgtgccgaccaggtgatatttcctggggcctggtgataaggatttggaaggttacagcacagagacgtgaacgtaaaaaggaaacagaggcagcaagcaaatgaggaaaccgatactctgttctgagaataaagccattttaccgctagacgtcatactctgtagacgttatagtgctggatgtctttggtactattacaagaaattagatatctctatctttaaatatcacttaaggaaatt

SEQ ID NO: 446613 - DNA, 879 bp, Homo Sapiens
gtcttccgtccgggaatatgctcaccttggcgatatggttcctttggcattcggactttattccgaaggttgtttagtcgctccttgttggcgctactgtactcctgtgggatgtttgtccccccatgggggtattatttcccttccccgggtggctggcaacatgggtatgctcgggattgtatgtgagcgacctcccgcccccgcgtttagggttggctccctcttcttctcctgatgtgcgccacctaggaccgcatcttgtcccgctacgcctcttgttttttacgtcactcgtccgccacgctcagctttcattactggactgctggaagagcgcacccttgttgaacccattctactggggtcttcgattgcgggtccccccctcgcggtggtcttatcggctcgggcccccctctgtgtgtctttggtaagttagttcctttatctttctttatttatcgtctttttctatttgtattgttttcttggtatctactttgttatacaaatctcctctagactgttccaggctgcttgcggatctaaagtgggggtgactgtgacctggaccaggtccatttctggagtaggcttcttctctctgtgtcctacttgggacgataggggaacttcaggtaagactaaacttttcaagcctttttacgagaaccaggggcacgcatcttcagggctgctgctgctgcccggaaacggtccaccacacgggtgatagatgacagcagcctgaggtcctgggggcttgggatggcatagtggacctggcgaggtaccaggcctagatcccccggctggtagggggtgatgtcagagagctgcggcagcagagacccagtcctgggcagctgatgctgg

SEQ ID NO: 446614 - DNA, 1678 bp, Homo Sapiens
gtggaggtagaaaacttttaattagctggagaggttgaggccctacaggcggggaaaaggacttgccagatgttcgccgcaagtcaagggccatagcgggggggcattacaaggcctcccaaccgaaggtcaaagcaagagctccgagcgtcccacacaagtcccgaagggacactgtgacgccgcgctactgaaggcgcctgggttcccggactcggccaccgcctcgccgcttccgcccctcagaagcatggcggccacgtagcccggcccggattggacgttggcggtggacgccaaacagttggcaacacgattggctgctgcggggtgatgacgtcagggggcggtgtcggagtgaatgggggcagcatgaggccgggcggctttttgggcgccggacagcggctgagtagagccatgagccgatgtgttttggagcctcgccccccggggaagcggtggatggtgagtggcgtggggcggcgacgtaggggctcccggtccctagcttcagttcggccattatgtcccgggagccgagtgcccccaaattgctgctctgttttcttaactggtgagttcagtgctcgacgggctccaaacttcttgaagctccgttcctgcactagggcgccctgcctgcccagccttctggagttctcaggggtcgggtttctgggccccttcttcgcgccccttccccactgcagcgttgctctgcgtttccgctcctctgcgttggggcccacgggacgctgtgagatcgggggtggcgagagttgttgggcctcagtttcctggtgccgcccgcaggtggctggcctggggaatcccggactgcccggcacgcgacacagcgtgggcatggcggtgctggggcagctggcgcggcggctgggtgtggcggagagttggacgcgcgaccggcactgtgccgccgacctcgccctggccccgctgggggatgcccaactggtcctgctccggccacggcggcttatgaacgccaacgggcgcagcgtggcccgggctgcggagctgtttgggctgactgccgaggaagtctacctggtgcatgatgagctggacaagcccctggggagactggctctgaagctggggggcagtgccaggggccacaatggagtccgttcctgcattagctgcctcaactccattgcaatgccaaggctgcgggtgggtatcgggcgcccggcgcaccctgaggcggttcaggcccatgtgctgggctgcttctcccctgctgagcaggagctgctgcctctgttgctggatcgagcccccgacctgatcttggaccacatccgtgagcgaagccaggggccctcactggggccgtgacactagtggccatggctgcctgcctgactgtagtgccccccaacccagccactgccacagagctggccacgcccagcccttggtatttactttttatacaaatcctcctttagactgtttcaggctgcctgcgggttaaagtggggggtggactgtgaaaagaacccaccctcctcgagggtagggcacattgagctggggcgcaggggggcaggtaacaaataaggaggcggtaatctgggagcttacccctttagagcatttggggggtcccccaaaaaacaacgcctcgggggggaacaagtcttccggg

SEQ ID NO: 446615 - DNA, 462 bp, Homo Sapiens
ttttcacagtcacccccactttaatccgcatgcagcctggaacagtctagaggagatttgtataaaaagtagataccaaggctggcgtggcagctctgtggcagtggctgggttggtgggcactacagtcaggcaggcagccatggccactagtgtcacggccccagtgagggccctggcttcgctcacggatgtggtccaagatcaggtcggtggctcgatccagcaacagaggcagcagctcattggagttgaggcagctaatgcaggaacggactccattgtggcccctggcactgccccccagcttcagagccagtctccccaggggcttgtccagctcatcatgcaccaggtagacttcctgcgcagtcagcccaaacagctccgcagcccgggccacgctgcgcccgttgggcttcataagccgccgtggccggagcaggaccagttgggcatccc

SEQ ID NO: 446616 - DNA, 1941 bp, Homo Sapiens
  misc_feature (1816)..(1877): n is a, c, g, or t
ccagaaataatgagatttttcaaagcaacagtgattcatcacactgaaataggactctacagttcaaaatgacaggaataactttatcctgtgttacataccaatattagagaaatcttaaaagtttgtagctgttagtttttagtttatgcatgtagttcagtagcccaagttgacaactccgctgtctctctacatgaatcactgtagttgaaattgtactaaagtatcagaagtaacatttactgtaatatgttaaatagcacctatattacttgaaagtaaagtgagacatttataggaatgctgacacagatttagtttctaactactagagagaaagcatctcctagacaaaatactatttagatatgaattattttaagatcacagccagaaaaatgtcataaaacattttagattttgcttggaaaagttagaaaagaaagctttgtgtatcgctcttttatcttttatttccaaagaagatgtacaaatgcttacataatcagaacagtgcaatcttaccaatgaagtttaccttgtgggagctacatttacttatttcatatattagttcaacaacataaatataataaaaatgcttttaagcaatctgattagagcaacatttatattaactacaaaatatacagtaaaatgaaacatcttgttaaataggcctgtaggaaaacaatattttaaaggaatacattttcatgaatctactttcacatttatttgttttattgtatcttatagttactataatcgttgtgtgcttttgttactgcaatttccagggatcattgtatattctcagtatgccagtgactatatatgtaaaggtaatttaaaaagtattactcccagagtaaaaacagacaaacaaataagaaatctcatttttaatgggaagttgtgcataaaactattgtagtatttttatagaaatgtcccttaatcattataagttcatcattataaaatgtatactattgtactaaagcaaaactgtctgcctttaaatctaagtggtgtcaacttactgtataattctggttacaaagttagatatgaaatctttggctattaattagaaaagcattatttgaaaagacctgtcaataaacatttctaaatgtggttgctcatcttaatagttttcttaattagaacagctaggaaatgaacagaacagtggtgcttttatgttataataacaaagaagtattacagtatcccaatctccagacctggggtccaagtattcaatcctggctcagttgcaggctgacagaagagaagcatcgtcctacgctcgtacacaatggagcaatgataacatctgtcacactcttccatattgtctgcactgaaggcagaaccattaggcaggtctttacaaaaggcattaaaatccagatgtgcagacagctgagggtggcaaagagaattcccgcaatgaaggccaggggaatggccaggaacaccgtcaggaacttgtacattacgtatttgctgatttcaaagagggcatggctgcagatccacactttgtcaaaggagtgcgtagtcaccggctctgcgatcacatcctcgaagcccagcttgagatgcgagttgagccggtggggatcccggtcctggtccgagtccgcgaacttctcggggtcggcgtactcgaggccgctgtggtggctgtaggagtcgtcgtccatgaagagctgtacgtccgccttctccgtctccagccccatcgcagccttggtgcgcggccgctgcagcccggctggcgcggtgcggctcccggtcnnnnnnnnnnnnnnnnnnnnnnnnnnnnnnnnnnnnnnnnnnnnnnnnnnnnnnnnnnnnnncggcccgggcggcggccgcttaacgctgtgggctccagccctcgtgctggattcgccacccagg

SEQ ID NO: 446617 - DNA, 620 bp, Homo Sapiens
  misc_feature (566)..(566): n is a, c, g, or t
gtaaaagaaaatacaacaaaatagtttgtcacaaaattctgtcctataacgaacaccattttctccatttcatttcaccaacagcttgtcatgctgatccacatctctcttccatctatccaaagcctgggtgttgaagatccagttcaatttttccttattcattcaatatgcattttttgtgtactagctatgtgccaaccagtgctgaaatttggagtaaaaacaagggaaataatccttatttttaaggagatcatctttcattagatagaataaagacaacttgacatcatcatgaaatcatgtaacaaagggaaagaaagaatttacacagtatcgggtgggaatggaaaggtgaataactcgcagaaacatgaggaacactcttcaagacattccccaattgttcaccgatgtaagcaccagggtaggaattatctgtgtaaactgtagcgttccttaaagaaaatggggaacattttcaatgctttagctagatcttgtgtattccttttaacagagtaaatatgaaataaatgattaaaacattgcaaaagaagcanaacagatattattctcctaaaatataaatagctactcctgcagatattagccat

SEQ ID NO: 446618 - DNA, 196 bp, Homo Sapiens
tcgaaaccgcgtggcatgacattttaatccacagtacagatctgtaaaggagggctttatcgtcagcacagagcaggaaaaacctaaatagaatgaaggcagctaagatgattactcaatcattaattaactatgttgtccaatcaccgcagtttcgacctccctttggcttcaaaagtcaaaaaagtcaacttgc

SEQ ID NO: 446619 - DNA, 847 bp, Homo Sapiens
  misc_feature (89)..(89): n is a, c, g, or t
  misc_feature (550)..(550): n is a, c, g, or t
  misc_feature (587)..(587): n is a, c, g, or t
  misc_feature (802)..(802): n is a, c, g, or t
  misc_feature (807)..(807): n is a, c, g, or t
  misc_feature (829)..(829): n is a, c, g, or t
ctgaacaatacaattttaatgcatactaaggctggttaactggttagaatactaggttaacaaggccaaactccagataggccaacagncttttcaaaccaatattcctgacactgccaggaataaagaaaactcttcactactgagggagggacagaaaacctagaaaaataaaccatactaaaagaaaaagggtattttgtttgtcactttaaagctgctttttctttaaacggtacacatattttcaacattcttacaaatgggccttctattaaaaagcaaactattgctaattccatggctttaagtggaatacttccaatcacttcctctatccagaaaatccgtgacactacatgccagctactttgcatatttataactgtttaataaactattcaaaattagcatctaaaataattatactttggacacacgaaggcatatatttggtgagaacattgtaattttcattttgtaaactatatattctatattcaagtaataacacagcattgcctatacagaactgaggcctgcgctgagnacccaaaacttgtcttttcctaaatgcaccactacgnggtggctaataagaggtctgtccagatgctaaggaccaggggacttcaaaatctccatcctgcggctttacaggtctccggggcagttaggaactttatctttcagagggtgggagggggcctgacaggaggcttttggaaaccttttgtggcaactcctcccgggggcacattttgggggactcagttccaacccaaatgcctttttggagggnctagnggcaaacgttggaccccgtttnttaggcaggcccggtagg

SEQ ID NO: 446620 - DNA, 516 bp, Homo Sapiens
aagaggacaatggatttgtttttattaatttttttgctaagaaagtttctaggtggcaggtgctgtccggggagggggcgtgcgcagcagacacagcagccaaactgtcctttctgcttccgtctgtctgtgccagccctgccgcctgccagctcttgctccctcagagccagaaggttcttggctccaggcttcctggcctggatgctggcagcccctggggagaggacccaggccccctctagtaatggccaccaccctccccccagggcagctggagcctcatctttggcagggtcccctctcccttttccaggagactctgtgcctgtagccctggtcccagtgaacctggcccccaccccagtggctggaacaggaaggccaggaggcagatgggccagggccaggagacagatggcccaatcccctgcccaccacagcagcttttctgagaggcgggcaggggcagggtttgctccccctggtgctgggatgtggtagagacattgcagc

SEQ ID NO: 446621 - DNA, 1777 bp, Homo Sapiens
  misc_feature (269)..(277): n is a, c, g, or t
  misc_feature (303)..(358): n is a, c, g, or t
  misc_feature (1232)..(1240): n is a, c, g, or t
aagtccgtgattcaggatagaaattgaccttataaaaataaatgctgcgccacctgctgaaatctaaattgctccatccctgtcagttactcaatattttttaaaccttaaaaatttacctttaacgtatttcaatagtattttaatacacggactataataacaaaccagctggtatattattttgtccttttccattataattttcattcttgtaattagcaaccaagttaatgcttgcattcaggattatctaaactgtttttacnnnnnnnnnccccacgaattaggagcctaacagcnnnnnnnnnnnnnnnnnnnnnnnnnnnnnnnnnnnnnnnnnnnnnnnnnnnnnnnnggctcaaggaaacttccctgctagtgaaacttcactctcaacaccactcaatgatctaacagcttcctaaatccaacttcattctttttgcagtttaagcccagtttcaaataaggcatcactgggatggataaagaaaacactgagatgggggatagaaacattaaaaagcagaaaaactaagcaaaatctaaatcctgtcaattggatgtttaccatttcacactgaaatctttccctgaatagaccagggacatcactgcctcctgctcagatctcaaagcttcaacatgctccacaaagcacctccctaagtaccctagtgtgttccctgggagagttgctacacagcccatctactggatttagtaccatagtcccagcacttggcccagggtcctagactgctgggtaggtcctcagaggtatctgaagtcatgtctacattgatacaaagaaacgtatggctcatctgtaccaatacgtagagaaacacaattaagaacaataaggatcacagaactcgaatggatcattataacttcaagactcagtttaagttaccaagaaatgcactgtagcccttttctacacttttatattcagatcagggctaaccctaacatgttcttaaatgaccacttatggtcatttaagtggtcaatgggaatattgcagcagagaactgctgttttgtttaaacgtactagccattagcattaaaagagtctaatgaactcatctaacacctggacacatttttaaagttcatcatttaccatatgtaaatttgacaacaattttgacttgcaatgtctgttgttcaaaagcaaagtcagactatctaaatcttgttttcctttggtcctacttnnnnnnnnnttagacatcttgtcagttttattaccatcagaggcacagatagtactacagtcactcagtttagaaggaagacaccgtgctccagagtaggtcaacccaggctaccatgagctcctcagccctttcagctttggtgaatctgtgaccctgtgaccctccccttctagaaagagaaatttgctctagaaagataccttgctctgggaggtatggctcctaatccttgtctccctattattgtgtagaggctaaccagggattggatcctattcaactgggttcctctcttttctgcctccgctggtcagataatagtcttttcaatggtctgttctcttcactcctctataatgttttccttagtctacctgtgcactggcacactccaaccctttggctgtaacaaacttaaaaataaataaggctgtaagagttctaaccatcaagagtataccacactacgtttcaattaaataaccattttatgatactcagaatcttgtactgagaaaaagcttcatttagactctaaagttt

SEQ ID NO: 446622 - DNA, 520 bp, Homo Sapiens
agtctgtttctttaattggagtgagtggcacttggcacacccacacagccaccttaaacattgtgggaaatcaagtccaagtatctcaagtaacagtacaacaatccatatcaggaaaaacagcttagggcttgacttcattatggttttggctgccattttatgcattctgagtagaagaaacattcctcctagcgcccccaccttgtctttaacattccgcagtggaagttcctcaaagctctccgttttgaaagcatcctctatgattaccagccactaaattgcatctgccaccgagggcccaatgggctttgaacctgttattcttgggaaattcaagctgcgagggagagagagaacgttgtacacgtgtgcagctgtgctttggagtagaagaagtaatcgtatgtgtctgtgtgttttttatgggggtaggggaagggtatattaattaacccaactgagaaggagatgactgtgttccaggaaggagccaatgaaatgagtttgctttaaa

SEQ ID NO: 446623 - DNA, 460 bp, Homo Sapiens
aactgacgcattaaatctttattgactaaacagcttaaaaaattactactatttccttttatttgttgttgtgaattttactcagaattaaagataaatgattagtaattacaggaaaactaacttgtaaaaatcttaaagacattgaatgggttaatgtactgagcagctacggaatgcaaggcactgtaggagtagggtgagtatactccccacaagggctcagggtcaggcaggggaggtgagataaaaacccacagccatacactagctggcctgtcctgagggttgtgaggcacaaaatgctaggagactagagaagtaagaaatgtcttgacatgaggagaaatcaaggaaagcatggttttagaacatgtgtgggatgttttttgtatcgagactgaagaggctttttaaagtggagggaaggcaaactgaggcatagagatgccaataccag

SEQ ID NO: 446624 - DNA, 170 bp, Homo Sapiens
gaagaaagttgattggatattgacttttcttgtaatgatgttattttataaagtgacccactatattaatttggattttgtgtttactctttagagaaatgctctattcagatccgattgggaagtttatgtttggatatttattctatttaaatttttatctcaatctc

SEQ ID NO: 446625 - DNA, 550 bp, Homo Sapiens
catgttttatttttattttgtggggtttgtttgcattttaaaaaattatctttatttaggtttctgattcagcacatgtatcaaagactaatcaacataaaggagtaaataagacattaattgaaagtcttacatctctctaaactctgaccaagaatgtcaagattgccactattaccagaactccaacctagtcaagttgtagacaagctatcatgaacaacatacagtgtgcacagatatgcagaggcaaaaggcatgctagcgcttggctctcctcttttccttgttgacatctttctgttggacagtccactttcgctttccaggctaagttccaaatcaagtccaaagaaggctcagggtcaacctgaccagatactcttctggaggaatgcattcttaaactgttgtgcctgcaactttgtttttgccaggatgaagttcagaccgagatgtacaatacaatctagatgacggtgcagactaagtcaagaactaaagttgtgcagtaacccgagttaaggcatgaatgcagacacacacatgc

SEQ ID NO: 446626 - DNA, 496 bp, Homo Sapiens
ttttttttacattttaaaaaattatctttatttaggtttctgattcagcacatgtatcaaagactaatcaacataaaggagtaaataagacattaattgaaagtcttacatctctctaaactctgaccaagaatgtcaagattgccactattaccagaactccaacctagtcaagttgtagacaagctatcatggaacaacatacagtgtgcacaggatatggcagaggcaaaagggcatgctaggcgcttgggctctcctcttttccttgttgacatctttctgttgggacagtccactttcggctttccggggctaagttccaaatcaaggtccaaaggagggcttcaggggtcaacctggaccaggatactcttctgggggggaatggcatttctttaaactgttgtggcctggcaactttgtttttgcccggggtgaaggttcagaccgaggtgttaccattacattttggttgacggtgcaggttaagtca

SEQ ID NO: 446627 - DNA, 748 bp, Homo Sapiens
tttttcacagccgctcttgtttaatggtggcacagcctgcggtctggttcctccatcagggcgctgtgggtatggccctgaggtgaggggcaggcctggggtggggtggggtggggcctgaggcaaaagcatgggggctgaccctctgcctgacatggagagaggacattcagaaccctccagccacagatggccagaaactttggtttgtgtttgttttcaagtttctgtcctcaaggaagctgcccagaaagggagacgaggggactgcttcctgagggagcagaggggccagagctgggaggagcaatgccagccgaagacaacgcccagacaaagctcaccagctccagggccacccgtgggaatgcagctgggaaaagggtgctggaacaggctccttccaccccatgggagccccagagtctgccccaggaccttcccaaaccctcaggaaggagaagcacgaggaaggggccccagaggtgggaatgaggttgagagagcagcagtaggaaacagacagaaacagagagtgggagatttagggcagggcagaagagacgccacggtgcccacccacctcgggggagagagggggtcagttctgagccccatcaggttcgtgacccactctaggaggagatgactcagaccccagatcagagaacgaaccgccacccagcctcgctaccttaggaccgttatagttactgcgtcgtttaaaccgcggttgacatgccccgct

SEQ ID NO: 446628 - DNA, 520 bp, Homo Sapiens
gtttacagaagacattttaatacacataggcacatttatattatatatgctacagctcaacagaagcacttgtttcccattcgagggctgccagatcagctgcctgttcacaacagcacagataagtgaagtttgaaattttaatatcagtgtttaatatcagtcagacacactgaatttgtaataaacaggaatcacagacagatagcaggaaacaggattttatgtagacaatacagggacaactgggtacagaaacaagcttgaagtgctttttgtgccttttcattctgcttttgaagagctaaagccttagcattactgcctcagccacaagcagcaacactggtccctactagctacattaatactctttcttcctacttattcttccatccaatctacaaaagctatgataatagaacatctagtggtttctggttgaaactttcctatcagaagaagcctagctactaattaattagattactgtaattaatttagcaatgctctgtgctgg

SEQ ID NO: 446629 - DNA, 1630 bp, Homo Sapiens
  misc_feature (1110)..(1222): n is a, c, g, or t
  misc_feature (1242)..(1259): n is a, c, g, or t
  misc_feature (1282)..(1292): n is a, c, g, or t
  misc_feature (1317)..(1404): n is a, c, g, or t
  misc_feature (1465)..(1474): n is a, c, g, or t
  misc_feature (1564)..(1574): n is a, c, g, or t
catgcgagagctaggattttaagttctgggatccagtgggggctgggggcgttcccagtaagggctgtgctcacacatccctgtgaggctctgacctcccttctggctgtcactcccatccggaggtgggacttaggccgaatggtcatgtcaggaagagcgtctgggtggagggtggagaccacaggaatgaagagggggttgctggatggagcctggcctggcagagccacacaggagagactccacagctctagagggtcaccaccttctccctgccatggggaggggccaggctgggtgactgccccagccccgccccagggccagcacctgccccactccaggtgatgctgcagcagggcgaggccatgcgctgcccccagtgccagatcgtggtacagaagaaggacggctgcgactggatccgctgcaccgtctgccacaccgagatctgttgggtcaccaagggcccacggttggggccttgggggcccaggagacaccagcggggggctgccgctgcaagggttaatgggattccttgccacccaagctgtcagaactgcccctgagctaaagatggtggggccacatgctgacccagccccacatccacattctgttagaatgtagctcagggagcttcgtggacggccttgcttgctgtagcgttgtaggggccctgcctgcactgcggttgtccacggtcacatctgccccagtgcctttgtccttcccttggggcttgccggccagacttctctcccctgcggctcccacctctgcctgaccccagccttaaacatagcccctggccagaggccttgctgggtggagcctctgtgtgactccatactcctcccaccacaacactcatctgtcaaacaccaagcactttcagcctccccgccttcagctgtcagctttctggggctaacttctctgcctttgtggttggaggcctgaggcctcttggaactcttgctaacctgttcagagccaggaaggagactgcacagttttgaaagcacagcccgtcaggtccggctctgcgtctccctctctgcagcctgtgtaagctattataattaaaatggttttccgggnnnnnnnnnnnnnnnnnnnnnnnnnnnnnnnnnnnnnnnnnnnnnnnnnnnnnnnnnnnnnnnnnnnnnnnnnnnnnnnnnnnnnnnnnnnnnnnnnnnnnnnnnnnnnnnnnttgcggccccccccgccccnnnnnnnnnnnnnnnnnncatttttttgggggcggggcccnnnnnnnnnnnggaaccggggcccccccggtccccnnnnnnnnnnnnnnnnnnnnnnnnnnnnnnnnnnnnnnnnnnnnnnnnnnnnnnnnnnnnnnnnnnnnnnnnnnnnnnnnnnnnnnnnagtttgggggttttttcggaccataaaaaaaggaccccgggggaccctcattttaattaannnnnnnnnnggggctttcgtgggggtttggggggaattttataagggattctcgcggagatggaaataaattaaaggccgcctgggggaccctaaatcnnnnnnnnnnntaaaacactttaaccccttggcgaaaaatattttcccccccgggaaaagggggggg

SEQ ID NO: 446630 - DNA, 576 bp, Homo Sapiens
  misc_feature (363)..(371): n is a, c, g, or t
catattagattcagtttactaataagaaagtaaagggctttggacaatgtaacatacaaatttaaagtatgcacattccaccaggctagaacgtacattctttggtcaattttacttccaagatgggaaaataaagggtaagctgctttatggttaaaaaatttagcaaagaaagaaaccgtgagaaatccctttcatcagcatgttatggaatacaagggcactggagtcacatgaaataacggcatgggtagtttacatgaagtttccagatttcacattgagagaaaccatacatcccaatgaaagacagttcacaaagcaaggttctagttacggtaacacaatgaatatgtcacaacnnnnnnnnnctaaccagactagaaaaaaatttcatcaaaaagtaccttcaaccttctctattttaatctgaggggaaattaagagaatctcaaaagttactacagagtttgggtaggctagatacatttattaatagtaaaagcaaccatggcaaaagcaaccatactcattcttgataatgaaaggatcttctatatacaaacctagcaaatt

SEQ ID NO: 446631 - DNA, 541 bp, Homo Sapiens
ccagacaccccagagtctttttattgaggttcttagaaggcgagtgcaatctcagcctagggtagctgaaggaggtccagttcgtgtcaagtctgtgttcaggaagtaggtgcagagctgccctttgcctttcaccttgatgacaccccggctgtagcaggtgtagcccagggactgtagggcccatgctgtctcctcagtcacttggattttgccaaggactcctgtactctccatgcggttggccacgttcactgtgttgccccaaatgtcatattgcggtttttgggccccaataactccagctactacgggtccatggttcaaccccactcgcaggcggaagttgttgaatgaatgcttgttgatgacgtccagcttagaccccagggccacggcaaattccaccatagtgccaaggtggctgcagctccgttcagaatcctgttgtgcatcctgtccagaggtggcatttaagcctgtggctgccatgtaggtgctgccgatggtcttgatcttctccaccccactgaacttgggc

SEQ ID NO: 446632 - DNA, 1190 bp, Homo Sapiens
  misc_feature (329)..(481): n is a, c, g, or t
tgtgccgcgttgtttgggagaaatgggaacgggtgatgtttgcggggtgggctgaggtttggtcaggaaggggggtaagggggcacaggtttggtggttaagtcggcgggtacaggtgtaagggggaacggtttgagagagaaggagtttgggagcaggcaaatgggaatgggaacgttttgtaaggtcccaggccccgggtggcgcgttgaggtgtgggaggggtgctggtgtgtgcccgagtccgttcgcctgtcgttgggcgtatgggggggacctcctgtgtggggaggtcgcgggagcgcgttgtccggggcgcaggtttgtcnnnnnnnnnnnnnnnnnnnnnnnnnnnnnnnnnnnnnnnnnnnnnnnnnnnnnnnnnnnnnnnnnnnnnnnnnnnnnnnnnnnnnnnnnnnnnnnnnnnnnnnnnnnnnnnnnnnnnnnnnnnnnnnnnnnnnnnnnnnnnnnnnnnnnnnnnaggcgccacaaacatggggtggcgcgggaaatgtttcgatagtgggggtgagtaggggcgggcttaaaggcggactgggcgcccagccggaagtgcccaattgggttcagcccgaaggcatgcgagttagggggccaagtttgcaagggcgtggcgtagggaggttgggagcaggtagaagggggcccaggttgcggggagagccgctgtgtgtggcccacggcgcagtggccaaggggtatagtgagccagtgggcagagcccacaagtggaggtgtagattaaggtgggggatgtgcctgcgtgtcggtaggctgtgcgtgtgcatgcaagccagccagcgtgcgtagtgcctcgggaagatgaatgtgcttcagtggtaggtggcagtgagtgcagtgtgggagggctcagtgcgcatgctgttgtcgtgccgcagtcagcgcagcgcgtatgtgtccacgttgttaagatatgcaatagaggcagcaaaattcggcttaaagagataatccaatatctgagaacgatagggctctgggtaatttactagaagtcgggaggttgccccgccgccgctgaccgcgccgatgccgtcgaactcccggcccagcccgtcggagtcgtcgagcacgtacgcgccgccgggcgccagcagcgcacacagcagcaagggcaccgcggcgcggcccgccgaacccgcggccgc

SEQ ID NO: 446633 - DNA, 1056 bp, Homo Sapiens
  misc_feature (197)..(206): n is a, c, g, or t
cggcaagaggggttttcttcacaaaagctcgccggagctgcgcaggttttcgccgggctccgggctgtgttaatgccggccggccatgtgggtagggtttaaatgcgcccgcccaatgggggaccccctttggcccaaaaaaaacctgggtagccgaaaaccttgtgccccccggaggggatcttttaggagggggnnnnnnnnnnagccacaaaggacgcgtgaggtgcgacttgttgcaaacccagcctttttttatcaaaccgccaaaccctgaacgctcgtggtttagccaggtgcttcttcctccaggcgaagccaagtgctggccatgggcctctcctccaggaagcgactcaggacccgccctctgcagcgcggcccagtgacccacattcattctccaagacctgcgctgctgggcctctgaggggccccggaaacatccggtggccacccatcccactggcattgttcccacgagggtgccaatgactgcgctcctggaggggctgagttcgtctttgggtccaggaggtacccaaagccgcttgtctgctggtggcagatatgacagacgtttgattcccaaccttctccgctttggtttcttcgtttactgaatgcccggcgcccacctcagtccgcgggaaacgagggacgcccctgccacactgcagtgcggacgacgaggccaacataaagacagcaggcatcagcagaggatggagacagcggctctggggctgtcttctctccgcaggttgggaagggaaaggagagaaaatgcacgcagtcacgctcggcggaggcgtccaggactgcgcccgccctggggaagggcgcacgcggtggtcgccaggggcagcgagagggcctgagttgggggggctgggacggacaagaagccccccacctcggcggttaccctgtcctgctggggagcggccatggggcaggtccccgagctgaagtcgctcggccgggagacgagtacccgccccgcgggagggcccaggacccgtgcttccatcccgagaattccggaccggtcca

SEQ ID NO: 446634 - DNA, 581 bp, Homo Sapiens
ttcagtttttatttcaataaaacaagaggcaacacttgttgtataacaagtactacatatggagaacatttacacaaatatacaaaaattcaaaaaactaaactccagtttatttccatagccttaagaaggtagggaacacacaaaaatagccaaagtcgtcgtttattctttaggaatgtaaactctaggaatacaattagaaacaaatatatttactatgaaaagattagtatcactaaatgattagaaataaaggtaagaggtacacaataagttccatataagagaaagcaacaatacgtgaaataaaatcttgggtttatggtaaaaacttcctattaagacaaatgtactctaaaactctactataaaaaaacacaaaaacatctcccaaaatgttcgttgttagtttctttagatatgcacaagttacaaagtatagaagacaatatatttatgctctctgatgaagaatttaacaatattaaacataaatctgaataactcaaagtactgagtataattttactaagcaacaaatgtagaagtataaattcatgctcattaaaggactagag

SEQ ID NO: 446635 - DNA, 502 bp, Homo Sapiens
gcggccgcgggctcgtcctcggccagggcccccccgcgcgcctccgcctcgggcccggcccgcagctgcaagccccgggcgcccgcgccaccctgcagcagctccgagatgcgcccgctgacggcccgcaggggaagcttggaggccaggcccgagctcctgttcctgctgagggactgcgtggaccagggcgtgtgcttcccaccggggggcgagctggagccctggcccaccgcctgcggcagggacttggtggagaagctgagggttttggtggtggaggcggacgggccgcgcgctctggggctggccaggaggagtctgctcacggcggagatcttggactggccggccttgggcgaggccccggagctggggggcgaggtcccggcgctgcggcccaggctcctccccgcgcggggcatggtgccgtccttgcccgcgtgcagccgggagctcacggagagacaggctctcggcccgctccaggagaggcattcgt

SEQ ID NO: 446636 - DNA, 318 bp, Homo Sapiens
  misc_feature (200)..(232): n is a, c, g, or t
actttgtggaaatagtttaaaaatctctcgactatcttttcaaaatcactcaccttgtggctaacacatgattaatacttgattccaaatcaagcaagaaggaatccttgagaacaagctatcctttaataaagtgttataatatggtgtatctatttccacatgtgtgtgtttgcatgtgcctatgtgtaatgcaggannnnnnnnnnnnnnnnnnnnnnnnnnnnnnnnngagacagagtctcgctctgtagcccaggctggagtgcagtggtgcgatctcgtcttactgcaagctccacctcccaggttcacacc

SEQ ID NO: 446637 - DNA, 679 bp, Homo Sapiens
gtgttgctcttttgtctttttctcgtttacaacagcctttatttccggcccttgatcctgctcggatgctggtggaggcccttagctccgcccgccaggctctgtgccgcctccccgcaggcgcagattcatgaacacggtgctcaggggcttgaggccgtactcccccagcgggagctggtcctccaggggcttcccctcgaaggtcagccagaacaggtcgtcctgcacaccctccagcccgctcacttgctgcttcaggtgggccacggtctgcgtcagccgcacctcgtaggtgctgctgcggcccttgttattcctcaccaggatgttcagaggttcgtcgcatttgtccaccaccagcaggaccgtgctgccggggcccaggccctggctggcaagggggaccctgtcctgcagcgccacaccgctcgggtggacagccagacgctgctggaaggcgtgcacgccgatcttctgggtgatctgcgccttcagctctgacaccgacatggagctgctcagggacacctggaattcgttgcccgccagcatcttcaccgtcaggtcccagcccatggctgtgggctgtgggctgtgggccacggcacgagctcctgtactggcaaagatgagttcgctgcctctcagccgccggcttccgcaggcagcacccccc

SEQ ID NO: 446638 - DNA, 921 bp, Homo Sapiens; identical to SEQ ID NO: 135428

SEQ ID NO: 446639 - DNA, 495 bp, Homo Sapiens
ttttttttgatatttaaatatttatttaagtttaaaaataatcttcatggcaccaatgattttatgctaactacatactgcatatgtagaaaaaagtacattgctttgaaggaaaatgtaacttaagagtttttggcacacagaaggttaacaactatatatttttaaatgtatctaagaaattcacatttgcaggtagtttaccctctactgcttaaagatgcagtatgctattctttagtaagagttttatttcctgatagatgaagctatgaaaaccattgctttttctacaatgagataaactaattttgagagaaaatgagagacatgttagaacacagtataaccaggttaaaaacttgaacaatttttaaaggtggagatataccaaaaaagactagtcaccaatcaaaggaggtttattattcaagcactatttgaaaagcaaactgaaggaaacttttctatccatattttctgggatgagccctg

SEQ ID NO: 446640 - DNA, 722 bp, Homo Sapiens
  misc_feature (535)..(670): n is a, c, g, or t
cccatggtatgtttttaattctgaaaattaactgaaggagacaagagacaatttaaaattacagcacctctgatgaatagttaaatggatcatttatcctacagggataaactgtaaccaaaacagattgtggggctctagactccggacagcaccaaaaattcaagttgcatatgaagtcctaatacttacagttgatttccattcagtattcggtattttgctcacctgagaatagatactccccagagtgtatagaggcccctgtatattcaatgatgaccacaaagaatcaaacagaaatcataaatgacagtccatggctctatggtttttaatgaatagtttgtgtagattttcccatgaaacacccctgatcttagttgggtgatttatagacctatgatgttggtggtgatcagctaagcaaactagccaaacagaagtaatttcaaattaagtcacttttactttgtgctattactcattattggatggtgggtgaggggaaaatacaaaatatatgtcctagacnnnnnnnnnnnnnnnnnnnnnnnnnnnnnnnnnnnnnnnnnnnnnnnnnnnnnnnnnnnnnnnnnnnnnnnnnnnnnnnnnnnnnnnnnnnnnnnnnnnnnnnnnnnnnnnnnnnnnnnnnnnnnnnnnnnnnnnncagctagctggggttactggttactatatttggtcagcaaagttcaacaatc

SEQ ID NO: 446641 - DNA, 460 bp, Homo Sapiens
ttgtggctagcttctttcattatgacttaacataatgtcataggtttttacattttttaaatggcttgaaaaacagtatttcatgacacatgaaaatcctatgaaattcacatttcagggtctataaataaagttttattggaacacatccctgttcgtttattgatatactgtctacagctgcttttgtgccatcaaggtagagttgagtcgttgctacagagattatctggctggcaaatcctaaattatttaccatctggtcctttacagtaagcgtttgccagcccccattagcactcttttctttcatcctcatcttttgccatacgtgttactagagatgcggcggggctggcagtttctcaccttaccctcctgttctgtaaaactgtttctctccattgaaacttggaccccctgtgtgtgaaaaactgtatgtggctgccagaaaagccag

SEQ ID NO: 446642 - DNA, 929 bp, Homo Sapiens
cggtggtaactgtgatggtattttcataatcgcagggatagtggaatccaatggaccagaatcagttagcaccttatcacgtttacgctgctgtcgtttctctctgtgactaattttagtttcccaggctccttcatcaacttcctttccatacatggcgtgaactgtttgtgcactgcttttagcatctgactttgatttcttcttttttttcgtgtgacttgttcattttttcttgtcaatctctggtggctgctttgctgttacactttgaggtgttcgaacagcttcaccctcagccacttcaacagtccgcccatttggtttgggcttctcggacagtttcttccggttcttcttcttctgttcctcgctccggagattcttcagcaaggccaggtcgtcgggggccgcggccggcacggccgccgcctcctcccgcttgcggggcgggctcctccgctttttgcgggcgccggcgcaagccgcggcccagccgtagcccagcagaaacagcagcagcagcccgagcgcgccagtgcccaccaggatcacccagccggggtaccgtttcggctccagccccaggtcgaggcccagctcggtgcgcagaaagcctaggccgaccgagagcatttcccgcagccgggccgagccctcctcggcctgctgggccagctcgtcctgccagctccgtgcagccatcttccctcccgtcagagggactcgcaggatgacgccggggcgcggagacgcagtggaatagtcgagggaagcgaggaagggccgggccgggtaccctcaggccgagcgcatcgcggggagggccggaggggtctcccaggttccccgctgtcagcctcactccgccgccgccaggaggcccggcctcggccgattcaccaccagccatcgtacctagcctaaat

SEQ ID NO: 446643 - DNA, 1023 bp, Homo Sapiens
ccccgggatgtcgatccctgttccgtgttcgtcggcactgtatgcacggttacgctggcttcgttttctcttttgtgctaattttagtttccccggctccgttcatcaacttcctttgccatccatgggcgtgtacctgttttgcactgcttttagcatctgactgtgatttcttcctatttgttctgttgactttgtcatttttctggtcaatctcttgtggctgctttgctgttaccactttgaggtgttcgtacagcttcaccctcagcccacttgcagcagtccggcccattttggtttgggcttctcgggacagtttcttcccggttcttcttcttctgttcctcgctccggagattcttcagcaaggccaggtcgtcgggggccgcggccggcacggccgccgcctcctcccgcttgcggggcgggctcctccgctttttgcgggcgccggcgcaagccgcggcccagccgtagcccagcagaaacagcagcagcagcccgagcgcgccagtgcccaccaggatcacccagccggggtaccgtttcggctccagccccaggtcgaggcccagctcggtgcgcagaaagcctaggccgaccgagagcatttcccgcagccgggccgagccctcctcggcctgctgggccagctcgtcctgccagctccgtgcagccatcttccctcccgtcagagggactcgcaggatgacgccggggcgcggagacgcagtggaatagtcgagggaagcgaggaagggccgggccgggtaacctcaggccgagcgcatcgcggccgtccctcgcgccggagccggggatcggccgctgccaccgcggggagggcggaggggtctcccaggttccccgctgtcagcctcactccgccgccgccaggagacccgggaggcgggagggagtgtctccagtggcggccagctaagcggcgtctcggcgccagcgccaggccccgctgtcctccctcggcggaacaatcgggggggaaagagggggattaat

SEQ ID NO: 446644 - DNA, 412 bp, Homo Sapiens
  misc_feature (321)..(337): n is a, c, g, or t
actaatatttttaattgacaaatcataattgtatatacttatggtgtacaaagattcataaatttgcttacatgaaaataaaaatttctacatatcaaaaaataccagaacaaagtcaaaagacaaatgacaatgacaaactggaaagaagatatttgcaggatctcttacaaaaagctaatatctaaagcacacctgtaatacaaaacaaagaccaacaaccaacagaaaaataggcaaagaatagaaataggaaaggccatggtaaagcagattccagtggctgttaaatacatgaaaatatgctctacgttactcatnnnnnnnnnnnnnnnnntagaacatttttatctgttaggttggcaaggataagaagacatgcatgatggtgagatatcggcaagatactggt

SEQ ID NO: 446645 - DNA, 463 bp, Homo Sapiens
gttttctgattaatggtctatttattgataccattctattttaacaaagaaaatatttcaaattacaaggtatacaagtcaatactgttttgaagtgaaaaattatttgctttgagagtgtatgcatgtatgtatatatataataaatgattataacgtgtgtgtcagtgacaatatgtagtctttggttgttagttatatactgtctacctgtgagatgcaaggtaagtgggtcacagactctcaaatttatgaaacacttagatttttcagggaagttacatgaaggaactagggagtttcatgattagataagacgttcgggtgggatctccaccggacagcactctaaatcatcagcagtgtgagcggtgattcaatttgggaaagtgagtataggtttaaattctggccacagacaacctctcctacacaattcactgaacctaccctggaaggaggt

SEQ ID NO: 446646 - DNA, 726 bp, Homo Sapiens
gggttctagcagcatttttatttacaaacagcaatgtccattgacgtttatttataccataaaaaagccatttacaagcaagaaacaagaattcagaacaaaattaagcagcactgaaatattcatgtcacaaatctaaaacaaagtgaatacaagagtaaaatatcatttgaataaatagtcttaaattcatgctataaaataatccttaatggcaagttactagttgatacagcatccgcttagctagcttcatttacttcatatggtgatgaagtgtggcagttgtgaggttaccagtttatattgcaagataatgacactgtgttaagtcattcaaattgctcaaccatttataacggatatgaatgttagtcctactaataaaagtggtgagagagatggttttacacattaggaaaatggtcattctcaaacgaaactaggtaatgtttcacctcttacaatagtcagggccagcaaccaaaggcttaggagcagacaagtccaagaggttgaattgcacagcatacttgttcactgaaggggcagccagagagtctgtaggactgaatctgctacaaggagagccaggcaaggctgactccaaggacttgatcagtaactacaatagccccgtctgtgccagactcaggaaggaaaccagagaacgcaggttctcttccgggccgagaagtcaagcactgtgcagacacagtgggaacc

SEQ ID NO: 446647 - DNA, 499 bp, Homo Sapiens
  misc_feature (481)..(481): n is a, c, g, or t
gctctagcagacatttttatttacaaacagcaatgtccattgactttatttataccataaaaaagccatttacaagcaagaaacaagaattcagaacaaaattaagcagcactgaaatattcatgtcacaaatctaaaacaaagtgaatacaagagtaaaatatcatttgaataaatagtcttaaattcatgctataaaataatccttaatgggcaagttactagttgatacagcatccgcttagctagcttcatttacttcatatggtgatgaagtgtgggagttgtgaggttaccagtttatattgcaagataatgacactgtgttaaggtcattcaaattgctcaaccatttataacgggaaaaaattgttagccctacttattaaaagtgggtgaggggaggtgggtttttcacattaggggaaatgggtcctttttcaaaccaaaccgggggaagttttacccctttacatagtcnggggcagccaaccaaggg

SEQ ID NO: 446648 - DNA, 423 bp, Homo Sapiens
tttttgccactgttctttacagggagaaacatttcaaagactaatgaagcttgctaggggtagtgattgaggaggatacatgtattccagtaattctcttctaatttaaaatcaaactatgaggaagaaattaaggaagtaattatgaaaacttctgtacttaaacttctttaatagctaccaggtaactccatggtaaggcctacctgagccaaatttcaaagcagaccaagttagtccataagggctataaagtgttttcccttctgggtatattgtattgtacaaggacaaagacatctttaaaagaatgttcagccttcactagtaaatggaaaacacattttaaggcagattttaagggtctttctggggctctaaaaatccagaacatatttgtggtctcctcctctgaccactaca

SEQ ID NO: 446649 - DNA, 717 bp, Homo Sapiens
cacccccagttccaccaccagtttatcaagaataccccagtggaccagaaattacagaaatggatgatcctagtgtggaggaggagcaggctttcagggctgcacaagaagcagttctactcgcagctgagaatgaagaatctgaggaagatgaagatgaggaagatgattatgactaataaacataaaattagcctggttttatgtgacactgatacacacacaccccttatatgggactaattttacacttttctgtgttatgtgtgtatatacatacacatgtaagaaattattcaactgcaaaatctcaatcttgaaaatcaagcttgaaatttcataggtagaaatattagcatttttattgaaagatactcacaggattttccagaggctaaataacatgcaattgcataattgttctgagggttatggataatggaatatgtgtttgtacattcctgtttttaaaagggctcaggtttcacatggtccaggtgaggtaaaacaattaaaataaataaataaatggtctcaggtttaatttgtaatacgacaaacactggaagatataacccacaggaaattcttggaaacatcaatactttttaaagagtgtcaaggggtatgaagacaaaaaatattgatagtcactagagtaatgtattcttaacctttgtaagaactgatctcaggcatgtattcttaaacttttgt

SEQ ID NO: 446650 - DNA, 455 bp, Homo Sapiens
gcaaaaagactaattggcatttattaacagctcatatttgcctcaaggattgtttataaaaaatgaactaaataaaacagataaaagtgacatccccagacacagttccagttctttactgcaacctccagaagcaagtagcatgaatttagtgtatatccaaatcagtccactggtaataattttacatacatatatagtcttaatataatgtattatttctgtgtttttaaaatttatatcaatgacatgcacattttattccatgaatctcttttctttacattatgttacgtgttggtattatatagatactttatacatggatatattatgttatatatgggaacaatccattccttctaatggccattataacaattcatatcctaatagaatattatggtaattcatatcaaaatagaacgtgaatatgttacattttatttataaat

SEQ ID NO: 446651 - DNA, 508 bp, Homo Sapiens
gtgggtcaaaacgcaacaggttccgaagtgcaaagcaaacgccaactgctgccgcacacaaccgcctgctttcgagttggctgccgaagtgcgggtctgaaatgatcctgcgaattcacaggcctgctcgcccgcgcccttgcgcgcttggccactcctgccccgcctggcctctctgcctctacctggcacctatacattctatgtacatacaaaccgggcccccggtcgcgggagggcgcacggggaggccgcagcgctcgtacctatacatatgtacacgtgtgcacaccggtcctcgcgaggcggccccgcggggtcatagcgcggcagcgtaggccgcggggtaggggtccagctggggcttgcccatgcccggcagcaggatgtaggcgagcggcggctgcagcccggggctgggccacgcgctgcagttgcacgggatcatgtagcccgggttgcccgggctggggtgcgagtgcgtgtgccccccggcggcggcggccgc

SEQ ID NO: 446652 - DNA, 483 bp, Homo Sapiens
taatatgacaaaaccagaatgttgaatgtttattgcatcaaacaacttgatcattatcattagtagcaagctgccacacaattgcaaccgctgtgtttttgccataggcgcccgctgggacacccaagcaggaaccattgttgaagcccgtctcaaggagctggcatgccctatgccggtcatctttgcaaaagccacccccgtggacagacaagaaaccaaacagacctacgagtgccctgtgtatagaaccaaactgagaggccccagctacatctggaccttcaggctgaagagcgaagagaagactgcaaaatgggttctggctggagtggctctgcttctagaagcgtaaggtaacactggcattcctctagcctctgctggagtgcagtgaggattttctagcatgttgctgcactgttcccatgcacattattctgactttttagtaactcacacgtgcattcttttttcaacgct

SEQ ID NO: 446653 - DNA, 1066 bp, Homo Sapiens
agaaatggagggatctttggcccggtaaagggagaggtgggttggggaagccaaaggttggagggtaaagaagctgccccagggggggtcctccaaaaggccctgggccccaagaaggggtgggatgtagcttgggggttttaaaccacgggacttcaaggtcggggaggaaccacccaggggaaggagggcgccaaggcctaggggggcccaccaactttttttcccagggagacggtgcaggacttgaggccagcgggctgcggaatttgttccgggaatggaagcacccaggaggcccctagaccacaattcccgtccagcagaaagaggaggaaggagctggtggccagtcgctggcgggggtgctcctggaagtgtctggccgtgggtggtggtgtcccagcaggaggccctgggcgaggcgctggatctggctgtccctgaagctcaagggggtacgctggggctctcagaatggaggtaatgtccttgcgtcccaccactcggccctcagctccttcctcagacagctcaatgcggaagcggtcctggacatcatagtggctgggaatgggtgccacatggcgaatcacaatgtcaatgcaagactggggcttcacatatccctctgcgtcaaacaccgtgtatttggcaggtgctgtgcacaggactcggaagcgaagcgcagttcctgtggggttatagagggtcagcagctgtcggggtccgctccgctggtccgccctgaatactagatccgggggaaagaccaggacccggacaaccggtcccaagggaggaggggcgccccgggacccccggccagggggccccggaccccaccagctcctggtcctggggcgccccacggcgcatgcaggctctgggcggtcggacatccgagggcagagctcaggggacagggcctggagtcagagcttgtggttaaagcacctgccagtcagcttgtggtcagattaatgttgccatgttccagagagtccttttctatacttccgccgtacggcctctgtcattggctaatcccgggaattccggaccg

SEQ ID NO: 446654 - DNA, 1181 bp, Homo Sapiens
ctgattatcattttaaaaatgtattttattcaacttggaaaatgagtacaaatccctgggtgttttttgtcagggaggagtggggagtaggcaggaaagagaagagggtaggaggcaaggtaaggtatgagcatcacagtggctgcctcaagaccctgcccagggagggtggggtgggctgggggttgagcacggagctcaggtccggaggaacaccatggtgaggaggcccaagacgtaggcggccaccaacttttgtcccagggagacgtgcaggacttgaggcagctggctgccgagttcgtccgggagtgggagcagcaggaaggccacagacacaatccccgtcagcaagaagaggaggaaggagctggtggccagttgctggcgggggtgctcctggaagtgtctggccgtgggtggtggtgtcccagcaggaggccctgggcgaggcgctggatctggctgtccctgaagctcaagggggtacgctggggctctcagaatggaggtaatgtccttgcgtcccaccactcggccctcagctccttcctcagacagctcaatgcggaagcggtcctggacatcatagtggctgggaatgggtgccacatggcgaatcacaatgtcaatgcaagactggggcttcacatatccctctgcgtcaaacaccgtgtatttggcaggtgctgtgcacaggactcggaagcgaagcgcagttcctgtggggttatagagggtcagcagctgtcggggtccgctccgctggtccgccctgaatactagatccgggggaaagaccaggaccgggacaacgggtcccaagggaggaggggcgccccgggacccccgcccagggggccccggacccaccagctcctggtcctggggcgccccacggcgcatgcaggctctgggcggtcggacatccgagggcagagctcaggggacagggcctggagtcagagctggggggcgtgaggggcgaaaggggacaagatgagctcccggagcagggcctcgactgatgccgccgccgccttggaaccccgctagatggggctcccgcagacccaggcccagggcccccaagacctttcctcttccagctctgccccaggttccttccctcgtgccgaattcgccacccaggcctcgctacctaaacccgtagagtactg

SEQ ID NO: 446655 - DNA, 643 bp, Homo Sapiens
  misc_feature (316)..(324): n is a, c, g, or t
aaattcccagaggccgcctatgttcgatgagccccaggattttttcccctggggaaaaccagggttaatggccccattgtttcaaatttaccctacgggggggccccgggggcccaaaaaggaattggtctagaaaagcttttttgaggggcccgaaggcggcccgacaagatttattattgttggggtttcgtctttcgtttgggagattcagaatttaattggttaagagattatacataagtagctgctagaaatcattactttcaacaatgcaacccaaaacaattttcctaaattgaaagcaaaaaccgannnnnnnnnaaggagactggaattgaacaaaattctctcaggctgctgaagtctgttgcttcatttattttagactcagtcttcttttcatcgctgatttggaaatagtgaaaggccacccgtaaacaatacctcacataggaatagccttcaggaggtctcagagccttccatgtctttaaaaattgtatctttaaaattagaatatgaggtaattgctcttatgcaaatttcagagacaacatgagcgagctccctggcaggcagaagctggacgtcctggtttcctaactgctcccacaaatgccctctgtaccctgctgggttc

SEQ ID NO: 446656 - DNA, 473 bp, Homo Sapiens
  misc_feature (402)..(402): n is a, c, g, or t
caccgtcctgggcactgccagcagttttattagagagccctgtcccctgattaaaagtggacactttcccacgggggtctcctccttcccggtgaggggctcagctggggtgcccctgtggcaccactcacaggccaggagccagggaagttctggggaagcactttcccagaaacccaccccagaccccaaggtagcttagggcttttcagaggcaggcccagatccggtcccaccgcagggaccaaccatgggccccgcctgcctgaggcctgcagcgggccaagccggctggcatgggctggcctattctgttgggtgggttcttggcccaccagagctggacaggcaggtgatcaagccacgttgggtgtgctgggggcctccgtgggcactcactgnggctctggccagaagacctgcatgacgctctgcttcctggaggcggtgtggcaggctgggcacatcctaga

SEQ ID NO: 446657 - DNA, 590 bp, Homo Sapiens
  misc_feature (439)..(439): n is a, c, g, or t
cccaaccaccaaaacaacccatttgcatgtcggcgacacgcctggtctcgggctccctttctggggctgtcctcccaggcggctcccaggtcctcatccagggaagagcccagcctcggccagaagccaccgcggcctccagttccgcaccgtgacaacctgggacccagcctttcagaaaggccaccaggaactgtttttaaagcatagggctgcactaggaggaagttttcccttgaggctgagagttatttcttgtggagaaatttcattttattgcctagtcccttcaggaacttattgacaccgctgtgctctccactggggagtgtttccagatactcttgggctcggacctcaaacagacctttggcatcctgccggcgcagctcccgctcctggatgaagccccgaaacatctgagtctccatgaagaccntccaggaagtggcggaggctcttggaggagacagctttgcggaaggcctcccgctgcagggttctctcctcacgctcgcccgacgtcaaggaccaaagagtattgtccacaatctccacgaagaagcggacaaaggcttcagacaccactt

SEQ ID NO: 446658 - DNA, 468 bp, Homo Sapiens
caagtttttcaatgttctttaataaaatgacatcaattgctgaaagcattatgacctttgttatgctacataatactgatacaaaatgtgaatagtacaaagttcattatatataaggctttaatatattacatttgtttctacataaacagactataaatatatgtgccatagcatgtcttatagtcattgttcccagcatttcacactatggtaccaaacaaaaaacacattttcttttttgaaaaaaaggacagaacaagggcaaaaatcagtagaaatagctctatatgttaaaagtctaaataatacaatagatgttataatttgggctataaaataattttgaagtctggctaataatcattcagagagtgaacaaacccaatcaggtttactggagtagaggccaaataactaaaatactgatgggttgcggggtgagagtgggttgggacagggggaaga

SEQ ID NO: 446659 - DNA, 607 bp, Homo Sapiens; identical to SEQ ID NO: 61058

SEQ ID NO: 446660 - DNA, 480 bp, Homo Sapiens
  misc_feature (107)..(107): n is a, c, g, or t
agacattcataatactggtaactctcatcaacagctctggcatgtacacgtggccacggtacccttcgtacaacacgggaagagaacaacaggacgcccaagaggcnatctggacagcacacagcaaacagaaaggctgaacgcccccccatggaaccccattaaaaaacaatgtttgtctattacaaagtcacgttttccgtttttccgctttataaagtcagcgatgctggagggtgtctagcggaatccgtcctccaggaatgagtgcaaaaggagagcgcacggctcagggacgtcccttcagtgagcaatggaaggactggctggaggcctcccatccatttcggacaaacacacacatacagaaaaggattattgccagcttgtgtactctcacaatgtgatttttgtatttcgaaagcttgaattgtcccctgagtgtgagagacagagggggagcgtccgatcagcggccgc

SEQ ID NO: 446661 - DNA, 892 bp, Homo Sapiens
ctttccggtatttatatttttattccactctaacacctcagagtaaagaactgatgggcaggcatcggcttctgctgacaattgccaaccggcatgagattgctgagctgaggtggactctccagacactggaactggaactccaggcccaatggcctctggtaagaatgctgcaacgtgagacccttgagagagactgacttgttgaagatgaagagaaaaccaagagcctccagtccagttgttgaagagcaaccacgagccaacaccaaggagacaaggaagaagaagtccttctctcaaccgatgaccgcaagcacaaagaagagtcccaagatagcgaagaaaggaaaataactcaagggagagccaggaagaaaaatgctccacaaaaatccatggctttaagaatacttgaggaagggagcaggccaacaccctctggccacagtgaccagctgaatgaggaactctaacagaatgagctgcagttggagcaacagaggggacatagctggaacaacagagcgaggggacacagccggagcaacagagtgggaggatgccaaccatttcaactctctccctgagcagcgagtaatttcagggcaagcccagagactaggatccatctgagaagtcttcagaggtctgacccagagaactcaacaacaggatacgtcccatggtgatgaaaataaaatgaatcttgtgttcaccgttgtattcctcacgacttaagttaaaaacctgatgaaaagtggttaatctccataatgggtgttagctccatcgttttccaacgttagagataaccgaatgtgacctcaccccgtttagttccggaggcggcggtcgcggcggcgaacagttttcgtctgtctgctatcct

SEQ ID NO: 446662 - DNA, 562 bp, Homo Sapiens
ttttaaagaattaccataagttttatttttgcttagttttattaaaaaaataaatatgtcataaagctttctttttccttagggagaaaaaaaggaacaagtctcataaaaccaaataagcaatggtaaggtgtcttaacttgaaaaagattaggagtcactggtttacaagttataattgaatgaaagaactgtaacagccacagttggccatttcatgccaatggcagcaaacaacaggattaactagggcaaaataaataagtgtgtggaagccctgataagtgcttaataaacagactgattcactgagacatcagtacagatacatcttgcttaaacaacacagaagttcctgaaaagttttgtgtaaatgatataaccacaaacattaccaggagagcttggtaactgaaagaattccatggcgaattcttttgtgaacaactactttcacttttgtaaatccaggtatttgctttttataaggagtttacctagttgctacctctctgaactgaggaaacagcatattcaccaaacgttgtgctccagctggacc

SEQ ID NO: 446663 - DNA, 538 bp, Homo Sapiens
  misc_feature (487)..(487): n is a, c, g, or t
  misc_feature (524)..(524): n is a, c, g, or t
aaagaattaccataagttttatttttgcttagttttattaaaaaaataaatatgtcataaagctttctttttccttagggagaaaaaaaggaacaagtctcataaaaccaaataagcaatggtaaggtgtcttaacttgaaaaagattaggagtcactggtttacaagttataattgaatgaaagaactgtaacagccacagttggccatttcatgccaatggcagtcaaacaacaggattaactagggcaaaataaataagtgtgtggaagccctgataagtgcttaataaacagactgattcactgaggacatcagtacagatacatcttgctttaaacaacacagaagttccctgaaaagttttgtggtaaatggatttaacccccaaacattacccggggggagcttgggtaactggaaaggatttccctgggccggaattcttttggtggaaccactactttcccttttgtaatccgggggntttgctttttatagggggtttaccctggttgctaccnctctggactgaggg

SEQ ID NO: 446664 - DNA, 424 bp, Homo Sapiens
  misc_feature (319)..(319): n is a, c, g, or t
  misc_feature (345)..(345): n is a, c, g, or t
gagatccacacgagggcgcgctcacgttccagaagccgcgtttgaccaagaggccgcggtaccttgtctgtccaacactggattctaataggcgacctcaaccccttagaaacaggcggcagctaaggtgtttgctagtttatttgttctaagcagccatgaggtgtgagaagttgtatagagacagaaaacggagcaactagattcacgaaacagcctaatctttgtctctttaaagacaaagctgttgcaaaagaataccttggtataaccaggtggtgtggagcagagttttaaaagataaatgtatgccttttgnaaatataccatagcctctgctggttntattaaattagggaaaatcagttttcttggtttcagtgtggagagccttgtctagggttggacaccccctacttaacat

SEQ ID NO: 446665 - DNA, 756 bp, Homo Sapiens
  misc_feature (543)..(543): n is a, c, g, or t
  misc_feature (610)..(610): n is a, c, g, or t
  misc_feature (623)..(623): n is a, c, g, or t
  misc_feature (635)..(635): n is a, c, g, or t
  misc_feature (685)..(685): n is a, c, g, or t
  misc_feature (699)..(699): n is a, c, g, or t
gggttttataatgttttattataaaagtaatatatgatctttatagaaaaataaagaaaataaaaatcatcaataattttatcacccagaaacaatcacttttaatgggctggtagaggttagtctattttaacatttctgaaatcatatagatttacatgattgctctcacgtaacctgtaacataagcatttcccatgttgctattatctgttaataacagtggtttgattaattggattggctgtgtggatgtggaacggaagattcttgatgtcaagaagggctgaggcacagaaggtgcagtcggtcatttgggaccatattgtctgtggctttcaggacagggagctttgggactcaggtagatgactctggaagaaaccttctcttttggaactgcagcatctccctgtcctccccaaggggaatttaggccaggaaataccagatcttccctctctgattttcttctcaaatcccaatgcaagacaatggagacttaatgtggttctggtcatcaggctcttccagagcattcgnggtgcatgagaagtgaataggtgaatgtgttctcagccccaactttgtcagcctcatcagggatagntgggatggctganatccgctttttncctgcagtgatcaaaggcactacagcagcaacaatgggccgtacagcaantccagtgacacagnccacatgatccccatcgggagagcttggagctttgacagtgatgcacagcctgggat

SEQ ID NO: 446666 - DNA, 403 bp, Homo Sapiens
ttttttttgattataatgttttattacaaaggtaatatatgatcattatagaaaaataaaataggtcatcaataattgcatcaccttgaaacaatcacttttaatttgttgttagaggttagtctattttaacatttctgaagtcatatagacttacatgattgctctcatgtaacctgtaacataagcgtttctcatgttgctacatctgttaataacagtggtttgactaattgtattggctgtgtggatgtggaacagaagattcttgatgtcaagaacggctgaggcacagaaggtgcagtcagtcatttgggaccatattgtctgtgggctttcagggacaggggagctttggggactcagggtaggatggactctggggaagagtcccttctctttt

SEQ ID NO: 446667 - DNA, 504 bp, Homo Sapiens
tttctatttttaataccgagccattacataatccacacagtaattgctgacttgaaaaactattggcaacattagaaaatccccagagttttaaacaggaaaaggattactacagcacaaaagcctttggtagtttcactgactagtaaaccattggtaatcgtcacttgccagtggaagtcacatgggccctgggaaacactcccctatctcagggaaagcaggctgggggaagggatgaaatgcagcctcagctgggaggaggaggctgctggtggggtggtgtgctgagctctgagtggggctccaacaagtgacctccagccaaaagtgctgaaggagtgagcttcaggttgtcctcgggccaccttttactgcttttgtttcttgctagggaatgagtgaagtctccagcggcccagtcctttccctctcggtttcccaccttcctacagcctccaacatattcctgtaagagcctgagggagggtggactactccagt

SEQ ID NO: 446668 - DNA, 676 bp, Homo Sapiens
  misc_feature (184)..(198): n is a, c, g, or t
  misc_feature (591)..(591): n is a, c, g, or t
tttctattaatctttatttatatgatggttctctggaaagcacttcattttaaaacctgtttctgagataagtagcataaggcgcatttgaagaaatactattgttgtatcacagagaacttccatgccttgaaatcatttttttcagagtattattaataagatggtctagctatgcagagcnnnnnnnnnnnnnnntcttcaaaagccaagactgtcaggcacatgaaggtatgcataaacggtcttcacatttaattttgtatgattcgggagatacctccatgtacatctaaccaggtcaggcagcataagtcctcagtaaccctgggtgtgccggcttcaagccaaagtattctgttgagtttggtttgtggagagacatttgaaatgttgcttcatagcttccattttctggagaagtggaagaaatgaagcatgaaaaggcctaggaatcttcgtcttctccaggctcttcttctccttctgcagtttcttcctcctcctcggcttccccttccgcaccctccatggctatttcttccgtctcttctgtggctgtctctccttcttcttcctttgagtctggangaggagccaaacccaagaaggaataaataatatctcttctttgcagagaagaaagagtcaaaatcccacagtactgctcctcatt

SEQ ID NO: 446669 - DNA, 819 bp, Homo Sapiens; identical to SEQ ID NO: 151692

SEQ ID NO: 446670 - DNA, 938 bp, Homo Sapiens
ggagacagagacatttatttttttatgatgactaataaattatttttaaagttaaactatttttttacccacacatataataatttaagagttatattcatttccctcaaagcttttttcagagtttttttgaccacagagagaattgcttgatgaagtaaaagagaaactcatacctaaacacaaacctgtctaagaaaatcaaaattatttattgtgaaggaataagaattttaagcacatctctttgaccaaagggggaaagtgaaggcattttcaaacaataacatttaagcagtcccagaaagaattatatactcctcaattttaatcatccacttctactcaagtcctcccagtaaaaatcacaaccttccacccaaaagatctacaaaagctgatggcaggagtcaataaaattaaatatgaatgcatgctgttaatggcttagtcatctttactaaaatcttgctactcagatgagggtttcccccacatgctatccattttcactttccaattccaggaattgttccaaaaaccctacagagccatggtaggacttcagttgtttactaatgcttttcattctttcatgccaaagaatatgtatggtactaggattaagaaaaaaagactgccggagtaatgccccttttagcttatgtcctaattatgatgtctcattagagagtttgacaacattgttcattacctgcttgaataaatcaaacagtacattcaatggcaatactcctgtattatacaattcatcagttcttcatacgtttttcagataatgagctaatttctgggctatataatttcaaagaaaaacaggacatgaaaacacaaaactttcacttggccattatataatgtactgagttagttcactaggcatttttaaggtattagtgaagcattatagttatatt

SEQ ID NO: 446671 - DNA, 327 bp, Homo Sapiens
gacttaacaaatggatgactttattaagagagaaggacaagactgatgtttaccttggtcaaaccatccaggaaaacaaagcacacagacttatagaatactttggtttaaaaattattcataatatcaatattaaacctgatgtttaaagaacctaatgagaaatatagtgtaaaaaacaaaccatgaaaacacaagtttgcatagatgaattaatgtagatgtacaattggcatttaaaaaaggaggtttgcgttttgggagtgccttaacgatgttgaacacctcaacctcccaagacacatgaaagtcaccagcaccacaatt

SEQ ID NO: 446672 - DNA, 519 bp, Homo Sapiens
gctcggtacccctgtgaaaaggcaaatgtaggcaacacaaaaacaatttagatcaacatctcaaactttataatacactcacatttatacgcaaatttctgtttacaagtacaaaaggcaaagaaacacaaagaagctaagcaactgcatcatcagccacattcaatcgaattaatactgttgtccccagtccgtagttttaatccagaggaaatggtagatgccatttcacacatggactccaccgttagttttagaagttggagactgtgtgtggttccgcagaagtctgggtttctacagagctgaactgagactccatcgtgttccaggccagatcagccagaagaaagtcatccattgctgtctgagtttcgttgctggtgaagaacaagctccccagggtttcaaacccagaactcatggtctgtgtttctgtactgttcaactgaactttgctttctagagcaggtatatttttagcagtgggagactccttcagtttggggtctctgtgtc

SEQ ID NO: 446673 - DNA, 295 bp, Homo Sapiens
catctcctctattaactttaatcacattttcaacatgcagccaagaatgatgctttgacagtaagccatacatttacacggtcaggcattgtcaattttctgcagtcgccacactgagataacacaagagagctggatattttctttcttgtgcctttctttactaaagagcaataaaaaatatgtgaaagatttatccatacctcaaatttgtttaccataaatctcgaaattattgcatttacttttgcttggtttatggcaaataaaaaatcaacttagttcttcagttaga

SEQ ID NO: 446674 - DNA, 620 bp, Homo Sapiens
  misc_feature (598)..(598): n is a, c, g, or t
  misc_feature (601)..(601): n is a, c, g, or t
aatagtcaaacattataatttaatgttttctatgtgaattcacaattgaaatattgtataatatgacaccaataaactgtgcaaaggtctttgaggtagagccttatttaaattctgcactcaaatacatatactttacataaatatgatcttctcagagttataaacaaagtttagaaatatggtaaaatctctagaattatcagaggtaatttagaggcaaagtggcctgcctgttcagtaactgatatttcagcaaaaggtcatagcttcttctattgattcatagagtggggttagcctgtggatagacatttgtactaacatacactgattacattcatactacagaatcatatgttagatgccagagcataatcttaatctttcatcctctgcatacactcctatttgggtacttagcatgccactgcatttactcttgatgaagtttgttttcccaactagattttaaacatccttggaggcagaatcatgagatattaaaaatctacaaatatgttggctcttcagcgctaataaatgataaaatgtacccagtaaaaaaccaagcagtatttacagccagctattaagnttnttttcaaacactaattgca

SEQ ID NO: 446675 - DNA, 573 bp, Homo Sapiens
ttttttttgcttttagaatactggtgcattttttattaaagaagagaataaagcatttgtaaatatatttctctcacgtatacttcaaaggtgacgctggtctgccactacagagctggggagcagacaggctggagctcttcccccaacccttccacactcctctcccccagataacagacacacacggagggcagggagctgcctagcctcaaaggacaaaagtttcccagttgcacgtacagaaggactcagtcgccaccagctcccatcacagtgccgcccggaaagcaggtggtgtctccaggaggtcagggatgcttggtaagaaaacccctttacccattagaaataaataaggcatgaaggttcccactgggatcccggtgcagaggccagggcccccccgccttccactgactgtatggctcttctggtttctaaggtctcaggaagggcggcagaaggaaccagaagccctgaagggctgctcagggcaagctggggacctgggtgtctcttagctgaacttgactttctgacatcttgaagcaaaactcctgacgcagctcc

SEQ ID NO: 446676 - DNA, 474 bp, Homo Sapiens
ttttttttatttcaaaataaatgtttaatataatttttagaccaaagaaaaactcaatcatacattgtctccagtggaccatatgtgccagaacaggaccaactcagtccagctttgaaggccctgattcagtcctactggtataatctcccttgatttattgatttgtgtatgcttcttatgcaatacaaggtgcattttactcttgaagtccctatcacctccaccatcgccatttaactggcaaaagcatgcttcctaatggggaggggttttcttcccccttccctggcagagggttctggaaccttcagggagtttggacaatcttatggaatctcttgaaccttctccccagaaaaatgtacatacaagtctacaaataatttcatggggttcatggaccccaaggcccacaatggtttctaaggccccaaattaaggaacctctgtgctagtgatttgagcaacgca

SEQ ID NO: 446677 - DNA, 482 bp, Homo Sapiens
agttatacttacatatgggtttctgtctgtcttctcacctatagctctgtgaaaaataagtgttgctcactgctgagtactcttacaagtgtgactggctggggctggtgttgccggtggtaaaggaatttaccaagacagttgtagggggagaaaaataaaggcacatttattagagaaagtatgaaaattcattgcaagggtgcaatatgtagcactacagagaaggggctgtctgcaaagaggcaggggctggagggaagttttataaggtcttctggagggggctacatgctgatcgaggttgtgccatttgggctacctgtggagcaaggtcgttgtgtcagcgcgttgtttatggttacttgtctctcagaacaattgttctctcctaccttgggcccctccctggtggttatcaagactccacaaatatccagtgcctcttgcgctttaggatatatattaagaagtcactggct

SEQ ID NO: 446678 - DNA, 538 bp, Homo Sapiens
ctgcaccaaaagacatacattcatttatttttcattgcagcaacaagataaacaagtataattccatggtcaaggagttacaaatagtagcaagcccagtaaccttgagcatatctataaggcaaataaaacaaatatttctttcatagtgtgggcatccaactttagataatctggaaaaaaatcactctagcccctgaataccatgatgtgcatgatgtgcaaaatgaaagtatcacccaaaatattttcaaagctaaaaagaaaatatttaaattcaaatactttaaccaaattggaaatgcaaacagtacacttagagtcatccttagccagctgttctccaaacaaaagatcgagaaacaaaacctagaacaatgtaaaaaagaaaaggtttatctagaaaaactggaagctcatcaaagtcacatttcttcttctgattcttgttctcgctcagcatttttcagaagccaacttctgaggagcagagcctcttaagtctagatttaaccaaccaggtaatgaaagcataatt

SEQ ID NO: 446679 - DNA, 681 bp, Homo Sapiens
gcggccgctcccttccccgcgcagccccgcacggcccgggcccacgtacaatgactcttcttgcttttcacctaagttgaataagcaccctgtgcactttaatctcctgtcggtaccattgggccaactaaagacaaggttttgaaatctcagctataaaagacatccagccaaactctcagtcttgccttaacaatgttccagaggctgaataaaatgtttgtgggtgaagtcagttcttcctccaaccaagaaccagaattcaatgagaaagaagatgatgaatggattcttgttgacttcatagatacttgcactggtttctcagcagaagaagaagaagaagaggaggacatcagtgaagagtcacctactgagcacccttcagtcttttcctgtttaccggcatctcttgagtgcttggctgatacaagtgattcctgctttctccagtttgagtcatgtccaatggaggagagctggtttatcaccccacccccatgttttactgcaggtggattaaccactatcaaggtggaaacaagtcctatggaaaaccttctcattgaacatcccagcatgtctgtctatgctgtgcataactcctgccctggtctcagtgaggccacccgtgggactgatgaattacatagcccaagtagtctcatgggccagaaaagc

SEQ ID NO: 446680 - DNA, 182 bp, Homo Sapiens
ttttttaagggtgatgcaaaaatagtttattatgatatagtttatgtaaagttaggtaatatttacaaaataaaaatgatcagctacatccagggaatctagcatgtcacacaaaggaataaatattctgacaaagtaacacttcaattcgtagtgaatcgttgatcacaaactaactttgt

SEQ ID NO: 446681 - DNA, 188 bp, Homo Sapiens
aaagaagaatttgttactatgtaaaccctgacattaaatgttttatctctaccagcatcaggaggaatcactgctttaagggtattatgtaatgcctagtgccttctatttacagtgaaaaagaggttttgtgaaggcatttatggtcattaccaaaaactaaattaaaggccttggatttttaagcc

SEQ ID NO: 446682 - DNA, 1068 bp, Homo Sapiens
ggaattggaagacaccgtttatagatatagattccattttacaagaagggaaaattgaggcctggagcagaaggaagcagtggggtagagtcagaaccagcatccttaagccgggcagacttggccttagacagacatgccttacttaggtccagcagatgctaccaggaaggtatggctggcagtacctgcgtctgagctcaggacttcagaccaagatggaagtcccttagaccaataacataaaaatcactttttaactcaggtgctgtgggtagggagcaagggcagctatactgtcctttcagaagctctcctgggctgtggaaagtgcccacgagcctggcagatcacggaggaaggaggcagaagttccaggcccagaacctgggtcccaggctgcattcagagaggattccttgaggccctggcagccaggaaccctgttttatgtgccccgaaggctgtaatgaaaacattgatgaccacagtgaagaagaccaagatggtggctgcgttgttgagctggttgagtcgccactgcttttctacctcattcaggttcagccgtgcaatgaccacgagcaggacaccgatgaccacctgcaggagcagagagaggctgatgagggtgaccagggtggtgtagtagtgagaggatggtccctgctccagcaccgccttcagccgcatggcgttggacatgaacagggccacgtccagcatgctctccgccacgctcttcttggtggcgtaatggttcaggttgatgggctggctcctggggtcggagcttccaggttgaaggtcgatgttttctcttgctgattccatctcgctgccctcaagtcccttcacacgcaccgggtgccgggaacagactgcgtgggctcctccaggctccgccgtctgagtctctgctgctttcttcgggtgggagagagcacacagctggcgggacagacctgccattcatccctctgatgtgggatgcccgtcttggctgcagcctctgggggaggtgtgcacctgcacacacgtgtgagtgtatgtgtgtgcacatccgct

SEQ ID NO: 446683 - DNA, 364 bp, Homo Sapiens
ttcccctgaaaatatttaatgcaagtaagtccagagatggggctttttacaaaaagtttgtcagcaaattcccttttttgtaggggacagggcagcaacagaatggggacaggatatcaaacaattgatttttattgcagtaagagtaacaaggaatcccacccctcacatgccctttgctttatgtaaaaacctgtccagcagaataagcaacagtcaccctcaggaggcgatttagccccaagtgcccatagaacagcctcaggccacgacttttgtgctccctcgttgttcccagagccatctgccaagaccaggaattcacctttggagtctaacttgttttctctttttttcacctctc

SEQ ID NO: 446684 - DNA, 576 bp, Homo Sapiens
ctggtgttttcaatgacatgcatgttcagcagagaaagatgaataaacactgtccaattcttctctccacatagaagcctcaagaagaggtgaggagatgccccgatttccttatttcagagcagtacatgcgttcgtctcacgaaagctcttacaactaaaacaacagcaccaacaaaccaggatcaaaataatcgtgcattttccaggattccatgttggacttctcagtgctttggagatcaggaaataatcatgctgttgcagcagtatggttttgtgtctggattttattcatacaggcatgtgtttacaggcatgagaattcctgtattgaaaagaaagtccttgtttttttctaacgtatctttctgttccatcaactgttaaaaccaaattgttaagaacattgagcttcttaggagagattacatgcagctacttaggaccacctcagcaaaatggagttgcctgggtagatagcagcagcagctcaccagccccacgctgccaggctgctggctgctgtccaccaggcagctgtggaacctccatgttctgcctaggtgttgtggc

SEQ ID NO: 446685 - DNA, 721 bp, Homo Sapiens
aaccttaaagatttttttactcacgtacctgttacactttagcatacagatagatcatagatcacgttacaagcacttggctcaggtccagcaaggacagatgaacaaattcctgagtcagaagtctgttaatattgctgttttgaaggacaatcctttattttacttgagaccttacatctttgttctagctgacagtaaatctctgggtttctgttacgaactctaagagggctgaaacttctgatattcaggtggatcacctgaattctctcagctgtcaatggcttggagaacatctcatgggcccaagtcatcaaataacctgttcctctctgtaagggcagtgtgagggactgctgtgcagacccaagcaatcccaacctggtgctaggtcatttcacttttctgaaaacctcacatcaggctgcatcctcttctgtccctggcaccaggctttgtttacacttggagccaccttggtgtgggtcaccgggacagtgtactcctctcctgccagcctccccttccccgaggtgtggtggctgcagtctcaggaagagcttggtacttgtggggacttctgttttctccctgtggagatcagtgaagactgggaggaaagctgcttcaacctgagtccggctcttcagcaggctgcacaagtggaagcaactaattctggtgctcaggctgggctctccacccaagttaggcctgc

SEQ ID NO: 446686 - DNA, 715 bp, Homo Sapiens
  misc_feature (597)..(598): n is a, c, g, or t
  misc_feature (612)..(612): n is a, c, g, or t
  misc_feature (622)..(622): n is a, c, g, or t
attctattaacatttgctgagaaggcagagcagagatgctgccagcagccacagtggtacggccagactgatggatccatttattcctctcaccgacccaggtcctttttgcttgaagtgcacggtggtaccaatttcttgaatggggtgggggattgtgggtaaaacacgtttgaaaaggactaggctggcattggtgacccccagcttgttggcagccacacaggtgtagttgccgtagtgctcctcagtgacgttggtcaccgtcagggaagactggccctccgtgctcttaatctcaaggccattggcactatttatcctagtgtcatcccggtaccactcaaagtcaggtgccggcactgccgaggcctcacatttgagtgaagcttgtcgtcctgtggtggcttcattgctcttggattctgtgatagtgggaggatagttcacagtgaccttgacttgtttgacatccgccgaggagacctcgttggcagctttgcactcatatttgcctgactgctccctggtgatgccaaggatctccagatattcttcttctccttcaaatttcccttccagctgggtgtaggtgtnnctcagtgataacangttcaggacngccatttgccatgcagaccagaatcacgttgctgccctcaatcacagtgacatccgaggagatatttgaatacttgtgggacttgtcgatcaa

SEQ ID NO: 446687 - DNA, 662 bp, Homo Sapiens
taaattatttttaaatttttattctattaacatttgctgagaaggcagagcagagatgctgccagcagccacagtggtacggccagactgatggatccatttattcctctcaccgacccaggtctgaaaaggactaggctggcattggtgacccccagcttgttggcagccacacaggtgtagttgccgtagtgctcctcagtgacgttggtcaccgtcagggaagactggccctccgtgctcttaatctcaaggccattggcactatttatccctagtgtcatccccggtaccactcaaagttcaggtgcaggcactgccgaggcctcacatttgagtgaagcttgtcgtcctgtggtggcttcattgctcttggattctgtgatagtgggaggatagttcacagtgaccttgacttgtttgacatccgccgaggagacctcgttggcagctttgcactcatatttgcctgactgctccctggtgatgccaaggatctacagatattcttcttctgcttcagattcccttccagttggtgtgaggtgtctccagatggatacaggttcaggacggccattggccatgcagaaccagagtacgttgcgtgagctcttcacagtgacatgcgaggagatattggagatctggagtgggacttg

SEQ ID NO: 446688 - DNA, 467 bp, Homo Sapiens
taaatatttttaaattttattctattaacatttgctgagaaggcagagcagagatgctgccagcagccacagtggtacggccagactgatggatccatttattcctctcaccgacccaggtcctgaatcaaaggcattgatttgtgaaatgggtcaaggcttttaatgttgactcaaggagcaaaattcagctgcagcaggactttttgcttgaagtgcacggtggtaccaatttcttgaatggggtgggggattgtggggtaaaacacgtttgaaaaggactaggctgggcattgggtgacccccagcttgttgggcagccacacaggtgtaggttgccgtagtgcttcctcagtgacgttgggtcaccgtcagggaagactggccctccgtgctcttaatctcaaggccattggcactatttatcctagtgtcatcccggtaccactcaaagtcaggtgcaggca

SEQ ID NO: 446689 - DNA, 924 bp, Homo Sapiens
atggggcagcgggggtctttattcgtcagattttccttcttggcctactccccaggtgtggccagggatagtccatacagtgtggctactgccaaggtcaggatggccagcagacccagtggggccagcagcccctccctggatagggctccagggtccttcactggaggaagatccttggtacccctgctctctccaaggctgggactagtgttcctggttgtggccaggtgtgcagtggttgtgacagcagatggtcttggcttggtcctagcagaggctgtgaccccatacatgggcctgatggtgccgaaaggcctggcgtgagcatccacccaccgcagcagggcctgtggtctccactgacagatgctgagcagggccaggacatcaccctcagccgtgtgcgagtctggaggggactgcccatacaggcgagtgtagatgctgcctaggctgtagctcttccttgggccgtgttctgaggggctgcttgctcgctccagggccttcagcgcagtgatgctatccacacagaaggcaccatccagagcactggtgaggcccagcatagccagctctgcttggagcagggggaagtcgtagcggtcaccattgtgtgccaccaggcaccagggctgtggctggcgccgcaggaaggctaggagcaggttggccaggttgtcatcaaaacattgacgcccatgcgctgccagcacagctgtgctcagacctgtgatctcgctggctgcagggctgcaggccttccccggagccacacacagggagagcttgtctaccacacgcggtggtggaggaactgtgggaggtggcccctgagaggtgggggggctctccagggcacatctgtggacagccagcaggcacagctccgtgaccttgggctgggagaagggcaagcca

SEQ ID NO: 446690 - DNA, 575 bp, Homo Sapiens
ttcttccctcattcttttatttttgaaaagtgccttcacgttgcatttttattggaggaaaacctcgctcgttcagtaagcataatctgattaacacagagaacggcaagcacatataaaatgatttttgtaggtcatctgcaagttcatggaagagctgggcctagaatgtgggttgtttcctggcctgtctagtctttgtagctgtgagacatagattacagcctatgctaattcaaaccttttaaataaaatgttccttatctcaaactagctggtcctaatggaccagtaaataatattcactttcagtctcttctggcttcctctgtagaggctctaggttatgacagagttagctgtgagtatgaaggaaatagaagtcaatgtccaatcgtggctaaattggaggaaagaaaacaatggaatctgaggggaatcaaacaatagttagggaatgttctattttcttaaattccctactagctttctcaccctcctgtagtgattgccaggtccctctagcctcagtagtgggaaagggagtcatttactgaacacctaccctgtgccat

SEQ ID NO: 446691 - DNA, 678 bp, Homo Sapiens
  misc_feature (563)..(563): n is a, c, g, or t
  misc_feature (618)..(618): n is a, c, g, or t
  misc_feature (623)..(623): n is a, c, g, or t
  misc_feature (644)..(644): n is a, c, g, or t
tttttcaaaggacaggacagtggttttatatatggcaaaatacttctcctaggggagtacagacaaatatagacagacagatgggggcacaggacaccagacagggaggggggaagggagggcagtggtgtcttctaatcagtaagtggaagctgcaccccacccccaggtggagggtgggacattggcacaggaggtggcgagacaggcatgaggtgcccatccctgaggcgggcagccgggcaggccccagtccttgttggcacactcggctctctctggcccagctgggatgctggggaggggcagggttgctgggctacagggatgccaaggcaaagggatgccccaggggagagggggtaccaaggcctctcctgggggaagtgaacatgggtaacaaacagaatcacgagaggcaaatacagagcagcaacagcagcagccaagccccccagaggagatccgaggtcccaaggcaacccctgggcaccatcccacgggtcctcttccctggggccttcagggtgaggtgaaaggacagttttttggtttaaaatgangcggaccaaagtgttcattggcttcacaaccaggtggacaagggatgggggctanatgcnaggggcccctctactattgcnagagcccagggatgtgaggcaagctcatccctgg

SEQ ID NO: 446692 - DNA, 2095 bp, Homo Sapiens
  misc_feature (430)..(479): n is a, c, g, or t
  misc_feature (2080)..(2080): n is a, c, g, or t
aagagaaagaaggggagggacgaaggaggaacagacgagcgaggagaaaagagagactgggaggacgcacatgagcgcgcggagggaagagtgcgtacggtatagggggacggcgggaggataacagggagtagggaagtacagcgcaaagaaaaacacatccgcagagggagagaggggggcttggtcagacgggtgggaaccagaagatatgggttttgtttaatcaaggtagtgatgaggagtgggcaagtagacaggggggagacgggggttgaaaaaagatcgcggcaagaggaagacagcctattagagtgaagaagaaggggggggaggaggcagaaaggggagaacgcccgaagggggaggttctaaagaggcgcgcccccgcggggaggtgtggggaagaagagaggcgaaaagagcaaannnnnnnnnnnnnnnnnnnnnnnnnnnnnnnnnnnnnnnnnnnnnnnnnnaggaaatgacggagtagagggtagacagaggggcccgtcatctctttatttgctgccagcagagtccaccaagcctgccgggcagccctgctgcccaccacggtggggtccaggcccagcccaccaccccgtggctgtctcctccaggctccagccgtcctgagggggccctggcagtgtctggagacccccaggctggaggtgaggggtgaactggactgagctcagggttagggttcccccagaccgttctgggattcctacttcctgttccctgccgagaggggcaccccgaatcctccagagggctgggatggattagagttgagaaatgggacaccctcaaaacccagggggtccttgcaagtccctggcgggcatccctgctgccctcacccgaccccacccccgggagctgggtgaggatggagggtgggggtccagagaagagtgaggggcagtgggggcttttccccaaggccctggggggcatcctcgtgcgtccccacagttcccttgcacaggtgcaggaggctgtcaggagtcagggccgggcatcacggtcccagcgtcgcaggcgggtcggccacagcaggaggctacagagacacagggcagcggccacgcccacgccgcccgtcacagccaccatcgcccagtggtaaaagctcacgcaggccctgcagcagagctctgaggggcaagggtgcaggctctggatggccatgactgccagcccattggccaccttatccaagaagctcatggagccgtacacgaacgctccgctgtttcgtgtggggaccgatgaggtcggccgtcatggccagcgaggtgacgaggatggtggcacagccagcacccagcagcacagccgctgcgtacacggccacacccagtccctccgccagcgccacccaggcggcaaaggccaggatcaccaggaggcctgagaagtaggtcatgttcctcccaatgcacttgttgatgggcttcatgaggaaggaggacaagaagccgctgaggtacatcaccaggggaatggtcgcgatgaacttcttgggcaggtggagcgagtaggtgaggtacatggccatgtaggtctgggacaggttcacgatgagcctggtggtcatgtacagtatgcccacctggtagaaagccggctcccggagccagtgcttccagagcagcaggggctgggccgtggcaggggccaacaggggggtgtgctcgcctggctcctccgcatgcggccggcgcctctcccgggtgcccaggtggaatagcagtgagaacacggcgccgacacccaccaccagcagggacaggttccggaacacgggcacgtcctggccccccagctggtcgctgatgctgatgtcttgggtgggctccacccgcgacgagccctgcaggtgcagcaggagccaggcggcgccgtagacggtgatgttggccaccacggtgaacgcatacctgagtgccgtgagctccaccttctcatggtcgttggtgacgagctccgggatgaggctgaggtgggagatctgtgtggaggcccagccaaactggaagcctcgtgccgattcaccacccangcctcgtacctagcc

SEQ ID NO: 446693 - DNA, 1211 bp, Homo Sapiens
  misc_feature (49)..(49): n is a, c, g, or t
cactagatgtatgtattgaactagtaaagggcgaacttgccagccttanctggctggttggctggcgatactcgtatacatacatatacgaagtatgatcaggcacatcggcgagctcgaatcgtcgagacggcagagtcgacgtggggcggacgcggcggacgtgggtgagggcgcggcgtaaaagacgggacgcggggtgcccggcgcgtgtgggggtcccggcgccgccccacggcaccaagaaggcctggccagggtacctccgcggacccgggggtggggggcgcgggccgggccgatgggcccgggaccccagcggccggagcggcgccgtcccgcgtgcgtgtcactggtggcgcggctgagctacgccgtgggccacttcctcaacgacctgtgcgcgtcatgtggttcacctacctgctgctctacctgcactcggtgcgcgcctacagctcccgcggcgcggggctgctgctgctgctgggccaggtggccgacgggctgtgcacaccgctcgtgggctacgaggccgaccgcgccgccagctgctgcgcccgctacggcccgcgcaaggcctggcacctggtcggcaccgtctgcgtcctgctgtccttccccttcatcttcagcccctgcctgggctgtggggcggccacgcccgagtgggctgccctcctctactacggcccgttcatcgtgatcttccagtttggctgggcctccacacagatctcccacctcagcctcatcccggagctcgtcaccaacgaccatgagaaggtggagctcacggcactcaggtatgcgttcaccgtggtggccaacatcaccgtctacggcgccgcctggctcctgctgcacctgcagggctcgtcgcgggtggagcccacccaagacatcagcatcagcgaccagctggggggccaggacgtgcccgtgttccggaacctgtccctgctggtggtgggtgtcggcgccgtgttctcactgctattccacctgggcacccgggagaggcgccggccgcatgcggaggagccaggcgagcacacccccctgttggcccctgccacggcccagcccctgctgctctggaagcactggctccgggagccggctttctaccaggtgggcatactgtacatgaccaccaggctcatcgtgaacctgtcccagacctacatggccatgtaggtctgggacag

SEQ ID NO: 446694 - DNA, 487 bp, Homo Sapiens
tcttataaaactcagcttgagggtctgatgggagaagggagaatttaagtaggagactggtttagcagttcaggaaggtgagtgggtggggtgcacagaggcaaataaataacacaggctgagactttgtcacagacatttcttggagcagatctcgtgccccctcccccgatgacaaggctgggtctttggcccccatcctcccccaccacttcagcctgcactgacactaacaatattgaggtcacagactggcttagaaacaagatcaggaagatatatgttggggtgcctcccccaaatctgggggccaagcatccgatctgaggggcaagcggctgggaaattgggcctgggggcttccaggggtctgaggtctgcctgggctcccagggcggcccctccatgttacccctgatttggggggcaatgaaggggattcatgggatcagagggtgggttttcaggcaggggagcaggatttggg

SEQ ID NO: 446695 - DNA, 847 bp, Homo Sapiens
agcgggggattacagatttaattcatgttattaactccctgccttttacctcctccctcctcccttggcacaactgccagatggatgtggctggaagtcagaggacattctcgtgggttcgtgggcctaggttacaaatgacctcagcgtgacagcaaacaggacagagaagaccaggctcttaactcaggaatccaccagccaggagaatgacaatgttgaacaccggaaccctgatgatatctgtcacatttgtaaggttgatttcagagtcaggagtggagacatcggcagttgacttgggtggagcttgggtcaagttctggggctggtatagagtgggcacaaggccttagtggtggtaggaggaatcttatacacattctgggtagaattctcacaggagccaggggtccctgaaaaacccttggtcaccaccaagcggatgcgatcgaacagcatgtgaggctccttgggaggctggtagatcacacactgatacagtccagaatcttccacttgaaggttgaccattcggacgcgcagtaaaccatgatcatggtagtcttctagtatgatcctccccacttggactggatgggaattctttgaaggcctctctgtgcatgccagggtcttgggcatctctccgtcccttattatctgccaagctttctggctgctggcaaacttctctagcgtgtagtcacatttcacatccagggtctgcccctctttcagttcatacttttcctcagttaatttagttgcagctcggagttctgagacaaagagcatccacagcagcccccagagcctggtcttcctcatccttcctgtgcaccag

SEQ ID NO: 446696 - DNA, 479 bp, Homo Sapiens
gcacatcttaatgtatttttattttctaggtggagacgtttggtaactgagaatcttttcaaggaggagaatccaaaaagccttctgctgctatctaaggctgcttagctccacagatccgtgaacagcacgcccagagtacagagaacgcggcaaaaccaacgcgaagaatccactccaggcagtctgagaaacccgggaggtggcgccacggctggagggcaggaggatggcggcgttccaaaaggcacccgctgtcacagacctcggtgtcctgctgtctgtcccagggatggagaggactgctccagggaagctgccggagcctgagtctgtcgggttcctctgcctgccccacctcttctacgggtgcctcttgctgcttctgtgtccccggccaactgaactcagtgggcttcgctgtacttggttccaaggtgctctggactccaggagagagtccgttttgccagtagact

SEQ ID NO: 446697 - DNA, 857 bp, Homo Sapiens
  misc_feature (186)..(221): n is a, c, g, or t
gggggtcttttatggtgtgccgcttttttgtttgtgtgttttccgtgttgggtgtttggttatagtaattcgcatttgatgattttatcacgtatgaatagtaaagtccacagttcagtcctcagacaacattcaggtaaatgtggtacaatatgagacacctgcctgtaatgtgatgacatgagnnnnnnnnnnnnnnnnnnnnnnnnnnnnnnnnnnnntttgaaccactgtgatttactagtctattaaaatgccattacacatttaaaaactgaacaattacaacaatgcaatcttcaagcaattaaaaacaaagaattgttgagccaacatgggagatctgctgagtaatctggcctttcaagtaatgtctagtggaaaccctgttttctccttccatctgaagatcatcaaaaataaaacgaacctacacgaaaaccacctgctctgagtgaaagtcaggattcagcccacatgactcagggacacactccccagcggttgctggaggcaccatcactccaacatgtgcaggagcagcgaggggtccacctccacagcccgcagcccgttgtgcaggctctggaaggtggcctgcttcccgaagcgctgccgccaacggatgaaggcctccaccacctgcgactgcacgttgtgggggtggttggccttacagcggtagatatccgtctgggacagtcccagagacagcaccatgggctcccactcagggcccagcctctgggccagctggttaatctgccggtctgatggggagctgttgaggatgtgcgaggggatcccagtcaatctgtcacctgcaggcaggtcggtcatggcctcttcccttgcct

SEQ ID NO: 446698 - DNA, 810 bp, Homo Sapiens; identical to SEQ ID NO: 54993

SEQ ID NO: 446699 - DNA, 728 bp, Homo Sapiens
gtgtggttttttgtaacagtgcaaatgacaaacaattcatttttaatgtaaatactgacaaggaaaaaaggcaccatggcccattcaagtattttgcatagatgtacaaatattgtaaacaattaataggtggacaagagagaagaagatctgttttccgtgaacaatctcccaaataaaaagaaaattcacattgccctggatcccagacacatacaaacgcacagtggacggtgtgagaggacgcgttgggggtgactttggaaatgtgggcttggattctacagaacctctccttcgcaggctcccctggggaaggggacctttccagttggcgttcccatggctttcttgggtgtccagcagagctgttatacacgtggttaacacaattactgactttggaactggtccccagttttcaaattgcaagtcttccataccctctgtcaaataagaataaattaggaagtaggcagggagagacttccaataaagattggaaaggcgtattgcaggaggtggggaggggctattgcttcagggggaagggactatggcaatacaaaaaaacactccaaccagaaaatcagccagtctcagaccttaagatctgcaagtgtctcagagctggggcagaaaaaggctttacttttatagggagaagtcgccaggctaaagcgacgcgtggtcgacgatatcccgagattccgaccgtacgcctgctt

SEQ ID NO: 446700 - DNA, 1071 bp, Homo Sapiens
  misc_feature (784)..(827): n is a, c, g, or t
gggattttcagtggctgacttccagagagcaatatggctggttccccaacatgcctcaccctcatctatatcctttggcagctcacagggtcagcagcctctggacccgtgaaagagctggtcggttccgttggtggggccgtgactttccccctgaagtccaaagtaaagcaagttgactctattgtctggaccttcaacacaacccctcttgtcaccatacagccagaagggggcactatcatagtgacccaaaatcgtaatagggagagagtagacttcccagatggaggctactccctgaagctcagcaaactgaagaagaatgactcagggatctactatgtggggatatacagctcatcactccagcagccctccacccaggagtacgtgctgcatgtctacgagcacctgtcaaagcctaaagtcaccatgggtttgcagagcaataagaatggcacctgtgtgaccaatctgacatgctgcatggaacatggggaagaggatgtgatttatacctggaaggccctggggcaagcagccaatgagtcccataatgggtccatcctccccatctcctggagatggggagaaagtgatatgaccttcatctgcgttgccaggaaccctgtcagcagaaacttctcaagccccatccttgccaggaagctctgtgaaggtgctgctgatgacccagattcctccatggtcctcctgtgtctcctgttggtgcccctcctgctcagtctctttgtactggggctatttctttggtctctgnnnnnnnnnnnnnnnnnnnnnnnnnnnnnnnnnnnnnnnnnnnnggacatttgtcgggaaactcctaacatatgcccccattctggagagaacacagagtacgacacaatccctcacactaatagaacaatcctaaaggaagatccagcaaatacggtttactccactgtggaaataccgaaaaagatggaaaatccccactcactgctcacgatgccagacacaccaaggctatttgcctatgagaatgttatctagacagcagtgcactcccctaagtctctgctc

SEQ ID NO: 446701 - DNA, 603 bp, Homo Sapiens
gcggccgcggcggcctgcgacgcctcccgccggggggcagccttgccgtgggccggggccgcgactgtcggggcgctaggggcggccagcggccgtttggctggcgtgtcggcggcgctcggggagggcgggccggggggcgcggcgcccatgaggccgctgcagcgcttgatctgcttctgcaggtacttgcggtggttcaccttccgcttcgacttgcccggcttgtccagcgccagcttgatgttgctggacgccgagtcaatgaagctgagtagatcgcgggtggcctcgcgcacgtcccctccttcggctcccgacagcagcgcacccgccggagccccggtctcatcgtcctcgaaacagcagcccttgtccagggctccgaaggcgccccctagcccgtccggggagcccccgaagccgaagggcacgaaagggtgcgtgctgaggagcgccgcctgcaccgccatcgccgcggctcccgggctgtccgcagcgctgcccgtgcgcccccgccagctcctgcccgccgcccagacccagctcctgccccggcgcggcgcgcgcggcgcagcctactagttccggcctcgtgccgaa

SEQ ID NO: 446702 - DNA, 485 bp, Homo Sapiens
ggctgttgtttttggcaaccattcttaagacaagctgaaagaagaactgtgttttgggaggtaaaacaaattattaaatactatcgatgtggtcctgctcttaacagattttgcaatacagtaacatatagctacttttaaagtaatttttctaatgcttctttctgcaagagggccaaaaccagaacatactgttttagtgtctttgttaacaaaaataattatttataacttttatattagaactgtatatttgatataaaaatatgtttataattaagctatccaaatttgtatattaaacagaattaacacaagtttgcagcatgagattagttgcaaacttattccctattattaatacttccttccattgaacagtcagtaagtaattcccttaacataaatccatcctaagtgtgtgcacaaatcggttagccccatcagttaacttcagaggaccaggtgataaccagatgaattct

SEQ ID NO: 446703 - DNA, 1080 bp, Homo Sapiens
  misc_feature (175)..(184): n is a, c, g, or t
  misc_feature (228)..(249): n is a, c, g, or t
  misc_feature (460)..(460): n is a, c, g, or t
gacagctgtctgcattccctgtagaaacccagcaatgattatgcacgttgagacatgtgctttttatttcttagcaagatattttatctctgtacataaagtagaaaccaaaagctagggaaacagatactctttacaccatcatgccacgcattgtttttaaagcattgcgttnnnnnnnnnnttaactaaaccaagatgctgtgattttttaaggtgccaatatgnnnnnnnnnnnnnnnnnnnnnnaatcattgcagttaagagaaatggaaattagttgtgttaatcttgcagaatgtttgcaggactgactatcaaactggatgatttccatttataccctactgtgtcagttcaagcatcaaaataccttgcatctgagacagacttcctacatcagggacaggtatctgtgtgtcattatacaaaacagttctagggggttgaactacatagntaaaaaaataaaatacatagtacttagtgtaaaataattttataaatgatcttttgtactttaggacattaaattgtacaacttttgtatatataaaagcttaggaactttctgtttagcaggaaggcaacacattcctacacttttaatgtatatgtttgttataatgtccatgtaaacatgccctatgtttgtgccttttaattagtttgtctcaataaacaaaatgtagagaaaaatatgtagctatgactttgttacaactgttcttatccacagtacaaaaatggtttgtttttaatatgtagagcattatgtgtggactactggaaggactcgtgtggggaaagcccaagaatgaccttgctgaggcctggattgggaggcacagtggccacatttggaggaagttcacatttcctggcatgcagacccaaaactgggttctggctctgcctgctgggatctgttatctctggtgggctggcagtcataattcacaattcagacagcccaggcttcctccacagtggtccaaggagcagtcctcagtgggggcaggtgtgggccctacccctaagctagaatgtggttgtcagaaccctgaaagtattagttct

SEQ ID NO: 446704 - DNA, 431 bp, Homo Sapiens
  misc_feature (195)..(195): n is a, c, g, or t
  misc_feature (220)..(280): n is a, c, g, or t
  misc_feature (336)..(336): n is a, c, g, or t
  misc_feature (379)..(379): n is a, c, g, or t
  misc_feature (400)..(400): n is a, c, g, or t
tttttgttgttttatactttatttgagaagagaccctacataaactatgtcaggaggatacaggtctacacacgatttcatcaatcaataaatggagttgttaacataacattgaagatatgatactatgagaaagacagacatatgaccaaggagtatttacaactctcacttatgatatatttatattgaagnatgggatatatacatatatacatgnnnnnnnnnnnnnnnnnnnnnnnnnnnnnnnnnnnnnnnnnnnnnnnnnnnnnnnnnnnnnaaaatgtttttaaacaaaaaccaggaaagagttcgccttcctgtggtgtttaaccntttggaaagtgaggatgggttgatttggattggtgtcctgggngttaaagctctgcccccacantttaactttcacacccttgggttccctggag

SEQ ID NO: 446705 - DNA, 2523 bp, Homo Sapiens
  misc_feature (521)..(521): n is a, c, g, or t
  misc_feature (550)..(550): n is a, c, g, or t
  misc_feature (632)..(632): n is a, c, g, or t
  misc_feature (659)..(659): n is a, c, g, or t
  misc_feature (697)..(697): n is a, c, g, or t
  misc_feature (800)..(800): n is a, c, g, or t
  misc_feature (874)..(874): n is a, c, g, or t
  misc_feature (907)..(907): n is a, c, g, or t
  misc_feature (1075)..(1094): n is a, c, g, or t
  misc_feature (1175)..(1235): n is a, c, g, or t
agaataagtataagtgcggcgtactgccggcgctggcggaagaaagaacgagcgacaatcgaccgttggttggcgcacagcacctcaaccaaaccggcgagttaagtgacgaccgcaagaagaaccgcgcgcaacgctcgcctgatctcccggcaccctcgcaatcaaaaatgcagaattagggggtcatcgcccggccatacgggccccgcgtctacaatggtgtctaacgcccgcacgcctctgcccactcatggaatggtctattgcgaagtacggggcggcgctttggggtgtttatttggagcggcgtgaagtgtgttgggttgcggcgccccgagcccagtgtgtccgtccaataaggtgtcttataaatggcgcggtgagacatcccatggtagacgcgaggcgaggtgaatacctgtggtgtatgtgagtagagaaggacagtggacccccgcgtctattgttagaagagccgaaggtatgctaaacacgagtagggattgggacaagcaacntccgggcagaagggagtaacggcgggacncgggccccgctacgggggtggtaggattatacgtcactcccgtaccgccgataataggacggggcgccccccgcatcacgangtaaacaattaagtttgatctaagaangcatggggcggcaggggatgcccgaaggagggtcacgnggcttatcaagggtagtggcttcagtcgcagtgatttttgctttggtggtggagctactttagtcagtctcgctctggtcggtggtgcttgcgccgcgttgangacgccgatagatgtaggggctctcccgccgtggtgtgcgtgaggcaacatgatccgagaccgctaggtcactngggcgtggtgtcatcacacgcggtaacctacgnttgcgagtggttcaacggtggtggggcgacagagagagagcggttggtgcggacaagaatgtttgttcgccggaggttagggttccgcacctttgtgtttgaaccaaagaaccaccacagggggcttcaagggggggttatagcgtgtggaccaccgggtgagaaaannnnnnnnnnnnnnnnnnnncaaggaatcggtcgatcgggagttcgttggttgatcgcgtcccagccaccgtggtgggtataatgttgacaagtgtgatannnnnnnnnnnnnnnnnnnnnnnnnnnnnnnnnnnnnnnnnnnnnnnnnnnnnnnnnnnnntggctagcaagggcgggtcaaccaggctgcacgcaaggtagtgtgtcgcacgacatccgtcggccctgtaggggtgatggtggtgggggcccggacctttggttgtgtttagcacaatactggttgcacgccattgacgggtattgttgttatttcttttccattgttcttttctatttaatatccatttatcaacattttgtcacaataataataaaaataatatctgttttaaaaatccacagggaattctcaagggaggagcttgtcttgtttctcgcccctcacatttgggaactcctggcctaggcccagtctctttggcttcctgccgccaggtccagcccctcttagtgcctgaagtggggtcttctggacccatccttgcccacagagtacagtgaacacaatgccctgggggtctgtggccaggggggagtcgagatcactgggggcctcaaagggtcagggattggggagctagtgaggtggagagtgggcggtgggggagttgtaagataagagtgggaatactgtatttatgtgggatggaaaacacgtgaacaggcccaggcagcctctagagggaggggcaggtctggagcaaagagcggctgagggtggggcagaggggaccgggtgcccagagagctgtcgaggggagccggcagcctgggacgactgcggggagaccagggcccctcagtgaacctggaagagtccgaagtaggtgaggaagggggcagccttgagatgggcccaggggagggtgcggatccgcagggaggaccctggccgcagggccaacagcccagacacctggcagaggcggagctggggcccgagggaactcgccgcagtggctgagaattcctccaggcagcgcagggccagcacaccatccaccagcaagtccagcttcaggtagacagccttcccctcatcaaagtgcacctgacagtacaggtagtagagcccagcccgggtgactataaactccccgatctggcggttgtagcgcagagggctggagctgttgattctggcttcctcccagccactcactgtcccgtccacacctgcctgcgctccgtcctgtccaggtcgtggatgaacttcataatgggctgcgatcgctcttcgagcccgtgttttccggcctttaggtgcacttctgcgaggccgaactagtcggttcaggaaaggcgcaggatcctggctttcttctgtctggggattcagttccctgtacacaaccgcacccctcttccacgcagactcacccgct

SEQ ID NO: 446706 - DNA, 1287 bp, Homo Sapiens
  misc_feature (49)..(59): n is a, c, g, or t
  misc_feature (334)..(334): n is a, c, g, or t
  misc_feature (367)..(654): n is a, c, g, or t
  misc_feature (1015)..(1079): n is a, c, g, or t
  misc_feature (1111)..(1111): n is a, c, g, or t
  misc_feature (1121)..(1146): n is a, c, g, or t
gcccaggggaccctgtgacctgtgaaaatctttgaagggggtaaccccnnnnnnnnnnntcagggccaaaaagggggaaaaggaagggaatttttccccggcccgggggggaagggagaaaaaggcccccaggccccggttattgaagcccgagggacattttaggaaggaaaggggcccccggggtttgggccctctggggtgactggaggaggaaggcccgggaatgatcccagattaaatcggatgctgtatgccctgtgaagacatggggtgtacctctaaacgcactgcgttgtaagcaaaggagtgacctgatttaatttgatctttnaaaagtcattctaggccaggccgggtggctcannnnnnnnnnnnnnnnnnnnnnnnnnnnnnnnnnnnnnnnnnnnnnnnnnnnnnnnnnnnnnnnnnnnnnnnnnnnnnnnnnnnnnnnnnnnnnnnnnnnnnnnnnnnnnnnnnnnnnnnnnnnnnnnnnnnnnnnnnnnnnnnnnnnnnnnnnnnnnnnnnnnnnnnnnnnnnnnnnnnnnnnnnnnnnnnnnnnnnnnnnnnnnnnnnnnnnnnnnnnnnnnnnnnnnnnnnnnnnnnnnnnnnnnnnnnnnnnnnnnnnnnnnnnnnnnnnnnnnnnnnnnnnnntgtcattctacactgtgaaaaatgagctggaggaggcaaagggaagaaaggggagatcagtgaggaggctgttgtcatagctcaggcaggagtatggtagcttggacttggcaacagcgtgcaggtagagcaccaccgctggagtctggatgcgggatgcattctgatgtagggagtgggggacgcgcacatcaagaagccaccgctggagtccagatgagggatgcgttctgatgtagggagtgggggacggcgcaggatcaagacttgcactgaaaatttctgctttgagcaactgcgtggaatggatggaggtgtccttcaccagctatgggaaaggccagggaaaggtttaaagggnnnnnnnnnnnnnnnnnnnnnnnnnnnnnnnnnnnnnnnnnnnnnnnnnnnnnnnnnnnnnnnnnagttggactccagcctgggtgacagagcgagnctccatctcnnnnnnnnnnnnnnnnnnnnnnnnnngaaaggtgtgatggggatggcaggggagaagggaggccacaagactgtctgcggtcacctagcgagtgataacatcttgacagtactattaaatatataaattaaagtgagccaccacacccggccaatatccttattttt

SEQ ID NO: 446707 - DNA, 445 bp, Homo Sapiens
cgcggggccgggctgaggtggcgtgtgggtggccgtgcccctctgcctggagccgcctcaaatcaactttattgacagtaggcggtgaccgacaggcggggtgcacgctgggcacacgtgcctggtcggtgttacttgaagcgtggggactagaagtcagaccctgaggagcatgatctctggaagctggagagaccttaagagttaggccaacctgttgtgggtgctggaatcctttgggcaccaagaagtgcttgcacacgctctattgatggggaacttaacacttcatgagtgagtctagtcttccctggacagtgctgtctgttgattccttataatgcacatcatagctttcattgattgtattaagcacctactgtgagccaagcattgagatatgtgctgtatagctcattctcacagtaccccacttgggtaatta

SEQ ID NO: 446708 - DNA, 186 bp, Homo Sapiens
  misc_feature (49)..(49): n is a, c, g, or t
ttttggtaaaatagctttatcctctgtcagaacacaaacaaacaaactnttgagaggggaggaaggaaaccgtctagctcagggctcacttaggagagggatgagattagaaagttcaacacactgcttgtgcagcggagataaagtcaagaccctagcacccacttataaatatctcgttatatt

SEQ ID NO: 446709 - DNA, 253 bp, Homo Sapiens
agcggccgcagggcagggaaacccctactggaccctgtgtgtctgccagcctggagcctttgtctccagccctgcctttattcctccttgcctccacaccagcctccccttgcttctccttacagactatccaagaagtgaagcttatgtctttagggagccttgggcagagtccacataaatgcaggaagaacttagacaatgcctgaaatgcaaaggcgacactggagtcttctttctctaacgtgtagcg

SEQ ID NO: 446710 - DNA, 608 bp, Homo Sapiens
accttttattcaacagcggctgtagcttaatcagttctctaatgatcaattgttctggttttaagaaatcaagcactttgaaaccaattcactgaaggcccttctgtctttgcgaacggattgcttgtcagtcgggttaggggctacttcctctcctgggggctctttttcttctcctttcttctaaagtagatgatctggttgccagagccttttgcacagggttgcccatttgcccttgggctggcgttgccccctctggctccaggcgattgctccctgtgcccgcagctgtcgtgcccggcttgaggctaggaggctgggctgggagcgccccggggtgaacagaaagcactgggctgtgagggagtccttgagcagactgggtccaacaggaaggctgcagcggtggaaccccgagctcagccctgctagtgattttctaggctctgttgtgctgtgccagctccggacctgtcaggaagccaccctttgctctttctctggccagaagagaagaaggctctccagtcctgatggcctaggtccagcgcccaggccaagggcgcccccacagacaggtgctgactctagcatttgtccatctg

SEQ ID NO: 446711 - DNA, 2047 bp, Homo Sapiens
  misc_feature (294)..(422): n is a, c, g, or t
  misc_feature (530)..(556): n is a, c, g, or t
  misc_feature (637)..(658): n is a, c, g, or t
  misc_feature (1749)..(1917): n is a, c, g, or t
  misc_feature (1961)..(1997): n is a, c, g, or t
ctttctcccccccaccacctcccgggggggattgtctcccccatgttttgaatttaaaacgcgggccacaaaatgggcaaaaatttttttgccccccccggtgtcctccccggggcgaaagaattttttaccgccaagggccccaaggtggggtggaagccccggcggcgggtttccggttttccccacccccggttgggaggggtgtccccctcccggcgcgaaggctttaatggaatcccaacccccacccccaaaaaatgccacgggcgggggggaaattttatatcgggnnnnnnnnnnnnnnnnnnnnnnnnnnnnnnnnnnnnnnnnnnnnnnnnnnnnnnnnnnnnnnnnnnnnnnnnnnnnnnnnnnnnnnnnnnnnnnnnnnnnnnnnnnnnnnnnnnnnnnnnnnnnnnnnngggttcccctgggaacaaagaaggccccggctcccttccttggggggccgcggcccccaaagaaagtgttttaaaaattttttggggccgggggggcccccaaaggcnnnnnnnnnnnnnnnnnnnnnnnnnnnccctctttccctttggtttcgtcgctcctttggtggcgctttcttcgtcttgcgctttttgtcctgtcctctttctcctgnnnnnnnnnnnnnnnnnnnnnnaccgttaaaagatttattgcagtaatacaataaaagtttagaaaacatttgtatgactcaaactggtttggaagttgcagagcaatggggaattcctgcaacatgatactgtgaggagattctcggacactagtcctctaacagcatgccactgaatgctcttccccaaattgagtccttacatgagtcccgtccactctacccaatggtgatatactgtttttcccccttacagatgtgcaaaacttttcttatattccataaccaaaaaatgtctttaacagaccattttaagcagcctgtttggtgcctgtgggtttttattagtattactttgtttcagtaaatcattttaaaatggaaaacatgaccaagttctatggctttttgtttaaacaaaataccagcttcaattttttaaaaagctgtttacatatggttctggcacctacatgaaagattttaatgagcagcaaaaagagtagaaaaaacagtggttgaaatggtatacttaagagtatttaccggttggatccagtgcaaaataatgaaacccagaatatttcagcagtgtaagccagtatgttggtgttcaaaaccacaagagggttcgatcacttaaccctatgtaaagtgcctctagttgatattaacaactacaaacaaaatatatcctatccataaagttcccacatctttgtaaattttgtggaagtactctagatgagtttgtgatctctggattctattctttagcttcatctctcattcatggtttcataagaggcttaagaaaaccatgactgttgtgcatctctcagctgaagtcagtctccaccaccaagctccaaatcccactcttacaactcgtgagactaagctcttacttctgagggttttaagtagctagacaactcttacaagatcgttaagtttatttatctgttcaagtctaccatcttcactctctacgaactccagaactggatgggaaaatggaagcccagcaatcaatcatgaagctgagcacttaaaacagagatcccagcagtgtagaagaacccataaggggccgggcgcggtggctcagnnnnnnnnnnnnnnnnnnnnnnnnnnnnnnnnnnnnnnnnnnnnnnnnnnnnnnnnnnnnnnnnnnnnnnnnnnnnnnnnnnnnnnnnnnnnnnnnnnnnnnnnnnnnnnnnnnnnnnnnnnnnnnnnnnnnnnnnnnnnnnnnnnnnnnnnnnnnnnnnnnnnnnnnnctcacgctctcgacgaattcgagctcggccgatttggcctgatnnnnnnnnnnnnnnnnnnnnnnnnnnnnnnnnnnnnncgccgccaccgcggtagagctccattcgccctatagtgatcgtatacatt

SEQ ID NO: 446712 - DNA, 684 bp, Homo Sapiens
tctgtgaatataatcatttatttgtctttacagtgatgatggaagaatgtacaggtgtcccctttcaataaagtataaaaatatgtttatatacagtgaagtcacaataatctttaactgggaaatttatttagaattcctgatctgttcttattaaaactgtgggggaaacaaatgttttacgtaagtgctacatttccagtagattgcacctggcatcaaaagctcagcttcatcttagggtcctgcttgatattacaaaagactaattttaagtcctaggactcaaaataaacatgattttttgaataatagatatatacatcaaaaatacatctaaaaaggcattggttagtgctattaaaaagctctatgtgctcgggtacattttttttcttacaggcaaaagccagtggaaacatttttgttcaatttctaggaattttctcttggggaaagtcggtcgaaagttacctgatcatattcttaggcttcatctccactgtccatttcaatatccatctcttctgtatcagcagctcgcgacaagatgtctgccatcagtgcttcttccaatttcttgcgtacttgctgtactcgctcttcctgtttcctgatgtcttcatctgtgacaataaaagctttgcagaggggttgagatgtgttaagccaaacaacagggtt

SEQ ID NO: 446713 - DNA, 340 bp, Homo Sapiens
  misc_feature (25)..(25): n is a, c, g, or t
  misc_feature (109)..(109): n is a, c, g, or t
cggtttgtgggcgcccgccccatgntgccatattggctgttggtgttcttggctgccctcaatgccctgttgcagtggttgttggggccattggtgttttaggcacccnctgctgaacccccttcaggctggcggtggccaaccacccccttcccggtcagcaccgacaaggttcagcgccatttgggttatgagcccctgtttttgtgggaggatagccggacccgcaccattttttgggtacaggccgttacgggttcagcccagtgacggtggggttggggcttggaggcccagatacagcaccctttcacccccaattaaacccagaacccctaaa

SEQ ID NO: 446714 - DNA, 1126 bp, Homo Sapiens
  misc_feature (426)..(426): n is a, c, g, or t
  misc_feature (445)..(447): n is a, c, g, or t
  misc_feature (450)..(450): n is a, c, g, or t
  misc_feature (452)..(452): n is a, c, g, or t
  misc_feature (455)..(456): n is a, c, g, or t
  misc_feature (460)..(533): n is a, c, g, or t
accgcgggtgtattccactccgacggggtcgggggggtggtggtgttcgcaatgccgcgcgcgcaggggttgttgaaaatccctttattcgcccaagtgccctggtgtatagtcagtgtcgggtgtgggtgggaggggttatctccttgattggggccgaccaacgcgttaagggaatcttcgagatcaagttcccgggagtgggggtctccaggagggcgcaccttggattgattataggagcgtctcgtgtgatcccccgggggcgtttgttccctgggaggggaatccagaactcccattcccgaggtcgatgcggaccgtgcgggaagcccgccagggccgctttttctcttggtgtgaaggccgagcggtccgccagggacaggttttctaaggttttcgggggagggccgtggccgcccnacgtggttggggcggcgcnnnccntnttnntggnnnnnnnnnnnnnnnnnnnnnnnnnnnnnnnnnnnnnnnnnnnnnnnnnnnnnnnnnnnnnnnnnnnnnnnnnnagggctttcctttaatgtatcttcaaaatcattctggggccaagttacatcataaaacattttattacatataaggactgaaacaggatttttcttaactgtaacatggtccacaaatgtaaatgcaaaacccccatggtggttgcaggagcaagtctagttgagacaggtcaggacgaaagcataaaagatgagtaactgaatggcatcccgggtcctgtagccacgccctccagatcgccgccgcaaaggacctggaacctcaggggcccactgtatgccatgaagaaggcgcagtcgctgcctcaaccaagccaggctccgccggggccgttcctatcctgagggtcggagggggaagggactcagccaaagccgcggcctcccagggcttgggcctccgcggcagccgggacgctgtgggttcgccgtggatcgccgcgatgtggcgtttctccaggcccgggagttcctggccctgctggaccagctgcaggagctgcgccagggtaaccgaagctgaggcagaggccggggccgagcattggggactgcggggacgctccatgtcgggtcgcgaatcctgaccggcg

SEQ ID NO: 446715 - DNA, 1118 bp, Homo Sapiens
  misc_feature (94)..(106): n is a, c, g, or t
  misc_feature (1101)..(1101): n is a, c, g, or t
aagggtcctccagacctgggggggagggcccagggaataccggtaagacgggcggtgtcgcagtagtccacggtgaggggcaggaatccctacnnnnnnnnnnnnntcgtggcccttttcaaaccgggctgggaaggagtaatttcaagggtgttatggcgggtaagtgcctcgattcccacacctcccggggggggcccagcctcaaggtcaagctggtgctggggccatcccccttcctttgccatttagaagatgggggctggaagcttggcaccacagaaattggacatcagccttataaaaccttgggctgaacttacggacctccaggagaatttcagccaaaacaaaaaagcaaatacacagagggaccctggaaccagaatccctccccatgggaaagacgaaggcacagagattcgagccaagtttcccaacatgttggtgtttgcagaaaagtccggtcacgtcacacacagcacagaggcaagaagcgaaggcagtggcattcacaggactactttattttaaagtttattacatttggaaaatctactgtccagggaaaaaccctttggtttaagtagagttttgccaaaagcaaaagactatcactttttggaaaatattcctgattccagcccagggcccagggtggggccacaggagctaacggagaacctggccttggatgggggcgctcagagccagttttgcccaagacacccttggtcaatttccaggaggaagcagcccttggagacggcgccacaggcaggacgggcgtggtctgcaggaggatttccaggcccctgccgccctccctacagtcctttttgtttgaaggctgagtcccagcattcacttttcacacgggcttttccaacgtggcaggggcccaggcctcagcatggccctgagcgcatggacacaggcccgactgcttgaaagaggcggcggccccacggcagcctggactgggcagcctgccaacagaccaccagaaacggggccaccagacagatagtccataccttgttgcacacatgagcgacaaacttaagagacaacacacaactaagcctactttttgcttcncagatggttctcctagt

SEQ ID NO: 446716 - DNA, 948 bp, Homo Sapiens
  misc_feature (290)..(290): n is a, c, g, or t
  misc_feature (317)..(317): n is a, c, g, or t
aaacctgaagaaatttatagaaagcttgtctagaaacaaggtgttggactatcccgccatcgttatatatgccatgattggaaatgatgtctgcagtgggaagagtgacccagtcccagccatgaccactcctgagaaactctactccaacgtcatgcagactctgaagcatctaaattcccacctgcccaatggcagccatgttattttgtatggcttaccagatggaacctttctctgggataatttgcacaccagatatcatcctctcggccagctaaattaagacnatgacctatgcgcagttgtactccttncctgaactgcctccaggtcagccccctgccacggctggatgtcttccaacaagacgttgcggactctcactttcagagagagcagagcaactctccaacacactgaaaaaaattgcagccagtgagaaatttacaaacttcaatcttttctacatggattttgccttccatgaaatcatacaggagtggcagaagagaggcggacagccctggcagctcatcgagcccgtggatggattccaccccaacgaggtggctttgctgttgttggcggatcatttctggaaaaaggtgcagctccagtggccccaaatcctgggaaaggagaatccgttcaacccccagattaaacaggtgtttggagaccaaggcgggcactgagcctctcaggagcatgcacccctggggagcacagggaggcagaggcttgggtaaactcattccacaaaccctatgggggctgccacgtcacaggcccaaaggactcttcttcagcagcatctttgcaaaatgtctttctctcaatgaagagcatatctggacgactgtgcaatgctgtgtgctcccgggatcagtaacccttccgctgttcctgaaataacctttcataaagtgctttgggtgccattcc

SEQ ID NO: 446717 - DNA, 997 bp, Homo Sapiens
  misc_feature (671)..(671): n is a, c, g, or t
  misc_feature (731)..(765): n is a, c, g, or t
gcctttgtgtaaagttgtggtttttgcagtcttttgtgatagttgttattattaggcacatgtgcatgagaaccctcccttgtggtatgaacccaaagtacctgagacaggtttcaatttagaaagtttattttgccaaggttaaggacatgccagtgacacagcctcaggatgatgtcctgaggatatgtgcccaaggtggtcgaggcacagcttgctttgatacatattagggagacacaggacatcaattaatacgtgtaagatgtacactggttctgtctggaaaggcgcaacaactgggggtggtgggcagctcgcaggtcataggtagataagagataaactgttgcattcctttgggtctttgatcagcctttcactgaatacacaatctccatgtgagaggcaggtagaggaacagtcactgatgccttagtctggctcagtgaatctgcattttcacataaacaatagggcagaggaagcaatcagacatgcatttgtctcaggtgagcagaggactgatggtgagttgtccattgtctggcatctgtgaagataagctatcaatttacattgccagggtgaaattcaacagaactattttagggtaaagatctcgaggtccacgaggaatttcccagaagaaaagcaggaactaccaacangagagccctggggactggtgcccagaggagctgcaagacaggagggaggtcacagggccnnnnnnnnnnnnnnnnnnnnnnnnnnnnnnnnnnngggcttcatgactcacacatccaagcagctcttgcctgtggggaagcttccgtctgcaggcgcaagcaactcagccgttgagaaacgcgcccacctttccaccatggggaagtttcccaccgaagacgttcttttccacgggaattcgcctggtccaacccttacccctctcctggcttcttcaaagacagaaggaacccccctgttttccccaaggggccagccttttaaa

SEQ ID NO: 446718 - DNA, 1179 bp, Homo Sapiens
  misc_feature (254)..(266): n is a, c, g, or t
  misc_feature (418)..(426): n is a, c, g, or t
  misc_feature (1128)..(1129): n is a, c, g, or t
ccactcctcttaaaggggaagcgccgagagaaaaggggatactcagccagggtgtgggaaaagccgcccccaacctttgggtttgggggaaaaaagaattcgcaaccgctcggttaaaaacccagggacatttgtgtttgtttctttcggtatctttcctggggagaacacaggggtttctgcgcagccacattgggacaatgtcaaagccccaccagcctcccggtggggttattctggtcttccccttcttnnnnnnnnnnnnnaagcattttcgggaataggaaaaggacttggggcatgggaccggggtgcggaggggcctggaggagaggcccatgggtcccgggggctggcccacagcgggggctgtgggaagggtccctaacctttcacaggccccctttctgtttaaggnnnnnnnnnggctgaaagggccacaggatatatttgtggtgtaaaccccagaggctgccactgctttcctggggagcttggaggccacacccatgtgactgcagggcaggatggtggacttctaggcccctacagcctcggcagtgtcctcagatccggatgtggaaagtgctgaggaagtcaggggccttggcaatcatgtcctcgaagtcagcaaagcccagcttgccgtcaccgtccaagtcagcctcctcaatgaccttgtcgcacacaagcaccacctcctcctcatccagctctgacttagtgagccgggccagcgtcagctccaggtcctccttgcagatgaagttgtcagtgttgaagtcatagatcttgaaggcatagtttgccttgagctctcggggagccgactcgcagagcacggaaaacatgtccacaaagtcgttgaaagtgaggttcccctcaccatcctcggaaaacgccgccacgatcctttctttgaagggattctcctgaagaaaacacacacagcaatcactgtgggtgcaggataagcaggagggccccggagccagactgtggacagcctgtgtgaccctggaggagtgaccaaatccctgtgagcctcggtttccccatgtgctccagcaaccctctgagcttgctcttgagatccgcgggaattcgcggacgcggggccgaaggggnngtgtgtgagtggatgggtaaagtagtgtacggtaaagggggggtggggtg

SEQ ID NO: 446719 - DNA, 899 bp, Homo Sapiens
  misc_feature (180)..(180): n is a, c, g, or t
ctcccggggccaggtcgcctcctgccgggacccgggcgcgctgcagccgcggagccgggtgccccgccctcttcccgccggcggcggagtcgctgccgctccgggttcccgtccccgcctccgagacccccgcgcgcctcctccaggcgagctgcggggcgggaagggtccggccaccgngggccgctgccagccgcggggctgccgagggccgcgggcacggggcgctggctccgggtctggcggccgctgatgggagtcggagcccgggcgggcgagcggcggcgcggcggccaccatggggaacaagcagaccatcttcaccgaagagcagctagacaactaccaggactgcaccttcttcaataagaaggacatcctcaagctgcattcgcgattctatgagctggcccccaacctcgtcccaatggactacaggaagagccccatcgtccacgtgcccatgagcctcatcatccagatgccagagctccgggagaatcccttcaaagaaaggatcgtggcggcgttttccgaggatggtgaggggaacctcactttcaacgactttgtggacatgttttccgtgctctgcgagtcggctccccgagagctcaaggcaaactatgccttcaagatctatgacttcaacactgacaacttcatctgcaaggaggacctggagctgacgctggcccggctcactaagtcagagctggatgaggaggaggtggtgcttgtgtgcgacaaggtcattgaggaggctgtcttggacggtgacgggaagctgggcttgctgacttcgaggaatgattgcaagggcctgacttcctcagcattacacatctggactgaggacctgccgaggtgaggggctagaatcaccaactgccctgatc

SEQ ID NO: 446720 - DNA, 948 bp, Homo Sapiens
  misc_feature (577)..(577): n is a, c, g, or t
  misc_feature (641)..(641): n is a, c, g, or t
  misc_feature (663)..(663): n is a, c, g, or t
  misc_feature (866)..(866): n is a, c, g, or t
  misc_feature (886)..(886): n is a, c, g, or t
ccttactatgtaaaacactttatttattttgtaaaaatgtttaaatatgaataaaaatactgtaacccaaagtagttgcctacttttaaaaatgaaacttgtaaaaataagagggagcccaaaccacatagaaagtcttagtttattttggtagacttgctttttataggcattggtttaaagtgattcttttcagagacatcctttgagaagttaaaattgcagaggcttacgctttcttttatttcaaatatgcatagtgattaaccagggaataagggattctcccatgttctgcctgttaagagcaaacagatctggagaacggaagcccaccctgcctcccttttccatctgaagcagtgcggggaggctggctcctctctttgttcccagactccagggcaaggggcgaccatgctgtatatgctgtgccttgggggacccccagaggctgcgctctgtggcctgtgctcccccgacctgtgcacccgcaccccagtcgggcacttgctctcacatcaggcaacgtcagcctgctgcagtgaaactcaaccatgatttttctttgcacacnaaatccttcctacttccaccactccctagcagaagttcccagtgccagagagcacctgctgggntgggggtggacaggaagccacnttattgtgtgtttattttaagggggcactctctaggagccttggaaccggtacaagctgaaaggagattcttgcttttacaataacgcgtactcatgacagctttaaaacagggctcctccggtctaaagcaccccaatcctgggtaggacccattttagaattaggaaaggcagtccattaactttttaagccttgatcagnttcgggctaatgccaaaaanggagtgctttcaggggcagtcgtaacacccgcatctaaagctttttactatctttttaaacg

SEQ ID NO: 446721 - DNA, 1454 bp, Homo Sapiens
gaatagtaagcctttagtatcttggccagtttattacagaggacgataaatgattccatgtggatagggcataacatacagagaatgagactatgccagaaatgggaggaggcatttgaaacaacatgagtatctcagggacagatggattgattctgctattggtaggcctggaaggcaaggtcagaagtagcaaaaaatggataccaaaagcactattagtcacccaagctaagtggaatagctggcccagtaggagaaatgcaggttttgctctacactaagttctccaactcttgataagcctccaaaaacaaatgttaggggaaaaaaacgcagctggttatgaaaagatatatctcatttcattaaaaaatcaatgtcaatgctgttaatagaatccttttatcttcaggacagaggcaatgccctaaacaaacaccagctcaagagcctctggatgccaaccctagagggtacccaaacacaaactttagcatagaggtaagaatctctatgtcttttggtggaggcaaaagccatttggttggtacttcacaggaacatctttctaccaagtcttcatcatatggtatgtgccacgagtctccagttgtttgcaccactgtgtcatagctgagaatacgctgaaaggttagttttgatcctggaaacctatttacaattgccagctgatgtccctgctgccacttaaaaaacaggcgttgggtcttggcatcaggcagacaggccttgtggtcccgcatcaggtctcttgtgataaacctgcagtgattcccggagtgcagtgtggcatacagaaggaatggatcatcctccgagatgtcatcagcaaaaaaacagctggcttgcttttgcacctcttccatctcatcccgactccactgggaactccgtcttagcatgtgcttccggcctaggaccagcagtcgcagattccgtttggctagttgagagacgacattcaagagaagttgagattcacgaactttaggaaacattttggcaacattgagaccatcaatgacaacatcaaaaggaggacgagattttatgaagttctcaaatctcttaagttcctgaggtgttgtctttctgtactggtcacctccatctatcacatccctcatgatttttcccttaagacattcatattcttctggactcagctgaatagactctatggtttttccacagcccgaacactggccactttttcggactgtggtgaattgtcctttccattgttttccaggaacactctcaaaccatgtttttatactgtgtgcaaatgactcctctggatacagctgattatttcttagatatgaaagaatatctagtagtttatttgaatagttatcatcctttatgtcttttccaaaatcaaagaaagcttttaaagtttccaacataggaacaatatcatgacc

SEQ ID NO: 446722 - DNA, 1159 bp, Homo Sapiens
  misc_feature (819)..(840): n is a, c, g, or t
ccaagtgatataatagttttatttgagacataaaaacacatgtgtttctattacatagtgtggggtttagggtcctggtttctaagacaagactttatttcaccctgtatcacagcttcctgggaaatgaattagggagcaagagacggcctggcaagaaaatcattattgttgctgggaagttgcaaagaaaggggagagtttattcaaattagtgtaacagagcccccaggatgaagagagtggtgcagggaaaaggtctaaattcctggtgttggtggggacactggcacatcccacagcaaggactcagccctcaacggcggcggctgggtcttgggaggggagtggtgggagggtaagggctcctcagctccctccctggactcccagttcagtcaccctttcccccggaagaattcaaagaggaagggcagggtctatgtcatggacactgctacttgttcgatgaagctggccaggtttatgtcccgttctgaaaggccggcacactcatgggtgctcagcgtgatgtggaccttgttgtacacgttaaaccattcaggatggtggtccagtttctcagcctgcagggccactcttgtcatgaacccaaaggccctgttgaagtctttgaaatgaaactgcttgaagatggcatcacggccttccagctcattccaccccacagccctcaggtttggcagcagctggtccctctcctcagcgctcagcctgtgtgctttgccagcctgctccgaaggcctgtggaccagaaatggtctgatgaagctcgcgagcttacagcagagcaagggnnnnnnnnnnnnnnnnnnnnnnggggtgggtgggggaagctcacgggaggagggctgctccagcgccaccaagcccccgtggcctggcacgggcctcaagccggcgcggggactggctctggggccagcataccggcgcagagcgtgagtcccaggcagaccccgtacccagagtgccagcgggaaggggcagcggacaggcacgcacacgagcgcgcaaactcagcctccctctcgctcccaccccagtataaagcagaatcgggccaccaaggggacgagatccgtggactcctccacgactgtcttccccggcccaggaaggtcgtaggccccccgct

SEQ ID NO: 446723 - DNA, 888 bp, Homo Sapiens
  misc_feature (339)..(349): n is a, c, g, or t
aggggccgtgaatgctagctgacctatgaagattaagaccctgtgtaactagtgtaggcaacctccagttggaccttgtttgggagaaataaggttcgcaggtcgggattctggggggacactcgaagtaagagcccgttcacagtgagcgagagtagtaagtccacggatgacttttttcgagtgcaacagaagttctcagtatttggagggtcctctcaaagatttgcggccttactgttgatatgacacctgcactgtgccattccgtgattatgtccattcaggatctgtatcagcgggatggggcatggtccccagcacaactcttctgggttnnnnnnnnnnngccaggtgattcctttgtgtgttatgtcgtaagtggagtgacttcatgcatatatggaagaagatttctatattcagctttttctgcaggttggagtcagcatagagttggaaaatcagctttggctttctttcctgtctcatttcctctagtgttctcctttttattgtcatcagctctcaacaactctgccacttttgtgtcccaaggtaataagatgtaggaaacaaaacattgtaaagtggagcaagaaaagttatcaattaaccacatcagagtcaaatgtcttgggtgacactaaggaggatatgggcaggtgataccagagtgctttatcttgtgatgttgatacagtagcagcctctcagacattcagccaggttggatttctcatgagtttgtcacctagttttgaatcctatcccgttggtttaggcacttccctgcctcgccttctcccgatgggctcgtctgcctcggaggcgcagggggtcgtgccgccgccgcgcaccggctgctcccgggagcgccgtcagggc

SEQ ID NO: 446724 - DNA, 515 bp, Homo Sapiens
ttctggtgcagcttcttttattattaatcttgaaatttgcatcatactaaacattcatgagtacctgatatagttcaggcccttcatcaagcacttgaaaggcattatatcttatcctcacaataacctttaacagatgagggaatcaaaacttgaggggataatggaacatgctcccaaatcctgagacccatcctattccaaagtctgacttctttccatggcatctcagctgcatccaagatgagcataaactgcattttcaaaatactctttgcatggtgacaggccagctcgagaaatacacacagtgagaagagacaagctgggattgtatgccagggatttgcctcgttgaaaccaggtgtctggacacatgcattaatcaccagcaccacagctttccggggtactcagagtgcatggagtgtgacctcatttaagggcagtgatgctgaccttttgggctgattccctaattgaccatgatgaaaagcctagggaactgaacatcc

SEQ ID NO: 446725 - DNA, 430 bp, Homo Sapiens
tcaagcaataaaagaaagggattttatctataactttagaaacacagcatttcatatttaaagttgatagaaatgtaaggaaaaataaaatccgtatgggtatcatcttccaagaagaaaatatgaattaagggatagatactttttacaatatgaaaataatcagaatttaccctatagaaatttaagtctgaattaactacaaggtaatagaagaaacgttcttcttaatctcatgtgtgttctctgtaactgattttcttgagtgcaaactgcacgtatctggaccaaggttcattttataaggcaacaagttagccagggggagggtgtggctaggtgtttctcttgctttgaacatctaataaaccaattcagtggaaaagaaccgaataaaatacagaagaatgatagttctcaatgaaaggtt

SEQ ID NO: 446726 - DNA, 1559 bp, Homo Sapiens
  misc_feature (163)..(174): n is a, c, g, or t
  misc_feature (556)..(582): n is a, c, g, or t
aaaaagatgaatataattaaaaaacaaagcacttttcattcaaaaaagaactgtagggtaagaccctcatctcagaataaccccatctaagaacactcaggctttctttatttaataagcagcagcagaagaatacatcccattctacatactgactgtgttnnnnnnnnnnnntgcagtccatatgcaggtagaaaactaaagtgcaacagaagcaagttaattagagtgtactcacttatacactatgcttttaattagttaacacaaaaatgtgtaattgataatttattattggtcctacatattatttactggcatgctgtagaccatagagaaatagaatgtttactgtgttttattattattactctgtgtagatacatatttatctatcatgtcaataaaaagaagcaaagcagtattaagcagcggtggaatttgtcgctttcactttttataaagtgctacataaaatgtcatatttccaaatttaaaaacataactccagttcttaccatgagaacagcatggtgatcacgaaggatcttcttgnnnnnnnnnnnnnnnnnnnnnnnnnnnaatgatctcttctgggtatcacatcaaatgagatacaaaggtgtactaggcaatcttagagatctggccaacttatttttatatttaagggcatctgtgaaccaagagacgttatgaaattaaatgtacaaatgtattatgtataaatgtattaaatgcaagcttcatataatgacacccatgtctctaagttgctcagagatcttgactggctgtggccctggccagctcttttcctgatagtctgattctgccttcatatataggcagctcctgatcatccatgccagtgaatgagaaaacaagcatggaatatataaactttaacattaaaaaatgttttattttgtaataaaatcaaatttcccattgaaaccttcaaaaactttgcagaatgaggttttgatatatgtgtacaagtagtaccttcttagtgcaagaaaacatcattatttctgtctgcctgcctttttgtttttaaaaatgaagactatcattgaaacaagtttgtcttcagtatgaggacatgttgacggagaggaaaggtaggaaagggttagggatagaagccaggttattttatgccaacaaagtctgctctaaaaagccttattgtttcactacctattaatatgagaactctggattcattttcccttatctcatgtttatagtgttttaagcttactttgtatatgtttactgggttaatgagtcacagcttttcaggatgaactcctattctactagagagatactcaattgaaacacacttttagattgtgttcttgcaagcccactctcagctgtcaaagttaacaccccataaaaatactctacaaagcaaagaaatacacttgcaaataactgagtgctgactgtaagcccaatcacaacttttccatttttcaaaattaaccatagttgatggcttgctgtgtctctctatcttgaacgttgtggtggagatctttcaa

SEQ ID NO: 446727 - DNA, 691 bp, Homo Sapiens
  misc_feature (580)..(580): n is a, c, g, or t
  misc_feature (609)..(609): n is a, c, g, or t
  misc_feature (653)..(653): n is a, c, g, or t
ttttgtgatcaagtcctgtttatttcagaagcttgaacagtagaactaggaaggagtgatgaaaacaaggcaccagtccccttgacagggccaaatccggcacaagctctgtctgtgcgatcaaggctgacccagcagcctcaatccgccttttcctgtgaggagagggtttgaggacaacctgcgcacaggtgactgttccatagggtgaggttggggtaagttggctctgggttcctctggatcagctgcaaaaggccagagggcccccagtacccttggccaagagcattccatgctgactctgtctgtgctcaggcaaagccacattctggagaggaagccgtagtgcctggtgggcaccaggaaggcctcaggtgttcaagaacaacttgcaatgaggctccatggccagcaagcacctgcttccccagcccagtcatctctgcagagccttccaggagggggcagggggcatcccaggcagccagacttctcaggacccctctgttgggtgacataagccacaggcctctatacatactgcttcttagaagcagagctgctggggacgacttgngggtttttgccattctgagggggtgggtncaggaagagagggggcctgaagacgcagcctctctctgtgtcangttggccagtctgtcactgatagagccattgtagtggg

SEQ ID NO: 446728 - DNA, 547 bp, Homo Sapiens
tataatgcacagaaatttattggctcgtgggactgaaggctgggaagcccaagatcgaggagctggcatttggtgaggaccttcttgcttcatcaacccagaggccgggcaaagagagggtgggaaggcaaacttcttttataagaaaactacttgctctataatgaacccactcctttgagaatggcattaatgcatttatgagggtagtggccccatgacccaaacacttcccactaggtcccatctccaagaccaccacattggggatcaagtttctaacacatgaactttaggggacacattcaaaccatagcagtagtatgcattttcacttagtaatatacattgaagattcttctgtgtttttttcatgacttggtagttcatttcttccttttcacagacttaatttttcagagcagttttagattcacgcaaaactgagcacaaagtacagagagctcccacatactctctgccctcccaactgcacagcttcccctgaacaagagttgtgcacttgttataactgatgaaaaggtcc

SEQ ID NO: 446729 - DNA, 472 bp, Homo Sapiens
atagaatattggtatccacctcacagagttgaaggatcagctgaagcaacctaaagcatctagctagtgcccagtgcccagcaggcacaggggggtgcagtggggctgacagtgagggctgacagtggaagctctagctggccttagctccagctcataccctttaggtccaggagccagtgtgtgtctgtctcctctcctctgggcccagtgattgcttaggtgactggggtgacaggcaagtgggtggagggaatggagaagagtgtaccctgggatctgagggctttacccccaggactagactgccctctggttttggtcagacctagcacagcgatcttgctttctagctggggcacctcaccctcacctcaaagatggtgaaactgctgtgcctcctgctgttgaggcaacctggaggcagagaaacctacaagtgacacagacgcgaggtggcagttccacagtg

SEQ ID NO: 446730 - DNA, 571 bp, Homo Sapiens
  misc_feature (437)..(437): n is a, c, g, or t
  misc_feature (508)..(508): n is a, c, g, or t
  misc_feature (560)..(560): n is a, c, g, or t
atgataaagacataaaatgatttatagttggggagaatttatgatcaaaggattgtctccaatagggtatatctgaggttccataccaggagcgtcattaaaattgatgccaattttatgaaatatgttcattttgaagcagatgtgtattagtagacaagccaataatttaaacatactcaatgaaaattccatagtgcaattttatctaaggtattttatgattactctcttagagccacagttttaagcagctttttcctaaactaggctcgttattaattttcaacacttcatactatgatgaagacatcacatactttagacagccttaatagaacaaattattcaacaaagttgattatacgttctataaagtaaatcacattctctcattgagtgagctgagtctttctgagtgtggggggcagagtccnggccagttcagggagctcccagggcataggaactgccctgcccctgctctgttcccggcggggtaatgctnggcattccaccgggcctccttcttcaggccttgccccacttcggccggggtnccctcaggggt

SEQ ID NO: 446731 - DNA, 714 bp, Homo Sapiens
ggggagcgcgggcggctggggaatggctgctgccatggtgccggggcgcagcgagagctgggagcgcggggagcctggccgcccggccctgtacttctgcgggagcattcgcggcggacgcgaggacaggacgctgtacgagcggatcgtgtctcggctgcggcgattcgggacagtgctcaccgagcacgtggcggccgccgagctgggcgcgcgcggggaagaggctgctgggggtgacaggctcatccatgagcaggacctggagtggctgcagcaggcggacgtggtcgtggcagaagtgacacagccatccttgggtgtaggctatgagctgggccgggccgtggcctttaacaagcggatcctgtgcctgttccgcccgcagtctggccgcggtgagcaccccaagcctccctcctggctttctatggacccagccctcagctccttccctggtgggctctgagcaccgcgcctctcccaaggggtaagggagctgtgagggtgtggatgggaggcagcttcacctttccctgccctttccagtgctttcggccatgatccggggagcagcagatggctctcggttccaggtgtgggactatgaggagggagaggtggaggccctgctggatcgatacttcgaggctgtcctccagggcaggtggctgcctcccctgacccaaccacttgacttaatctcactttctt

SEQ ID NO: 446732 - DNA, 865 bp, Homo Sapiens
  misc_feature (179)..(180): n is a, c, g, or t
actcgggtgcccgcgcgggcgttgtttattgggggagggatttccaggccctaggtcacggcccgggttcctcgtagggaaccagctatggcccatgttcccttccttttgggggccgcgcgcccaaaggaaatgttctaggaaagtttttgaggggcggaaggcggccgaacaaggtnnaattttgtttggtgagtgtgcgttggggggattttaacctgtaccttttaatttgctcctggggctaagaggaaggaatggtactagagcagtgtctgagaatagaagaatttaagaaagtgagattaagtcaagtggttgggtcaggggaggcagccacctgccctggaggatcagcctcgaagtatcgatccagcagggcctccacctctccctcctcatagtcccacacctggaaccgagagccatctgctgctccccggatcatggccgaaagcacgcggccagactgcgggcggaacaggcacaggatccgcttgttaaaggccacggcccggcccagctcatagcctacacccaaggatggctgtgtcacttctgccacgaccacgtccgcctgctgcagccactccaggtcctgctcatggatgagcctgtcacccccagcagcctcttccccgcgcgcgcccagctcggcggccgccacgtgctcggtgagcactgtcccgaatcgccgcagccgagacacgatccgctcgtacagcgtcctgtcctcgcgtccgccgcgaatgctcccgcagaagtacagggccgggcggccaggctccccgcgctcccagctctcgctgcgccccggcaccatggcagcagccattccccagccgcccgcgctctccggcccccg

SEQ ID NO: 446733 - DNA, 641 bp, Homo Sapiens
  misc_feature (441)..(478): n is a, c, g, or t
ttttttttcaaaacaagacaatgttttaattgtaaaactaactcgaggcaggggtgggcgggctggggctgcgctgaccgggcaggaacctggttcttcaggcagtggttctgccagggccaccccgcaggacagggaccatctgtcccccaataagggcaggggctagagtgttataaaatgacaatataaatagacttctagaaaagaggaggctgtccaggtgcagtagtcatttgctgcaggggctggagagggtggggggccctgacctgtctccccatccagccacagaaagggggcgcagggctacgggaaaaggccactcttcggacattcatgatcgacccccacaatggctcagggggagagggggctgggtgtcaggcaaggcgccagacaccccttgcaggctggaggacggggtggctggacctttgnnnnnnnnnnnnnnnnnnnnnnnnnnnnnnnnnnnnnncatacatgttcacctcttagtgttctctccacccccagcgacccccactgcagacttccagtgatgggagggccgctgcccttcctggagacagaagaacatgggggagggcctgtccccctcgtgccgattcgccacccaggcctcgtacctagccgtacgt

SEQ ID NO: 446734 - DNA, 579 bp, Homo Sapiens
  misc_feature (455)..(455): n is a, c, g, or t
  misc_feature (560)..(560): n is a, c, g, or t
ccttttggagtggtttggtttttatttttaaatgaagtttccatctgtacacgttaagaaaataaacaaaacaacaggaagccattctctgtgtatcctccttggaggcaggaaggatggatctgccgataggcacacaacagcacacagccagggctcatgggagtgagtgcccgtcacctcacgaaggtcatgggcctaaaacatacggaggctccatagaaaatgctccagctggctttgcagtcatgcataaaggtgaggacacttaattcaaggcatctgggggctggtgtcaccgcacatgaagagtagtgcccatgctgtcccacgagcttccttgggaaaagggaaaaacaaatcttttcctcaaatagaattgtcgcaggaaagagccatgacattttattcactgtttaatcatcgggtggcaggatttctttgaagtagaatcntggtagtacccctcccaatctttgctgggatcacttctaaatggtgaatatactctgtcaaggaatgttctggatcttgagaagcagtcagctcgttgccgaatntttggcctcgaggccaaat

SEQ ID NO: 446735 - DNA, 475 bp, Homo Sapiens
  misc_feature (29)..(29): n is a, c, g, or t
cctctatatggagtgaccaaaatgccaanattgtccatctgcctctgagtagggcaatggaaataccaaaccttctgactttgccaaaaagcatacaagcaacctggtcatacataggatgacaaaattctttctggttgtttttaaacaataaagcaataagaacaaatacaatacataggaagttaaaagcacaaaggaatgaacttattaatatttttgaaaaatgcactgggaaaaagttgatgtcaataacagtataaaacagccctatttcttgataaaaaatgacaaatgactgtctcttgcggatgcttggtactgtaatgttaataatagtcacctgctgttggatgcagcaataatttctgtatggtccatagcactgtatattatggatcgatattaatgtatccaatgaaataatcgacttgttcttgatagcctcattaaagcatttggtttttcacataat

SEQ ID NO: 446736 - DNA, 542 bp, Homo Sapiens
aattttaataatacattttattcacctcaagctatctaaaatcttatcatcttgacacactgaaataataatcaattaacaaatgattgagagattttactgtttttttctttagtaagtcttcgaaacacagaagacgatgtttcttatactgtcacagtgcagttaactcgaacagcacagacccggagccttaaacagctttgtcagagctcagcctctctgcagtgtcctaagcactcaacaaataagttggctcagcctctctgcagtgtgctaagcacacaacaaataagtcttggcgttggccatttgtacgtccaatcattaggcgctcagtgcgtgcaccttccctgtagacctccctgtgattctggcacccacagccaactcttgtatctttccccaggggcagggctgccttggtccaaatccgacgtgatctcccgtgtggatcgaggggaagagctgaggcaggagagagaggcccagcgagttacctgcccaggtgggtgaggatatcccagcagtgtgagccctct

SEQ ID NO: 446737 - DNA, 1679 bp, Homo Sapiens
atcgtgatttttataaaaatccttgaccactcgctggccggagggtggagagggctgcagtgttattcctaacggaatgaaggacagctccagggactgggctagctcctggtccccagggaggcagcagcagacactatgttagggctgaaggcaatttgggggcctagctctgagcaagaggctgggagcagccacaccagccctgtccccacatgtggacagagggcccagcccactcaggggggaccccactggcttcctccagcctagtcctggagggagatcttcacaaagagggtggctgatggatgctggtccccgttcttagacatgaggtggacatgggcggtatccttgcttgaggctgttcaaggggatggtactctgggccaatgaagtcattcttgggaggaggcatcataatcttccaccaagaagcggatgagggcaaggtcaggcacaactacctcaaacgcaaactccgtgtcccaccatgggttgaaaccatttttggtgatgacagcagtctggcggctggccacgtcccggctcacgccatggatctccactgtcactttggggtccacaattgaattcttattcttgttgacttttggcagctgctgccccgaaatgaccctgatgttgagccgcttccgtgcccaccagggcccctgagccagggcgcgggggttaaaggtgccgttggggtctcgcaggaaggcgggcttcagcacgtacccacaggccccgttgtcctggaagcggccctggtacacgtccatctctggcccaggtgtctggaaattcagggccacgatctggcagcccccattccacatctccacggggctgtagttggaggagtctgttctccatccagccgggtagattctgctcaggtgccccacgttgtggcggacaaagccgtttcctgattcttggagcagtcgaagggcacggttctcagagaaggacgccatctcgtagaaggcctgtccaggggtgccaggactggagaagcccccaaagtggacactcttgcagtaaatgaccatgtcagagagctcctgtgctagcctgagcttgtcctccttgggcttgtgctgcacacggctcctcactgcctcatcctccatctcagcagcctcgtcttcgtctgacaccacagtggcctcagggccaccctcccctccagggggcaggagccccccgagcttcttccccttcagcaggatcttccccttcagttgctcaggggagggcaggctgttggtgaccccatccagtggtcggttcaacagcatggggcccaggatggcatgcaggtgccgcgccatcacgcgctgctgctccagtgtgcagtggttctccagggataggatgacagggtagggggacgccttgaaggcatagtcccggatggccctgagcacatcgcagaagaggatcttggaagtgaaagtatagccgtggtagatgattggttcctggttgggcccgtcccagcagtcaagctccaggcatcggcagcctttgcacagtgcccggatgtaggcttcagtgctgctgggcccggctagctggtcctccagcaggtaggtgttgtgtgaagaggacaccaggtagtggctaagtggctggcccatgtcctggtagacacggcggtgtgccag

SEQ ID NO: 446738 - DNA, 553 bp, Homo Sapiens
tttttcggataaattttcttttatttccatactcttttgtgacatgtgtggcacaagtattcaatctcacagggatgttaaaacccacactcgaagggtgtccagtgtgcttaggaaatgtgggtttgcgcaatcacaggccaagcctgggggtcctcggggaagctactcctccaggtcacctgccaggtggatgcacttccttgggcaatgggtgaccctcccaggacaaggggaaccagcagggactcgatggcaccacacagcagccacctgttctgacaatgtgacacagaccaactaatgccagagcccaggagaagccacagcagagctgcctgggttggtgtcagagcaacaggcagaagtgactgtgccgcccgtgggctgtcatccaccggtggctactgtgtcattctggaaaaactatgatgccatgagactctgagaaaccgaatcactgcagagacaaactcataaaaattaaaaccaatccataaaattgtatctagaaactctgtccctggtgccaataagcagcaaagtcaacaaa

SEQ ID NO: 446739 - DNA, 461 bp, Homo Sapiens
  misc_feature (336)..(336): n is a, c, g, or t
tagcaattctttatattttagcaaattttccatcctagtacagagaaaatgctactacaggagtgggaatatggaagagacaagaacctgagtgtgtgtttctgccacaacattcagaagaaaacttcaaaaaacagtgtgatatattttatctaaccctttgggactggtttcaactgaataaaaatagaaggccttagaaaatacctggctagatcagaacagacttcagttcaaagttcaaggaaccacacagcctcacttacaatcatggctattacttaaaaatagggtgaaaaaatttatagttaggatatttttcttcattttcactgnacaagtgtaagaagggaaattggacagtaagaggttaatttataaattcacaatctgtggtggttgctcaggacctgcatttcaaggcagacatgtaatcagcacacacacacattactcaaagt

SEQ ID NO: 446740 - DNA, 299 bp, Homo Sapiens
cagagaccacagaccacagtgatttttcttttcccttgtttaattaggcaatacccttgttaattgccctttggcaactaacttaaccatgtgcttcccacacagtacatcaggaaaacttacagggcaatatttttaacttggggcaggaagaagggagcagcagagaattgactagatatagcacctattaaaagagaactcttgcttcttctgagatttttcaagctgtgctttgtgtgtgtgccagtagacttacgcaaggacagggtacaaacttagctgaaggtctgcccagg

SEQ ID NO: 446741 - DNA, 784 bp, Homo Sapiens
gtttcataactaaaaatttattaaggaaacaaaaccagtgctgcaaacgggacagaaaggagagctgggtctccctcccgaccacccagtcatcggccttccagctggggagagaatcttaaaggagaggccggggaccctgtactccaaagagcccagtcttctgagactctaggggactcctacccccaaactactggccttggctcccctacacggtaccccatcgcttctggcatagtcctgggcctcagggagggcagagctgcgcacccatcctccaggcaggctgtgcagtcaggccatgggctctggggtatcccccactggtcccattaagatttgcccctggctccaccgaaaaccccgtcttcccctaagttgtccttgtctctggccctgggtttcaggaactcattcttggtaaggaagcctccccactgaggtaccagctaaaggggcaaggaaagggcccctgtgtcagtgtcagtttttccggggagtgagggcaaagctagaaaccaggttaggcgacggtgccccagcactggaatgcctcaggctgggctgtccacgcctggaagtttctcccagcacaggagccgagggtggaaggccctgggtgggagacctgtactaggttcctgccatgggtagtagagagggaaagttcagagtgagaacccctatgacgaggaaccgcggtgaagaaatgaaggggatcagggaggtgaaaaggatcaactagaaggggaagaagggtgaggggctattctggaaagtg

SEQ ID NO: 446742 - DNA, 1053 bp, Homo Sapiens
gggtttgcaacaagatgtgatgaatatgtcacccagttggatgagatgcagagacagttagcagctgcagaggatgagaagaagactctgaacactttgttacgaatggctatccagcaaaaactcgccctgacccagaggctggaggacttagagtttgaccatgagcagtcccgacgcagcaaaggcaaacttggaaagagcaagatcggcagccctaaagtaagtggggaggcatcagtcaccgtgcccaccatagacacttacctcctgcatagtcagggcccacagacacccaacattcgggtcagcagtggcactcagaggaaaaggtatgcatgcagcaatcttcatagtacggtgcagtggccagattttagttaactgcaaaaataaatgtgctcttgttgtggaggatggaggaggggaaagaaaagaaaaaatgggagctggcatataaatggtcttgctaatgtgggtctttccagatcaaaacctttttgataattgtgtttatgtagtcctttctaaccccctgcccaatccctcctcttgattaatcgtaatataattttcaagtgtctgttaatatttttgctactctttgtatgtgtaaatatgcctctcccttacctccaacctgagaattggtagataaaggtggatattaagaatgaagctgtgttctacctgggttataattttaaaagtcattgtacctttggaaatggtgctgtttatcagcttctctttaaccggggcaaggatatgaatatgttctcttagggaaacttttgtccatatgaccaaaactgatgacagactgaaaggggatgtctatatctagataaaatgggatggaatacgcacagtccttttcttgaaagcaggtttttgtgctttttcatttggcatgggaatattgcccagagaaaccacttgtaaggtttttaggggcttgattttgtgagtcctggctgttgagttacttaccctgtattttcggttaatggtaacatttttattttaggagctttcattaaagactcaaat

SEQ ID NO: 446743 - DNA, 895 bp, Homo Sapiens
gggcagacgcttgccccaaagcgaggttctgcgcagcgtgccagacgactaccgctgtgggaaggcactgggccccgtggagtcactccaggaacacctgcgggaccccacaaatgattgtcattggctacagccggggcctgctggtcatctggaaccaggcctcgcagtgtgtggaccacatcttcctggggaaccagcagctggagagcctatgctgggggcgtgatagcagcactgtggtcagctcacacagcgatggcagctatgctgtctggtctgtggatgccggcagcttcccaacgctgcagcccacggtagccaccacaccttacggcccctttccctgcaaggccattaacaagattctgtggcggaactgtgaatctgggggccactttatcatcttcagcggtggcatgccccgtgccagctatggtgaccgccactgtgtaagtgtgcttcgagccgagacattggtgacgctggacttcacttcccgcatcatcgacttcttcacagtgcacagcacacggcccgaggatgaatttgatgacccccaggccctggctgtgctgctggaagaggagctggtggtgctggacctgcagactcctggctggccagctgtgcctgccccatacctggccccgctgcactcctctgcaatcacttgctcggcccacgtggccagtgtccccgccaagctgtgggcccgcattgtgagcgctggcgagcagcagagcccccagcctgtctccagtgccttgagctggcccatcactgggggccgaaacctggcccaggagccgtcacagcgagggctgctgctgacgggccatgaggacggcaccgtgaggttctgggatgcctcgggtgtggcgctgcggccgct

SEQ ID NO: 446744 - DNA, 575 bp, Homo Sapiens
  misc_feature (42)..(68): n is a, c, g, or t
  misc_feature (507)..(507): n is a, c, g, or t
  misc_feature (529)..(529): n is a, c, g, or t
  misc_feature (562)..(562): n is a, c, g, or t
aagctaaaagctttattagatatttctctttaagctaaatcnnnnnnnnnnnnnnnnnnnnnnnnnnntcatgtctaaatgtgtttactatttattttttactcttaaagtgatgttatttacatgtgttgttagaatgcaaaccttatcagtaggacatctaggattaagctctggcagtattaatagttagaacagtcacatgtatgcaaatttttacatagttaaaaagaagaatcactgtaaaataaatgcttattctttaattataagtgatgtggaacaatgtgtacttagttctaaagttcagtcaaggagacttccaggatgtgcatagctactgtatgagtgtggggtgcagagatggaggatgcttctggaagtcaagcagtggaattccatggtatactcagaaaagttaatagttcagttatttccaagaagccttcttgctgcagaccagtaattaatggtcccgctgctcctctctttcattggtgccttctncttcttcagggaatgctgattnaatctggcctttcagatgcttaaccccttttanggtgggtggtgtg

SEQ ID NO: 446745 - DNA, 171 bp, Homo Sapiens
  misc_feature (66)..(66): n is a, c, g, or t
ttatccagctttcttttctgttgttggggaagagaaacctttccttctacccttataggtttagcnaaatgagggcctgtgagttaaactgacaaaagacagattagcaagagaaaagagagagtatgtggggtgggggggcaccggtagtgggtgcttggtggctcacac

SEQ ID NO: 446746 - DNA, 484 bp, Homo Sapiens
gggatgacatgctcagcaaggtggaggccgcctacctccggggccatatcaatgactcccaggcagcccctgccccactcctgcctgtctatgaactagacggagctcccacggctgcccaggtgctgatcatgggacctgatgacttcattgtggccatggttagctccctgaaccagccctttggcagcggccttatcaccccctcggggatcctgctcaacagccagatgctggacttctcctggcccaaccggacagctaaccactctgcacccagcctggagaattcagtgcagccagggaagcggccactctctttcctgctgcccacagtggtccgacccgcggaggggctctgtggaacctacctcgctctgggggccaatggagctgcgcggggcctcagcggcctgacacaggttctgctgaatgtcctgaccttgaaccggaacctgagtgacagcctggggccgcggcgcca

SEQ ID NO: 446747 - DNA, 480 bp, Homo Sapiens
  misc_feature (296)..(429): n is a, c, g, or t
ccttggaaaatcattcatttatgttaagaagtagatggcccattattatttacaaaataacttgaagagccattttggttttggaaagagagctggcagagcagagctcagaaaggagatgaaacaatgagagataagttgttttacataatgaaagaatacagactttccccgattataccaaacagaaccaagataaagtaagattttccacaacaaggcactcagggatggcgatggaggcgctgtggatcaagtcagccagagagaaatttctgggggttggaatggttacnnnnnnnnnnnnnnnnnnnnnnnnnnnnnnnnnnnnnnnnnnnnnnnnnnnnnnnnnnnnnnnnnnnnnnnnnnnnnnnnnnnnnnnnnnnnnnnnnnnnnnnnnnnnnnnnnnnnnnnnnnnnnnnnnnnnnnatggtgcgtcttacgtgcactgcccagcatgccgccatcaaccagggccag

SEQ ID NO: 446748 - DNA, 2267 bp, Homo Sapiens
  misc_feature (934)..(962): n is a, c, g, or t
cctttctttgctatttaatgttcatcacttaacgttttgtgtgtaagtttcaggagggcccaagaaatgattacacaggaggcaaggaggggaggtgataggagggttgctgggggtctggagctcatggcccccagctcgggggccaaaagggttccatctcagctcaaggggagtaaaaaggggccccagaaccaaacacatgctaaaacatacttgcaagcccccaaaccccctccccacctgctggggaggaaaataaatacacccagactctgtcccactccccaggtgcccaggtgaggggccagcaggtgagtttcctcccctcatcacaggttgaggtcaaagaattgccatttactacagtgctcctagtcccttccacagggctgggggaaccctgggctggggagcggtggttgtcagcgcacagcctgcctggggcttgtcatgctaaatagaggggagccacactcactcccacttcaggcaaaacagaacaggccagggagggggtggcaagttcactgaggcctcatggcccccttctggccagctcaggacaaaacagtcctttgcagggttgtctatagctgggagaaatccccacaggtcacagtcgaagtcaattccttcttgccgcattcccacactggcccgcttttcttcatcgcaaccttctgggcccagccaaccccatgtttgcagggaaggggaggatgggggagcattcctccacgtgtaagcccttgacgacagacgccagctccagcctcggtcggcagtccttggcccgccaaacccgggggcgagtgaagacggccgagcagacctcaattccctccgatgcttctctggcagctgccccgggcagtatccagtctcagcccaagagaaagaactcatggagaaaagtgagatttctcctccnnnnnnnnnnnnnnnnnnnnnnnnnnnnntgcaaggtgaggggtccttggtccctgacccctaggctgattctaggggccagtgttagctccgggtccatgtcgggatggagggcagcagactggagccatgccactgatgtcacacaggcatgcctgagagggacaggcagagggaagcagcaccctttccacgaaccccaaacctgactccatcatggaccaggccctaggcaagcatcccatctccacgggtgggcaggcagtggggaaggggtgggggtctggagacagcgtggaaggcaaagctgacttggcttcaagccatttcccagaaggtcacctgccaccctcccctcgccctcaggcaaacctgaggcccctcatttagagaaggcggtgccagcctgcacttggcctccccgttgctgtctggctttgggcgaatcatggcctctccctgggcctcactgacctatatccaaaatgaggggggtgggctgagcttcgaaaacccctcccagctctgacaagcctccgatcctcttcatcttaggctggggtggggggcaagaggggctgagggagggttgaggccactgggatgccacccttgttccccaagttcacagtgtagagtccatggctctggttcctcgattcctccctctgagtctctggggccttgtcacttccccctagtaccatccctggtgttggccccccatatatgacacctgctgtggtgggaggggctggcccacctagcagtgtgggagaagggggcaggtggcctgagatggtgacggggcaggggcagggttggggaggcagcaggggcacttctctctctggacaggaagtgtggtcagaagtgaaggggccacacgggctgcactgacagggctgtggttttggggcctggactctgaggtcctgcccagaggagctcagttctgccaggcgggccccccccaaagggtgggggtgcgggctccacaggggttggctggagcatcggttgtcggaatgtggggcggggcgggggctccccggttgggctcacaccggggatgtggcagtggactcactgcacagactctccacgaggtcggctcgctggatgcggcgcagggcggccaggagggcgtccagtgtggcgctgtcctgggtggcccagcttgcaagcagggcgcgaacggggcaggcctcatgggtaaaggagtctatgtgctcgggctggtagcccagctcgcccgccaggtgccgccaggtgtcccccgcagagccgtgagaagcttctccacatcgcgggaatccggaccggtccagcct

SEQ ID NO: 446749 - DNA, 441 bp, Homo Sapiens
  misc_feature (341)..(341): n is a, c, g, or t
ttgtacatgaaagagtatttattgaaaacatggttactgacaggaagctcctggctgctctctggttacaatcttggctcacaactggaagtgttacatactttttacttcccctcaattttatttttccccaaggttccatcctaagataggtagatcttatataaatatatatacacgtctgtataagtatggcctatagtaatgaaaatatatagtacactcttcattgggtagtacctaccatgccaggccaccaatactgaatgccaatgtgctaacgtatgtccagggagagaggctgtgtgtgtggtttacaagtgctgcagcaccagggaagnccccactggcacaggtgtggcctcagccggcctcagccagctccctgaaatcatggccaatggcagaaaccatagcactaggaagggaaggccaacttcc

SEQ ID NO: 446750 - DNA, 469 bp, Homo Sapiens
agaaaactcttaacaaataagaatagaagaaaccttcaacagtctgactttaaaaagagaaagccccagaaagcctatggcaaacattttacttaatggtaagataaagtttttttctaaaaaaacactatctcatctaagccttacaaatatccccactttgtctcttctcttgtactcttttcccacttccacttagtctcaggatataggctgaggtccagacatgaaaaaataacacccacagtggcctcattatctacttcttaccctcaaatcagggggcacagaagtattttccctgaggaaatacttgagccactcatcctggaatgactcaatgtgaccaaggttaaatgaagttaggactgggattagggtatctggtattaagatgtatgttggttttagcccatggtttctgcttcagaactcccatagcccttgctacagtcctttgttataatgt

SEQ ID NO: 446751 - DNA, 503 bp, Homo Sapiens
cccttggtagaaaatgttttaatatgaaaacttagtagatgtaatggcaattttctttgggaataaattggtctctgaatcatactctaaaaacataaaggaaaaatgactaataattcagcacaaaatgaaaacctgtggttacctaagaggtatcagtgtgcatttagcaatttcttctttttctaggtgaataagcatgtcaggtccacaagacaaatggtggctgttgccaggctttcttcccattgctactcaagatttgctcctcagaaaaaggaatgagtggcatttcaccaatatggaaatgtttccaatagagtataaaaatccattaagcaattttccagtacattaggctaaaagtgcttaaaacgagtatctctttctgtgacaattaaacatcacacaatttgcagtcgtataatacccctatgtacaaagtgctcggtcaacttggcctattttagtcattacttttgtacttatttccatgtgtgacc

SEQ ID NO: 446752 - DNA, 793 bp, Homo Sapiens
ttttttttggggttccagatcaggaagttttattgctgacatgcaggaagagtccccatgtagtacaaaaatatgtctttatacaaacttttttgtgactttttccgtttctttacaataggacttctctcagtgtgtgacacccagtgagggctgacccatcctcctctcctttgcttcaccaggaatgtcatcagacacatggcttgaccttggaagggcccagtctgtctgacagggctttgcagacccggcggctattgctttgaaaaggaggagaaagaccacgcacgggcagcagcctggagggacccggtgggctgctgagagggggctccgctgcgacgggccctggcccagcttcaggccctcacaggaggacagtcaagggctgggagccctaggccggactgcatttccgctcccgcaggagactttctatgaaataaatatagaaaagagggcatcccccagccccacagcacaagaccctggccctcagcgctggacagctgagacagacgcaggctcgctgctcagggggagtaagtgctgggctccagtaggctcccacaggcccactgaggcagaggcatgagtcgcccaagtgctggatggggcatggggagaaaggggcgtgggcagccctgctactgctggcaagaggtggccccatttttccatcccgagattcccggaccggtaccaccttcttttgtaccactctgtgggagggccgcgcgtccgcgggctgagagcctttgtctaataatcatcctggtggccccccctt

SEQ ID NO: 446753 - DNA, 1995 bp, Homo Sapiens
gtgtgcaagtgtttatttggaatcccttctattttattagaaacagaaacagtaatttcaccagtaggaattgcgtgtgctctcaatacaagtaagtttgccactccttcaattgttgtccattgcagacactttggattcaaggttaagaatccaaatgagaaataagaaatatccggtccctgatgattcgtttaagtcctgttcaactcgatgaaagcttccacccgaaggaagagttactgttcctcctggctggctttgtgtttctttcagtgctctaaagaactttgtatttgggcagctgtgctctgtcatgtcaggctgctggacaggagttgatgcttacggcgccgctgaccagggctgctttactgaagctcactgggtgtccatcaatcacaaagtggcgtatgcagcctgtgaagggtttgctgggggccaagcgtggtgtcagtagagattctggaacacctccaacaaacacaggctccctgtgatcaattggttttggattcaggggtccaaccacatggttcacttcagagtccacatccaactgaaccacattagaatctctaataactgtaattctgtgccatctgccatcacagagactctgcttgggtgtaactgaggtggaaaaatctctgatgccattattgactttcactatgacctgtccatttttcatgtgaacatttaggtactccccattgacactgtggccgtggaccagggttccggaactgcttctgggacggacttcaaatgcaatttcaaacttcaatccaatattgaaagattcatctagaaccacgtatcctccttctgttgaaaagtaagttcctgtttccatggggccttcaaagcaaggggtcacactgaatgtctgagaagcagaggtgatggaggccccattgagctggagattgctgagacagccactaaaactgtagatggagttaatctgaacatttttcacagcctttccaggagccacacctcccaaataaatgggacccttgattttccaggtagcttcagtaggaggaagactttcttctaggactcggagaccatcaattaccagtcggccactgctcctttctcgaataaatatcacatcatgccacaggccatcattgtatttctcctggcttctaatcttcagttttttgtgaccaacattaaacatgtaaaccaagcggccatgggccaaaaatagagtcatgaagtcattctcttcttgatctgagacatagaagatcatgccatgggaggaacgagttctcagacgaatggaaaactgagatttggcaccaaaatctccttttaagtgttcaaactcttggcggctgttggctgttcctccatattgataggcgtgctctattgctctagggctgttggaaaggtggcaatgagagtttcttggagtattccgctctgggagtttcagagcaacaggatcccatgaaggtgcatctttacttttccctccctttttattctgacttgctttaggcttggataaattttttccttttttatggaggagaaacaatggtgaagactcaatgggacactcataaagagaagtgtggaccttttcagtataccgttggaaatcttcaacctccacatctctatccaccctggtaaagtaggcattacttatgcagccagtgaaattagcatactgagcactgattggtgagccaccgaagtaaaacttcttttcacttgcttgtgtctgttctattttccctttggtaggattcttactcccaactctgcttttatctactatcagttcatatcttgtggggtgagacagagctaatgaccgaagtgggacagcccatcattgtactgcttatctactgactgaactttgattccctttacatccatgatggacagtaccatttatccagtgagatggagaaacaccgtctgacccctgaagcataataagaatagtaacccatt

SEQ ID NO: 446754 - DNA, 615 bp, Homo Sapiens
  misc_feature (587)..(587): n is a, c, g, or t
ttttttttacagtggcttaaacaaataggggtttatttgtctcatccttatcaaggtaggggtaggtacagtggcttcaaactgcttccagagttccagtctcttttcatctttctgctctgccatccttattatatagacattcaccctcatgctagctgtggcatgaatggaagatggctgcttcacctccaggcctcgcttctacattcttttaacatccagcaggtggcagcactaagtaacaattccatactaggtcatctaacagaaacctttattccattctgcacaaatcaagacttctgtacactccatgccttgatgatttcttcagcagcatccagtgtgctgttttttttaatgaagcagaaacgcacaaacttctcatactgtgatttagtctctgagttacagaatgctgaaacggggatggctgatcgttttttatgtttcgtcatccatttcacatacttatagtcataaggctcattattcttcatatcagagaggtctggatctagcaaagacacatcagcgatgatgaagtatcctccatcaggaactatgggtttaggccaacactntcaagtaaacgtacccatcgatctcttt

SEQ ID NO: 446755 - DNA, 377 bp, Homo Sapiens
tttttaaagtcagatgagtgtttattgtttgccaggctttttgcatacattagtccatttaattctcagaaacgaccttcatatgaaacaggtactgattttattcctattttataatgagagaaccgagttactgagaggttaaacatctcacatttcttatccactatgttatgctgactcttataaaatgattgtggaaggtgtgttaatacatttcaactggaaaaaaaaggtcagatcccccgaaaatgttgttaggagttgggttaactgctttggaaaaacaatggaaatatttaaattccagttgtactgaaataccttttaacatccagcaggtggcagcactaagtaacaattccatactaggtccc

SEQ ID NO: 446756 - DNA, 691 bp, Homo Sapiens
  misc_feature (224)..(224): n is a, c, g, or t
  misc_feature (276)..(276): n is a, c, g, or t
acatttcctgttttcattttattgggaacttcaaagaaaagaaagagagacggattggttcccaagacaagccgtgacgtagactcccaacaagctggggaattctggacagcgaaggggtggacagtgagactcagcacagcccaaagtcaaaggcattagggttgttctgaaaatagagattcaagaagccctggaaaatgctcttatccatgagaagagcnacagactgtggggtcccacttcatggctgatatccagagccgcagggttggncgtgtggctcacacagttccagtatcccatacacatccagccgctcaaaccagggccagagggaggtaatcaatcatggatatacaggttccaccaaagaaggtggtgttctgatactcaagaatctcttccaggttgctgaattcctgacgcagggctgccttcagattagtgcattctctcccacatctcaacgctaccaggcactccttggtcaaatgtgggaccttacaaaatagctccaataacatcttttggcgagctcgttcataagggtcatatggaaacagcttccttcctggataagcatcatccaggtactcacaagcaataacagattcatagatcagttgacattggctggtctccaggacaggaatgtggccaaaagggtgctttgtatagtaccattcag

SEQ ID NO: 446757 - DNA, 671 bp, Homo Sapiens
ggtacagggctctacacagaggtcctgctgagagcgtctgcaaaatgacccacgggaagacaaggtggacccagccccagctcatatgcacaggtggaatggagaccagtcagtttccaggtgaagagaagcctcaggcaagccccgaaggccgtcctgagagtgagacttcctgcctcgtcacaacaacagattttcaaatacagacagaaatggctgcaaccatggagacgtccatatttacaacagagtaccaggtagcagtggccggctgtgttttcctgctgatcagcgtcctcctcctgagtgggctcacctggcagcggagacagaggaagagtagaagaacaatctagaaaaccaaaagaacaagaatttcttggtaagaagccgggaacagacaacagaagtcatgaagcccaagtgaaatcaaaggtgctaaatggtcgcccaggagacatccgttgtgcttgcctgcgttttggaagctctgaagtcacatcacaggacacggggcagtggcaaccttgtctctatgccagctcagtcccatcagagagcgagcgctacccacttctaaatagcaatttcgccgttgaagaggaagggcaaaaccactagaactctccatcttattttcatgtatatgtgttcattaaagcatgaatggt

SEQ ID NO: 446758 - DNA, 168 bp, Homo Sapiens
aagtctcttctctgtctttgtactggaatcgaaatcataagataaacagatcaaacgtgcttaagagctaactcgtgacactatgcagtattgtttgaagacctgttgttcgaacctctgtctctttatgttaactggatttctgcattaaatgactgcccccttgtt

SEQ ID NO: 446759 - DNA, 632 bp, Homo Sapiens
  misc_feature (154)..(154): n is a, c, g, or t
ccttgagagggaataagtatcaaagacatgctaactgtattccttctcttccttccaggcagtagaacgagtcctgtacccacacctgtccacctactggacaaacttgcaggctgtgctggatgattattcagtatctaatgcccaggtcaanagcagatggacacaaagtctatggagccattctggtgagtaccgtccccttccagcctcccttccctgcatgagcttagcagccaagcaggcttactttggaatatttgatgggcccaggttcctcgaattttttgcctatcttagtccttggctcttacaggtggcggtagagcgactgctgaagatgaaggcccaggcagcagagcccaacaggggtggcccaggtggcagggggtgccggcgcctggacgacctgccatgggacagccttctctttcaagagtcgtcctccgggggcggtgcagaacccagctttgggtccggcctcccgctgccgccagggggcgcggggccggaggacccttctctttcggtgaccctggccgacatctaccgggagctctacgccttcttcggtgacagcttggccacacgctttggcaccggccagcctgcacccacggctccgcggccgc

SEQ ID NO: 446760 - DNA, 506 bp, Homo Sapiens
ggatttatttacaaggaacgaaggggccactgactcagagcggcaagtacagcgagtagtccgagagcgcccaccggcgggcggggcggctggtacggccgatcatgggcagtttctgcacgtagcgcgaggccgggctaggcccgtacggcgcggggaaggcagtctggaaaaggcgcccgcggcagcgcctcccagcctgccgcccggctatgatgaaacgaaagtgcggggcgccgcgcggggcgaaacggctcttctggaaaacgtcgcgggtgccggtcccggggccctgctgccggggtgccccgcgcgcccgatgcacgcgcggcaagggcctgctctcagaggcggcgggcccagaggccgacgcggggccgcctccgccgctgccccgggggctctcgtcgccgtgcgggctgactatggcgcttgccgtcagctgcggcatcttccgcaccgagtccggggctgccgccggctccttcttgtccccgggcggccgc

SEQ ID NO: 446761 - DNA, 214 bp, Homo Sapiens
  misc_feature (139)..(147): n is a, c, g, or t
catatacaagattcatttttaatggatttgatcgtcgggtgcaaatttgagcattatttacaagagctttctgtagagttatttttgttcaaataaaaccagactctcaaaatacaacataagcctgaacctacttgannnnnnnnnctccctctagttaccaaggaatatcgtatctcagatgcatggcctactatcacactggtctttaaag

SEQ ID NO: 446762 - DNA, 520 bp, Homo Sapiens
  misc_feature (51)..(62): n is a, c, g, or t
gcagaaggttaggtgtttatttgcactgcttttataccgtctaccaggttnnnnnnnnnnnncagagactcttttgaaggcatagattttagatatcaacctcagactgtggcatttgggatttccagagcatgtcgttgaggcacttttgtacccagaggcacatggaatttaccaggctgtggagatgatgtgctctcgggatgctgctgccagtagcctggtgaggtagggaagacagcagtggacgcacagtcagggcccagtacacagcccgcctgcctttcgtgtgattgtccagcaggtggcacctgttccctcctgccacccaccttataattgcttccctcttgagcaccttcagccagaggtgggtgggaaggggaggacgtgcactgggttctgctatgtgccagcatctttggtataaggagccattccctggcccagggcaggcagccagtacccaccggggttggggatcattggtgggtctccattgcccatgctctccctgcct

SEQ ID NO: 446763 - DNA, 536 bp, Homo Sapiens
  misc_feature (482)..(491): n is a, c, g, or t
tcatgaacctcaaagtagcaatatatttatttacaaaatatacagtttcacagaaacagcttcgctttatacacataaactttaaaattacacagaaccatgtaaacgatgtgaagtgtctggcctggccaaagccaatgggagggcctacttttggggtgacatccctccctcccctcacttcattagccaccaaccaggaaccacagatgggtcgtgcctaatttgcatataaagaagctgattgcagctgcccagctcaatctaacacaaaaaccaaggtgtccgacttcttagacaccacccacagggacagatctgctaaaagaacaaaaatgcaatcaaggaaacaaattggagatgagtatcacatgcattccagaggcatcgaaccttctagcacacgtgacagttgccagggccggcagttccattctaaagtcacatggattcttaaatgcacctttaaaagcttgtggaannnnnnnnnncaaagcagaaaaacactttggagcgctggttattcacgtggtgaa

SEQ ID NO: 446764 - DNA, 482 bp, Homo Sapiens
  misc_feature (308)..(323): n is a, c, g, or t
  misc_feature (326)..(326): n is a, c, g, or t
  misc_feature (399)..(399): n is a, c, g, or t
  misc_feature (450)..(450): n is a, c, g, or t
  misc_feature (464)..(464): n is a, c, g, or t
acaaaatccaaaataattttattcacattttcagatttttgcttccacaaggtgttcagcaaacatgctaaggcgacagaatgtctagttggtcacgacatgcaacgctgaccattcaattgatgacagcagtgaccacgcccacctgagctaccagccccacagcacaaagggggtttgcgggaacacaccaaaccacacagcaaccagcaacctgaggtaggtctctttacagtacaaaaacttctacggccagtgtgaggacactgattaggcaagagctgcttaaagttgcagactttgagggnnnnnnnnnnnnnnnnctntgcgacgactgcggtgagaaagggaaaacagacccacgaaatcctgagccctgccactgaactgtgggaggtntggggattagggcaattgaaaaagtgccacctcaaaaagcagcatttggtnccggggttttgggncccaacaggtttttgggg

SEQ ID NO: 446765 - DNA, 794 bp, Homo Sapiens
  misc_feature (63)..(63): n is a, c, g, or t
  misc_feature (165)..(165): n is a, c, g, or t
  misc_feature (171)..(171): n is a, c, g, or t
  misc_feature (197)..(198): n is a, c, g, or t
  misc_feature (214)..(214): n is a, c, g, or t
aggttgggaatggacgatacattaccagacacactagccatatccgataatcactccataggnaattgccctcagccagatcggcaaggcggtctcctcaggcagctacagaaagcaggcttgcgtctggtgacctgggacactctgagtcatcgtctcaccganctcagnagacagtcggcagccaccggcaggcnngtcgcacaggcgccgncgagctgtccgcaggtacccttcagctccccaccagctcggcccggtacacgggctcgtgctcgctgtcctccagacggtggggcttcaggcggatcttagggggcggcaggtccgcgccggccggcacaggccgtgtcagtttcaacttggggatggaggccgagggcgcgcaggacggccggtcccgggactctctgtccagcacctcggggtcctggctgccgtcgtcctgcggggcctgctggggacggaagggctccagagagccgtgcacgcgggaggggatcttgaccacctctcccttgccctggggcgtgctgtaggagatcttgatgaccgggctccgcgggacctgctctgccggggccctgtcctcctcgcgcctctccctcttgctcctcctggcggtggccgcagccgtgggctcgccgttctccggctcctccggcttgcggagctccctgtccgggccgctgcccagcctcctgcgggccctgggcgcggctgggggtccggggctggcctccggggggctcagcgtgctcttgcacttctcacagagcacctggcgcggccgc

SEQ ID NO: 446766 - DNA, 1184 bp, Homo Sapiens
  misc_feature (886)..(898): n is a, c, g, or t
caataccaggagatggagaagaaagtcagcctactcgaggacaatagctctctggaatttgactctgagatggtggagatggctcaaaagttgggagctgctctccaggttggggaggcactggtctggaccaaaccagttaaagatcccaaatcaaagcaccagaccacttcaaccagcaaacctgccagtttccagcagcctctgggctctaatcaagctctaggacaggcaatgtcttcagcagctgcatacaggacgctcccctcaggtgctggaggaacatcccagttcacaaagcccccatctcttcctctggagccagagcctgcggtggaatcaagtccaactgaaacatcagaacaaataagagagaaataagaatagaatgaatgaccccaaaatagggttttcttgggcgaggatgtgctggattaggaaaggtgacatgacacaggcagagcagagtggcacccaccacagaatacagtgtgtgttattacgaggagccagcagttgagcctaaggtccttctacctacctggtattggcatttgaggtcggaaaccctctactgccccataagccaggaaaagtgaaaagagaacacagttcctttaagaactggcagcaaggcttgaggccttatgtatgtagctgagtcagcaaggtacatgatgctgtctgctttcaaaaggacttttctctcctagctgactgactccttccttagttcaaggaacagctgagacagacctctgctgagtagctctgtgatgacaaagccttggtttaactgaggtgatcctcaggttgtgaggtttattagtccccaaggcaaacacaaatattagattaataatccaactttaatagtatacatttnnnnnnnnnnnnncaaagccctggaagttgaggccaagcctgctgagtattgcagctgcatttgcccaaagggaatccagaacaagtccctccctgtattttgttcttgagaggggtcagtctagaagctagatcctatcaggatgaggagcagcagcccagggcttgtctggatcagcaccaacgattttaaagaaaaaaggaagagtttcttagatgagtaattgttattgaagatagtcagtgataaccactgaccagatgctatcaaattacaactatggccttttagtaattca

SEQ ID NO: 446767 - DNA, 827 bp, Homo Sapiens
  misc_feature (519)..(519): n is a, c, g, or t
ctggtggcctccagagcctgctctcctggaccaaggctgcccaagcagcttacagggcccttcccttcatcccggatctcatggtctagcttcctctgcaactccgtgtcctcgggcaggtcgcttgaagaggctgagtcggaagcgccgcgtttgaactccatctccaggcggagccctggccacggtgacccggctccggtggtttcgggagaacatgctggcggcccctgcgactttgcctgctcagtgcgctccccgcgccgcccggcttagcctcctctcctcggcttctgtctctcgacgctcgtccgccagtccggccgggaatctcccgctgcggggctccaaaccccgcccccggagacgacacctgggcctggcagggcgcggcaacctcctcttccacccccgccaaaggcccagcccgtccggccagtccctgggcgccaagccgacctggcccgactgccccggagcccccaggggcgcactgcacctcgcgagcactgtgggagncgcgttctccctgcccgcgcgggtcgcgagcgcctacctggacttgggacggaccgagaagccctgccccgccagccgccccaacctggcaagcctggcttcccgggcgctgaaaaccccgtggctcagggatcgccgcgtagcacgctctggctctactcgggcctgggaccttgcccagtttcaatcccggcagcctccgaagagaccatttcacatcccacagtcccaatgttccttcttcgtccccctccccactaggctcctctgcgaggctatccgcctaagcctagtggccacactccgct

SEQ ID NO: 446768 - DNA, 1054 bp, Homo Sapiens
  misc_feature (72)..(108): n is a, c, g, or t
  misc_feature (720)..(739): n is a, c, g, or t
gggagcctttaccttttatgcaaaaggtttattccggaaactagtgtacatttctataaatagatgctgtgnnnnnnnnnnnnnnnnnnnnnnnnnnnnnnnnnnnnnggaagaggaaaaggctggtacaacggaggcctgcgaccctgggggcacaggaggcaggcatggccctgggcggggcgtgggggggcgtggagggaggccccagggggtctcacccatgcaagcagaggaccagggctttttctggcaccgcagttttgttttaaaactggacctgtatatttgtaaagctatttatgggcccctggcactcttgttcccacaccccaacacttccagcatttagctggccacatggcggagagttttaatttttaacttattgacaaccgagaaggtttatcccgccgatagagggacggccaagaatgtacgtccagcctgccccggagctggaggatcccctccaagcctaaaaggttgttaatagttggaggtgattccagtgaagatattttatttcctttgtcctttttcaggagaattagatttctataggatttttctttaggagatttattttttggacttcaaagcaagctggtattttcatacaaattcttctaattgctgtgtgtcccaggcagggagacggtttccagggaggggccggccctgtgtgcaggttccgatgttattagatgttacaagttnnnnnnnnnnnnnnnnnnnnatttattgagtttttacaagatgtatttgttgtagacttaacacttcttacgcaatgcttctagagttttatagcctggactgctacctttcaaagcttggagggaagccgtgaattcagttggttcgttctgtactgttactgggccctgagtctgggcagctgtcccttgcttgcctgcagggccatggctcagggtggtctcttcttggggcccagtgcatggtggccagaggtgtcacccaaaccggcaggtgcgattttgttaacccagcgacgaactttccgaaaaataaagacacctggttgctaaaa

SEQ ID NO: 446769 - DNA, 906 bp, Homo Sapiens
  misc_feature (769)..(853): n is a, c, g, or t
tgaatgttatgtaatttactatttccaggttagggtctcctgcaaatgtggtaactatgccttctttgacctcatcccaattaacagtgtccagcaggtcagggcagcaagcaaagacttccctctaaggaacagacttcattctgttaatcaaaccctgccaagttaagactatcccacaaactacaaatcttcagggcaccagcatctggctcatagtccccctttcttcaatgaggccatcaggagacattctggcaaatagcttggtgagatcaaggtatcctctgggaatctattagtaaacaaatgggtttctaaagccagaagaaaccctagtacaatcccattattctgcaggtatttaccacctaataaccctgccaaggaaagtacggttcatgccgactcattctgcagacactgaccactttctatgtcaggtattgtgctaggtggagccctcttctgagcctttcgtaaggactcacaaatctcgtaatgtacagaaatttgctttttagcctcttggaatgtgtccccgacatttagcaaaatacacctgttgacacacgacaagtatttgcccgcctagtctttccctatccatacctacagtcattaccacctgcttctccactaggtcagaggttgttcagagggtcccagccacatgctgtgtccagtcattcccagaaattaagcctccaagtgtcaaacccagctgaattttaaaagtaatcacaaaaggctgggcgtggtggctcannnnnnnnnnnnnnnnnnnnnnnnnnnnnnnnnnnnnnnnnnnnnnnnnnnnnnnnnnnnnnnnnnnnnnnnnnnnnnnnnnnnngctgtctctactaaaaatacaaaattagcctcgtgccgaattcgccacccagc

SEQ ID NO: 446770 - DNA, 166 bp, Homo Sapiens
ctcaattaatgtattgttattatctagggcagtgttatccaataaaaatctgtgagccacacttatttcacacttcctactagcccagaagcccggtaaaatcaatttgaataatatgtacgatttaattcaatatatccaagatacatttcaacatgtagtcaat

SEQ ID NO: 446771 - DNA, 832 bp, Homo Sapiens
tttgcacaataaatactcgccagtttcattattattaaagaatccatttgaatgtcagctcaacacagcctcctataccgaggcattgtgaaccgcatctccccagcttctccaggcttttccaagaatcagggacactgtagcctgttggtctcagtgtatgacagacacggaggaagcacatctttagctgatacttaaacagagaccctgagcgcacatacacccgcgcacacatgcatggagcttcaccttctctgtcattctgcagtgaccaggagagcaagagctcccacctcccttcaaaacactgtgcccatcccgggcactaaggcctctttaaagcacggcacctccacgagggagggccacagccacatacactccacctggcaggtggacagcgtgagcacgtggaccatagcagggacaaggtgccccggccagccccaacgccctctgccgctgacagggacagaagccctctccagctgcgtgtgctgcagaggccatgcgtagcctccagctgcattctattccactccagtgcctgggccagttagcaccagtgtggaagacagtgagctggctccggacaacagggatggaggaaaggtcccacattcacattcctgatacgtggacaaggtgaggggccgcaatcgctctggcagcattttaaagatggggaagtagcagacacccacgcgtgaaggcaggagagccccaactgtggtggaaatggccccagaatggtagggccaagcctagctccagacaccccagagccctggagaagccaagactgagggagaaagcctgagggaggacc

SEQ ID NO: 446772 - DNA, 538 bp, Homo Sapiens
gatacaccttttattcaaagatacaaatagactgacagtaaaaggatgagaaaaggtacatcattcaaacagcagccacaagaaagctggagtggctatactaatctcatacaaaatagacataacaaaaaattcctagagacattttataactatagaagggtcaatctatcaggaaaagctaacaattacaaatatgtatgcacccaacaacaaaacactacaatacaccaagcacacaactgacagaaataagagttggagacttcaatgtctcactttctataatgaataaccaagcagaaaatcaactaggaaataaaagatataacattataaacaactagacctaacaaacatctataaaacactccacacaacaagaaagtatacattcttctcaactgcacatagaacattctctagaacacaccaccatatgctaggctataaagcaaacctctctaaatttaaaaggatataatacataaattatgttctcctacacaatagaatgaaattaggaattgatatagtt

SEQ ID NO: 446773 - DNA, 458 bp, Homo Sapiens
tttcatagaccaaaatagagatttttatttccaaacacaaagcagatacatttttaaaaacataaaacaacagcaaaaacgtcaaaccatcttttagaacactgctacttccaacttgcacaaaaggaaggggaggaaaacgtcaatgcaactttaaaatatagcactaagaagaaactccggggtcctggtgttcctccctggatggcggggaaggctccattagctttggacttgatatgaaccgagataacacacacatgttccgagacagtcgtttggctccaatactgcttgccttcccagaaagcttaatttattgcaaatgcatgttttaccatcacaaataatatggacaagagtagatatggtccctctgcgtattgtttacataatagaatatttaaaacaatggaatgtgtttgtctttgacatcaaaaatcatttatgcagcatct

SEQ ID NO: 446774 - DNA, 905 bp, Homo Sapiens
taaccaagtttaatttataggctttcgtggacttctggtagtcaactgacttcgaagttaggacagcatggggggattgggggagtagctatgacaatgaggagttttaagagtgagaaaacacaatgtctatgagaacatggacttctcttttagaggctccatgagctactcagagaggaggttatgagggttggttaaggtacgagaggcacaaagtgaaagaagcctccactacttcaaaccacatcagggcttttggcaagagctacatgaaaaataggctcacaggcagcctggcgaggcgggtctgggcttgcaggctggcgctaaggaccggcagttgggagactctcagggacccgatggagggccttgggcaccaccagtttaccgcatgggttggagagacaaaaaaagaggagagcgacaaaagggggaaaataggtccgatgatcagaggaggaagacgaaggctggctggtcattagatgcgtcttgtttgccgccaaagggcaggggttacgagctgtgcagccagactgggtgttgcaacccgagcgctccctccgcccggggcgtccatcctcgccgggggcgaagctctccacacgctctttgccccttcctgcgcctcctggctgctagtcagtcctgttagggcacttctggaaacctgctgtcgactcgctgccttggtccgactttgatcgcggccttgataacttggcgcagcgccccgtctcctttcctccggtccctctcccgcccacccggcctcaccggccacttcgcctcaagcgctggagtcgaccagaactctgcggctcggctgccggcaagacccggatagcggatttcgctcctgctgcggggcgcgcactcgcccgcccgcccgctcgctc

SEQ ID NO: 446775 - DNA, 449 bp, Homo Sapiens
ttccaatgcaacttgcaccaaagctttatttgctattttcatagtctgaatgcaacatctttgtacatgcaaaggtcatcttgttttattgcagtcgaccagatttccaactgctcttctgtgcatatgaaacttctttacagttacaaaatataaaagcacttgtagacgtccaatactctgtgaggtctggtaagccccatttgtttttacattaaaaatataagtttttctagatgacttctcagtcacacggttagagattctttctgggactggataaagtgcctctcgtctgccttccgttcagaactcctagagcttgtgaattcctaaggcaattgcaagaacaccgcaggcaggaagcttaactttcctacacaaagaactcgagctccttttctatcgtgactcaaagatctgaggaaggacccagaagaaaggttagg

SEQ ID NO: 446776 - DNA, 842 bp, Homo Sapiens
agtaggtgctaaaacttggttttgaaattttattaaaaaaatatatttgcaaacatataaaatttaagatgaaaaacgctcattttaaaacatgtaataacttaatatttgcaaacatacacagatgctataaaatccataccattaaaaatgttaatgatacagtattgcgctcatggaacaaaaatcttgctgtaattccagagcttctcgtccccatgtttcagggagctgagaatctggtacaatgaaagtcatgagagccacatggccaaagcagtaatacagaataaaaaaccatttagaacacatattttaaaaacatgtttcttaaggaatcacacagataaaaaggaaacacaattctgcattttccccactttgaagtgaatgatattgcatcttagcattttaaatgaaggtgtcaaatacaaaacggagggaatcactgcacacatctgttgaatttgctgaaaaacaggctcctcaaggccctggtccactcggaaatgttctcaagcacagctgtaaaaaagcctagtgtaagctgcttgactttgctcagatcttagcattttagagacttgagaacacagggcactattggttccagaagatacactgaacgcaactgaagaaaactgaagggaggcaagaaagaaaaacatactctgcagcaaacgtgcagccaggatgcaggatgcgcaccctaggattcctcagttctcctcactcaccacgggctgagcccactcgtgcctgtgccacctctcattcctctcagagttacagtatgatggctgattttgttttttgagcagttaggcaccttcaatttcacc

SEQ ID NO: 446777 - DNA, 577 bp, Homo Sapiens
  misc_feature (31)..(31): n is a, c, g, or t
  misc_feature (99)..(99): n is a, c, g, or t
tcccccctttgaaaacccattagaaaatgtnccaacagttaatacaaacaggtttcctgccagacccctgtggtaacttcccaaaagcaagagtagcanccaagagaggaaaggagcatgtttatactttggactttgtcatcaggcacttaaattgttggagagacatgcccgttttgaaccaaagatataaaaactgggttggagtaatctttacaagtggtctaatgaatgggccttcagaagcaaagtggaggtgtgggttgaacctctgcccatcctttagtgctgactttcaagttttctaaatgcccataaccacagcaatggcagcagtggcggcaacggcaggaacagttctgtcatgtctgttttctgtatgtgttctgtggctgaccagaaggttttggtgtcacactaagaaggctctggggtgtggcacacctactgcccgaggttgcccagatccacgctggagccaaactctatgatgtaaaagctatcagccttttcaccctgagtgattatgcgttctccatccttatagatcttctctcctattacatccacaatcttc

SEQ ID NO: 446778 - DNA, 383 bp, Homo Sapiens
tcttcggcagttctgcgagcagattaattgaaacgggcctggaacttcatcctctcctcccgatggagttgctgtaggtctgcggacactgcctggttagcctccgggaccacagcgccgtgggctttccctcgtggtgtctgctttaaacttgggtgctatcaatctatccaacaatgacggatgaccttgtcatagcgacgccagtcaaaacattttcggtctaactctcttccaaccaacatcgaagcatcctgaatgagacccggatgaagtctgagcagcacgtttcccaggttcagaaaactgcagcactggcagcaactcttccctcacggaggcgcaggcccgctcaagggcagcggcgccgctggtctcctgag

SEQ ID NO: 446779 - DNA, 491 bp, Homo Sapiens
ttaacgcagttcttaacgtttttaatcgggttttattccattgccacagcctactctaccttttctaccaccccgcagtatctgcctctgggtccagggtcctttctgctccggcactgggggctctcaagaggtggggctgccacgtgggtggcctctccctggagctgagcccaccctgggggaccctggatcatgcccctttgcccccagcccttggtttgcagggaggccgcctggcgatgcccagcctgaaacagcacccctggcagggctgctcagtggcagctctcactttgtgctcaacaggaagcaatcagaaacacataccagaagccaaatctacgccaacaatttctcagacaacgaaaaagcaaagagcaaaatcaacatgatttggaaaaggaatttttaacctttaattggaaaaagaaaacattttctcaccgaagaattttcgtgtttgagaaataaagaaaatttgaggtgtg

SEQ ID NO: 446780 - DNA, 537 bp, Homo Sapiens
aactagttgaaagttttatttttataaaattaacataaaagattgtttaaaaatctgcagttatttacagcagtattgcacaagtaaagtggcaattaccctgtcaaaattcatcagtgcaaaacacaagtaagccagggaaactgcaatacaaatgctacatacgctgggtcctagaaaacaggttagtgatggatcagtatacagccagatcagtgctatttataagtgggtacctgatgagttctgatacagtaactagtggtcacagaatctggacataaaacataagagagcttctatagtctgacattcccaaataaaagtagtcaagttacttaactgggagcttgaggatgcttcttacacacaatgctgtttagagtagaccccaactgatttagcgtcatctgtagacacgtttcccccaccccacgtgtacgtgagtggacacacacaggcaccaggctaaatcagcagggatggcagaaccacctgcatggaaccaccatgaagtctccttaaagctcccataag

SEQ ID NO: 446781 - DNA, 560 bp, Homo Sapiens
tttttctgctgcttaaaacacacaactttattgatgacataaaaatagtcttaaatgtataaacataagtccacacaaaggaccaaagattaccttacttatgaagaatccattcagtttctgctcatgaagcatactaaaaatatctcaatccagacaagataaaaatcaacacatgtatttttagtacaagcttgaattcatttggtgttcataaaatggtccagctatagaccatcataggtaacatcagtttcaaagttataatgcaatttacaatgtgcattacttccagagtgcaaaaccaaaatattactcaaatttgtttgggaacatacagccaatcagagtttacttattaatagctcaactctctctttcacctcagggtcattgcattctgctgctaaggctcgaagtttcttggcacatgctttaggtcgttggaataggaaataaagggaatttttactgaatttgtcctgggtaaatgcttttgctcttcttttaaaatggtaatttatattttcaaatagtgaaagagcattaagaatattctc

SEQ ID NO: 446782 - DNA, 251 bp, Homo Sapiens
  misc_feature (28)..(28): n is a, c, g, or t
  misc_feature (44)..(44): n is a, c, g, or t
tgtggctttgtgtttcaaataatgttcncctttctgtttttgcnccagataagaatcagttccttgagaataaattttttatctttcttaacttcagaatattaaatttggaatatctactaaaattgtgtgttatgtggctgtaaatgatgtacacgctgtaaaataagatcgctactgttatgtgggattattatttctaaatgttactcattgaaatgagcatacaataaaaagcatttattgccctt

SEQ ID NO: 446783 - DNA, 1335 bp, Homo Sapiens
  misc_feature (180)..(180): n is a, c, g, or t
  misc_feature (185)..(249): n is a, c, g, or t
  misc_feature (251)..(251): n is a, c, g, or t
  misc_feature (253)..(253): n is a, c, g, or t
  misc_feature (255)..(255): n is a, c, g, or t
aatttcccaaggcccctttagttcccttgggcccacggggagttttcccttgcgggaaaccccgtttttgggccccccagtttccccttttcccttaacggggggccccgccgcgccccaaaaggaaatggttttttgaaaagtttttttgagggcggagggcgggccgaccaaggaaancgtannnnnnnnnnnnnnnnnnnnnnnnnnnnnnnnnnnnnnnnnnnnnnnnnnnnnnnnnnnnnnnnntncncngtagagccatagttccatttattatccagcaaacactgggaggaccaggggaggggcccagcctggacaccctcctattattgccatgggttccagtttgcttccccaacctagagggcctagaggtgctcagcctagggaaagagtggacccggcccctgacccttggcccttgggatggagcatagtccagatggccctggctctagcaccaactcataagcccccaccccaggcccatctccttagggccactgagctcctattggagccaagctggctagactctgggccgctgggtccagctccaagcaggcggactcttgagttctggaccccaggctggctgaactctgggatcctaattccaggctctaggtgaggtggacttaggtcctgggctccaggctaggccaggggccttcagggctgcagcaggtagctgccttcatggctgggcttctggggtggtggggccttctcaggacaggggccagggctggagttgggactggattcagagagagagtcaacgtcggcagagcgagaatggcaggcccagcagaggatgacccagagcagcagcagcaagaagcccacgagaccgttgcagacgatggcgatgagggccccctgggagatggctgcccccatgacaggcagcaccctcagaccagcacagacagtggagctgcctcaatggtgaggcccatgccgaggcaggactctggtatggccggccttcagaggaggctgtgctgtctgcacgctcagtgattcctgggcagtggagatgtctacctgcagtcctgagcctgagttgagcctggtgcgcgcccgcgggagggtccggggcagcgggatgctcggcgccgactaaggcttgggagcctgcgggcggggggcggcgggaggtgggagaccagcagaggcgacgtccgctcccccggccctccccctcggccgcgcagcctccaccggccgctcccgccgcggcgcgaccggggcggcctctgccgcgggcggtctgcggtgagcgggcacctcctccccttggggccgcacctcctccgcggccgc

SEQ ID NO: 446784 - DNA, 449 bp, Homo Sapiens
  misc_feature (351)..(403): n is a, c, g, or t
tttttttgtaaaatgaaacatttttattcattcattttaagatttacagcaatggcaattaacaatatagaccaaaagcttcgaatttagctgcatacttttaaaaaatggtaagaagtaaaagatgctttaaaagctatccatctcagttcttaaatggcatctaaaccttagaagtcaaatgttacagcaaatatttgtaaaagcaactgtaaataaaaccgaacgcaaccacagcataatataaccatgtagccatagatatatgataaatataaacaacagcttaatattaggaccattagtcacagtggcaaaagttcttagatattgaaaagaagatgtgttagnnnnnnnnnnnnnnnnnnnnnnnnnnnnnnnnnnnnnnnnnnnnnnnnnnnnnatcatcaagatagcaggccatcccaggacagcagtcaagggaaaat

SEQ ID NO: 446785 - DNA, 529 bp, Homo Sapiens
tttccgtgagggcattaggctgctgattgtaagttatttccaataccactgatcttggtatctgccaagggcttccttgccttccctgggcagttttaggatttcaccctagtagggggtatgaggcactgacccctttattctggacccaaactgctttagagcagagttaatacctctccctccctcttcaaaacagctacaggaactgcaggcaccacatatgtgtgaggccacatcactgcccctgaggcttcaactatttccaccatgcactattactagctactaacagccattttaagagatctcctagcctgcaaggtagaattctgggatcagttccaaaaccagaactgccagtaatggtgacttgaatattttatttgatttttggtcagtaaccttgtcatttaaattggactttccaatagccttaacatggcctctgagaagtttcctccagaaaggtctttaagctttcgcttttcaataagtaagttctttactgcttttctactgctacttt

SEQ ID NO: 446786 - DNA, 513 bp, Homo Sapiens
agacgtatgtatagtagtatactgactgctaagtgtactatactgttgctttactaatcacctaattcattgcagttcatacttattgactcagagtttaaaaccacaatctgtaggctttaagaattgcttttaaacctttttaagtgataaactcttgaagtggtcttaaggttagcaaataattgtcagtattaaacatggcgttatttaagtagtcctgctgcaagaaaggcacttcagtgaatatgtgactagtaaagcttaaatatgtttggatctaatagagctcatgaaatactgtaacttggggattgtaaatgaatggatacaataggttaaggcccaagatgtttgaaatgaatgcaatattaatagatgcatatatacatgacatattgtggttaattttaaaactactgtgccttaacgtgtttcttaaacttttgtagtaaatgaacatttgaaatccattttgataaacctgctgttaatgttttttccccccttaaa

SEQ ID NO: 446787 - DNA, 484 bp, Homo Sapiens
  misc_feature (331)..(331): n is a, c, g, or t
atatttcaatattcaagttacaaatgtataaggcagttagaaataatacagtcacatgtcacttaatgatagggaaacattctgagaaatgcattgtaaggtgactttattgtgtgaacatcatggagtgcacttatacaaacctagatgggacacctatgacccacccaggccagatggtacagcctgttgctcctgggccacacacctgtacagcatgtgaccgcaattaaataccgcaggcaattgtaacacagtggtgagtatttgtgtttacaaacataggaaaggtacagtaaaactatggtattacaatgttatgggaccaccngtcatgtaagtggtatgtctttgacagaaacatggttacgtggttcatgagtgtatattcactggaagatagtcaagactaaagacacattagagcaaattgacccctttaacatgtgattattgtccaattaaagacagttgatttaagtaa

SEQ ID NO: 446788 - DNA, 786 bp, Homo Sapiens
  misc_feature (56)..(56): n is a, c, g, or t
  misc_feature (113)..(113): n is a, c, g, or t
  misc_feature (163)..(163): n is a, c, g, or t
  misc_feature (169)..(169): n is a, c, g, or t
  misc_feature (171)..(171): n is a, c, g, or t
  misc_feature (174)..(174): n is a, c, g, or t
  misc_feature (259)..(259): n is a, c, g, or t
  misc_feature (399)..(399): n is a, c, g, or t
  misc_feature (433)..(433): n is a, c, g, or t
gctgcccgcaggatcgcggtgccagtgctgtgcgcgatggcagccatgctaggggnatcggcgccctacgcgcctgctacgcggtggcctcaatcctacggtaatacgctacncgcctatcgggtacgcgggcgcgcctgcagcctggtacagctgcactgcncttacncngcngggcctccccagcgcagcggccactgccgccgcaacaacaacttcgtgaacttcggcgtcggggacttgaatgcggttcagagcnccgggattccgcagagcaactcgggagtgtccacgctgcatggtatccgagcctggtagggaagggacccgcgtggcgcgaccctgaccgatcccacctcaacagctccctgactctcggggggagaaggggctcccaancatgaaccctgagtcccctggattttgcattcanctcctgcggagacctaggaactttttctgtcccacgcgcgtttgttcttgcgcacgggagagtttgtggcggcgattatgcagcgtgcaatgagtgatcctgcagcctggtgtcttagctgtccccccaggagtgccctccgagagtccatgggcacccccggttggaactgggactgagctcgggcacgcagggcctgagatctggccgcccattccgcgagccagggccgggcgcccgggcctttgctatctcgccgtcgcccgcccacgcacccacccgtatttatgtttttacctattgctgtaagaaatgacgatccccttcccattaaagagagtgcgttgaccccg

SEQ ID NO: 446789 - DNA, 266 bp, Homo Sapiens
tttgatattgaatatatacaatttatttaataaattaatgtcattcaaaatacagtgccagaacatggtgcagttgaacatgctagtaatgtttgtcatgaagcacctgtgctcatgttagattggcggcgccccactactgctagtggttcctgggattaatgccagagcagcgctagttatctgctcttctgcacagctagtgcagagaattcctgaacagttcaccttactaatcctaacccccacacgcacacaacagggtt

SEQ ID NO: 446790 - DNA, 647 bp, Homo Sapiens
ttgcaccagacggtcttcaggtttatttcttaaatcaattaggaaataaaaccacagtgcccaggaaagttcacatgagacgccacggtgtctcttgccatggccccaccactccaggggccagggggtgctgctggagggaggacagacggacaggcggcctgggtggccggccccagaaaggctggcgtggatgttcgagatgagccaccagcgaagccagtagggatgtctgggccgtcctggtgggattgtctgggacatcgccaccaacacggtgtcagagccatcagtggggacatcggaggggccaccaccaggtggggtatattcaacaggctagaacccctgaggcttgagaggccaacccccggcaggagacctcccctgacccctctgctgcctctcctgtgggaccctccagtagacacaccagatgaggacacccaggaggcctcctcccaggacaggaggcagctggctgggcagccacgcagtgcagggttcagggccctccagcaggagctccatggagatggctaaatggggacatcaaggcaggggctgacagtggttacatccaagtggttacagtcaattccggaagctttcagggcatcaggaggggaaggtggggctggggaaat

SEQ ID NO: 446791 - DNA, 1715 bp, Homo Sapiens
  misc_feature (404)..(404): n is a, c, g, or t
  misc_feature (449)..(449): n is a, c, g, or t
ggaagaccaaattgatagactggactttattcgaaaccagatgaaccttttaacactggatgttaagaaaaaaatcaaggaggttaccgaggaggtggcaaacaaagtttcatgtgcaatgacagatgaaatttgtcgactgtctgttttggttgatgaattttgttcagagtttcatcctaatccagatgtattaaaaatatataaaagtgaattaaataagcacatagaggatggtatgggaagaaatttggctgatcgatgcaccgatgaagtaaacgccttagtgcttcagacccagcaagaaattattgaaaatttgaagccattacttccagctgggtatacaggataaactacatacactgatcccttgccaaggaaatttgatctcagttattatnctaaattacccccaagttatgtttcaggttttccagggggtattngtatttcgtttttccctgggctggtcttcccttgtacatcgatttttgggccctagaaatgctcaaagggtgctcctaggattatcagagcctatctttcagctccctagatctttagcttctactcccactgctcctaccactccagcaacgccagataatgcatcacaggaagaactcatgattacattagtaacaggattggcgtccgttacatctagaacttctatgggcatcattattgttggaggagtgatttggaaaactataggctggaaactcctatctgtttcattaactatgtatggagctttgtatctttatgaaagactgagctggaccacccatgccaaggagcgagcctttaaacagcagtttgtaaactatgcaactgaaaaactgaggatgattgttagctccacgagtgcaaactgcagtcaccaagtaaaacaacaaatagctaccacttttgctcgcctgtgccaacaagttgatattactcaaaaacagctggaagaagaaattgctagattacccacagaaatagatcagttggagaaaatacaaaacaattcaaagctcttaagaaataaagctgttcaacttgaaaatgagctggagaattttactaagcagtttctaccttcaagcaatgaagaatcctaacaatagagattgctttggtgaccatgataggaggaaacgaaacttgtaagattggaacagttgttatttttatgaaattactttaaatatgaattgtactaactgtacctaaatagcaaagccctgtgtagattctggtaatgatctgtctcagggtatgtgtatttttgaagagtgttatgtccttagttttaattttgagtaaagaaaaggctaaagtcatgaattagttacaagcaacagtaccaacttatgtgacccctgaggggtggggctgtgagctcttaatttgtttttgattctgaaagactctgcttcctggcatccaggagttagagattgagcctttcatcttctttctcaaaactagtttttgatgctttctttcatgggaatagtcacttttttatttagtaaatcgcattgctggaaccaccaaggagtgtggaatgtccttgagtgtattatttatgcaagtcacagtcacgttgccatcatggcagctatgtgaaacactaataaatgtgtttttactttttattcccgttaaaactgatgtaaaacaggataaaggcttgttatagtcacttatatagtcat

SEQ ID NO: 446792 - DNA, 283 bp, Homo Sapiens
ggaagacatctggtgtggagacctctctattgcacacaacgtcccagcgcactccactctccacccactcctggggcctctctgtcctcccttccttggccttgggtcattcgttattcctggctcgggtccactccgaggtcctccttagctgccagtcatcacaggggatggctgcctccacactgcctgctccagggactcgagtccactccacggagagcctttgccagctgtggccagcctgtgagtatcttggcccggcacaccctggctttcccgg

SEQ ID NO: 446793 - DNA, 1018 bp, Homo Sapiens
  misc_feature (105)..(113): n is a, c, g, or t
tttaatgatcattatctttattcatacacacttgcttccaaactacaattaatgtttctaacaaagcgtatcatgcaaacggagattagaggttatacaaactgnnnnnnnnngcaatgcagtaatttacacatccgtctcctctgcgatataaccaaatggtgtttgacggttgaatggcctctacattttgtcagtaggtgcttatacagaaggaaaaacctcaacctccgtctcttcctccaaacaaagttggggcttatatgatgtttttcaattaatgatttaaacgtggtatgtccttcacacacacaaatcatgtagcaaaagcaatgacttcaaatgcttctgtttataaaagatattctgaaagaccctaacagaagggatgtgaggttaatttttagaaaacctttagactcaaaatagtaactgccttcatgattgattttgaatattctagtaaaccaacccttcaagaaaagaatgatattcttccaggaagaatatcaacaaaagtctacaatcacaggaatggatactcctaaagttaagcagaggtgacaaagacacagtcgtttaatcagaaaatgcaaagccaccttttatcttattttagaaaaaaaggttcttataaagtggacttgacacctattttctgaaaagccgagttctgtctactcgcgtaagtggtaactatgaaacagacgtcaataggcacgtttgctgctgcctcttatatcttgggagatcgaagtatttctgagttgccccagtgggcaaaaattcctttcacaggcatctctgaatcttcacccaaggtgagagacctggggaccacgccggtctgggcacaaagccatgaagcatctcctcttccaaagaaggccccgagctccggagcaaggaacggtcccgaaaccatggatctttccaggctgcttgattgggccccaacagtttccctgttgaatttaacttacaggtcccgttttaaaaccaatacgcattcccaatg

SEQ ID NO: 446794 - DNA, 1115 bp, Homo Sapiens
  misc_feature (111)..(111): n is a, c, g, or t
  misc_feature (357)..(367): n is a, c, g, or t
  misc_feature (616)..(640): n is a, c, g, or t
  misc_feature (646)..(646): n is a, c, g, or t
  misc_feature (684)..(696): n is a, c, g, or t
  misc_feature (715)..(852): n is a, c, g, or t
  misc_feature (1023)..(1023): n is a, c, g, or t
  misc_feature (1041)..(1041): n is a, c, g, or t
ccaccgtcgtcgaaattcgcggcgccggggtggttcgcggaaaacaagggggcacggcgagacggtgtgcatttaggggaggtatggtgggatcgggtgggttcgtggatnagggggggcccacccaccaggagcggagggggttgcgacaaggggcgcacggtttggagacgcggggccaaagcgcacacacctcgtggtgtgtatgatggtcgatgcatcttgggcggcggcgggtgaggaataaatttgtgtgctcgcggccccgatgtcttttcccaggaatgttttgtgtatgagggcggcggcggggggttagggatgtttggcgttagtcgaccaggtcggcttccggcnnnnnnnnnnncgcgggttgggagacctaaagaagattgtgggggggaagagcagcgttcactgtatggtatgggggtgggtatggcgtggcggcgcgggggcccgccgccccgcacatttatgggtgtcgtttgggggggcccgcgcgaggtatggtggggcagggcgggctgtttgggcgccccttgtgagaggaggggtgtaaggacttctcgggggggccgccggcggcggtcttaagaagagggaggggaatccnnnnnnnnnnnnnnnnnnnnnnnnntgggtncatttgtttgttcccgttggttttttgtaggggtgttnnnnnnnnnnnnnttggtgtttttgagggtgnnnnnnnnnnnnnnnnnnnnnnnnnnnnnnnnnnnnnnnnnnnnnnnnnnnnnnnnnnnnnnnnnnnnnnnnnnnnnnnnnnnnnnnnnnnnnnnnnnnnnnnnnnnnnnnnnnnnnnnnnnnnnnnnnnnnnnnnnnatttattacacgctttatttgagttaaagatagaaaacaatatacttttatgtaaattgctatggcaatgtagtttacagtaattccttttatatatacttcgtattattcttttagacattttataaggaataaagctaattgtatattaagtttaacaataatcagtanaatattctccaaaagtantttcctgaagtgggcttgctaggtataaagctcataattgtcaagatacttatattagggacatgaacccaagg

SEQ ID NO: 446795 - DNA, 576 bp, Homo Sapiens
cgatgagtaaatcttggctctcaagtattgactggctatttattataaagtactgaagtcacatagccacctataaaacagcatagaaatgtctgcctgtttaaaaagtcattttaaaggtagagtgtccacatcaggcaccatttgtgatatgactccagtggcatatatttcattttttaatgacaagacactccaaacctttcagataacaaactatcattgcagaccttcacttttggaatgcaatctttatattttctgtgcatcacacacatgcttttctgcacgtggttgccttagtcatcttcctacagcaccatctagacatcaaaaattgtgctatatatcattggtaaaggaaatttgaagagatgacagtgcctaaaagtacagtttacatccttttggaaagtatgtgtaagtgcatgtttttttgtgcaccttcttctatagcacttttttacaaatatcttatttttatttaacgacttgggttcatgtccctaatataagtatcttgacaattatgagctttatacctagcaagccataattgccaagatttactcatcg

SEQ ID NO: 446796 - DNA, 877 bp, Homo Sapiens
  misc_feature (21)..(21): n is a, c, g, or t
  misc_feature (32)..(32): n is a, c, g, or t
  misc_feature (78)..(78): n is a, c, g, or t
  misc_feature (183)..(196): n is a, c, g, or t
aaataatcctggtacaatgtnatttaacaggnatcaaatgttttgtaaccaaccccccaattagtttcccaattgggnaaactataatttgataattcaagaagccatattattggccgttagtgtcacgtcaacaaagaatgtggagctgaccacctaaagtatttttgaactatatatatnnnnnnnnnnnnnntacgcaaaatttcacattttaatatgcttagaaggagtttttaaagaagtagaaatgatttccttggcctctgactttcagtgatgaaaatgcaaccatgcagtcccccctttgcagaagggcagttcttcccaggctttctggaagcaggggcttccgaggagtctccacccacctcacagaacactcactatgagccctgcacagacagcaggattcacaatctccaatagggatggcaggggcagcccttaaaacttgaagaggtcgatgaagtgctgcggagacacaggcgtgaagcagctgtcagggtcggccgccgtgcaggggtgtcctgagtccttccaaaagagaatgctgcagtgccgacagaaatgcagtgtgtctccgtactgctccttcgctgggtaatgtttctgaagtgcaaagtacatcaacttccattcaatatgacctttttctgaaaggatcaaatgtctacaaaactgcttttcagcaaaatggtactgacaaagcttcttccacagctgtctgtcttcactaagcatatacaacgtgggggtcacctggcctaaggtgatgatgtcccatccgtctgagaaccggtataggatgttgttcagcatgtgcagaggaaggtcactgagggtgaggccattgttcacttgcttgtcctgttcg

SEQ ID NO: 446797 - DNA, 396 bp, Homo Sapiens
aaaataaaaagtaatcatttttatttgcattggcatttttgtcaattcagactgagaaatgatgagccttttttgttgttgtttttagtagcttacatggtgcttttagttctataaaactcccatctttgttgaatgacgagattgtaaaccagaaaccaaaaaccaaaaaacacccacacagctgtcttatacttctgtaaccatttctggaacttaaaactctcttgttcgttacacctcattcattgcatcttagttttagcttgtcaaagatcttttagtagctctaacatagcccactagctaagtcttgtaaatgtgtataagctggacatttggtaatattatttttaaaaaaggaaaaggaggaataggtatacttatttaatactt

SEQ ID NO: 446798 - DNA, 1602 bp, Homo Sapiens
caagctactatcagacaatgttgtttattatttcacacaaaagttagaccaaggccacagtgccgttaaacacctccctccccacccacgcatggctcaaaaaccaccccaaccctgctataaaaacaacagaacacaacaaaaatactgcatttgaggctgagccaggaacagagtggctccaacaaaaataagacaaaaacacaagacacaacatcttttcaggtttgtgtaaaaattgccatggcccacggggaaagtggtcatggccgtgtcaacaaggatacttgaaactcagggcttttggaggtttgagacagctgccacattagggtgtcttccaggctctgctgcaggaactgaggatgctgaagggcagggctgatcccttcgccccctctgaagtttaggccattgcctggatgtgcttttcgttggggaagatgccataggctccttcctcctttccagagagagggacacagtgagagggctggaggccctgaaagccttcagtgcccacggtaaggaagccagccaagagaattccctctctagaaagaaggccttccaccggacaaagttcatggccctgggagccagcatgcctgcattcacatggcataaagccctacagcaactgtcgccaccagaaagctgagtgtaaggacccatcggagaagcggaccctggaagcgggttttgagtgggggcttcccctctggggagtctccacggggggcagaatcttgcactttgttgctggccccgctggcgaagccctggtgcccgtgaaggggctctggtccttggtgtcatgggtcagcagctcctgcaactcctcaaagagctggatgttgagcaggaacgcagtcttggcctcttctatcaccctctgcctgactgcgggagtcatctccagggagttcatgcgggagcggtagagctgcttgaacttggtggcactggcaatgttggggaaggtgaagaaggccaggccctcgccagagctgggcaggtccagggctttctgggcaatctttttgagcacctggcccccagacaggtcacccaggtagcgggtgtaggcgtgggccaccagcagctcgggctctgtgcgccccacctcgtggagccgcttcacatagcgctgcatggctggtgtgtaggggatgacctcctgccagcggggcccgtaccagaaggccaggtcctgctccagggcagccttgcggtgcagctcttctgggaagtagacaggggcgaagactgggctctccttgttgcgctcaatctcctcctccagggccacatagatgtggtacagggaggccatcaccagcttgaagccgtctcgggtcacctggcccttctgaaagttcctcatgaactcagcattctctgcctgggtgtgcacctccttggtggcctccttcagggcctctgacaaatcctggggcatgctgtcgggttgcggacgctccatccggccggtgctgggctcgttcgtgctggctccgcgggcggcggctgcgctgaggacgctcgagaggaggcaggcgttgactgccggagccgcggcatcccgggaattccggaccg

SEQ ID NO: 446799 - DNA, 1226 bp, Homo Sapiens
  misc_feature (18)..(18): n is a, c, g, or t
  misc_feature (23)..(23): n is a, c, g, or t
  misc_feature (60)..(60): n is a, c, g, or t
  misc_feature (71)..(71): n is a, c, g, or t
  misc_feature (90)..(90): n is a, c, g, or t
  misc_feature (106)..(106): n is a, c, g, or t
  misc_feature (131)..(131): n is a, c, g, or t
  misc_feature (156)..(156): n is a, c, g, or t
  misc_feature (167)..(167): n is a, c, g, or t
  misc_feature (172)..(172): n is a, c, g, or t
  misc_feature (187)..(187): n is a, c, g, or t
  misc_feature (193)..(193): n is a, c, g, or t
  misc_feature (202)..(202): n is a, c, g, or t
  misc_feature (238)..(238): n is a, c, g, or t
  misc_feature (305)..(305): n is a, c, g, or t
  misc_feature (826)..(826): n is a, c, g, or t
tgtaggccacaggtgggnccacnccgaagaaaccaaaagccggtattccctaagcccagngtgaaacccanggccccgtgacccacaggncacggaacactaaatngggcccccaggcgaaaactgggggntgaactaaaagtcaaggccctgtgnaaacaggatancctanccggggagggcccanttgganctcctaaanggaattttgtacactcccacagaaccccctatctanagtaaaattgattttcagttttaaatgtgggcaaaaaggcattttctcccaagattttaaaactaantcttatttttaaatggtttacccaaaatttgtcagtacattttacgtgtagaagcattttaaaaatcatttctagcaagcacttgacatctagtcagctctctactcctttattttgttttatcaaaagattaagagctcctttctttgaataaaataatttctcataattaagcagtagaagatctatcttcacaaagtatgagggatgccagatgttgataaacttactctttctgaatctggacaaagtcgacttaacagatttttctgatgagcatgttttatgaatcctccattgtgctccattctatcacatgtgcatttttcatgttaaactgcaattacttaatctcttcccctatccttctaaattaattttccgaagttggagtgtagtcttttcccccttaggctatgcattaatcgaagctttcttttcaccatgactttataatgtctagtaaacaatatttctacttcccacatctttgctttacacagtcaccttgcccttcctcncaccacctaacaaaaaagatggtcatactaacaggtgaagtgtacaaggtgtctgtgtgttttgtgtagcttcagagttagattgaaattaccaggcacagatttagtcttgtcattttgtttacacattggggaaaacaattcagtttattaaacgtttcatgtaactgcacccaagttttgccaagctggaaacttggaccttttctgtgtagtgactttttaattatagttttcataacctggagatcagactgttgctttcgcatgatgtatgtagtgtctcatgactggagtttgctttgttttatagtatctgtactccttgtatttttcaagagctattttgtaaacagatgatgtatttctccattgaaaacacaataaacccaccagcgca

SEQ ID NO: 446800 - DNA, 809 bp, Homo Sapiens
ccctttgtgtttttccgtgtgagtgtgaagctgggatagtgggatttttattttgcttggccaggcttgttttgtgccatcttccccatcagcagacattgaaccagggcccactcccgccctgcccccagactggagactttttaggttataaggaataattcttccttcatgagccagcagtgggtaccagagtctcttgggctcagcacctgtttcctttcccacagaagggggtgcctgtcagaggcctggagccaaggccacctgtggctggacagcagcagccccctcagagtggggagcccacttctgccttctgcacgcgctcactcctgtgggtgccatcgcagtacgggggcctctgagtggccttgcaggtacagagtgccaccatgcgggtctcttgggccttgaacttgagtggagataggccagtgcgttggaagaagtgggagccgtcacagaagggctgcttcttgctgcggccacacacacaccacctgtaggttttccctgccaccagctccaccttgatgggggtcttcagggccaccacggacctggctggggttctagggaaccactgggcctgtggccagggaagatgaggggctcagggttagctcaagccctggaagcaccgtccggcctgcgacccttcctagtttcccactggcctgtgtgtgtggcaggtttcctctacaagaggctgatctgatgccacccaaacaagaccgttccccaggacaccataggaccgtgagctttggacagggagatttcaaagccatgcaggcactcaggtt

SEQ ID NO: 446801 - DNA, 991 bp, Homo Sapiens
ggttgggaccccttaggggccttcactgtgtgcacgctgtgcccctgtgtctgagagtccctgtgcccgtgtaccctctttgccccggggaccttccggatctcctggctttgtaaaaaagccgcaatactttctgggacctgtagttctttgggttggagcgaagaaagggaagggtgcctctcatctctgggtttagccgggcttggggaccccatacagaatgaatctgaactgccctctcctgtggctggtcaggtgcccccagcccacagagaggttaaaatctggagcaggaggcagcacgtgggcctcatagcagtgactgcaggactaccagtctggttgggcaggcttgtttttgccatcttccccatcagcaaacattgaaccagggcccactcccgcctgccccagactggagacttttaggttataaggaataattcttccttcatgagccagcagtgggtaccagagtctcttgggctcagcacctgtttcctttcccacagaagggggtgcctgtcagaggcctggagccaaggccacctgtggctggacagcagcagccccctcagagtggggagcccacttctgccttctgcacgcgctcactcctgtgggtgccatcgcagtacgggggcctctgagtggccttgcaggtacagagtgccaccatgcgggtctcttgggccttgaacttgagtggagataggccagtgcgttggaagaagtgggagccgtcacagaagggctgcttcttgctgcggccacacacacaccacctgtaggttttccctgccaccagctccaccttgatgggggtcttcagggccaccacggacctggctggggttctagggaaccactgggccagccaggaggagatgtcccgccgcgggttcaggtcccgggcaccacgcgccgccggccgcaggatcgcccccgcgccgcgcatggtcgatcccgggaattccggaccggtcca

SEQ ID NO: 446802 - DNA, 268 bp, Homo Sapiens
cccctggaacacatagtttttaaagtacctattagtgatactctcctcccgttggcagtgcttccactgtgttttctgcatgtaataaaggatggcactgttttttgcataggtctttcctaatagctgagcactcttggagtgtaggggctcaaccttatgcctctttggacacacaagcctagcccatgggctggcatataggagctgctcaataaatgtttgttgaccgaatgagtggatacccgaataaaattttttcattgtc

SEQ ID NO: 446803 - DNA, 425 bp, Homo Sapiens
  misc_feature (312)..(312): n is a, c, g, or t
  misc_feature (384)..(384): n is a, c, g, or t
tcacaagcctttgatttttgtttcatttatttgtaataaacctcttccacgtgatgtcttttatttttcacgttccagatcactcaagttttattttgctggtactttggccacaccctctccttccccatgtggagcaaaagcaacttagggtgcttgacccaaaggctagattcccatgtaagtccccatgtattactgctggttcccgatttctacacctgctggattcattggaggtttgttaaatgtccctgtttttaatttcagcctactcaatttctatgtggggggcagttccaggatgtcctngtagggtgccagatttcatggacacttcaagtccctgataaaaaatcgtggtatttgcatataacatacatncttcctgtatactttaaatcatctctatttttcataatatc

SEQ ID NO: 446804 - DNA, 839 bp, Homo Sapiens
cagcttaaaacatgtctctgcattttattttaagaaaacacaaacctggtcacaaaacattcttcagagaacaggataagtgaagaaacaaacaaaatgcatgggaatagcaaatttggggccacggtcatgttcaaggggcggagctgacatgacatcattttgttcccggaaaagcaaggttaactcaagctgtgaagcccagatggccaatagatttacagccatctaaagaagagcagaatgctctcaagagctgaattatgatgacttgtaggtattgattagatgagaacaccaaccccatattcagcagagagttagggaatgagaagtagaggggagatggtggtggagatcgtctttatgtagttttcaaagtcacttccgaaaaagaagatgaggtaatagttgaatatgccagcaacggacatgaggaacaggaagagtatgatgcgtttcccaaatatgtagccaggggtgctctgcgttctctctcctaggtaaccgacaaagtacttttgcctcacaaacaagtacatcagtccagcaaacgcagcaggaacttggctgcaaagtagccccgcagaccagagcacagcgaggaaagtggggtacgcatctacacagttctggttggcagtgtagacccgctcaaaggcaagtgttccggtcctctggaagctcctcccattctgggtcctgctttcgtgctccactttatgggcaaagaatccattctggaccacgctgatgagggtgacgatggccaacaggacaacattgcctacagtttcttgatccatgtttgcttcaggctccccagagaggactgcccc

SEQ ID NO: 446805 - DNA, 833 bp, Homo Sapiens; identical to SEQ ID NO: 315681

SEQ ID NO: 446806 - DNA, 544 bp, Homo Sapiens
agagtggcgaagatgcatttattatacaaagactgaagcacatcagtcatgtcccaaatggaaggcaaactgggtaagtttccaagctttcttttctggaaaacaacttattgctggatataactgaaagtgaagattatttgttagcagtcttggatagtttttttctctaatatcatttaaccaaaaagaaatgtcttattctccagatgcaggtttacacatccctgggctggttttaatgataaacaatttagccaaaatagtaatcttcctcaggacccaacagatcttgaactgggcaacagcccatgaatagcctagttctgggtattcatcgcatcttttggaataacagcacacagacccagggagggtatttatagtccagtgtgaggggtgggcaggacgagatgagtcacactttattcttcactgctcaaggctgttctgagcttttccctctgactcagcaccagtggcctcacagctgacagggcctaaatgcggcagcaggagctcaggaagcggtcatgctgcttaa

SEQ ID NO: 446807 - DNA, 433 bp, Homo Sapiens
  misc_feature (412)..(412): n is a, c, g, or t
  misc_feature (420)..(420): n is a, c, g, or t
gtgcttttgacactttatccgtttttatttaaaaacatgctaaaaacatggtgttccataaagccaggaccaggatgaaggaacgcacagatacggcaatgcaagcagaaagtgcatctgaaaccaacaagcgtgctcaccctgctctccctcccgtgctgcccgggggaggcaggtgggcaaggagggggcaggaagcccccagggcctcacctcctgagtccccaatcagggcagggaggccaggccccaccctggactattgcctcactgcagtggggaggaggaaagtttggggcacgggaacacaagggttggccggattctgagaagctgagggacaaagattggaccccaagcacctcacgcccagtttcccatcctattgccacgtccctgctagtttagcacntccaccantgggtggggcagg

SEQ ID NO: 446808 - DNA, 506 bp, Homo Sapiens
  misc_feature (419)..(427): n is a, c, g, or t
taggtgatcaggtaaagcccctactccagggcaggcactgtgatgtgttgctggcctgatgcctcctcaataggaacagcgtgcatgttgtttaaagtgcagtctctgtggggctagggaacaactggttagctatatggaattaaataaattcctatttattggtgtgtgttttaagatgcaacagactagaacatgttgaaggctgttgggtggatgttagcggaaaggaggagagggagatcaaggtacagtagaaaaagtgagaaaaaaatgcggacagggctgggatgcagaaccctgggagagcaatttgcctctaaaggaaggtctagggtagtagaccaactcaattcttataaagtaagattctagagatatcaaagatttttttaagttataaaacatacaattatacnnnnnnnnntgtcatagagacccataaattcactgccaagttaaacagatgttaatgttttgcctgatttgtttcagatctctggttt

SEQ ID NO: 446809 - DNA, 658 bp, Homo Sapiens
  misc_feature (458)..(458): n is a, c, g, or t
taatgtttcacccatgtttatttgatatcatgatttcttagtccttacacaaagggaaataagcactcccttcccttttttgttgcatgtgtgttagcaggagtcggaagaacagaatatgagggaacaagcagagggtgcagaaaatagaaagatggggaaagaaagatgctgttgaagacacagagtgagtgtttatatgaacccttctctaaataagcagtatcaacaaagagtacaaagctgacaacatggagtgtcttcttacagaaataatctgggaccacattcaacatacattatacagcatcagggtacaggttttccgtcagaaattatgtgtatattcttttttctcgcttttaagtttcattgatgacattgttcatatacttttagtgtattattaagcaaatattaatttaatcatataaaccaatcctggtcagcaaaaagcnactgttagctgccatgtaaaggtccttctgtcaagtaaaacttcattctacacttctagcttcctatcagaggaacttcttgaaggaactctttcagttggctttacaactcatctgcaacaccaaatgtggattaaattcagatcacaccttggttgtgtatatatgtatataacagcccctggcacaattagctaata

SEQ ID NO: 446810 - DNA, 281 bp, Homo Sapiens
aattttaaatgttttattacacaatttcctttgaaattttcaatacaatagtgcatttttaatccgcaaaaaatgttacaatggtagtatctatgcacacaataatataaacatgtaggaggtgtgtgttcacatttttggaaatggacagaacaaaggggaagaagcctgcacctcaatactcagggcagagataggcccctctagggctgcatttgaggtcagcaccaaccgtgtgcaaagctgatctgggcctgctgcagaaaagaggctaaactccc

SEQ ID NO: 446811 - DNA, 278 bp, Homo Sapiens
aaatgttatttctacaggttgctggggaacaggtggtgtttggttacatgggtaagttctttagtgatgatttgtgacattttggtgcacccaacacccgagcagtatacactgcacccaatttgtctttcattcctcaccttcttgccaccctttccacctgagtccccaaagtccattgtgtcatccttatgctttacatgttcatagcttagcttccaattatgagtcagaacatacaatgtttggtttcccattcctgaattacttcacttaga

SEQ ID NO: 446812 - DNA, 408 bp, Homo Sapiens
  misc_feature (65)..(73): n is a, c, g, or t
  misc_feature (268)..(268): n is a, c, g, or t
  misc_feature (357)..(357): n is a, c, g, or t
ctaaattgtattttattcaattatctataacaatgccatatactagtaagcaaagcaagcaacannnnnnnnnaaataacatctttaattaaagtttttgcaaagtagaatattaaacttaaaataggtcttagtacatcaaaatactaagttctctaattgtattccaagatggtctttaaaacataatatcccatatatcacagaagagcaaccttgatctgcaatgaattttacaaacataataaatatatttacgccattacancataaccagtattgtacaacagcagttgacaattagtagctcagaacagcaaaaaggattagccccggccccccaagtcatagtcccgntgtagactggactgattaaggaaccttggactgaaagagtagttactaaac

SEQ ID NO: 446813 - DNA, 585 bp, Homo Sapiens
  misc_feature (407)..(462): n is a, c, g, or t
ggattccaaaatagagatttatttattaaggattatttagtttctgcataaaaatctccaattgttcctcattgggttttttcttttaaaacacacatcaactcttttggggttgctttgtttgccccagcactttaaaaaatacagctctttttagcgccaggaagaacagttaaggttaaggcagtgaggcgttttcttggatcttagcagctgaagggttcatctctccccgtcaagagaatacacacggtaggtagtttcttaggttggaaaatctgtccctgaaggaaataattctgcagaagaatgcaaacggagtcatctatggtcaattgtttgtgccctatagctttgaaagaaacgcctcttggtcatcaagggcttgctggttggtttcagctgtnnnnnnnnnnnnnnnnnnnnnnnnnnnnnnnnnnnnnnnnnnnnnnnnnnnnnnnntctgtctagcgagacagaaagagcagggtttacaatagtgctgtgaggctgggctgtgcaaaccacatgagaatacacaccagtttgctttttaaaaaatcccacataggggccctgcatacc

SEQ ID NO: 446814 - DNA, 445 bp, Homo Sapiens
ctgaagacattttaattaatgggagctcagcacacaaaatcattagcataagttagacattgttactattctcctgttaaataacttgtaacaatggttacctacatttgaggaaaataagagaacactttcagaaactatgtgacctgcctccaaaaacattcaggtacatccacaagactttgcatacagtgaggttcctggatcctctgaaaaccccaagtaaagacgcccaagctaaaatgatgttctcctggtacatatctgcacgtaagtcagttgaagctgtaggttcctcaataaacatttagggttactttatacaaactgtctttagtaatgggcatgcttatgtgaatttcacataagaattcttcggcatctataaaatttcttggcaatgtcaagttcctaagaatcactcactatctgtcccaaaaggctg

SEQ ID NO: 446815 - DNA, 701 bp, Homo Sapiens
ggcagcattaggaacttcaatgatattcaactcaaaccatgcgtagggagagtaaagttattttattaaatcatgcacgtcacgtgtgttagtgcaaatagtttaatctgtactccagaaattctattgtactttatatctttacaaaatagatttaaaacaattatttactttaaaaaatgtaattctgaagttaagcatttcagaacaatatttgcaataacctatatacaagaggtactgggtaccactggcatattagcattctgtggtggagtggcttcctgcaacagaaaatgatgaaatgaactatatgacagtattttctacaagtcatttgtgactaattcctccataaatctagtgatcttcccaaaagcaatctcaaatagcttaaaatataacctttaaagtataaacagtgactgccaaacatcacaaggcaaattataccctaaactcctatttcaatatttggctagacctgtggattgccacagaacattcaagccaattcactgacgatttcctcccggtcttcactgactgaaaaatttaactatgtgatactttaggatattctatgacctaaataaactttattgacataactatgatgccgcacaaaaccatggctaaactttcacttgtgttttaaatttataatatcaagcagtattttaggtgcttcattgtgcccc

SEQ ID NO: 446816 - DNA, 668 bp, Homo Sapiens
  misc_feature (231)..(249): n is a, c, g, or t
caaaagggaagatgacaacttttattgttattacaaaagcaaatttaatttgtcatttgaataattgcaagagcagactaagggcttaatcctcacacaggcaccaagtcaggcacagtaggtagctacaaatcgtaagaaaaagctttctttcctacctagagcactcttccatgctttggaattaggctaaaaaactcaacaaacctgatcagttccctttaatcctgnnnnnnnnnnnnnnnnnnnaaatgagatctaggtattaacctgctgtctagcgaaaactagtcactaagtcctggcctgagagatacccacatttcctttagaacaaacagaactaatacctgtgtacatttctgagagccctgatgtgtgagtccttaaaatgtagaccttgcaggaggcttagacctcagtttcacctaatgcatgtggaggaaatggaggtgagaatagtcacctgaagagtgcaagcgctccagctccagcacacacactcttccctgggcagcaggaaaaggaggtaacaaggacttgggctgacatctgaagcactaagctaatgtgcctggtagaggggagcctcaggaagcacaagatgtcattccacctgtgctgtccacaaacctgaggtttccacatcgttttaaagggcacagtgg

SEQ ID NO: 446817 - DNA, 914 bp, Homo Sapiens
ccttctctatctgttgcccctgattttgccttaagttcttgcctgagtgatctcccagcctgtcttctgtctccttttggttcagtctttatactgcctcttgagtaatctttctgaaatttaaacttgatatttttcgccctcttgcttgaaaacttcacttgcttccccatttcctactctttaaggaatgatttctttagcctcagatagaaggacctttatgatctggccatattctgaaatagcttcaatcctctcctcatctctgttccagtatacatctttccttcttattctgcaaacattagaccacttgatattctttaaatatgtcatgtacttttcttgtgtctgttctttgggataattcctatccttttcagggaggcaaattgcacgtgagtttaagtatgaaggcaatgtatacctgctgattgtaaaatatttaaacattgtacatatctgtgtggttttaaaagtctgcttttaattatgtaaaattcatcttccctttccacagataacttctgttaacaacttgatatctattgtacaagatgtgttactggcatttccatgtatatatgtatataaatgcaggaaaccaacatgtcattgacacctctcttctttacttttccccatatctaatcattcctcaagtcttactgatttttatcagctagaatctatctccttattttctacctctattgccactctgatccaggctaccagcatttccctcttaagctttctgaagcaacttccctaactcccactttgtgctcctcacactcaatctggtcggctatccattcattctccataacagcaactaggagtcatttctttttaaaattcgggaccctgattcctttccatctccccagctgaacgcctttttcatt

SEQ ID NO: 446818 - DNA, 746 bp, Homo Sapiens
gccattaaagttaccaaaaaaaataaacctttgaaaggaaaactggccatccaaggaaaaaaccccaaggggaagttgtaagaagaaatgaggctatgaaaaagctaaggttgtagaaaaaggaaaccatcattttggagacgcgtacctaagctttttctctaggaaatgctgtcatgaattcttcctttgtagtgatcattagttcatttctaaagaaaacaaacattccccaagatgtaaagtaataatatttcattaatgaaacataacaagtataaacaccttgtttactcctgtttcttatacaaaatgggcaaaaatgtcttcaaggatttataaccattttgtaaatattaatgtggcttctgctaggggtggacaacttcccggcttctatgggaggggccacttagaaaacgccttcagataaggttcaattcttttgtatttcagcaaagtcagcccacgcatctctatttggtttgacaaataatgcaactcctactacatccccgatgacacgaagtgaaattcctattgtgtggaaataatttaacttctaatcttctggtggaacaacaatcgtttctatttggatgtttgtatttcactaatgatggctcaaaataatatttagtttccttgttcctttgtgctgtttttaaaatggcatgttagatttgggggtgggaggggatatccttttgctaaatttcactttatctgagcaggtttaaaatacc

SEQ ID NO: 446819 - DNA, 556 bp, Homo Sapiens
cttaaacaatttggtcacgatgcacctttgatataaaagcatttttaaactttattattaatactcaggacattaggaatttccagatttttttcagtagcatttgtagaaccacttttggtaacaaatacagtagttaggaatatgcatccaattcagaatgcataataatgtttatcctgaatcctttccggctaaaaacagggctggcgctgtgatgagatatagaacgagaatctacaaaaaacactgtaacatgtttgttttttcccagaggctacatcctcttttgctggaatactttataaatacatattaaaaagtaaggcaacaactccaaacagtccaagctgtttgctcaactcttttcccaattagatttgcaatcccggtgatcaatttcatggttgtattgtttagtgtttgtctttcttatttcaaatggtccaaaaggatgtttttctcacatttctaaaacatctctggtatgtgtgttcaatgatatatgcaactaatactggtcaggtactgaagcctgtgatgtcccagtgcctgt

SEQ ID NO: 446820 - DNA, 424 bp, Homo Sapiens
ggttaacacgctcggactatggttttaataaacgtacatggacaagtcgatatagacagatttattacagtcagtccaacatacacagggacgctgtaaacaggggcgcgggccggagagcgggtgtgcaaagtgggcgcagggccctggggccgcgccccttgctttgccggctcgacttttgcacggggggcggtgaggagggggctgttcgcccagacagagggccacctcctagcccgggagcagagcagagggcctgggcctgcagctaagctcaagggtggggtgttctgagatggacctcccccacctcccgccaggcccgcactgcccgctgtcgctccgtggccttaatatagggctccggggcgcggggccagcgaggctctaccaggcgcgccggggccgtgtgcggctcccc

SEQ ID NO: 446821 - DNA, 659 bp, Homo Sapiens
  misc_feature (46)..(63): n is a, c, g, or t
caaaaaaaacccatctttcggtttattgaaggagcagaagggagcnnnnnnnnnnnnnnnnnnaattaaatgcttttgcctcgtttataaagagcgagttttcaggaggtcccttctcaaggaggaggggggcacctctcccccaactacaagcagcagcaaagccaagccaaggaggacagagggaaactggaggggccaagggaccccaaacaccccctcggacaggagccacaagctttctccccccacccacaatgcatctaccccaggggacccatctgggtggaagaagggagtatgtacacagatagaggtggcactgggctgggtcggggagggaataatttatccgcggcagcggtgggtggcaaaggggcagagggcagtagcctggaggcagtggtagcctaggggtcccgttctttcttaactttgatgtctccagcaaggatggtggcgatctcgccctgcatgaaggcccagggcacggaggagccgaccagcgggcacttgtctccgctcgggcagtacacctccccggccgggccctgcgccttgattaactcccgggagcatggaaagcagaacttgtgttctggcacctaggggcactggacgaaggggtgtctttccacccgctcctgcacatgttcaca

SEQ ID NO: 446822 - DNA, 917 bp, Homo Sapiens
  misc_feature (270)..(327): n is a, c, g, or t
  misc_feature (892)..(892): n is a, c, g, or t
cgggcgtggctggtcacgcagatgggggagagacggggggggatgggagctccacggcgtggtaccggccccattttggactggattgggtgtgcgcgggcagtggttagaaaagaaggtgggtcaacaacatgtcttcctgtgcgtggcccgggaggcattcagcgcagaaagccaagaggggaggggtgctgggatcggagggggggcgccacagcgagaagggtgggcgggtgaggtgggcgggcctacaaggaggggtcgggcaannnnnnnnnnnnnnnnnnnnnnnnnnnnnnnnnnnnnnnnnnnnnnnnnnnnnnnnnncgtgttcctataaactgaagttttattacaagcaggaacaaagaatactggcttaaataaaaggtaggtgggagccccctcctctagccagcttcttcctcacctcccagggccactgcagtgatggcccagggccctgaggctggggtgaagctgtttctcccagaggggaccctctgtggctgccattcccagctgtctgtgaccactagcctctggagtgagaagggcaagatctggggacttcctatgtcactttccaagggcttcagcccacttgaagggccaaggagggggatggtggaacaatatctattttgataagaaactacagctcccagcagaggagaaacatcctctgagtttccggcccagactcaggccaaccttcacttgcctcttggcccaccctgcaccttcttccttttctctggatggaggtccccgtttggcagaaacaccttgtcttccagctcctggcactgggtcccatattcagagctcagaggagggggttttgcttttaggattgcagccgttcccagagccattacccacccaccanggccaggttagcttttttggaaggt

SEQ ID NO: 446823 - DNA, 523 bp, Homo Sapiens
tttttgcatatctcaaatttaagtttatttaaaaattacaaaaatgtctccactcaagttgtccttgaaaaaaatttagaagcagcaacaatcatcttggttagttacaagcagtctagtgcaatttataaaatcgagcaaaatttggatgtgtgtcttatccctctgtagacacgggacccttttttgaggtctctttctttagggtctggtagcatcatgactgggacactttccaaagccttcttcctttggactctatgtaaaataattctatagacccctgtgattgaggctgcgagcatctctcccttgggttatttcggaatatggctcttctgtaatgcccaaatgttctaaagtgcttttggacctcattttcttcttccttggggagtgctgggtttccgacaaatgtttggggatccagttgggaaaggttccaaaggtgtagggtatggcaccccttgcatccattcatcattcatgatgcagtcgattccgtacctctccgtggggatct

SEQ ID NO: 446824 - DNA, 539 bp, Homo Sapiens
gggggttaagccacccaggctattatatttttgttatagcagcctgaacaaagacagctttgattcttaacatatttaatgaaactcgagcttcataaaccagtgaaatgcctacccctatggagacggggagctggtcatgggacccaggtgcctggaggacatcccagtggctttgaaggctccagccagtcaagacggtcaatattagcccttctgccaacatctggcaatgtgaggctggggtggacgttggcctgatgttgccaggagtaggatgctgatgctgccagagagtaggtgggctccaaaccccaggcttctcacttgcttactaagcacagcagtctgaagcttgggacctggcagtgcgtctttggagaaggcaaaaaagccacagcagcaacacttaggagcaagacccttcccgttctccaccctatttcctcccctgaagaagagcaacagttcaagctttagcatggcacagaacgttaggttgggccaggcaagcagccttggtggggccaggtgaagca

SEQ ID NO: 446825 - DNA, 941 bp, Homo Sapiens
acagtattttacaataattctttaaagtgaatcataatattattaaatgtttatgaatgtttacaaatgacagcatttttggaagaaacatgccttcacagctttgaacttcattaagaggttctattctggtgaccattccagcaggtgttagtttctagtccaaataaattcagtattcccatggatgtgcgataccaggaggctatgattacatttttgtttgtaaatgagaaattaatcccctgtgaaattaatctcgcagggggagggaagcgacggttgccgggaagcgcgggccacccctcccctccctcccattcttcgtcctcccctcgcgcgccacccgttttttcctctgttctccgttaataacggcttgggtggctgggggaggagggaaggtggctccggcggagtctgggcgggcgcctcccactcagccgccagccgccgtgggagccggaggatggcggcggtagcagcggccgccggagactaggcggtgcggaggcccgggggcgccaagcgcggcggccagaaagccggcagcggcccgtcatggcgcaccagaaccgaaaccagcggcagtcgcaccgccacctgagtcgccccttcctgctggagacagcgaggggtgcctgcagccgggacaccttcttctccgcgtctcctcgtctcccgcgcccgcgtcaggccgccagccttgcccaccgccccgagaagagcgcgccgggcgccgactgcccctcggggcgccgggcggcggccctggacgtgcgggggcctctctgggccggccgcagcgcctcggccctgccctctagctcccgcgttcgctcctgccttcttggctctcggggcacagcgcgcggcccggtccggagcagggcggacatgagcgccaagcagagcggcctggccgccgctcacgccccgct

SEQ ID NO: 446826 - DNA, 220 bp, Homo Sapiens
  misc_feature (110)..(110): n is a, c, g, or t
  misc_feature (122)..(122): n is a, c, g, or t
  misc_feature (163)..(163): n is a, c, g, or t
ccgtaaaggatacagaggaacagttctgctaaaacacagataaaagtgccgctccatacaaaacataaagaatcagaatcaaaagtcactctgaacataaagaaaaaaantcatctcacaantaatgtggccacagctgccagaaaacctggtagtggctcanttaggcaaagtgtaggaatctcatttttgtttttctctccttaagtttaaagaaaca

SEQ ID NO: 446827 - DNA, 198 bp, Homo Sapiens
ggtccctgaggggcagcaaacagtaactaccaaaaccaatgaatattttcattttaatagtttaatgtatgtttatagtaatataaaaagtcttttcagtgtgtgaaaaaaagacatgttgtaggatgggatcctggaatggaaaaaggacattaggtaacaaactaaagaaatctgaggccaggcacagtggctcat

SEQ ID NO: 446828 - DNA, 462 bp, Homo Sapiens
  misc_feature (374)..(374): n is a, c, g, or t
ttttttttcaaacaaaaaccctgcgattttaatgagaattaaaggaggatgtaaattaaaaggcctgtttgtctgtacagcaatgcagatgcgcaggcccatcctggtggaggacccagatgcagggagcaaatattcgggttgtgttgctaagagtcgcaggaactactgctagtgatactaggcttgctgcaggaggatgtcacgctgagaaagggagatgactaggagcagaaaaagtactctcactgttccagcttccagcccaatcctagcagaatgaatgcattttaaaaccagtccacattcacatgtgctgaggaaggttgttagtgggtccctcatctggggcaaagcaggacccaaggtgggtncttgagtgcaggagttgcaggagcatttctttgtggctcttcctcttcatgggctgggaactattctggggttttgcgccccgggtcc

SEQ ID NO: 446829 - DNA, 868 bp, Homo Sapiens
  misc_feature (559)..(559): n is a, c, g, or t
  misc_feature (623)..(623): n is a, c, g, or t
  misc_feature (687)..(687): n is a, c, g, or t
ttttttttaaagttaacgtatctggcaaagatgggattctgaagcagcccctgaattccttttcctgtgtcacccaggacaccaggtacagccaaggtccctttgaaaaagtccagttgttcctgactatgctgggaaaggatctgggtaagtgctatcaaaatccaagatctcccacttttaggttgcagacttgatttcttcttttaggcctcctccatctgtggaactccggaggagaccctcctgctggccttgggtttgggagggcattcctagttcttctcagtcctttctgttctcctccctgggaccccggaggaagcatctctcctagccttgggtttgggaggaggccttcctgattccctccatccaagggccctggagaaaatgcatttgtgggctccgggcttatggagaggcattcaggttggattcaactggttcataaggtttgtggggatgctcacactaagggcactggaagagatatcttcataaagtcagtgcaataggtaacttacccactaggggcaggaactcctgtagaagtcanaggcatgccaggttttccagcacttcagctagctgcatattgtgggctggtcttgtgcacattntaaaactgaacgggcaaatacagcagggaaattcagagctcaaatgcccacctgcactatacanttaaaatgagagtttctaagcttctcttttttgtttcggctgctttgattgctgtattagctactgtgtagataaactcatgtatgatctactattaggtactgaactttctcagttaacaatgagctaaagaacatggactattgaactcgaaaaaaagggtaaggttaaattaatgctg

SEQ ID NO: 446830 - DNA, 831 bp, Homo Sapiens
ggatagaagggggtaacaggggcgggggcgaggatgattttaaatcgtgcagcgagcgcccgtcggaagcatccgcgggtaagggaacccccaggagataccccgggggaacgcgcttgggggtgggtttcacgggagggctggttcgccacgcggggtgttttttcgtttggggaatatcccaacccggtgcttatgccccatggtcttcggggagaacacggtaggggcttttccggctcgcattggggcggcgcgccacgaaaagagggttgagcaattctttcggaggcaggggccgcccgcagatgcggctgagggtgccgggagcggatggcgtgggtgcgttcgccacacgtttacttttaaaaaataattgtacaaaacagaatgaattcttaaggcatatcagaaatgctgagtcccaggccggggccctgccccagccagggctgggactctgcagttgggagcttgtccagctgccccctctaatgcttttctcctccaggacacagggagcctccggaagcacagtagtccccgtgtgtcaccttaggctgacctctgtccccaggggtgacgtaatgctgtcactgtcttgaattcttcatcgtttaacagggagcccagtgttttcactttgcacattgggtatctggtcttgcctgtcctaccctgaacctgggttccctgggccatgtaacacccaggcagctctgatgcccctgggtacttggaggagctcccaggaagtccaagcctgcgccaggaatctctggctttcaaagtcttcaaaggctggagcggctgcccctcttaatcatggcc

SEQ ID NO: 446831 - DNA, 853 bp, Homo Sapiens
  misc_feature (72)..(84): n is a, c, g, or t
gaaggggagacaagtttattgaggagcttgacacccctcttctgccctagcttgagagaacaactgcagcannnnnnnnnnnnnctcttcccgatgaccatcttttgggctggcgggccaggccctgggtgtctcccatatcgctgtctttagtgagactgaggatctggtataaggaaacagatcagctgcagccagtgagggcccctgcgttgggcctgggagagagaaggtcctgttcctgcctttcctgtggccccaggcactctcagctctgaagccaggctattgctcgacaccgcaggatgcccaggactccctggaaccaggagcaaaagggcgcagtcctttccccgtcagagccacccaccagctttccaggcttccatgcatcttccaggggtccagcctgtgggacagtctagcaggaatttcccatagcagcaccggtctagcgggtagatgggtggcaccagcacagcttgacacactgtgttggggcgaggacctcctcgtcggtgcacttacacccctacaaagtacatcctctaatgggagatacggtggtgcccggcttggccaccttgagaaatgagtctgcacagcagacgctgacagcagcaataccccgatgccttaggcataccgtgtggataggggcccctaggtgtgaggccactgctcctctggatacgcggtgcctgccgccccggtgtccgagaggggttcacgcgccattgcacccggcccaggtaccggaacgaggcacttcctacgctgtgtctgcaccctgggcctctttcctgttcagccgtatctctgggggttccgggcttctctcgcattgttgccc

SEQ ID NO: 446832 - DNA, 1115 bp, Homo Sapiens
gggtctttaaagagggctgctcaactgcaaggacgctgtaagcaggaagagaagccacagcgcttcagaaaagagtgggacagggacaagcatatctaagaggctgaacatgaatccacagatcagaaacccgatgaaggcaatgtatccaggcacattctacttccaatttaaaaacctatgggaagccaacgatcggaacgaaacttggctgtgcttcaccgtggaaggtataaagcgccgctcagttgtctcctggaagacgggcgtcttccgaaaccaggtggattctgagacccattgtcatgcagaaaggtgcttcctctcttggttctgcgacgacatactgtctcctaacacaaagtaccaggtcacctggtacacatcttggagcccttgcccagactgtgcaggggaggtggccgagttcctggccaggcacagcaacgtgaatctcaccatcttcaccgcccgcctctactacttccagtatccatgttaccaggaggggctccgcagcctgagtcaggaaggggtcgctgtggagatcatggactatgaagattttaaatattgttgggaaaactttgtgtacaatgataatgagccattcaagccttggaagggattaaaaaccaactttcgacttctgaaaagaaggctacgggagagtctccagtgaggggtctccctgggcctcatggtctgtctcctctagcctcctgctcatgctgcacgggcctcccctccaccctggacccgctctgtttctgcctggtcatcctgagcccctcctggcctcagggccattccacagtgctcccctgcctcaccgcttcctcctcgctcttccagactcttcctgcagaggctcctttctgcctccatggctatccatccacccccacagaccccgttcctccagcctgcgtgcccctaacctggcttttcccatctccccagcataaccaaatcttactaaactcatcctaggctgggcatggtgactcacgcctgtaatcccccagcaatttgggaggcaaaggtgggagaatcgcgtgagcccaggagttccagaccaggctgggtcacatgacaaagcacacaatctctac

SEQ ID NO: 446833 - DNA, 833 bp, Homo Sapiens
agaaaccggaaccgggttcccggggtggagggggaaggccccgtgccggccagagcccaggaggctttgggggggaccaggcccctgagggccccagggaagaccccctccctgggaggctctccccgtagccttcttttcagaagtcgaaaagttgggttttaaatcccttcccaaggccttgaatggctccattatccattgtacccaaagttttccccaacaatatttaaaatcttcatagtccatgatctccacagcggacccctttcctgactcaggctgcggagcccctcctggtaacatggatactggaagtagtagaggcgggcggtgaagatggtgagattcacgttgctgtgcctggccaggaactcggccacctcccctgcacagtctgggcaagggctccaagatgtgtaccaggtgacctggtactttgtgttaggagacagtatgtcgtcgcagaaccaagagaggaagcacctttctgcatgacaatgggtctcagaatccacctggtttcggaagacgcccgtcttccaggagacaactgagcggcgctttataccttccacggtgaagcacagccaagtttcgttccgatcgttggcttcccataggtttttaaattggaagtagaatgtgcctggatacattgccttcatcgggtttctgatctgtggattcatgttcagcctcttagatatgcttgtccctgtcccactcttttctgaagcgctgtggcttctcttcctgcttacagcgtccttgcagttgagcagccctctttaaagtgacctcccagggccttgtgaatcatggcccctccc

SEQ ID NO: 446834 - DNA, 312 bp, Homo Sapiens
  misc_feature (144)..(144): n is a, c, g, or t
  misc_feature (172)..(172): n is a, c, g, or t
  misc_feature (188)..(188): n is a, c, g, or t
  misc_feature (221)..(221): n is a, c, g, or t
  misc_feature (255)..(255): n is a, c, g, or t
  misc_feature (277)..(277): n is a, c, g, or t
ttttttttcatttaatgcttttattgttttaacacagataagctatggccatgtaatctgtaatctctgatttccaaaatgtgaaccaagaagtataactcaacttagtcttataaaaattagatattttccctcatggaaaanaaaatcagaaaatactacatggtttttntgttttttaagttttntcctatactactggtttaaatcactgtaacagnaacaggaatatgtaaggcacattctgggaacctnacatctaaggattaactacttntatttaccttaataaatttaaaggcaaaatacagc

SEQ ID NO: 446835 - DNA, 394 bp, Homo Sapiens
ccactttcatgagtttcctttactgtattctcaacttgggccttgcttcaagcaggcaaacatacattgaagaatgcactttggtactgtttaaataacaacacatcagcccacttgattccatgccatgtccttgctgacagaaacatccccaacagggcatgccctggtccaagtcctctgtctttgtcaaaatgctcttctgatgagttggagaggaggcagccagcagtggcagtccacaaggatccaggtaccttctccaatcctaaagcagacagcaggttgaataaaaccaatacacaacctattttctaggcaggaggggaaaaggcccttaggacaataatatttgtacaaagagttgagagtaaacaaacagtgtatcaggttc

SEQ ID NO: 446836 - DNA, 810 bp, Homo Sapiens
  misc_feature (419)..(479): n is a, c, g, or t
ctttcccttagggacattttttccaaataaatgatccccagtttttatggttaataagatgcctgaacagaatgcgtaagccaaaggatttttaccttaccaccaaaattctcttcaatgattatatcaaatgccaaattttctaagacttcaagagaatttctgtttgtagttacatggctaaaaacaagacattattacagtaatcaagtccataaaactagaaaaaaaagcactgtataacaaaaaggccttttagaagctattaaatgaacaaacattatagataaaccaattttatatctgaagcagcttatagcaccaacacgttggcaggaccagcagaggggtggggtctttggaccaaggcatctgggaacaggaagggctctcagccatcatctactgcagccacttgnnnnnnnnnnnnnnnnnnnnnnnnnnnnnnnnnnnnnnnnnnnnnnnnnnnnnnnnnnnnnacaggacagactgggaaatgatccagggctatgatccaggccactgacttcaggtaagtgctctattttaacatacagatataagattctatttgatttgatgtattttttccccattaacaggtctaccataaaagaaagcaataaaacccataatgtactctggtattgtatttatttcactgagaaatgactggcatgtactacgatcattttgggggcctatatagatcttacatcaaaattcagaggaattagtcagataacactattttagttataaattgagaaggtggcatttgaagagaatatttggcacatcctccactcc

SEQ ID NO: 446837 - DNA, 2571 bp, Homo Sapiens
  misc_feature (465)..(525): n is a, c, g, or t
  misc_feature (1056)..(1068): n is a, c, g, or t
  misc_feature (1208)..(1208): n is a, c, g, or t
gggggacatgattattatatcgtttaccgtgagggcaatgtttcgtcgaataagtttatccgcattgtttaatgtttaatagggagcgctggcacgggaggcgcgacccaaaaaatatatttcaggggccaacaaagatggtattgaaagtgtattttgaaatgcaagattttagtgggtacatcaaggaggaatttctgtttggtagttaccagtggctaaaaaccaaggcctttatgtccagtaatcaaagtccataaaggctagaagaaaaaagctctgtataacaaaagaggctttttaagaagctattaaatgaacaaacattgtggataatccaattttatgtttgaagcagcttatagcaccaacacgttggcaggaccagcagaggggtggggtctttggaccaaggcatctgggaacaggaagggctctcagccatcatgtactgcagccacttgnnnnnnnnnnnnnnnnnnnnnnnnnnnnnnnnnnnnnnnnnnnnnnnnnnnnnnnnnnnnnacaggacagactgggaaatgatccagggctatgatccaggccactgacttcaggtaagtgctctattttaacatacagatataagattctatttgatttgatgtattttttccccattaacaggtctaccataaaagaaagcaataaaacccataatgtactctggtattgtatttatttcactgagaaatgactggcatgtactacgatcattttgggggcctatatagatcttacatcaaaattcagaggaattagtcagataacactattttagttataaattgagaaggtggcatttgaagagaatatttggcacatcctccactacgtaagctaccctatgcctcaaaattactaaatcattggtataaagttttggtttttttcctgatagtttaaagattagtaaagtacaaaaacagtctaaatagagaaaaagcaagtcaggtctttcctttaaaagttaagtatggcacttttcattttaataaggtaaatgattttaaaaacctgacattttttagaagnnnnnnnnnnnnnctagctatgagccatcacttgtgaaccatctggtatataaaatatttcccttatttaaaaaatgtttctgtaaaatacttcggagtcatgaaatcatgccgtggtcctgaggcctcaactggacagattttatgatgaanctaatgaagatataagaatgaaaaaaagaaagagatcactgttaacagaagcagcattaaggacaaagtatactgaatatattgaaacagcttcatggaaatgaagccaagaagttgcatgtatatacgtgagaaagattatcattacagtggtagttggaaaaagtaacaaacactgggtatttgtctatcattaacataaaccaactgttgcagacagttaaactgtggctttgtaaggagaataaagcctgataaaaaaagtgacttctgcatatcatatatatgtatacatatattttctcacatagacgtctagttataagtaaatcaacatttagctacaacttttcctctcttgggtccagcatcaaaagatttgatattcatgaacatgccctacacctggttaggaagttatgtatttatactcatagcctttattgtatctgaccagggtgaataaaatgaaatctcctgggacctcaagtccatttcttaccactataagcatattaacagatatatatcaaaacatacttgtttactgttaggtaaaagagcatgtttcagtactaaataataaactatgcctgctaccaataacatgcacataatggtataataaaagtaatttttcatgaaaatattttgaaagaagctacattataaatatttaaagaaacgttaaaaatcagagtgaaaatcagattagtgttctgaaactgagtagaaaaatagacttataaaaaaaagaatttctcattaagtgaagccttaaaatgtaaagttgtcttttttagtgtaaatttcaaatctcaccctttgagaggtaaaatcttcctctctcctaaaccaggtacctataattgatttgggaactgggcatatcgcagaacgaaaaagcagatgacacaaggctaagggcagtgccgtgattttcacatggccttagaaaagcgaggggcattcataaggctgagtagatagcaacttggagaaatactgaataaatgtgagcagtttgaaaacagtaatgcatttgtccaccctaaatgagctaatactcaaagcccagacattagattttaaaaggggtttgctttccaggacagattgtacaaaatttgggaaaatcgttgtaaataattacttcctggggttgattcctttttgaggggaagtttttaacctttccttagtagttacttttaatgaactgaagaagaattaaagcatcaaaggcctagtgtatgatttgactccgaagtgaccctctcttctactttgataaagtcaagataccttattggccataggagattcctccttttggggctacccccctactctgaaagtgggt

SEQ ID NO: 446838 - DNA, 831 bp, Homo Sapiens
  misc_feature (685)..(745): n is a, c, g, or t
gggacaacggtttgagccctcttttgttttcttatgggggccgcgggcccaaaaaaaaggttttgaaaaatttttggggggccaagggggcccaccaatagtgatgctattagttgtttgttctaacattatgttcggtttttgtcattgtgttattaattcggggctttttcttttggtctgttgttgttggttttttcttttacagaaagcaatggtgcttttaatgaaacttctttcaaatctgtgaacatgctagctgtgaagtacatgcttttattctttccataggacatatttccaaataatgatcacagtattatggttaataagatgctggacagatgcgtagccaaagaatattacataacaacaaaatctcatcaatgatatatcaaatgcaaatttactaagacatcaagagaatatctgtttgtagttacatggctaaaaacaagacattattacagtaatcaagtccataaaactagaaaaaaagcactgtataacaaaaaggccttttagaagctattaaatgaacaaacattatagataaaccaattttatatctgaagcagcttatagcaccaacacgttggcaggaccagcagaggggtggggtctttggaccaaggcatctgggaacaggaagggctctcagccatcatctactgcagccacttgnnnnnnnnnnnnnnnnnnnnnnnnnnnnnnnnnnnnnnnnnnnnnnnnnnnnnnnnnnnnnacaggacagactggcaaatgatccagggctatgatccaggccactgacttcaggtaagtgctctattttaacatacagatataacc

SEQ ID NO: 446839 - DNA, 307 bp, Homo Sapiens
ctctagacatcagagaattctgttgtagttcatggctaaaaacaagacattatgacagtaaccaaggtcgcataaaagctagaaaaaacgcacgtataacaaaagggccttttagaagctattaaatgaacaaacattatagataaaccaattttatatctgaagcagcttatagcaccaacacgttggcaggaccagcagaggggtggggtctttggaccaaggcatctgggaacaggaagggctctcagccatcatctactgcagccacttgttttacaaatggagaaatagaggcccagagaga

SEQ ID NO: 446840 - DNA, 774 bp, Homo Sapiens
acaagctccaatttttttaattagacccaacagaaacaaaaacactccaataaattgtttataaaagcttcctgtcagtatctgtacttatttcctcacagaccagtaacatctggttggcaggcactggtctgaggaccacacttcggtgctaaaagcttgtactatagtgcatccaaattcagtcagcagaaccggggttcaagacctgacttcattactactagctggatagccagagaaagatcacttagcctttctaaggtccactttactcatttggatcaggttaattatatctatgattaagctttctgtgagagctcaataataatgtactaacctctcaggaagtacttgaaagttgaaactgaatcacataattggtacatttacatattaaacgtgaattgttttatctgatatctactccatcttcttactgaatggtgttttctccttgaatagaaacgtgttcagttgatcatcaaatacttaaaggaccttgaaagcttgtctggctctaattaaagcacagctacttggtgatcttaacagaaacctgtcctctctcggagaagtgcaacctcttccactgcgctgacagctttgtgggaagagggagaactacaggaaacaatgaagaagtcagaaggtgcctgtttacccaaacgtgtctgcagccatgttcctgcataccccggttagaagaaccgctgaagcactatgctatcagcttaaaatctaggtgactacaaaaccctggaaagttcc

SEQ ID NO: 446841 - DNA, 1131 bp, Homo Sapiens
ctggccagggttcacatttaattagctcaacaacaaaaaatcttttgttttcgtagtttttggatttcaaaaaatggataaaagactgtaatctgttttctgcgtttgcagtcttcatactgggatggaaataatggttatgttacaacaaaacttcagtctaacagtttctcatcttttaatactatttatggtaaatacatatatataacttacttgcaatttaaattacaaaattcatatacaaagtaagcaaaaaggcacacataagaaatccaccttgaccacagaaatgtgaaaacaccagccctaatgaccaagacaatgtttcaaagacaacaaacaccaagaaaagttgagattctacaataaatcatattaaacgcaagcactatgatgcacagacgtgagcactgaatatttactaaagcataaaacttaggaaaaatcattttacggggaatctattcatattccaaacagcattttaaaaaacattaaacttagcttagttttaaaaacaaattcagacccaaacaatcaagaaccagaaaatgggtttcttaccttttgtttccagtaggatgtgggctgaacagcaaggtgggttattcaatctgatgttatgaaaagtaattgcttcttaaagagacttaagtttttccttggttagaaaataattataggctccctaaaatattctaaggggacataaatagggagaagagggggaaattccaagacagcttttgtagtttcaaaagggtgtaactttcttctaataattgccaatacggatagagacctaaaggtccattttctgagactataaataggagcagtccatacttcccatcacagcttttagctgtctggtcatcttaactacaaaacctatgcccctttacctaagtaaacattagatcctctctaatcttcaaattcagcctgtataacaaggaatactgtctcatttcaatgtgaggttagaattactataacttttagtagagcacatctttcaactttaaacactcaaacttgagtgaaggccatttacatttttcggacgcgtgggtcgacgatatcccgggattccggccgaccgctgcttttaacatggtatatgct

SEQ ID NO: 446842 - DNA, 1216 bp, Homo Sapiens
  misc_feature (21)..(21): n is a, c, g, or t
  misc_feature (822)..(832): n is a, c, g, or t
  misc_feature (952)..(1018): n is a, c, g, or t
tgaatatatgattggttggcngaaaagataatgatctgtgtagtatttagataagctttatgctgcatcctgaaaaactcatggtgaacacagtcctttttccccatcactatggaccagcatttactctcactttgctcccttgggacaagagtttactgttaaatgttttcatttcacagagtctcaaggtgcaaataatttaaaagactgaattctaaactaattatggtactagagggccagttttatctttcattaagaattgcttgctgaattttaaagtttttttcatacaatttatcatagcatttaagtatctttctataacatagatactaacagttttgggagaatgccactggtaactggaaaggggagaaacagatctctcaggatgataaaaattagcactttacagactttcaagtagacctaaacttttaaacaaaagtactcaaggcttttaaggaagcagctctgtgattagctactgaccaagaccctcctatcactggtgtctaatccctatgttacagatgaagacacaggtttagtactttgcccatatagttaaattagtgacagagataggccataagcccacatttgtcttcagtcaaagctttcactcctgtccctgttccactcctgtatacctgaggtccccaacataaactttagatcaggcttagtggtcagcattcctagtacttggaaagttggtattttttacaacagatatatgtaaacatataaaaatttcaaaatgaatgaaaaacagtgactaaatgttccacttcacagttttcctggctgaannnnnnnnnnncaggtactggtaatattttagagtttgttaataatttatattgccaacctaccataaaagagattatgatggtatttttctatgaccctgagggtcttaagctattctgagtcagaatannnnnnnnnnnnnnnnnnnnnnnnnnnnnnnnnnnnnnnnnnnnnnnnnnnnnnnnnnnnnnnnnnntctgccacccaagatagcaagaccaaccccttctcatcctcagcctattcaacatgaagatgacaaggatgaagaccttcatgatgatccacttccacttaatgaatagtaaatatattttctcttccttataatcttaacaaacattttctcttctctagcttactttattgtaagaatacagtatataatacatat

SEQ ID NO: 446843 - DNA, 1211 bp, Homo Sapiens
  misc_feature (134)..(177): n is a, c, g, or t
  misc_feature (296)..(306): n is a, c, g, or t
  misc_feature (537)..(552): n is a, c, g, or t
  misc_feature (605)..(691): n is a, c, g, or t
  misc_feature (693)..(693): n is a, c, g, or t
ttctacccccgcccgcgtgggtttttccacccgggggggcggaaaatattttgttctccccttcgtttggggcccaccccggttgtttttctacccgacgcggggcggaattattattattttgcgcacagcgnnnnnnnnnnnnnnnnnnnnnnnnnnnnnnnnnnnnnnnnnnnncgccaggtgttcaataaaataatacgtttcccccaaaaggctcttcccaggggggggccagagagggcgcgggaatggaatttttataaccccggcccccccggaagaagatccccccnnnnnnnnnnncctcacattttaaaatttcgaaggaaagcctctcggggtggctgttttgtttaaagaaccccagtgaggggcccccgcgggcggctctttttttggtgttgggtgaagcaaaccaccctggttgccccgcccggggggttttttttgtgtggggagaaattgcaagccccttagtcctgtgcccaggggggcccggggggccccaacgaggaggctttttcaaattttctnnnnnnnnnnnnnnnncgcaaaaaaaaggtttttaaaactttttcaggggccggggcggcccgacaaannnnnnnnnnnnnnnnnnnnnnnnnnnnnnnnnnnnnnnnnnnnnnnnnnnnnnnnnnnnnnnnnnnnnnnnnnnnnnnnnnnnnnntntttcaaaagactgaaacagatttctgtattaccaacagaagacaatttccaagctataagtgaaaaaagcagtcagaacggtggtatataatacagaaccatttgtaatcaaaatcaatgtatacatgctactcgtttacaggtgtatattcagtcgctgaacaaatctccgttaggggcgctgttcgtgtgctgggaacacacaggtcaatgaagagcagccagaaagccccaagctctggaggcttccactctcgtgaatcagcaccgcttgatcatctccttccacaggggcacagtcagcggcgatagctgaggctggcagcctttgctgggtgagtcacagaccagaagttccgtcgagtctgaagtttctggaaggcgttgaagtttctcctcttctctctcttaaattttttaattttcttttccttccctcggtcaaactcttcgtcccagtcatcaaccacggtctcagtccgggcctgtctgctgtcttcaatagcatcctgactgac

SEQ ID NO: 446844 - DNA, 544 bp, Homo Sapiens
aaggttgaacgaagacatttatttgtaaaatcaattctcaatggaggagagattgtatccatagaaagtaaaccagtgatcgttcagagggccacatgcacgcattagtgaaaccaagggaaaaaccaaaaagacagcactgctgcggacgacccgcgtggctactaatcctgccaacagaaaagcaaaatgtcctttccgcttgagaacgcggatgcaccaagatgtcctgtgagaaggcaatttggtctgacatccacgatgaagtgatcagggaacaagtgggggagcgtttttttctattccgtgtggcctgcttgtttcccgcagaaactggctgaccgcttccgttgtcctcccgcctccagtgggagggagggtggtgtcaaatccctggctttctcacatgcccatccttatgctctgaatgatctgaaagatagcttaagggagctgatggctgatgagatgtcttcaggctgtgcatctcagatcccgaggatgaactccagagcagatgaatggcctcagtctttccttcagg

SEQ ID NO: 446845 - DNA, 781 bp, Homo Sapiens
aaaggttgaacgaagacattaatttgtaaaatcaattctcatggaggagaagattgtatccatagaaagtaaaccagtgatcgttcagaggcccacatgcacgcattagtgaaaaccaagggaaaaaccaaaagacagcactgctgcggacgacccgcgtggctactaatcctgccaacagaaaagcaaaatgtcctttccgcttgagaacgcggatgcaccaagatgtcctgtgagaaggcaatttggtctgacatccacgatgaagtgatcagggaacaagtgggggagcgtttttttctattccgtgtggcctgcttgtttcccgcagaaactggctgaccgcttccgttgtcctcccgcctccagtgggagggaggtggtgtcaaatccctggctttctcacatgcccatccttatgctctgaatgatctgaaagatagctgagccacagacaacaaaaacaaacagtgccaacagccatggtcccacaggatatttctcctcttgcggcctcagggttttggctacgttccccctctgggtgatgtttttgctgtgcttctcgttagccatccggatccgctgtttggccaccatggcttgtgcgctctgaaatgctcccacctgcaaggattcccctgcgttagctcctgcgacaggccgagcgcgtcccgccgaggcccccgcggcccacccgggcgctgcaggtggcaaggcgtgccccgagccctgcgcaccccgctccccgagccccggctagccgactccagagagaggc

SEQ ID NO: 446846 - DNA, 553 bp, Homo Sapiens
aaagaacagcatctaaagaaagtttattctgtgatattagagacagaaggttttcatataaatgcaagtttgacaaagtcagcatctttctagctgtctaaggaagagtcacttgtaacacagccagccaggaggctgctttgttttttattataaagaacactaacacaaatgcagcatgattgctgtaaaataaatgtgaaatttgtacaaaagtcccagtccttccgcagttctaggtttacagtcaggctcaaccttacttgccccgctcctgcatgaaaacaagtgcgttttatacagcctctgccacccagtggcatagtttaaggctctatattatatttaaaattaaggtttttttcctatcatacacatcaatttggaacctgctggtgactcttctaccacagagggtaaataaaaagaccagtttttaaagtaagaggattcagctcatcttataaaagtataatagtttcggccagacgtccattaacatctgtttaaattagatacagacacaatgccaaatattagaatcataaatgta

SEQ ID NO: 446847 - DNA, 519 bp, Homo Sapiens
gcaaaagaagagcacatgccaaaaattttatttcatttttcagtgaggaatgtccaaggagaatccaaagatcaaaattactgaaataaatgtgctaatagaagcaaaactggggaaggaggtcgggtgaatctacgctaagacacaatgtacacgtctatagacaagaattattttgctctgctatcagttacctacagcttacagagttgcaagatagctcccatagaatcaaaatcaaacagccaggaaggaagggtctttgtccagagtctagattccagacaatgcatagttttccactgaagtacaatgggatctccccctacacttccatttccaagtcctatttatggactgtctagccccagaaaagatgtgtttttccccaatcagatgctataaagctgtcacttctcttgttttttattgtttattcagttataaaatgtcgaggggaaactagataatctcgattcccttacgattccttaattcaaatttcttactactgcttcc

SEQ ID NO: 446848 - DNA, 587 bp, Homo Sapiens
cacaaaaagtagaaaataaactcttgtattgtagcacatttcatcacagcctgactaggaccagtgctcgactttctggtggcagggcccagagctcacggacaccactgacagtatggggggtgttctgcttggcaccatgtctggctttttggccagaagtcctttgcagagctgaatatccccttgccagcccgccagctctggctgggaggacttgctcttgggtctgcagcctgcatcaggagcctccactttccccagtgctggattatgcatcctgctctccagggtccaccttgttgctacagctgcatggcttcctgctccactgactggttcgagggtgccaggtacttctcctggatgcccagtgtggaagagaaatggaagtcggctcccattgcggcagacatcatggcttccaagcttcgctgctcttgggctccgaaacagtatccattggctttatccacagcctgcaggactcgctggatgctctccttgtcctggatgttgagagggataaaggagacaaggctatagtcttcgatgagctgcactagcttctcattgagctggcggta

SEQ ID NO: 446849 - DNA, 805 bp, Homo Sapiens
  misc_feature (150)..(192): n is a, c, g, or t
ggcagttcagttggtttcaacatttattgagcacctactatataccaggcactgtactagatgctggagacacaaagatgaataagacatggtccctgtccccaaggaactgatagtctcttggaggcaaacaggtagtgcaaagatgtnnnnnnnnnnnnnnnnnnnnnnnnnnnnnnnnnnnnnnnnnnntattgggcttttcaacacaatggtatgccactgtaatgtcaaagcagacaaataaaatgcattttcatgtgataaaacaataaaaccattaagagctaacttttaaaggttcacatgataaaggtagttaatactaaaaatttacatcatagtttttcaagtatttcatacttagaaatattattgcccacatttgtgctatagtcaaagccaaatccaggttgctgcatcattcacatctcagcatgctgggattcagtttctcactaagtttatgaattagaatggctaattcctcagttgcttggctcttgtcttccaaaagttcataacgaaggctggagatatcttgcttgatttcttttaattcaccttcattaacttcatcattttctttgtctacttgtgctttcaaaacataccgctttataagtcttttcattatctgctgataacgtgttggctgattgagaatgctgttaaaactgtgtgattcaaaaactcttgagttagactgagtgaagaggtttaacctggactttgagttacccattcccatttctatatccttctgaagtcttctccttctgcatttgggaaagttaacaattcg

SEQ ID NO: 446850 - DNA, 479 bp, Homo Sapiens
gacaatcccgatgaggttacaggacacaaaagataacaagagtcatcaccgaataagactaggaggccttccggaaagggacaattttctgaaaagcttgccgaaactcttcgttaaacacagtgtagattattggattgatgagggagtttaaatagcctagccaggtgaagaagtcaaagagcgccgggtggatccagcaggagtcccggcagatggggaggaccagagacaccacgaagaagggcagccagcagatgataaaggcccccagaatgatgcccaggattttagtggctttcctttctcgagcagcagaaatcctcttgcgttccagggcactgtcagcaagcttgattttcacgtggttgaaaaagagaggggagccagccgagtgcgagtgcccctcatggaggctggagttgagcgagcagagcgaggacccggcagagcctgtgatgaggtgggccgtggtgaag

SEQ ID NO: 446851 - DNA, 901 bp, Homo Sapiens
cattaaaattttatggagtctaattgtcagaaaaatctccattgtatgacccaatagcacatatatgtatgtaactgaaactctcaatattttgctgacatcgataatggtaagttaataaatatatctcagctatccaaaacaatacagtggctcaagttaatccagtcttcaaaaataattttctcttttccattccaatcattttgttctcccacggacattaataaactaggaggtctttgtggttgcctttgtggccaggtcagggtaaatgtggtttcagacagactcgaactctctttgccagtctgagtatctctgagccagattctttgcggagggcttggtgtgagttagcacatccagaaagccggcagtggttactatatccaactggatcctgggtaagtcgctgctttctgactggtgattttcaagtgcatcaaagatcttcctcacgggccgcatggctgcttccctgcagacgagcttaatatctgagcctgagtagccctcagtctcctggctcagcacactgtactccagctctgtgtgcagctccaaggccctgctcttgctcacaggaggcagccagtggtagatcatggcctgcctggcctcccggctggggagatcgaccagaatcctcttctccaggcggcgtaacatggcacagtccagctcccacggcaggttagaagctgctaagacaaatacgagatcttccgagcgtgccagcccatccatctgcaccagtaactctgtcttcatccgcaggcttccttcatgttctcccccagaagctgtgcctctctgactcatcaccgactccagctcgtccaggaagatcgtggatggggcgtgtagcgggcagctccaatacacccgcgtgcctagg

SEQ ID NO: 446852 - DNA, 450 bp, Homo Sapiens
acctcctaccccacgcgggtgttatttgagcttgcccgctaccacgccccatccacgatcttcctggacgagctggagtcggtgatgagtcagagaggcacagcttctgggggagaacatgaaggaagcctgcggatgaagacagagttactggtgcagatggatgggctggcacgctcagaagatctcgtatttgtcttagcagcttctaacctgccgtgggagctggactgtgccatgttacgccgcctggagaagaggattctggtcgatctccccagccgggaggccaggcaggccatgatctaccactgctgcctcctgtgagcaagagcagggccttggagctgcacacagagctggagtacagtgtgctgagccaggagactgagggctactcaggctcagatattaagctcgtctgcagggaacagccatgcgtcccgtgac

SEQ ID NO: 446853 - DNA, 774 bp, Homo Sapiens
cgcgctcgccggagagctgggtgctaccgctgtttccgctgctgagccctgcccgccggccggcccgctcgctagctcgcttcccctcgcccaggggaaaggtcagcagcgtcctggagccgccgtgtcactccccgaaagccatgaactgcagcgagagccagcggctgcgaacccttctgagccgcctgttgctcgagctgcaccaccggggtaatgccagcggcttgggcgctggccctcgtcccagcatgggcatgggggtcgtgcctgaccctttcgtgggccgcgaggtgaccagcgccaagggcgacgacgcctatctctacatcctgctcatcatgatcttctacgcctgcttggccggaggcctcatcctggcctacacccgctcccgtaagctcgtcgaggccaaggacgagccgtcccaggcttgcgccgagcacgaatgggccccgggaggcgccctgaccgccgacgccgaggctgccgcgggctcccaggccgagggccgccgccagcttgcctccgaggggctgcctgccctcgcccagggcgctgagcgggtctaaaaccacagccccagattgctggttcgcgccctcctcatctcgctcatccctgggcgcgcctcccaccttccacccccaactcccttccagggttcgcctcatctgaggcccagataatggtgagaggccaggagaccttgtctggaaggccctggaaggagaagcaccaccttacccattcgggccagtttctccctcttca

SEQ ID NO: 446854 - DNA, 775 bp, Homo Sapiens
ggttttttagtaaactttattgtaccgaacaaaaaaaatgattttgcaatgattttctctcccacaaaagcgtgggtgaaaaccagtaacttataaaaatactttcggactctaataatacatacattcacaccttatcttctgagtatttaaatgggggaggttcacctgaaaaaacccatagttttttgcctcaactgacctgtaaaaaagtccacctatatcaactttctgccaatctggagaagatctgttttctttgatctgacgtcatgtgttcacaagcttctaaaatgtttgccaaaattaaagtctgctggatggtttttgccttaacccatattcttccattcattccaaatactatctccagtggatagagttttcccacttcctgtatgatttcacaatctggagctaatagctttctaattaagcccagagtcactttaaaaagcagaccatcctgtccaatgacacccattccattggctcgtccacagctgtcaatacagaccatctctggttccatgtctttattagcaaccacaaattggccatagatgagatctccaacctgcacatttggtctgtttcttttagttgcaccttcaaatgacaagtaagacaaagaagctggctcactccctccaacatcaactttgaatatatctccagatttagctgtcactatgccaatcacatggtctccttttactggaacataccgcttctgctgagagtccacccagtaaacaccgccgccgctgccaat

SEQ ID NO: 446855 - DNA, 506 bp, Homo Sapiens
  misc_feature (236)..(275): n is a, c, g, or t
aactcagaatactgctgttttattcaatcaacaattttaaactggttttatctaacaaatatttcccaaagtcacatgtaacttaaaaaaaattggggttaattcctatatttctgagagctttataaatatttaattgatataagcaatttgtccctaagcctgtcagaatagagcttctttatagggttttataaattaattgggtaataccatcagaagataggaaagtatcnnnnnnnnnnnnnnnnnnnnnnnnnnnnnnnnnnnnnnnngatagatgcaaatggagaccttatagcttccattttaaaattgtagccatgagtcaggtaaacacagtaatacagaactctggtttatatgaaatggttggctctcgtctttactgcactttaatttttttatccaaattgtgtttttggtgaatggaacaagttgctacctgaccaatgtgagagcaaaaatattttttaccaattatggaggacatttttaagatattg

SEQ ID NO: 446856 - DNA, 1133 bp, Homo Sapiens
ttttggttcaaaagaaagctctttattgattgactcagcaatgcagggctggcacccatcagcttcaaaccacatcttatcgcatccactcctgtccactcccgtccactttgcccttttccaggctgaaatcttgctttcaggcaagggcttccggccagccttgcattagttctcagctatggtcttctgaccccagtcctggatggaagtcaccttcacatacacaccatactcagccacagcacagcttttatcaaagcttaggatcccagccgcgtaccaggtgtcctcctccaggtcgtgaacggcaaaggcactgcccgcatcgccatagcaggtgtcttcctggtacttagacatgccgacacagaaggtgtgttcgttcagtatgggctgcacccctacagggctcttcggtgccttccatttggggcatgtgctgccttcataatgcgttatgcaatcgtattggtcagccacaggcagcatgacatacttcagatggtcagtaagtttaaagttgtcactttgtccccagccagacacgtaacccacacgccctacttctgcataattctttgaaggtaggcagatgggcatcactctctcattaacaagcaccttctgtttgagtttgatgagcccaatatctacctggtggtagttagggtgtagaaccaccttctcaatctctacaagctgctttttccccacatagagtgttaaagtaggggcaatgtctttcgctgttgcattttctgaatggttcaggaagagatttttagccgtggtcagcagccattgttcattgatcagcgtggcccctgtggtgagattatggtgggaaaccatcttagcctgccagggaaagctgcctttggcatccaggtgtccacccaggatccgctgcactgggtttgccggattcttgggcttcccacatactgcttcacattcaggaagtttatctccaacagccttatttatccactgcttcttatcatttaaggtgtatactccatctccttctgtgcgcagtctgtagtagttcttacactggtagcgaaacaagtgctccacatagccatttgcaatctcagggggcttcgggatcccgagaattccggacc

SEQ ID NO: 446857 - DNA, 449 bp, Homo Sapiens
gcggccgtcctgcgtgcgtgcaatacgctcgatgcgcagcgtctcgttgaacaccgatgtctcctggaacttgtccgaggcgctacctgccgtcttggtccaccgtacctggggtcgagggtgccctgttacaaggcactgcagcatgagggtgtccccctcccggatggtgtagacacgctcgctgatattgtcctctttcaccacacatgcctggcccgcatgcacgatctgcgcctgggctggagcgtagactccttgtccccggcagtggaaggggatcagcgccagaagtagaaggcaggtcacctccatcttcacggccggtgcttcatccccgcgaggcggcgcagcccgagaggcggcggggggcgcattcgccggggccccgcgacgcccctatgtccccccctttccctgagaggtgagagagagagcggcgactaaga

SEQ ID NO: 446858 - DNA, 499 bp, Homo Sapiens
gcggccgcggcaggtgcagtgcgaggggcgccacctgtaggctggtgtgggcactgcctagaggttgctgtggcgccgtctggaggttgccgtggctctcgttggcgcccagcgccgcgcccggggcttcatggctgtgtcggtgctgccccctcccagggccgcagggcccgggttccacttggcggcgtcttctcgcgagtcgctttcgctgctccaagaagtcggcggtgcagcaactgacgccgctgctgctccggtcgccgcaggtcgccatattcctcgcgggggccggccgggctctcggctcaggccgcccaccctgctccggccgccgccgcctctccgttcccgcagccagaggaggcgagggagcgacctccaggcactgggcgcccgccgcttccccagcagccggcggggcgggggaagaaagacgccaggaagcggaaggcccccgccggcccgagggtcgcccggggctgtgccccatggttcc

SEQ ID NO: 446859 - DNA, 424 bp, Homo Sapiens
agcaggggctacaggatgccacgtttccttgagaatatgtatatcgggaaggaatgtcacacgtgcactgtaataagactcctataaaacgaactcaagcatagaagaatcgtaggagaatgattaggcagattttattactacgtacttggctatttctctgtctcctttttaagagattacacagagttgtatgatgagtgtcccactgtggatgttcaactttgacttggcaacatctgtaaatgtaatacctgatggttataagcatttctcaatggatttctgcttcagttaatcaacattttgtatactttatcacccttggagatcaatattcacatgtaatcttctcatatttttgtggcacgtgaatattatataggtatatcaactattggtaaaaataaataaaggcataaat

SEQ ID NO: 446860 - DNA, 981 bp, Homo Sapiens
  misc_feature (818)..(837): n is a, c, g, or t
  misc_feature (842)..(845): n is a, c, g, or t
gctgggtggcgaattcggcacgagggcccggggtaccaacatggcccagaagcgtcctgcctgcaccctgaagcctgagtgtgtccagcagctgctggtttgctcccaggaggccaagaagtcagcctactgcccctacagtcactttcctgtgggggctgccctgctcacccaggaggggagaatcttcaaagggtgcaacatagaaaatgcctgctacccgctgggcatctgtgctgaacggaccgctatccagaaggccgtctcagaagggtacaaggatttcagggcaattgctatcgccagtgacatgcaagatgattttatctctccatgtggggcctgcaggcaagtcatgagagagtttggcaccaactggcccgtgtacatgaccaagccggatggtacgtatattgtcatgacggtccaggagctgctgccctcctcctttgggcctgaggacctgcagaagacccagtgacagccagagaatgcccactgcctgtaacagccacctggagaacttcataaagatgtctcacagccctggggacacctgcccagtgggccccagccctacagggactgggcaaagatgatgtttccagattacactccagcctgagtcagcacccctcctagcaacctgccttgggacttagaacaccgccgcccccctgccccacctttcctttccttcctgtgggccctctttcaaagtccagcctagtctggactgcttccccatcagccttcccaaggttctatcctgttccgagcaacttttctaattataaacatcacagaacatcctggannnnnnnnnnnnnnnnnnnnaaaannnncctgtcggccgcctccgcccctgaaaaactttctaaaccatttcttttggcgccgcgggccccagaaggtaaagggaactgggccttacctggttccctaagaaaaaccctggccatgaacaagggcttgggaatt

SEQ ID NO: 446861 - DNA, 544 bp, Homo Sapiens
ccccttttatctcactcccgttttattggtaatgggatgagttgaaatgagaaggaacattaatataattttgaaatgtatacaaaagtaaaagttgcactgttttgctcagtttgaaacaaactgaatacaaatagcattttaaaagtctgcatgacctatatggttgtggatattttttctatcaagtgattgcagatgatttatggggactagaagatattttgatatcaatgtaaggaatttttcctctggcagtctagctttttactttataaatctgagaaattacttgtataaactgaataaacttctgtatgtcattgtacagttaaaaaacataaagaggcaaaaaattgcaagtgaatgggtagaaacagataacatcatgtgtacattaaccagaaaattgttgcaactatattactatcaaacaaaatagaatttaaggcaaaaagataagcattaatagaaacacagtgaggcatcccttagtagtaaaaatgaaatgctatctgccactccttccttcttctctgagaat

SEQ ID NO: 446862 - DNA, 521 bp, Homo Sapiens
  misc_feature (23)..(23): n is a, c, g, or t
agggcaatccggcgcccttcccngctcatccatcatggcaccagcagggcatctgcaatagtttaatggacaccttagatccctgccagatagtgacccagctgacacctgactctgcatttaatatcagtccgtttgacattcaactgtaatgtcagctccagctttaaatgtcctccagctttaaaatgacacttatttctcctcttttataagtaaacaaataagtcaatatagaaaactctaaaaataaagagcacataattagatagatccagatataatcgctaacaatatttttacatatcatcttccagtatttttcctacatatatgtatttactttaaaaaaaatagcatccgacagtgtctatttgtggcctgctttttaaattacatggcgaagtatctttccctatcaatatacacacttggtatcacttttaatggctgtagttattctactatatggattatgaacttacctccttccacccttaatagattttcgtatttgttaa

SEQ ID NO: 446863 - DNA, 1586 bp, Homo Sapiens
accaataaagtgatttgtatataactggtggcagggggaggggggcggttggagactgaattgcccattcaaatcattagactttttaaaaaaacatttcctcgatggaaatttccagttccacaaaagaaagtaatcaaacagatgttcctccttaagtcttaaaccacgacattcagatgatctatgtgcaaattaataaggttatgacataattcaattatgtgacaaagccgagggagagttgacaaagaaccagactggcatcattgacttctcaatgaagtggagctcggtaaaaaatctagatgaatcacaggttgtctgaccagaagatccctgacaatgggctgtttactttagagaaaggagctgaaccctgaaaactgaatgtgcgaaattctaattatcaaaaaacccacagcgcatcaggtagacatgatcatctgcatttcttttccacgctgcaaatcaccgcgatcccagattagtccagccggccgggtgcctccctcccgtccgcctgggcagttgaggccaatcagcagtttaggcgcacaggtgcgggctcagaaagcagcagcaatctccggtgtgttctggaatcagaagttgaggtccacgtctgattagttcccttcgtttcattagacttggctgaatgtgtgccagtcccactagagcttcgatttcagacttcctatgacaggtttgttcacagaaaactctggccaccaggatgcccgctccaacaccttgctttcctgcaggacagcgccccagaggtttttgtagagctcgccgtcggctctgccaatcggtgagtccagaacaaagtcaggaggagcgatcacgtctaccagggcaactgcatcgtctttcagctgggaacacaaagccaggacggcgctctccaacacttctcccgcctgctcaccagagaagtatcctcctcggtagagcagggccgcgtggcggctcagggaccacagggcgtacagagcactgagccgccccagcacggcccgcagcgagggcggcacggaaggctggtgcacgtgctcgtggaacctctggaccaccgtgagctccacgaaggccagcgccaacggacggccgtgggacacctggcatttgttccttgcttcaaagtcactgcttcctgatcttttctcttggtttaatttttgataagtctctcggagcaggtagcaaaccagccacttgtatgctgccagggcgactgcagagtccaagcagtcggcaacactggagacctcaaacttctggtcaaggatgccgggataggcgtccagaaagtccactgacttcagcggactgcggaagcaagctccatcgtggacctggtgtgccaggagacccagcaaatagttgcttgtctgctgcagcaggatgttgttgtcaccttcgtatgtgcagttgggatcgttgtcatctctaaggacacccaaccggttcatggccagatagccgtgtcctccaccacgtcccggcattcctgaattccttgctgggtggtccacgaggccaggggcttgctggccgatgccagggcgtggatctca

SEQ ID NO: 446864 - DNA, 458 bp, Homo Sapiens
  misc_feature (17)..(17): n is a, c, g, or t
aagacttggctgaaatntgtgccaagtccccactagaagcttccgatttcaagacttccctatgaacaaggtttgttcaacaagaaaactctggccacccaggatgcccgctccaacaccttgctttcctgcaggacagcgccccagaggtttttgtagagccttccggtcggctctgccaatcggtgagtccagaacaaagtcaggaggagcgatcacgtctaccagggcaactgcatcgtctttcagctcggtagagcagggcgcgtggcggctcagggaccacagggcgtacagagcactgagccgccccagcacggcccgcagcgagggcggcacggaaggctggtgcacgtgctcgtggaacctctggaccaccgtgagctccacgaaggccagcgccaacggacggccgtgggacacctggcatttgttccttgcttcaaagtcactgcttc

SEQ ID NO: 446865 - DNA, 758 bp, Homo Sapiens
tgcaaaaaacaacctctaaacacaagataagaaaactcgaacattaacattcttcaattttgtgtaagctctgcagtacggaaaatatacaaacttcaaacagctgcaaaaatagtgtctttgggagaaaatagagtctctacatcgatacaagaaaaataggcatttttctaatccatccagccctggggcgggcggagagtatagagtcgccatttgccgaccatggaggaagtgccacgctctcctccgccactaacgcacctggggctgggacgcggctcgggctgctgctttaagacaagtctttagtcagggtgaaagcgagatgacaatgccacttgggaaaacacttgtttcctccctctgccagcagctgaattggtcaagtgttatggcccgattagggctgctttggtcagctcctccaatgagagggaggcatgggaatacgggctgagcaggactgggggatctatcttatagagtctcctggaggagagggaaggaaatctgtggcgtcttctctccttcgttcatggccagcttgctctgtgaccaaaataagggcctcctatacagtcatttggactgacacccagtgggtggtgggactcaagaccttctgggatgttttccaaccaagtgaggggatgtggcaggtacacaaggtgtgaattgtgagctgcccagctactagtggagcaaggcaggtcccatcacagttcagaagggccggtgcccatcaaaagacggac

SEQ ID NO: 446866 - DNA, 417 bp, Homo Sapiens
aagtcagaaagaattaaaacatttattgggcataaatatattacatatacactacagatacagttaggtattacatatagcataatatttgcaaaatctatacattaaaattgatatggcagttttaatacaatgtatatgaaatagtctaaaatttacaatacaggaaaacatgattttctttttctcctagagttgaaaagcttgggaatgtatgtccaacagtgaggtaaaacattttatctttcaatttaaagaattgtgcaaggataacattcaaacacattcaattagggcacttctcaattttgacatgaatactgaattattgtaggccaacaaaacaaggttaggaaaatgccaacatttcaagttgataagaacaaggcagagaatatgcaaaaaatctcttaaaaa

SEQ ID NO: 446867 - DNA, 513 bp, Homo Sapiens
ccctgggttaaatatagagaatttaatggctacatttaaaaatgtacattattatgtcaaagggtaaatttacaaattgataatcatagtttgcaacaattcaaagtttattctcaaatttatccaagtttacttttatttacaatgaataaaaagaaccatgtgaaatgtaagagatgtcagacattaaaagtatttttggtattaactcttataatatttcagaattcagggtagcaaattttaaaaccaataacaatagaaaaaatgtaaaccatttactaattaagattgcattaaaacaattgttggtctttaaagaagtattcttatccttagacactgtactttcaattgaatagggtgtattgcaagaatttggcccactttcatattggcccataagcctctccagctcaaatggtttcaactagtcctctcttccttattcccaggtgggaaaaaaattccttgggaaaaggtaaggaatacatcaaatccattttggtagtc

SEQ ID NO: 446868 - DNA, 1123 bp, Homo Sapiens
  misc_feature (69)..(200): n is a, c, g, or t
  misc_feature (279)..(325): n is a, c, g, or t
  misc_feature (327)..(353): n is a, c, g, or t
  misc_feature (453)..(463): n is a, c, g, or t
gtgttcaagccagtttttttggtttcagcctcccggagtggctggggattcccagatgtccggcccccnnnnnnnnnnnnnnnnnnnnnnnnnnnnnnnnnnnnnnnnnnnnnnnnnnnnnnnnnnnnnnnnnnnnnnnnnnnnnnnnnnnnnnnnnnnnnnnnnnnnnnnnnnnnnnnnnnnnnnnnnnnnnnnnnnnnttatggggataagcccctgtgcccagcccaaaaaaggcatttaaacaaaaaattctgacgttaaaaactgaaaaatatnnnnnnnnnnnnnnnnnnnnnnnnnnnnnnnnnnnnnnnnnnnnnnncnnnnnnnnnnnnnnnnnnnnnnnnnnnccctgaaaatatgagcccaggagttcgaggctgcaatggagccaatactgcacctttgtgcttctgcctgggcgacagagtgaggaccttgtcgataagnnnnnnnnnnncctgaaaacagaaaagagggcttttacaatgttgatgaactcatcttagagtgcatgatttataaatacataaatatccatgcatacttttacagtgataactcctgggaaaatgagaatgttaaaaaagccaatctagacagagtccttctcattccacctgcctctttatgttggtaataccaggagtcttaagagagctgctgtggtctatgtcacattcatcccagcctcctttctaatcctgtagctgatgatgaaaatgtgataaatcttctggcttagctttgatgctttttcattaattcacttctggtagtaaattgtggcaggtcttccacttcaatcccatcggccatttccatcaccttgtctaaaaggtctttattgtaactgcagcctaggaagagatggttggcccagaccatggagagggagagcagctggtccaggcggccactgccgtcgggcgggtcgcggtagtcgggcaggtggcgcaggatgaattccatgctggccttccattgcttctcgctctctgagtaggagcggaactgctccgcgaagtcggccgcctgccgcacccccgaaaccagctcctccactgcggcagccgcctcgccaccgaccatggtgcccgccgcagccgaggaccccgct

SEQ ID NO: 446869 - DNA, 458 bp, Homo Sapiens
ttttttttataaaaatgtttagtctttgctttattgagttacaacaaatgagcaacaagttagaaaaattggttttattcaaacttcctagcgtttgacttgtgcggtgtactcaaatggggggcagtgtgggacggggagggattgcaaccagagttcatactgcaacacgtacaccagatatgtctcttggttttccttcttttaaaagttaggactaactgaaaaagtgcactcaggtatctaaaattgtcccaaaacaaacacacacacaaacagataaaatcatttcatggtgaggctttgagctaaaatcttgtcaaataccacaccgagaaaaggcagtgaagaagataaatgaaaaccaaagccattcacctctgtacccttcagataggaagatctttttgttgtgttttaatgtcacgatagtactgatcatgctacagaggaccgcc

SEQ ID NO: 446870 - DNA, 1042 bp, Homo Sapiens
  misc_feature (70)..(87): n is a, c, g, or t
  misc_feature (98)..(151): n is a, c, g, or t
gtcgtggggggggtgggtttttgcgtgcgtttggcgggggctgcgggtgcggggtttgcccgcccgggcnnnnnnnnnnnnnnnnnntccgtcccgcnnnnnnnnnnnnnnnnnnnnnnnnnnnnnnnnnnnnnnnnnnnnnnnnnnnnnnttccattgttttagtttgttttccgaaatgcatttatttcacaaatttgtttaagggctataaacaaaatttgtatcaacttgtttgtatatatttacaaaacagaaaattaagtcagcattaagtcaacatgagtagtcacagaatttttcccctttataaatggtacatattcaaggagacttcaaaaagtttgtggaaaaatggttaaaagataaaaaatataaactatatttttgaacattagctctatagcattcaagacacttttgtaagtgatgataccagctatttagtccatccctaaagaactgagagttctgggaatttatctacatcaatgcagtttctttatacattaacttgagaaaaatgtactgccctgaaaaatttttttaagattaggaaacaaaaagtcagaaggtgccaaaccaggactgtagggtggatgcctagtgatttcccatcaaaactcttgcaaaatggccttgtttgatgagagggatgagcaggaacattgttgtggtgaagaactctctggtctttctcggggatttttctgctgaagctttggctaagtttctcaaaacactcccatgataagcacgttaccattctttggccctacagaaagtcaacaagcaaaatgccttgagcattcaaaagctgttgccatgacctttgctctcaaccagtcctcttgtgctttaactgaactacttatcttggtaaccactgctttgtgttttgtcttcaggattgcgctggtaaagccatgtttcatctcctgttacaatttttcaatgaaaggcttcaagatcctgatcccatttatttaaaatttccattgaaagctctattcttgtctgtaatcccgggaattccggaccg

SEQ ID NO: 446871 - DNA, 1011 bp, Homo Sapiens
tttttagatttttaaactttttttagccacagaccttttgttcaaaggaaaccttaaatggagatgtaacacgccagctgcttaaagacacaggctctgcaagagtgagtgtgggagtgggagggggctacagtctcgccagctgggccccctcgctgcttctgcccagctctccctgctgcagcactggcactgcagggaaccttcccagccacggggggctgagcctgggcctgtcaagccctgactggacatcctcaacagagaatgtttatggagtcagcacgaagccatgagaaggggcagcccaggggccagccagccctcacaggtcctaccagggaggggcccctcagagcttctcagcagggacagcaggttcagagctgagacaccgggcacgtgccagcacagatctgcagcacgcgcaccaggcgctgcgccatgtggccctaaagcctttcagcagggcctgcaggttcagagttgagacagggggctttgataggtgtggccagatcttcagcacggtgtgccaggtgactgctgcatggtggctctaaagccttccagcacctgtggcgaggaaacacaccttccccaagaagaagctggcatccacatggcgcagggactcctctgtgttctggagactgtatttgctgtgaagattaaccacaaacacgatcaggtcaattcggggccgattcacactggagggcaaagggagggactttgccaagtggaccttcagctcggaggcgcagtcctctttgagcatcgagtccgccagctgctgcagaagagcatcctccgtgcccaccagcaagatggtggccgtgttcaggccgggcagcttgtccaggggcctcaacaccgacatcacagccgcaggaccaaccgttgctcctgcggtgcgcgccgatctttcacaccctcgtgccgaattcggccacccaggcctcgctaccttaactgtggaagggggggttctaaaccttggggccccgg

SEQ ID NO: 446872 - DNA, 996 bp, Homo Sapiens
tgacctcaaggtcatcctcatgtcggccaccatcaacatctcgctcttctccagctatttcagcaatgcccctgtggtacagggtgcctgggaggctgttccccatcacggttgtgtaccagccgcaggaggcggagccgaccacgtccaagtcagagaagctggacccgcggcctttcctgagggtgctggagtccattgaccacaagtacccgcctgaggagcggggtgacctcctcgtcttcctcagcggcatggcggagatcagcgccgtgctggaggctgcccagacctatgccagccacacccagcgctgggtggtactgccactgcacagcgccctgtctgtggccgaccaggacaaggtatttgatgtggcaccccctggagtccggaaatgcatcctctccaccaacattgctgagacctcagtcaccattgacgggatccgcttcgtagtagattccggaaaggtgaaggagatgagctacgatccccaggccaagctgcaacggctgcaggagttctggattagtcaggccagcgcagagcagcggaagggccgggcgggccgcacgggccccggagtctgcttccgcttctatgccgaatcggactatgatgccttcgccccctaccccgtcccagaaattcggagggtggccctggactcgttggtgctgcagatgaagagcatgagtgtgggggacccccgaaccttccccttcatcgagcccccaccaccagccagcctggaaaccgccatcctctacctccgggaccagggggccctggacagctcagaggccctcacacccattgggtccctgctagcccagctgcctgtggacgttgtgattgggaagatgctgatcctgggctccatgttcagcctggtggagcctgtgctcaccatcgcagccgcacttagcgtccagtcgcccttcacccgcagcgcccagagcagcccagagtgcgcggcagcacggcggccgc

SEQ ID NO: 446873 - DNA, 218 bp, Homo Sapiens
gcaggggcccaacacagtttattcggtctcggtaaaggaaaaaacccattttaaaaagccatcccgcagaatgccccatccctagaaagacccacttcctggcccttcagctgcttttgtttcttttcacctccaaaaataaaattacagtttacaataaccttttaaaatacagcatcattaagtgggaaactgaaagcctgccattgttgttgccg

SEQ ID NO: 446874 - DNA, 744 bp, Homo Sapiens
  misc_feature (27)..(27): n is a, c, g, or t
gccccctatgaggcagtttaaaataanaaccacatacaccatgggaactggaactggatcccggtcagtggcacctgaccccagaagaattcgtggatttgtacaaaatgcagaggaagaaatgaggcaatgtggtgctgagtcgaggggtagccgattggcagagtagtagtcagcaacagtgcagtcaggtcatgcctctttctcataagtgcgagtgcaaactgcagtgccgtgggtgagtgtcaggatgagttttccatcaattagctcccgcacaagtgtggtctcttgcccgtcccatttctgcaggtgaacaagtttccctccatccagtgtcacaatggacttgaccttcctgtcatctgctgttgtctcatcgaactccacccccaacttaaagctgatctctgtgttcttgaaggtgctgtgtgtttttagggtgagaatgtccccattcttttcgatgattgtggtaggcttggtcatgctggccacctgcctggtagcaaaacccacacctgagggtagggggaaggttatgagtatatgagctggggtagagaagcagtgtacaagaaactcaatgaataactctcaggcctgggtatggggaagtggaggactgtatctttcaaagcctttgcatgggaattttaaaattcagtcttgcgcttagttctgttttggtgaacacagataactgatcccattagatgagagatacttaaggaacagcagtgc

SEQ ID NO: 446875 - DNA, 1051 bp, Homo Sapiens
aggcataaagtaaaaatattaaaccagggattttctacacaaacataatgtataaagcatgcctaatttatagaaactagatcactcactcattctgctcagaaactcattgattttactctgaagcacccacgaatgacagattcccaggaggggcagagaaggctgagcggcaccacgtggggctggccgcgggttgtgggcatgagcacgcctggagaggccatggggctggtgacaagctctggccagaagaccccaagaaggtctgatcctggggtctgatccaggcctgcggcactgggtcctaggcagactgtctgcctggtgagacgtggaaggagccagtgtccgcagccgtctcaggacgtcagagagctcggtggcctgtctccagcagcatgctctccagatgcagcctgctgtcgctctccacatagggctggtgcagccacatggacaggtagctcagggtgaggtcgggatccccggtgtgggcaagctccttggccaccgtgcgcttcaggagcagctccttcctgtacatctccaagagcttatgcgaaacctcatagaaatgggttgtaggccacgtgtggaacagagggggtcgtttactctcctccccataatggtagttttctagttcacaaattcccttggtagttgaagacagcttttccattttcacctgtattttggtcaacccatccaaggtggcctgcagttcctcacacagcttctccagttcctcgttatattccagacacaccttttcttcattttccttcgaggctgggctgctgctgtctagttctatcttgtctttattcaataaactgattttcaagttggcaatattatttgcagtggtaaaacctgcatcattgagggtttcccacttcaggattaaattgtgccaatcagccgcattgtccttaatttttcttgcactgacagataagacaggttttctgggcgttacagttccaagagtctttgcttccataaggtccacagatatccgtagaaggagacgcgaagccccccc

SEQ ID NO: 446876 - DNA, 1309 bp, Homo Sapiens
  misc_feature (140)..(140): n is a, c, g, or t
  misc_feature (162)..(170): n is a, c, g, or t
  misc_feature (600)..(614): n is a, c, g, or t
  misc_feature (630)..(631): n is a, c, g, or t
  misc_feature (691)..(766): n is a, c, g, or t
gcgagtaggtgttcgccccccgcgttaggggattttgaaaaagcgggggccaaaagtaagggagggacgtttgtgttgtcaaccgcgcgggtttaacctcgtgtggggagggattatttatttcgccggaagccgcgcanaggttggtttggtaggcgcctnnnnnnnnntgtagaggggtatcataaacacgcaggttttgtgggggggtttctcgcactctcggggcgagagaattgtttttgtagaatttctcacccacactcttctgcgggaaaagtgcacacgcgccgcggggggtgcgattatttataatattgggagggccccctcgtgaggacctccctttgtggaaggggtgccccgaaaaagagacctccgccgaaggggccctctattgggtgttttttgttaaggacaccccgcgggtgtcctcccgcgggggggtgttttttttgtggggagggatgccaccggccccttgttcttgttccccggggggtttgcttttggggaaacgagttgtagcccatgttgttccttttcttgtttgggggcgcgcggcgccccaaaggggaaggttttaagaaaatttttgcnnnnnnnnnnnnnnnccgcaaagaaaaatanngtttgaaaagggggttttaaggggcgttgttggggagggagtgatatggtgttgagtggnnnnnnnnnnnnnnnnnnnnnnnnnnnnnnnnnnnnnnnnnnnnnnnnnnnnnnnnnnnnnnnnnnnnnnnnnnnnccgcacatgacaggtttattgacaaaggctgaacgtcaccagcctcatcagcttttcttacattttatgggaaggtttttacatcatcaccgcagttgtccccagctgttatttctgtagaaacaaattcgtcagccacacgtgctggagtatttcattgtcctggcacccgactaacccacacggcagctcgcacggtcccagtccacatgagtgcaattgccatgttgatgtcaacaagcagtgactgaaccaccccggagcatacggcgggcgctccacagaggggccttcctgctgctccgggccgagcgctgctgctcctcgtgggcctggtgaggccgcacagcgccattgctgccatcctggaagatggaggacgctcaggcgtgcaccagagcagcatgttttccttctcctctttaactcggcggtgcgctagctagctcagaccgtgggcacagaggacacaccgcgacgtccagctcagacccaccagcaccttgcatctccagcgtcagttcccccacggtggcagatttg

SEQ ID NO: 446877 - DNA, 231 bp, Homo Sapiens
ttttttaaataactcattaaagtttattacattaaaaccatatatcacttttatattgtatttgccatttctgaacaatacaaagtagaggcaaatagtaacacttaataaaaatgttgcttccccattcctttccctaagacccagccctccctcaaatattccctcccacccctaacagaactctgtccttaataaaacacttaaatacatcataaatagtaaattatg

SEQ ID NO: 446878 - DNA, 526 bp, Homo Sapiens
ttttttaggttccaataaaattttatttatgaacactaaaatttgaatttcatatgcttttctcatgccacaaaatattattcttttgattgtattcaacctttttaaaaaccatttttagctcacaagctgtacaaaaacagacggtgagtaaattggcccacagaccggtttgctagcccctgggcttaagagatctgtccacttactcctcaacatgcagagtgtgaactgtgtgaactgcataggccacagcaatcttactgcatccattcccgctgcatcattatttttgatttgtattcattcagtccaccgaagcattcacttggcacctctccaaatctgggtactgtgcaagatccttccttgggacactgaaggaaaatcagacacggcccttctctcaagttcgcagactctccggtatccagatactacggctctcatagtatcagaaaacacagccacaagcgcaggtaagtatcagaggtgttttacgagatacatgtatcagattcttaag

SEQ ID NO: 446879 - DNA, 467 bp, Homo Sapiens
  misc_feature (171)..(311): n is a, c, g, or t
  misc_feature (318)..(372): n is a, c, g, or t
agcctcagtcagatttcactttatttgtatcgatgacaatattaactcttcagatttataaaatgacaaaacttgataattacctggaaacaatttattattaactaggttaaccctaaatccatcaagaaaaaccacctaacatattcagtgttaaaaagagacattacnnnnnnnnnnnnnnnnnnnnnnnnnnnnnnnnnnnnnnnnnnnnnnnnnnnnnnnnnnnnnnnnnnnnnnnnnnnnnnnnnnnnnnnnnnnnnnnnnnnnnnnnnnnnnnnnnnnnnnnnnnnnnnnnnnnnnnnnnnnnngtcttgnnnnnnnnnnnnnnnnnnnnnnnnnnnnnnnnnnnnnnnnnnnnnnnnnnnnnnngtgtgggccgctacacctggccccaatctggtactttcaatgttgcctataaacagatttcagctgaagctcagatggtaaggttaagatgcctg

SEQ ID NO: 446880 - DNA, 2078 bp, Homo Sapiens
tttagcccaggtcaacacgcttttattgccacttctggctcccctcgtcccagcaagattcctacctcttaccctgtaggaatactgagctccgatgcaggggaatggggtgggggtgttaccacttctcctctgcacactgccaagttaaagaaaaccctgcttgctggagagggagggccagacagggaggaattcaagggcatgtatggctcagtcccacttctgactgcagagtatagggaccagggttccaaactttttttcgaagtaagggaggtggggaagaatttggctgctgttgtaccccgtgtcctagctgccatgtttccatggaaatgaaggcggggcaggatgtagctcactctgactacctgggaggatggcaggacaggcatttggtaaacatatctccctccactcctacctagcacatacggctgtccccagccgacccccaggctctctcctcactgcctgctccactcctttcccttctggagctggtatcatgccaagtggagtccaggcagggctgccagtgctactctccacagccaggtctcactggcacgttaggatctaagtatgtccgccaagctcaggagcatccctgctagagctgtgtggtggcagtgcctcggtgaaaaggcagcagcagtacccccaactctctgtgcaactgctgtttcccagacaaactgaaaacataaacctcaacacttaagggtatcactctggcacaatgctgagggctgggatgggggagaggaggcgcatcctcctgagactggagccacctgtgcaccctgccttctgcccatctggagtttgcttcttcccactgggctgtcactggggggctggaatccaaatctccatttggtgctgctttcagcacccactgctgttcgtttatgaggcttgccagtttccatggtgaggaggtgcaggatggattctcagtaccatgggtcagcccggtgctgctggttgtagagctgtagcttgatctgatctttgatctgattcactaggatctgggacagcagaattcccaccagctgggggatggccaggcctagagccacaccaccaagtaagaataggttgctgtgtatccagttgaccaacttgtcaatacagccattggtgtagatgactttgctagcttccaagtagtcaaaggcctgcataccttggccacacatagtgttgatcactgcctggtcaggagtaggccagcaacaggagtcaggcacagagcagcgctctcgactggggttgtcttctgagcagttgaaatacatgttctgagaccagtccttgtaggacatccctccacagcagctaaactttttctggccaaaatcaatagaggttctgcagatccaagtcatctcggtagtgcacaatggcattgttgatgatctcactcactttccctcgaagccttgtctgagaagacgaagcccaggatcccagcggccagctgcagcaggaacacagcggtgaggcagagggagaacgtctgcaggaggcagatgttctcgcggagggacccaatgcagccacagaaggtgagcaggaacatgaggacacccaccacgatcagcaggatggcagggtccactgccaggcaggctagggctgcttctgcatgcttcattagccgagcgtagacacccacagccaccatcaccatggaaatcacccagaagagcatgttgaagaagaagagcaggtatttcaccagcgggctgacgaaggagaactcctccccggaggcggccggcgcccggggtctccgcgccatggccccgccgccgccaccgcccccgggggcctatttcccagcggctgccggccggcctgtgtgccccgcgcccgggggcatgagccgagccgcgccgcgcaggagcccggccggcgggggagcctgcgctgcggcgggaggcgcccgagccggggggccgggagcggcgcgggccggggaaccgcgcctggagctgctggagccgcggtgggcagcgcgagcggacgagcctcgtgccgaattcgccacccaggcctcgccc

SEQ ID NO: 446881 - DNA, 974 bp, Homo Sapiens
  misc_feature (48)..(57): n is a, c, g, or t
atgtctccagaagtgcttagtttttatttatttctaattctttctgcnnnnnnnnnncacgagcactgcttagaactcaagttcctgggatcaaacttgtatcacacaggctggagaaggctgtggagaaactgagtcctcccaggtctcaaggtgggtggagggagcctgcaggggtctccttccctcccctcttgcctgttctgcctggtcagagcctgcacacgagtgcagagggctcccttagagagggccgggctagaggaagctgaagtttcagaataagcagcttattctgtggcctcctttccactacagactccttgaggaggagtaagaccccagaaggacaggtgagtctcacctaggctgaccaaagtccagctcagccagcccttgatctatccaagacatccgcccacagcagtgagaagctgatgccactcaaagccattctcagtctacatccacgatgctgggaaagaaaaaccaagttcaatttaccaaaatatctgtattatctataaaaattgaactctaatgagtcactgatacgggaggcagcaatacccgactgtgctgacatgcagaaggaagacagctctgtcccaccaaccctatagcagaacatttgtattgagtggcacgtgggctgagtcatttgtaaggtctcaaaaacctggacactttggaacgtagcaatcggatgaacgatcttggaaacatctctcgggactcctgggctgtgtacttgaaatagttctggggatgggccaggacatcaaacagagccttgataagtttcttatccttaagtatttcctgatggttctcagatgcatagagcctgccatctcgaactatgtcttcaatgagttcctggtagtcctcatcatatgtcacgtatgggacctggaaccctctagcgctgttcccttcattggacttgaactgaatccacagcttctttgacc

SEQ ID NO: 446882 - DNA, 868 bp, Homo Sapiens
  misc_feature (47)..(172): n is a, c, g, or t
  misc_feature (202)..(263): n is a, c, g, or t
  misc_feature (460)..(483): n is a, c, g, or t
  misc_feature (487)..(557): n is a, c, g, or t
  misc_feature (792)..(828): n is a, c, g, or t
gaaatgaagttttgctctttcgcccaggttggagtgaagtgggatgnnnnnnnnnnnnnnnnnnnnnnnnnnnnnnnnnnnnnnnnnnnnnnnnnnnnnnnnnnnnnnnnnnnnnnnnnnnnnnnnnnnnnnnnnnnnnnnnnnnnnnnnnnnnnnnnnnnnnnnnnnnnnnagggtttcaccatattggccaggatggtcnnnnnnnnnnnnnnnnnnnnnnnnnnnnnnnnnnnnnnnnnnnnnnnnnnnnnnnnnnnnnntgagccaccgcgcctggcccgtcaatcagccttttgtcatatttctggcaccagcaccttctggagatgaggatctcaacattgccctcagaatctagctgtcccatatggagcaggaccttgaactccttctggaacaccaggaggaagactctgcttgagcctggaaataaggtctttgcagatgtaattattannnnnnnnnnnnnnnnnnnnnnnnggannnnnnnnnnnnnnnnnnnnnnnnnnnnnnnnnnnnnnnnnnnnnnnnnnnnnnnnnnnnnnnnnnnnnnnaagcagctccgctggctcagcaatgcgggtcgtccgggtctgggtcattgccactggctcgtccctcctcccacccttgcttcctggactcaagagctgctaggctctctgcgcgccggcagtgggctccgcaggctgtctcctacacagagcaggcgggaggagggctctgggttgcttcccgcgccgaagacccgctctcgacgaattcgagctcggccgatttggcctgatnnnnnnnnnnnnnnnnnnnnnnnnnnnnnnnnnnnnncgccgccccgcgttaactccagtcccctatatatttcgca

SEQ ID NO: 446883 - DNA, 691 bp, Homo Sapiens
tgatgtttctgaatccttttattttttaaaggacttttaaaatttgaaactacaaaacggatttcatacattctgccataaataaaaacaaacaataaggcaggactctacataagcaaaccaagaacaattgttttcagaaaatgtgataaaatgctttacaatcataagccatccagtttttaaaataaaactgttgaaaaactcacaaatcttcaagcggcacatacaagacacccttgaagagggaacaaaatgtggttctgccactttgtactgttctcacatttttgaaaacctaattttgcttagagcataggtctgttccgtattctaaaattcacacaggttggtttgttttttctcaagaaccatgtgatagaggcaccaatgacaatacaactttgtttccaagaaccttgtaacaaagcgttgtctcttttaaacataccacttgaggcaaaaggaatcctggacaggagttttctgtagaggcgtttaaaaccctaccgaatccgcttctgctgccgtgctctgtaaatgtcatgaacaggggggacaacggctcccttttcttcatcttcatctgaatcctcgttgggcctttgacggccttggtgagtactgcattactttccacggggccgttgccttctacagctagctctggggccccaccagtaatgatcct

SEQ ID NO: 446884 - DNA, 648 bp, Homo Sapiens
  misc_feature (166)..(191): n is a, c, g, or t
  misc_feature (575)..(575): n is a, c, g, or t
  misc_feature (614)..(614): n is a, c, g, or t
ccttcaatattgaaaattaatttttatctctgtttacatagtctgctccctcctgctgccagattaattccaaggacagcacaagaatgtcatgtctgaggcactccctaatcaatgttccagtctagaggaaagcagaaaggtgtcactgggttgtgaggggacnnnnnnnnnnnnnnnnnnnnnnnnnngcgtgggtcattctgatggtggctgctgtcagcatccaagtggcttatgggataggacaaccccccaggcacttcactgtaggacagttagcaccaagagctaaggttgtgagataatgcaaatctggcctgtcacctctgcagagtacaggttcccatactgtgaggcagcagccagagagggaaccaccagagaaacagcatttcagaattgtctttcctttggtgtatggatatgtgtgtgttctagtctttggtgggcaatggaatctgcagctccatgacaatcttgttaagtagcttatgtgggaagtgtttcaggtcacaagggccacccattctaaggcttctcattttaattccccggggctaagagacaggttnggggaaaggggaaaaaacctaggcaccttggctattacngaatttgggattcagaaggccattcattgcattt

SEQ ID NO: 446885 - DNA, 1111 bp, Homo Sapiens
  misc_feature (333)..(333): n is a, c, g, or t
  misc_feature (351)..(351): n is a, c, g, or t
  misc_feature (440)..(440): n is a, c, g, or t
ttctcgctgacgtcgcctgttccccgaccccatagagagggtgcatttatcatcacggagactcccctatccggctgcagagcggtgtcccttgctacatagcgccgtcgcgctgagcgcgcgacccattatgcctgtcccatcgcacacccaacgcggtatgtgtggtgatctcgcaagttcatgcgtgtctcaccccactcagtgtacgcagctcactgttacatatttccatctgctactgaggctccccccggcgctagtaagctattgtgttgcgcggcacacatctgtttatgcggggatccacccggagacaaaggatggagcccnctcctgcttgccgtattnggcgtatacgcaccctcctcctctctaagctgattctaccgccgatcacttagggtcctaatgtacgtgtggctctacaccctgcgganaagaagcaggtggagaggctgaccgggttcctgcggactgcagttggtacgagtcgcatgctcccattgaacacgcggtatctcgggcctggtgcacggcgggtctaatgcgagcgcacctcggccttttcttgctcgtcaaggcgcggggtaggcctgggcggctgcctttttcgaaagccggctgcttccctgccaagattatgggcagagtcgagttcgccagcccagggaggtacttcggttctggcaacccgaagcgttcgcgtggcgccacggctggtctcccaggccgccggtctcatccccgggcggcggggcaccctcgctgagcgttatccatggtgccgcgaagccagcgtgcatctgggaggcggacggcagcagatgcttagcggcctctgcacagcggccgctaccgcatcccggggggttggtccccgaatggaagtctccgtccttggggctgagccccgtcgggtccccaaggggacgcggcggcgagacggccagcggtggcccgcgctgcgcccagatgttggcggccgtgaagtccacaaaggagccttcgcgcgcgcgtccctcgagcttcccctgggcgcccgccctgccccgtgcgcacccccggaccaaccgggaggggaccaggagagggaccgcggcaaggggcc

SEQ ID NO: 446886 - DNA, 622 bp, Homo Sapiens
  misc_feature (46)..(59): n is a, c, g, or t
  misc_feature (69)..(256): n is a, c, g, or t
  misc_feature (485)..(485): n is a, c, g, or t
cccttgggggccccgccccccaaaaaatgttttaaaaaatttttcnnnnnnnnnnnnnncccccaaatnnnnnnnnnnnnnnnnnnnnnnnnnnnnnnnnnnnnnnnnnnnnnnnnnnnnnnnnnnnnnnnnnnnnnnnnnnnnnnnnnnnnnnnnnnnnnnnnnnnnnnnnnnnnnnnnnnnnnnnnnnnnnnnnnnnnnnnnnnnnnnnnnnnnnnnnnnnnnnnnnnnnnnnnnnnnnnnnnnnnnnnnnnnnactttgtgtgttgtgttttattaacaccaaaatgtgccacatcatggtttagaagaggtggagggtggaggcaggaggctccgaaggcccaggcagggccgccagcctctggcctctccatggactccagctggagagcctgtccgctcagcaacaccccaggcagcaccaagaataacatgcccacaagaacatcatggccaagagacgcacaggcgcatcccgcttncaggcacctttcccacctggccagaagtccctgctgtcatcccgacttgcacggtggttttggtaaccagtgggctgtgcaggagtgaaagtggggtcactttccttcctttcccagctgctggagtcggaactgct

SEQ ID NO: 446887 - DNA, 1477 bp, Homo Sapiens
  misc_feature (34)..(34): n is a, c, g, or t
  misc_feature (213)..(213): n is a, c, g, or t
  misc_feature (1359)..(1413): n is a, c, g, or t
cacccgcgactcccacgcagacagtagtgcggcntgcagggttcccccggcggacgaggctaatggttcgctccgccccgcccacacagaggccgcccactggctccggctgcgtttcaggactctggaggaagggacttggccttcgccctcagacgctcttaagggtaggcggcgttgtcctcagttctgccccagcactcagacccagantgggtccctgcctccgccttccgccctcggattaagtctcttggaagccggcctgtctccgccttcagacctagggagaggtcttaacctctgttctcagactctggaaaaggcttctcaacggcttggcctgacctcagctcctcgcattccctccacatctcaagacaccaacccagggatgcaggacagacacacagacactcagtgagggtcaaatatctttaaataaagtgccaggaacaataaatactgtacaggaagagagtgcacgtgaacgtccagatctgtggtttcaacctcgagactccaaggacgagtagctctgatgctgttggcgccggcgggcagagcgcatcttctcgaaccgggcctccatctcctccagcactcgcggtgtgtaacggacaaccagcttcaccgagccctgggccgccttcagcagctccaccgccttctcatgctgctcaccctcaacgctcacaccgttcaccgacaacagttgatccccacgcttgaggcctccatggcggtcagccacaccccctgggatgacccgggagatgtagatgggcgagttttgctctttgccacccatgatgttgaagcctaggccctcatccgtcttgggtagctccactaccctgggatgtgcgtggccctcgctggctgtgaaggcagccactgtggccttggctgtggcatgggctcggatctcggcgctgccggtgatgtccagcgtgtcataaagctgctcatacacctctcggatagcggagcagaagcggctctgcagaactcgctggagggcctgcagcttctgcggcggcagctccccgctgcgctggagccgctcgaggagctcaaccgcccgggacacgtctgcggggcgggggcggggcgcagaaaccccgagtgtcagagaccccgagacgcagagaagcaaggagagcggcggagtgaggccgagcgcacagtccggggaggacggccgaagcctagtcggacaccccgcagagtccagggtggcgcaggagagactgccaccagcggccctgcggccccgggacccctccacaggccgggttgtaaggcgggcgcccagcgtcccggcccgcgcccagggagcctcccacacctagcgannnnnnnnnnnnnnnnnnnnnnnnnnnnnnnnnnnnnnnnnnnnnnnnnnnnnnngcactggcctgacccgggaagggcggggaccgggggctgggtatgtagccgcggcccgggtggg

SEQ ID NO: 446888 - DNA, 606 bp, Homo Sapiens
  misc_feature (339)..(351): n is a, c, g, or t
ttaaatgtcatagtgtttactttatttaaatcctgaggttaaaaataaagtatttccacatggcatggcagacactataaaataatatgcttagggatacaaaagttttccacccccattgagcaggtggggtgctggtatttgatgtgcttctagataattctttggcagataagaatgaattggggtcccagacccaccatcccgtaaggccacatgaattgaggattaatcaattaaagtgcaattccaaatgttgagccttccaaatgaggcttgggtattgctctgcagccaccagaggcagagtgtctctgcataacatacatcaagcagccnnnnnnnnnnnnnaaatcagagatgcctccccaaatttcaagatgtactttattattttaaaagtgcttaagaggaaagagagaattattaattcagtctctcctgtttccttggaagaaacataatgaaatgagaagaacttactaaagttcccctacaaagtgctttcttggtaagtgttttgtaaacaagaatggccgtctcgatggtctttgtgtacatgaccatccttggttctaagcatcacgaatggcttctctctgcttt

SEQ ID NO: 446889 - DNA, 713 bp, Homo Sapiens
  misc_feature (39)..(39): n is a, c, g, or t
  misc_feature (182)..(182): n is a, c, g, or t
  misc_feature (461)..(550): n is a, c, g, or t
cttgcctttacggagtgcacattcaatgcggtacggttntcccatccagccccgcagactggacccttccagggtgatgttggaacaatccggggcgcagacgcagcggggtctgttcttcttgttcattcggcattttttcccaggtccacagtccacgttctcacacgtttctttacagnggatgcagttgggggcgcccccgttgaaaatcatccacttgaagagtgtgttgtcattcacgtcctcctcggtccacgaggtgctcagccggccggtgctgcagcactcctccttgctcagttcggtcttgtacaggacctggcagcggccgttcttcgcttgacggagccagcagttcccagcctgggcactgcggtcctccatgaactggcagagcagcagcagcaggaggcaaagcccacccggctggtgcctcgcgcggaccatcctgggggcannnnnnnnnnnnnnnnnnnnnnnnnnnnnnnnnnnnnnnnnnnnnnnnnnnnnnnnnnnnnnnnnnnnnnnnnnnnnnnnnnnnnnnnnnagggcgcagcgatcccggcgcagccccgcgctcgccgccggccgcccgcgcgattcaatggacgtcagaagccgggcgcagccgcgctttaaatctagacgggggtctccgcggtttgcggtgggcggtctcccagtgtgtggggctgtgggagggcggccgc

SEQ ID NO: 446890 - DNA, 571 bp, Homo Sapiens
  misc_feature (13)..(13): n is a, c, g, or t
  misc_feature (93)..(190): n is a, c, g, or t
gaaaaggaaacanaacaaaaaacttccccaaggacccaaggacccattttcctctctatctgcctaaaataatttcttaataactcctacaannnnnnnnnnnnnnnnnnnnnnnnnnnnnnnnnnnnnnnnnnnnnnnnnnnnnnnnnnnnnnnnnnnnnnnnnnnnnnnnnnnnnnnnnnnnnnnnnngaagagcagctagggctcctcctggggtcaatctaagggtcctcagaagaatgatgtgtctatgtgtggttctgtttacagcaccatttggagtttgattgcttctagatgagaagaaacaatttgagttatagtattgtgtatacagggtccaaatatcaatacaagacacataagcaagagagggcttaataaaggggttaaccaattccataaagaagactggaatttattaaagaggcattgtagccactcggggatcaataattttgatttgatttttaagtacttgtagattttcttttaactagaggcattaatccgaaagcagcatgtttcattgaaaactgcatcactaaacccaataaaaagtcctagcag

SEQ ID NO: 446891 - DNA, 672 bp, Homo Sapiens
  misc_feature (42)..(42): n is a, c, g, or t
  misc_feature (57)..(128): n is a, c, g, or t
cgagcggcgagaaattgtttccactgcaaacaaaaaaggcgnacacatgaccaggcnnnnnnnnnnnnnnnnnnnnnnnnnnnnnnnnnnnnnnnnnnnnnnnnnnnnnnnnnnnnnnnnnnnnnnnnaagggaaaacgtggggcggtggggcaggtgggtcaggcggcgcgtgccctgtcccctccccgggctccggccacacgagcgggccggcgctgcgctgctggcaacgtgtcgcgggaacgctcctaccccatctgcatgccttacatggctcgaaagtaaaaataaaaagaattacgctgcgggcgaggcttgtgggggtgagaagaggagattccacgtctccccagtgctgcgtcctgataggacccccagggccttccgagccctctcccagcgaccacctcgtgtcccggaggtaagcaccgcagcgtcccacccaggtggccgcgtgtctcccgagggagggccggtggccattacaagacaagaggcaccgtcctaaaggccacgccggtggggcctctcaagtgggttgtgcggaacgccccggccggcctagagagaaaacaggtctcatttccatctcagtttgagctctcaggaaccagactgacaattcgcaagccacccagagaaatggtgcagccaccactctaagtctcta

SEQ ID NO: 446892 - DNA, 869 bp, Homo Sapiens
  misc_feature (251)..(285): n is a, c, g, or t
  misc_feature (434)..(475): n is a, c, g, or t
atcaccaggtctgataagttcttcttcagccattccccttttttctatttttcttatcttctgcgtgcatttttctgggaactcgaagtgggagccctgctgccctcgctgaacgaatccaaatccttatccaccagcgacagggacaggttcccggccgccgcgccgccccccagctgctgctcgctggcgctgtgcgcgctttgagagaaattcaagctcaggtcgaacatcaggtcgtcggcgtcctnnnnnnnnnnnnnnnnnnnnnnnnnnnnnnnnnnngacgaggaggtggacaccgagcgcgaggacgcgggcgacagcgcgggctgcgcgagcggcggcgggtgctgcttggtgatgttcttgaagctgtagtagaggcggctgccgcatttcttgctggagcccttggaggtcttggcaccgannnnnnnnnnnnnnnnnnnnnnnnnnnnnnnnnnnnnnnnnntcttctctgggctctggctggcgctgggcttggccgaggggtccattttgggctttttccggggccggtacttgtagtcggggtagtcggccatgtgcttgagccgcagccgctccgcctcccggatgaacgggatcttctcgctgtccttcagcattttccagcgcttgcccagcctcttggagatctcggcgttgtgcatgtccggagactgctccatgatcttcctgcgttcgatcttggaccataccatgaacgcgttcatcggccgcttgatgtggcccgacgccgtcttgcaccagtctgggtcgctctcgtccagggccaccgggctgcaagccatgaattcgccctcctccgtgtccagcgcctcccggggcaggttgctctccgc

SEQ ID NO: 446893 - DNA, 560 bp, Homo Sapiens
  misc_feature (74)..(84): n is a, c, g, or t
gaactccaaatgcaataattgaaaacatatctatccatggcatattagaaactcaaaggactttaaaaaattgnnnnnnnnnnnaaattttgtaacaagagtggcctaggggattatgttgggaacgtatcccatataagaaacagattatccaccaaatgtccacagtaaccaccactatctttgtgaagtcatcagttgcccctgcatttgaagtgggagggtcttacaaggtgtaatacacaaaataagaaacccaggatagagaaggcaaagaaatcagctataggtgtgttactgggtgttccactctgcattttgtgttccttcactgaatatcagcctcattttctcccctctgcatgcaggtcacctcttcagtgaggttagcctgaccaccctataccaaatagcacatctgactacaactctgtagtccctacccccaattccctacccccactctcctttcttcattttttatcacttagtaccaccggatgtcttatatgtcaatttggcagttattattttctatttataacttattttctatttat

SEQ ID NO: 446894 - DNA, 468 bp, Homo Sapiens
agtctgagcatttattcccagaatttatccaaaccccttttaatctccttggctggatttatcaaccataaattttttcacccatacatttctttttcctgcaaacaaatggtaaccactgaattaatacatctcatatatatatataatctgcccttaaaaaatgatgcactgtgtgtgtgcaccgtacacatttgtctacgtgtgggcacacacacaaaacacacttaaatttctgtgatgttagctgcagtgctgcgagatatttcttccagatcagtcacttgattcctcgcctcttcatcaccagagaagatctgagcgcaaggtctccagcgctctggcggaaatctccagcagcactgtagatggctaccattccttcatcgactaagcaccaggccctaccactctgtagccatcaaagagagggggaaaggtgatgaaggagcacagggagagactgtc

SEQ ID NO: 446895 - DNA, 446 bp, Homo Sapiens
taacaatcacctctgttgcctccatttgagagaatacttccaggggctctgcatgtctggtccccaacctggtcggggagttcactttcagaggctcagggatgggccttccccagccccaccagcaaatcatctctccctgcttccaggagggtacttactctccaactagtgggctttatgggccaggaaggatgacaggaaggggtgtgtggggtactacgtccctccacactgagaatccgaaagccaagatgcccaagattctatcgttatctgcttgtcttgtagaagcccctctgtgagactgaggggcaaaggagagagggcaggggcgtgtctcaacccttctggccacttctaggttgtgcagactgccactcttattactacgatggactgtcagatcagcaggtggcccaggagggcttgcttgatgcgggctg

SEQ ID NO: 446896 - DNA, 636 bp, Homo Sapiens
gctcattatgatttaatatgatgattgatcatctctgccccgccagcattatcctaagaatagtgatgaaggtcggagaggcccatgcctgtcagagctcaagctcaagtcaccagaagatagaaaatatacttgttcgttactccttttttcattgtaaaattcacacatgtggccccacgccctaactttttccataagctgtcctccatgctcccagcctgcctcactgctctacgatttctcagccctggattgttcttccacagatctgctcatcaactctggctcctgaccctctctccttagtgaccccaccccattcccaccccctgcgaaagtgaccacagcttccactatgggcaagggtttaggaaggtccaaagggctcttcagtgggtactggcaggcattcagtttaggtggaaggcccgagacacctcccgataggcatttcgaagcaggacataagggaaacaggactccagcatgtccagggtcaggaaggatgactcctccaccaccaagcgcatgagcagagaaatggattctcgatttctggttttaagcttgtcagtctcctggcccagctgcaagaggctgacagaggccaccaccagaaattccttgaggtcc

SEQ ID NO: 446897 - DNA, 928 bp, Homo Sapiens
  misc_feature (494)..(558): n is a, c, g, or t
  misc_feature (812)..(812): n is a, c, g, or t
agctctaaagtcttttaaacaacagctggaaagttcttgaacgagcccacgggaaacctccagggttttaggaagctgacgatgcaagtttatccaaatggaaaacatttaatgctgctggttggagcaagtgatcaggcaaacaaaaaaacccatcgtgtttcactggctcaaagagactttgttgaaaacaattatactattctcattggacaataaattttacagcagggagggggaattccagagagtgcagtgtagaaaacaagagagtctcaaactctccatacttcaacctctgggaaaaaacattttctaagctgccaagggaaataccactcagaatacactccctcagatgggtggacttacccagaaaacacaagcagcttctttcgttctttcactttgagacagggtcttgctttgtcacccaggatgaagtacaggggtgagatcatggctcactccagccattgaccatccaagcaagnnnnnnnnnnnnnnnnnnnnnnnnnnnnnnnnnnnnnnnnnnnnnnnnnnnnnnnnnnnnnnnnnaattaacatttttagatagagacagggatctcacgtatagatgcccaaggactggatcccgaacaagcctgcaacagcagagcgaatcagggcaggcctcagcactcccaagagatgtagaggaattacaggcaatgaaaccacccacgccacccgaacaaaaacaagacagagtatctcaaaagaagaaaagacaagcacacacaaacatcagaaggcaaaaaatgacttgcaccagctactataactacagngaagcaaagaacgacaaacgaggataggcacaacacggaagaacaacaagtctaggaagacaaagcataagataacagacaagacaaaataaagggagcaactcagagacaagcaa

SEQ ID NO: 446898 - DNA, 818 bp, Homo Sapiens
ggggatttgattttctctggggttttcactagttccggcctttggcgctctatgacgtcaccgaagtgacggagcggaaaagcgcgagaagcggcttggttccttgtacgcagaggcggtagtgacacaggcacaactgacagtggcagaagctcagctgacaaggactggggacggcggtgtccttgtcttgcctttgtcgcccccgcccctctcttccctggctggacttgcggagtccccgccgaagaacccgaggagccatatattgaagaccatgtctggaagcttctactttgtaattgttggtcaccatgataatccagtttttgaaatggagtttttgccagctgggaaggcagaatccaaagacgaccatcgtcatctgaaccagttcatagctcatgctgctctcgacctcgtagatgagaacatgtggctgtcgaacaacatgtacttgaaaactgtggacaagttcaacgagtggtttgtgtcagcatttgtcaccgcggggcatatgaggtttattatgcttcatgacataagacaagaagatggaataaagaacttctttactgatgtttatgatttatatataaaattttcaatgaatccattttatgaacccaattctcctattcgatcaagtgcatttgacagaaaagttcagtttcttgggaagaaacaccttttaagctgaatggagaaaattccaaaataaattatatcaccacaatggtgtatactcaggaatgtgtacattgtaaattacttgattaaatagcctggaaatcttttgtgtattctcagcttatcta

SEQ ID NO: 446899 - DNA, 911 bp, Homo Sapiens
  misc_feature (832)..(868): n is a, c, g, or t
gaggagacaagaagagggagcaggatgtgagtgagaagggactctgtatgaaagaacactgttcacaaggaaatagccgagtgatctagttgatacgtgacatgagacagaatgtactatgtgtgtgaaatataaaaggaatttcattaggtttagataacgctgagcataccctgaagttttccaaggctattttaatcaagtaacttgaccatgtacacattcctgagtatacaccatttgtggtgacatcatgttattttggaattttgctgcattcagcttaaaaggtgtttcttcccaagaaactgaacttgttctgtcaaatgcacttgatcgaataggagaattgggcttcataaaatggattcattgaaaactttatatataaatcataaacatcagtaaagaagttctttattccatcttcttgtcttatgtcatgaagcataataaacctcatatgccccgcagtgacaaatgccgacacaaaccactcgttgaacttgtccacagttttcaagtacatgttgttcgatagccacatgttctcatctacgaggtcgagagcagcatgagctatgaactggttcagatgacgatggtcgtctttggattctgccttcccagctggcaaaaactccatttcaaaaactggattatcatggtggccaacaattacaaagtagaagctcccagacatggtcttcaatatatggctcctgcagtgggaggccgacaacggagaacgcaatgtcagtttccgcggaagagacccgcgccccgaacctccgctctcgacgaattcgagctcggccgatttggcctgatnnnnnnnnnnnnnnnnnnnnnnnnnnnnnnnnnnnnncgccgccaccgcgtaaacccggtccccatatgagtgtatacat

SEQ ID NO: 446900 - DNA, 938 bp, Homo Sapiens
  misc_feature (200)..(209): n is a, c, g, or t
cacaattctcatttattggtgatatggcagctgcaggaagtctgaattctgagagttggttgtacataacctcaggaatttattcttctgtgggcttacatgattacgacagagatgcttaccctttgaaatcacatataacgatggtgctatacaaacatcacaaatatttggtgtctgagtcttaacaaatattatgnnnnnnnnnnaatcacaaagagactagattaacaggcagtgtaaatcacatatatcttaagattttaaaaatacattttatacaataggtttctaatttcttcactagcattttattttggtgtgttttgtcttcatacttatagtcctaaaggaaactatgaatctctggctcatgccatgaaagtcagtaagattgatatttccccacaggaatatggctgagtgtacattgaatcacagagtcaacaaagtaacatctaatttacaacagattacttttaaaattcaaataaaatctaattattttaaacgacatcagtttgaacaaaattataggagtcaaaatttttatttacaaaacatttgagtatatttgaaatggctagttcttgctaactgcacaacttaaatattcttggtgcacatagtctgtcaaccttctgtacaacattgttagactgctcagttaacttacatggaatggttaggtaggtgggaaaattatatggcaattttcatccattcaaagtgcttgaaagggaatgttttgatgcttttcatattagagaagatctgtcattaatgttgggtgcctttaatttgaaaagattagctaaaatttcccaaaatgtaatttagtgcagtataagaattataggaaagattgataaatttatcatcaaatgctggaattcctaatctagcattatgcagttgatccaagtcattgtaccctc

SEQ ID NO: 446901 - DNA, 414 bp, Homo Sapiens
ttttttttggtctcaagcgcaaaatatattttagttcacaatttattctccagcccttcactctttttggaaaagtgcttaaagttctttatgcccctgaagctgtctgtctcctaggaccaattcatactacaggctttacatggaattttcatgaactcctcagattatgtatatcagtctttatcctctcacaccaactttgctggatctctaattagaaacatttttaaaccttactttaaaaatgcagaatgctttcttattacctctgaaatatggcccaaactctataccctattttttagggcttttcataacaggatccctgctttatacgtctccatctgccactggctttcctctctgggttccttgaatgcacaaaaatatctttgcttgattggcgcatgt

SEQ ID NO: 446902 - DNA, 882 bp, Homo Sapiens
  misc_feature (167)..(176): n is a, c, g, or t
aatttctgcccagttacaacaacgaaatgggaaaccacaattaaaattcacaaaccatggcatgaaaaacaacacgcaccccatcaggaattacaccaaaccccttttcctttttattcattcaaaagagagtccaatacacaagtgtcaaatatgagcactgtcannnnnnnnnncttagaagggggaaaaacatttattttggcagtgctttgacaattccaggaagtggttttgataccacaagttgcaggaatagaaaccctaacaaacttggagggcatttgtttgagaggcaagggacgccttgcttagaaaacattcctcttgtgcttagtgaatcacctatcgcctcggtgggctgctgtgtctttccaggtgctgaaagagaaaacggaatttcttgcatagacagctgaagagtcctgtagaggagagtgatttttgtatctccaaccctcctcccgacttgaaacaaattctcaagcttctctggagcatcttttggtcacatgaccctcgatcatggtaacccttttgctaagacacatgtgacaccaaggtttcctctgacactgcttctctaaggttcagatgacagcataaaacatcactggtcaaaaatattagatattaagaatgtgggcgtttatgttcgtaacagcaaatactttgtagggtgtgtcacccaaaggagcatttttgtcatttaatatggtccccggggagttagcccaaaatcatacaaataagcctttttctaaagacaggtcaaagttggttaatttaacagttgaggaaccgtctcatgccaattaaaaaattcttacttcccaactattcaatggtccaaaaagcaattaaatgtgaccattcagtttt

SEQ ID NO: 446903 - DNA, 445 bp, Homo Sapiens
ttttttttggagcaaggaaagggactttatttcggagagccagcaaaccaagaagatggtggactaatgtcctaaagaaccgtcttaaaattatgcgggctttgcttgtcttttatgtttaggtcgggggaaaggaaggggctgacaaccgcagacatctggacaccagcaagggtccaggggaggtttgcagaacttctttgtccttggctaacagtctgtcatgtgacaatagccaaacctcctcattcctataaacctttaacaaaaacagttaggctgtttacatggcttcccctttaatcccagagttagttttgcaaacgggcatgattcctgtttttgcgttttatctcagtggctcttaaagttattcctaggcctagggtgcagggaatagggtaaagggcccctttaaataaaaaatgggagttagttatgttta

SEQ ID NO: 446904 - DNA, 506 bp, Homo Sapiens
ttttttggagcaaggaaagggactttatttcggagagccagcaaaccaagaagatggtggactaatgtcctaaagaaccgtcttaaaattatgcgggctttgccttgtcttttatgtttaggtcgggggaaaggaaggggctgacaaccgcagacatttggacaccagcaagggtccaggggaggtttgcagaacttctttgtccttggctaacagtctgtcatgtgacaatagccaaacctcctcattcctataaacctttaacaaaaacagttagctgtttacatgcttcccctttaatcccagagttagttttgcaaacggcatgattcctgtttttgcgttttatctcagtgctctaaagttatcctagcctaggtgcaggaataggtaaaggccccttaaataaaaatggagttagttatgttagttcttctgctgtttcatggttacaagacacagaagagaacccttgcatcaaaacaggatgagattaggttgttgtt

SEQ ID NO: 446905 - DNA, 2246 bp, Homo Sapiens
taggaacagttgctttgccagttacaccagtggtcatacctgggcaagtttctaccccagtcagcactactacatcaggagtgaaacctggaactgctccctgcaagccacctctaactaaggctccggtgctgccagtgggtactgaacttccagcaggtactctacccagcgagcagctgccaccttttgcaggaccttctctaacccagtcccagcaacctctagaggatcttgatgctcaattgagaaggacacttagtccagagattatcacagtgacttctgcggttggtcctgtgtccatggcggctccaacagcaatcacagaagcaggaacacagcctcagaagggtgtttctcaagtcaaagaaggccctgtcctagcaactagttcaggagctggtgtttttaagatgggacgatttcaggtttctgttgcagcagacggtgcccagaaagagggtaaaaataagtcagaagatgcaaagtctgttcattttgaatccagcacctcagagtcctcagtgctatcaagtagtagtccagagagtaccttggtgaaaccagagccgaatggcataaccatccctggtatctcttcagatgtgccagagagtgcccacaaaactactgcctcagaggcaaagtcagacactgggcagcctaccaaggttggacgttttcaggtgacaactacagcaaacaaagtgggtcgtttctctgtatcaaaaactgaggacaagatcactgacacaaagaaagaaggaccagtggcatctcctccttttatggatttggaacaagctgttcttcctgctgtgataccaaagaaagagaagcctgaactgtcagagccttcacatctaaatgggccgtcttctgacccggaggccgcttttttaagtagggatgtggatgatggttccggtagtccacactcgccccatcagctgagctcaaagagccttcctagccagaatctaagtcaaagccttagtaattcatttaactcctcttacatgagtagcgacaatgagtcagatatcgaagatgaagacttaaagttagagctgcgacgactacgagataaacatctcaaagagattcaggacctgcagagtcgccagaagcatgaaattgaatctttgtataccaaactgggcaaggtgccccctgctgttattattcccccagctgctcccctttcagggagaagacgacgacccactaaaagcaaaggcagcaaatctagtcgaagcagttccttggggaataaaagcccccagctttcaggtaacctgtctggtcagagtgcagcttcagtcttgcacccccagcagaccctccaccctcctggcaacatcccagagtccgggcagaatcagctgttacagccccttaagccatctccctccagtgacaacctttattcagccttcaccagtgatggtgccatttcagtaccaagcctttttgttccaggtcaaggaaccagcagcacaaacactgttggggcaacagtgaacagccaagccgcccaagctcagcctcctgccatgacgtccagcaggaagggcacattcacagatgacttgcacaagttggtagacaattgggcccgagatgccatgaatctctcaggcaggagaggaagcaaagggcacatgaattatgagggccctggaatggcaaggaagttctctgcacctgggcaactgtgcatctccatgacctcgaacctgggtggctctgcccccatctctgcagcatcagctacctctctaggtcacttcaccaagtctatgtgccccccacagcagtatggctttccagctaccccatttggcgctcaatggagtgggacgggtggcccagcaaccacagccacttggccagtttcaacctgtgggaactgcctccttgcagaatttcaacatcaagcaatttgcagaaatccatcagcaaccccccaggctccaacctgcggaccacttagacctagagacattaactgaatagatctgggggcaggagatggaatgctgagggggtgggtgggggtgggacgtagcctatatactaactactagttgctgcatttaactggttatttctttgaccagagggggaatgtaattaatacttgcattgagcccctcagaattggagaggtctccccgatccagttatggactgcgcagaggcaggaagaacagttattgtcaaggggcagcttcagacaa

SEQ ID NO: 446906 - DNA, 582 bp, Homo Sapiens
ttttgcacaagtcagtaaaaactctttattcattccttcatgtgacagttggccttgagtagttacaaagacagagcagttcctgcctctcaaaattctaagcagacattccagagctcacagatcagtgtcccaccagctgctaccctggaagcttcagggagatggggagcctggagtaggggggtgctgcaggaacccccggcaggcagtggggccaggcttcacaggcacccagggctgagtgcgaaatggcagggggcaagcaggcaaacagtgggatggtcttgagggtgtggggtgagggcaggaagcccacggtagttcctgacttggagtcgagggagacagaacggaggggcccgagctgaagacagagtctgagggaactggagaggctagaagccagcactcagcttcccaggagaccccaactattgccgggccaagtgtccagggagaacgtcgggtatccaaatgtttcagtggaagattccttttccaaacatgagctggttctttgggtttttaattataaacataatacatggtcaaggttaaaaacattttccaagcaccaca

SEQ ID NO: 446907 - DNA, 457 bp, Homo Sapiens
gtgggcggccacttgacatcctctttgagtaaagaatagggtgtcatgtgggggccagactgcactgcatctgtgaggctcaggcttggcaacatcctctgcagctcttcctcttcttcctcctcctctcctgcaccaaaagagtaatcctcagggggctgggagtctgtgggagcagggccattggagcagacctcgtagatcttgtagggctgaggtggcatgtcccggggcccgtcgtagatgaggcggaagtcccggctcttgttaagggcacagcgcaggttggccttccacttggccggatcggcttcatccacgccttcggtgtatttccctgtctccttggcccaggccttgaagatggtgttatctccgtcctggctgggaccatgccttgtggcatgcctccaggggatgccgaataatttcttttccccgttgacccattgaagcc

SEQ ID NO: 446908 - DNA, 1115 bp, Homo Sapiens
  misc_feature (863)..(863): n is a, c, g, or t
  misc_feature (881)..(881): n is a, c, g, or t
  misc_feature (897)..(941): n is a, c, g, or t
ggaccggtccggaattttcgggatggcgcagcctgggcagagctctgcttggtcccgccgcccggccggtgctccctggcgcagccacgcaggcgcaccgcagacagacccctctgccatgaaccagtccatcccagtggctcccaccccaccccgccgcgtgcggctgaagccctggctggtggcccaggtgaacagctgccagtacccagggcttcaatgggtcaacgcgggaaaagaaattattctgcatcccctggaggcatgccacaaggcatggtcccagccaggacggagataacaccatcttcaatggcctgggccaaggagacagggaaatacaccgaaggcgtggatgaagccgatccggccaagtggaaggccaacctgcgctgtgcccttaacaagagccgggacttccgcctcatctacgacgggccccgggacatgccacctcagccctacaagatctacgaggtctgctccaatggccctgctcccacagactcccagccccctgaggattactcttttggtgcaggagaggaggaggaagaacgaggaagagctgcagaggactgttgccaagcctgagcctcacaggttggggccgggaggtggtggttgggaggtctagttattacaagagaagctataggtaccataggtacctggaagggggctagatggggaggctagtggtggcccagggctgggaggaggtgtgcctgcgaagcagttcgtggaggtggcactgacagccgtccacacgcactctctgtagatgcagtgcagtctggcccccacatgacaccctattctttactcaaagaagatgtcaagtgggccgcccactctgcagncgcccactctgaagccgncccgggggtgctgggnnnnnnnnnnnnnnnnnnnnnnnnnnnnnnnnnnnnnnnnnnnnnggggaaccctggacgggtttccgggaacctccccactttgggggcccaggaaaccctggggccccctccgcggtatacccctgatttcttggcaaggctaaataacttcctttctcaaaatttgttaaaacggggccccaaaaggccggccttttggtacccccctaggaacac

SEQ ID NO: 446909 - DNA, 324 bp, Homo Sapiens
  misc_feature (163)..(163): n is a, c, g, or t
  misc_feature (259)..(259): n is a, c, g, or t
atatatgtgtacacaatttattcatgggataaattggacagaatcagcattttgtgccatgaaatttttccttgagtatattccttgtatgggaaagcatcacattcttttcaagagcattcttcaatccttttctcttatgtaatagggtagtggtggtggnggagaagaccagatcttcagggaaaattagaagtattaaaaggggagtcagcctgggtttgggttggctctagcccaaggacccttccatatgctntcaagtctagacctagaagagactgctatggcaaacattagtatgaccattgggtgccctctcta

SEQ ID NO: 446910 - DNA, 530 bp, Homo Sapiens
gtacaaaactttgaattttttatttgtgaaattaaaaatatggtattatatatatataaacttctattcctctataaatatagatgattttgtgatagtgaacagaataaatgtataccaaattcaaagaccaatatcattttagcgtatgacagacatagataaatttaggtcctaagtaccggcattttgataaattcttaaagtttaaaacaatacaatcaggaggattgcttttctcctcttcttcacagagaactaaagtgaatatttttaaatggctttgaaagatttacatttgacacatttctgtaaatccaaaagaggagcacacaggatttaatgcagtagacctgcacacattttccctttagcatgcatgcccatattttgtttatttcaggcgctatctccccgtcaattattccaccttctttacctcctgaaatcttaccaggttattattggtggtgtgaattgttcccccctcagaatgtgctgctgaataataatcgtaataaaatgttgcc

SEQ ID NO: 446911 - DNA, 520 bp, Homo Sapiens
  misc_feature (394)..(394): n is a, c, g, or t
  misc_feature (440)..(440): n is a, c, g, or t
taatggctaattcattttaattagtgatttttagcaaataacatggcatacttacattccatgggcagttttccccaaatggtagcaagagtttaacatacatgtataattcaatttcatatcctcccataattttttttataaagaataagttttaaactcttaaaacatttgataagaacagccccctttaaaatgttaaaatgaagaaaatagctaattcacttgccttgctaaataaaatggacaccatgaagaaatccagtaagaagctctctgaaatatctttgtagtcaaagtggaaaaagatgacagtgaagctcaagttaataaactggtaaaccgggttgcagaatgatgtccgcaacagcttcatgccagcaatgatcatcanaaaaatgtccccgtgggtaccaagtcctcggtgattgcttattaanaatgcatcaatagtgaagggccttcaaattagcgctgggttccaagagtatttttcaaacactgaaaccaaccatagatt

SEQ ID NO: 446912 - DNA, 407 bp, Homo Sapiens
accataattgactttttatttaaaaaattacacggagcaatttccagcttatctttttttataaaagtactgcctatatcaaacattttatatcacgttaattccattgaagagctgcctttttctgttaaggtactgattccaattgatgggatacatgcccttaatacagaaagtttccattatttattcaaatatcaaaattaagattattgagaagtttattgctttatggctgggcaagatgctactagcacattttaggtaaataatattctttattaaaaactatgaggtcattctgtttaaaactttcaagataattcacggaaaacagatttatctattcaaattaaacattaaagggccaggctactagctatagacatttatatgtgaagcagctc

SEQ ID NO: 446913 - DNA, 382 bp, Homo Sapiens
aaaggagtgagccaccatgtccagtctctttttcttatatgcaatactcattatagagctagttgtgttttcctgcaattttcttgatacccaaaatgagagcaagtttaacttaaaaatgctgcagggtttatgcaatgcctatcaatgttacaattctgacccactctccatatttattactctcagtattctatctgtatatttccttatcctattttaaactgttttcattttcttgtttaattgtatatgcatctatgtatttatttccttgaaaactacacttgcataaggtagttttaaaaattaatgaccactggttctacactatgcaaaatatgcaatggtactgatctctatagcagttatctacaaacta

SEQ ID NO: 446914 - DNA, 754 bp, Homo Sapiens
  misc_feature (46)..(58): n is a, c, g, or t
aaactcatatctgtttattctccccaaatcaggggacacaaaggcnnnnnnnnnnnnnctgatgagtgggtaatcctaaaataagcaggaaatgcctgtggctcagcctaactcaaggtgagacgaagctggagctgggagctcgaaagtgtcccccagctccctcctcactttgcctgtaacgccacctctgcagaaggtaaagtagaattggtagctgtgtcactggtttgggttgagtcctcggtcagggccctctccagactggcgggaagggcgtggatcagcctctcccggaagtcctggcccatgaagacatagagcatggggttgaggcagctgttgaagaaggccagggcacttgtcacatccactgcaataccaatttctttgtacatgccttgcaataactcactgattctgactgtggctataagggccactcatctgatatggggaccatctatagaaaaaaggctgctgggacatatgataggacccgtaagggacgactgttacttaatcactctttgcttgtggatcttggtggcaataagcccataactgacagcaaccgatggacatgggtgcgctgaagccaatgatgaaccggattatgcctttcaccgtcaacatggcaacggccacctttatcctctctttagggtcgttggtcccagggcaaaagataaagtgcaggctactgaccccgtattacaggtactgtgatacaccaatgattactggcaatgtg

SEQ ID NO: 446915 - DNA, 1308 bp, Homo Sapiens
tcctaagtagcgaggcctgggtggcgaattcggcacgaggggagcgttcggcgggcggcggccgggcggcccaggggctgccgcgggactcggggcgcagccgagtggctgcaggggtggagtgggccggacgagccgcggggcccgggtgccgcgggttcgaggccgggccccgcgcgaggaggccgcgccaccccgggggagctgcccggcagcgagtttgccccgctgccgaaagaaggcgggagccggcaggggccttcgaaaccccctggcaacccaggcccggagtccttggggagcggctgtttcctgggacgccctcccggacacccccgctgcagggttacggttctgggcccccggcagaaggctcctccgggtgacccccggcggggccctgcgagccgcgggagccgaccccggggcctcgagccgggaggaagggggcttccggaggcggagggccgggggccgagggagccgggcctctcggacgcggggcagggcactggcccgggctggagacggactctgggaccctcggctgcgggggtctcagcgacctgccccgcggcaagcgcggccgcggagtggcctaccggggaccctcccccagagggaccggtccggggcggggagatgaacggcttcagcacggaggaggacagccgcgaagggccccccgccgccccagctgccgccgccccgggctacggccagagctgctgcctcatcgaggacggcgagcgctgcgtccggcccgcgggcaacgcctccttcagcaagagggtccagaagagcatctcgcagaagaaactcaagctggacatcgacaagagcgtaaggcacctatatatctgtgattttcacaaaaatttcatccagagtgtccgaaataaaaggaagaggaagacaagtgacgatggcggagattctcccgagcacgacactgacattcctgaggttgatctgttccagctgcaggtgaacaccctacgacgttataaacgacactacaagttgcagaccagaccaggcttcaataaggcccagttagcagaaactgtgagtcgacacttcaggaacatacctgtgaatgaaaaagagacccttgcctacttcatctacatggtgaagagtaacaagagtagactggaccagacatcggagggtggcaagcagcttgagtgaggatgaagcacatcttaaaggaatgaagtgtaatgcttgatgcacaggtgatatctactacatttaagcccataaagactgttaaatattattgtaaataaaaaagtttgaatg

SEQ ID NO: 446916 - DNA, 911 bp, Homo Sapiens
  misc_feature (60)..(154): n is a, c, g, or t
  misc_feature (257)..(311): n is a, c, g, or t
ccggaattcccgggattgacagaagacgtgcggagggagacgcagagacagaggagaggnnnnnnnnnnnnnnnnnnnnnnnnnnnnnnnnnnnnnnnnnnnnnnnnnnnnnnnnnnnnnnnnnnnnnnnnnnnnnnnnnnnnnnnnnnnnnnngctccccatggaagccagctgtgccccaggaggagcaggaggaggtggagtcggctgaatgcccacggtgcgcccggggcccctgagcccatcccgctcctannnnnnnnnnnnnnnnnnnnnnnnnnnnnnnnnnnnnnnnnnnnnnnnnnnnnnnctccgtccgcccctcccccggggcttcgccccggacctgccccccgcccgtttgccagcgctcaggcaggagctctggactgggcgcgccgccgccctggagtgagggaagcccagtggaagggggtcccgggagccggctgcgatggacgccgtcttggaacccttcccggccgacaggctgttccccggatccagcttcctggacttgggggatctgaacgagtcggacttcctcaacaatgcgcactttcctgagcacctggaccactttacggagaacatggaggacttctccaatgacctgttcagcagcttctttgatgaccctgtgctggatgagaagagccctctattggacatggaactggactcccctacgccaggcatccaggcggagcacagctactccctgagcggcgactcagcgccccagagcccccttgtgcccatcaagatggaggacaccacccaagatgcagagcatggagcatgggcgctgggacacaaactgtgctccatcatggtgaagcaggagcagagcccggagctgcccgtgagaccctctggctgccccctcggccatggctgccgcggccgc

SEQ ID NO: 446917 - DNA, 265 bp, Homo Sapiens
tttctattgaagggattatttatttgcagctcatcttaagtgacaaaattccatacagaagactataacagaaatcatatttaatatattaaaattaatacttcaaatatctttcacattaagatgattatctattgtgtaaatctttcctaggtatgtgtgtctgtttcttgatgtgtaaaccaaaactctgaaatattctcttgatctaactttgacttttaaaaactgacattgtattggaatttacataattctcaatcag

SEQ ID NO: 446918 - DNA, 516 bp, Homo Sapiens
tccggtgtggtgatgtatttattcataatatattttcagaacacattaataatggagaataacacttattcatatactgaatataacttttcctggagcactctagagcttgtttggagttggagaatactgccaggcttttcctaatctctttggtctttggaagtgggcagggtttctcaaaccaagtgtcttccatgggccattggcaaaggcttcccttcatcagcttggaggggcagaaagaccatggcttcagcacttccattttggaaagaagtaacaaaaaagtgaattaatgagcaatcggaaagactcaaagcattttgtactccacagttcatttcttcacacaaacgtccattactgcagcgggcatgaaaaccggcagggtgttaggctcatggcctgaagagaagtcacatcaccagccgatgttttcatgcaaaaggcaatcgtgatgattcagaacctggttctgaatttctccaggtgtgctcgtgagctgaaggtcat

SEQ ID NO: 446919 - DNA, 464 bp, Homo Sapiens
  misc_feature (411)..(411): n is a, c, g, or t
  misc_feature (423)..(423): n is a, c, g, or t
  misc_feature (450)..(450): n is a, c, g, or t
ggagtagtgtccctaacatttatttcaggtggtgactaggagggttgaggtgtagatatacttcctctcttctcgtggagccttactgaagacaggatcgccgttcttgtgtttatcagctgagaagggcagtctcgccatcttaaagacctgccctccagccccttcaaacgccacacttcccaggaagcactctctccataagtgttcagagaaccctgaccagagaagctcccgcacttcttatatgaactccgattgtgctgagggggaggggaggagtacacaaagcaggaggtgggtggggaggctggggtcacacagcccagggaggggcaaccacccgggcgaggtgctccgtcagcacaggtttccctcctccctcccttccccccagtaacaccagggttntgaccgggaccngtcccaccgtagagtttcagcggcatnaagtccaaggacag

SEQ ID NO: 446920 - DNA, 801 bp, Homo Sapiens
  misc_feature (695)..(695): n is a, c, g, or t
  misc_feature (754)..(755): n is a, c, g, or t
gatttgctaattgctttattcagaagagaccccccggagtacagcttctttggttaagcacggagttgaggtggaggagagcagtagaaggctggaaatctgctggatgtctcattctgggtgggtatagaagggctcctgcctggcctctaggatgggtgagggatgctttctgcatggccaaggaacttggttagggtagggagggagggtatgagagagggaaattcagcactgggtggaaggtttccagggaagaggggactcagcaacgaggggtgctccctctgcagtgtttattggaatagtactggtactttttattgtaggtcgtcttgtttctagcaaaacaggtggcagcagccttatcacactcacacagttgacttctgcaggagtcctgttttgcacaggtgattctgctccccgagttgctaaacttgtagctcagaaatttggtgccacatccacgtttctccagacgtttgtagcaacagtcatgagtgacacagcagcgatccgttgcatccttgggggatcctctgccacccacgccacagtggcagccgtagaagccataactgagtgcggcttcctttcctgtggtcaacttgatcattctgtggaagttcaccaaattcccatgggcctgcagtaggccaaagatcatgatcactgccaacagtaggagggtnttcatggtaagagttcttgggtgacaaatgcagatggactggcctagctcctctgctgnntggtctcaacttctgccccggccgtcgctcccctgctcctcctcgg

SEQ ID NO: 446921 - DNA, 1142 bp, Homo Sapiens
  misc_feature (393)..(436): n is a, c, g, or t
  misc_feature (544)..(553): n is a, c, g, or t
gtgtggggtgcgatgagaggatagtgccacacaagcacgcggctggtggcggataagagtggtgacgcgccccgcacgtgttcttctctgcttctcgagagtttgaacggcgccgctctgtgttgatgagccccccgactggtttttgggctctctatctatgtcatgtgtatcaaagaggtgtgggaggttgcgcatgcgtatacccccccaacagggggggagaatagtgtcgttatatataagaagaaggcggtttttcttgtgagtggggggcccacgagaataggtgaccgccaccccccacaagggcggggaacggctctggtgggcgggggggtaggtcgttgcgtgtggcgcggcggcgggggaaagtcgacatgagtggcggtnnnnnnnnnnnnnnnnnnnnnnnnnnnnnnnnnnnnnnnnnnnntgctggtatatatggctccccggcggcgggccgagcgtgcgtttggaggttgggccccgggggttaggagtaggtgaagggtgttattttttttggagggcaaagacnnnnnnnnnnaattggacttggctttgacgagtactgacaaaccctgcagacactagtacaatttgatcgtaaacaaagtccttgccagcatagtccagcaaattctgataaaacacatacaaaagttaaaagacagctcgatttcatcttcctcccaacacctgcaactgtttccagattttctgtgtagtcttctttgtgctttcagttcagtaaaaattagaaaggataacaaacttgtaaagtcagatacctaattgtacaaaattgactagaccatggagaagggggaagcatcattttacaaaatattgttaagatcaccagcattaatttaaattattttcctttctggacttccaagtccacttggcaattttacttaggaaaatatcatgcgtaaatagaaaaccagtattctaaacacattttctttatgtgacatattcttgtgcgtctatgtaatgagaatttttaaaaaattgttttcttcctgctgtcaaaacttaggcattaaaaataagggactgtaaacctagttgacttacccataaaaaggagtaagttcggagaatgagagaaggaccaatagaatcta

SEQ ID NO: 446922 - DNA, 1031 bp, Homo Sapiens
ggtagaaaccttactttttgtttaatttgttttgccaaacaaacacagtgaaaactttagtctgactaattgtacagaaaatagaatttgtaaccagtagcaaacaaaacaggataaacctaagtccctggcaagctggatctccatcagcaggtcatccagatccccttgtaaatggcctcctgggaaaataagtcctaggaggcagaggcacagatttaccagtccccatcagaatcacaggctgcacctgggaaggaaaagcatgaaaaggaggagaactgatgttacttgaatctcttatcactacacacattagagttgtctgactgctgaccaaccttaaggtatggttttcccaaacctatagtccctggacatcccacctgcatccctagagggtaagtttcaagttcagtggttctgaagcctctgcttaaccagaatctgcaacaataactggggaggaagggtagacaaagtcataattgctggtgtcaccagggcagagtctaaggccccagcttccacttcaggaggaaacaattgaggatgccaggtcaccagcaagagagtccagctgccttaagcctcagtactgtcaaccagtgcccaggagtatagaggagttcaacaatggcctgcggtcccctggctggatggggtctgggagtccagcaggctgccggggcaccagttcacattccgtgcttcttgcggatgacagccatggcaagcagccgatccttctcacgcagttcttcgcgcagcttggcctcagtgagacgcaggtggcgaatgctgcctttcatctctttcatcttcacttccatcagagccaggatgtcccgctgctcattcagcttgcgcaggagctcctcctccgtggtgcctgacgacaaggagtacgaatggtcggagccagtatcagggaagccctcttcccctaccaccaccaactgggggcccatagggcactcggcagcctccagccctgcggtagcagcctgtaactccgacgcggcggccgc

SEQ ID NO: 446923 - DNA, 632 bp, Homo Sapiens
  misc_feature (488)..(496): n is a, c, g, or t
agagccatatttcaactttacatgtccaaggagcatgtctcagaaggcttgaagagaggaacactcatccagggtgtattgagaattaatccagagaagtttcatgaagccttcattccttccccggatggtgatcgagacatttttattgatggggttgttgctcgtaatagagccttaaatggggatctggtggtcgtgaaaatgcttcccgaggagcattggaaggtagtttaaccagagagcaatgacaaagaaacagaatctgcgtatgaatcatatatccccgaggagctttgtggaccccatctcccgcaacagtccttgtatagctataatgtcagtcctgatgtcattgtagaggctcagtttgatggcaggtactcagaagatggacatggcatcacccacaatgtgctggttgatggtgttaagacactttcagtttctgtttgtgacaaaggggagtactagaatattgttttaannnnnnnnnaagagcattgattaagtattggaattccctctctgttgcagagaaaacaacccaatgccattaatatagtcctaaaaatcttgaaatggggcctgtatttaccttatagcgccccctctaccccctttagagcaaa

SEQ ID NO: 446924 - DNA, 611 bp, Homo Sapiens
atcttaattattttgcttcttccaaggacttgtcattatcagctcgaattttatttctcagacgttcttcctcttccctcctctcctgataggtaatatgctgcaagtaggcctccaataaatcgaatgttgacttcaaacacagacacctctgaattcacactgaaatcaaggttgtcttcaatccatctttgcccatctaggaattcatcatgaagtcccatgatataaagggtatccaaagcatctactatggtagcacccatttgtgaacttccaaatatgttaggggagtgtcctttccttgcaataggtctgagttcattatgtccccacccatatgtcctatagttatcccaagcgtgtttcatcatctctttaattttttcccttttctctcttatgtcattatcttctgggtctccaccacgtattcctacaaggttgggaatagggactggtggcagtggcttgttctcttttatcttcatttcttggactaccttatttttctctgtctgaatttctgctcgaatttcctctcttgactttcttaatttttcttttgcttcttccaaggccttctcatggatctgaaatgagccgtggat

SEQ ID NO: 446925 - DNA, 352 bp, Homo Sapiens
  misc_feature (270)..(270): n is a, c, g, or t
gaatatatcaaacttgatttttattagaatgcggctgtttcttcacattagtaaagcaaaaagcaagagcccggttttatatacacttcatgttttgttcttttgctaacaccaagtctgctttatctgaattttccatttcatgagtatcatcaattctccactgctgtctgcatagccaattatttttttcaggatcaaggtctcttggtttgtctgcagtatctctttccttgattttatgttatccaactgtcaggtaaatatttncttcttgtatcatctttttctttaacagcttttttgagaattaaatgttccaagtaactcttgacaagcttaagtttcttca

SEQ ID NO: 446926 - DNA, 328 bp, Homo Sapiens
tgttttgttttgttttatttattcacttacaggaaatataaacacaaattctaaaagtgtgaagttgcaaacgacaggcaagttcacatttcaattaatgtgaactgaacaagagtttaaggtgatttttaaataccttccacgttagaaaatccttctttcttaaataagttttcatataaagccaagtccttgcaacttaacgacggttttacagtcttaagtgattttagaaagtgctcttgtttcactgtagttgcgtctagtccattttcttgcagagccagcaaagcagcttctgtgcagaggtttctaagatcagctccag

SEQ ID NO: 446927 - DNA, 595 bp, Homo Sapiens
  misc_feature (32)..(32): n is a, c, g, or t
tctcattaacaaatttctaaatcatacttctnctttcatgtgaaatgagattagatgtggccattaaaatcagctcttagcagacattggaagaaaaagtatagctttctgcccaggtcctgttttggatccaagtttatactgcccagttcgtttcagtgccacataccaactggtgtatttccttgaccggtaagtattgtagttattagattccaatcgttcaaaaaagatacactcatccgtaacacatttagaagccagtaatcttccatcttccttcatagccaggtaacggttagcacacactcctttgatagacacaactcctctctcttctgcttgaagttgtagcttgatgtgagggtcgctcttctcccggaccccgtcaagtcggccgtgggggtgtatgcgcaggaagtagcccccgtttttgcagttcagccgcttggggtccttgaagtggccgggcgggaaggcgccgctgccgccatcgtcgggcaaggcgggcagcgtggtgatgctcccggctgccatggtccctgcggggcccggccgggatccgcgatccgctggagccgcgcggggagcgcgg

SEQ ID NO: 446928 - DNA, 370 bp, Homo Sapiens
tgctgggattacaagcgtgagccactgcaccgggccacagaagaaagtacttctcccccctgctctccgaccagaccccttgacagggcacaccggtgcattcagaagacactgatgggcaacccccagcctgctaattccccagattgcaacaggctgggcttcaagtggcagctgcttttgtctatgtgggactcaatgccctgacattgttggccaaagccaaagttaggcctggccagatgccccagcccttagcagggaaacagctaacgggacactaatggggcggtgaaaggggaacagactggaagcccagcttcatttcctgtgtcttttttccctacattataaatgtctctttaatgtc

SEQ ID NO: 446929 - DNA, 626 bp, Homo Sapiens
  misc_feature (550)..(562): n is a, c, g, or t
ttttttttatctcaaaatgtgtatttaatggccattccatcaaaataaagcagaatcccatttcaaaactattatatgtatatatatttttaaggtgcattttcaagttttatttgggtttcatttcttcttggcttgcctgaggtgttcttgcaggtacaattaacacaaaatgttctgagggtagtagcttttcatgcactgaagaatgagatcctaacaacattgcacatcttggatacattagaaattttaaaagccatgtgtaatttcagaaaacttaataccgtcatgaaagacattttcaacacaaaatttaggcactctatactttggaatagccataaaatattccaacaagagttaatgcactttgtgattacatctactcaaagataattctcaattaaaatctatacttattaaataacattttaaattagagcccattaaattttgataattactgtgaaatatttgcagcattgtgttgtagttaaataatgctgaactacttctattactgactctagtactcatccttcatggnnnnnnnnnnnnncgagacagagtcttgctctgtcaacccaggctggagtggagtggacgaacttggctcactgcaa

SEQ ID NO: 446930 - DNA, 780 bp, Homo Sapiens
  misc_feature (651)..(651): n is a, c, g, or t
  misc_feature (711)..(711): n is a, c, g, or t
  misc_feature (720)..(720): n is a, c, g, or t
  misc_feature (757)..(757): n is a, c, g, or t
gtcaagtgtttgtgttgctatatacaatatgcaaactgaatgaagtcaacagcctccgcttagatagacatggcttttgttcaggctagtcctgtcatgatgtgacatatggagacgtaggttcaagaggaatttccaagctggtataaaaaaatcaggtcgggtgaagtaaactcaatttttattcttctatataatacatggatatatggataaattttcctttaaagagtttgcaaccctgaggcaatgtccttgggtacgtaacgtataaagcaacagcaaatgaaatctgaatgcgggaatgacaactggacttcgaaacataatttaatattcgtgaaattgcacacataccaatagtattctatgtctcgtctagcctcttaatccaactatctcaactgccttgcagtttgcctaccagacaccccaactctctacatacattctgtcatgtaaatgctgaccttctgactgaaatttaataaattaacatgggatttacatcaagggatttttgtctggtgagtgcattgccagaaagcatgcctagttcctgaccacagcatctgcccacataaaaactttggcccccacaggggatgagatggcatctgactgcagtaacctcgaggtcctgagggtccntgggatccaccaggagcaagtttttcatctaatctgagggcgcttaagggtatggcagangaagggaangcatggctggttagaagagatggaacgtcacagcacngggttacagaaccgtgaatctga

SEQ ID NO: 446931 - DNA, 655 bp, Homo Sapiens
  misc_feature (97)..(105): n is a, c, g, or t
tttgggaaatacaggattgatttatttgggaactaagtttacacattatatgtctcaatataaaacaaaagctatggctttagagtttaacaggttnnnnnnnnntaggaggaaaggcaaaacaaatgtaagaatagtttttaatccattttctcacaagcagtgcacagtgggccggcaggtacttaagtaccttatcctaatcctggatgtgctcatacaggctgtcaatttgggtccgaaagtatttggaaagctctcctcgctttgctttcaatgttggtgtcaagagcccattttcaatggaaaatggctctggatgaagaaaaatggctttgacctgttcaaaagttttaaggccactttctttcccaattttctgcaagtcttctaaaatggcttcccttacaacttggttttggcacagttcctcaaaggagcccttcaccccaagcttggctgcaaatgagggaagtacatctgtgtcaggaaccaccactcctactaaggatgaccgtaagctctccccgtgtacaaaaatttgtaacactggttgactcctgttgtagatattttctatcttctctggtgcaatgtattctccttgggccagcttggaaaatgtctttttacggtcgatgaaccttagaattcc

SEQ ID NO: 446932 - DNA, 468 bp, Homo Sapiens
tttttaaacttcaatgtttttacaagtttatttaaacgactgaagaaaaacagtgctttatattgctgggattttgagaaggctagtttatgagatttggaccgtctcatgagttcaagcaaacacccttcaccatcatttccccaccagcagtttccaggcaggggcggcaaaattgttttcaccccattgtgtctatctctttccctagctccttcctcagccatatagagtgtggctccaggccttttatccccttttccatccctcactcctgatgtcctggatagagaattacaagtcagtaaactctgggctgggaaacactggctggtgctaccaagacactatgtaactgttgtccattcacaaagttttatctacactacatacagaatacattttcccctacattttaactgatgctcgctttagagcaactccctttgtttggacaagaaaggaatc

SEQ ID NO: 446933 - DNA, 663 bp, Homo Sapiens
ctgaatgaaagctaattccattcttttatttcctcataccacaaacatttcaatttatctgcctttttacaacctgatttacacaagcaaattgcaaacgaaaaccaggcattctttaatcatccaaaatgcatgtataaaatatagaacaaaccctagtatttaaacataaacagggttagctgaagcagctttattgcaatctcttcaagttagcatattacagtttaaatatttatgcctgtaaagatctgcataatctacaatacagagttatttcagaagcagttgacttaactagttgagaaaaaaaacaacaaacttcaacgcaaagctataataattatctgaaacttatttacaattaaacatttagggtcctgatttacaaaactcagtgcctttcatgatttattgatgagttttatagagaaagtaagcagtatgtagaatattccccaggtaaaatctggagtgaatggcttttagaggaaagtctatcagtatgcttaactaaaaactaaagagtgacaaaactgtatacagcagcaatcagaataacaggccacaagagaagaacgccatttttgacaatatcctttgtatgtataggaagaaaaatgattgccaccccccacccctgcctgcctgttgtagctcccc

SEQ ID NO: 446934 - DNA, 556 bp, Homo Sapiens
tttttaactttaacaaatgttattaaaagcagcaattaaaaaccatgaatctttttgaaggtgcagagggttataaggtcagttggcagtaatgcagctattatctggtatgaatgaaatgctggggtggggagtcagggtgacctcattaggccttgtgctatcttcccaggtggtgcagacaccccctccctccttttccctctccaggcccacagcctccccagagcccaggtagggaaggtccagatgtactataacaggattgctcatcccaggctatctcagaagtctggaaagcaggcctagaaggttgctgggctctctgaagccaggcaggaagctacaaattggatcccagttcccacagcacccctgggctaggggttggcttctcagctccccttccacctggccctagttggcccctgtggcagcagctgtggggctgaaaagggggaagaactgggtccaacgccagctcgtctatgcctgggctgtgccagggaagcagaggaaagtgggtgggctgtgcacaggaggtgaggtccccctt

SEQ ID NO: 446935 - DNA, 474 bp, Homo Sapiens
gcagcaggcctgcaggagctgtttttccattgctaggcctgaccccctctctacctgtgagcgttcagggggtccctgagaagccaaccccatagcccaggggtgctgtgggaactgggatccaatttgtagcttcctgcctggcttcagagagcccagcaaccttctaggcctgctttccagacttctgagatagcctgggatgagcaatcctgttacagtacatctggaccttccctacctgggctctggggaggctgtgggcctggagagggaaaaggagggagggggtgtctgcaccacctgggaagatagcacaaggcctaatgaggtcaccctgactccccaccccagcatttcattcataccagataatagctgcattactgccaactgaccttataaccctctgcaccttcaaaaagattcatggtttttaattgctgcttttaataacatttgttaaagttataa

SEQ ID NO: 446936 - DNA, 835 bp, Homo Sapiens
gaaataattataaattatcagaaagttgcaaacaaagcccagtggatttaggggcaagaaagtccagtggcaacttggtgaggatgatggcaattatccatctgaccccagaacccttgattctgagtgcctaatgttttccagagtcagcttttgtctagtggatggggcagaaagacagaggtgttggagttgagggtgttggaccaagagtgcaaatccagggccacaggtgacagtacagcggcaggaagtggaaatgagggaatgaaagggactctaggaagagccaagagggactgactgtgagaaggacaggaatgaggacagaaggagacagcagagtgtgtggcttccatggtgtggcatttctgggttcacagtggggcccaggagtgagtggctatagaagagagaaaaggaggccttcctggtggtgggggccataacactgagagatcggggttcagacacctgcggaaatcacccaggttgctggcagggtgtcaggtagaggtggacgctgagcctctgtggagttttcccagttacttcaacaccactcccaactttgctgcctaaagagcctgtttaatgttcttgtggttgacacctgccccaaaccctgaatggttcccccatggattctcaggaaatgtccaaacccctcaccttttcctttgaggtccttctatgatcacctgggatgggttatgtaaccaaagggctcttatgaagctggcctcagaaactatggaatcacgccccccatatatcatgaaattctctgttctttggcctccacttctctctgcatctcggcctcattttccca

SEQ ID NO: 446937 - DNA, 439 bp, Homo Sapiens
gcgtctttctcttgaaggaggattgctgtagacttctctagcttgaatattgcaacatagcatcttaggtctagatagggatgctaatgccagttgtagaagtgtgaaaaaagcaccttgtatgtagtaatgtattttatatctttgttttttcttttactgactgtttataacactcaattgacaatagatatgaactgtattttaaatcatactgttaaatattttccctcttttgttgggaagctcattttagtttaaccatgtttgttttgttggtagcttacctggaaggcagtgaccacttttttatattctcttaatgaaaccattcagcaggtatatgctgttgaggctggttatagaggttttctataataaatgttcaagtatttttgtatataactggttaattttaataagagataccattatgtgt

SEQ ID NO: 446938 - DNA, 765 bp, Homo Sapiens
ctttccccaggatgcaagactctcccctccactgtccgggacagcgttcgccctttagcggggaggtcattacagcctcatggcctctaccaaggccccagatcacaggatctcctgggccttggagcacctcacgctgggggaatcaatccctgagggactcagaatcttctccgtgcaacctggaaagttcatctcttgtttccttcagtcaaagaaagtccattgtacataacaaaacagcccccaaacagcccagtgccgacaccattgttcctttcacactttcctttgttgcatgcagttgggttcaaatgccaaatagtgattagaagacgaccattctgatctgtgtgtgatctggtcactatgtgactgcctttacggtttctctccatgtgctatatgaatgaagaatgcataccagtgttttaaaaggtatttttatgtgtttttaaacacttttttaaatgagcctgacacctgtgtttcagcatttggagacatccccatgttattcttttaagtgtataattactgatacttttttgtttgtttgtttaactaagttgtgtttaacttatgtgcagtctttataatgtatgtatgttattacagtttcaactatcatattttctttgattacatttataatttgatcttgctctgattataatgccagtgaatgttgctgaactctttgtatatgcaaattgcaagatttaaaccattctgatgcaaggataaacctttactttgactacc

SEQ ID NO: 446939 - DNA, 398 bp, Homo Sapiens
  misc_feature (252)..(252): n is a, c, g, or t
  misc_feature (331)..(331): n is a, c, g, or t
  misc_feature (383)..(383): n is a, c, g, or t
ggtagtcaaagtaaaggtttatccttgacatcagaatggtttaaatcttgcaatttgcatatacaaagagttcagcaacattcactggcattataatcagagcaagatcaaattataaatgtaatcaaagaaaatatgatagttgaaactgtaataacatacatacattataaaggcctgcacataagttaaacacaacttaggttaaacaaacaaacaaaaaagtatcagtaattatacacttaacaggantaacatggggggatgtctcccaaatggctggaaacacgggtgttccgggctcattttaaaaaaggtgtttttaaaaacnccttaaaaataccctttttaaaaccttggggtttggcattctttctttcctntgggccctggggggg

SEQ ID NO: 446940 - DNA, 699 bp, Homo Sapiens
  misc_feature (193)..(270): n is a, c, g, or t
aaagaagagatttattttattatttaacttttaaagtctctaatatgccttctaagaagggttctggctcagaaaattgcagaagaaaatcgagtagagaactagaattacagaaacctaagaaatacttttactgagctttcttcacacaagaaaatgcacggaaatgaattatacatggataccaatttgnnnnnnnnnnnnnnnnnnnnnnnnnnnnnnnnnnnnnnnnnnnnnnnnnnnnnnnnnnnnnnnnnnnnnnnnnnnnnnacctcaccctttactaagctgttagcttggtctgttgcgcttactgctatatcctcagcatctagtacagttcctgacacatatatgcacttaataagtatttgtcaaatgaatattattgagtaaataagatgaaggtcaattcagaaattcagcactatcaggctatatacataatacagactattataaaaaactagaatggagcagttccttttaacgacggagaaatgtcagtaacatactttgagcacaatatagctaatttcacaactggtctttaaatataacatacctataatcaatttaatgtttttctttgttaccagagttgttcaaaacgtgcgtttcacctatcaaagctcaactaaatgaggtttaagaaatctgcacatttgaatgtacttaattttaaaagattctggtttt

SEQ ID NO: 446941 - DNA, 817 bp, Homo Sapiens
  misc_feature (284)..(309): n is a, c, g, or t
cccgtgttccccatttgttatccttcgagagagtggttccacctccaccattcatggtgttgcaatgagcttgcttttgtccacctgacagcatggacctagatgaatggcagagaataggcagtgacctgcatcttgcctcttacccttatcactagggcacagctggcacggcccatgcttcagagggccttgctcctggtaagagatgaactgagactggcagggtcccagggctccctaagcctagatacatctagaccagagctgaccatgggcctgcnnnnnnnnnnnnnnnnnnnnnnnnnntacagttgctctctcctctcatccctctgggctctatgtgggagagatctatgtgccactgtttaggctaaggctggaaatggtttttcctagccactgagctgacaccttggtgacccttcaggaaatgaagtcatgagaccttggggtcaaagtgcagtactggaagcacacagggacactacagacctagtgcccatagtggcacaagtagaaagatccagcactcaagagctggggcgtacatgagttgagagagcaacacagccctctcctgagcccattggccaattccaggtccactggttggacttgtaggactctgaggggtgaagtgcttctgcctccgagagggtctcagtggggtcctggagcccgagggggaccactgggcggtgcagcactcctggcttgtgactgaacaaccatagtatgcagtggagcctgcctctgcctgattcaccacccagcctcgtacatagccataatttttgtcgtctttgtgtgt

SEQ ID NO: 446942 - DNA, 510 bp, Homo Sapiens
  misc_feature (46)..(46): n is a, c, g, or t
ccccctaacatccaattcccaacttcaagggggggaaccctggaanaagaagctggcctttggggtggtggcctttggggaagaactttgacccatgtcggcgaatgtcaagacagagcgtgcttctgaggtggggacatacaagattgtgcttgcgaggactcggctttcttgcttttggacttggtcaggtcaatgggctgatcgctgttctcaaacaggtagcgcctggacacgctggctgaccttgtggaggcaggactcaagaccggcttgtccatgacattgagattcgacttgtggaacatggaaattgtgcttgaacttgggctggagcaggaaggtgagcgcaagggctccgtgctttgcccaagtgattgttcaggacggactgcagggcgctgagtgggttgatgcatggcagggccggggcgtggttggcgagggcgcacccattgctcagagcagatgtgggctccaggggctggggtttctccttctcgctgccct

SEQ ID NO: 446943 - DNA, 910 bp, Homo Sapiens
aatcctgtgcgcgtgcgttcttgtgggaactgcgcctcccagaaggcaccgcgcgtcgtccttctccctccctgaaggccgcctcgcttgcccagtgtgtcggccgcccgcgaactagagtccactgacttttccgccaccatgttgcccgcctcactgcttcgtcacccgggcctgcgccgcctgatgcttcaggcgcgtacatacgccgaggccgccgctgcacctgcccccgccgccgggcccggacagatgtccttcacctttgcctccccgacgcaggtgttctttgacagtgccaacgtcaagcaagtggacgtgcctacgctgactggagcctttggcatcttggcatcccatgtccccacactacaggtcctacggcctgggctggtagtggttcacacagaagacggcaccacgactaagtactttgtgagcagcggctccgtcactgtgaatgccgactcctctgtgcagttactagctgaagaagctgtgacactggacatgctggacctgggggcagcccgggccaacctggagaaggcgcagtcagaactgtcaggtgcggcggacgaggcagcacgggctgagatccagatccgtattgaggccaatgaagccctagtgaaggccctggagtaggtggtacctactgtctgacacccacggggaaactgagccaggtccaggccgatgagaagttcccagtgggctgaagtggccaccaggggtcagcagtgctccagttgctgggcttaaagcttcctggtgcctgtctgccaggtcatggaggattccccaatctggcatccccacgatgcctctggagagatggccttgattgcccctcaaagccacctgaaccgtcgtcaacttacccagcctgtctccattaaacaccagg

SEQ ID NO: 446944 - DNA, 299 bp, Homo Sapiens
  misc_feature (239)..(256): n is a, c, g, or t
agaatatgcaacattcagttttattgaccccaggatgggacaaggaaaaaagttcagggagcctggctgagtcagctccccagaggggcctcttcccctgtaggaagcctcccagcccagctcacttaaaggagacgggttaagtgagtcatctcatgactggggcaactgctaccaagccccaaacctcaacctcaccacctgatgttttatctcttatcttagaccaggggttgccnnnnnnnnnnnnnnnnnnagatggagtctcaccctcccaggctggagacagaccccttctc

SEQ ID NO: 446945 - DNA, 450 bp, Homo Sapiens
aataatagttgacaggagttaacggagtacacagaatattaagcatttgaagaggcctacaaatcacgtgagcagaaaaacaatgggcaagcccttggtcatgttgaattctgtgaatgacaaagtgctactgcctcaataaccaccctctgcccgtatccaacaggcacatctcctcctttgtggttccacttcccctgtgcagatcgtgggatgaaacgcatgggccatcgcacctgcctttggaatgatcagctttacctggttgggggttttggtgaggatggcaggacagccagtccacaggtttgcatcctggactttatctaaatagtgccaagacacatcactaagcctcgttttgttttgctttgttgcaaacctataaagcgttatcaccagagctatctgcttcacttcaaatgcttattaaatttcaatctgagactc

SEQ ID NO: 446946 - DNA, 1630 bp, Homo Sapiens
  misc_feature (926)..(926): n is a, c, g, or t
gcgggacttgaggtgggaaccccggctggcgtcggtagggggaggttcccggggaagcccgcggaaggcgaggtgcctggcctgccatgtaggggctcgttccaagccgcagaccccaccgccctccctctccccggggcccatggcggtggccgtgcccccgggtcgggccgcaggctcaggctgggcctggaggccagtggcgcgggacgcgcttttggctagagctttccattcatgcaccgaactgcggggacggttctatctcgtaggtggtctcctagcaggaggagcgagagagcccagcagcgatacggtggttttcgacccagctaggggccaggccgtacgattgggagcccggggcagccccccgcgcagtcaccacgacgcggcacccgtggacgggcgttggctctgcgtggtgggcggctgggacgggtctcgccgcttggccacagtgaccgcactggacacagagcgcggtgtgtgggaggcgtggacagggacccctggtgactgcccccccgccggcctcagtagtcacacctgcacccgaatctctgaccgagagctgcaggtggctggccgggagggcggtatccacactcagcgacgctatggaagcatctacacattaaggctggaccccagcgcccgcacctatttgctatcaagcaagaaggctgccacacagctttcactctcagttcacactctcgaaaaacaaaagcctaagcagatttctcaggcaatttatccacctcctcactctagcaccctccttccaggggaacctaccatgtttaagctagctgagctctctacagtattaccctccctcttatcccacctaccgcactgccccatgcctcttctccatccatccttggcaagggcggtggcagttacgcttttgcagcatntatccattcagcggtggatttctgcgtgtgcacctattgctacaagcaagaaggctgccacacagcctcacgctcaggtcactgtgcggccctgctccaaactcctggaccccatccaggtcatcagctattgctctttggaggttgcaacttagctgaaccagaagtagctgggcattggagtcatgggaaaattaagtcctttctttctccccaaggaggaaccacctgttgctcctcatttgatggaacagcttgcaaggcttgtgagcagtgggcaggggtcccagaaggggccccatggactacggcatcactcatgttctgtggtcgggccctttgctgtgctgtttggtggagaaactctgaccagagctagagacaccatctgcaatgatctctacatctatgatactcgcacatctcctcctttgtggttccacttcccctgtgcagatcgtgggatgaaacgcatgggccatcgcacctgcctttggaatgatcagctttacctggttgggggttttggtgaggatggcaggacagccagtccacaggtttgcatcctggactttatctaaatagtgccaagacacatcactaagcctcgttttgttttgctttgttgcaaacctataaagcgttatcaccagagctatctgcttcacttcaaatgcttattaaatttcaatctgagactcaaa

SEQ ID NO: 446947 - DNA, 482 bp, Homo Sapiens
  misc_feature (110)..(136): n is a, c, g, or t
  misc_feature (159)..(418): n is a, c, g, or t
ctctagcaattatcttcaatgtttatgcttacaataaccttagtatttggcattacgacactaatatgtgcccatgagacagacggagcactacttatcccagaggaggnnnnnnnnnnnnnnnnnnnnnnnnnnngagagggaggcttgtttcttcannnnnnnnnnnnnnnnnnnnnnnnnnnnnnnnnnnnnnnnnnnnnnnnnnnnnnnnnnnnnnnnnnnnnnnnnnnnnnnnnnnnnnnnnnnnnnnnnnnnnnnnnnnnnnnnnnnnnnnnnnnnnnnnnnnnnnnnnnnnnnnnnnnnnnnnnnnnnnnnnnnnnnnnnnnnnnnnnnnnnnnnnnnnnnnnnnnnnnnnnnnnnnnnnnnnnnnnnnnnnnnnnnnnnnnnnnnnnnnnnnnnnnnnnnnnnnnnnnnngtccagacaaggtattttttagagattatgattgttcaccacaagctgcctagcaggtagccca

SEQ ID NO: 446948 - DNA, 1056 bp, Homo Sapiens
gcaagctctcttagcttgtgcattcagaccagacatcacatgtaaatatttatacacagggaggtgggaggggagggccacacgatgcgttgctgcgccccccgccttcctctcactcctcttctaagaagcgcggagtgttctgccttttcacctacgcagccccagcccggcccccctggggaccctagagagggtgtcctttctgtttatccttctctttgctccagaatggctgcgctctctaggggcgcgatgtgtgtgtggtggagccgggtcccctccagcaaggagggcggcccactgctctgctggtgctggaaggaggaccccgggtagtggccgatgacctcgctgtaggtgggcggcggcccctccatgcgcccgccgctgccgtagcacgtggcgctgatgcccgagttactgctgggggggcaggggccgcccagcctggcactatccatcaggtcactgtcgaagatggttctgtttgggggtgcgcgcaccgactcccggttcagttccagctgctgctcggggtccccgaagctggagggtgcaggggccctggtagggtgggggctcctccccgtctgacagcgagatggtgggcggcaggtcgatctcgtgctgcaggtacggataggtgggctggaagcggtggaagcggtcccgctgggcgaagggcggcacggccaggcggtcggtgggccgaggcggggcgtagacctgcggctctgggattccgttgcctgacactgtgctctccgagggccacaggcatccttctgaggacagggcatcttctctcctccgcccctggctgtgccggctgatgaaggaccgtgcagacagcttgtagtggctcagcaggcacgtgatcaccaccaccatcaccatcatcaccaccacgatgatgatgatctgaacaaactccagctccgtgatctccatgctctggaacaaagagcgtttgcagttgcacgtgcaggagacattgggctgcccggcggcggcggcggcggtgctgttgacccccatcaagcggtgcatgga

SEQ ID NO: 446949 - DNA, 1180 bp, Homo Sapiens
  misc_feature (36)..(36): n is a, c, g, or t
  misc_feature (101)..(101): n is a, c, g, or t
  misc_feature (110)..(110): n is a, c, g, or t
aaactgttgccttaatgtttggtgacaatttctagntagtgcataagtgaatttagttcttatgataaggtaactttgagactgtttttagcttagtaagnaattgtggnaaaccacatgtttattgtgcccatcattttacacaaagaaaagaggattatattatttcttctaaggaagtaggagttttcttcctaaaagtgcttacatattgtagtactattacttaaaagttatttatgaagttgggagccttctagtttgcctgtgttgatgtattttgaaaacaaaattgcaataaaggatgagcttccatcggtgtgtatggtataccagatacagatggttgcaaggaaaccttttcccccactagaatagtctattagtaactgctaagtcctagcttgcatttttgaaaatgcctttctgcatgttagcacccagactttcctttgtcatattcctttatagctacaacttaactgtagcttatcagagaagctctgtagtcctacactgaagtgtgttcccttggctgttcatatggggctgggtttggttgaacttccattctgtataaatgctagaacacagttactacagattgattcacaaactgcatgtgctggtgcttgaggcagccaaaatggaatgctgtggaaagcatatctatatcttaaaaaacactcagacaggagttaaggacagctttaataatttttttgtttaccacttaatctttatcaactttgattttagttagggcttagctcatggttgaagaaaagtggaaaataacaagtgcccatttaggtttgaagaatccagaatgttttacctttgactttatgagttatagaagcttggctttgctctaggtttcatgttcccaaatgagccatctgtcagtatattcacttaattcttactaatttcagtttcctgtaaaggaaacaacttacatattgatgcttaaatccagaaagtgtaaaaggttttcttaaactgttaaaatatagtgtctgatataaaggatgtaagttactcagctttctgctccctaagccaaacagtgtttgtcttcagtgtgaaatttaactgtaaaaactacttgtaatgtcaagagattatagatcatattattaataaaatggacctgggtctaatattttttttcttc

SEQ ID NO: 446950 - DNA, 590 bp, Homo Sapiens
ttcaaagctttttcacattttactacagaggtatttgatagacatatttattattagttaatatgtaaacttgtaaactgctaattcatatcctacttgtacaaaatcattttacaaaaactctttaaaaactaatagagaatgtattctctggtgggcatcactggaaggcatacctgggcaggtcctcccctgaaggctatcagcacctgcaaccagctcagctactgctgcctttgcagccgacactccaccctcctgctacctcttcattcccaagttcactgtgtcctgattcgtcgccttttctcccctcttttgtggacgccttctcacctgacaccaccacttcacagatgattgtacaggataaatgaataacagtattgtatcttcgtacctttctaccttggacgagaacaactctgggttctctcagacattcagcagtcttatttcctgtggccttttatcccataatatattacttcaaatttaaataaatctccttcaaccagagtcctcaaatagcgttcattttatcctttgagtcatccttttatataaagtccttcaagtatccatattac

SEQ ID NO: 446951 - DNA, 951 bp, Homo Sapiens
aagagtttaagtggttttatctttattggaaggaaatgtgttaaagacagactcactacagtgttgagacagtagtgagtagcacagtaaggagactgcccaggacttgaggtccttggtccctctatagaagtatcaagtgtttgtaaaaggtttagcacccatgtgacagaaagaagccatcatcctcttaatttctcttggttttacttaatatatagaagggcaaactagtgggcctctgagtgcaagatgaggacttcattagaataaagacatattgcctcctggatttctaacccatagctccaagagcctcagtgtcagaacataggtaagggacttgatttactgagagaccctaccctacaacatcctgtggacattagagctctgtgctcctgtcactgagtatcactgtgagcttaaaatatgtcagctgctccatttctctttccttttgtgtattcagagctctgattttaaaacactgaaatctggaagattccagtagctgcactctgtctaaagcatatgaggaatgactgtagaatttgcatgtcctctatagcttttgttcacatgtatgcaggcagggataatgttattgattgttcaacctatttaccttgaccaggggttgttagtaatgcccaatatgaatcaagttggcacaagtgtgatcagatgatcaggtcttgtctctttacactgcaccaccaatgcttcagcactgcctccctttgccttaaggactgggagtgcgatgctgtgaatgggatggaaggggttattcacatgtgctttcattacttcttcccttcctcagaagggaaggcaaagacatctataaaacctttacagctgtgcagacttctgtatccctccatcctcatttccaccctttgtaaagtcataaggatgctctccatttccctcttcccttctact

SEQ ID NO: 446952 - DNA, 257 bp, Homo Sapiens
cttcctgacagcacacaaccttgattaggaggggctgggagggaggatcgatgagcccctgacccctgggttctgaggctgccagggtcgcttgcagctcggccgcgtggaggtgaccgggcggaactccgagggggcgcggggagagctgggcgggcccaccgctccagcggctgctgtcaggggccgcgaggctttccctgaagatgcagcgtagcatattttgcacatgagttcagaggaagaggaagtgtagc

SEQ ID NO: 446953 - DNA, 561 bp, Homo Sapiens
  misc_feature (364)..(364): n is a, c, g, or t
aggaaaacacagcttgttatatatttagtgtttaacattccagtgcaggcagtatcttagcatcagactttcctcattcatgagtagcagtttagaaaggaatacatataggatacttgataagactgtggcctgaaaagaccatttgtgtgtcagacagctggctctatcctccaatcagtggagcacccaggactatcgcaggagaggtggaacagatgaagtgtaagttctctgtaaatctgaagagtccggtataatgattgttcccacttaaccccttgggccacatcttgatatggagaacatttccacctcttgcatcaacctgtgctctctttgttttggatgacgttctctccangagggttcaagagcctccttagaggggagtgagctttctcttccagtcctaatatctgaatatttcaaagcacatgaggagtccacgaacatgttagggatgttgctgccaaaatagatcttactgttagaagcaatggcctggtactttttgagctccagatattccggggtcaacttgtgcttgtttgaggtggc

SEQ ID NO: 446954 - DNA, 1160 bp, Homo Sapiens
gggagaagacttttggcaccaacctctatattttaatatttcgtttttaacaaaaggatattgtatgtggtacactgagaatatgtctctgggcaggaggcgttaagaagagacctcttcaatttttgtgcccactcccatttaaattttttagggggagaagggtaaaacaaagacatatttgtctttacacataaagaaagagctcccaagtccgttttccaaggaagagggggtcggtaaaaaaaggctagtttggaggaaattcttcttttattcttgaaaggcaagaccccaggagggtaacaatggcttaaaggggggcctgcgatcccatctttagtggaattgcccacaaacgaattttccggcccattccacacgaaaaaatcccctgtggagttggacaaaatggtgtaagggatactcctccaccaggacgattaaagaaacgccaacttgcggtttttaactggctaccgttatttggcaccccctaactttccttggattgagccctttaaaacaacaattcccaagttggatattttttttctaaaaaagtagatgacaatctaaacattatcactgtactttacattcactgtgcaaaacaaaaagcctttgaacaggcacaaaacagtgcaacaatgcagttacgtcctaataaaacaaacctttttaataacattgaaataaaatggtttcattttgcattaaactacataccatgaacttctccaacataaaaggactaaaaacaagcattagaagatatttacaaactatctttaaacttctacaggtctctcctcctcgtcctggatgtgcacaccccaatccagttcacccatcaagtgcacagcaaaggaaaagaggcccatttaatagacataatgtttccaacacccttgaggaccatggacagttgtgcaagaaacatggtaaggcaactagaagcataactttctgctgaaaagagtctgtgggggtcttgtatacgataacatacattctttgtccctacaaactcatacttcaaaaatgaataaaagcattagaaatggcattaaagttttacattgggcaattaaatagctatgcaaagtgtgtcttatgcaactcgattaaaaccttgccttactctgctactgaaaata

SEQ ID NO: 446955 - DNA, 414 bp, Homo Sapiens
tcggtaccccgtacaaggccccgtgacaccgaggaagaggctgaccatgggtaagggggtggccgtgcgcactgtcttcagaatattctccgtgttttccgtcaccaaattgatctccggttcaagaaaatattctgaggccacacagcgacctttctccggacctgcaaagaagcagactcgccagaggccggcgtgcagggccatcttgacctcggtggtctggtttctgcggtagcactgtgccttcttccatgtacagccagtagtcagtgctgaccgcgatgcctaccagtagcagtccacacgcaccaaacacgctgctcagcagggtcagggcgcgactactacagtactcatacctcagagtcagggggcgccctgcggggcctcgctcagggctgggcgaacgct

SEQ ID NO: 446956 - DNA, 1139 bp, Homo Sapiens
tggtacggtccggagtttcgggatatcgtcgaccacgcgtcgactagttctagatcccgagcggctcccttttttttgttggttttcagggcaccattttttataaaaacgcatagtctcatttttcactctttaaaatcacattcaaaaatcggcaaagaaacgccccggggaatgagtagacgggaggggagggtgcgccaacccagccccgggggggagaaggcgcgacaccacacaggcagcgcgactggcacgagggggcatgcggtgggcgaggcggcggcactgacaggacgtgggctgtggggctggccagcctgggcgggggtacactgatgggccaggatggggggcacactgataggccccagccagcctccttgctgtgctgcccgcccacctggccggccccgtcctgggcagatggggtcgcacccagcccagcatcagcgagacctcaggccaggcgaggccagtatggcccaacctgcaggtgccttgctgtggtccctgagcccgggtgctgggggttggggcaagaggggacagcagggagggtagcagcacctgctgccaatgccactctctcagccaagccccgcagtgtcagggaagtgggagtggaggcagccagtgacacagaggcttttcctgaataagggcacaggagcccgagtcactgtgggaggccttgagggccagggagacaacgggcccctcctctcgccaacactgtggagcaggacagtgcagggcctgcccctctgcagcaggagggggtgcagtgggaaaattcaagtcggatccctgtgctgtgcctgcccctggtgaggggggatgggccacccagcagtgcccatgggcacagagtgcagcccacagagcccagggtggcacagcttggtgtggcatcatccctcggggaaggggcgggagggctgtgctcttcccccacaggaagacactgggagcgggcagcccctgaagtcaggacagagggcgccgggcagcggctgggttggtgcagcaggagccgaggcaagcgggcccctcccgggggagctgggccaggctggggccacgggaaatcacaataattacaaaataaaaccttttccgcttggcgggaaaacaaa

SEQ ID NO: 446957 - DNA, 501 bp, Homo Sapiens
  misc_feature (52)..(86): n is a, c, g, or t
cccagacattcgagaccaccctggataacataatgagatcctcgtctctacnnnnnnnnnnnnnnnnnnnnnnnnnnnnnnnnnnncttgattattgaagtttgaaatccacttctacgggcacgaagccacttagctccaaagccaaggagcgctttggagaagaggtcccaactggtgcagatccaaggtttcccatgggtggggaggcaggatggggggggcgcctgcaaagaggtgagggctgtacgatctccaaggaatttgggagcaggggtcccgcttttctccgccgggcgcccccagccagctggttgccgagcccacgccccatctgcacaccaggacccggatgtgcagcgcgcggggtgtctgggcccgtggagcctgcaccgcgctgcgctgcaaggcgcctcactgtacgcactggcggccgttgcggcggagcaaccatcccctgcccgacgccgccgggagtctggagacgcacctggcggccgc

SEQ ID NO: 446958 - DNA, 281 bp, Homo Sapiens
acagggcagagcaggaaatcagagtaagccagggtggagaatgagcaggtaatcagaatgagtcagggtggagcaggtaatggaaaaaggttgctttacgaggaagttaagtttaacagtagaaggcaaagaactgaacatactgacatattgattctttgaagagaaatttagaactcatacctaacagtacttggagagtgtgcatgagcctttccctccgcctgaattgctctgcatagcaggtccagctgttgaatttatgttttaaaatgtgctca

SEQ ID NO: 446959 - DNA, 825 bp, Homo Sapiens
cgtttgacaccccttccaaagaaactctgcctggaaggccctgccgtcttcttaattgttaattatgtacatcctttaaagggcctaaagttatgaaaggttctagcgggaactgaagcagcagtcaagtcttgtgatgcccgggaggaagcgtccagtgatcctctagtctcttatttttcccaagtggcagcgagaggagggcggctctgggcgttaaggtgttggccagtttaaaaccgctctgtgctcccagggagcttctgttcctaaggcttcccaagccaaggcaggaggaaacggcagggctttgagagctgagcagcggtgaggtgggaaaagaccgagggcaggggtttggaaataccgcatcctgtgctacacacaaagaaaatgctcactttgggatggggcactagcagtgtcggcgggtgccaaggggcaacgactagaactgggagtgcattctccacagggtgacaggctcctctctcctgcggccagcgccacaagcagcgggttcctggctgatcggagggtgggaacggggctgcggaccccgttgcgctccaggaggagcgccggcccttacctcgcccgtccggcttcatcagcagcgcgtggcccaccagtgggtaggcgcgggccaccgtggggatgggccgcatctgctgccatttccgcgcgtagctcgccaccctctgcagcaggctcaggaccagactggcgccggccagggaaagggcactcgccgcgccccacagcagcagcttctgccacacgagccccagccagagccccgccatcgccccggctggcggccgc

SEQ ID NO: 446960 - DNA, 795 bp, Homo Sapiens
tgctccatcatcactccagactgagccaagttctgatgggacaatgagattcctctatgacagcccctccttgaatctgagctttgccccctgcttccggtccacagcgggcttcacaggggttatcaggaaagacttgctgcgaacaaagtcagcttgcttcacaggctcctggcctctctcgggcaccttggcttgctttcctggttcagactttcagggtcccgtgccccaggcttgtcttcctggttgggtggctggtccaaggtccccctccgcttctgccgagtgacggtgatccagggtggcgcaggctgcccatcagctccaggccctgttgctgcaggcggcagactcttttcagctcccctgcgcagcggccttttctccgccgtcctgggctccttcctgggttcccgctctcccgggccggcgtcggggggcgcgggctggtgcgggagcgtgaagctctgcagaagcggcttccggggcaggggcggcttggagctgagcggctcggggggccgggccttcccctttccttggtcgctgggggccctggtgcctcgaagggcgggggccgtcccgaggggacacttctcctccttcgggagcacggtcagcgacctttctaaccggacctcggcactgtacctcttcacacccttcacctcctgagaggcgccatccctgtatttgagcgagagggaggtggaccggagcttgacggggaaggggtttctgtcctcactcggggccggctcctgggcggctgggcagggctctctcgtgccg

SEQ ID NO: 446961 - DNA, 524 bp, Homo Sapiens
ttttttttggcagaagacatgtttaataacattttcatatttaaaaaatacagcaacaattctctatctgtccaccatcttgccttgcccttcctggggctgaggcagacaaaggaaaggtaatgaggttagggcccccaggcgggctaagtgctattggcctgctcctgctcaaagagagccatagccagctgggcacggccccctagcccctccaggttgctgaggcggcagcggtggtagagttcttcactgagccgtgggctgcagtctcgcagggagaacttctgcaccagccctggctctacggcccgaaagaggtggagccctgagaaccggaggaaaacatccatcacctccagcccctccagggcttcctcctcttcctggcctgccagttcacctgccagccgggctcgggccgccaggtagtcagcgttgtagaagcagccctccgcagaagcctgccggtcaaatctcccccctataggagccccccgggaggggtcagcaccaggagggga

SEQ ID NO: 446962 - DNA, 703 bp, Homo Sapiens
atgtgttcaaaaaaatgttttttttattgaattgaatgggagctaaagtaggataaagtggagccaaattataaataggaatataggtaggagttcattcattcagtaaatatttattgaatgcttattgtgtccaggccctgttctcagctcttagaatacatccatgaacaaaccagataaaaacttctgcccttgcgcagtttatactctagatcgtaagggatgggattagcaataaatttacataaattcaaccatacctactggaaaaagacacatgcatggaaattattaatgctataagaatctcttgatatgcagtttgtatttttgtacttaatataagcataatatattcatacctacatatcactccacagggatttaaactttaagactacaaagagaaatttattggtaatttaggagattttcaaggaccattctgagcatgctcaattttgtccttaggcacggtctttaaaacctaaccaccttacaagttgtgactccactgtaccaaaatgaagactctgagacttttgggcaaaagaaccattttaagtatttgagtatgagaaagatgacaggatgaatccacattctctcagattaatctggtaacaaggaacaagaaagagtacattcatctgaatatacatggtcaggtaacagtggaattcacatcaagaatttttta

SEQ ID NO: 446963 - DNA, 283 bp, Homo Sapiens
attgtgcatttctgttttatgtagataataaaatattactttaacataaatatataaggatctctgcgtttttattttccccacaagcacaaccaaatgtaccaaaacaaagtattttttaagagactgaacaaaaaaattacatcccatatagattttcctcacctattcatttaaagctacagaaaaacagtttccagaacctttttgtttcaaaagaaataaatatacattgaggcaggccacttaaaaatgatatgaaaatatttccctgggtagcatt

SEQ ID NO: 446964 - DNA, 145 bp, Homo Sapiens
tcacagcaaggtatgtaactttatttttctagcataataatttaaagtatttacacactgcacactcactgttttacacagatacgtattcatatatctatgaaccacatctaaaggtttctttgcaaagactcgacacactgtt

SEQ ID NO: 446965 - DNA, 542 bp, Homo Sapiens
cgaagtcccctctttttgttttccttcagtgtggtccttaagcatcaatgtttggtggttgtttctagcaagtcttttgcttcatttattttggctgctacgtaaggagatccacctttatctgggtgattcaaaatcatgactctcctatgagctgttctaatcttagccttgccagcagatgggcttacacctaaaataagaccagcttctcgcctactcattttctgttcaaatcctcctttatagtaggatgaaaagctaggagttgaaatcttctttgcagtttctgtgataacttgttctagaggtttccagatccgaaatgcgtagcgacctgcaaatgcaagagctgcaacacccagtcctacagctatcaaacttcttaccagtctctgctggtcgacgtcggcgtctggccgtttggccgagggctgcaagtactcagcgtagcgcaaactctcgccaactggagcgatgacaccacgggcagccatggcaaggcggcccggagactcaaggcgccgcggcaatgacccgct

SEQ ID NO: 446966 - DNA, 540 bp, Homo Sapiens
  misc_feature (389)..(389): n is a, c, g, or t
  misc_feature (467)..(467): n is a, c, g, or t
taacaatgtgccaaatgttttatttctctcatatgcaagtaattacctctcaaagcatttttaaaaaacgcattattaccactttaccaatgaattatttctgtccctggagattaaatcaaatcaaaatgttacaaatagtatcagtatgatataatttcttaaatatatgggacattgtcaacagctgtgattcatatgaaaaatataatcagatctctcaaattcctaattctgttttaaaaacacaaaacactagaacagttgctctgaaattactgatgatgatccctttaataaactgcaattaaccactaatatagaaattcaatttaagcaagaagttttatatattatactttacagaaaaaaataattttgaaaaagtnttgacaaacagagatcaaacatttagggcattagttactgcattctctttttagaatatacattaagctacactagtnaaatttaaagttttatgaccaggccttaaaaaacatgaatgatgatgacagaaccactatcacacataaacaa

SEQ ID NO: 446967 - DNA, 602 bp, Homo Sapiens
attttaattaaggtttatttcaatagcaaaaatgacttcaagattttgcgtgaattattttttaaacaaaactatatgaaaaatatgtacaaatcagtcatcaatgtcattgacatttttatgaacaagtttcaaatgaaaaatatcccatcataacaaaggtacataaataaataaatgctgacaatactggccctaaagtctaacacaactgttagactaatcaggataccgctttctactacgtgaggagcacataatcaatgtttccagcaaaaggcaagtactggtttgtgtaggtttatttaggccagttgacagccacattattttgaggtgtggctacttgtttctcttcatagtgttgaatggcacagtgcaaggcattgggcaccagaagcatgagcataggcagagccatttccaccatgctgacggcaggcaagaagaagacaaaaatgaacccctttcatgcttgtttagatatgtgacggctaggcgcaggtgcacgcctgtaatcccagcactttgggagccaaggcaggcagctcacctgaggtcaggagttcgagaacagcctgaccaacatggtgaaaccgccc

SEQ ID NO: 446968 - DNA, 556 bp, Homo Sapiens
tcattaacatgactccagagtcatttaatagtatgattacaaaaacgccagacagaaaaattttaaagtaaaagtgtgtttcagttcattagggttttcccagcccagggagaaaaattacttctttttaaaaatcagttctgggtagagggagacggagctatttgaaggacagctggatgagtcaggttaaaaacaatactgcccagacctattattatttaataatattattaagtaatttaatcaagacaggactgcacttggcccttattcacattgatgttttcgtccagacacctgctggtgtgaaatggtaccaaatcacatctcttctttgttgtgaggatgccttgttgaaatggctccagcagtggcaggttcagcctgggaactaaagctcttcctattttacagccataaatatccacattgcactgtcacttccttactggaaacttcatctcaaccaatgcgtccgtcattattgaacagctcatgatattcctgctcagcagaattgcacagcagttgttggtagcaagtcaagtccccc

SEQ ID NO: 446969 - DNA, 585 bp, Homo Sapiens
ctaggttctaatattttattgccaaattgttaaacttttcaagaagtcataacatcaccttttctgggttcctccaaccagatactaacttaaattcctgaaaatgtaaacctcactaacaaggtccttgtggtttaatctagaaaacagaatccagcaatacgaaggaaattctgttatattttttagcttcttgcaagaggctgggttttgaagggaagaatgagtatctcaattatagaaataataggaattatggccatagaattggtgcttcatccccgaatgctcattatccctgaggtctttatggtcttctagaattgatttatggaaacgcttttgtgcaccagtttttgaaaaagagttcttaagctccagcaggttggtctgaggtttggtcactccagctctaggaatccaaccaagaacaggtcttgtttcttcattgttttccatattcaagaacaactcttcttctggcttacttaaaaaatgttctaaagtgaaagcttccgtgtcttgtttattttgtaaaacactaggtttactaaggctaacagggtctggacacatattatactg

SEQ ID NO: 446970 - DNA, 359 bp, Homo Sapiens
ggcataagctgatttattatttatgagaactttagtataagaagcatcctgcaatcacaaaagtggaactagttgatattttgaaatcatacttgatttaaccaccttcagaaattctataaaacactagcaacttccttttatcagacttatgaggtagttacattatttttccttttattgacatgattcatcaaaaaattattttatccaagctcataaactaagtcaataaaactgcaagggaaaaatgacaaaaattctatcttatgcctgatcttaggtcaaatcaaatgttgccctctgggattccaattcttcatgtcacagttaagtagtacttattatgtattttacag

SEQ ID NO: 446971 - DNA, 534 bp, Homo Sapiens
ccaggaaaaaaattaaatctttatttttaaaaatcccacaaatccataatgaaatcatcatctgaaaaaaaagatggtagggaacaaaacgtgggatacatttaaaaggcactagattcattaataccagagccattctggagatgccatgtaagaaatctggagttactctaaatcttcttcttagtggtatcagaactggggagaagggtccaagcaaagtgttgcctttggccagtgtattcggatcgaggttatgaggaagagcccttttcctttgtcagtgagtttcatgttggtccaccactccagcgctgagcagctccccgatggccctgtcatcgtatctcaggacctccttcaggatgtgcgttgtgtgctgcccgagcagggggggcggcctggcctctgacatcttgaacttactgtatctcacagctgggcctgggacggaaatcttcccacagttggatgctccatctccataacgaggccattgtgtaatacccttgctgatccttgaagatgaaggaa

SEQ ID NO: 446972 - DNA, 535 bp, Homo Sapiens
aaagagcttatcttcaattttattgttgggaatctacaattgcaaagtggttcaaagtcatttcttataccacttcacaatacacacacagatttaggaaacttaaaaaaagttctttaaaaaattctaataggatttaccctattttactggccaagtgtaaaaaataaaccctaaatgtgactttctctaattttccttgtacaatcttattgacattttttatagctaatccatatatgcatagaaccgaggctattattttgctgcaacaacttttataaaaaggttatgaagtttaaaagtatattttgtatcaagagtacttaatatttgtaaacactaagaaacaaacatacttcctatcaaaacctctagctgccatttgcacactgtttttaaggtgaagcctcccatttcttgaattacttatgcagagctgagcaggctcatgtggttccactcccacgttaagtatttgttctttgggcataggtcatttcatcagcatgggtattttctgaccacccactca

SEQ ID NO: 446973 - DNA, 486 bp, Homo Sapiens
gaggaggatagcttcagcagcccacactgaaggctgggtcagtcctgtttccacagtggggaagtgatcagagctgcctcatgactggcacagtgccagcacagggccagggcccacagggtctctgtgaaggcctccacgaggtgagggccagaagcagccaggaagccctccatcaaactcctcctcccagcacctaccattccagaaagcaaactctcacccccacacacgctatcgcacacgcacagtaggcgcgatgcaacagagaaaaaaccgaattaacccccaaacaggacgtgacgggaagggaaggggggatggggagttgggaagaaggaatcacattttgcaaactgcccactaggggtcaccgtaccctcagaaccgagggtgcagaagtcacaccggcctgcggctatgcgctggcggagggtcccagagagaagaaggcccggctgggtggcctccgccgcccagcttgtg

SEQ ID NO: 446974 - DNA, 944 bp, Homo Sapiens
  misc_feature (469)..(478): n is a, c, g, or t
atggaatatttattaggtgttgttgaagtgtacagggtaaccaagcgtgtggagctggggataaaagccactgcagtgtgcagtgagaaactccagcagttgctgaaggacatcgataaagtgtggaataacctaatcggcttcatgtcactcgccacactcacaccagatgaaaactcgctggatttttcctcctgtatgttacggcctgggattaaaaatgctcaggagcttgcctgtggagtgtgcctcttgaatgtggactcgaggagccggaaagaagagaagcctgcagaagaacatcctaaaaaagcattcaactcagaaacagacagtttcaagctggcctatggagggcaccagtatcacgccagctgtgccaacttctggatcaactgtgtcgaaccaaagcctcctggcctcgtcctgcctgacctgctctgaacaactcctctgtgaagcattgacnnnnnnnnnnctgtgacaccccacggggtgacggggaccaataaatagaatgcgagcactgcacagttcgcttccctgaatcgatatgaagaacaccgcaagggacggggcccccgtcatccccatggccagtctgcaggacttcaggtaaaattgtcccacccaaactgcacgtggcaccagaagcttgctcacttatctctacttaagattttctgaaatacggaccacggctttcttgatctaaggaagaacttgctgctgcagtattgaaactgtgaagaactgacatttgaagaaaaatagattaccgttgcgggactagaatgggcgactgcttggagccagtgcttgtttttatctaggacacttactgtcctgtgaagtagaatacatttatctgcatttagtttgttaatgtctgaaatgaataaaaagaggaaatttgcgattaaacttgatgttcttgctttttt

SEQ ID NO: 446975 - DNA, 1034 bp, Homo Sapiens
tctgcgttgattcttggctttcttcttttgtcccatctgttccctttctgcttcctccttttgcgtctcccccatttcctatgtcgagctttcggattctttctgcttctgtgtttattctggagcaggcctgtgtcctcttgctgctttggatctccttcaactcctatctgggcctctctgcctccacctaggttctactgccctggtcctagttggtcttacttatgtctttattgttttcgtctgcgttgctgatcttagctgagaccctggccagatcactgaagtatatttcatgtccgagtgtgttcgggatgcagccactgcccgatcgacatgttcttgtgaccttttgactacattggcctgtgaactccatcagaaacgtgggttttgtgacttatggtgagtcgtggagagtggatttgtgaccaatgacatttactgagttctccccagtccaaatggggaggagtaaggagtctggatggtgtggataaatgaaatatatggttattaggactatatgttattactgaaactgacaacaatggaaaagaaatgataagcacaatcctcttattgttctataaggaaaatacatcagtaaggtctatgaacaagcttagatcaggtcctgtggatgagcatgtggtccccacgacctcctgttggaccccctacgttttggctgtatcctttatcccagccagtcatccagctcgaccgttatgagaaggtaccttgcccaggtctggcacatagtagagtctcaataaatgtcacttggttggttgtatctaacttttaagggacagagctttacctggcagtgataaagatgggctgtggagcttggaaaaccacctctgttttccttgctctatacagcagcacatattatcatacagacagaaaatccagaatcttttcaaagcccacatatggtagcacaggttggcctgtgcatcggcaattctcatatctgtttttttcaaagaataaaatcaaataaagagcaggaaaaaaaa

SEQ ID NO: 446976 - DNA, 1353 bp, Homo Sapiens
caagagcggcggcaggaagtgcagtctacagtaaaggaaacccgccggactggagacaggctggaaagaggcaggtacagcccacaaggacgggggccctggctgtcagacccaaccttgcagaccatcaagtgcagctctggttcaagaaccgggcctgcttgctctgcggtagcaacggcacataaccgcagcgaatgaccagggcacgccaagccagcagccgggaccccgggatgctcttggcacatgatccgactccgctgcctttgcgggtcctgtactcccgcgaggtccaggattgtgcagcccctgccccaaccggccgattgggaattcttcgcagcagcagaacaccgctgcctccaggtccgaccagacctgcataggtagagagtccccgcacagggcggccagcagagctacccagctgccccagggcctcgggacccctgggcctgggacccaggccagaccctgacctcattcggtgatcatcacaggactccatgcccaccccaagacacctttcagggaccctgccgtcgaacatacacgacatgggaggcaggggcgggccttttgcaggggaaggactcccccagcaggacgtttactgaatctggagggagtcgccctgcagatatcccgcggaagccggaggagacccaggtgcgccccaccggctagctgcgcctgcgggtgcccaaattggtgtccgggccatcctcaccgcagtgactcctccgcagcgccaacgcactccattttccttccaccctgccggtggggggcgtttgcttgttctcactctgcagccgcagccagtggcgccgctaccaaggtccccgcctcgccatccgggtcctgcctgagcatccttattggtgctcagggctaggcgtgcattgctgctaggggcgcggaaaggtttatcgtgggtggatgctgcccggggcttgagtggtttttagaggtcttgagtggctcactctccaatcagcgctttctagagacagcgtggtcagcgtacttgcttactttcaggattgcgagacgtctttaacccttgctgatcggctgacgctgcagcttcctgtggcttcctgctcatttcccgcaagatagcactgatagggtattggaaatccttatgtaaagtatctgttcactgtttttgcccattttcttgatttatttgaactgattcttctattcttttgaagttaatgtgttgcaattttcacatctatgttgttttttcattagtggcatttctcaagtccttgatttcttgaatttcatgttgtctatttcagtatgtattacattatctgtgacgggtggaccagt

SEQ ID NO: 446977 - DNA, 1158 bp, Homo Sapiens
  misc_feature (185)..(185): n is a, c, g, or t
  misc_feature (1071)..(1101): n is a, c, g, or t
gatatttcaaaaattattttcacacatgattatcatacagtattacaatgtattatgtgcaaaattccatttaaaaatcatttacaaaagtacaacacagtatgtgctgagggttctagttcaacaaaagccaaggctaaaaaaggtacaaggtacaaagccaaccaaatgagatgactatgcantgtttacacagtacaataacatgtttttgtaactacctgtgttacgtggatacaagaccctcatagtttgtgcacctgcaaactggttttatttaacataagtttaatttcactgcaggttctgataatgtagattgatttttttgtgcattttcaaattcttctccattatatagcatcttatttaactcaacaaaagccacattatacattacttggtttctggtcccaataatttgatgctgttaagttttaatttgtatggaaaagggagaaaagtgttcttcttggatttttattttcctcaaggggcttttcaaaattgtttctacaagcaaatcacacatggaatagattttgccaaacctcactgcatatttacagtattttaagcataggtggttccttctatctctttttctacatcttttgaagagcctgaaccagcagactgcactcctcagtcctttgttagagttcatatttctctctctacctctctctacattcatttctctccttattctcagcatcatttgtttaaaaaacaaaacagcaaaacaccactaaacgtgaacaagagaacagtacatccgatttccaaaggcattctgtggccagtgtcaggaatacgttgctttaagaaatccagcagtctctccccacaaagttgccaaaacatccagttacagaagagagactttaaaaatgcaatactctcaaatccagcaagagatttatttttgaatattaaatgttaaaatcacatgcataattatagaatattttaaagttacaaaaatattttaaaaccaatcctgacagtttacctgcaactgctataaaaatttctatgaaatatataaaaacatgaaggctctttgtnnnnnnnnnnnnnnnnnnnnnnnnnnnnnnngaaaggaaggaaggcagggatgaagccatccacaggagtgagaatcacctgacgccc

SEQ ID NO: 446978 - DNA, 722 bp, Homo Sapiens
gctaggcaaggagggatgattatttattagcttctacagattagacaatggggtgggggtgggctcaaggtgagatgattttttgggtccaagtctactcaagacaggcatcccagtcttcggtctccaaatccacctcctgtctgtccccccacactgctcctcaggccttgtggatccattgactgtgatttctgtggttcagctcccacatcaggcaggaagggcagctactgggttcttagatcccccattgcctccaacccttgcttcctagctggcctcccagggcaccacgaggggctgggccaggctgctgtgcttcacgttgcaggagtagggggctgtgtcctgcgggggcactgccaccaccacccaggactggtaagtgccatttgcattgtgaagaacatctccccgtaactcaggctcctgcacctcgccggcccgagtccagtgcacatcaattttcccttggtagaagtcgtgagccaggcacttcagtttcttcttttctcctggggcctggtggctggtgaccaccacagaagggaggatcttgcgggtccaggatatttttgctgtctccagagtcccatgggctgagacttcctgtctttactgttgtatctaaagaactggaggtcattgagtgagccaacggcctgtaacgcggggaacgtcttcacttgcttggacagtccaaggttgatatacgtcac

SEQ ID NO: 446979 - DNA, 1194 bp, Homo Sapiens
gatggatgattatttattaccttctacaaattaaacaatggggtgggggtgggctcaaggtgaaatgattttttgggtccaagtctactcaaaacaggcatcccagtcttcggtctccaaatccacctcctgtctgtccccccacactgctcctcaggccttgtggatccattgactgtgatttctgtggttcagctcccacatcaggcaggaagggcagctactgggtctgaaatcccacattgcctccaacccttgcttcctagctggcctcccagggcaccacaaggggctgggccaagctgctgtgctgcacgtggcaggagtagggggctgtgtcctgcgggggcactgccaccaccacccaggactggtaagtgccatttccattgtgaagaacatctccccgtaactcaggctcctgcacctcgccggcccgagtccagtgcacatcaattttccctgggtagaagtcgtaggccaggcacttcagtttcttcttttctcctggggcctggtggctggtgaccaccacagaggggaggatcttgccggtccaggatattttttctgtatttcaggtatttccgcagagtcgcagggcactcctcctcccaggtaagccttggcccgctgcacgtagactggttctgcctcccacttctgcttggttatctggggctgctgggtcgaaggggaccccaggctgggatttttttgttgaattcaatgtagtcctttccatcatagtaatttttccagaatgttcccgctgcttctgttattctcgatctcacaaccaaaccttccctgcaatacgtgagacccgttactgtcgttgtaatactccacaatgtctttcagggtctccataaagatgtcctccctggccttctgaagttggctgtcctgcttccaatcctccattccttccacctgtctccagagtcccatgggctgagacttcctgtctttactgttgtatctaaagaactggaggtcattgagtgagccaagggcctgaaacgcggggacgtcttcaacatgcttggacagcccagtgtagatataggtcagagagtaacgaccatcttggttctcctgggggacagcaggacccagaagcagcagcagagacagcaggacaggcaccattcttaccattgatcccgggaattccggaccggtccagcc

SEQ ID NO: 446980 - DNA, 1618 bp, Homo Sapiens
  misc_feature (77)..(86): n is a, c, g, or t
tttttagatctaaactttgatctgtattttggataatcaaataaatataaagctttttgccccactttgggagggannnnnnnnnnctagaacaaaatgaaaccttcaacatattcttccactgaaaaagccaaagttccatttcagacatgaaggtgaagggcccttggagctgtagcaccagaagaaggaggaagaatgcgggtgatggctttgtttggagtcatcaggctctacaacctatcatttggtttctcactagtagctttttaaaattcccaaacagtcttagtattcttgttgttaatgttactattaaaataagttcctatggagtaaaagagaaaaattaagctgttaataaaatgtcttcaaacctcttctcagaaaacaaagcagcaggttcatcgtacacgtaccagtctcaatcccacagaaacgcttggttcctttcatccctatgctgtctatacagtttaatctctacctttaaaaaagagacgaatgcagtcattttgttagcttaggtttgtgttttgtttttgtgaagtgctgctggcttttggccaaaatacatatatttcaactgaacccaagtgttcagacaattgccagcccagtgaaaggctcatgagctgtcacacgacgtatggcatcttctaaattgcaacttgctccctcccttgggcaggctgcccgagagttgctccttcctcttccaaacacccactcagttgatttccttttggtcttgcttcccacaggaaagcggatacttggcaaatctgcgaggcggaggccgatcagctgtggaagttctgcacggtgctctgtttctgggagagcccggaggagctcctcgcggattgctttgatgagagaggccgaggagtggccaggctggaggtcttccgtgggagctggtggggtaacccagcccagggccttgcagtcccccggtgggggaggttcccggaaggagctgagggctccctgcctgaagtccttggcacctgaaatagcggtgaagaagaatactcttgatgtccgagcatgtgtgtggcctctcttcgccccgcttcgtcctccccgtacgaaggccagcctggccccccatactggctgcctctgcttggcgggatttccactggctgagctccaattctgctggcaatccccacctgtgtcaggtgctggatctgggagcctgtggtacccccgacaggccgaggccgggccaccgacggcatctcctccgagtagatccctctggcagcaaatggggcttcggcggaggcctgtggctgctgagggtcagggggcaccagctctgtagactgcagcaaaccggggccaaaacctggtcttggcaatggacccgtcgggggagtcattccatagtcttcgtatctactgcagggattgttggccgtctgggctgggctgtagaaggacccccactgggtggctcgcctctcttcctgggaaggggtgctgtttgcgggcaggccgggtgggactccggggcctacacctgcggtgctggcaggctggctgctgggggccacgagggcaaaggcgtcgtccaggagggagtgcatggtctggcgtgcctcct

SEQ ID NO: 446981 - DNA, 525 bp, Homo Sapiens
  misc_feature (22)..(22): n is a, c, g, or t
  misc_feature (34)..(34): n is a, c, g, or t
  misc_feature (71)..(71): n is a, c, g, or t
  misc_feature (116)..(116): n is a, c, g, or t
  misc_feature (121)..(121): n is a, c, g, or t
  misc_feature (143)..(143): n is a, c, g, or t
  misc_feature (498)..(498): n is a, c, g, or t
aacgaatacttgcaaatctgcnagcaagccaatnagctgtgaaagttctgcacgttctctgtttctggaanagccgaagaagctctcgcgaattgctttgatgagagaggccgagnagtgnccaggctgaaggtcttccgtgnagctggtggggtaacccagcccagggccctgcagttcccggtgggggaggttcccggaaggagctgagggctccctgcctgaagtccttggcacggcctctcttcgccccgcttcgtcctccccgtacgaaggccagcctggccccccatactggctgcctctgcttggcgggatttccactggctgagctccaattctgctggcaatccccacctgtgtacaggtgctggatctgggagccctgtggtacccccgaacaggccgaggcggggccaccgacggcatctcctccgagtagatccctctggcagcaaatggggtcttcggcggaaggcctgtggtctgctgagggtncagggggcaccagtctctgtaggactg

SEQ ID NO: 446982 - DNA, 518 bp, Homo Sapiens
aatctgcgtgattgctttattgtacaaaaagtttccagtaacagtaaattggttttaaaaaaggacaaaaaagtcattttggatagaagtgcttcactaattgctttatttaagcatacaagaaaaaaagttttatctgaccaattacgttggaagggttttattacctttaagaagccattagctaggataaaacactgaaagcacttgtgtcaaaacaaataaataatgtaaataacgctctctcaattagcagagaaaacagtgaatccgttaaatcagagacacacatcacttcacaagcatggcccagccagcaccaccacccccaaaacgaacaaaacaagagacagcagttttcagttacaatcttgggaaagatcaggagctttggaaaacgcgtggtaaacatgtctgtttctccttctacctccactcaacctgagctgcacccggacactttaaaggaggcatgtgtccagaggctgcatccagggatgcccagagggaggcctgcc

SEQ ID NO: 446983 - DNA, 642 bp, Homo Sapiens
taaagaaataaatttactttaatggtactttcaaaaagactaatccataacaaattaagttatactgtatttcctttgctacccagaaccacagggctggttgtcaacacatattgaagaaatgtaagcaaaatacagaaagtgatgattttcaaaaggaagagaagaaactccttttcaacaaacactttatatcatttattaatgcagtatacattagatctaaaatctgcagtttctaagcacaccatgttatagatctttcagatccttctgcagttttaggttatttctacagaggtacctttaagtgaatgaataccacattctgtaattcctgaaaatatagtacagagtgaaatgatttaaatataatttaggcacatattgattatgaaaatagattatctctcaatacaatacttctctgtcttggtaaaaataataaagcaaagaaaataattcatttctgaagttgctttccttcacttgtaaaggtctgatctcctcccactatgcatatgtaccctttactgttaaggaaagctttgcatatgtagatatagaagaataagctacgtaaatactaaagatatgtcattctcccaaaggagacacaggtggttttcaatgattccttgc

SEQ ID NO: 446984 - DNA, 551 bp, Homo Sapiens
ttaaaaaagagcattttattttaataaagaataaaagagatcaatatactgttttaatggatacaaaaataaatattcattcagcatattaaagatatgtgctttgacattcatttgaattggagattcaagcctattgttatcttatgaacacttcagcaaacaggactgccattcttaaaaatataatgctttgttggacaaaagggacaagccacgtcccctggtcctctcctctattcgcctgtgaactccatccacacgtaaaggacctctgggtctgactgtcccctccacaggcatggtgctgggaaaaggaaacaggcatatctggcttttcagattttaaaccggaaactctcacagtcacaaatccaccatgagacttgggagattggatgagctgtctcccaaaccctaacaccttccaccttctcaaaatgaaggctgccctttcactgggaggttctgaatgcgggatggtgctgactcaggctgggcacaaaggagaaaggaggacatggaaaatccgacaattcgaagtacaaata

SEQ ID NO: 446985 - DNA, 817 bp, Homo Sapiens
  misc_feature (759)..(768): n is a, c, g, or t
aacatggggggtccactagggggtatgttttctgggcagccacccggtccccctcaggccccgccgggccttccgggccaagcttcgcttcttcaggcagctccaggcgctcctagaccttccagcagtactttggtggacgagttggagtcatctttcgaggcttgctttgcatctctggtgagtcaggactatgtcaatggcaccgatcaaggaagaaattcgaaccggtgttgatcagtgtatccagaagtttctggatattgcaagacagacagaatgttttttcttacaaaaaagattgcagttatctgtccagaaaccagagcaagttatcaaagaggatgtgtcagaactaaggaatgaattacagcggaaagatgcactagtccagaagcacttgacaaagctgaggcattggcagcaggtgctggaggacatcaacgtgcagcacaaaaagcccgccgacatccctcagggctccttggcctacctggagcaggcatctgccaacatccctgcacctctgaagccaacgtgagcaaagggcagaggcagttggcctatgagtgggctgatgcgtgaggttggccacacattccttcctgtggacttgacattttggaagaactctttgccagataatgagttcattttagttttatgctcccattgaaaaattttccactatttttataagctgttaatttcttgagtactttataacatgtctgtagcttggataaaccaagtaagtannnnnnnnnngtctttagcaaagtttagactgtgaatatgatgacacagattctttttt

SEQ ID NO: 446986 - DNA, 619 bp, Homo Sapiens
ccgggtacctcagtttctcctttattgctcctgtacgaacccctcccctcccccctgtaaacacagtgctgcgagatcgctggcagagaaggcttcctccagcggctgggtggtgaaggaccctggctcttctctcggggcgacccctcagtgctcggcagtcatactggggtgcgagagaggtgggcagcagctcagcctccccccgctggggagcgaaagtttcttggtctcagcttcatttccgtgaagggcaccgagaactcgaagcccttccagtggtaccagctcactccctgatggtccactgtgctcccgtagagcccgttgaggttggcgtagtggcagttcctgtaccaccaggcccctcggtcggagacagcgcaggagatgagcaagctgttggggtcccgatcacgggcagagaagacactgccgctgtggtagctcatggagtcccctgcggtgccgtggtatccctccaagtggaggcggtagtactccgcagtcgagtctacgtggagagagtcgtactgggcgatcacagcctcgtgctcagccgccggtccacgctcatggagtagtcacctgcctgtgtcaagctgtgcagggcctcatt

SEQ ID NO: 446987 - DNA, 741 bp, Homo Sapiens
agcaaatccctcttttatttttgccacttgttataatatctctaagaagttactccaggaccgggcagtagggattactgattcagatgggtccagtgactagaatatgagtagaaagtgtgaggtctaatttgaacctgtcagagttactgttgcctgcgctggcccaaagtgcagatttttagtcagcttgtgataggccaggtgttttgtctggaccaggagttatctttgacttgtagctagaataaggatcctgagaagtcaggtatccacttgatgtccttttatttgacttgttaccattagtactctcctgggatcaaggctgccaagcctgacctatacccagatttcccagtgcactcaggagatcgtcggtggccttgatgaagccagtgctttttgggaaaaacggagcaaggcaacgcacgacagaagcggtgcaccaaggagtaaagattcagttccatgggccccacttgctgtttgagaaaatgtcctgcttccttcctagctgacttgactcccagcagtaacaggtgggagtgaggacgcagggtcggcactcgagtcgactgctctggctccaggcgtattttctgaaactggactctgccagcccttagcttgtcaagttagcctggccagagtctggggccgactgttccactgggccgtcgactatgacactctgctgtccatgggccactatgcacccctccactgtccttaggatgg

SEQ ID NO: 446988 - DNA, 828 bp, Homo Sapiens
tttttttagcactacaaacactttttttaatgacatcagatggtacatttatacaaattacaagctacaatatagtgaatacaaaatccatccagaaaacggttagaaaagcatcacttaacagaagtaaatcggattcaagtagctaaagaactcaagccccccattttgatgattatacacggcttgaaatgcagcacatccaaatcctccccctagtcagggcactattcaatactacagcatattcaatgactctagtgatgtaaagattctaacacttttagcatcgacgtcaagagacatctcgtaacaggttcactatgcaaaactcaaatgagaatgtgtgaacgttctttgcaaactgtaaggtgctgtgcagatgttgttagctattgctattattactgttcagtgagattacactgaacgtggggaaaaggaagactactctgtataactgacaaatatgacttacagaacatcttaaaaggaatgcagatattactttcaaatacacatagcaacaacacaggcaaggaaagtgtggccaggagtgatgtcgaggaattcctattttaaggaatatataaaggattaagctattcatagattatgtgtaatatttatcattagattcccaaagtccctgaaaataatttatttttaaggtgaccctttccccctgaaaagggaaaaagaaatcttgtcaggttactaatgtgctgcttcagccagctcttgtaaaaattatcttaaacataggagtacagtctgaattaatagttatactaatctggtgggtgacacagagtgcttgacagcacc

SEQ ID NO: 446989 - DNA, 674 bp, Homo Sapiens
gaaccatccagttctagttttatactggagtttccttgtgcctgtccagtcactgacacagaagtagatgcactgtcctttttatcaggctcgacagacaaagtggtgatatctgaggggctaccctcctgtaagagccggtgtagaattttatgccgttctgtcaatgagctatgagaagagggacaagaacctcctgaagagttagcagaggcagagttggaagtgcctgtgcaagacaggacatctttgcagcttgtgtctatatcagcatgccgtaactgctgttcggcagttgttgtcaaaagctgcactagtttgtgactggtttgagagtatttactgtctccatctgaaagtctgtcattgttatgcagaagccctgaatccagaggtttgccatcactagagctgttgtcagattgaatcatttcatttaaaattgaggcaatctctttgttatctttggactcagcttttgctggttgtttatttaatctgcttggtgaattctttgagctcatctgcctgaggactggagaactggcagagaagccaacggagttattgggtccttcattcatacccctgtaagatgttactgggatgtgtgaataagatcgggtatcattattacaggcactacttgtcatgctaacgggagaccttaatgt

SEQ ID NO: 446990 - DNA, 375 bp, Homo Sapiens
  misc_feature (103)..(103): n is a, c, g, or t
  misc_feature (246)..(246): n is a, c, g, or t
gtaagaacatgttttatgtatgattgaagtttttacaacactccggaaaagccatccgatgttagatttaaaaataaaatcgaaagcattttctgacatagtnacacatgaaaaattggaaattccaatatcttcaatagaagttatagaaagtgtgtgtctttttggagtttgacacccacttaacacagcagaaaataaggtactatactgtaaacaaaaaaagtgcagtgaaggacaattgtnaatttacataagaatagttcataaacattttggtctttccataacagtttttatgtgaaatgaataaaaaaacctttagacagctgtcatcactcttgtttgaccacttttcacttatgtgcacacaga

SEQ ID NO: 446991 - DNA, 545 bp, Homo Sapiens
tttaacacttatgcatttattttcatgtgtaagaagaaaaacataactagcacgtgaacatgactgcatggatacacggctcagcacgaggctaaagtcagaagtgagtgaaaacaaaatagcatgttgatttaagtgaaataacagaacaggaggcctttggttataacaattgtggaggtggtctgtgaatgcagaagttcgggactccctgctctaggctcagggcaagacgctgtggtctgggccgaagcccctggggttctacagagaagcctgcccagtgcacggcccctgtggcattctcgtgggagcgtgtgagaccccagggagggaagcacattctgtttaacttgtccgtgccgtacaaaatgtcttagaagtgataaagcaacaatgatgattctccttcaaagggaagaagaatcttccaggtgtggtcttgaggacgcagaggttacaacacaggctgggctgcagggcccaagtaggacttgaggtcataaccagaggactgaagggacacctgtcctggcaccatactg

SEQ ID NO: 446992 - DNA, 579 bp, Homo Sapiens
  misc_feature (551)..(551): n is a, c, g, or t
acttttaaagatatttaatgatgtttttcaaatcagtacaaaaatttaaatacaaaaatgatttgctattgacaagtctcaaatctgtcatgggaactcaaacaagttaccagtctgttcaccgttcattgtattctataaaatatttgataacagtcacccactacagacattcttttcccctgtgggatgtcatactgcattaaaactctgtatttacataacaataatatgagtttggtccatttcacatggaagaattctggttaattttgaactaaatagggattatagcacaatccctagactttagaacacgtggttgtttcatctgcttttacactaatatgttaacatgttgtgcagcactcaaaagggaaatacaggcacatagataattatttaaaactcttttttaaattaaatggagtatcatttaggtctgagattagcaccattgtagaatgcacagtatttggcatagatgttgctcctcttctatctaaaagttagaaacctatgtccggataataccctacaccacatgcgcngctacacacacgtgcgctcagccaacaa

SEQ ID NO: 446993 - DNA, 544 bp, Homo Sapiens
tttttaaaaataaaattcatttattgaaaagaaaaagcttaacatacgatccatgtgcaaaccccaaaacaggatctatgaaactctggcatgatccacatcgctacacataccatgctggaagtgcacatccacacaggcacgtaacatacacagtactgtctagttatcaacacctacagattggttgatttttcttcacacaccattgacatgttttacaatagagttaccaattttattatccactgaaagagcatagcttcccccagaatcactttgatttaaaccaaataacacagtgaatgacaggcaccctgcacctatatctgctaccttccttactctgataacctcctaccagcaccatttatgtcctctggccagggaacgactcagtggcacaaaggaaagagaagaaatgttacaggctgatgctgtcggggcaaatagccctgcaaccagccggacttactgtctaaaagtattaaccgtaatttcaaagacaaaccacaccccttccttttcccctaatggcctcaga

SEQ ID NO: 446994 - DNA, 476 bp, Homo Sapiens
tttttttcagaactatctgatatttatttcccaatattttgatacttgttttacaactggaatacatggaatgaaggggctgatatgggaccccaggtaagagtgaggtcaggactctctaagggtctggggttccccctagaggggactttgggcatccagtttcagggactgagccgggttgggtcggggggcagcatggcatcggacgtggtgccgtctgtgcctctcctgcctgcggtacagccggcgcaggtgtttccgaacggcccacagcaccaggtacacctcccacagcaactcagcctccggagtcttcaaaggtgactgcgtcctcacttgggagctgactgaggcagaactcactgatgacttccagctgcacatctgccagccgctctgcagggcagagaccatgagcgtggagacagacttgacggccgtcctcggcagctgcagtagggattggccctgtt

SEQ ID NO: 446995 - DNA, 168 bp, Homo Sapiens
ttttctctttgagtatctttttaatgacttaaacaccagcacggagactcgccatgtaaacggcctcatttctgtgctctgtgctttgggagggacagggacaccatttcccacctcggctgagttaaaacctgtcttgtaaattaataaataatttcctaacacggc

SEQ ID NO: 446996 - DNA, 513 bp, Homo Sapiens
  misc_feature (343)..(388): n is a, c, g, or t
  misc_feature (410)..(430): n is a, c, g, or t
atattttctaaaatttttatttcttgttcattttgtttctaagatattcactcacatattaaaaataacaacgtctcaaaacatttgaagcaactctcttcatcccttttaaaaataccttgctgtttcgggggttaaaaaaagccacaagggagattaaaacaatacaaatatttattttcccaactcccctgccatgggttctgggacgtcaccgcctctttctggggcccgtttcatccttttcttttaatccaagaagcgatgggtgttgtgcgccctgtagtcccagctacctgggaggcaggctgaggtgggaggatcttttgggtccaggattttnnnnnnnnnnnnnnnnnnnnnnnnnnnnnnnnnnnnnnnnnnnnnnggaagagcgagacactgtatcnnnnnnnnnnnnnnnnnnnnngagaaggcatcgcggctctgtaacactccgtccagctctcgcactctcagatgcaaacttccacacaaactcctcggctcccc

SEQ ID NO: 446997 - DNA, 508 bp, Homo Sapiens
gaaaggatgcactttcatgtttaacaaattaaattaaatatacggggcttcagctcaaactctacataaaattacagagatctggtgccacctcatacagtggggtggggggtggtgtctggcctggacggggtgtggtcatcagcatggctgaaagaccaggcgatctcccgggccccaggagagaccacagtccctgcaacccagtcttccttccatcattattaatattatcttcatttcttaaatataaataccaaggccccttctctgtgtcatggggagaatgcactggggatgagccactagccatgggctccagcctctcatgcttggggcttctgtgcccccaaccccagcccacagtaataggggactcctgggcacatctggcaggtggcaaaaatagccgccaaggccaggggatagaggcggggatggaggcggggattgaggcggggacagaggcgggcagagttgggggattgacggtggagcagggaaagtc

SEQ ID NO: 446998 - DNA, 323 bp, Homo Sapiens
tggtcaaagtataaattcatattttgtaggaaatgtagtttacaaaacagtatcaattgctacccccaattcagatgacccactttccccggaagggggatgtttaggtcctattccactgggcaagggtaaaatgattcagtagtcttccaggttaacagtaaattcttctcccaaggctggggccatcaaggcacagtctgtatgaggctcaccctgtctgaccctaggctggggctgcttgcttggtaggcaggaattggggtgggggtgggggctcagggaagggtctggaccctgagacttctgcttacaggagggtg

SEQ ID NO: 446999 - DNA, 539 bp, Homo Sapiens
tcgacagaattttttataattaagagcatttatccaggctacataccaacagggaaaacatgatacactattaagtaaaacactaggacattaaattgtatatattacatgattaaaactatgtaaatatttgtatctttgaaaaagactgaaaaataattacatatgttcagaatctaatcatttcccacctccttcaatgcaatggcctttgtctcttgggagaggagggcactggagtcctagtctaggggagcccagcaccccagtctctcgcctgcaaccctgttaacagccctgcactggtctctctgctttcaccctttctctctccaacctcctcagcactggccagctagagaggtccttcagaatgtgaatcagctcatgcccctcttctgctcagaaccctaggaggcttcctgtatctctccaactaaaagcttcctgccatggccgtccaggctgcagaatgtcagctcgcctgctctgacctgctgctcggttccctgcctatgcctgcctctccagccatgctg

SEQ ID NO: 447000 - DNA, 550 bp, Homo Sapiens
  misc_feature (13)..(13): n is a, c, g, or t
ccttccattttanaatttttcttcagatcccgttcagttttatttccattgcatctaatgaagcaactgaccctcaggtcacaggcagagagagtcacagcagcagactgctctgggtcagtgacaactgtcctcaggagattgtgttgttttcttcttcacctgctcctatctatggacttcattttagtcaccatggagtaaaaacatatattcgatgatctgctcacattcctgctctctacctacttcttggtattccgaattgttcagttaatttagagaaggccttttctgaagggatatctaaaaagcataggaaatccttgttcagagggaagtgggtttgcttcatggttgttaagtctactgtctggcttcttttgcatttttaaaaataagacgatttaattttaatttcataggattttatagaaaagctcttaattttctactagcagtatatagtatcacttctattctttttgttaaaggaaaaggaaatgtccccaaagtattaaagaattaaatgatactgaaaatttgtatg

SEQ ID NO: 447001 - DNA, 1945 bp, Homo Sapiens
  misc_feature (31)..(31): n is a, c, g, or t
  misc_feature (67)..(67): n is a, c, g, or t
  misc_feature (101)..(101): n is a, c, g, or t
  misc_feature (618)..(626): n is a, c, g, or t
  misc_feature (708)..(717): n is a, c, g, or t
  misc_feature (990)..(1003): n is a, c, g, or t
  misc_feature (1011)..(1053): n is a, c, g, or t
  misc_feature (1192)..(1466): n is a, c, g, or t
  misc_feature (1748)..(1748): n is a, c, g, or t
  misc_feature (1919)..(1919): n is a, c, g, or t
tggtttttcccaaaggttttatatgccaggntttttggttgtaccctgtatccagatcttccttttncactgtttctaaccaattctaaccactttccttngaatccatttggttcttgtatagagtggtaacttattggggataaaccacttccaacttttggcagaaaatactttggattctccccaaggtcatttgtattcagagtaaatcagtggtccacccccataaaactgtaagacaagcctcctgtatgaagccagaagcacaagtgccttcagagggcagttgattccagtccagttgcctccctagcttgtgtgtggcctgcctccaccatagcagggactagggagggaggcagggaacgttttttcttttctacatcttcacaggttcggctgggggcagctgataggcctaaggccataccttactatttaagatactctgatcgcacaactgcagagacagggttccctcactgctagtcagcttcttttggaaactggacaggccattgccacctgcactttgaagaagtgagcaaagacgtggccacatttctaataagttgaaatggtctttctcccttcctcagagagcaaccagcttcnnnnnnnnnaaaagtcctttctatctgttggatacaacagtgtgcttttggtgcacattttttagcaatagttgtgaattaatggcaaagnnnnnnnnnnttatttaccagccctcagttgtgtttgcccgaggggcctttgagcaaagaaatgggttttgctgggtcattttgccctgtgtgctaagccttgggtggctgcattcccctcctgtcatagatctgacccccagcatgattgtatttctttcccctccagtcaaaccgtaatacagtttccagaaaattcgacagtctgcaatgccaaaagggtaaaaatctgtatttcacagttgtatagaataaaggctttagttacaccacaacaccccgnnnnnnnnnnnnnncctctcgnnnnnnnnnnnnnnnnnnnnnnnnnnnnnnnnnnnnnnnnnnnacacaaaaaaatttcttcttttacaaacccccactctccccttactcctggacacctcttcccgccgcaatcccccccgatataagagcgctataaaaccatatccccccgcccaacccatttgccctccccgtctttnnnnnnnnnnnnnnnnnnnnnnnnnnnnnnnnnnnnnnnnnnnnnnnnnnnnnnnnnnnnnnnnnnnnnnnnnnnnnnnnnnnnnnnnnnnnnnnnnnnnnnnnnnnnnnnnnnnnnnnnnnnnnnnnnnnnnnnnnnnnnnnnnnnnnnnnnnnnnnnnnnnnnnnnnnnnnnnnnnnnnnnnnnnnnnnnnnnnnnnnnnnnnnnnnnnnnnnnnnnnnnnnnnnnnnnnnnnnnnnnnnnnnnnnnnnnnnnnnnnnnnnnnnnnnnnnnnntactacagctgatatagtctctcatgcaccccgcccctcttatacccgcgatcacctttccccccctatttctcttttctcgcccgatcttacgcccgctcgcccgcgcctttccttcttatcgcgcgtcccctcgttgttataccgcgcgggaaataccactgagcgtctcccgcgccgcgcgtcctatatcccactccgtgaacccaaactccactccttatcgtcgccttcgtgattaagccgccgccccgccacgccgcataaatccccgcgcgcatncatcatttacccctttattaagcccatcatgcacccgcagagtatagcctcccaaccgcgcccccctttattacaccacccgcccacccgcctcctcgattgcacccccatccttgcgccgtatattgacaccgtattcacctatggactgaagcgagataccccctagcntaataccaagagccctcatcgccgct

SEQ ID NO: 447002 - DNA, 926 bp, Homo Sapiens
ttttttgtggtgacagactttctttataaacatttggaagttttctcccccatcttcttaagaagcaggggggcaggtggaggagagtgaggggagagctgcccggtgcagacccaggacgagggctgcacttggtgtggccgtgtcctgagcctcagtgaggctgggcagatggtctcggagcctccatggggcgtagcaggaaccgggcttggcttcctattgtgactgatgagaaaagtgaccacgtgggggtcagtcgggggcaaggggctcagccccactggactctgggctgcagaggccaccccccaggtgggggtgcccgcagggatggaggcagctcctgaactggtggccagcccacggggtactggaagacagtggttctgatgggttcagccctgctacttggggctgagctcagccgcttggctctcttctccagccagtcctccagatggccctcggggagctcaggagcatctagtagccactccctggctcgcctctcctcctccacctggatgctcagctcctgcaggtctcgctctgacatgtgggaaaatctgcagttggagccaaagtcgcactggcctgtcagtagaaacttcctgcagggccgcttgttctgctcatccagcaagatggcagctgcatctcggaacatgtcgtaccagaccttcttggccttgaggtgctgcagcccgttcaggtgcttcttgcggttgtggaggttgtcctggaaggagcggtcgcagtagtcacagaagtatcgcttccccatggccactcagagcaggtgctttgctgcagagaaggaagtgttcaagtcttccagtgcggagaaaagagactaggactcgcccctcgacgtctcgcggaaggtacctggctccccggtggcgtgcagctccgggctcccc

SEQ ID NO: 447003 - DNA, 886 bp, Homo Sapiens
agtcccccggggcacgggggggcttgccccccttggttgtgggcccgggtgtccttggaaccctccaagtgaaggcctggggccaaaatggttttcgggagccctccccatgggggggtaagccaaggaacccaggggcttgggccttcccttattggtggacgggatggaggaaaagtggcccccccgtggggggtccaattcggggggccaagggggcttcaagcccccccttggacttttggggctgcagagggccacccccccagggtgggggttgcccgccagggatgggaggcagcttcctgaacttggtggccagcccccgggggttctggaagacagtggttctgatgggttcagccctgttacttggggctgagctcagccgcttggctttcttttccagccagtcctccagatggccctcggggagctcaggagcatctagtagccactccctggctcgcctctcctcctccacctggatgctcagctcctgcaggtctcgctctgacatgtgggaaaatctgcagttggagccaaagtcgcactggcctgtcagtagaaacttcctgcagggccgcttgttctgctcatccagcaagatggcagctgcatctcggaacatgtcgtaccagaccttcttggccttgaggtgctgcagcccgttcaggtgcttcttgcggttgtggaggttgtcctggaaggagcggtcgcagtagtcacagaagtatcgcttccccatggccactcagagcaggtgctttgctgcagagaaggaagtgttcaagtcttccagtgcggagaaaagagactaggactcgcccctcgacgtctcgcggaaggtacctggctccccggtggctgcagctccgggctcccc

SEQ ID NO: 447004 - DNA, 522 bp, Homo Sapiens
gctgttatgattagatatttattgagcaccaggagagagtcagaacattagacttatagtggaggagcagaactgaaccctggcctgtgaaataacaatttcaattaaaagctgtctggccctgaagaaagagaaatgatcctggatatagctggtcctctgagctggcagagctgagcctccctcgggtcttctggtggcaagatgccaaagttgaatagtgtctgtaggcatgatgaccaagtcctagtgctatgggcatcttccctctggtatttagagaggagtaccagaagcccccggcagagatactagaagggcccagagccaaatccagcagctggcttacttgagatgcatctggcaaattccagggcaaagccagttgactcccagcggctccagttttggtaggcggacattttgggctatccaggaagagaggtagcagggaagaaggccatgcagaaggcaaggactgactaggcaattatgtcagcagatcctggcctaatggggcat

SEQ ID NO: 447005 - DNA, 738 bp, Homo Sapiens
cgcccccccaaaaagggtggcggtttgagtgtgttggcttcggcgatgcgcacgtggctgcggcacacctcgcgaatcaggcgcaggtgagggtcggcctccacccacttgccgttggtgcccagcacgatgccgttgtcgcgtgccagtatcgggcccgccgcctcccgggagcgcagcacggcccgcgggtcgcgcaccaggtgcacgatgcgcaggttgagcgcggggtcgctgagcagcgggtagagcacctgcaggttgaagaagcgcacctccttgagcaccacgtggctgtaggagcggcaggcctcccgggccaggctgaatggctgccgcgtgcacagtgtcttgcatacgtcctgcttgctgatggtgcctcggggaaaggcgctgcaggcgggcggcgagcacagcgcgcggctcgttgcccagttgaaataggcggacaggtttcggctctgtggcatgtaggcatcagacacgtgcatgtcgcacaaaaagatagagcgcatcaggtcgcgcacggccatgtgcagcgttgccgcgctgccctgcgacagggtggtccacacatgccacgcgggcttcatcatgtagaagacgtcggtgtgctgggctgaagagctgtccctaagaggatgagcccgagcgccacgaggacagcatccgcacgtgcacacgatgctcggctgcggctggtgatgatggccctggccggcagatgatgaagagcag

SEQ ID NO: 447006 - DNA, 540 bp, Homo Sapiens
  misc_feature (354)..(354): n is a, c, g, or t
aaatggtttaattttatttcaaaattgtacaaaatggccataagcggctataaaaaatttgtcttcagaacatgtggaaattcagaaacaacaaaacaggtatcattcacagtgtaatggaaaagctttttctgaggcaggaattataactcttccttctttttccctagtctttcatggtctccctcccggagggctcgaatataattggtaaatcccaattctgtgcggtcgctgtcatacttttctgcgaacttcccatagtggtagtagtggaaagtggggtagcccttgaccgcctcctgctggcacaggtcttggttcttgtctttgacgcagtcaacagcgggcacnaggcaatctttcggtcatctttgaaggcatcagcagtagcagtaaagtgcggaatgaccttcttacagtgtgggcaccaaggggcgtagaacatggaccaaggtgtgtttcttcttcttcagggtctcccggaagttgtcccccaccaggtgcaacacgcttgtctgctgctcttcccacgtgggc

SEQ ID NO: 447007 - DNA, 1800 bp, Homo Sapiens
ttttttttggtcttatgtataatatttataaaagagggctgccagcctccccaccctatcccagtgtggccactggggtctttggctcccgggggcaggccactctgggcctcggcctgtttcttctcccagcagtggaatgtgagctgtggcccaggcttgtggcagggggagtcccagcctccccaggactggtgaagggacaggacaggggtctcttgggggtccctacaccagccccaccctcagcagaacctgctggccccagctatggggtatgggagggtgtcatcctgtgaagggagatgggagaagagtatccaagggcccaggagtctgaaaagggcctagggaataaaaggggggaaaacaagtgggctgggggagatgaggccccagggcgcaaaccgtggcctagcagcagggtcgggggatggctgcaggctgatcccagctgtgtatgttcctacaggctgtgtcacctcaggaggcagctgctgggccccagtgtatgcatctgtgcaaggagggaatgaggggcttgggcgggatctaaggcgacagccctaccctgcttccagttcaggaagcctctacagctccagagcctagcagggtagtggcccaagggccttgttcttggctcttgaacaaaaacctttcacagagaggacatggggcctggctgaatgccacagtgttaatcgcgtgtttctcctcccccgactggccactggatgggagcaggggctgaagagtctgggcagggctgctagggtgagtagacagaacaggatgagggtcaccgctatttggtttccatcacatgccggcatggatcccatgaaggacccagtcagctgcatgatgaacgctcaggctcatggtcaatcagtcatacaagcgcgagtcgggggacggacgaacagacgcgcattaacactgatggcactgtcgaggcaggccccatgtcctcgtctgtggcgaggctctcgtgtctcgacgatgcccgcgagcaagggccctgtggagccgacgtacacctgcttcggccttctcggcagcctcgtcagcacgcttccctagaaactcggtgacgcaccggctcgaggctcgtctgcgcatctccacgatcccccggcgccgagaacgggcgcacgtacactgcccgcgctcgcattgagcacccgcaatgccaggtaccgacgtgcggcgcgccaccaagcccgccccgtcgaccatcccgtgcaccggcgtgccaccacaaggcccgcgcactccgacagcccagtaccgaccagccccgcgggaaaaccacccgccccgtggccacagcgcgcacattcgatccgcctcacgcgacgaccacagatggcacagctcgccgcaacagcgggccgacgagccaggaagcctccagcccgtcccacggcaggacgcgcagcaccctgtcacagcctcgcctgcacgcccctcacgccaaggccgctgaccggatcgtccgcagtacaccgcgaagccggacccgcacacgtgccacgcacgaccggcccgcgccccagacggaatgacgccacgagactcaagcggcgcgaggagacgatacccccgatcccgtcccccccactggcacgccccctagaggcccagcccgcacgcaccagcacaccacaacccgtgccggcactcgacgcaccgacgcgcacgcgacacagcgcgcagcgacgccgcacaagcgtccgcacgcgccacggtatcgccggacacaccacactgcgagcgccaacacgacgcacgcca

SEQ ID NO: 447008 - DNA, 1057 bp, Homo Sapiens
caaaaaagtggcctttattttccaatttctatagcaaaaccagccataagtgaacatggatgctcttcaatatttttccagtattaaatgaaaaaagacctctgccccagcccacatttcctttgttgaatgagtagagaagactgagaagtatcactcacccgtgatgtggtttgtcccttttccagccagtgtgttggtaataaaagtcacctttcagagctttggtccctgtaatgcccgtctttcctgtgtccaggaataacctttgctactaggcagtcctctgaaagatttgtagaaggttaaagtggaaagggacttggaagctcatagaatccatgcctcttcttttagcatcaaggaattagaagtcctgagagatgaagaatgttgtcttccaactcaaaccatttctgaagccatttccctgttactgcattgcccacaacccttccccattgctatcctcatcctgctaatgctgtttttaatgactgacagtctgatttgtctttggcagcaaacattttgcttcacagattcctacttaaggaagagaggggctcctcattgtcactgtacagagcaggctggtcagctttacacaggtgtcagatgaaccgtcacagccagatttgcatgttggcctcaggagggcttcaaggtccaacatctcgacgtaaggagcgtttccagttctttcatgctcagataacagtgctaactgcagctgtttcatcccaaatccctatttgaggtcttaacatctattccattttgccaacaagggttatgctgttaaccctctgcaccagatttagagctgactgatgcactgcctagaagggtgagagagactagagcaatgaaccatcgctgattttagcacagaatacttccctgatacagcaggacttggcatgccctttagaaaacaaacaggtgttaactttgaaatcattacacatctccctgcccagctttaaattaagtggaaccctgacagctagctttaaaacacattgatgggctgggcacagtggctcacacctct

SEQ ID NO: 447009 - DNA, 956 bp, Homo Sapiens
agtctctggtggctagcctgtcctgacaggggagagttaagctcccgttctccaccgtgccgtgctggccaggtgggctgcagggtgaccgagagaccagaacctgcttgctggagcttagtgctcagagctggggaggtgaggttccgccgctcctctgtctgtcagcgccggcagcccctcccggcttcacttcctccctgcagcccctgctactgagaagctccgcggatcccagcagccgccacgccctgtgcctcagcctgctgggtgctccatgtcaggtcctaactacctgactgcgcagactgggcaggaagacaggacccttgtacattctcctatctgcactagaggtcctggctggaccgagcagcctcctcctcctaggatgacctcaccctccagctctccagttttcaggttggagacattagatggaggccaagaagatggctctgaggcggacagaggaaagctggattttgggagcgggctgcctcccatggagtcacagttccagggcgaggaccggaaattcgcccctcagataagagtcaacctcaactaccgaaagggaacaggtgccagtcagccggatccaaaccgatttgaccgagatcggctcttcaatgcggtctcccggggtgtccccgaggatctggctggacttccagagtacctgagcaagaccagcaagtacctcaccgactcggaatacacagagggctccacaggtaagacgtgcctgatgaaggctgtgctgaaccttaaggacggggtcaatgcctgcattctgccactgctgcagatcgaccgggactctggcaatcctcagcccctggtaaatgcccagtgcacagatgactattaccgaggccacagcgctctgcacatcgccattgagaagaggagtctgcagtgtgtgaagctcctggtggagaatggggccaatg

SEQ ID NO: 447010 - DNA, 1876 bp, Homo Sapiens
  misc_feature (235)..(257): n is a, c, g, or t
  misc_feature (881)..(897): n is a, c, g, or t
caccttttatcacaaagtttttattgaacaaaaataatatgacagtaaaaatgatacataaagtgaagatttgcagtcatagaaaagatgtgtacaaagagaccaacattcaggttatatagttctataaaacttttcccatagcagtttaacactgattaagcagacataaaagggaaaagaaagtcattaatgttctttgaaacctattttctgagtaaaatacctctgctannnnnnnnnnnnnnnnnnnnnnngaatgaggcagagctatatgagtgagttattcttcagttcctccagttctctgtttgtgttacaggagtattttcatccatcaaaaaattgtagtatttttgcatttctaataaatgggatctaggggcatacattaatcccagtttccaaaggaaaagaaagaatcagatctatagtcatttaaatatttccaatcagcatttacgtaaacaagtatactaaaaatagtagttttggttgagattttcgcacattaacttcctttagtttgtaagaatcatgcattttggatgtgttctcttatctgacaacacagttttaaatgctgtctttatctgttttgtttgttttactaataacacgtagttttgaaccagtaattacttaacagctaggcatgggggagacagaattggactgagcaccaatcattgttctaccttcagtgagctgtgcagccataggcaactcccagcttctgctgtgcacctgtcttgagctggaaacaggtggcgggaagcattctcaaaggccccttctagcactaactttgtatgttcagtaaatatcagttccctggaccagctccttttattctggtacagaattattcttagcctatnnnnnnnnnnnnnnnnnacagtagtgtctattatttgtgaattttggaaccagtgtcattactttacagtcaaggaggcatgttagagtgtttggatttttatcccttgataagggcccacatccccacatacagagatgctcaattccaattgaaaaacctcagaatttctaagtgtcaaagcaatagtctagatttttttctgaaaattcaagaaatgtgttttctcaaatctctttttttatcctttctcataatcctgccacttaatgcccagtttggatcagttatttagtcacatttcaagttagtttttatcatcacttatagttaaggattgtaattaatcttgaatttaaagcttggtgcttttcagttttcttgtattagaactttccttcttcatgtacaggtgtggtacctttggactggtgcctgctgattttctgatggaacagaaaatatgtctgtattatcactgctccaaattacattacacaacagaatttactggagtgttccaagttatcatcagttcagttccacgatgatgaggttcctgtagaatttttcatctgtcagatttccttcattctcccctaactttagtaatacataaagcagtgtatcctctctcagtttccacaagcaaggcctttagtacctccactctctatttgtattacagcaagtttttgatccatcaaaaattgtgaacacctacctatactgatgaagatacctagtgttaaaaatggtttctttgttgtttgggttcatcaccactctgtgagcttcttctaaagcattagattttttaaatgttaattatagttccaggggaaccccaacttacttatactgacacagtaaatatatcagatggtcgggattccctatggaaaactgagaaaaccagggctaattttttgaaataagaatatgctagcctaggagatattcttgggcctggaatagcataaacttgatgtagct

SEQ ID NO: 447011 - DNA, 1140 bp, Homo Sapiens
ctccatttctccaaggatgtcggcaaaaagccttttctttcccttcttggtccaaataatggataaaaccagtttccccggaaaatttgaggaaatgaccccctgggttacttttcccttccttccctgaaacattcccccccctgaaaggtgccaggggatgactccctttccctaatggggacagccaccactggtagcttttccctgggtttgtggaggaagggcatggccaccacacccattggcagtctgctgcagggacctcacgatgagaggaagcaatggatgcctgggccagggaaatgcatatttgggagaaagcaggaaattctgatgtagagatagggaagaaccctggggaaaaggacccaagctgggcggggaggaggaaaccaccaggatcccaggatcagagacaaaggacccagggacacaaacaaagtgaggccagatggagagggcaggctcacggggagagcaagctcacagggagagcatgagccaaacctggcttatttcacactcatcggagagactgcacagatggggccaaaccagggcccaggagcatcggagagaggaaggccatttcaaagacttttgtaaaataagctcaaagtttctttgtttatttgtgggtgtgggagtggaaacgtagggaaagtgaagaaagtgggggaaaagggatgggtgattttgtaggcaagatgctccctgaggaggtcctggtggacctgctgtggggagtggcattctgcacactctcatatcatggggagcgcatgactacattactgcttacacatctccaagtgcagcttgtggggtgaatgtttaattgtctcactgtaactgtctaaatctctggaaaatgtgaagggtcatgcatttgatttaaacctatgaggtctgaatgaattctcctccatgcctaaccgagtgaagcaagtgtataaccaaccatgcatccctaagcagggccggtttgaaagggaggaaacgcctccccactgagctcgcaaagatcttcatcactgacctgaatcagatccggcaggaaatgaaacactgagtacatacttttacagtagagggagggggacggaaaacaagtgagctgaactgaaatgtgagaaa

SEQ ID NO: 447012 - DNA, 911 bp, Homo Sapiens
gctgtcacacttcttagattttacaaggggacacagaaataatcagctgtgaaagggcactggcagttatggatggtttcattcctgacacgctctgcaggatccgtgggatcagaagagacccttggaggagcatctcttaacaacccacctttggggtcctacatcatcttggcttctggtaaattttgacataaatgtgccacactggcagccactaaccaacaggggctggggtcaatctgcatgatttatctcatacacaacttgttaatgctatgatcttaggaatctaatcaccaaggtgaggcagcctgcagtactgacctcaccatccatgacccttcttcacagatgcccagactcaggtaaccatgatgttgtattcagaacctgtaggtttaatttcagaccctcgggatgcatctaaggccaatctgtgagccattacaacctccaaaaggcatttaggactaatctgatgatctttgcactgccaataattaaagatggcaaccaatgggctaaatggtaacaacactcatatccttacattcatagtatttctccccagtgtgaattctttcatgcatacttaggcatgaggaaagagcaaatgctttcccaaattctttacatacaaaaggtttctctctggtaggagttcacaggtggggtgaggaatacagaaattctttcccacatatcttgcatttacctttctccactgtgagttttcaaatgtttactacgatgggaagaagtaatgaaggtcttcccacattcaacacattcataaggcttctctcctgtgtgaattcttctatgttgagtaagcgttgaagatctattgaaggctttcccacattccttacactgatagggtttctctccagtgtgatttcgtatcc

SEQ ID NO: 447013 - DNA, 487 bp, Homo Sapiens
  misc_feature (75)..(86): n is a, c, g, or t
  misc_feature (407)..(407): n is a, c, g, or t
  misc_feature (476)..(476): n is a, c, g, or t
atttcgacattttattgaacttttcatattacacaatttacccaaaacatttaaagtaacagtaagacaaacttnnnnnnnnnnnngtcatacagacaaaacatctttaggtgaggcaatatgtaaatttcattgtcaaatcatgattttgttactctgctatacaacttggtaccatatcaatgctactaaatgactcaagagtaagacattatgcattccgtttatatgagaaaaagagattatttacaactacttgaaagagaaacagaaatgccaacaacagtttcattcaaattctagtgcaatgtcaattgttaccaagagatcttatttgcttatataaattttggcaaataattcaaacctgggctatcttattagaagctgacaaagtatgcttttcntgttgcaaaagattcagtgggacaaaaaatcctccacaacctcaggctggttaaaaccaattttaagcngccattttttt

SEQ ID NO: 447014 - DNA, 1058 bp, Homo Sapiens
  misc_feature (128)..(138): n is a, c, g, or t
  misc_feature (156)..(164): n is a, c, g, or t
  misc_feature (296)..(305): n is a, c, g, or t
  misc_feature (368)..(490): n is a, c, g, or t
  misc_feature (496)..(501): n is a, c, g, or t
  misc_feature (507)..(516): n is a, c, g, or t
  misc_feature (518)..(623): n is a, c, g, or t
tttttccccccaggtggcaacacaaattgttggggcccccatttggcccacattttgttcaaccccacctttttccccaagggggggccaattttttctgccgccaggggtttataaaaatgttccannnnnnnnnnnataaagggtggtcccacnnnnnnnnnaaaaaataaaataaacaaattgcccccaaatccggtgtaagaaaatccccacaagaaccccccaaaaagcctccaggcgaggtttttcaaaacaatttttagagtcccgccgggattttctttttaattggnnnnnnnnnncgccctttgggccccccggggggtttttgtgtggggacctttcggggccgcctccgcggcccnnnnnnnnnnnnnnnnnnnnnnnnnnnnnnnnnnnnnnnnnnnnnnnnnnnnnnnnnnnnnnnnnnnnnnnnnnnnnnnnnnnnnnnnnnnnnnnnnnnnnnnnnnnnnnnnnnnnnnnnnnntttttnnnnnntttttnnnnnnnnnntnnnnnnnnnnnnnnnnnnnnnnnnnnnnnnnnnnnnnnnnnnnnnnnnnnnnnnnnnnnnnnnnnnnnnnnnnnnnnnnnnnnnnnnnnnnnnnnnnnnnnnnnnngtaacatcttttatttgtatacaattataaattacaaacttgttttattaggttttttaaaatttatttttcgtcaacttagtcccttttatttaccagcagtttgctctgacagaataaattacaaactattgttttgtttaatccctttaaccatcatgtcaggcacacaggttggagaatattagctcccattttatggacagagtggaaacactgtacccatatttagtgtaagacagagctgggatataagccttgggcttccatagtcacaactgcttttttgcataactttgtaatacatcattttaaagtaatctgatttcacaatgttttacagtatagggagtaacatctatagcatctcttcttgggcagggttacccctgggaggggaaccccattctaatttacccccataacggtgggcac

SEQ ID NO: 447015 - DNA, 990 bp, Homo Sapiens
  misc_feature (44)..(86): n is a, c, g, or t
aaggtgtgctctccctcaaaggaagtgtttcatggttggagctnnnnnnnnnnnnnnnnnnnnnnnnnnnnnnnnnnnnnnnnnnnataacaacaggcagcacatgccccccacaccgcaccccatgcccaatctcagggtgggagacaagaggggggactcattgtccggagggaggctctggagggagacagccctgggtcaacccgactgtgtccccacacccaggactgccccatggcccctccagacctgctccagaggcccttctccggctaccccgtgctctccccgctaaccgtgttgccccatgacccgctcagaactgatgagatcaagggaatgttcaagcgaaaagccgagcaggacggaccttccaagatgtgccagcttcctgggatctcactgcagcagagcgctgaggcccagcagcacaatcagcagctggggcgccgcagcggagctggagtcctgggagctggggtagtacttcttgtccgcgattctcacgcttaagacctggttttctcttctcagtcgctccacctctgcagacgcgtcctgaagcttatggtttaatgtagtgatctctccctcaagctcctccactttcttttgtccttgggccttctctgcatccagggaagccattagggccatcacagtgtggttgcaggtggcggcctgggcctccacatcctgaaagcccttctgggcctcggtcagctcttgttgcaggagatgggtgacattgcgacactccatcactgcccgaaggccgtcccggcaggcctcgctgttggccttgatggtgaagataatcaagggcacccccagaatcacgatgatcaggagcaccagaattcctatccccagcagaagcttacagcgcttatccccgtcttccatgggcactctgcaatagtcatacgaagtagatgccatccagatctcccctttagctgaaaggagtctggcctggagttaggc

SEQ ID NO: 447016 - DNA, 535 bp, Homo Sapiens
tgcgcactgaacgttgctttattcattggttaattttcctaacagcgttgtaaacccaggccgggatgtcctgagcgttctggcagaggcccgtgcagcctcggccccttccggtccgcgctagcctggcctttgccctgagctccctcagcttcgcaagatgagcttcccagacggggccggggcctggctctgagggaaaggcgttcccgccaggtctggggccgccttcccatgttctctaaagcccagcacctgtggttcgttggcggggctcgtgggattggggtaagggctgtggtttcgaggccgtctgtggccgcccccagcccctagtctgcgagacgccggccccgcctttgggcggcctcctgcctggggggcctccaggcctggctacgccgaccggcacctgaactccctgcacgcgttgcatgcctcccacagagatgggactgcttagtaagaccttgctcaggtcagtcaggaagcgggttggcgggcaccgcgggacactcagactggcaaacaccct

SEQ ID NO: 447017 - DNA, 688 bp, Homo Sapiens
  misc_feature (45)..(79): n is a, c, g, or t
catattgcccaggctcgtcttgaacaccggggctcaaggaatctnnnnnnnnnnnnnnnnnnnnnnnnnnnnnnnnnnngtgtgagtcatcatgcccagcctccttgaagtttactaacaattgggataactgagggaagagaagtgacaattccactcagtctattagaggtctggatataaggtagccacacaataactctaacttgacttctaaccattctatcttattgatttggaggctgtcttctgccagattttttgtggcttgagatgatattttcgaacccttctttcactacctttcttacccttaatgtgccaagcttgaaacaggatttgatttcctgagctacttgttcgccttctgtgcgtcaccaagtaatctggttcatctttcgtctcattcatgttattttcaagtgaaacaagacattttgggggtcaagtctctttgggtgttttgtttttatgtatataaaaatggattttgtgttccctttccatgtaagtaccaacttatatggaaactcacaatcataatgtaaagaagaaatgaaagcctggtgtattgtacttcaagatgcctccctgatgtatagaatctccttgtaaaataaataattgcattgtatatcagtcttcccatcaatattaattattaaatattttagaatttttaaatacc

SEQ ID NO: 447018 - DNA, 1853 bp, Homo Sapiens
ccagttaatttagtcctttatttttttcattctccatagaatattggttttgtaacatcgaatacaatccaatatataacattaaaacaatccgatacataccattctgctttatgaaagatcagcaaaaatacataaacaaggatataactagtacatttataaaatacatcataacaatgaaaccaaaggatcccacacaataatcttcacatttgacatgctggttacagctgaggagagccagtgtctttggcaagtgattcatatacataagcgatgacactgactaatcctaacacttctgaaatgttcattctttaccagttaaacctaaaataaatccagcaagagtactgaaatataacaagaatggaaatccaaaatttgtccgaaaggggcaatgtttaatactaggaagaacactgaatttggggactaattcttgtccccaagtacatttggattcttgtcttcgttcctggatgatcttaggcaagtaatctgtgctatgaatccttcacttttaaaatgagagagttggttggctggttctctaaggtctttctagattttaactttccatgattttaaaatctttgacacaggcttatttttgtgttgtaaaatgaaatctctcacaatactaacttggcagttgggtggaatccagtgccacccacacacatctgctcaaatagttctttaccttctgggccccaagccagccccagtcctcaagttaacattgatggcaggcttcaggaggcctgatggcctagttctccgccagacacaaatgccagatagatagttttaaagctcctgaagtcatggttatcagaagaaaagctataaaggaagaactacagggaaaacccttacgacactctctttggaaaaatgacgaaataacacatttactgatgcactaacggaagaaggtaggtgcatatattaactataacacataattaattttaactgttattggtgaatatgcacaaaatatacatacaaattagaacttgatcaataaatataaattcaaggtctagatgcaaatgggaagctctctgatgctggtaatttgaacaagaagtttattgtactttcacatgtttctaattctatgggaagaagttgggattccttttactaatgttggcttctgctccattatctgtaaagtccacctctttcacataatcgcagaaattaaagatgtccaaggcccctgtagggcatttcatccatgtcatactcttatcagatgactgtctttttgttctgaaagactgaatgagtgggttttcatcatctctccatttgaaagtcaagtaagctttatctcttcggattcaaggtctaaatttgtccttgtttcttcctaatattttaatgtaattcctatgtcaattgtatttacacaatttttaatatttaactctgatttgcattatagaaattagtccacttcaataaacatgaatgtgcaaaacaaaattactctggaaaagtcaggttttttaaataaacattatccttttattaaattactaaaatgtttctcatataacagtaatgattattctaagcaactgcatgagccttggaagattcttcatctctaacacatgttcctctttcagaaaatatcaaaactctcatttctctgttgtccaccttcctcctgaggggactcaggccacacagggggtctcttctgactgagaatccctaatactgaagaagtggcatcaccagtgatatggtttggctatgtccccactgaaattgcaacttgaattatcttctggatccgcgggaattcccggacccggagcccagcc

SEQ ID NO: 447019 - DNA, 886 bp, Homo Sapiens
cattatttttattctaaaccttactctgtttgatgaagattgggggaagagccctcccaattccaccgctcacacataacagcggttgctagcattctttatttgtgctaggtcatctgcatattgtttaaacatttttcgaggctggaaagactgctcccactcaggcaattctgacgtggcggcccttctaatttatattctctaaataattcttcatttagagaaaacagtcagggattacagtgagggagggtgacgtgctgacggggacagagcttggcttttgatcattctccccttagctctgcccaggcaagcgtccctaactcagggtatcggaaccgatctcccttagaggattatgtttcaaccaccagcctcagcggtttactcaaatgtccttccagccaaatgcagaagtctccctgggagtaattttggtgaagtcagcttttgcctttttcatcacaggcaggctttagtagttcctcaaaacgtgcaccacaactgcccggctgccaaacagaaatgctgatgcctgggcccactctagccatttggcctcggcatcactgtgcgggagcgttgggcgcagactcgcattgtcacaggaacctcccggccttccgaagagccccgcgccggggcctttgtctcgcacgtcggctggggcgggagctaggttctcgcagcctcctcccaccgctctgcgccttctttgtccctccagaagccgccatcaaagctcagctcctgattaggtttcggccccgctggccggcgcagtctcggcgactaccccaggcggcctggcgcacgcgaggattcgccgcgccccagatgcaggtgcctcccctccttagccgccgaccgacagcccgct

SEQ ID NO: 447020 - DNA, 837 bp, Homo Sapiens
  misc_feature (56)..(64): n is a, c, g, or t
  misc_feature (84)..(98): n is a, c, g, or t
  misc_feature (151)..(317): n is a, c, g, or t
  misc_feature (411)..(422): n is a, c, g, or t
  misc_feature (807)..(807): n is a, c, g, or t
  misc_feature (826)..(826): n is a, c, g, or t
aaaagaaagaggtgttttttccccaaaaaattccccccgatgtgggcgtttttttnnnnnnnnnccgggtggtttaaaaaagannnnnnnnnnnnnnnaaatttatttaaaagcccccccttatgggggcgcccctttttaacaaaaaaannnnnnnnnnnnnnnnnnnnnnnnnnnnnnnnnnnnnnnnnnnnnnnnnnnnnnnnnnnnnnnnnnnnnnnnnnnnnnnnnnnnnnnnnnnnnnnnnnnnnnnnnnnnnnnnnnnnnnnnnnnnnnnnnnnnnnnnnnnnnnnnnnnnnnnnnnnnnnnnnnnnnnncttctttataaacacaagtacatgaggtttatttgaaattccaatttattacaagttcaccctttaatggggcccttcctctttgaagacaatnnnnnnnnnnnncaacaacaaacaattcaggtgtcactgaagtgggaacacaggattctcactatgaacaagaacagactggatgtaggaggcaggggaagctggcggtggtggggttatgaagctgtgatgtcagtgccaactccatgcctatagaagggacggtaaactacccagcagccctggagcaatcctcgtcgtccttgggcaggaggacggaggaagcagaggccacattccgcagtttaaaattaagaggcttgattctcatgttctaggagctgcagtccccttggtggactttaaataggtacagaagagcttgggtgctcaaaatttccaaattcaaaggtgataaaaaaggaaaaccctgttttggactttttatcaaaatccntcataaaagggaaagaagnctacaaagttt

SEQ ID NO: 447021 - DNA, 793 bp, Homo Sapiens
ggacttacgtatttctttttattcaagaactctatccaatatatacacattttccttttggcttttgtcatttgtgtctttaagactttgaataatgtttttaaataatattaactttaatctttcatacacctttgggaaatttactatttgtattttgttttgtgtattttgtaacacacaagttgtaaatgattatagtattttctgttcaattccatctttcagtttttatgcttaaaaagtgtcttcttagtcatatatgcccgtctacattttcttctagtttcttttattagatatatctagtattaattgcgtcgacccatttgatacatggtaatttttttcatgatgtggacatgaagtaaatattctgatttttaaatgtttccattgataattggctaccattgtcaattttgcttattggttctgatacttattcggtttcttagttttccaggtaataatttatctgcatgtcagacgtaacttactgtatcttgtttttctaatagttcagtattaccattgcctttgttgtttcattgagaacttccagtacaatgctcaggagggggcaaaacaaacaacggcaatggcgaccaatccattctctctgtcgttcagtctttatagttcgcgttagaacatacgagaatgcgttctgacatagaacttgattgaagaggtactttggaatgtgctgagtgagtaaagtgtctttaatcatttacagagtttgagaggtatacgctatggtagtccattatacaagatggagaaattg

SEQ ID NO: 447022 - DNA, 489 bp, Homo Sapiens
  misc_feature (400)..(416): n is a, c, g, or t
ggagacatctacacacaccagtggcagctgccccagggcctgcttccccttcctaagtctgtcatcctctggaagggatgggtggtgctccaatctctggtgcctaaaaacccaagtttatttctctcttaacactggcaataaccagtccacaccactgttgccttttaaaacctcttaataatctcatgctgtgtttgttttgattccaatccaattatcaccagggctgtgtgggtaaatgcttttaaatgctctctcatcttgttcttccccctcaccccccactcttaggtatgtatgatgctaatcttgtccctaagtaagtttcttcctgctccttttgtatcttcctttcttgtctttcctcctaccttttgtctcttggtgttttgggacnnnnnnnnnnnnnnnnnggccttttgtacaaagattagtttcaatgtagtctgtagcctcctttgtaaaccaattaaaaagttttttaat

SEQ ID NO: 447023 - DNA, 569 bp, Homo Sapiens
  misc_feature (538)..(538): n is a, c, g, or t
ttttaaatacagatatttattttctcactgttctaattaaaatagggattagcaggtttaattcctggtaagggctctcttggcttctccttgtgtcctcatgtggactttcctttgtgtgtgagcataggaagagacgtctctccttcctcttctcataagatcaccatttgtatcaaattagaatcacattcttatgtcctcattgccctatgtccaaatacaatcacattgcaggttaaggggtgaattctggcaagttggagttggggtggggggtggcgcaggggttatataactccagaaatctcagtcacagactctttacctgtccctaacatacatatattagttggccattaaattgaattccttcaggacatataaaatttaatggtgcaggacagcagaaaacaggatgagactgcaatatcctatcctattgaatatgagaataaagctcctatgcaggcttagagaaaagtcagaaagaataaaggggcaaatgaaaatggaaagaatggtgaagtttaagttntgagtaaaatcgtaaaaaccaacagtatacc

SEQ ID NO: 447024 - DNA, 428 bp, Homo Sapiens
  misc_feature (313)..(313): n is a, c, g, or t
  misc_feature (344)..(344): n is a, c, g, or t
  misc_feature (361)..(361): n is a, c, g, or t
  misc_feature (379)..(379): n is a, c, g, or t
  misc_feature (387)..(387): n is a, c, g, or t
ttttcatgggtgaatctctgtattagagccaaacccaaaacagaaataaaacagaactctttttgtaaactaagtcatacctactttcttcttcagaattatcataaaacatcatcttttacaacatggagaagcgaggtaggccataattgttcaaatttcatctttctcaaattttaaaattgttttaatcccaaaggtgcctattgaattcttcaaaaataaactgcctatcaggtatcatacctgcaaatgcttctaatatctcttgattatcacttgaacaagttcagcgatggcaaaggaaaaaaanttatatagccatgtaaagtaacattttctanttttccccctttagggnctccaactatgggcttanaaccccantgaacaggtgaaggtttccctctggtacatgggcttttatt

SEQ ID NO: 447025 - DNA, 472 bp, Homo Sapiens
ccaagcactcaatagatgttatttattattaaaatgacaaacatgtcactgccattgccctgccctctctggaactcaactctaaaaactgcttttattgttactttagaaatcataaaaatctcattaaggtcacatatttttgatccccaactaccatgcagctcagtctccatattactgaaaaaaagtttggatcacgttacttttggccatttctaaaaatcaaattaacactcaggggacagagatttgtcatcacagaagatatgcagaaaaataggcacaagaccttgaagtgaatcccaaagaggcgctccaaccacagatggagtaaccaccaccacagctggtcaagggtgacagcagccacatgatgggtgttctttcaaagttagtcacatgcctgcagtttgtgttgtctagaggggaatttgattaacccagggaaggtcatcccagctggtcttac

SEQ ID NO: 447026 - DNA, 368 bp, Homo Sapiens
gttgccaccaccatttatttatctagttcataactaaggatagaacactatagcagtgctagagatgcaaagacgtccctgcccttaaggggctttacaatcttactggagaatataacaggcacataagaagctggactacaaggaagcatgagctaacaaatgccagacttcggaaggcagcgtagtttgagaacatgggattcagagtcacaaaacccacatcctagtcccaacccagtatatcagttaacctctctgggttttttcccagctacaacattaaatagtaaggactgaggagggctgtctgcatgtttccatcatcattcagatcaaaagctgagatgagctttagggaggaggct

SEQ ID NO: 447027 - DNA, 536 bp, Homo Sapiens
aatctttgaagaatgttctttcagctggacatgtctagcagcttttaaagtatttttctaggatataaatttaaaggcaaaaataacaaataaatagataaaatggattgtggatatggagtagagtgaccaactctcctgatttgcctgggattgaggggtttcctgggtcttgggacttccagtgctacaagtgggaaagtcacagacaaacctggatgagatgatcaccctaacagaagtcactgcccagggctgaggggcatgtggtgacatgggagatgggtttgtttatggaaagtcattccaaggactcagaacagggtttgatgcccagcaagtgcccgctgctgccatcagcattgacaacatccccatcaacaccacgtgctttctgcttattattagtagtagtcacacttcagcacacttcctcagatagaacatcttacataaccagcaatgtgcttctaaagatgcagctctttaaaagatactatatgtatagcacacccttgacataagtgactccatct

SEQ ID NO: 447028 - DNA, 397 bp, Homo Sapiens
  misc_feature (45)..(45): n is a, c, g, or t
  misc_feature (97)..(171): n is a, c, g, or t
cattcttgtattcaaatatctatcaatatacattcaattacctantcaaatatctatcaattcatgaatgggatacattcattccatggaatggctnnnnnnnnnnnnnnnnnnnnnnnnnnnnnnnnnnnnnnnnnnnnnnnnnnnnnnnnnnnnnnnnnnnnnnnnnnngcaaaacagtgtgagaaaaatgataaataataatggtttcaagaaatgcagagcagagagcccagaggcaaagacccacaggacagagggtcagtcccaggctgtggatcctaactaagaaactcctgctggattttgcccagctccatttgcaaactattttgggttattgacttctttatcccctccatgttccctcattttgaactagaatcactgtagttgt

SEQ ID NO: 447029 - DNA, 421 bp, Homo Sapiens
  misc_feature (68)..(148): n is a, c, g, or t
ttcaagtatctgtcaatacaagaatgggatcaataaactgtgatacactcattccatgggaatggctnnnnnnnnnnnnnnnnnnnnnnnnnnnnnnnnnnnnnnnnnnnnnnnnnnnnnnnnnnnnnnnnnnnnnnnnnnnnnnnnnaagtgcgagaaaaaaaggtagataataatggttccaagaaatgcccagcagacagcccagaggcaaagacccacaggacggcgggccggtcccagggctgtcgatcctaattaaggaaacttctgctggattttgcccagctccatttccaaactattttggggtcagtgacttctttatcccttccatgttgcctcattttgaactagggatcactgtaggtgttattctatgtctgtcacatcattccacgtagggggcagttaggccttt

SEQ ID NO: 447030 - DNA, 518 bp, Homo Sapiens
ggtaaacaaaattcacattttatttagattgaaataaactatacaaaattgattttcttcaccaaaaataacagcaatattttccatatttttctagataaaccacaacacttattttgtaggttttccaggttttgcttataaatcaagatgaggcagtatataagagtcatggaaaaagacagagaaaaaaaacagacaaatcagttgtcagtatccatggcctttgattctgtctcaaccatgaaacagaagtgttcaacatatacctgctaaaaagcttaggaagatgtaggctccacaaaggaatgtaaacagcaacgagatgtggaacaacagcaggcttttccattcaaactttgtcatttgtttctttaagttcaagaaagacaaaatctacactgaaatccttgtttggtgagctcacaagcttttctccggtaatttcttgtaactgtccagtatagatttttaacatacttaaaactcctattagtcaaaggtcaattgtgggctcc

SEQ ID NO: 447031 - DNA, 1887 bp, Homo Sapiens
  misc_feature (370)..(370): n is a, c, g, or t
  misc_feature (400)..(400): n is a, c, g, or t
  misc_feature (491)..(499): n is a, c, g, or t
  misc_feature (906)..(906): n is a, c, g, or t
  misc_feature (911)..(1021): n is a, c, g, or t
cgcggttggaattagactgcatcgtctatatatgtatgatacatactggagacggttggtgtcctctggcactcgacaacatgcagtacgtgctctcacagtgtgtcgcatctatcacacgacggcgagttgttgtatcagaccaagacattaagtgtgtctctgttctaggcagacaatacaaacttacacccgttaggtggtcatcacacccccacatcaggtggcgcgtggtatactagtagccgcgcagcgactaatgatgagaattgcttgttttgtatccagatgtgtgcgtagtggttgtttcctccccgtgccgcacctgtatatctctccgtgtgggcgggctacatattatgtattgttntggatgctgacgctcgacgtggtgtttganaggagtttgaacattcgcacctcgggtttgtgggtatacctagcccaaggggtcatgatagaaatctccacgctttgttaggggacactcnnnnnnnnncccattggtctatagaatgttctgggggggtcgcagggctaggcgggggccagcgctcgtttctcccaggctgggttgttagacctatagcggagggggggagacaatcacatggtcgacggggtgagtctaaaattggggatttcccacgccacttcatttttcgcggccgggggtggtgcccttcaatttttaatggcaaaccggctgttttttttggaggccgaattctttcccgttgatgggcattccgggcggggggttctggactaaataaagagcggtggcgaacaccccgaagtggtgtttgtactgcgagcaatcccaagcgcctgccgccggacgtgttttcctatgctatcgtgggggtgccggggttcggttttttttcttggttcgtgtggcgnttggnnnnnnnnnnnnnnnnnnnnnnnnnnnnnnnnnnnnnnnnnnnnnnnnnnnnnnnnnnnnnnnnnnnnnnnnnnnnnnnnnnnnnnnnnnnnnnnnnnnnnnnnnnnnnnngaaaacaaaataaatttattcgtcctcctccacataacattttccctgaaggagagtgtccctggcacctggcccagcttccacaatggaatggataggccccttccctccttttactccctaattggcccaaagcttttgaacagaccctcaaaccaagcagaggaagccatggtgtgccttccaccactggagggttacatttgaaattggtgtcccaattttaaaacgtcccagctgccataggagaggctcttgggagtggcctccagctcttgacaagggcccacagaggccactgccccatcacggggggcacactgggcccgtgaggaggaagggcctcgctgcctccaggatgtccagtttggggtccagtgagcggccaagcccctccaacaccatgatggcaaacacaatggaggcaaagttgctctcaagctttaccttgtgagtcatcagcaacttaaagacactagagagaaggctggacacatgaagcttctccagggtgatggtgttcttcctggcctgggtcaccagcatggccatctcggttttgaacccctccacgtccctgcactcgctggcccgggcatgatgcaggatcagctcagccactctctggccctgccccatcaccacagccatgaaatctgcccggaaattcctcaggtcaggggcctgcagctccgccacaatgccagcatccagcagcaccagtcgcagcgggcagagggaagatggcacggccaccaccagagtgtcacagatgtccgcctgctgcagctgcgcctcctgactcgaggacaggccgttggcacctgaaccaggatgtttcaagggtgaagtcgcctcgtgccgaa

SEQ ID NO: 447032 - DNA, 415 bp, Homo Sapiens
  misc_feature (88)..(88): n is a, c, g, or t
aaaagacaggaatgaggaactttatcctggagaaggaaagaatgggagaaactagtcctgtagtcagggcaggactctcggagaacgncaagggcttgactccattcgctgcctggtggtctctaagacgagcaacataatctatgaaggtgcagggataaactgtgattttaccttgtgagtcatcagcaacttaaagacactagagagaaggctggacacatgaagcttctccagggtgatggtgttcttcctggcctgggtcaccagcatggccatctcggttttgaacccctccacgtccctgcacttcgctggcccgggcatgatgcagggatcagcttcagccactttttgggccctgccccattcaccacagccatggaaaacttgcccggaaattccttcaggtttt

SEQ ID NO: 447033 - DNA, 807 bp, Homo Sapiens
  misc_feature (735)..(735): n is a, c, g, or t
tcatatttgacttttgcttttattttataagaatataacatgctgaaacaggaaaatggggattgcaaacatcattcatatctaggaaaccagctccatttgtcacaataaataaatatttaaacagtgaggagttcctgacaggctccaagaggttcccagcacattcagaggtagagtctggtagagaaagggagacagtcaggctgaaacccctgctgagattctccagtagaggcaaactgaaattacaataataaataacaacagcaccaacaataacaaaaacaatgttatgacaatcacagaaaaccaatgatacaatacacttaaataatctcctggaggagctcatggtacagagagaacagtgttgattatcctgggccacaaaggggctgccctgggtagttcacttccccagcctgggctctgccgcaggagttcccatcaggaaatgtttgttcagtgatgccctgaggtgacaggcaggttctgattatcccccagtcctgcccttcgaagcagcctctccccccagcttctgcacttctagggtgccatggtcctgggccacctctgcccacttcagtgtcaatttacgtctgcaggaaagaaacacaagctcccctctatctggggcatctctttttgctgtctcataccacaaaaacacttggctgattcagcaggactctcagggaccgcaaagagattatttttttagatcctttnttgctgttcacactgcggggcatgagagctgaaagccactcccgagcctcaaactttgtgtcttgggcctgc

SEQ ID NO: 447034 - DNA, 338 bp, Homo Sapiens
ctcagtgttttcaattcctccttggttgaatccatggatgcaaaacccacagatatgaagggctggctatatatgcattgatgattgtcctattatattagttataaagtgtcatttaatatgtagtgaaagttatggtacagtggaaagagtagttgaaaacataaacatttggacctttcaagaaaggtagcttggtgaagtttttcaccttcaaactatgtcccagtcagggctctgctactaattagctataatctttgcacaaattacatcacctttgagtctcagttgcctcacctgtgaaatgaaagaactggatactctctaaggtcact

SEQ ID NO: 447035 - DNA, 858 bp, Homo Sapiens
  misc_feature (98)..(98): n is a, c, g, or t
  misc_feature (204)..(213): n is a, c, g, or t
  misc_feature (267)..(269): n is a, c, g, or t
  misc_feature (274)..(275): n is a, c, g, or t
acagcgctcgctggcccggcggcggcgaggggctcggggaaacgggcccggcgaacgccacctgccgggcggcccacgccaagtccgcgtgcgcccgngcgccggcactggccgtagggcgaccgatgcgaagcgaccacgtcagggacccagaaccggccgacgacgcacgctaggaccgcgttccgcttcccccttgggggnnnnnnnnnnaagcgaacggtgttagaaagctttccgagggcccgagcgcggcccgcccagcgnnncccanntctttgcttttttattttctagaggggaattatatttattcacacaaccaaaacatcagacagactcagcagcagtggggagggagggtgggcagggctgaaggtccattcacagcccgtaaacccctcagtctcagggatcgggggtgctggtagtgggactgggagaatagtcttaatctctcaggtgcccacccaccttcccttcttactgggaggaagggtagagctgtctctcaggttataacctctcaggtggaggcctgagccctcagaccctactgcctagtagcttgacaactggtggtgtccccacaagttagggaaaagactcccagccactccttgagatgggtgcctgggatcccccttactgcctcaagctcccatggacctgtgggcggggagttaaatccctgttccatctcgcctgttcccagagtttgaggactttcaccctgtccagttcccagggaaggtgatgtgggagatgaatattgagatttgtgccgtgtctttcagtctctggtacccctgccaagcaagagttgagggcatgcaatgggctgcccagcttgatccc

SEQ ID NO: 447036 - DNA, 463 bp, Homo Sapiens
ttttttttatccgacagtcttgtctttattggtatatgcgtttggctctgaatgatcaactacatcacaaattccagtacaaaagatctcattttcggacagatcatatagataaagaattccaagctccattggtcactcatacatacacgtgggcaagccctggagtttctgaacataggaagagaatgcaagtcatgtgttaggtccactcccttgcatgaaatgtgggagagggaaataaagttaggcaacatttagcaatcaacagaaccccttccctatcctaccgcagcccaacatggtgcagcagcagcaggctgaatggttgagaccagtgcaatgaggtggcaggaagtgccctggtaggaggggggtccttggccacatggggagcttacagagagaatcacagtaatacacagatgtagtgcccattagccagcagggtttccttgaggaa

SEQ ID NO: 447037 - DNA, 181 bp, Homo Sapiens
tttttttccttaaattttagaatattttaatgtccatttcttcagtgaatgcattttgaaattattagaattaacaatttaaaaagagcagataaaaggatatatggaaaatgcaaacagtcggttcttgctaattcaatttcagattctaggcatgatgtgattttccaaacaaccaatt

SEQ ID NO: 447038 - DNA, 819 bp, Homo Sapiens
  misc_feature (554)..(554): n is a, c, g, or t
ggttttgctttcttaaagcatgtgctgagctgatgaagagagcagtttggcaattaaaaaggcccagcggcttgggcagcagcaggggggtgccaggtgagggtcaggtagtccctctttcctgggccagggagcagcaaagcccgcactaacttcataaaatataaaacaagggaggggcgaagggaagagggagatttgtaaaatacaatatcttaggggattggcaataataaaaaataaggttcattatttacaaacaatttctgttcttggtctctgtacagtgggggtggggtaaggggtgtctgtgagtggggtgcgttgatgtgtctgtttgggtgcaggtgtgggggcagggaggcagtggtcgtgttgggcatatgagagaggaggtggggtacccagtgagtggtttgtctgagaaggacggatggatgttggtgggaaggagaatgagaacagagtggtcggcccaagggaagagtccaaatgtcaggggcaaggaagggctgggaagtggagccttttctcctggaatgggaagctcccangagggcaggggccacgaggcgggatccggggttagtggagcaagacctccctcttctggggtacccagggggtcccgtcctaatggtcctggggtccttgggcatgggcctaagaaaagtttgaaagggggggtgttgggggccccaaaattccctgttcgtgggaacccccttccttttgaaatggggaaaaaattccgggggctgggtggccgttttctccaccgtccttttaaggcccggggcctcccacccaagggtacct

SEQ ID NO: 447039 - DNA, 737 bp, Homo Sapiens
caacctgtttattgtatgagcaacccaaacttcagtttaagtgctgttgaaattttattactagattccataaccctacaattgataaatcttataccattttaggtatttaatgagatacttagaaatactaagaaaaaaaatcagtattcaaagggttaattttgtttattaataacaataaaataattttataatcttcttcaagttcaaaatccagctttgaacccgaggaaggctttcgaatcatgttaattaaatgttggtcctttaaccagtagcagtttgattaccaattactcggaggatctctttgtgaatgcctccttcttgtgtattaatatttgcatctcccacttggccgtcttcatagacgaaaaagaatcgtgtgcagacatggttagtattggggacaacccatatctctccatgtttgtgcaggtcagatgaggtgatcacttcacataaggctatgcattttaagttacggctttgcaggaattgggattgctgtccttttttctgtgactgtgatgtattgctgcttttactgcttgaagctggctcgtccttggctgacaccttctgtttcttgttcatccctgagtaaccaaatgatatgcttgacattggactaagatagattccacttccatacattgcaccatggagctgcaatcgtgtattagaagcaacaaccagaccattcctcaggatggagtgccagttttcaatcc

SEQ ID NO: 447040 - DNA, 517 bp, Homo Sapiens
gaaaatgatttattaactgccacatacatcaacggagagtttgtgtgatccttccctcgtctgggtcaagcgtattcacctgagattgtcttggaggccactggctctttctcttatgtcccccaggtgctggagatgacactggcctctgcctgtatggaaacagctccagcaggctttggaaatcttttccggatcaggtggcttctgtgagctggacggcagcccggccgccaagatgataactgagttgactctgctgctccccagtctccacatctagttcatctccatcactggagtcacgctggtgattacattcttccatcctgggttctgctcatgtgtctgcagacaggagatagagcatctaatccctgaaatgtcgttgcagaccaccaaggctactgtagaattcttgaatgcaatttaattgctggaaggcagtgaaattcctcatgcttccctcagggagctccagaaacggcgttttcttcatttccccgtctttggggcg

SEQ ID NO: 447041 - DNA, 553 bp, Homo Sapiens; identical to SEQ ID NO: 208410

SEQ ID NO: 447042 - DNA, 608 bp, Homo Sapiens
  misc_feature (365)..(483): n is a, c, g, or t
ctgctaagtgccatgagaccttagcagaggctgtgggtgccccgccccattccctccactcactcttccttgcaggtcgacctgcccttctttgctgaggcctttctctgcctccagagcctgcttggtcctcaggctgtaagtgcaggcagagctaatgtctctccatagctgccctccaccagcctgctcctgagacacctgctggccagcagcctgaagcagaatcctttactcagattcagccgcacagatgctcactgcagagatctccaaggcctgtggtcatccttgagcccatctcagatttgtgtggatagggtgttagagaacatggaatcagctggatagagtggttcatgctnnnnnnnnnnnnnnnnnnnnnnnnnnnnnnnnnnnnnnnnnnnnnnnnnnnnnnnnnnnnnnnnnnnnnnnnnnnnnnnnnnnnnnnnnnnnnnnnnnnnnnnnnnnnnnnnnnnnnnncatagtgtggtctcggctgcttggaaggctgaggcgggaggattgcgtgagcccagcagttcaaggctgcagtgagctatgactgtgcccctgcacccagcctgggtgacagagaccctgtctct

SEQ ID NO: 447043 - DNA, 1118 bp, Homo Sapiens
  misc_feature (233)..(281): n is a, c, g, or t
  misc_feature (349)..(375): n is a, c, g, or t
  misc_feature (552)..(570): n is a, c, g, or t
  misc_feature (767)..(821): n is a, c, g, or t
  misc_feature (824)..(824): n is a, c, g, or t
tttcacatgtagaaaagaggctttattaagaaggctttgaagtcaaaaaataaaactcttgatacaatttttttaacccttaaatcagctcagcaaatatataatcagtaatttagctgggtaagattaaaggtccattactttatttaaaataaaatatattttagttcttaaaatttattccataaagtacatatttccctataaattgccctacatatacacaagaggtnnnnnnnnnnnnnnnnnnnnnnnnnnnnnnnnnnnnnnnnnnnnnnnnntgacaacagaaaccgcagtaaaaaggggattaataattaacagaaagttagaaatttgattggaacgnnnnnnnnnnnnnnnnnnnnnnnnnnnccggccgcgcacggttgatgtacaaaagcataagtggttagccccaaaaagggagtaaaaatgtcaccctcctcctctggaacgtctgtgcggcctgagaccggccggcgagaaaagtcaaatcagaaaacggcttcggacgaaaggaaaaaacgctgagcgctggaaaagtcgtgnnnnnnnnnnnnnnnnnnnaaagatcaccctggaggggaggggtgtctaaaaataagaaaactaaaaaaagtgcaagcggaccttttctctccggtttattgtaacctgaccactcaatactgtcgttgaagggctgaggcgccgccgggctgcggggtctccgtctccacgcctgaggcggcagttaaagctcatctgtaaacactggccgccgnnnnnnnnnnnnnnnnnnnnnnnnnnnnnnnnnnnnnnnnnnnnnnnnnnnnnnnacnccgggtcccgccccgtctccggcgcccacccctggcccccgcagatggccccggccacgtggtggtccgcgctctaggaaaagatatgaatggcctgggtggccggcgtgcggcaggcgggacactcgggctcgctcttgccgcagatgcggacggcgcagtccatgcagaagaggttgtggccgcaggggaccagcgcagccatcacctcgccctcggcgcacaccacgcactctcgcgccagggccggggccgaggacgccgaagggggcttgcggctgttctcggaggcgc

SEQ ID NO: 447044 - DNA, 487 bp, Homo Sapiens
  misc_feature (98)..(204): n is a, c, g, or t
cactcattactgtcgttgaagggctgaggcgccgccgggctgcggggtctccgtctccacgcctgaggcggcagttaaagctcatctgtaaacactgnnnnnnnnnnnnnnnnnnnnnnnnnnnnnnnnnnnnnnnnnnnnnnnnnnnnnnnnnnnnnnnnnnnnnnnnnnnnnnnnnnnnnnnnnnnnnnnnnnnnnnnnnnnagatggccccggccacgtggtggtccgcgctctaggaaaagatatgaatggcctgggtggccggcgtgcggcaggcgggacactcgggctcgctcttgccgcagatgcggacggcgcagtccatgcagaagaggttgtggccgcaggggaccagcgcagccatcacctcgccctcggcgcacaccacgcactctcgcgccagggccggggccgaggacgccgaagggggcttgcggctgttctcggaggcgccggagtccaggggggcgcaggcggcggccgc

SEQ ID NO: 447045 - DNA, 393 bp, Homo Sapiens
aacttttgagatttccattttatttaatatatcagcctggcaattaatcattacctttccaacacattcaagcagatgtttgttgttatatgtagccaggtgttagaccaggaagattggaccaaataatctagcataaagtagaagttgaaagcagaagttcaagggtttttgttgttgttgttttttggtaagtcacctcacagcttattagccagcctgtgtttgaaccaccatttgggtaccttctctgttttaataaggcctcatccctgcaccagcatcctaaccatttttctcaaatggagagacgggtgctataaacaacccaatttaggctagaaagggaaactaaatattttgtgtaacatccaaatactctctggttgccaa

SEQ ID NO: 447046 - DNA, 329 bp, Homo Sapiens
ttttttttgctgaatatgtcgtatatacatatatataatattttattttaaaatgtcattgaacatatacatttctttagctttttccaggggacattgcacctaagtttcaaaacacacaaaatagatcccctttactaaacagttttcattttggggttacaaaaaagtcaatgtttcacaatcacaaagcataaaggtacatggttctgaaacaatttccaggcagatttctctcattcactgtactagggtagttttggaaacccagaccatgatccattccttacaaatgatctccaccatgggcctccctggggtctccaggt

SEQ ID NO: 447047 - DNA, 451 bp, Homo Sapiens
  misc_feature (181)..(197): n is a, c, g, or t
  misc_feature (270)..(281): n is a, c, g, or t
  misc_feature (331)..(331): n is a, c, g, or t
  misc_feature (439)..(439): n is a, c, g, or t
caggaagtgttgaatttttaaaagaaacttgatattggtgataaaggtatgaatgaacaacttttttacttgccctcgatgtttcaagatgcctggtgaaaccgagaggccacatggcatgtccaaggagacatgctttttgggttctatatgaatagagatggttttagcctgcaattgnnnnnnnnnnnnnnnnncggttgaagccttgctaactttttcccagagcattctgggttgatatttcacagtcaaacgttttggcatggnnnnnnnnnnnngcattttaaactcttagtgaattcaaagctctaaatccaaacaatggtgnacacatgtacataacatttcatgttttcagagatacgtatgcttatttaagtgcctttcatgttttaatcaatgtttgcagaatttatcttaaacctgagatgaattnaaaaatttttct

SEQ ID NO: 447048 - DNA, 1474 bp, Homo Sapiens
  misc_feature (891)..(891): n is a, c, g, or t
ttttttttggctttcgcttgtcatttattattttatcacatatttacattccagtaggcagcctgtccccctgtccaacaaggccctttggtcctcactggtcggcctgctccagacccccaggtgcaggcgcgtgtccggagtcgaggctccgcgatgtcagacgttcagcaggaggggccggtgctcctcgtctgcagcgtcgctgggaggaatttcataaatgacaaacagggaggagtacaggcagcccaggaaggacacgaggctggagaagtacatcaccccgttggcactgcccacggccgaggtcaggggccccaggaccagggagaccagaatctgagccaggaagtactggcagctcagcagagagatgtccacgcccatgccccgccgggtgccgtccgcactggaccctgcaaacttcttactctgatagtaatcgcagagcagcgagtaaggcaaggtgcacagggtggaaaataaaatcccgtaggttatgcagagcgacaggaccacgtagaggttcctggagagggtggcaagcccggtccccaggccgaaggcgagataggcgatgaagtagagggtgcggacgctgaggaactcctccagcttctccaggatagctgagtagaaggcagcactgaaggcgtagatacacatgccccagcagcccatggtcacgccgctgttgtacttctgatacgcctctgatgtgtgcggggccttggggtccccctgaaacaccacctcgcccatgaagtctgtgtagaagagcaacatcccctcgaatgagagccaccccaggaagtggttgacgcagagggtgcgtagcgccttgggcatgttgcaggatggtggagcagaggcgccccacggacaganggctgctccgcgcgctcgctggagcccgtcagctcgctctcatacttcacgccgttgagcaggatattggccacctgctgactgaaggtcacattccttctcctgctggtttcgggaccccctcctccggctgcgtccgggatggccaaggtctgaggtctcttcagaatccctgatgacctcggcttagaggtgtccaaggagcccaccctcagaatgtccccgtcacagccggaggtcagggcaccctctctgccctccagaagtccacggtcctggcggtagaagccgtcgggggcccgggggaagctgacgctgatgggcggcctggggacgctgccagggatggccaggtagctgtcgtggccgcccgtgaagcagtcaatgaggacgctgtctatgttggccgtgccaaaggatgaggcgaactcgctgatgcccgtcagggagctgtccctgctgatgaagctgccgtacttgggcgtgagggggctgggcggcgagatggggctggagaagttggtggccgtgtgcgacggtaggctgtcgccagggccttcctctggcaggacgggcggggacg

SEQ ID NO: 447049 - DNA, 406 bp, Homo Sapiens
attcattctttcttgacgcactcgctcgctccccggttcgctccgggcgcattaccgcttcttcttctgcttgagggacttcctgcgtttcaggatcatctcatagagcttgtccatgccctcggtgaggccctcgccgatgatggcgcacgccggctggacgtgataggtggtggccgggataagctcgtggagcgccagctgcttctcaatctctgccaccggcagcgacttgggcaggtcctgcttgttggcgatgaccagcagcggcgtgccctggttctcggcgaacttggtcaccttgtgcagctccgtcttggcctcctccagccggtccacgtccaccgagtccaccacgtagatgatgccgtccgtgcagcggctgtaggacttccacagcggccgc

SEQ ID NO: 447050 - DNA, 1540 bp, Homo Sapiens
  misc_feature (145)..(157): n is a, c, g, or t
  misc_feature (511)..(552): n is a, c, g, or t
  misc_feature (1515)..(1515): n is a, c, g, or t
caaataattttaccaaaaactacattttattcaagaaacagaaaaggagtcatttggtgccatgcttttattcaaatgaaaggggaaaaactacactgtaccaggaaatagcaagtatgacagtattttacagcacagcatcttnnnnnnnnnnnnncctgtaagcaatgctctagagtggacaggtaagcacaccatacactgtacattgctcaacagtgtccatgaaaccataattaaatagctgaatttggctttaaacagccaaataaaactgtaacagtcattctaatacaaaacggaaaaaccaagaactaaatctttccaaagctgtgtcaaatagcagaatttgacaggctgcactggtaaccacgacaaatgtttggcaaacttaatggaatagttatcataataatttgacctctgatgatgaaagcaccagtgtgtttcagtaaggttgacgaaaatcctcagactttatgaaatggcatatttttcaactgtataattnnnnnnnnnnnnnnnnnnnnnnnnnnnnnnnnnnnnnnnnnntctgcagacttaaagaaatatatccatattccttctgcattaataaagtaaaatcttatactgagagcaatgaactctgtggcaatattcacattctacctttagaccttatagacattcaattcaactgttggacacacacaaatttaagaataaagggtggtcctgtttagttttacagtttctccattgtcttgcatccaattttctttatttaatagcgaagtaatatcacaaagattgctttgatgagggaaatttagttaatattgaaatgaacaaaatttagtaacgtaaaatgcttattaaattatccttttgactactattcaccttttgattagattcatttataattttttaaactagttttaatctaaacgtgtatttgactatcatttccttctaactgtgatagaaattactgtccaaaaggtaaaatgtgcaattccccatttttaatatccatatgttatatacacaatatgtatacacttaaaatataagagttacatatcctggtctcttacatgcaaacagtagatcacaaatagttttgagctacacatgtatcttgcacaggtattggaaaaaaatctgtgaaatttttttacagttttaacaaatatacataaatataagaacataaattacagtaaaatattgacagcatttgagaaaatgttgataacccagatgcactgatgcctaaaggccttataataatagaaaagtacagctcagggacatctcattcctattcttgttttttaaaataagtaaatacatcatatgagacattagttctttctctaaacaactcaattagagaaatgtatatatttttatctctacttcccatgaaagaaaacaaactacgcatctcatttatgggtaccatactggtcttcccccggctaggtttacacatttggtcacaacactgggaatataacaggggcncataatcatccagtccttttcccgg

SEQ ID NO: 447051 - DNA, 477 bp, Homo Sapiens
gtttttaaaacctgaaggaaattttatttttcttcccactgaggtgtgatccaccctcttggtggggcctggagagcttctttaaacaatccacgtttaaaagtgccttgcgctagaatttctgacaccccgagggcagacagtgttgggccaattgggtgggtgtttggggctgagagatcagggttcctcactggaacatctttctcaatcaagtgggcaaacctgatctacagcccggcccaggtgtcccggattcccactcattctcaggcctgccggggagagcacactctcgatttctgcccgttgttgtcctggactcgaagggacagggaggggctggtcacttcctccgtgcctgggcctggttactctgtcccttctgatgctgctgcttaacctgggccaggatgtctcggatcttccgttgagccatctgactggcatagaaatgtccgatgattttcacgatga

SEQ ID NO: 447052 - DNA, 587 bp, Homo Sapiens
  misc_feature (45)..(96): n is a, c, g, or t
gaccgaagtggatctgttttaattaatttatgacttttaaaatgnnnnnnnnnnnnnnnnnnnnnnnnnnnnnnnnnnnnnnnnnnnnnnnnnnnnaagtcagaaatagctagaacgatgctgggaaaatcaggtagctgtaaagcgagtagcccccaaatcagtcatcttggcctgaagatgtaaacaaggaggtttgcttcctgcaagatgagtacttcactgagtttggttttcatttttcctacaccgaagccacctctgtccctccaatgttcatgtctgtccgaggctgcgcaggaggttacgtcaagatgtggccaataagtccaaaaagcgctttgaatactgttctgggttcacggtggagatctccgcgccagcgccatgtttaacagtttttgcagcatgggcagctttcttttttgcatcataatgagtaaggatgtcaataattgccatgaagtacacctccttcctaggcgagttttcatggcacttaattccatagacgtcgatgttggatcgaactccccgggagccaggggtggtgagctgttcagtgtattcccggggctatctggggg

SEQ ID NO: 447053 - DNA, 579 bp, Homo Sapiens
  misc_feature (396)..(396): n is a, c, g, or t
gaaagcattatttatattttaataataaagtacataccatggacataaaatgaaaatgcatataaattgaatagattattatttaggtacatcagttaagtagcatttagttgtttaataaataacagactaaatctgaaataattcttagtttggtaagttctaagtataattatttaagaaataagagattatatacaataatatatccattcttgtcgttcattcaaaggcattacatgttgacaaaccattgtagatttgggtcccacttctactggcaaatatgttgagtcctctgttgtttatggcagtttttacttaggctcattgctgatgtgaataatcactttctcatctggacttgttttcaataactgacgttatccgggtgtncacaactgtaagtatgcacgattatattttcatagccatccattactttggcatcaccgttgctaagaacagatttacaaatggccttctcaagttgtccactacatgcctccatatggacagctttaatttttggcttgcatttttctgcatagatatcaatgacaaatggacatgcctctg

SEQ ID NO: 447054 - DNA, 433 bp, Homo Sapiens
gacaagttagtatcagtttattttggggcaaaaaaacttgaaagccatgcaagtttcgtcacaacgcacgttttgcatgagctttttgaagacaccttatctttgacgctgcccgagttccagagggagctggccctgccccttcctgttagattgccacggtgctggggcgagggacagagcaggtcagcagccccagggtgacctcccccagagtgcggcagacggcctgctgcgccgtgtgcggcctgagcctaggccggttgtccagctctgagctccagtgtcctctgtagcccggagacagtagcgcttgtcaagcccctgtgcagacgtggcgaggtagtgcaggacaagcagagagcctggctccggggtcagcagccaggagagtcccagttgctccagtcccagagcctccccagaggagggg

SEQ ID NO: 447055 - DNA, 1287 bp, Homo Sapiens
  misc_feature (73)..(126): n is a, c, g, or t
  misc_feature (150)..(163): n is a, c, g, or t
gctgagtatgtggccacgtgcctgtagtcccatttagttgggagactgaggcaggaggatctttgagcccctnnnnnnnnnnnnnnnnnnnnnnnnnnnnnnnnnnnnnnnnnnnnnnnnnnnnnnagagcaagaccctgtctcaaaagnnnnnnnnnnnnnngtggcctgggggaaacaggacagtcatataccccaagaatggaaattttcatgccaccccccttccttccttacaaattctaatgctgattgcatgaacgaggtgttgagagagacttttcttcatttagacatttgccctagtgaatgagggagcaagagaatgctaagagggatgagagaatatatttctggctctaggactttgacatccaggtaattgaatctgggacattctcattaggttagaaaaggaaagatgagaaaatcactagcaggatatgcaattccagagaccatctgctccaaaaattagttttgtttctcattgctccttattcagcgacagttatttcaataagctacattatttagcagagtctgagagacaaaggctgtgaaaacatgtatttatgatagaaaacaaactcagaaaaatataatagatagttcactttttatctcattcacattctatagctggagaactcaaaatcccatttagatatttctgcttatccaaaagcacactgggtgaaactaaaccaccaaatgggagaaaatgttcattgggtgtgtgtggcttcacccagtttatttacctatggagtggaagtgtagggagaaataaggtctgcttataatggtcaaggtctatggagaagccctgaagttgctctccccaaatcacaagtctggattaagaaaaggaagcaaacatgatgaaaacatctcatcacacaaaactcagtgatggggtctctgacagtcaccagccagcaggggaaaaggagaaatccacctgccggctttaagatttattgaaggctgccagcacagcccagatcatttctgtggcactaggctttgtcccttccacttcaggggccagttctactaagtccttggctcgattcattggcacatcatacttggcatttggcagagaggagaagacattctctagcacatcagaagagtgggctagcaccaggagtgctattgttcgcttggcctaggctgagggtcatgtacccaccgtttagtacatattctgagtttttttactagtccgttgatctcttggagattggtcacttggagaatagtcattgcaaatatcag

SEQ ID NO: 447056 - DNA, 1676 bp, Homo Sapiens
  misc_feature (353)..(370): n is a, c, g, or t
  misc_feature (636)..(652): n is a, c, g, or t
  misc_feature (1097)..(1128): n is a, c, g, or t
aaattgggggtttaaaaaaatttttaaaaatattttgtcatttttacggatgtacgttcattccattcaccccagccctcaaaaagaaaaagtttttccacagaccaggcaagtaatagctctgttccaaggaatgtgttttaatttttgcccagataaaagaaaataagctttgcacacactctcaattctttacttgcaggcaaacttcactctttattatctgaaactcttccattctcagcctcttagaggcacagatggctcaagtttcagtggcaaaaagtctttttttccataaccaaactagagcaaatttggaattcagtctgggactaaaacgtcacagcagnnnnnnnnnnnnnnnnnntaatttgcttttttctttctttcatttagcagcataaataagtttggccactgggagtacagtacagggttgggacaacaatcccatatttgaagacctacttctagcaccagcatcaagaattaaatccatctcaggactcacagaacccaggacaacttgccacctttgagcaacatatgcattgaagaatgtatatggaagcaacagtaaatagattaacagaggctaatactgtgattgattgacattggcaatggttggcnnnnnnnnnnnnnnnnngcttttcatgataactgtacaaaaacaattcacagtaatttttttaagcttttccactccagaaaaatgactttttgttgcagatgctctctaattagaaagtcaaccagtacttgttttgatattattgcagttcctttctaggtgtctagctgtcagtggtaaaagaacaggctagcagaatctgtaatgatgtttcagcattaacactgcccaatgaccactggagaagaaaataaagaaataattgcacctggtttgatttagaaagtctcattttgcaaagctgccctcagtcaaaagtgaagccttttatgtgatgagacagcagacgcctctcttgtcagttatggtttgtcatctcttcttcttttccttcttagtctgtaggtcttttcaatctgttgccccaagccaacatcctgcaccactgagaacaagggannnnnnnnnnnnnnnnnnnnnnnnnnnnnnnngcagggggaagggcagggagtatatcgtctacacaattggacaaattcatcttttctgctcttcacttcatgtccacatcaaagtccagcaccagcagcttggtttcttcagtcccattccgactcccaactgcacacaccagctttgtgtttgaggctctgatccgccacacaactcccccactccccccactctccaatgtgactaggtttcgaataaattcacccgttttcaagtcccatagttttacagttccatcatctgagctggtaattacaaagttcttgttgaactgtaaacaggtcacagcactctgatgcttgttgggaccttgcaatgtttgtaaacactgtcctgttttgatatcccagattttaactgtagaatctgcattcccagagacaagaatattgtctttgagttccattccacttgttaacgactggtgccctgttaacgtgtgaatgcaattccctgtctccacatcccaaacacggattgatgtatcaagagatccactcaccacatggataccatcgggtaccga

SEQ ID NO: 447057 - DNA, 434 bp, Homo Sapiens
gcagggggaagggcagggagtatatcgtctacacaattggacaaattcatcttttctgctcttcacttcatgtccacatcaaagtccagcaccagcagcttggtttcttcagtcccattccgactcccaactgcacacaccagctttgtgtttgaggctctgatccgccacacaactcccccactccccccactctccaatgtgactaggtttcgaataaattcacccgttttcaagtcccatagttttacagttccatcatctgaggctgggtaattacaaagttcttgttggaactgttaaacagggtcacaggcactctggatgcttgttggggggaccttggcaatgttttggtaaaacactggtcctgtttttggatattcccaggatttttaactgtagggaatctggcatttcccggaggacaagga

SEQ ID NO: 447058 - DNA, 578 bp, Homo Sapiens
atcatctttagtctgcgcattggtgatatacaggtcgcagtcggcagctttcagcttctctctcaccataatctgcttctttaagtcgcaaagggagatgtggagcccatcaaaggtgacggtatcatagttgagtttagaggaaaatttataatgcacacaggacatggtgccaagggattcataaggttcagcgaggagacgtggacactctcaatatacgtatatttataaactttaagagcaaaatatgtacacacaaaacactcaaagacaccgaaggaccctaagggcttcagattaaataccccccaaccacaagcaggggttcgtcagaacaataatccagagaccccccgatactcagaatcacttcatgggggaggaggaggacgaggacggggaagaggggaaatcgagaatccgccaacgggcacaatgtcacccggctgggtccccctcgctcatgctaaggggccggcagagacggggggattggcggtgcagtcagtagcggtcagtccacacgttaagagtccgagcgaccccacggggtcaggggtccatagcgcggccgc

SEQ ID NO: 447059 - DNA, 957 bp, Homo Sapiens
gtggggggcagaggggggtggcccaggtggccctaggaccccccctccatggaaaaccagctatggcataacaccgtgagatgttgcaatcaataccaagaaagcccccacgatgccgaggacatcttactcctgctgctgggcctcatcgttcttgtcaacattggcatcaacgtggcaactatgatgtggcatggactccagaacgccttagacaagatgattgattgggctactcagaaaagaggacccggattcctacctggaggaggaggacaacctgcccttcccgtatcccaagtacccacgtcgcggctggggcgggttttatcagagagcgggcctgccctccaatgtggggctgtggggccaccaggtggtatcctggccagtctgccaccaccctctctctacctgtcacctgagctgcgctgcatgcccaagcgtgtagaggccaggtctgagctgaggctgcagtcctatgggcgccacggttcccaatcccgactgtggggcaatgtggaggctgagcagtgggcctcgtctccaccacctccccaccggctgccccctaacccctcttgggtccccgtggggcacagcccttacccctcagtgggctggatgctgtatgactcctgggatcagcggcgtcgtggcacggagggcttttgagcagcccccctgcctcggtgtcccggaacgcccgggctgaggcccagggctgccgggagcaccactccccacagtcccaccagcagagcctggttggtcacgcctatggccagtcccacgggagtccccacccatccacggaacccttgggctacagctcccaggacccccgtgaggtgcggcgtcgggcagctgactgggctgaggctctgcccgcctggcgtctctgactacctctgcctccctcacggtgttggacgaggcctcccatcaacggacccc

SEQ ID NO: 447060 - DNA, 671 bp, Homo Sapiens
  misc_feature (47)..(82): n is a, c, g, or t
  misc_feature (132)..(143): n is a, c, g, or t
  misc_feature (147)..(155): n is a, c, g, or t
  misc_feature (299)..(300): n is a, c, g, or t
  misc_feature (302)..(302): n is a, c, g, or t
  misc_feature (305)..(305): n is a, c, g, or t
attttggaggcgcgcgggggggacctcctccctttttggaggggcgnnnnnnnnnnnnnnnnnnnnnnnnnnnnnnnnnnnnttgggggaatttttctccaaaaaaccctttggggtttcccccccgggggnnnnnnnnnnnngtgnnnnnnnnnaacccccgccccttttttctttgccccgggtttttctttgggaaacaaagttttgccccattttcccctttcccttttgggggcccggggccccaacggaatggttttgaaaagtttttgaagggcggagccggccgacaagcnntnatntccttgttgagccggtcgtcggcaggatgagacacatttattctacatctggtcacagtaaatctcacccagaccacaggcaggatgccacgtggctacaggcagctggcggaaatggagatcatctgttctggtgctcatggccactctgggcagaaagcaaaggtgcctcatggcacctactcagaggcactgaggccacattcccatctccaggcaccagggatgtctctgaagggtgattccatttggagtttccaaaatccaggacttctgagagccaagccctagttccaagtcatcctgagtccaggctctgccgacgcgtgggtcgacgatatcccggaattccggaccggtaccagc

SEQ ID NO: 447061 - DNA, 1003 bp, Homo Sapiens
cttaagcagccaaaatggtatactttcttatttttgaacttttaaagttctagtttggtctttgaatgagaacaaagtaaaagatgtttataaaagccatttccttttctttccccactatgctcatttgacttgttcttccccctatagggtaccctgagtcattcagagaaggagaattaatagcactgagttggtgatgaagctcctgttaggacatatggcttcacaaaaagaaatacttccagataagtcagagagacagttggacgtcttgagcaaatcttgaaagagatagggaagaaagcagaagttgttgggtggtgcttgtaagaaaaaggctcatacgatgaggaccagcttcttgtggatctccaggtctctgaccacagcactgaattcctcaaaggatatcttcccatcgccatccttgtccaggatgatgatggttttgtcgaccagctgctggagctgccagtccgtcaggttgttgcccaccatcatcttcagcacctggaagagctccccgttggaaatgtagccatctttatccatgtcgtaaatgctgaacgcaaacctcaacttctgctcctcgtcgcccttgacgctgaactgggaggtccccaggatgaattccttgaagtccacttctccatcaccgtcggtgtcgaagacgtcgatcactcgccgcaccaacgggttgtggcgcagctccggcagggacatgaactcctccacgctcagagaccctgatttgtccaagtccaacttcttaaacctcctgcccagccttttaatttcatcattgtcaaagtgggagcacatctccgccgggtaactggcctcgtttcccattgtggacatctggcaacggccacggctcaaagggtcggagaggggagcaggggcggtgagctcgggcggggctcgtatcccgggaattccggaccggtaccaaccagtacggtgttgtgggtttttggttgtattaagttgtgagacg

SEQ ID NO: 447062 - DNA, 1459 bp, Homo Sapiens
  misc_feature (150)..(180): n is a, c, g, or t
  misc_feature (773)..(773): n is a, c, g, or t
  misc_feature (1278)..(1372): n is a, c, g, or t
ctcctctctgtggtgctgcagatccctggggttctgggttcccagtctcctcttcccttgctgcctgcctctgtctccagctgccccaaggtgtccgtaagccaaggctgcagggcagcagcagagtgctgaaggtttgctctgccaggnnnnnnnnnnnnnnnnnnnnnnnnnnnnnnncgtgcgcgtgcgcgcgcactataaagcaatccccatatctggtggcttaaagaagaggggagtttgtttctccttcacttctgactgaggtgggtgccccagggcaagtggcttgcggaagatcaggtcatccctccatcttgcccctgtatgcctaagggtgaaggtcaaaaaccttttctctgaaggtgagtgtttcaggttctgtgggccatatggccctgttgtagctactcaactctgtagcgcaaaaggtagccagagacagtacagagatgacgtgggtgaggctgcattccaataaaactttacttgcacaaacaggctggatttggtccacaggccgtagcttacccatcctgcctggggcatcgcgtttggccatggagattgggtcctaggcaaactcatgctctaggaggaagaggaaggcagggcaagcaatgctgtttttgtagaagccaccggacattgcaccacttctcatgttcccctggagagaacttcgtgcttacctgccaccaagggaggcttgggaagtcattctgtggccagggccctgttttgtgggggaaggggaggaagcatgctgngagacagagggcagtccctactgctgctctatctccagtggcagctcccttgtccatccctccgcgcggcctgacagcccctcagcctccatctttcccaccccctctactgggcatctcctgcagctcagcccagctctctggcccctgtagcaggggttacctttgcccaccctggagaagctccctcttcaaggagcctcgccaccccaagggcaccttgtctcagagtgtggcttgggctcttaacctgggttgatactggttgagctgtgtgacactgggtgagctttgtgatcttgggccagttacttaactgctctgtgcctctagaacatggggatagctctcgtcgtcacttcctaaggccttgtgcagatgcatgggttacccaggtaaaggaggtggcatggcacatggcacgtggcttgtaatgtggtcgcagagctccccttgtctctgtctgcagcttgctccctgtgccaccattctgacagcccccgcnnnnnnnnnnnnnnnnnnnnnnnnnnnnnnnnnnnnnnnnnnnnnnnnnnnnnnnnnnnnnnnnnnnnnnnnnnnnnnnnnnnnnnnnnnnnnnnacccagctgtcccccgaggcagcctatgatgtgctgagcgtcgccgacatgtacctgctgccaggcctgaagaggctgtgcggccgc

SEQ ID NO: 447063 - DNA, 1731 bp, Homo Sapiens
ggaattcccgggatgcggcttcgccgcccgaggtcgttcggctcgggtaccatcctccgcgccatggacaccagcgacctgttcgccagctgcaggaagggggatgtgggccgagtgcgaccatgaacccgtcctgacccaggctctgacctccttcctgcccaggtacctgctggagcagcgagacgtggaggtactatgcctgcttgtgtgggcacgaggagctggtactctaccttctggccaatggagcccgctgcgaggccaacaccttcgatggtgagcgctgcctctatggggcactgagtgaccccatccgccgggctctacgcgattacaagcaggtcacggcttcctgcaggaggcgggattactatgacgacttcttgcagcggcttctagagcagggcatccacagtgacgtggtctttgtagtacacgggaagccattccgggtgcatcgctgcgtcctgggtgcacgtagtgcctactttgccaacatgctggacaccaaatggaagggcaagagtgtcgtggttctcaggcacccactgatcaaccccgtggcctttggggccctgctgcagtacctgtacacaggccgcctggacattggcgtagagcatgtgagtgactgtgagcgcctggccaagcaatgccagctgtgggacctgctcagcgacctggaggccaagtgcgagaaggtgtctgagtttgtggcgtctaagccaggcacgtgtgtgaaggtgctgaccatcgagcccccacctgcagacccccgcctccgggaggacatggcgctgctggccgattgtgccctgccccccgagctccgaggtgatctttgggagctgcccttcccttgtcctgacggcttcaacagctgccctgacatctgcttccgagtggctggctgcagcttcctctgccacaaggcctttttctgtggccgcagtgactacttccgagccctgctggatgaccacttccgagagagcgaggagccagcgacctcagggggccccccagccgtcaccctgcatggcatctcacccgacgtcttcactcacgtgctctactacatgtacagcgaccacactgagctgtcccccgaggcagcctatgatgtgctgagcgtcgccgacatgtacctgctgccaggcctgaagaggctgtgcggccgcagcctggctcagatgctagacgaggacactgtggtgggtgtgtggcgcgtggccaagctcttccgcctggcgcggcttgaggaccagtgcactgagtacatggccaaggtcattgagaagctggtggagcgggaggacttcgtggaggcggtgaaggaggaggcagcggctgtggcagcccggcaggagacggactctatcccgctggtggacgacatccgcttccacgtggccagcacggtgcagacctacagcgccatagaggaggcgcagcagcgtctgcgggcactcgaggacctgctcgtgtccatcggtctggactgttgagcccctggctgggcagccccaggggccaggagctctcttggagacaagcatgtgtatgcgtttgtgtgcagctcttcttcctgctccctgcacattgagggcttcatggggggtgcgaggggctcagtggggcttctcttccctccatgagcctggagaccccaggggaggatccatttgggatgagccccctccccccaatgcacaagccagcccccaa

SEQ ID NO: 447064 - DNA, 790 bp, Homo Sapiens
  misc_feature (188)..(188): n is a, c, g, or t
  misc_feature (703)..(703): n is a, c, g, or t
aggtcgttcggctcgggtaccatcctccgcgccatggacaccagcgacctgttcgccagctgcaggaagggggatgtgggccgagtgcggtacctgctggagcagcgagacgtggaggtgaatgtgcgggacaagtgggacagcacccccttgtactatgcctgcttgtgtgggcacgaggagctggntactctaccttctggccaatggagcccgctgcgaggccaacaccttcgatggtgagcgctgcctctatggggcactgagtgaccccatccgccgggctctacgcgattacaagcaggtcacggcttcctgcaggaggcgggattactatgacgacttcttgcagcggcttcttagagcagggcatccacagtgacgtggtctttgtagtacacgggaagccatttccgggtgcatcgctgcgtcctgggtgcacgtagtgcctactttgccaacatgctggacaccaaatggaagggcaagagtgtcgtggttctcaggcacccactgatcaaccccgtggcctttggggccctgctgcagtacctgtacacaggtgaccccctgggtccagggtaggaggagagggagtgggccgtccttctggacagcagtacacctaggtgtggctgggctgacctttcacctctagacacttcatggtccccccggggtggttccagctgcctctcgggtngggttgcaagagagaggactagtgtgcctgctcaggaagagcttgtcccaaccacatgctgaggccctcccatctgttccctggggc

SEQ ID NO: 447065 - DNA, 654 bp, Homo Sapiens
cgcattcagctccatcttgtaacattctaagtgaagctggtgccaggtataacctattcagttttgtgagtttggattacataggtcaaggatcagtaatctatggctcatggaccaaatccagcctcctgcctgtttttgtaaacaaagttttactggaatgcattcaagctgatgtgtttacatattatctatagatgctttcacactacaccagcgtagctgagaagctgtgacacagatcacactaactgcaaaggcgaaaatattcactctcttagagaaaaactttgctttttgtagtatatttatttaaaaaattgtagtttcctttggagaaaaagtgctttttctctaggtgagcctaagaggactcagacagggtgtttgattaactataggggctttttgttaaaaggtagaaaactatggatagcactaatctacagcattaatgaaccagcaaaactcagaacatcttcagtatcaacataccttagatacggagtctttcctgacttcttgtacagcttcagagtgtgaggctgacccaaactgagatttcggtgtcaaatacctaaaagaaaagtttaccaaagtttcaatgctttcaaagacagatggtatgtacccaacataataaagctatttata

SEQ ID NO: 447066 - DNA, 1327 bp, Homo Sapiens
  misc_feature (394)..(437): n is a, c, g, or t
  misc_feature (511)..(511): n is a, c, g, or t
  misc_feature (548)..(548): n is a, c, g, or t
ttttttttaatctaaagtttttattttctaaaagtataaaaacacatacaaaaagggacttattcttgagaaatgatcatatcattgtaacacacaggccattggacaaggccactatgcagaaagtattgctcccaaaccattaggaattttaatcaccactttgttccagactctttagaagttactatttctaaaatacacatggacaaagaataagctttattcaaccagactcacaaaagtaaggattctgcttctctaggttcataaaatagaattccaaggctctgaggaaaataaacttgtgtcagtcccagggaacttttctccccagaagttgattggtcactctctttttatatagctgggctcgcagccggtatgacttatnnnnnnnnnnnnnnnnnnnnnnnnnnnnnnnnnnnnnnnnnnnnggaagctgctcataaatccgtttggacctctgaatcatttccttcttgctgataggcttgttcttctggatagnccaggaagactctcttgggcagcgggcacatgcgatntctggtggccctggccgttccctgtcaatgttgaatagtgcatcccgctcggtctgtaacatgctctgcagcttcctctcctggactattaacttcaggcgctttatccgctccccagagcgggagatgaagtcaggtctgtgaaactgaagcgattcctgaagggttgctctcacaaatggcttcagtaggtctctgccagcctctctgcctgggcctgccaggtagccccgaccgtccaggtgctgcccctgacagttctgctcccgcagtggctccctccagggtctggtcttggttattggttcaaaccaggagatgccagggccacaagtgttaggcacgttttccttctttgatctagactccacattttccacaggaacaaaccaggaaactccttcatgggaattcttcttgttcttttttaactttctgtcctcaggataaccggtaaagagcattttctccttcacgtttttcttctgacccaagaagtcacatcactgttctcttccaatttagcctcgctggaacttggagttgggaaagttatcccaacatctcgagtgtgttttttggcaccgttcacaatctccaagttacctgcttgtatgcccttgtttaacatgtgtacattctgcttgttgcaaaaagtagagtttgagctcaggaaactactggcagaagaggaaatagagtcagaagaaatcacatggtttgctacctggatgtgtctccttctggtgtgctcagaagtcactaggggatgacctgta

SEQ ID NO: 447067 - DNA, 873 bp, Homo Sapiens
  misc_feature (181)..(190): n is a, c, g, or t
ataataggtaagtatattcaaagatcgtccctcaaagttgaactcatttgaaccattaaatctaaagaagatccaatcaaaaaattaaaaagaaaacacataagattaataacttggattttgaggggatatacagcaaagattgaaacaaggtctcagaagtattttggcttctgttaannnnnnnnnngattacaatgaaaagaaatgaaactccaagttgaaagatatccagaaccactttaaaattctcataaagatagtcacataacatgggctaccccaaccctactataagtctactgtttgcccaatgccatcaaggtttattaccaatagtaagaaagattcaaatatctggtatccagacaatgttcacagctacttctcctttaagagaagcagaaaggcagttttaggtgtggtctgtctttattcccccgaacttgatcaatgtatacaatgcttacacattcaaatatgtgcaagattcaacaggaacactctccactgctgtgctgagtacgcaagtttccctgagatgtccgcatcaccgagggctccgttctaactctggtcgacagtttctgaacaatgcaatagtgtagctagaggactatataaaatataaggttctctcaaaaagattcatggtgtttggggataaaaaacatatcagtcttcttggctaaaggttggcaaatgtgttttcaactttaaaatgtctgaaactggctcttttctttgttgatagaagctgagtccagtgatgtgctcaacatctgtgatccgtgctctgtgtaacattaacaattctttcaccccatggaggagtcatgccttcccatggcacacaggctctccgctggttat

SEQ ID NO: 447068 - DNA, 1479 bp, Homo Sapiens
  misc_feature (203)..(203): n is a, c, g, or t
  misc_feature (261)..(261): n is a, c, g, or t
  misc_feature (283)..(305): n is a, c, g, or t
  misc_feature (460)..(468): n is a, c, g, or t
  misc_feature (477)..(477): n is a, c, g, or t
  misc_feature (522)..(539): n is a, c, g, or t
  misc_feature (578)..(663): n is a, c, g, or t
  misc_feature (834)..(893): n is a, c, g, or t
  misc_feature (1038)..(1046): n is a, c, g, or t
gaataaataggatcagggggcgtggagaataaaacaaacgggggcgtgcgcgcggacatatttaatgtgggggtagagagcggtgagcggtaaaaagagggaggcgaatggtggggggcacatattcgcgggcaggtgtatttgtattttgtataggctagaaacggggagaaataaagggggtggcggataagtggaggganaggtgggatattgtcagttagtctcactaaaccgggtggggcggggggtgttgatatncgatattatgctccgtggactnnnnnnnnnnnnnnnnnnnnnnncgagggattataatatagcaggatcggtatacaagcggcacagacagggggtgcggagagatataggggatagagaggcggcgtggcgcgcaccgccgacaggggaggtgttgtagtggaaaaggtgaagcgcgagagcgaggggggcgctgatnnnnnnnnnggtgtgaanacgggcgagcggcaatatatataagcggcggtaaataatagggcnnnnnnnnnnnnnnnnnnagagaatggcggggcgtataagggaaataagaaatagannnnnnnnnnnnnnnnnnnnnnnnnnnnnnnnnnnnnnnnnnnnnnnnnnnnnnnnnnnnnnnnnnnnnnnnnnnnnnnnnnnnnnaagtaaggcagaggaagtgaaaaatgggtgcccgattggggtggggagggatggtttaaaagatcccagacgtgggctagaaggcgtgtaagaaaaaagggggggaaatagacgtggtgtgaatcagagaagggatatgaaggggagtgaaaacggggtagccgtggagannnnnnnnnnnnnnnnnnnnnnnnnnnnnnnnnnnnnnnnnnnnnnnnnnnnnnnnnnnnacgacagtggaggagggcacgacacgtttgcgggcttgtagtggtcgttgttgttttttgggtaatattgaaaaaatacaattaaatttttattaaaaatacatactccttacgcgatctttgtgtacattttgtgtgaaaaggnnnnnnnnntaggaaaggcattaagactacctaattatttatactgtatttggtagaagcgtgtttcagtcaaactttaacgaaaaataagttattctgttttcatttgctcccggacgtcagaaggcagagtttcaaacagagcatcttctacaactaaaccagctcgcttcagagcccgacagtcacccagttcaggagggaggatttcaaagtgattaccttttacatctaagtaggaaagaaatagcaaatttccaattttcggtgaaagtacagataggctgttttttccaatcttcagagttttaagtttcttgcagaagtagagttcatctggaaggctttccactttgttacatgtgatggaaaaatactgtaaactttgtagaactccaatttcaggggggataaatcgaatgtcattgtacgataagtccaa

SEQ ID NO: 447069 - DNA, 909 bp, Homo Sapiens
ccccggaagtttggttctgaccttagagtaagtgaggccctcccattcttccacatggcggagataggaaagccacggaccttgtggggggatccagccttcctcaaggtgggatgttggcttcccggccacattttcccaaaagtcctggataacactgactttctctgtttgcgcagtactgttgcactgaagagatgcagttaggggcctctgcttctttctcacattctgctcttcaaattctgccttcctcttggtatgagtctttgacttgaggtggtcactaatggcagacttgcgaacatgattcagaaccacattgcaagaagtgcagaagagttttcctccatcttcatgcagctcacctccaaactcagtgactcgatccaggggagtcacatacaaagcagtcttagaacggtttcgagcaggtggtgctgttactacaaatcgctccattctgactctaaataaatatggttcggattagtttccagtttttttcgtcttgatacttagcagggaatggtctccagagcgaaaccagagacgcatcaaatcctggcactttccgtttgttcaaccccggagatgccttcaaatcagtttttcaacaagtggtggtggggaaatagtttctgggcttgcacccgattttccctgtggtgccaggaagtcatgcctttacgtaggatcgaggccgccgttagggaaagtggacgaggcccggccggaaaggaaaagaaaaggaagaaagaggagcaagggaataagggaggaggaggatccgtcgctgccgccgtcgccgccgttgcccgatcgagccccgcggcggccgccgtgtcccccgccgcgccccgtccgcctgcaccgcctatggcagagcccgtaggcggtccccccgct

SEQ ID NO: 447070 - DNA, 1341 bp, Homo Sapiens
  misc_feature (1290)..(1298): n is a, c, g, or t
gaggatccgcagactgtctgacaggttgcatgctcctgctgagccccttcttgcccctgccacagtcctcctgcacccctgtgttctcttgttctcaggtgtgaatgtgtctccttggcagtctgggagctcctagcaactggggccaggcctcttctccaactatcgctgaagcctcggctgagttggggagctccacatccaggctccttcccttcttcctttgcctcctctgaatctgagcactcggacactggagcaggagaaaaagagaacgggaccccagcacaccaagaacagaacgcactcctttattccctgggagacgacaggctccctctcggggctgggggacgcttggttctgggccctatcaaggtggggacagtgctgggggcactgctggctccactggcagggcaggtccgaaggggctcctggcccttcctcaaagcttctccaggtaggaaccagggacgaagccacgctgcccgttcctctccacagtccaccagccatccttcccttccaggatcacctccaggatgtctcccgcggacaggtccagctcatctgggttctgcgctgtataatcgtagagcgcccggtactcctgggctggtgaggccgggtttccctgtatctcctgcactgcgatggctgtgtagacaccctcattccgctcgggggtgggggtcagggtctctgtggacgcagcagaagctgccaacgaagtggtcttgggacttccgtgcagcagtccagagaacctctttatcatgccgcaggacggctgtatgccagggctgctggtcagcggggtgacctcccgatcgtaatagttctggtagggcaccggagcggggggctctgtgcccgtgctcttggcctggatgaaactgtcgatgtcggcgtctatgctgcagccttccagcgtcagccgcacttcctcgtagagctcatcatccttgacacactgcatggagagctggttgctgtgcacccacagggcgttgcggagaatggtcagccggtcaaactcttgcagctgaaaggcctcacaggtggtccggtgctcctgctcccactcagcccggaccttctccagctgcgcaatgctctgcctgtatacccgctctgcctcggtggccgagtccttgcactgcctggctttgttctgactcttctccacctgcttctggtggccgttggcgctaatgcgctcgaaggcctgctcccggacgccgtgggtcgacgatatcccgggaattccggaccgtaccacctgcnnnnnnnnnaaaaccaacggtgttctattagttgtcacccatattagcctat

SEQ ID NO: 447071 - DNA, 375 bp, Homo Sapiens
ggggagaactatgatgacaaactgagggggatgggaggcccggtccgttgggttacccccatcctgtgtccccaaggggctggccctgccgaccctgggagacatgccgcatttactgctgggtgggggaacgccaggcccctccctgcaggcccttccctgcaggcccttccaacgtcatgcgctttcaatctcttggccagaacccagatgagctggacctgtccgcgggagacatcctggaggtgatcctggaaggggaggatggctggtggactgtggagaggaacgggcagcgtggcttcgtccctggttcctacctggagaagctttgaggaagggccaggagccccttcggacctgccctgccagtgg

SEQ ID NO: 447072 - DNA, 482 bp, Homo Sapiens
aaagtcaaatgataaatacataaggatttatttatataggtttgaaattatctattataaaaaaatttctaaagaatagaaaaatacagggaaacaaaatatttcttaacatttgaatagatatgaaaaatcagactaccacaatcccatgggaaaacccccctacttagaggcttttctgagacactgtcctaagctcttggccccacaggagatagggaagaggccagataggaaagtcagcaaggcccagctccttctgaagctaaagatatgccaacttgctgaaacccagaggaatgctggctgtgtatgacaaaagagcatctgtgattcaggtaatgacaagcagccccccgaggcctccccagtccccacctgcctttggaaaaccaccctctggggaaggccacactcaggccagaagcctcccactgagtctgcctggctgtcagccctgcctagctgctctgataattacg

SEQ ID NO: 447073 - DNA, 457 bp, Homo Sapiens
ttagcattcaataaatatttattataattaaaagaccgtagcaatacccccaccaccaagacccttcacccagaaatagagagattggaattgtaaacaccgtatccagttctgaccaccctgaaagccagggcatcatcgcgcccgttttgtcctaaatgaagggctcccggacaatgtcctgaaagtggcagatgacctcatcttccactgtccacagggcacagggcagaccggggtgctctatggggtcctggccgatgcctgggtccaggggtgttccccaggtggtcaggcaaagacacgcggtcattctgcctcctgcgtcttgtcctcgggcgcctgggaccctctctggttccacatgtggttgttcagccccagctgtaccatctgtgcgtggtggataatgaggggttgcagccctgcgctctgagggggtgcgggtgaggccgta

SEQ ID NO: 447074 - DNA, 430 bp, Homo Sapiens
  misc_feature (349)..(349): n is a, c, g, or t
  misc_feature (371)..(371): n is a, c, g, or t
  misc_feature (388)..(388): n is a, c, g, or t
  misc_feature (404)..(404): n is a, c, g, or t
cctaaaaatgttttattttaacaaaatgctcaaatatctgaaattgggcaaaggtggagggtgggcaagctggctgaggtgtcccaggtctgtggctgcctagctgggtgaggggctggtgagcagctgctccagacaccactggacttcctccaggccccggtaggcccgcttcagaccccggggaaggcagcggcaggactccaggttgaggtagagcaggcccgggcagctgctgatcacagagctgacagtgcttggtgtgacccgggtgcccctgaggttaagagagcacagggcttggtttttagcccccagggggtgctttaagaaggcagccaggggcctncttccaggtcctttttcacttnaacccctgggccacttnaaagttccagtttttngcagttgttatttggcaccatttttt

SEQ ID NO: 447075 - DNA, 654 bp, Homo Sapiens
  misc_feature (189)..(189): n is a, c, g, or t
  misc_feature (457)..(466): n is a, c, g, or t
  misc_feature (521)..(547): n is a, c, g, or t
ggcattttcaagattttattgtaaaacagagctgaagtcacaggaagtagggaactttgcacccaacatatacagcattcattcgctgagtacctgccaagagcgaggctaggtgcttggccctgcagggacctgagacatatacgagtcatgtttcctgctctgcagagctcccagcccggtgggggnagacagggcagaggcacagccattctttcatacaagtctccaagtgccagaagctctacaatgtcaagggagcaatttattccttcagcagaggaagaaagaacccccaggagccacatttgctcagagccttgggagctgagaaacttctgataggaggtaaagtactgcaggcagctgtaaaaaatctggagtggagatggagcttggaggctgggcagcagtgcctggacagaggagtccagattatggaagtgttttaaaaggnnnnnnnnnnttatggggctaacatagtaccataacttttaatttttacaagttgggacatcacnnnnnnnnnnnnnnnnnnnnnnnnnnnctaccacttactttcaccatcatttcacaaatgcaggaatattttaagtcctcagcctctccccgaaagaacataatctccaaatgaagggctctccttcacgggga

SEQ ID NO: 447076 - DNA, 839 bp, Homo Sapiens
tagccatgctcatggctgactctagaggatacacttcctctcctcccacctccagggtaccagcaggcttcaagccaggggtacagatggtgagcaggacccctcccacactagcagcaggcctggctgggctgagaaatgctgactaattatatgtcggtctgctctaaaaccccctaatggcctgagaattgcccacttcattaactaggatgaacagtcccaggatgtctccttctcccaactctgactcctaaaaggacacttctgatccaacctatggctttgtcctctgctctatctgtggacatggacaggaaagttccccagctgaggtctaactttccctcttactgctaaagattggtagattgatttttttaaaaagcaacaaaactaaagccacagccgttttccatggaggtgggctttattaggtgactgttgaggcaagggaggttctagggctggtggactgatggggggcaagggcttctccttgcttttgaatttagtgcatgttgcctagaggttagatgtgtgagaatagctgcagaagtgagaggagaggaaaagagaaggtcatagaatggacattttccttgggccagaaccaggatatggggactgggggtggagagggagggtactcttcacataggagactccaccaaggtcaccatttgataccagcttccctaacgcccacctgccccatcccagttcatgccccagatgccagccctgttagctccctcaacatccactggagaagaggagggaggaggagatgagaaacgatgatacccttctgccctccagctcccctgcccagaatt

SEQ ID NO: 447077 - DNA, 462 bp, Homo Sapiens
attaacaatgccagttttgtttgtttttttacaaagttaccgagatgacaatatccataattagctgactcttacgtacacactgtgacctgatcatcctgaaaaactttatgggggagaaaggtcagcagcttctctttctttttctcgaaaataataaaactgcgtattctactttatatttaaatgtaaggaagaaaatatacaagcccatatttacattgtatttctattaagagcaacaatagttcatatgttcatgtttgctactatcacaattcaacatatgaacacagatcagctctataccatgaatactgctggaagtgatggtttaggattaccaactcactgctgccatgaccaaaacaagcaaatgcatcctggaaataaacctgcaaacacatatctttcagtacgtaataatgcaactgcattaagtaagtacatactgtacacaaa

SEQ ID NO: 447078 - DNA, 1186 bp, Homo Sapiens
  misc_feature (1137)..(1137): n is a, c, g, or t
agttttttccccattccacggaacgttgttaaaaagggaggggcccaggggcctaagtcttataaataggacttcacttataggggagtcccttttgtacaagaaaagctggggtatcgccgtaagcctggggccccctggaggggatactctaggagcgggccgcccagggaccccggtggtcccccggaaaggagaaagcgcgggcgcccccggcggcggggtgtaagcgggctccgtcgggctcccgcctggctccatccccgggctgccctgctgggttcccgggccccgcaccagacgcggccccaccggagctgccgcccgaggcgcctccggacgcagagcccgcgcctccggccctggaggtaggacaggcccagcacggaggagggcacccgcggtgtgggcacgtagactggcgaggacgcggcgcccgcgccgtgcatgaaggcgccggggccgcccgcctcgtaggcaccggggggcggcccgtggttggcggccatggccaagctctgatacatggtccctgcgagctcccggcttcggtgtcctctctctccctcgcaggtcaaggagccacgcggggagagaaaacgacggcaacaacgataatatgcgtgggaggaactgtcgcgaagatcaaaaatcaaaggggaaaaaaccaactcgcttaaaaatatatacgtattaaatccagcattgagcaaagggctctaggctcttgtttactccggaaaatcccaatttgaatttttggtggttccggaagctgatgtaggagcagctgaattcaccccagggcctgaaggtccggcgcacctattgggggcagaagacggagggcagcgtccaggcctggaggtggcgcacgagccttcgggtcccccactcgtcacaccgagaggcctccaggacacccgcggccacaggcgcagaagctgctaggctggctccttcctcctcgccgcagccggggtccttaataaaagatccagtatttgacttttaaaatcaagtagctgacctatttcattgcattttctggaatactcaactcctgcagttcttcaagataatgtaattttttttctttcataactgctgggcctggaggttccgcgcacgctcccntgggagcccccggagctgcagcggcgacgaagcctctcgcggccctgcg

SEQ ID NO: 447079 - DNA, 602 bp, Homo Sapiens
ttctcgtacatggtcataatcacacaatatgtaacgtaagtcagtcacaggataagtcaataaaaatattaaaacatcaacattcacacattgattacatgaaataaattaaactaagccagtcacaaatttctcttcactcttacttaagtcacggcttatttatgtatacacactatataatactttcctaaagctctcaaaatgctacaaataaaaacgaaggctttgcattatagctgctggacaaaaatatcaacactgttgatgtgtgaaaacacagtttctttgttctttagcatcagtgcacagggtatggctccaagtggtatgcaatttaggagagaaaaaacatacagcgtcttgtggaatagatcctctgttcatcattggcacaaatcaaaaaggaagtttactgtccttggtacctctgttgggtctcctccctaaagacagataatgtcatacatatatgccttcaggattaaaaccagatgagataggattctgcagaatgcggagattactggggagctgccgagatgaaccaggtcgcttccgggacccagactggaatggtgcctccctttcaatgtctgcat

SEQ ID NO: 447080 - DNA, 900 bp, Homo Sapiens
cgcgaggagggttgctagtggagaagcaaccttggccatggaccagccggctggcctgcaggtggactacgtcttccggggtgtggagcatgccgtgcgggtgatggtttctgggcaggtgctggagctggaggtggaggaccggatgacggctgaccagtggcggggcgagttcgatgctggctagtagtgagtcagtcaccctggacctgctgacctacacagacctggagtccctgcggaaccgcaagatggggggccgcccaggctccttggcccccaggtcggcccagctcaactccaagctgctacctgatcctcatctactccgtggagtttgacaggattcactacccgctgcccctcccgtaccagggcaagccagaccccgtggttctgcagggcatcatccggtcactgaaggaggaactgggccgcctgcaagggctggatggccagaacactcgggacacccgggagaatgagatctggcatctgcgggagcaggtgtcgcgcctggcgtccgagaagcgggagctggaggcgcagctgggccgatcgcgcgaggaggcgctggccgggcgcgcggcacgccaggaggccgaggcgctgcgcgggctggtgcgcgggctggagctggagctgcggcaggagcgcggcctcgggcacagggtggccggccgtcgcggccaggactgccgccgtctggccaaggagctcgaggaggcgaaggcatcggagcggagcctgcgcgcccggctgaagacgctgaccagcgagctggcattgtacaagagggggaggcggactccgccggtgcagccgcccccgacgcgggaggaccgggcctcatcgtcccgggagcgctccgcgtcgcgaggccgcggcgccgcgcgctcc

SEQ ID NO: 447081 - DNA, 877 bp, Homo Sapiens
tgtttttccatcctgtagagataccacactgacattatcaaaatggatatgtccattagcttctgtgacagcaggatttgcatagcatgtcacaccattgatggcaggtaatgctttaggttgatgagttttttcttgaggaccaaagttatcatttccaaagtgggtatgaccattctgaccatatgtctttaataacatctttagcattctttcagaaaaagaaaagtaggtaaaatccaccaaacacagcaactgccttctcaacataactgtcgactttgggatcaaatccaaatgcctctggaataagttggaaaattgcatttgaaaaaagagtcccaatagccagccccacaaaaaaggtcaaaatctttgggaaataagatttctttatcagtggagtcaaaatcaatccgaggagagatgccagattaataatcgtcactgacaggaatccatatccccaaacttctgaatgacttggtcttgttttgtgcttgggccgatcctcacatgggtgaaagttcaattgctgtaagactgctggacagatgacagagaatttggagctggttatttgggtagcatttgaaaagccatgaagggaaaagatctcttcagcagttaaacactggttgaagtgcagctggccaggctccgggacgcccacgcgggaggcggctcccatctgctccagcaagtgctggagctgcgccgccgacaggctcagattcgcgccgaacacgctcagcacatcctcgctgaaggctagccctggcccctccgccactcctccgaggccggcggccgccagcaacaggagcccggccaccgcgcgacccgtggccatcctggcctgggcttcccctccgct

SEQ ID NO: 447082 - DNA, 284 bp, Homo Sapiens
cttcacgagaattcaggacctgcattttcattctaaaaagaaatgaacagcttgtgaaggagttttttggcttcatagtttctattcatgaggtagtgttacttctttatccccctaaagacaaaatgaagataaagggggattgccaggaatgggtttaaaagcacaaatgtggtagcttatcatctacaccatggagagtgaacccttacgaaatgaaagtcaaatgagaccatccgagaaaaagatgcgcataggcatttgtacctcggccgcgaccacgc

SEQ ID NO: 447083 - DNA, 631 bp, Homo Sapiens
  misc_feature (98)..(107): n is a, c, g, or t
aaaacttgagaaagtactttaattctgtaggcaaaggttcagcaaatcagctagcactaatcttgaccaaatgggtgagtcagcctcatcacagagannnnnnnnnnaatttagatgaaatttcacatttaaaaacatggtaactccaagcattcttccaaaaacaaagaataaacattggaatagtcacttacaaggacttaacgacttgtattaaacatattttacactaaagtactagatggtctctagttcattttagctcaaaccttccttaattctttgagtaatttcaccagactattctttaagtcttagtaattacaaataggaacctgaatgaggaaaggaaaattcaggaattaaagttgttatcagtaagcctaattaaacagtgcagacagaaagatggcagtagaataaagcattctacattaggagtagggagaatataatcagtagttcacagccccatgaatgaagcacagcatacaacaaagtctggctgggatttgggataaagtggacaatatctgtctgctcttgagtggtaactaacaaactaaacagggatatagactgtggcccctattaatgtgatactgtacctgaagtaaccaaccacactcag

SEQ ID NO: 447084 - DNA, 494 bp, Homo Sapiens
ctgaacacaagtggtataaattattcccactcctggataaaaatttgttccaggaaagcaggtaaattagcatgatataaatcttcaaattacttttgcccagtttggagatgatgatccagccatggtgtgaccaacagtgttttctcatcaacaccataagtaattctgcaaaggacatgctgtacactttgcccagatttgtgattatttcctcaagaaatggaattactgggctaaagggagttaacatctttaaggttctagttaaacactgagaaactggcctcaagaaagattggataatgtatatacctgccaattaaagcccatcattgctactgctaaatatattcctttaaatttttttctatttaatagggtgtaaagggcattttattttttattcaatatgccttactttgatcatgaattattaactttcttatgtttattggtcattatacttcttataaagattatttgcatatttt

SEQ ID NO: 447085 - DNA, 1182 bp, Homo Sapiens
  misc_feature (720)..(720): n is a, c, g, or t
  misc_feature (1054)..(1063): n is a, c, g, or t
aatgaaacaaaagaattttgataaaaaagtaaaagaattctggcgagcagtaaaaagcagcgtgtggaaaagggagccgattgttcatcaacatgagtatggaccagaagaaaacctagaagatgacatgtaccgtaagacttgtactatgtgtggccatgaactgacatatgaaaaaatgtgattttttagttcagtgacctgttttatagaattttatatttaaataaaggaaatttagattggtccttttcaaaattcttaaaaaaaagcaacatcttcatagatgaatgaaacccttgtataagtaatacttcagtaataattatgtatgttatggcttaaaagcaagtttcagtgaaggtcacctggcctggttgtgtgcacaatgtcatgtctgtgattgccttcttacaacagagatgggagctgagtgctagagtaggtgcagaagtggtaggtcagctacaaatttgaggacaagataccaaggcaaaccctagattggggtagagggaaaagggttcaacaaaggctgaactggattcttaaccaagaaacaaataatagcaatggtggtgcaccactgtaccccaggttctagtcatgtgttttttaggacgatttcctgtctccacgatggtggaaacagtggggaactactgctggaaaaagccctaatagcagacataaacattgagttgtacgagtctgacaccnaaacccccataccaaatacccctccctccccacatcaccctcaaccttccccatcacctcatccataaaaaaagggcgggcgccctctctaaaaatatcccctcagggggcccccaacttttacccgtttaccccaatttttctcttttacaaaaaggggggccccctataaataggggggcccccacaattttaaaaaatcttatagggccccttggcccccccctccttcttttctaacacaccctccccgaattctggggaaaaaaacccggcccaaacattttgggcgaactctttttggtgccaggaggacctcccttccttttttgcnnnnnnnnnncgaacaaaatattgtggggaaaaacattctccccttcacgaaggtattttttaccgcgccttttccggcgagaaaaaaataccaaaattttttttatcccggttctaaaagtgggggtt

SEQ ID NO: 447086 - DNA, 579 bp, Homo Sapiens
atcttcctcttccacctttttccgggcaactttagcaggaccctttgcaccatcaaactttcctttcgacttatagtcagcaacatccttctcatacttctccttcagctttgccgccttagtgatgtaaggctgcttttcactgtcatttaaattattccacatctcacccagcttttttgccacgtctccaatagagatgccggggtttgtggatttgatcttggggcggaattctgaacagaacaggaagaatccagacggtggccttttgggagcattaggatccttcttcttcttgcctcccttagctggtccataatccttcatttcccgatcatagcgcactttatctgcctttgccatttcatcaaatttagatttctctttcccggacatcgtcttccacctctcagagcacttcttggaaaattccgcaaaattgacagggacctctgggtttttcttcttatgttcttctctgcatgtctgcacaaagaaggcataagcggacatcttgccctttggtttcttggggtcacctttagccatcctgactgtattgttcgctagtctccc

SEQ ID NO: 447087 - DNA, 631 bp, Homo Sapiens
accctccactgagaacttctgcttcttaaggatgagatttggtgaacaccatttttatcatcagttaaaagtctctaccttctgcatactccttattttaacatatcatcagtcttaaaatggtgacttctgagattccttccaataccccttttattagctcatgaacatgaagctgcaagatactcttttccatttcgaaaacttgtagattaagcagagacgccccaaattgtcgctaataaaagttgtgcaataacaacaaggttcccaagggaaaaacttgaagaacaactgattgtcactatttggctgaataccagttttttaatctggctgaatgcctatattttttgttaagtgatatttgtaaactggaggaatagagtttaattacctcagaagcacttatacagcctgtttgggtaggatgaggagaagggactttatggcagagctgtcagggggataacaagagacagaagagccatatctaataggaaagtctgatcacatttaatctaaagtgttgctccctcgtcttcccaggaagcctttggtaaaatctatatccctggacaatgcttttggggttgggagaaggttggtggggggctgtgatggttggtgt

SEQ ID NO: 447088 - DNA, 367 bp, Homo Sapiens
acgtctaaatgaacacattttctaaatgaattttttaggtagttactgtatatgtaccaagaaagatataacgttagggtttggttgtctttgtgtttgtattttctttcttttgaaagggtttgttaatttttctaattttaccaaagtttgcagcctatacctcaataaaacagggatattttaaatcacatacctgcagacaaactggagcaatgttatttttaaagggtttttttcacctccttattcttagattattaatgtattagggaagaatgagacaattttgtgtaggctttttctaaagtccagtactttgtccagattttagattctcagaataaatgtttttcgcagaaaaaaa

SEQ ID NO: 447089 - DNA, 1656 bp, Homo Sapiens
ggtgggaggaaattccagaagcccttaggtcctgtggcccgggggttctcccttagggaaaacaagcttatgacccatgtttcacctttccctttctgggccgccgggcgcccaaacgaaatggtttaggaaagctttttggggggccgagggcggccgacaagggttgtgtgtgtgtgggggcggatccagggggcggacaggacaaggtttatttgggggtcctggaagcactggggagagggacgagggggcaaggtcgaggctcacaggggcaccccctagccaaatgcccccttcccctagggattggggaggaagacagagacagacaaaccaacagagatggagagaaagaccaacggatgctacggagagagggaaggaaaccccagtgtccaccacctcccactcagatgagttcacaggataaagaattgcgtggaccggtccacacgttacaggaaaagagaggagtgtccgccctattcactctaaggaaggtggcaggccacagcctaggaccagcccattccatgtgatgggggtgtgtgcacatagatcagtccattctactgggcaaggggatttcaggccagtctattctagtgtttggggcggggaagatcgttagggtcgatccattccacagtcggggaggggggattcgagggcagggggcatctaccctggtccctctttcagcacagggaatgaaaaaggggaaaggcagatttcggctatatccattttctggggtcaccagtgactctggtgggtggcatttggagggatctaggaaaattcagggacatgctccctccacattctccagatcaaggtcgttaggaatgatggctctcagggaatggggcagtcttcccttggtgggggtgggtgcccatcttttagtattagggctctcaagatgagaggtacttgtgggagacccattgctcactgcaaagtccccatggtcttggggacttacggctaacccacactcattccagggacctcaggctcaggagtctctccctagatttgggctcccctgcgcccagctaaggaccctgtttgtttgtggtcccccagctccggggcctttgctgggtttttaggtggcccccacctctccagtcagggtcccctcatttcagggcctgcgtctggatttggatttggagggccggggcctcacgcgcagtcccgaggtcccctggtccaggccgagtccaggaggctgggtggagggcagggcgcacgcagcctggcagtcagtccatgccccggtgcagcttcaggtgcctggagaggttgctgagcgtgatgaagcccttgccgcagatgtggcaagggaagggccgctcggtgccgtgcagcagccggtggcgcttgaggtagcactcgtggcggaagaacttgccgcactccaggcacgggaacggcttctcgccagtgtgcaccagcacgtgccgctccaggtctcgcggtgagcggaacagcttctcgcactcggagcagccgaagatcttcttgccgcggccggagccagacgggggttccccggacgccggttccctttcccgggcggcggccgccgcctcctcccctcgtgccgaattcaacacccagcctcgctacctagccgtaagg

SEQ ID NO: 447090 - DNA, 542 bp, Homo Sapiens
agttaaaaagaattattgttttgaaggtttaagcaagttttaaaacgttagttgtaaagaaaatgctgtttgtaaacatattagctaaagttaaagaggtatcatccagtttttctgtgaactggacagtaaattaaaagcataacaggtttttcttaaagcaccaacctgctctttagtaaaaattatagaaggttaaagagtctataaaatctttcctaatagtcaaacattaaaaaattaagtaaatatgtttacaaggttttattaaaattaggtttaacattaataacacactaatataaagataaaatttagcttatctggtataaaaatcatgtgagaagcattgttaaatgtaaaatggtatttggctttctttggtttaaaaactaataaaaataggttctaaaggaaatttctcagtaaaaaagcactaaggactataaagtccactgccaaggtccccatatttaaaacaaaaggtcaattttcttaaaaattatatacttggtttatcttccactttcctttctcgcaaa

SEQ ID NO: 447091 - DNA, 498 bp, Homo Sapiens
  misc_feature (344)..(344): n is a, c, g, or t
  misc_feature (371)..(371): n is a, c, g, or t
  misc_feature (384)..(384): n is a, c, g, or t
  misc_feature (389)..(389): n is a, c, g, or t
  misc_feature (437)..(437): n is a, c, g, or t
  misc_feature (445)..(445): n is a, c, g, or t
  misc_feature (450)..(450): n is a, c, g, or t
  misc_feature (459)..(459): n is a, c, g, or t
atgtctacaagattttattaaaattaagtttaacattaataacacactaatataaaggtaaaatttagcttatctggtataaaaatcatacattcattttactagaggatcatagaagttaaagacttaaaacaaactttggcaattaagacaggataccaagatgcaaatgcgtggttgaaatggatcaaatattccatttgcacgttaaacaaaagcaattgttatgcttgtgcacatggcaggccagaggctcagattttcccccctttccactaaggttgtcctccagttgaccaggcgtgggctgcatggttgctcttttccaggattctataggcctnggagtaataaagtcatgccaaagctcnctctggtaatatnccggnagtcccggcaccctggggggtcaagccccggagggccaattccaagcnttccaatnttccnaaacaactnaaattcactttccggggcttttaaggacagggagggaaa

SEQ ID NO: 447092 - DNA, 871 bp, Homo Sapiens
ctatttcttaaaccagaactaatgtattctggacacagagtccctgaaaccccagacaaagaaaattcgatgtatctgaacaaacaaaaccgcgtttctttaaatctccaagccaaaaggaaaagtgcagaaacatttactcactgtccgacctgtacatatattttacctgataacccttaaagaagtgccccccagttcagccatcacccatgcagggcaaagggagctggagccggcccagcctgtcggcgcagacactcctgacagctcctgtctgggcacttctttctttcttggagcttctaatttctttcttggcttctgaggcctaacagggtgttttgatgcacacacaggaattactaccgtccccaatcctagggtacatccctagcccaggccagggctttgagttttcctaggagcgggagggtctgcaaagccccacaggctgaaatctcagcgtggccctctgctcatctgctccaggtggaaactctcacccctgagctgcccgacctgggttcaagcccgggtcaggggagttagcaaggagacacctgaaaaataaaaggacagaatggaagtgcacactcccaccgcgggcccgggcgggaagtcggactaagaccgcggcgggaccgccccatccagaaagggtgccccgggtgtgggggcggaaaccccagcgctgtcttcagtctccacacccgcgcctttttcccctggaaaacgaacgtccttggcctcttcggccgcaaccgggcggctccagacgtccaggagggcagaggctgggctggtgcggcgcggggggcgcgggcgcgggctctgcgcctttaaggcccgcgtcggcagagcgagcgca

SEQ ID NO: 447093 - DNA, 1116 bp, Homo Sapiens
gctaaacaaaatatttacggtagagggaggaatttgtgtcccaaatatatagttcccctcccgccccaagaaagtataggggttttccttttccacaaaagatttctcccaagcctaagcagtttttttccccaagtccaggagaggtttgtaataacggacgggccccggggccttaggtttttaaataccgacccccttgtagggggcccccttttgtccaaaaaaaactggggttaggcgtaagcttgggcccccttcgaaggggattctctaggggcggcccgcccttttggaggatcgtatgtaggcggggcggtccgggcttttaaagcaaacatgagaatttattaggatatttggagtatctcacagaagaattcaacaatcaagacatgaaaagggcagaggtggacctgaacatgaagaccagaagaaccaggtactggaacacaatcgggactctttcttgattttgctttcatcatggcttcattcttctctctcactgcagaccatgtttctccatgtggcagaaaacagccactcactgcacccacatttaaatatagcttgtgatgcaaaaattacacagacaaaaaagatagtcctagctttctagaagctttctagtgggaaagataaaacatgcaatgattatattatcacagtgagaaacacacgtacaggttcatatagattcaataggcattaacaaggaacaagggcatttcaattgcagatttgcaaaaacataagtgataatagaaatctcaaggaactacaagttgttcacagaggccagaaaatattgcataggaggaaaaagttttcagaaatgatagatagataggcattggtttgtacaaaagtccttacataccataaggagaatgttacactttaagtccacaatgagccacacgatatttcaacatgaggcatgtgaaatcagggttgcatttaaaaataatcactatgtatacatgtgaaaaatggactgaaaaatgatagcaaggtgcagaaaacatgcatgcatctgcaagggttatggttggttatcagcagttaggccaggggtaggtgttgaacatctgaaagctcattggtacctcc

SEQ ID NO: 447094 - DNA, 1969 bp, Homo Sapiens
  misc_feature (55)..(55): n is a, c, g, or t
  misc_feature (110)..(110): n is a, c, g, or t
  misc_feature (143)..(144): n is a, c, g, or t
  misc_feature (169)..(169): n is a, c, g, or t
  misc_feature (171)..(172): n is a, c, g, or t
  misc_feature (180)..(180): n is a, c, g, or t
  misc_feature (183)..(183): n is a, c, g, or t
  misc_feature (190)..(191): n is a, c, g, or t
  misc_feature (193)..(194): n is a, c, g, or t
  misc_feature (197)..(198): n is a, c, g, or t
  misc_feature (204)..(204): n is a, c, g, or t
  misc_feature (208)..(247): n is a, c, g, or t
  misc_feature (331)..(367): n is a, c, g, or t
tttcacctctacttttactctctatctgatatttttaatggcgccgagctcaccntcccacttatatctcattttatcccttcccctctaacttttactcaaccaccccntcactcacgataccaaatcctaaacccccaaannccaattcaccacaccaatacacttnannacccaacncanaccaccnncnncannctcccnccannnnnnnnnnnnnnnnnnnnnnnnnnnnnnnnnnnnnnnnagtgctcaccctgtggcttccgcagggacgtggggccctcgcgtcgtccgtggggctgcctgtgctgtctctcttgggcccctnnnnnnnnnnnnnnnnnnnnnnnnnnnnnnnnnnnnngctgcccggggagggggtgggagggcaggcggggtgggctcacgccttgtgctgtttgctggtcttgaaggagacctgcagcacgcgctcgcccaggcgatagccgttcaggctggcgatggccatggccgcctcgtcatagttggtcatggtcacgaagccgaaacccttgcacttgttggtggtgaaatcacggatgaccttgacgttggtgactgccccaaaaggcccgaacagctgccacagcacgctctcgtctgcctccggtgacaggttgtacacgaagatgcaccagccggcgcccgccgcgccccccgacaggcccacgcccgccaggccgctcataccatcgatggcgatcggcgagaacctggcgatgagcgacaggggactcttgacgccgtaggccatgttgagcaaattgtccagccggaaacgctgggtctgatggtgtagggggcctgcgtagcgccgggcggatgactggtagaggtgggtgagcagcgcctgccccgtcttctgacttgggttgttcgcgaacttgactgtgatgggctcactgcgcccagcggcttctgcccattcagtcctttgatagcctcttcggcctcaatcctcttgtcaaagcggatgaatcccacaccccgagagacacctgtgacctggtccaccaggatgcgggacgtgatgatgcggccgtactgggagaagagctgctccatctctttctggctcatggtcttggggagcccgctgacgtacaggttagcatcccggatggatgctgaactgggtctggcataggacaccttgatggtcttcgtctgtaatttgaggccgttgagggtgttgatggctttgtctgcatcattggggtcagaatagttcacaaacccgtagccaaggctctgccctgtgatcttgtcccgaaccaacttgcaggactcgatgtcgccaatgctgccgaagagactcttgaactcatcctgggtcatgttctggggcaggtagttgacgatgaggttggtcttgctgtcgtcagtggctccatttgtaccaaggagtggcccgttgggcagggccgggccggccgggctcccccccacctgagactccatggcccccagtatctgagtgaccattcttgtgtgcccggcgggcgcggtccgtgttgaggggggctccgggggtggtgcactcctaggggggcgcccgatgctcacgctggggtcccgcccgggcggcctctggtgcggccgctgcagatgtggcgatgaaggcggcggctccctcgagggccagggacgggcccgaacccggggatgcgcgcgcggatggccgggccccggggtggcctgcgggcggcaggggatggaaagagggagcgggcgcggggttgaggacgccccctgcgcggccccgcggggcccggggaggttgcgcttcccgacagagatcgcggcgctctgcctttcgccgccgcccctcggtcggtcctgtccggtcccgtgtgttcaagtcctctcccctcgcccaccctccctccctccctccggcccgcgctgcgcctcgtgctgagttcgccacccaggcctcgctccc

SEQ ID NO: 447095 - DNA, 458 bp, Homo Sapiens
  misc_feature (240)..(250): n is a, c, g, or t
  misc_feature (268)..(307): n is a, c, g, or t
  misc_feature (317)..(317): n is a, c, g, or t
  misc_feature (341)..(411): n is a, c, g, or t
caacaaggctgtatttttttcctgggggttgactttgcaaagttttgtcgatggcttgtctggcccggtgtgtttgttttgtttgtttctctcggctcagctttgttggtttcggggggctttccgccgggaggggaggggaaggggacaggagagcgagtgggagcagaacgtggagaaagagggaggggagggagagctgaagtcgattgtctggcttcaagacagaagtaggaggcnnnnnnnnnnntctctccaaagatctcgnnnnnnnnnnnnnnnnnnnnnnnnnnnnnnnnnnnnnnnncttttagagntggtgtgcagccgaggagttggcnnnnnnnnnnnnnnnnnnnnnnnnnnnnnnnnnnnnnnnnnnnnnnnnnnnnnnnnnnnnnnnnnnnnnnngactgtccgggggccaagtccagggcagcccacagtcagccattccc

SEQ ID NO: 447096 - DNA, 461 bp, Homo Sapiens
gaaaatgatattaattttattgcatcattttactgactagaacgccagacttagagtggatataagtataaaaataaccaaattcttacaaataatactttgctgctacagtactgaataattagtggaggttgcaattataatacaactttaaataacattctcataatgggtttaacacaatcaaccaggggctaaggtttaaaggtttacaaagagaaatccaggacaacatgaaaactcccaaagttcatattccagctaaatgcttcatttaaccgtcaatccaccaacacaaacattaacaaaactcagagcaactcatgatgaaacagtcgttctctttttaggacaggccaaggttaatacagaaaggtaaatgattcggattagtttcccaggcagaactgattccatcccatccctggcctatcccatcctccctacccaagaaaatctgt

SEQ ID NO: 447097 - DNA, 1038 bp, Homo Sapiens
atgagtaataaatatattttgctttattttcaatttgatatatggaaatttcatcagaagacttgactgcagtgttacttacaacttagaatgacaaaaaattcagctctctggtttttcaaaggtaataaagattatactaactcaatggcttaaataagagcttgttaaccaaacacaaatattttactgacaaactaggaatttaggtattatgaaggagaaaacaattttcacagacacccactctcttagtctaagggatgaggaatttatttcaaagttatacaagtgcaaagaaatagatctagaagcagcaggggtttcaaatgagcaaaaatggaagaaatagaaagttaatgtttactgacatagggaaatcctcataagaggaatgaaaaaaatcgatttccaaagctaggaaaacatgtgggtcctacaagacttgcacgaaaaataattagatgtaaatgttcttaagaagaaaccgaagggagcggttaggatatttcaaatgtaagaaatacaaatgtaataagatacctagagaccatgtccctttttaataaacactcaggattttaaggaaagatgatgccttggagctctgtgcctttggcccgttggtcaaggtaattcgtcaagtgcaggcacacaaactggcctgcaagcacgttcaggggcttattttgtttttaaagagcaacaaccagaaggaaatgtctttaggtgccaggggtgagcacctcctaagaacacggggcatcttcagagccatggcatggcccagcaggagcaggggtcaccaccagcttttcttctcctttctcaggtggagacagacataagttcgaggtttctggaagacggctgcccacagagggcttgccttctaactcctcatttgaatcttttccatcatcaataccctggccattccttttcccacaggtacagctcagtacaatctggggcttaaaatttcaattctttggtgacctgaagattcttccatgaaaaggattactctgaacttaa

SEQ ID NO: 447098 - DNA, 542 bp, Homo Sapiens
ttttttttaactatgtgactaaattatattcaaattttatgaacagaaaatgatataaatgttatcagctaataaagagattatcaaagagtaagcaaccaaaacaagtaggcaaaaagcatcagagagtaattaatacaaagatgatgttgtttttctggatttcataatgtttatcatagttgtcaacttttctcattcaaaaaaacccttatttttatacctaattttaattaaaaatttttcagtttgtattaaagaggactccccaaattatatgagtttccaacttcataaaacctaaatctgtctttgttcatatcagataaaaataggccacacagactgccaagtaggtacagtcttggaactgtctgtggtgctggacccaaggttcacttggctctctccatgggtacttactgcccaagccaaagctgctcctgggtggtgaatagttggggtttattaatggaagtgaggcttaatgtcataggaatggatgcttttgtccatggaaaaagtgtctcaatagggttaag

SEQ ID NO: 447099 - DNA, 1785 bp, Homo Sapiens; identical to SEQ ID NO: 138710
  misc_feature (355)..(477): n is a, c, g, or t
  misc_feature (817)..(817): n is a, c, g, or t
  misc_feature (839)..(839): n is a, c, g, or t

SEQ ID NO: 447100 - DNA, 414 bp, Homo Sapiens
aaaactgggggaaaaagttgtttattgcaactgcgaggaagttagactttaaaatgcagaacaaagactgaacatactgatatactggttctttgaagggaagtttagaattcattgtatctaacattattcaggcttaaaatagtttccaatccagtgggacgagtcactccatataattctgtgaagtcaaccagttcctatcaaggagagagtcgtggccgctgggagcgcgtggaccgtgggctccggggcggcgcctgcccgggcaccccggccccgtccacgccccgcaagaggagctcgctggccccgccacgcgggaaggggtcgccccggggtcttgggcgggagggccgtgcgggctgcggagacaccgaggaggggaggcgcctctcctgagctcttggcgca

SEQ ID NO: 447101 - DNA, 769 bp, Homo Sapiens
  misc_feature (45)..(45): n is a, c, g, or t
  misc_feature (192)..(210): n is a, c, g, or t
atcgggggggaggagagttcccaagcgcacttagggtgcagggtncccaagggatttggcttaggaaaaaccagggtttggcctcatgtttcactttacctttcgggggcccgcggcgcgcaaagggaatgggtttaggaaagcttttctcgaggggcccgagggcgggcccggcaacaggaaatttaggtnnnnnnnnnnnnnnnnnnntacttgaaaactttattaaaataaggattaaacctgaaaaaagaacaatcagaatgccagccctttgcataaaatcagcaagaaaaaggaaagagaaaaaagaagagcatcagtcctctccacttcttcccagagacttaggtggggaggagaatacccgctgccctgcagtgcctgcagcctgtagcggggagagctgtgggcaggttctctgtctcggggctcagtgggctatagagaagtaagttcccaccagagcagaggcccaagagtcacagatacctaagctagagaatagattatcctgaggggatataaactccaggaagttgatcagggaacaggaatttgggaacaaacaattattctgaaagcctggagagcctgaagaggcaggggccatgcacacgagcctctaactgcccttgggtgccacgatctgctggacatagttgacaacattgctgtggagctgggaggcggtggatgcaaaagtctccttggcgagggtctgggccacctcactgccacccatcattgcgtggtacagcggaagtgt

SEQ ID NO: 447102 - DNA, 248 bp, Homo Sapiens
ttcgcaagcttagttcacattttttaataacatggcacagtttacattacacaagaaggctccgccgatgagaacatgctgaagattcagttgcttcacttttcttttcacataggatctagaaaggacttttttacatacaggataaacagcaaaaaggtccgtatagaacaatctctttacaatactgaaagctaccactacagttccagtgtacatattccttgcatttttttagttgttgtctt

SEQ ID NO: 447103 - DNA, 686 bp, Homo Sapiens
ggggggcttgatatgaaccgttgttaaaaagcaggctggtaccggtcggaattccgggatatgtcgacccacgcgtcgggggatggtgtgcattcagagcatttgggttgggggcttcctgttccctcagccccagtcgagaggaaagagaatctgggccactgccagaaagagagtcaagcaaacctggaagggcaaatctgagagtgggaaggccaaaggccgaggcccagatttagtattcactagcagcgccttcgggtagcaggatgattccttttcctgcctgtctgctgctggctctcttccctaaggtacaggttggcaggaccacctccgcctacttctccaccatccctagcatgccagcccgttcccagatcaacctgccagtggagtcaggcagtgcactcctggagccaagagggaagggcagggtagagagggtatgtccagtagcctggagctccatggtggcttcatgcctcccttctcccagctcaggtggccctgagggctccctcggaacagtgcctcaaatcctgacccaagggccagcatggggaagagatggttgcaggcaaaatgcactttatagagattttctattgctgggaaggtgtgtttctcccacaatttgtttgtgaatattcacttgttttataaatgtctgacctgtcttgaaa

SEQ ID NO: 447104 - DNA, 412 bp, Homo Sapiens
  misc_feature (40)..(40): n is a, c, g, or t
gctttggccttcccaactcctcagatttgccccttcccangtttgccttgactctctttctggcagtggccccgattctctttcctctcgactggggctgagggaacagggaagccccccaacccaatgctctgaatgcacaccatcccctgtgccctgctcccctcccacgatgatgggacatttctagtgaaggtgacatacgtacaacagttggactctaaaggcagctctctggctgagaaaacctgaggatatctcaggaagaagcctgtcagtgtgatggacagctacaggagatgggtctgaccccagggttctggtccaaggacagaggacagtgagggacagggctggggccaaaagaattaacagatctgaggctaggaaaggtcacaggggaggtagaaac

SEQ ID NO: 447105 - DNA, 740 bp, Homo Sapiens
  misc_feature (19)..(19): n is a, c, g, or t
  misc_feature (74)..(74): n is a, c, g, or t
  misc_feature (85)..(85): n is a, c, g, or t
  misc_feature (640)..(649): n is a, c, g, or t
agccccaggatttccaagnctgcagggacccataatcatcccactgcactcccaccctgggagacagtgaagancttggcccttnaacaaaaaaaaggaccaaaaattgataacgacaatttgtaatggtcagccctatcccaccagtctaaatgaaagtttaaaaattttcatatactgtacagaagtagatggagtcttaatgctaggtaagggtaaacaagctgaaatagcagtcagtgacttcagagaccatgaaaccaaagttaatcttctaagtccttttaattgttcttataaactagcataagatataaacttaagtagtacacatgagttttataatttactaatctctgacagatagctaagcatagcacatcagagcataacacagtgtgagggaaataaagtgtacaatgacatcttctattctggacctaataattcaatagagaaagaactacttgtagtcactgtggttacagaaggtttcatggacagcgaacataaagctctactagctaacaaataggtcttaatgataaaaacgtgggccttcagagaactaaaggtaccaatgtgtggcagtccaaaattacgaggaaaatgagttcccttcatgggtcacatcagcaannnnnnnnnnccccttttgagacagagtcttgctctgctgcccaggttggagtgcagtaatgccagttctagctgagggagttaagatcatttaatcagtg

SEQ ID NO: 447106 - DNA, 406 bp, Homo Sapiens
  misc_feature (171)..(273): n is a, c, g, or t
aagtatgtttcagtatgtgacgtgcttcatagccatttttatttcattgtttaaacaacttttgggctatgtttgataagtgttatccatattttacccattttatatgtaggaatcagaaatcagaaaaggaggtgggtccagtggctcacacttgttattccagtaatnnnnnnnnnnnnnnnnnnnnnnnnnnnnnnnnnnnnnnnnnnnnnnnnnnnnnnnnnnnnnnnnnnnnnnnnnnnnnnnnnnnnnnnnnnnnnnnnnnnnnnntatatgcctatagtcccagctacttgggagactgaagtggtaggatcacccgagtccagtatgtttaggcttcagtgagctgggatcatgccactgcatactccaccctgggtgacagagtgagaccctgttt

SEQ ID NO: 447107 - DNA, 574 bp, Homo Sapiens
ggtgggcaatacatatacaaacatctttattgacaagtgagccaataagggcacatttagtttacagataaccaaaaacatttgaaatgcataacattaaaatttccaagattcatgttgcagtacaaacatgtggcaggttaaacatcaggcataaaaaggacaaatactgaaacgcaaagggccagagatcccaagtcgcttaacactatttaaaatgttattcaactgcaaacttcagcctctggaaccatcccagatagctactggttaagtgatacgaagtaggaaaaaagaaggttctggaaggtctcaaggaggctgtgcagaaaacagcaccagatggaagcaagagcagaaagaagtcacgtcccatctttatgacaagacacagaacaagatggtcacagttcttcatgggtaaacaaaagatgtggaagacacatccaaccttaagtaacttctactgacggatgctctggcacttctctatgtagagaaggagagagaaagagagcaccaagcaggagtgggggactctatatttattgtctgccagttcttttatatgcat

SEQ ID NO: 447108 - DNA, 481 bp, Homo Sapiens
ttaagtatacaatttgtttttatttacaataccctataaaaatgtaaatttagaaacttttattttcattaattagaaccaatccaaacaaaaaagataaagcacagtaaggaagagataataatcaagtattcacttgattggttgtgaagggaaggtaggaaaggcatgtagtggaaatggtcagtagacaacggtagagggaagctaggtaacatcactggggaacagctggtggagcctggggttacagcatgggaagaaatggagatggagaacaggacagctggttttaacagaggatcttactgttgtacaatacatgtatgtgcaaaatgtttattctctttaaataccataacctgtccctcccaccccccaactacattcgaaaaagtaagaacagcagaaagatcacgaaggccatgtaaaattaattcagatttaattttcttcagggctgtgatcactagggatcaaa

SEQ ID NO: 447109 - DNA, 538 bp, Homo Sapiens
ctgccgctgcccgggtgtcgagcgagcggagccgccgccgcccctgccccccgagcgcgccctacctcctctcgtcctgccgccgcctcacaatggggcaggacgccccgccgcggggggcagtgcgggagcggcggcggccccctcccccagcgccggctcctcgcccgccgccgccgccaggctcacaacgtgctcggcgcgcagctggccggccggccagcccaacgccgccagagcgctcgccgcgggcggaccccggagctgctccgctttgttcccggctcgcctccacttccccgccggcgccggccggctcccgagcgaccctcacctgcgatcacgccgactgccacttgtccaccttctccactacaaaggcaacgaggggagaccccgtcttcccggggaccggctctctccggccccgccgcgcccctggctgccgcttctcccgctgccactgccctctcggagctcctgggaagtttctgatctactttcggctctgaaggaggaagagctgatgggaggagct

SEQ ID NO: 447110 - DNA, 934 bp, Homo Sapiens
  misc_feature (483)..(497): n is a, c, g, or t
tttgattttaatgaacattttaatgttatgtataacagaacattatgaatataatggaaataaagttttatcaatttaataaaaaaattttcaacataacatggggaggtaataatttgatatctatattatagtatttattttgaaaaatattcccagcttgagggtaaaacaattaattttgcattccaaactctagaatcgtgattttcatgtgagcttaatgcagaattacagcagaaaaacaaaaacattttcattaatttcctttgtcattaaatcaataaaatctttgactgctacaggtctcctttaacaatatatatttaactcctctattggaaccatattgctaatgctgcattatatacactcaaaaccaaaacaaaacaaatactgtataaaatctaaaagcaaacattgagttgtaacatttatatttaacttaaggttttaatggatttttacctttgcagacacccnnnnnnnnnnnnnnntaaactatttttctgactgttcctgacttaaatgatggctacagggataaacacggaaggaagccttgccaagttaatcactgcaatgttgtaactaatgactgctaaaaacaaacagaagttattcgtctttgaaagggaaaccatagagcagtcctgatcagaatttcttcctagttctgcaccgggatacttacggcgagagaccttgcgcaaaaggtcgccatgggcaatctccaattgccttaagagaggctttgtctacacatagcagaatgtgggagtggtcatatggccgtgttgcttggaccttagcgagggttctacgttacggttgcctggggtttgggccctctcggtatgtttgcttttgtcttctggccagcattgctctcgtctgcggcgggtctcgccttctggttcgctgggccccgggt

SEQ ID NO: 447111 - DNA, 535 bp, Homo Sapiens
catgtaataaaattactttattagaatcaggaatttgttaaaataatatccttcacatatagctaaagtgcaaattctcttgctctgtagtagaagcaagcacatctgtcagacctccgtggtgtgcttataaaaccaagacgagaagagttttaagaagtacctctggcagcataagagtacgaaaacacattttataaaggtttgaacaattatcatttggagccatttcatatatcgtgtatgtcttttcacttatttttcttaacctttcaaaaactactctgtgctatttatacaactgaagaactgtataaactactttagagcagtggcctcattactgtcaggaacggaatttaccaaatccaagagacaacactgcgtatttgccatcactcacacactgacaaagtgcagtagtgttagacatcatgggctctgtcactgggaaagggacccagtgacttccacctctctgactctaaatagcagcagtcatattggcacctgtaccatatgattcaaagagaag

SEQ ID NO: 447112 - DNA, 980 bp, Homo Sapiens
  misc_feature (233)..(245): n is a, c, g, or t
acatctgctttactctttaattttcatggttggccaaacagacaatccaagttaaggccatttgaagacaaataaattgatccattgaatttatgtatcctggaggtgctgccagagaatgtccaggccagagagaaagcaattgttaagtgctcagtggagaaaaacaaagaatcttctgtactatgtaataatcatttcccagtgatgaagacaacggtacaatggatccnnnnnnnnnnnnnaaagcagccagcagtcaatgaaataaggtgtgaaaaggagaaactttcctatattctttcatagagcttttttctctcctaacaccaggagcacacacacaaaaggatcagcttcatgaaatatataagctctttaagttcacttggagctggattttgatggccaaaattctcttttccttctgacattgacattcatcgttcatccacagcattgatctggtcaaaacgccactgctggcgggcttttccatcacacggacgcaggtacaaatctttattgttttcttgcaccacagcttccatgcatttcccagaaagaatgtggacaatcatcccattctcctggaagtcccagtgctgctggtggatggccaggccttcctccgtgcagttctgaagaatcacctgctcctgcctgacagcaaagcacaggtgctgtgggctgccaaagtgaatctccttcctgctggtgtgctgcaggtactgttgctgccggctgtcactgcaaggagccaacaccatgggacagcccaggatgtccccttctgcctggcagtctgcacagagcccaagtccagtgttgtagagctttccagagaaactgggcctgggttcagatgggtacagctcagggtagacattagccagaaaccagtggaatgtccgacaacccagtctcctttgcagctgcaagcgttccatgcagtctggcttctcagccttgctcaagga

SEQ ID NO: 447113 - DNA, 1068 bp, Homo Sapiens
  misc_feature (38)..(38): n is a, c, g, or t
  misc_feature (983)..(1007): n is a, c, g, or t
tcgcccaccaagcgactttctttcgtccccatactgcngaaagtgaatttaaaggcaggacggacgtcccaggatggtgaactgggtagtccttgttgacttcaccccccatcataataatcaatcacatatctaacttctgtcccggcaacggtttatgatcccaatcgtgcctatcaaaaggcaactcataccccatccaggaacgatttcgtgcccttggtgaatactcttttgctttccctccaaaccggatcaatgatggaccacaaggacactctgcagcatgaagggcttcccacttcaaaatctccttccaagcctgctcgttattctgattgtgaattctaatgatattatacatatccttctgactgatatcctcatccttccacttccaccctttctttaacattgcattccagaacatctgctcagaagggtaaacccactttttctctgaatctgctctcggaatggatgactcttctctgacagtagacaatgcaaatggctgatctggagctggtgtttgatttggtggtggcatcagatttgaaggatctaggttctccttattctcagccgcagtgcccctaatgggacactccacgtactcataggcgcgttcctggtgggcaggcacagagtatgttttcttctcacaggttgggccagatggctctgtattcactggacagcctttcattttcccttcatgcatcgggcatcctgaaggtggggacgctgaagcatttgaggcctgaactgcaacagcaggagcagatggagacaaacccatggctggaaacagtgttgactgtaaacaattttaaatttccacctgctccagcccgtggtccccagaccaaaccggccgcggccagcctgcccttctgcacctaagccctcccccgggctgttccgggaggccggtaccgccttcagtcgccaacccgaacccagagcagcagtgacttcannnnnnnnnnnnnnnnnnnnnnnnnttcctctcactcggtcaccgctgtggctgcggtcaccgccggcgttctcacgcaccccccc

SEQ ID NO: 447114 - DNA, 1151 bp, Homo Sapiens
accacagctgaattacatttactgtacaaagaacggttcggagagaaccaggaatggcggagtgtctaacagcagcgcgggtagtgttgatgccgtgaatgcaggaccatccaggtcctcaaagtctgtgaggtttgttcataatcccaaacaagggccctgctggcagcaacaggacaggtggggccaggacagggaagctggagcaggaggccagtgtctttgggggctgtggcagggccgcctgcctggggttcccttactcatctggtagttcatgcaggccacggccctcatctcccaggaacgggccatggggcgagtccactggtgcccagtaacaccctccgtgggaccaccttgggaagcatgtgccgcggagtccaccacggggggtcctgggtcccgggagggctccttctgcgtgctggccatgtcgtgccgcacggcctgaggacaggaggtagaggtgagcaccagtgctgtgggcaggcccaggcgatggtgaccgtgcagaggggctgctggggcaggcatgggcagaagcactgggtggaggagcggccaatggcttcaggagagaggtggccggccctgcgtgcctggggctcagcatgagcgccgggctggtgggcctttgaggaggggcctagcctcccgaggcccccatgtggacgtggacgtggacgaggtggttccaggcacgtccctaagaaggtcaggatggttctgatgccgtgcaacctcacaggagagctgcagctgtggggaccccagggccagcgacagaagctgccgagaacaggaggctgcacgcaggtgcccggggtctgcaccgctgcccatcaagtattcctaagtctacagatagctctgcactctccagggtgggcgagatgatctgagttttgagtggtcaatgtccccgaaggtgtcacatcacagcaggaaggttctcatccccacgtggggagggatttggggagcaacaaaaatgtgggctgccaggtgcacctcctttctcccctctcctgagtgctgcttgggctctgaccacaggaccacaccctccatcccgtgggagccagggccccggtcacccaagcttccagagggagcaccggccctgtctgctcccccggcctctgggc

SEQ ID NO: 447115 - DNA, 457 bp, Homo Sapiens
aattaattataaacttattacattgattttttacaacagacataactaaacataaaacaaaaaggagcaaaagactttgctgaaacatcttcataggagtccagaatataaactgaaacagagcacatacaccagaaagaccttcccggaagattgtggaaccaggtccccagagcagaaaagtccaggagagactcttaactcttcaggcccagtgctgggggaacccctcatgggagcagctgtaatgaggcctgtaaactggacactgctgagccctgacatccagacctcaatgccctgactcagtccatgggagcgaccccttcaaacaggctccatgtgggcctgtaatcaggaaagactagagcatccaggagtggagatttgattctgagatgctgggagttgttcctggttcttgctcctgtctggctggtgctgacagccaaaagcg

SEQ ID NO: 447116 - DNA, 875 bp, Homo Sapiens
atatatatttgggttagtttttatcacattatcacgtttgtctttatattttatcttcatcctaaattttctccctatcaaaacagcaggaaatttttaaacttttatattgtacactatttttgcataaaataagagctgtagctaccaaatactatttactacttagtacaggtggcttctgtgtattaaactacgaattacaaatatcacttcactaaccactataattatttttggctttttcagccactggaactttttttggggggatttaaatacaggaaaactgtttaagcaaaaaatgcactgctttcatgtaaaatgatataatcttctttaacaaatattttcttcattgataactgacagatatctcatagcattaacataaaataccagaaacaaactttatctccctattcttacatttagtgcaaattggaatgcgtatgtgaatgttagaagatggacttaatctctgacaactttattaatttctctagctacagcaatgctatttaaaagccagttaggtatgaatagtacagtaatagtttgggttctcccttgataaatgaataaaaggctcaattctgataagtgatcaaatttcttgaaattctttcaaatcagctgaaaatttggttggggtgaattgatggtttttgagaagtaggccaggtatcctcacaaagaagttttagaatagggtttcttttaagtttttaaatatcatcctttgtctttccatatggttttcataaccaaatacatgactatagcatggttatttttctagtactgccatttgtgatatagccacatcttggcgtgcaagctagacatctcaggtaaatttgtgtgtgtatttg

SEQ ID NO: 447117 - DNA, 624 bp, Homo Sapiens
  misc_feature (603)..(603): n is a, c, g, or t
ctctttccataaatttattaaaataaaaaactatgtatatataagtaatggaaataaagtctatcagctttattagctgcaatgatttgcattatttgtaattatgtatcataagttacatgtaacatataacaaaaacttgagttttgaaaaatgttttattcaagaattacataatttcaaatatcttccaaaatacagtttcctagattgctacaaaagaaatttgataagaaatttaaatcattaaatatgtttcactagtatatacatacagaatgccaagcaatagtattcagccctggaatgcgtaccatgtcttttgtttttcctcatgaaaggctcaacccagcattttgtataggctatgtacaacaggcaaagttttgtattcaagaatttgacgttagctgcctcaatttatagctgtggtagtttgtccactggggtgtcaaatttgaagtctgtaggaaacagatctggggctcgaggatagatcagtctataggactgtctgattgtaacatcagcaacaccagcaatatctccaatttctttttgggtcctcttttcagctgatgcctgtgaggccatgtaaaatantgccgctgccacagagatggg

SEQ ID NO: 447118 - DNA, 740 bp, Homo Sapiens
ggagatatgtgatatctgttttcatactcttgcctttccatcatgaatgcttagttatgaacagagattcctttgtagagctcataggcagtacagagaggtaagtcttgcctcagagggccttgtatcttggtgtagtttttaaatagtgcatagtgtatagtgtatagtgtacattttgttttgcacatagtttgttgccccgaatgggttttttaccaagcctttttttctttcatgtatttacagtccggagcacaagattctcttctttcaaatacaatgtaattcgctttactttacaacactaaatctgggctttgaatttccagtgcattggactgattggattgttgggagttagaggctgttccaaccatccttagtttgggagagtggctccttctgcttgttttctaagcgtacagtcaacgggtgccatttgtggtatttaacatgttaggatgattgttccaaatgctgagttgttttatttctagatgtaattagttcactttatgtaatattcttctctcagactgactttaaaaacaaagttttatcattttcattgtatttgtatttattacagagtgttttagctttgatattctttgtattttcattcatttgttacatgagctttatcagtaacatctgtataaatggtttttaaaaattaactatgtatgtgcccatgccgaagtcgagcaataaaatcaatgctgtttgcactgtca

SEQ ID NO: 447119 - DNA, 513 bp, Homo Sapiens
tttcaagaccaatcaagatgcactgagacactgcttaaatctaagctgccaagctgtgttgacgttcctggtggaaataccacggatacacacccaccacaaatgacctcctcaaattccactttctccattagaaaaatcaaggaatgcaactcagaaataacattacatcctgcattttattcaattccatatgacaaaaatagtaacctagactaagacatccatttcagtcagcagatgtgtcaagccacaagatttaataataaaaaatattgggtctaggtaacaatccccagctgctcagagaggtcccagccccgcatggcattacagtataaaaatagtgtctctcttcaccatgcagagggatggcctagccctgcacacaggagggtcagtctcactgtaccttcatgagccatcttatttacaacactttacatttctctttagttatatacacatccttttgggagaagagagaacactatatggtaccaaatactaacc

SEQ ID NO: 447120 - DNA, 622 bp, Homo Sapiens
  misc_feature (51)..(51): n is a, c, g, or t
  misc_feature (166)..(174): n is a, c, g, or t
  misc_feature (377)..(471): n is a, c, g, or t
caaagaatgaaacaatccaaaaatgtttttcaaaacaattttgtgaatttnatttttacaaaaattttttaaattcatattttaaaatgtataccaaggcaaaaaaatcatataagctatatcataaatacaagagtttcaaaacatacaagagacatataatgtnnnnnnnnnttatatatatgaagtccaatgtaatttataatacaaaaaaatacagcaagggaaaatgctttagaaatgctcatctgcaaactacaaaacaaaatcctcctcttgaccgactgcatgaactgccatgaaatttgcagctccatcatactaggtatctcttctttcttcatgttaccttgtctttcttcccatttttcttttannnnnnnnnnnnnnnnnnnnnnnnnnnnnnnnnnnnnnnnnnnnnnnnnnnnnnnnnnnnnnnnnnnnnnnnnnnnnnnnnnnnnnnnnnnnnnnacgtgccaccgcacctggctcctaatttctttttaagacaagggccattcaaggctttttaaaacctgatgtgtgttgttatactttataacagtcaggggcttttaattccaaaaggtaatactttatactctgcctacatgagatgagc

SEQ ID NO: 447121 - DNA, 429 bp, Homo Sapiens
ttccttctatttaacttttattaaaagaagtgctaaggtactgagatgcagtacatcatatttattaccaaaattattaacaaatatacaaaacttgtacatgtaattttcttacatccatttattctctataatactgatttttgttcaagtaggttatctacagtatgtaaacatcccttggattgacctcacacagattaggaaagccctctaacccatgcttttgtcagatacttcttttttatttggcttttcatttgtagcatctaatctccacatttggcacatggaagagacatctacagtgcaaaagaggcagatttttctggtttcattctgaacaattttgcaggggcacagttaaatagctgagaggagacacgagcactctaacttgatggcgttggatgagctgtaatgccaaca

SEQ ID NO: 447122 - DNA, 548 bp, Homo Sapiens
cagaatagttgtctgaactttaatatttgaatcaaggaaaatgtgaacagatgaaactgttagtaagagagaaatggtgcatgcacaaaagggatagattaataaaatgacagctgattgttggtgatgaacatatttgttttccttaacatgtcccaacttccataattattcagatgtacaacaagtggtcctaatgtcctggctgaaattgcccaggcgtgcaacaaagcaagctggttttgttcctgaattatgcagttaactgaggctgtttgggcccagatttgatgtggtaagtagtcagaatgctgacatatgattattaaaaattattaaaattactttcttcccattttaatttgataaggtggtttccacacaattttgcatttcaaatatttctaagtaaatttagtaaaccaaagatgaatatgacaaatctcaaataatatgttttagaacactttcccatttgaactgttcactatatatgactgagtttattatacctccttcaactatatacaatattgatgttaaatgtc

SEQ ID NO: 447123 - DNA, 1234 bp, Homo Sapiens
  misc_feature (1075)..(1136): n is a, c, g, or t
gtaccccgtacaaggccccgctctggggacgacaggcagtcgaagccctcttcctcttcactgatggaggggtgcggccgccctgccgtggaggggtaggcggcagggtctggatcggagctgactgacatccggctctcagtgggcggcaggaaggcggaggtgggctctgcagcgtctgggggcctctgcactggggtcaggtagatctcctcagtggcctctagtcgcacatcggcctggtagtggattcggtctcgatgcgagtggccccgacccccaggcggggcagcagggggaccacccggaggtgccatctgggtggctgtgctgcggcggcaagggctgtcggtggaggtgcctcgatctgtggtgggggcggggccgctctgggggggcagctcatcgctcaggcagatgtgttcatgcggtggtgtctgctcccctgtcttcaggggtgaggatgatcgagacacccgatcctgccaactgtgctttttgcccagagaattattattcagtgtgtcctgagaccgcggcacctgcggaaagaggttgagcgtggtgggccgcttgggccggtacgtgtccccgctgcccgggccctggctctggccttggctctggccctggccgcgggacgccggctcctggccggactcggccttgggcggccccgctcccggccgccgggccgcgcgctcctcgtcgtcgtcctcctcgtcgtcctcggccccgggagtgtcccccgtcgcgtcgatcaggtccatctgcagcatctcggcctgcaaccggctccccgcgccgccgccgcccgcagagagcagcccggcgcgcgggggccgtaaggacagggtgtctttgcactgtaagctgatgccacactcatcagtgatctccgagaggtcttcatcctcaaactcctccaggctgatgtcatgggtgagcctgaaattgggaggcgaagcgatgtgcagccccaggaacggggaggcggcgggcggggacgcggccccccctcccaggccgccgctttctcgctccgccattctcgggcacagccctggccatccgnnnnnnnnnnnnnnnnnnnnnnnnnnnnnnnnnnnnnnnnnnnnnnnnnnnnnnnnnnnnnngccgccgccgcggagttcgggctaggcgggcgcacctgtgtctggcagggcgcggcacagcaccgcgcacggcccgcgggactggcgagagccccgct

SEQ ID NO: 447124 - DNA, 1229 bp, Homo Sapiens
  misc_feature (62)..(62): n is a, c, g, or t
  misc_feature (65)..(188): n is a, c, g, or t
  misc_feature (428)..(428): n is a, c, g, or t
  misc_feature (541)..(541): n is a, c, g, or t
gggggccccgcttgccaaaggtttggtttttaaaagttttttgggggtcgaagggtgttttnaannnnnnnnnnnnnnnnnnnnnnnnnnnnnnnnnnnnnnnnnnnnnnnnnnnnnnnnnnnnnnnnnnnnnnnnnnnnnnnnnnnnnnnnnnnnnnnnnnnnnnnnnnnnnnnnnnnnnnnnnnnngaagcaggagatgctttatttcagaacaaggtacaataggccacacctctgtcctgcacctgggaaccttgggcatggatgagcagagcaaccacaggtctgaagagacaaagcagaggaagcctgagcgtgcttctcccctgtgtggaggggcaggccgccattgttgtggtgtggctcctttcatctcctcagctgtccagggactagggtatgaaggggacaagaaaaaccaggccncaatatcctctaaaattaagctgaggcaggagagggacacccaaggcgaggggtgacagggctttttttgtttggctggagagccagtctcccggccggatttctggtgccanccggcaaaggaaggcccaaaagtgagggcagcgcagagatgagggggctctcagggaaaacacccagggtgggagcaaccacagaagccccccggctgtgtccactctccaatcatgctggccttcttctcccccttggatgtgaccagacacgtgcccagagctgcctgctcatggtgggttgtcctgcgttggggcagtctcaactactggtcccacagaagaagtcttcaggaagctcactcaggagtccatccaggtcatctgcttctgggagttcttcctcaggggacgcctctgcctctaggttctgtgctgttctgaagccttcctcgggctttgcagccacatcatgctggaagctccctgaatccttggggaagggctgagatggcttgaggaagctcccatccccagaatccgggctgtaaatatggaccaggttgttgggtgtcacgttgaggtagtgatttcgaagtgaaggagaaaacactccaatctgcttcagcagcagcactgagccaggcttcagctcattctggcacgtctccagcagcaacctgtgcaccgtcccctgcatctctcccgtggggtccttgaaaaccacactggcgtccattgtgctccgagtcagggacttgatcatcaccgccatgattggggaccattgttcctaagccacggtcaa

SEQ ID NO: 447125 - DNA, 535 bp, Homo Sapiens
  misc_feature (87)..(145): n is a, c, g, or t
aatgcccaaaacataatttatttattaaagatggggtcttgctatgttgcccaggctggattcaaaatcctgagcccaagcaatccnnnnnnnnnnnnnnnnnnnnnnnnnnnnnnnnnnnnnnnnnnnnnnnnnnnnnnnnnnntaagccacatactttaaatggacctaatttccaagcctggctgcctgatagaatgtgctttggtcagctagaattgataccatgttagagggtcagctgcacacaaaaatggtgttgctgagagaaatggcacattatacctggtactccttagaggtgctctatctactgtatcaatatagccattaaaagctcaatctgccagctgtttttgaaagacccaataatactgttatgactatataagataaccttgatgtatgtcactttatgatacgtgttacttaacatgactcccggggggccctggcttagagctgattccaaaggcacacagcttaggtcaaattataggacacataatatttactattttatttactgcctacc

SEQ ID NO: 447126 - DNA, 708 bp, Homo Sapiens
  misc_feature (310)..(310): n is a, c, g, or t
  misc_feature (414)..(427): n is a, c, g, or t
  misc_feature (626)..(626): n is a, c, g, or t
ctgaagcgggttttgcaaagctgacatcccttaaagataacttgggctttcggaagcggcaaggaaatggcacccgtagttgccaggacaggtggtgtcctcggccaggactaagagccagctcatctttgtaacattcataatacgggaaactgaggaccaggtggctcggaaaagagatgagttccagcttttacctaacacagggttctctcgtcgtcccccaacccctccagctcggcttctttgtgtcccagggttgtagatttttggatagaggtgtttctggattctagtgaagtctgagganctggaaaagaccaaggaggggttgatgatttacaaggtccatagaaaaactttttgtgtggtcggaagttggccaagcagaggcccacagcctgatgctactgnnnnnnnnnnnnnnaaagatctgaattccctaaagatcaagagggttcagctggccttgggagatgtttgctggagaatgacttcagttttctcctaaggcaatcagattgcaaccattagcattgtatcttatctgcaaatcagtttactccgaggttccccaaggatagttttattaggaccacaggactttactaaccactgaggtaacnacgctgcttgtgcagcaattattttgaggtggaggtatttatgggacaagtttataattccatttattaaagggactaacct

SEQ ID NO: 447127 - DNA, 1083 bp, Homo Sapiens
atccagctaaatatgacagtcttggatttatttgtaagtgtttaaaatgtccaatattcagaagttgtcaggtgttcttaccacctccccactccctcaaccagtccctgcttccagggtccaggagaagcagtgttcaggcagagtagtctcttgccagagcagaacaaggagtcctggtggccaagtggcaagtatgcaggctgggctggtccctggtgggacttctcctgggcttttcctcccatcatcttccttcacgtgtctctcagccctggcagagtttggagctgataccctgggtcatggccacagtccagttcactgggtggatgtgtccctggcttctgtccatgccaggctgcagcccagagggcgctggctgctagaatcttgatgagaaagatgcaggccaggaggagaaggatggaagtgggtgggaaggggatttctccttccaagaggctccttggagagacaagaaggcagatgggagccttgagatggcctggagatgctgtgctccacatgggcatcctcgaagctctcagactccccggggaaccagagatctccagcatcccggtgatccagggggtctgccagcacctccaccaggaccttcctgagggtgtcagcctcactgccatggaggctctggcactggtagagacccgcatcatggggttgtagattccgcagcgtaatggtgagagtgccacccagggtatcgtctgtgatggctgtgctcccattccacctcctcaggaaggacagcagccacaagttgtgcgtgctgaccacacgctggcatgggcccttctctcccagctggcggcaccaggccttgcgcctcccccagtgcttcatggagtcataggggcaagacacctgcagggactggcccgccacgccctggaacactgtggtgttgtgggctccggacagctctgtgacaaagagtaagatgagcaagccggagaggctccatgccacccttccccagccaagggcagaagcagagtgccttgtgcaagatctcgtctttcccttgaactgcagaaaaaagaggatcaggcagtc

SEQ ID NO: 447128 - DNA, 700 bp, Homo Sapiens
tcactttccaagggtttctctgcactatgatgcttctggtcctggtgaaagaccgcacatgccccagtcaagtatagttcctgcccaggcaaatcggtcaggtgctaaatgtcggtcaggaatgggacacacatgtcacaggattgaatcttctgggtggatggactggcctctggagtcctgacctgaggtactccttctacagaaacactttgctcaggtgtctcttcatccgtccatcccatgccaacaaaccagcgcagttataagtgcaaagttctccagcatcacatcgcggtacaggagcctctgcgtctcatcaaggagctcccattcttcctgggagaagtaaatggccacgtcctcaaaggtcacacagccctgtgtaaagcccataagtttagcttctgcagtcacgggaaccgaagtcgaatccctaagcacggccgccgccatcggattgtgagcggagcggggccgggagcggcgggcgacccggggcgggaacccaggcacggctgccaccagcgccagcgacccaccggctgatgcgcagcggggcgacccccgctctgtgccggaggcagcgtttctaactcaggcggcgtgggccgaggtagagaaccaccaaaattaccatctcgccctcgtgccgaattcgccacccaggcctcgctacctataacccgggagtactgcc

SEQ ID NO: 447129 - DNA, 852 bp, Homo Sapiens
  misc_feature (125)..(206): n is a, c, g, or t
  misc_feature (214)..(276): n is a, c, g, or t
ccaggtgattttgttggtgaggagtggtcgcgcgccgagtaacagggaatagttggagagggctccctccccacgagggaaagggcgggaaagaagtttgatggaggagcgggggacgcgcaggnnnnnnnnnnnnnnnnnnnnnnnnnnnnnnnnnnnnnnnnnnnnnnnnnnnnnnnnnnnnnnnnnnnnnnnnnnnnnnnnnnccgcggcnnnnnnnnnnnnnnnnnnnnnnnnnnnnnnnnnnnnnnnnnnnnnnnnnnnnnnnnnnnnnnngcatcgtagtactcaaacaactttatttcactagccatgagcaaaaagttgaccgggctccaggggattttccatcctgccctctccctggtgggtggctcccatgatttggaaataacctcatgttccacttggcagtgcctggctttgtgcacccacatggttttggcctgggtcccagtgaaaatggtcctcacctggctggggaacatggttctgagaggccccttgatctgccctggggacatgtgtggccatgctaagggccctgcccaccttcacgtgactggccacctttgccagggtgcaggcagctcctagcatggagacatccttcatggaagtgagctttcccacccacctccatacccacatttctcagaaacagagttaacagggaaccaagagtcaagaagccacagggctggtaacgtgcctacagccaaatctgtgaccattacctgaagaggcaggacaacaaaagtaatcaggaaaggagaagatgtgggctggaatgagataggacaagagaagacagaataaaggcaggaaaatcagaaacaccagagagcaccc

SEQ ID NO: 447130 - DNA, 482 bp, Homo Sapiens
ctgaaacagaattcattatttcccacagatgaaaataacagaactgtgattgagaaatggagcttaacctgtactaaaaagaatggcttacaacaggggtccccaaccagatataagccataatcacagatatgcttatttgcacagtagctgttgccgaatttcagtctaccatgtgcctattattcaccaaaatagtaatcatacctataccttttaagtattacctataaattcttgctccttatgaaatctcttaatcttccctgattttttattgctattgttgtttgtttttacaaaatctccttaccaaactttggggcacaaaggcctttcaggttgaaaaatttaaactgtccaatcaagtattggccaatattaatgttgtaaacctgtaggtctccttgtatctattctcaatattctatatagcaatttttctcactagtgccttgctcttttctttctcctgcctctac

SEQ ID NO: 447131 - DNA, 283 bp, Homo Sapiens
gcgctgcatgcccgagttcgttttcgccgctttcaacgtgactgtggtggccaccaacacgtgtgggactccgcccgaggaatactgtgtgcagaccggggtgaccggggtcaccaagtcctgtcacctgtgcgacgccgggcagccccacctgcagcacggggcagccttcctgaccgactacaacaaccaggccgacaccacctggtggcaaagccagaccatgctggccggggtgcagtaccccagctccatcaacctcacgctgcacctgggaaaagct

SEQ ID NO: 447132 - DNA, 547 bp, Homo Sapiens
agtttcgttactatcatttatttctgtatcatgcacaaaaacaattccattaatacatttattgtattatccatttcagtacttatgctaatacagtcattttaatttggatatttgaaatttagaatagattcattgctgttagtgcactatctgaagagaattctaggttacttatttgtaattaggatccagacaaatgcccatgtttctaaacaccacacaaaaactagcacaagtggcagagactgatcatacttcctgtcttcaaaagacaatgatcaatacaaaaagtcaatgtgaaccataggtttttgcttttcaccttgcctgaacaaatttcacaaattcaagaaagatccttgagctttaagcagtcttcactctttggggaaaggcaaaggatagcagctcctttgtggtaaggacatgaggcagttgtcagaagacctgggctaaaaccctggctcaacccaagtgcccctgtgaccttacttgacctccttgattctacaaattagtttgatctaaattctccccaatgcta

SEQ ID NO: 447133 - DNA, 294 bp, Homo Sapiens
tggcactttctacaaaaaatgctttatttaataatatgatctttttaaaaaggagacttttatacacacttactttagaaacagtcaaaaacacaacagaatcaatccagatttagaaatgatgatttgtgacatacaatattggtgtgctgaacaagacagtttaaatgtatgattctttttgtcccttcacatttcaataattcacatttgttaaaactagtggttgggactaaagaaaaggtcatatctgaatcctttccccttcagaaatctgtcacccttctgggcacc

SEQ ID NO: 447134 - DNA, 570 bp, Homo Sapiens
aaaagtttacttttatatacttaatttgaaaagatttgttcaaacttttataatttgttctttaatcattccccctcccatccacttcagtacccagaaaactaaatatccaagaattcctgggtaaaacagacaaccactagatagatataactaacgtatttttttaagctgtatagttcttcatcaaatggaaatcggcaaccactgaaaataacattaaaaattagtgtgggcatgaagtatggaattttaaacatcagtttactatgctgattaagtcaacatttatattttcatcagaacttaataatcccataaataaatagagctctcagttatttaaaaaaatcaagggataacatatgtatttagacatattagcagcgtaaagatgtatgcttcaacacacttattggggaaacgtctgaaaatattactacactgaattcaagggtatccaaaggaacctgacatagaagttctctagaataacatcatttcagggaatttcaaaaaagaaaagggggtcaaataggaaatagcctcaaattaattgacaaagttcag

SEQ ID NO: 447135 - DNA, 1111 bp, Homo Sapiens
  misc_feature (514)..(514): n is a, c, g, or t
gacagcagaagtctttttattcaaatctcccaccttacagatgtccagaataatcaacatatttcaaagggtatatttcaaaaacgtactagcaactcagccagccactgtcacatggaataagaagacatgccctggccattagaaccatgctgtcctcgctcttgtgtccctccacgggacagacatcaccttgcaagacaactcgtgccactgtccccaacagttttccacagagttcttgttccccttcatctgaatccttctctgtgcaatttgatgtcctgaactatttctgacggttgcacacaagatctcagggactgggactttttagttatgagaccagcccttttagacagcagacagtaggtacagtgcttgctctcccttctttgcatccttccagagttgccttcatcctcatttcctgcatctggtaaagtctctctgaaaatgtgaaaccgacgacagaacatggcaagctggatggagaagccgacaacccctcccnccactctcacccaacgccgggccggtcctgtttcggatcctgcacactgtggaagcttcttgcttccttgttttggtgggtgaaatctttgctgttcaaaaaggtgtttttgcacagaaattttaggacgtgtttattctagtaacgtagtgttttcttttttcgctatatttacatgtggagaactccagggaggcccccaccagagatcccttaaatgctggtctctgtccctgcttctcggccccgctggccttttggagccatcgtgcttcccagtccgcaggcaacaatcacagcatcacctgcaatgggcagcaaattgaaccgcggacccctggagtgacgccttggagatggaccctttggatttgggaactcctctgacggccgggactcccaggattcccttccatagagggagtccacggtggtcgcagccggcggctgagtcctcttgcgggtcgccaggagggggctgcggtgagcggcggcgggccccgcggcggcgagtgcgcccctctcggcgggactgggaggcgcagcgccggcgctgagctcctgtggccgcgatcccgggaattccggaccggtcca

SEQ ID NO: 447136 - DNA, 528 bp, Homo Sapiens
tttttctgctaactttttatttattcaagtagaatccaatatgaaaatgaaataagcataaacaaacagttaaatttctactaaacctttaatcagctaagcaggccagaattttttaatgctgggcaagggctgtcatgaagaagatttatgaaagcagtgacaaaataatttcccaataaatacagtgcagatggggaaaatgatgactgggtcatcctcccacatagaaagaataacaagaggccagtacattgatcccacatataattttcaataaatgaggttcagtttggtctcaatgaactcttctgagaagaaaacattgaattttattaggtgtacacagagttaacaaatatattcccaaacagtttagtatgaaacattttgaacccctttagatccaatattgaacattttgcatggaatcttcattgtgtagtcaactgttcctggcctttcttggtagttgtcttccctaagctcaaacaaacagtgttaaactaaaaaggaaattaagaatgc

SEQ ID NO: 447137 - DNA, 1120 bp, Homo Sapiens
ttggaataccattgtgtttattgatcaaacctggcttcgagtgtgacagagccattcttggttctccttggaagtaacaagaacactgggtaacatgtgaagtgcatggagactcacctgaatcccaccaaagtagtagctggacccagtagcctagcttattgtcttggcagtgccccctacccagtaccattagacctggctttgtcccttacataggacagactgggcttctccactcccgccaggctggccctacctccacctgtccttggaagctagtatgtaagtaagggaggagtcatcaagtttataagatgggtaggctgaggattgaggcaggaggggacttaatggctgaagtccctggcttgttccagagccctggcccttgagcccctggactggtcagtgcatggacactctcccctttcccagctcgggcggaagacttttcctgacttagctgctccatacacacaatctataaatatgtatttgctttaaaaattaataaattagatcttgggccagcctgaggtcatctggccagccatgagtcctgtgacatggacatttgtcatgtgtcatatatagaccaacaatcatgtatcctgccacttgggatgccagccaccccatgccccagaaccacgtgccacactggctttcatgtaacgccacatgtcaaggggtcacactgccacatataaccgtacgtgtcatgcattgtcatgacaccctcattgtgtgtcgcatgtccccaattgatcacacatatcccacgtaatgcagggtactcctttgtccagacccagctcctggttcccaaaaaagttctccctgaggactgcagcaggacacacgtatccttcctcctgggtggagtgcagagcgccctgccgaggctcttctttcctgagtcatttatcccagtgggcgaaaggtggatcatttgggtgcatcacttggctggattccagaggtcttgagggggccatcaagtaccccaaggggcctggggctggttgtcaaagaaggcaaagtccagcctgggctcctggctcttcaggtgctgggccatgtcgcagggaatggggatcccgggaattccggaccc

SEQ ID NO: 447138 - DNA, 896 bp, Homo Sapiens
  misc_feature (255)..(284): n is a, c, g, or t
tcccattttcctggggggccatggccaagaaagaagaccttcccagccgggtttggaaaaaccatccccaaggaatatttaaaaaggaccccagatttttctttaatataggactaaaacaagggatgggtaggggacttcccctcccccaaacaaagctgctcagtaattttattgagaaccgataatgcaagtccctataaagtttttaatctgcacaaacagaatcatgttaatgtgttcacttgtccggannnnnnnnnnnnnnnnnnnnnnnnnnnnnnccacttgacacagtgaaggaaaaatatatatataaatccgcactgagggagatgtctttgaacacctccccgcctggtgggcagagacccagaccagccttgctggaagttgctctggacataaatgttggaactcctacccccagtagctcaatgcaaccgacgtttctgagcccccagaatctgatccagatcccggacatataaaccacgccaagaagacaggggctgtctctagcacattctctcgagggagtccggggccccttcccagacgcaactgcaaaaggaagggctaacgccatggcgggcccgtggtttattttatatccgacaaagtgcacggcagcctgaactggactggaatgaaaagacgtgtctgggacgggtctacggggacgcgctgcgggacctgtccggcttggcttccaagccgctaaccaaccgctggatgctctgcagttcgctggtggccgcctctttctccgcgcagagtttgggcgacaaggacatggagctggaggagagcgtggaggagcggctgttgagttcagagcccgagtccactgccaccgaggccgggctggcggccagggcggcgactttgccgtc

SEQ ID NO: 447139 - DNA, 522 bp, Homo Sapiens
ttagtgtgtattaaaatgaatttatttacacagtaacatgatgccacggagtacacagcaaagtaccacagcaaaccaaagggtggcaccactgctggcagagaggacctttcaatgatagatttatacaactttacaatatgtaagtagaggggtgaagctccggaaagagcaaaaacaagattttcaaatacagagtgtgggcagggccagagagaattaaagagagattggaatgaggactgtcatgattcaaatcaccaagtagaatgaaatcttgcttctgtatttgcctcatgccaaaatgccctgcatatcctcaacagaaaatcccaacccagtgtgtttcatacattcacactctttagttcttaactgggtaaaggaagggataaccaagtagtatttggagcaagttcctgaaacagtgtggtttaacctttcaaaaatgaaccctatgtctggttcaacattcaagttatcatgagtgcggacacacacatactatccacacactaacgg

SEQ ID NO: 447140 - DNA, 785 bp, Homo Sapiens
  misc_feature (744)..(744): n is a, c, g, or t
  misc_feature (760)..(760): n is a, c, g, or t
  misc_feature (772)..(772): n is a, c, g, or t
ctttacatgatgttcagcttggtgggtgaaccaaacttaaattttttttccagaagtattaaaatttagttaaagcaagatgaagtcttttcccatgaatgtgtccccttatctcattatagcttatgctcagtttcactttcttggaaaggttaaaacaaattagcctggcactttaggtaacttgaaaataactctcacccttctgactgccttccatccactctcaccccacacctttttttaatatatatacacccttacagattttctaacaaccaaataaaattctagcaataaattgaattatactgctatatttgtatatactgtaccataaatagtatgtctgtacctggaaggtatttttttgagaactgatttatatgaaatatacttgagggtaatgtagcttgtcctttttagtttcaaattcttattcataggcagatactttgaagacaccttaactctttgttgtgtgtattttcccttgcatcagataactatacatggagaaatccattttgttttttggtttatcttctgttcttcctaccttgtgcttgtctgactagtatcacccctgagccagtatacagtaccatcctctccccctaccaagtttgggcagaggtgtttatactgcattctcaggatctatggaatatttttgtcatcctgcctgaggaaagtacatcttccagggcaaaagtagggggtatcttggaactcctttcttcnggagttgaggcaggantcactgggcttnaggcatcccctaa

SEQ ID NO: 447141 - DNA, 516 bp, Homo Sapiens
gctgtaaaaatcgtaagtttatttgttaaaaaaaatactgtatttgaaaagtaccttccttctgggattttcaaataatttgtacactacattttattcatctacacattggaaatgagtaaactggtgaacatatagctttttatacatttaacacaaccagtgcaaattctcctgcctctgagaaggcagagaagccctttactcagaaggtcttcaattctagcattactccaactcctagggaaatttcgggtgggtgcctatggctgtatgaccatctgattcctcagggacaggacaggaattcagcaagggagcttaaaatattttaagtaattgtcaacattccatggtgactctccccaaaaatctagtggtaggaaaataatctgtacttattcctctttctgcacacaaagccctcatttaaatttgtgagcctgcttgggatccattacctagccattcagagatcctgtcaaatgcacagcagattggatactcaccatccca

SEQ ID NO: 447142 - DNA, 448 bp, Homo Sapiens
aaacatatgatcattttaattacagatgattgaaatacagtgcaacagatgagacaaatacaatactgtaccagtttttaaaaacctgaaccataacggcttcgcattctagtacacttacttacttaaaacaaaaattgcttagataacaaaactatacttcaagttgttttagaaacagttctgcgctaggaacatacaaaggaaaatgacccgttgtgcttctttaaaatcgaatgagagtctcctctagggtcctgctgacagagcccccccagcctccgccaggtgaggtgcacagggcccactccagggcaccagctccccccaacttgggcttctctgggtttgtcggagggcatcatccagttccacactatgttttaacagttcctagtcagccaggggattacatatttctgggaagaaaatggcaaatgtccccatt

SEQ ID NO: 447143 - DNA, 592 bp, Homo Sapiens
  misc_feature (180)..(190): n is a, c, g, or t
acctgcgtcgtggtgaacatacttttcaaagacatagttagaaggacatactcaattttaaacagtcacacaaatttcttcaaagtatttaggatttggaaatttgaggagagggttgggggaagggtattgtagagaatctcttgccccttggaaggtaaatggtaatgcttttctaannnnnnnnnnngtaaactaagaatcagcaattaataaaagcaagtgtactctataatcacagacagaaggttcttattttcaggtcagcactccctagaggtgcaaactttatttaatttaaatgcagttgtttgtctaatgggaagctgatagggccttgctgcagttctctaaggtggccaaattaaacttggctggcagctcctgtaatcctcttgggcaactttacagccaagccccaagggctaaatggcaggcctggagctgtgagtgtggcctccccacggagggtgactccttgagttcagtgaggaaaaccacggtgcctggcagtggtcagccaggagtatgactggccactccttaggcatccagaagtaggaaacacagaaagcattccacaaaacgggga

SEQ ID NO: 447144 - DNA, 434 bp, Homo Sapiens
ttttttgggaattaaaagggcaattttttatttttgtcacctaaaaaacaagcaacccagaattaagatatacgtaagtttctcaaatttatcctaataaaattttgaatatttatacaatttctacagaaacatacagtgtatcaaaatctgcataaatcaaatttataaaatgtgtagaaatgcatagtgatattaccaacttacaaagcaaggatatgggaattatttccagagtagcctacagtagaaaatagtcattatggcagcagcttctgatgtttttgtttggtaggttttctgatttcaatatatagaatcatattcatagagtatcttcttttaacgaattgcacaaagtacccatttaaaatttacatgcacagttcattgccacctttcttaggcctatgcatagttaataaggttataat

SEQ ID NO: 447145 - DNA, 828 bp, Homo Sapiens
  misc_feature (467)..(507): n is a, c, g, or t
cacattgttatttgtttattttgtacaagtgatgtcataagcaaggattttgcctgtgttctagattatctccaataaataaataactatgtacaaatattttgagtttacaaaatagaagaggaaaacctttgtcttacaaaagttacatttctatgatacatttatttccatacactgaagcaggatttcattcctagcttagctgaaccaaagaccttgcagaccctgtgtggcagtgtctagagctgtgtacctagccttttctacccaaagaggcacagctacccaaaggaaatttcttcagtttcttgaaaataagggcctgacttggcctgctacttataactgatctatatttcatgtattccagaaaattggaagcagtctggaatggttgtcctcaaattactgagcagacacaccccctgcagatcttgttaaatatagattctcatgaactggannnnnnnnnnnnnnnnnnnnnnnnnnnnnnnnnnnnnnnnntgggcagggcagcttccaattcttgttcaggggccacattccaaaaggcctctctgaaatggtagaaattctctgaggacctgattaaggctaggccctaattgggcatcctccaggatccattcccaagctcccaattccacaagaccagtagagctggttttattttggtctaccagtgacaaggaacagtgacagtcaattgctaattggcatgaatcatgcagtttgaagctttcttgaactgtctcctgggaggtgtttgtctcttctctcaatctagagcaaccttctgaacattttcaacactgtcaaaaatcc

SEQ ID NO: 447146 - DNA, 869 bp, Homo Sapiens
  misc_feature (292)..(430): n is a, c, g, or t
  misc_feature (468)..(534): n is a, c, g, or t
  misc_feature (789)..(828): n is a, c, g, or t
cggctcccctgaggaaacagcaaataatttgggcctcagaggcacagactcttgggttccttatgacctggtgcctgacggagaaagaagtgcgccgccgttttactgtctggaaaatgggttgcaggcggaacagaaaggctgcggcgaataggagcggaccagaccctggtgtaggggtcttctggatgctttagagacttcgtgccttcccggttcccattccctgctcctttggacgagaagggaactagtatttatttaactttaatcagccgggtttgtggctcannnnnnnnnnnnnnnnnnnnnnnnnnnnnnnnnnnnnnnnnnnnnnnnnnnnnnnnnnnnnnnnnnnnnnnnnnnnnnnnnnnnnnnnnnnnnnnnnnnnnnnnnnnnnnnnnnnnnnnnnnnnnnnnnnnnnnnnnnnactcccggggctgaataaagagaatcgcttgaacccannnnnnnnnnnnnnnnnnnnnnnnnnnnnnnnnnnnnnnnnnnnnnnnnnnnnnnnnnnnnnnnnnnctttccctgtctcaaataaataaataaatagatagatagataatttaacattcatcagacactatttcaagctccagtttggagcctgtgtcccgcccaagtcctcaagccctcaccccacccacccttgggctgtcaggtcacgcctgcaggtgctcaataaataccttttgaaatgtttttcgtttgtttgtttttgtcccaagtgccagacactgtgttaaagtgcttaacctccatggcaagggtggtggnnnnnnnnnnnnnnnnnnnnnnnnnnnnnnnnnnnnnnnntaatcacatggctgcgctaggaaacagcaggtccctaaagc

SEQ ID NO: 447147 - DNA, 528 bp, Homo Sapiens
atgatcatctaatatttctttaataataattctagttccataggttttcatgttatgccaatttgtacccgagtttaattacagaaaaggcaacaatttctaaattggtggtatacatttctttacaattttttaatgtaaggccatttattaaaatagacaaactagaagatgaaaacgaaggcaacagaaaaattcaacttttcacaaccaaaagaattagcacaaccttagaaataatttagaaaaaagtgttgttaaaagatatgttgcagatctccgttccattacccaagattatgtcaattcacgattctaaataaatctttttaaagtaagagattaaaaactcatcttcagtgtatatgtaaattctgtgttttatcacacaggtatgtttattcaacactgtcttttgaaaatggaccatttaaaaagacatagcaatttccattctgttaagtttcattcaactttacttagggttgaatacacatgaaatgtgcttttaatgcataaaaatcacag

SEQ ID NO: 447148 - DNA, 762 bp, Homo Sapiens
  misc_feature (176)..(226): n is a, c, g, or t
  misc_feature (432)..(440): n is a, c, g, or t
  misc_feature (457)..(457): n is a, c, g, or t
  misc_feature (465)..(465): n is a, c, g, or t
  misc_feature (478)..(486): n is a, c, g, or t
  misc_feature (601)..(601): n is a, c, g, or t
agagacgggccgacagggtagttttaattgtgtcgaggtgttgtgttgtagcatttataaaaactggcagatttattctgcaggggcccattttcaagaagctaaaggtgaaggtgggaggggagaagtttcctccccttttcctttctccctcatgttatttcctccaaggggtnnnnnnnnnnnnnnnnnnnnnnnnnnnnnnnnnnnnnnnnnnnnnnnnnnnctgaggttccaaaaagttacagcatcttatttcctcatagaaaaggggaaggagccagagggaaggggagtccctggggtggggggatatctcacccccagcccggtgagacatcccctccccttaaatagctgccccaaatggggcaagcccagggctatagcatttaaaaactcccacatcccattttatcaaaaccaaagagnnnnnnnnntttcccttttcccccanaaacccanaatatatatatannnnnnnnncttaaaaaaaccaaaactttgaaggcattaagcgttaaagtgaatctagaacaagggaatgtgaaattccctccttccttcccccttcctgtggggttcattggtgcatccccancaaagggaccggccccaaggggatggcataggggaaggaccaaagggagaaaagggcgggggcctccccagccaatcagcagccattgtgggtgtgagcagggaaaccacacccccttggagttttccaagtgggatggggagtgggaaccatgcattcct

SEQ ID NO: 447149 - DNA, 736 bp, Homo Sapiens
  misc_feature (310)..(310): n is a, c, g, or t
  misc_feature (585)..(594): n is a, c, g, or t
ttttcatgatgactacttatttatttctattttatatgcggggaaacagctcagttattactcaaagccacacttaccaaagccagaggtaaactagtacaagtcttttgattcttagcattatattcaataaattcactaggtattctctaactgtacttttgatgggatattgaaatctttaaaggagaaattccatgttggaaccaagcaaagggtggaatttgacaaagcagcccaaccactttggcttacaaagtcctttatttagttcctaccctcttcatctgcatagtaaatcatagggttnccccccacccccaccacgaatagcagttaatcatggctattctccaaaaagctaggtgcaaattaactttatggctccagtctatctaatctgaatgaataaacaacctaaaggtttggggtaaaccacagcacagaagaagcaccagatctaggctccaggctggtctctgccattgctaacagggacaccaattccacagaatcatcagattttaaatggctgtttttgtatgtaccagataaaactagtgcaattttattgctgctagtacnnnnnnnnnnaaattttgggatatacattttcaattggctactgtaacattttgaagtttatttacaatacactgtcgtactgttcataaacttcaaaatgagagtagtgccatggaagaaaagagatccagttttaataccactttatggc

SEQ ID NO: 447150 - DNA, 419 bp, Homo Sapiens
ctatgctttacctgctatggaaaatttgacacattctgctttactcttttgtttataggtgaatcacagaatgtatttttatgtattctgtagttcaatagccatggctgtttacttcatttaatttatttagcataaagacattatgaaaaggcctaaacatgagcttcacttccccactaactaattagcatctgttatttcttaaccgtaatgcctaggcctaacctcaaccaaccttccacaatcttgttcacagtcagagacccaaaaaagagtgttataagtggggtgtcactattgtgaaagtagtgctaatggtgttgaattggtacctatgattcttcttttgaattagattgtatgtttcatgatctcaacttacattactaaaattcaataaactgatcatttagatg

SEQ ID NO: 447151 - DNA, 727 bp, Homo Sapiens
aatcttttggttcctttattcaccactgacagtcatgcgtcttaaacaatcagtaacaattttaaggtacacaatgggtttatgaagtgtcattcacagtgttttatgtaactggtttcagtagaggtaccactcaatttttatgccaggtaagcaaagctgttttaaagccacgatggaagtcatgccctgaaggctttatccccaccaagaaagcagcagtagaactccagccctgaaggagagctgttttttcagggtcttggttaaactggaggccagtcactgtatgtatgatacagctttcctgttgtttcatggaaagaatgctatcacaagagcatttagtcttgtctttgaataaaatagaataagatcctagaacaaattaataaatagaacaatctgtcatttgttctcactgctaataagcattaattctaaataagtcattctatttttattcttaagatttaatgacccagtacaatgacgcacacatatctctaacgaaagcacctgctattttactggccttaccaaatgttattcctagatgtaatcgcctactaatgaaatcactgcttttcactttgggaatcagagacacaaaactacagctccccagaaaaaacacattattgtcttaagctaggagcacaagcgctttccttctatcccctgaaaatttcataagaaacatccagggaattccggaccggtacca

SEQ ID NO: 447152 - DNA, 535 bp, Homo Sapiens
tcatagcaaagtatattgtaaacaaatttaatgaccaaatgatagactggtaaaaaatgtgcctatcaccaagggctgatacctttcctgtggcccaggccctctgctctttaaaaatggggcacaaatacaggcaggtaagagacagacagctctcatcctgcactcttggctttctgagagatatgaccccaaggtcctggagtctagctgctgcttcctcctctgggaaatagaggagtgatattggtagtacctagggcatagcactgctgggacaattcagtgatttggggactgatctccatatcaagatgacctgatcctgtctgtgtgcgggacagtggctagcacggagcccttgttaggcccgcctaccatctgacccttctcaaaccttcccgtctgaggacatctgcatgcacacttgtccctccaatgctgtctcactctggatggccctgacacctgagaggccagacagccaagtggtttctaggacctttgtgattctaggcctgggttcctgtttcat

SEQ ID NO: 447153 - DNA, 343 bp, Homo Sapiens
atccccaacacacacaaagaccggcatcagatttattattatctcttgttaaatattttcgatcttttctcagaacatggtctagaagggcatagtagtttttttcccggtacatgcgtgggtgggtagtgaggagaagggagcagaggtgcgcgccaggagccaggctggttctctgcagagaacaacctccagatcctcccagggaagcccgacacgccagtcccacgttggacgacgtgcagaggaagggggaggtccacggtgacgacgaagatgaccttatacgtgcactcggcatatcctggagtaacgcgcagtgggggaggtggggaggggaggg

SEQ ID NO: 447154 - DNA, 921 bp, Homo Sapiens
gggtccggaattcccgggatctggcttcgtggtccctgatgggagagcatgaacaggtggtatgtgaagcccttggagaccagctcttccaaagtcaaagccaagaccattgtgatgattcccgactcccagaagctcctgcgatgtgaacttgagtcactcaagagccagttacaggcccagaccaaggctttcgagttcctgaaccactcagtgaccatgttggagaaggagagctgcttgcagcaaatcaagattcagcagcttgaagaggtgctgagccccacaggccgccagggagagaaggaggagcacaagtggggcatggagcagggccggcaggagctgtatggggccctgacccaaggccttcaggggctggagaagaccctgcgtgacagtgaggagatgcagcgggcccgcaccactcgctgcctgcagctgctggcccaggagatccgggacagcaagaagttcctgtgggaggagctggaactggtgcgggaggaggtgaccttcatctatcagaagctccaagcgcaggaggatgagatctcagagaacttggtgaacattcagaaaatgcagaaaacgcaggtgaaatgccgcaaaatcctgaccaagatgaagcagcagggtcatgagacagccgcctgtccggagactgaagagataccgcagggagccagtggctgctggaaggatgacctccagaaggaactgagtgatatatggtctgctgtgcacgtgctgcagaactccatagacagcctcactttgtgctcgggggcctgtcccaaggcctcgagcctaagaggccacaaggggcaccagtgcctgagccctccactcccctcctgggactctgactccgactctgaccaggacctctcccagccacctttcagcaagagcggccgc

SEQ ID NO: 447155 - DNA, 1211 bp, Homo Sapiens
ctggtaccggccggaagtttcgggatatcgtcgacccacgcgtcgcgatggtgtccccgcgggatcaaacttcagcgtcacagctgaggactggcttcgtggtccctgatgggagagcatgaacaggtggtatgtgaagcccttggagaccagctcttccaaagtcaaagccaagaccattgtgatgattcccgactcccagaagctcctgcgatgtgaacttgagtcactcaagagccagttacaggcccagaccaaggctttcgagttcctgaaccactcagtgaccatgttggagaaggagagctgcttgcagcaaatcaagattcagcagcttgaagaggtgctgagccccacaggccgccagggagagaaggaggagcacaagtggggcatggagcagggccggcaggagctgtatggggccctgacccaaggccttcaggggctggagaagaccctgcgtgacagtgaggagatgcagcgggcccgcaccactcgctgcctgcagctgctggcccaggagatccgggacagcaagaagttcctgtgggaggagctggaactggtgcgggaggaggtgaccttcatctatcagaagctccaagcgcaggaggatgagatctcagagaacttggtgaacattcagaaaatgcagaaaacgcaggtgaaatgccgcaaaatcctgaccaagatgaagcagcagggtcatgagacagccgcctgtccggagactgaagagataccgcagggagccagtggctgctggaaggatgacctccagaaggaactgagtgatatatggtgatgcccaagcctgcagtctgacccctgaaccctcctctgaacccgttcccccaacgggatctggcagtgaccaccagaacctggagcccacctgagtccagacttccctcaccccctaggactcaccccaccacggcccccaaccttagctgtactgctgtctacaccctgagcagtgtggagtctcccagcgcccccagctccttgtcttcttgcaggtctgctgtgcacgtgctgcagaactccatagacagcctcactttgtgctcgggggcctgtcccaaggcctcgagcctaagaggccacaaggggcaccagtgcctgagccctccactcccctcctgggactctgactccgactgtgaccaggacctctcccagccaccttcagcaagagcggtcgc

SEQ ID NO: 447156 - DNA, 799 bp, Homo Sapiens
ttgcattgccatgattttattattagtgtccaaaatgggactcccaagtaataaatgatttattccagccacagccaaaaaagactttgcctggctaaaagagtctctctctaagtatgtaatatacaagaaatacaattcaaagagatgttcctataagtacattttttacacggcatatatttaaaaaggaggccccttttaatataaaattccggttatataccaatatggttaattagcatttacactatagtttgaacgtattttaaatagcatgatgtgtatacaatgtctcccgcgcccattggcaaccagggtcgtgggaagcttggtgaggagttaaccaggtcctgtggtttaagcagtggagcacccgggattcctgcccccctttctgctcacacaattgcactccattcttccgccttccttgttttctccaaaaccacctgataggggggatgtcctgatttctgaggtgtgcttctcatcatgactgcttcgttttgcccttctgatttccacggcacaagattataggaggaaactcattctcatcatcaagacacactggtcccgtcgcaaactcatgttcaggaataacttctcctcgcagcgccccgccgtcctcagaataacctggcaccgtggaggctgaagatgcacttggtctggctacggtcgctgcataagactgaggtaaggaaggtctgaggtcattttctttattctcttctgttgttcctgagccaagcaagctgtgggttttgattaagacacactctcctccatcctg

SEQ ID NO: 447157 - DNA, 703 bp, Homo Sapiens
ttgagttgtaataggatgaatgtaattgtagaataggattgcacaaatacagaagtcatgccctaaaggctacagcaacaaattaatacaaataattctggcagtcttataaaattacatctatctctgtagatatttcacttttgtgtcatcaaaaacagtttgtaaaaatattttcaaactttttttaaacttcaacagtaatcaaagttatctgactgcaagtaacatcaaaatgctagcaaatagaccattttaatcagttttattgattcatgcttccagttcttattcagttaaaaacaaggcacattaaatacatcctcttattgctctataaatgcatgcagctcattctgtgtatcaaaagtaataaataatggccataaaacaccaagacagttataaaaatgacaacccagcctcaaacatagtatttaacagtccagtctagaacaataacccaacatgatacataaaagtgccacatatgaaaacatgcggtgtgtatatccactctagcactgagcttacacttgctatttaaaaacatagtagggctttttcactccttcaaaaaggttgacatgatgcaaacatcgcaagttatagcatcattgactttaatattacattcatatgccaaaaatctttacagatatataagagaaaaataacatcaatgatgactcctacagtatat

SEQ ID NO: 447158 - DNA, 905 bp, Homo Sapiens
ttagaaggacaaccttgagctgcttgaggtttatttataaagtacaaggtacacttactgggcctggcctttttaatttttactcttttgccttcctttccacccagccaagatttttgcttgctctcacctgggagttgagccgatttcacaaatctgctcttggctgtcatgagccaaataccagcacaaccttccctggacctgagggtggcttcatcttagaaggcccacaaggatcctgctgaagcaaatgactctgctccagtcagctcaggcctctatggagcaaagaaactggtgtccttcttggagcgctgccttcatctccttgaactgagccaactggcaggcctcctccagccccagccagcggtaggcttggtgctcatgggagaggcggatctccacgtcatagtccttcacctccgccagccagtaaatgactgttttaggcttgttcctggccacataattgagttcccttttgaacccctcaataatggtcagctggcctgcttctatgcctgcttcctcttgggtctccctcagggctgtttccaagtcatcctctcctggttccacatggcctttgggaggagtccagtgatgaatgccatctgatgcctgcagcagtaaaaactcaattgcattgttgtccactttgggaatgaggcatcttcggaagatgatcaagccacatgctctcaaggccatggtcttatcctaaggactttgtgtataactgcaggaccctggcaactaccctcagtcaatgtggcctctatcccaactcctccagggctccctgtaaaacagggctggcatgtgtttgttgtgacactggagatcctcagaagcaaacgcaccgaagcagaaggaggtaggaggcaggaccttccgct

SEQ ID NO: 447159 - DNA, 550 bp, Homo Sapiens
  misc_feature (329)..(329): n is a, c, g, or t
tttttttattgtcaattattttattcaaatgtttggaacttaaacacaaaatcatcattaagttttcacaaaatgaggcatctgtcgcttgaaaggcaaaaaatatttcagaaatatgtttacagaaatgtaaaaatattaggcatcaagacagatgtgaacgtattcagtagcttgtcttgtctgtcagtcttcctctgagccgaagatcttactgtactcactcagcatgagctcagctatctggttctggtagaccatgtggatcgccatgtttcctgtttcattttcagctcgcagaagggtaggtccaaatacaatccccaagnctttgcttgggacatgaggttcttgggaggctttggccactatccttctagtccaactgtgccgcattaagctttcccagttgatagctgatctgctttgaggagtgcatttaactcagagctctgcaaaaatggagtgcttttctgttgactgtagagtacgtaggtcaagtggaatttttggcacttcattacattccctgaccctcactaaacaaact

SEQ ID NO: 447160 - DNA, 1876 bp, Homo Sapiens
  misc_feature (76)..(85): n is a, c, g, or t
  misc_feature (1084)..(1084): n is a, c, g, or t
  misc_feature (1154)..(1154): n is a, c, g, or t
aggaagcccttttgcaacccatccaggatataatagagatctccccaaagacgacatcttagagatggagaggagnnnnnnnnnncttaagtcccataaagaaggcagaaacatgtttttggttgatcaagatgagtttgggccaaatataaggaggctgcttcactggagggaatcacaaagccatctggggcaggaatgttgatggtgaagtgacttccctgctaaagctcgcttgctgggatccggatgcctctgcagagacaaaggtggttcagagttcatggggaaaagaggcagggtttgtggctgagaagcggtgccaatggggagagtggcagtgtccagagaaagccatcaatagtcagtggatccttgtgatccaatattcagtggacagagggttagaggggctgtgttttttcctccatcattgaaaccaggactgaagaagggccgcagaggtcctgtaaaggcacattcagagaaggagtagatgagggagccatggtcagtgatgttgtagaaggagaccatgccagcctcatagtccaggaaaatcccaacttggcaatggagggcacctgaaggtggaggggagtctgggggtaggtgccagcctcatatttttgtttgttccacaaccaaattgtccagaagccactcttggaactaagcaaaaagtgccccttcgtgcgcacagagtctctgcagacacccaggtcccaggcctcctttcctgtcacatctacctcccagtaatgttttccagagtgaaagtgctgggcacccaggaccataggataactatcaaatctctcttcatttccaggtatgctctgctgggtgtctccaagcgtcacttgtctccgatcttctgaaagtatcagccacggattggctgtgtctggatccagagtgatgtggactgcacatgtcctcagcatcttcttcagccctggcacatggcacacactcctgagttctggagaggtaatatccaggtccttcaggttccaggactcactcctttccaggacaattatcacctcctgcagcagttccagtgctgagctgtggcacnttcgatctagctctgagatgagctcctgtagggcctggctctgctgggccagcttggcctctttctcccncaggattctcagctgctccctctcatccttctccagctcctgcagctgcctctgttcttcttcaaccaggaagtttttttgctgcacaaactctgcgtgaatcctagatttctgtgtttccactgttttcttccagtctgctctctttattgcaatttccacttccaacttctcagccaactcctgctttcttctcagttcgccctagatgccacctggagcttcgtcctggtactcttgtgcagcctcctcaagagggaccatggcgtggtcacggtgtttccgagactgggcacatacccagcaaagggccttcccatctttctcacagtacaggtgaagtctctctccatgcactgcacaccgttccccctgtgtgccctctctggcctcctggctgatttctttaaggttgttcaccatgttggctagctgtcgattgggccggagattcttgagcagaaagcgctgccggcacacaggacagacgctgcccccacctttcccaacctgagagatgcattcctggcagaagctgtggccacactcgatgctcacaggctccacgaaggggtccaggcagatagggcatgtgacctcactcccacatcacttgtacaagcgtgctgctgaagccattgtcaagtgtgccgttaacagcagtgtggagacctttagggggtttggctttacaatcccgtatctccggggcgtaccgcctg

SEQ ID NO: 447161 - DNA, 1042 bp, Homo Sapiens
tgggaggcctccaggtctcgggaaaaggaagaaaaatccctggaagataattaaggaaagacttgatccccataagagaacacccgaggattcaccggtagcacaacgcggcattcgtcgccaccgggattggagtgcagtatgaatgcttccagcagtgagcatgtgtatagtaattaccacgtggttttttatttgtttagtatgttcagggtaacattttgttttgtgtgtaagcactcagatgtgagatttcagctagtggggataattgcaatgacttacattgtcaatcaatatttaatttttttaagttatagatcttagaatctggctcttttgcttttcctctcaacttatggatctttgtattttatttatgaacttagtagtttttatataaaagcaagatcacatttacttgttcattgattcatagttcaattaactcgtaaatttgatagattaaatgtcccacaaacttttaacatcatttaaacacttaattaagaaaattcctttagatatttcaaactacaattacaaatttaatttagccaattcaaacacttcaaacacctaacaagggagacttacaaatatgatgaacaaattatccctaagcacttaagcagcttctgtaaatctaatcagacataaaatttgttgcttagattttgttttaaatatcataaaaagcaagcagaaattatataaagcaaatcaacaattataaaatttcttaccgcaactgtaaacacaacttatacaaaagtatcgatattatggatttatttcttcatcatcttgttgtggtaaaagaaatatatgtgcatggacctattcatttctcactccaatcaagatgaacaaaatagtactatcttgcatttaagctaagtatacatggtaggaagcttgggtccacgacatgggtggggtaaatttatgtggttgaatccagaagattgaaccatgggatgccattccaagatcctggacccacagaggtcccacgctgggtgggctttccaggcttctg

SEQ ID NO: 447162 - DNA, 615 bp, Homo Sapiens
ttttttttagagtcagaggtatatccatttattgtgggcaagacaggttatgggagggagagaagaggaggcctggctagcaaaggtgatcttaatatgtaaatgaaaccttacaggcagcagctctcagaaagaataagctctaaaagtttctttcagacctttacagctgtcagactctcagttaatctttcctagatctgggcaaggaaagacttggctgcatcaatgcagattccctacagatgcaaatctcctcaacgaaagacaactttgcagggctacttctgcagctggctttctgaacagacatctcaaaatatgtcaaagaaatgtattttggggtaaaatatttttaattccttcacatctacagcctgatgcacctgccgtttcaacgcaccattgttggtggcaattccattctttcctacaattaagccaaaagaacagattctccttgaggctagtctttttctcacagcacacatacaatttctcagaaaaattctgtctcctgtttggttaattacagactttaacctgcccaatctttctctttcttggtctttgaattttggcaaaggagtctcctgatacaggcgggattgattc

SEQ ID NO: 447163 - DNA, 619 bp, Homo Sapiens
  misc_feature (66)..(95): n is a, c, g, or t
  misc_feature (203)..(266): n is a, c, g, or t
aaaggttcattattgctttctacctgcttaagacaaagcaggggtgtgagttcaaggtgggttggnnnnnnnnnnnnnnnnnnnnnnnnnnnnnnaaccattaaaagggaattgctttgtggttataatatgtttcttgcaacttagtaagccttaacatgaaagtgtctgctgaacgacctgaatggtaaatatatatatannnnnnnnnnnnnnnnnnnnnnnnnnnnnnnnnnnnnnnnnnnnnnnnnnnnnnnnnnnnnnnnagacagcaactctaagactcaggtaagatcacctccttcaaataaccccagaaacaccttccttacagataccctcttttaatttcagcccatggcttatgctactacatttacagattgtgagttcttagggaccagaaacctggtgagatgggaagggtggtaaaagacaaggtcagaaaaggcagggccagatcgtataaggctttagtccaagaaaaaagactggattttattctgcatggaatggaaagccattgaaaggttctaatccgtacatggtcatggttggcttaatcaacctcttcaatggtgggcctctgaggaagcaccaccttctcgacatgtcgaga

SEQ ID NO: 447164 - DNA, 385 bp, Homo Sapiens
caaacaggtcatttgtttttattttatggatacaccaaaattttataatgagttgtgtttctattttggctttatcttccagaaacttagaaccaaatatgcagtcctcttctagcaactgtatgagagcaggtggtaagcttctattttattgcccttgttttcccttgactccaaatcttctttcatccttttgtaggtatattggtaggatactcaaattctctgtcacggtcctctttcagagtgtggatagccagaatacaaccagagatcctatctcccaaagcccagttcatagtcttctgctgctgcaaaaccatctcctggcccaacaaagccggggtctctccaaatgggaaaagaattgcttcctgctaatctc

SEQ ID NO: 447165 - DNA, 494 bp, Homo Sapiens
ttttttttgtagttggtgtttgttatttattgattctccctccaaaggggcctaagctcgacaaaaccgttacagttgtcagaacccagccacagggctcagcccccttcccccacgtcacgtctgcatcactactgtgggtgagcctggacggacgggggctggggctgcccgtggcagcggcaagggatgctttccagagacagccaccacgcaggagggaggatcaccccaggcaacccagacacgggtgttcacatgtgaggctgtgagctccacatagcacaaaggaggcttgctgactttgggcggccatgtctgctgggacctgggtgatccagtgcgtgccacagccagaagcaccattccctgcatatggccactagccaccctggggtgggacagcctgtctagacagacagcaccttgggggctcccctgagggtcagtgagggcctgaccccaggcaggacttgcgtggaacgctgtttctt

SEQ ID NO: 447166 - DNA, 412 bp, Homo Sapiens
  misc_feature (359)..(359): n is a, c, g, or t
  misc_feature (369)..(369): n is a, c, g, or t
  misc_feature (400)..(400): n is a, c, g, or t
tatcatccacattatatattttaatacacacatagtagagaaaccagtgtacagagaaatgaagtgatgtgcctaaggtctttgtgcatgcagcttgtggcagcattaggatgtggattccaaatcgctcagtctggtcttcctccccatgtaccatgctgcctttctcctgcagagtttgggggtttggaggaccaaggagtaggggctggatgttgagggcagtgcagtttcctgcaagaggtggcttttagtttcttctttgaagcgaattctgtcagaccacatgctgttgtgggtggtggagaaagcttcacgagtctttgccagcaaaagtctggtggtgggttggggtgccngggtcttctnggccagcgactctgactctgctccttctcantgttgcttttgc

SEQ ID NO: 447167 - DNA, 1653 bp, Homo Sapiens
  misc_feature (1115)..(1198): n is a, c, g, or t
aagcgtctggagaatttcttccatctttctttagtttataaacttttcacttcttttatttgttaaaatagtcacatccatatacatgaaaagatttgaccataatgcattcattgattgtggctcttgccatctcgtggcatccaggatcctggctgaaaggttttaccagtgctgctgggagccactgagggttcttcctttccaaagtatggagcagaggcatggcctttaatttgagtttgaactggtggaggcaggagttcctcactggtctctttactaaggagtttttctttttcataaaaatcttggctttttattttgatttcttctctgtgtttttcattctttagtatttcctccatagtaggtggagtctttcttgttcttctaatccaagcttcccattctgttggaatatcccctgcttcatagtctacttcttttttatttgctgcttctacaattcttttctctcgaatagtttgtcctctccagttcttgtactgcgggatgtagtagtatttgttcccgaattggtccgtgcccacgtgctccttcacttcccttgacagcgatctccacaaggcgcggaacaaatcctgagaccaacccatgccgtccacccagtttccagcgctgccagcagcgggacccgcagtaggggtaatgctccagccgccgacccagcccacccaccaccaccagacttttgctggcaaagactcgtgaagaggccctcacccagatgcaggcttttgaccttggatttgccagcctccagaattgctttctccaccacccacaacagcatgtggtctgacagaattggcttcaaagaagaaactaaaagccacctcttgcaggaaactgcactgccctcaacatccagcccctactccttggtcctccaaacccccaaactctgcaggagaaaggcagcatggtacatggggaggaagaccagactgagcgatttggaatccacatcctaatgctgccacaagctgcatgcacaaagaccttaggcacatctcttcatttctctgtacactggtttctctactatgtgtgtattaaaatatataatgtggatgatagtaaactgaacnnnnnnnnnnnnnnnnnnnnnnnnnnnnnnnnnnnnnnnnnnnnnnnnnnnnnnnnnnnnnnnnnnnnnnnnnnnnnnnnnnnncacaaatacaaacaaaacaagggggcggggcgcccgggccggctaatgatactcgggggagcgaggtgatcaaacaagcaaacaccagtaaagttttccgtatctatgcagatcagaacattaccacaacacacacacaactccacgagaagaatatataatagtatctatcagaacccgaccagaaccaacggacagacaacatcaagcaacaaaagccgatgcatagatagaataagaaaaaagaggacagcgacaacccactaagcgagatcgcagcagcacgagcagaaacacacagaaagcggagagaataacgacgtgagacggcaagggaaagatagaaacaaactgagtgagcgacccgaaaacgaagccaatacaaccacacacaaagaacgaggagatagataagaaaatcaatgaagcagcgatgcaggctacaagtaacaaaa

SEQ ID NO: 447168 - DNA, 482 bp, Homo Sapiens
caggatgttcactcctgtgttatttattatatagaaagatcaaggggactggttaaactagacatatcacatccagccgctgctaaaaactaaagggaaatagtaggtgacaaaagcaggggtcctgaacagtggtgggctcgggggattggagttttttcctttatgtttttctgtattttccacaatccatgcttttcattgccattccatcagatgatgttaaggaggaacacagatccagtcacctgaggggatacttcctcactgccaccttctcagggtttagaccaacatgtgggttctagttcccccagccccaaagctgttccctgcaaggaagagatcagtctttgagcaaattttggctcaagactgaagacacagaaggcgaggctcctgcacgcacagcacacggccatctgatcctgtgctgcagtggacgctgactttcgccacgccgtcctctctggcccagcacc

SEQ ID NO: 447169 - DNA, 1018 bp, Homo Sapiens
  misc_feature (967)..(967): n is a, c, g, or t
  misc_feature (1005)..(1005): n is a, c, g, or t
ttgggtgtccgatttccttggtgcgttccgttctgggttgccatgggtgcgccctggtcttgtgcacgtcggaagtgccttgttccctcgggcgtcttcctcctggtctcgcgcccgtcatcgtctggtcgccggaccaggggcaaccattgccgcgttttcccgggtcgccagggaccggtaccctgccgtgggtcctcccgacggctcggtccctgccccgtcttcagccttcccttctgcggcgcgggcgcgacgtgccctcctgcggacgccaccccagaggccctcgcggcgtactctggcgccctgtgcgtctcccggccaccgtggcgcgtgccccccggccgggctgcccgcgggcggctccctggcgacttggccggtgaaattccggaaacagagggcccccccgcatccccgcgacgcacgtgctctcagacacagttacacctgagggccacccagagggcttctggcttctgtttattgcggctgacacgacacctgcgacacccgcggtccttccacccagaccctcgaccccagaggcagccaggccggcaggccaagggtgcccaggcccaggccaccctcaccacgtgcttctctgagagcgcggagcccaggcgcgtcttctgctcccggggtcccgggcggggtgggcccatgtgcccccaccttcacccctaaggccggtccagcagggcgtggacgacagcagcgatgttgggggaggccccttcccggggccccctcctcttccaggatgtggtggggctggcacagtgactcctgggggaacggggccgggttagcttccccacggtgccacccatgcggcttccggcctgtggcagggggtcgggggcagacccgagcatcaccgtgcgctcggggctcggcgacaaatgagacgcaagaaagctgtcagcgataacagaagggaggtgacacggggggttgncggcgacggcctggttcgacgatatccaaaacgcgggnccggtaccagccg

SEQ ID NO: 447170 - DNA, 544 bp, Homo Sapiens
cagcccaaactcatgttctcaactttattccccatcccagtggtggctcttctgtacagtggagaaagaagggggaccccaccagggctatggagagacagtagaggcaggactgaaccgtcagcaaagattaaaaggatgacctgaggctggcaaccacaaaaccaagaagccagcgggggctgccccttccaagtctcaccaatgacccagagcaggttccagagcccaaaggcccaaaagtgcaattcccaaaagccaaggtctgggagccatcaaggagctcccagagatccagcgacgctcagagggcaagggtgtctttgatgagcctgcgcatggtggtggtgactgaggtgcccagggcatcagtgatctggaaggagatcttgtacaggtagggctgcacgtcccgcaagcctgtgtcaaacacgttatccacctccgactgtgtgggcatcttgggcaagtactcatgccgattcatcacctccacgatgttgatgatcttctcccagagtttctcacccaccttctcccggca

SEQ ID NO: 447171 - DNA, 1038 bp, Homo Sapiens
cgtgtcccgtattcctaacacttcttggagcggttccagtctctgtaccttgtgctacatcgtccattcgtcagatatgacatggggtttcgccagttgatcgactttcttgtgagattacagtcaaatctttgtctaaagggactagtcgccgacgcgatatttgaagcttcgtgtgtgttctatggagtcttagtatctctatgtatgctctgcttggagtgtgttattctctgtagttgctacttagtctagtgcgactgttgtagggctgggtagggatatcgttgttggacggtgggaatgttgtcaggtatcatccgagttgttgtaggttttcaaaaggttattaggtgtaggactagacgatgtgacagtttggaattatgcatgctatagtatcagatgtgcattgcactataatagataaggatagggctctgtggaacatgtctgcttgcgtatgtgaataatggagagtgctcttatctggtcaaggtttgtctggaagatagagggatctgttgagttcgggttgtgttattgaacgtagaagtcatattgttaatctagcgatcagataagaagcagagaataattattttatgttataactacaccgatgtattaaaagacccattatgcaaaagattcaaggtacatcatgcagttcgacaagctattgaacaaaatctggattccattatattggtctttccttgaggagattccagattatcaacctgaattccatgcactctgtttgcgaagaggaatgtgttaaatctcactgcatcattgaactggccagttcagaaagaatcggataggatgcctcttcgtcataaagttgtcaagtagcacttggatccataaactgctgtacattaaatttatttaaatacttcaattagcaaaggagtaactttctcaatttaaaaagttctatggcaaatttaagttttccataaaggtgttataatttgtttattcatatttgtaaatgattatattctatcacaattacatttttttagg

SEQ ID NO: 447172 - DNA, 1045 bp, Homo Sapiens
gtcagaatgaaaaattttatcatcactcctgttcaccccgcagagtctgcggagtgctaaagggcacaccaataaggatccgagggagggggtctacatctgctttttcagcccccaaagccatatattggggtggcccaatataaagctactcattagtttggttcctgagcagacctgctaataaacctcaaaaacacaaaagtctacttcactagccagaaatgaaagcaggatctagatctgagtgggaagggcagagggcagcatggggtggtaggtggtgccgacacaggcctgtgtgtgcccctgcagtgtgcatgctcggctggctgtgcggaagctgtacatcaggacccggccatcggcgctgcccgtcaccagcaagtcaccgcctggggagcactcgcagcccactgagtagccctccaccttgtgcccttcatagcgccgccgtctgctcatccggtagggccacacagtggagaaaagggccaggtagttgccattggtctgtgccaggaacacgggctctctcgggtgcaaggcgaggctggggcaggtgaacctctcgtggaaaatctggttggagattttggcagaggtccggaaatcccaggcaataatggtgcggtcagctgagtcccgggtggaagcgtctgtgctgctcaggaactcggagccttcccggaggaacaggatgtccaaggtctgctggatggtcgccttgtagcttctcatcaccttgccagtccttatatcccaagctttcatttcagagctgaagcctccacataaaaagatgttgtggtcttttggatggaatttcaaggtagtgattctaaagtcacttcgaccactaaatagctgggttcctgtttcaaggtctgttaggtgcagcgcgaagtcaaagccaccactgaggatgcgccggccacagggagcccaccgggcggcccgcactgcctctgtgtgcagggagtaggtctgcaggcagtgcccggagtccacggcgttccataccacacgcaccggaagcgctcgg

SEQ ID NO: 447173 - DNA, 786 bp, Homo Sapiens
gctgaaatcacttaacaaacagcaaaacacacatttattggggatcgccggctgcccgccagcgctttcactagtgtagtcctcacactcctgaggcaaacagacttttctccccactttacagatgaggaaactgaggctcagaaggtggtacccaggacccacagccaacctctgtgctcgttcctctcatctacccttgaggaagaggggagtccaagagcccagctggcatcgggaaggttcagtgacaaaaagctcagtgccagatcttcatgtcccctccccaggggcaggtggcgaggacggagggcagcacggggctgtgtaggtggtgccgacacaggcctgtgtgtgcccctagcagtgtgcatgctcggctggctgtgcggaagctgtacatcagtgacccggccattacggtcgctgcccgtacaccagacaagtcaccgcactggtggagcactcgcagcaccactgagtagccctccacgtggaaaatctaggttggagatatatcggacagaggtaccggaaatcccaggcgagtaaatggtgcggctcagcataaggtcccgtgcatggaagcgtctgtgctgctcaggaactcggagccttcccggaggaacaaggatgtccaaggtctgctggatggtcggcttgtagcttctcatcacctatgccagatccttatatcccaagcattacatttcagagctgaaggcctcacagagtagtaaagatgttgtgggcataaaggatggaattttcaaggtagtagattct

SEQ ID NO: 447174 - DNA, 460 bp, Homo Sapiens
  misc_feature (52)..(52): n is a, c, g, or t
  misc_feature (344)..(344): n is a, c, g, or t
  misc_feature (409)..(409): n is a, c, g, or t
  misc_feature (419)..(419): n is a, c, g, or t
gttagaatgaaaaattttatcatcactcctgttcaccccgcagagtctgggnagttgctaaagggcacaccaataaggatccgagggagggggtctacatctgctttttcagcccccaaagccatatattggggtggcccaatataaagctactcattagtttggttcctgagcagacctgctaataaacctcaaaaacacaaaagtctacttcactagccagaaatgaaagcaggatctagatctgagtgggaagggcagagggcagcatgggttgactctagttggaattgtgccagtcttctctggaggccgactcactcgtgggagtggggaaaggggtngccagggcccagttctagaaaccccagggcctatgggaagtgatgccagggggaagggaagcagntaagctggtngctagttcccgggaggcaccaacctccaaattcacctaggc

SEQ ID NO: 447175 - DNA, 565 bp, Homo Sapiens
cttctttgcctctgtcattaaaaggcacttaatttatttaaaatttaatttgtatttagtataatggtatagatccaccttaacctggataaatgggaactatctactgcacggaagaatctttttggcagtattcccacttgaggcaattattccaccgtatttttgcggtaacctacttggctgtgtcagctccgctggttattaaggtgttaatcaaaagctcatgaccgtatcttgcagccacatggagaggagtgttgccgtccttatccacacagtcaatttcacctccattctgaatgagggtctgtgaccgtgtgaaccttccatggacagctgtcatgtgcagtggacttttgccatctttactctgaatgttaacatctgccccgttgtttactaacaattcaagacacaaagcaccatgagtggaggcagcagcaaaatgcaaaggggtgaacccattattgtttggctggttcacgttagcaccgtagtcaatcaactcgttaaccacagcatcctgtccattgtagcaggcgatgtgaagcgctgtatttcc

SEQ ID NO: 447176 - DNA, 692 bp, Homo Sapiens
cggcagccagaagacgcggtcccgcaggtgctgcgccagcgagaggcggtacagcgcctccgcccgcaggctgtgcatctcccgggccaccttctggcagtgcgccagctcacggcgcagctcggccttgcgggcgggcgcggcgctgtgcggcaggtgggcctcgggcggctggggcgcctcggagggcggggccggcacgcctagctgggggcagcccttggcctggaagagctgcagcaccaggtccagcacgcgcccgttgacgcgccaggcgcagttgcccagttgggtgagggcgtccagtgcgccatgcagcgcggtgggcgggcaggtttccagcagctcctggtgctgcgtggcgccttccaccgtgcgcatcagcttggtggggctgagcaggaaagcaccagagtgcggcgatgtccagggcagcggggggcaaagcatgggtacatccaccgcctcgaaggtcagcgtgggctccgcggccttctccagcagctgcacgtaggccggtgcggcttcaggatgccgatctggtggacgttgcggaaggaatacacgtggtagaggcacgggacaagcccgagaggacgatgcgggttggtccagccgcatggatctgcagaagctgcaccaacatcttcgcagcgcatgcgcaagtccatctgcactggcaggggccaggc

SEQ ID NO: 447177 - DNA, 882 bp, Homo Sapiens
acaactgaagagaaagttcctatttattctcaaatgccctgactaaactgctcaaaagcagtttatattttcaaaccaatgtcatgtgcctcaacataaagttcaaattcatttactgtccatgacacttaagcatccagatcaataaattacaatacacatattctgtaagagtcttttataccaagaagcttgtttttggtcttcggcagtgacatttcctccccattcaccacacaaacgcagcccgctctcgtaacatgcggacaccaaagcgctgccactctcgctgataaatccacagttcctgtgttgtatccaaacaagccaacactgcccctcctttccatgcaatcagccgggggtccatgtccttaggccttgtgatcacatccacattttcaataattcgcctgaaggatggtggcattttgttgagaattctgtgctgcagaaattcttgagctttatgaaacatcaaaccacctcccaccactaggatggagctgtacatcgttctttttggtgtcgtcgagatgaacagcagtctatgctatggaggatggctttatccaggcccagggctttcccttcaatacagcgagatggcagtcttcctggacatcagtgcagtgagggcctcctcggaatcgttgcctgccatcaggccatcatccctgtgcagaccccaaatctacctcctgggaatggagtcttatctggaagatcagatggactggtccacgaagatccccttcaaatccaataggtttggatgcagactttcggtcagcagtagcttttgcagactgatcttgttagctctgtgtggccagcaggtatgttcatcgtgaggatcctcaggatcgcctgaagatccgt

SEQ ID NO: 447178 - DNA, 478 bp, Homo Sapiens
caatcctggaatatatttttttaattggttgatttgcttcgttcaaagcgcttagaatggaagatttagtttgaggaggggcaggtttgggggtaggctcagcgggcatagtggccacaagaagatgcccatctcacacctggagacgtccatgagcacctcgaagctggccgtgtggctgcactggcgtacgacatgggtccggttcctggacaggagcttgaagccccgggcagaccaccctcccgtcccactgacactgcgtagagaagggagaagaggcaggggtgagacggttccctccgcccatgtctgttgggggcagtctttgcccggccctggggactcccaggccatcctggccaaaccaaacagcaggtatagtgagtgctgaaagcccggcgccctcgcagtttgctccccaccgtgttcctcaccggccccctgcaccgaacagccacccagctgcaaaagcagc

SEQ ID NO: 447179 - DNA, 553 bp, Homo Sapiens
aaaaagaaactagtttctactaatacattttaatggatatttatgtatatacacacacatagagacaaacacatatatacacatactcagagcagggaccgagccagctgttgctctccttcttttcagttctgtcatacttgctgggagattctattccacttacaaattaagcctgagtctagggccaaacaagagaacactagagtgggtttcctaaagcattagttcatacatcgctccaaagttgttaggctctaagcactgatgaggtacaagctagctggcattagagtccagatgttactattaagcgttcttttaaatgaacacggaggaatgcttccattcagacggccccagtaagtacacccttgcttccagcttcttcttcagaacataaatataaggcaccttgcagtgaatttgcttctgggggtggtgcccctgaactctcctggattagtctttctgaaggttctggagaattctccctccatcttggacttgagtgctgttgggggacgtcccatattgaaggacatggagaagg

SEQ ID NO: 447180 - DNA, 557 bp, Homo Sapiens
ttttttttagttcaatatgattttatttaaaaatgtgtacagctgaaaggagggatctgatcttttgttaaatgaaaccaattttcacggtatatatttggccattttagcttcgtagtgaataataacagaaaaggaagtttctgttcaagatcctcactccagcacactcagccaggtgcctggcaagatgacacatttcctggtctgaagctcacagccaatcctctcactgaagtgaaacaccaattctccaggcatacacacacatacgcacatcttattttcactgctctacacaggggcctgagaatccttaattttaaagttgggaaaaacgtgaaaggattccttaactcattgtctgcgacaaatccaactacctgttaactcttaacaattgcaagtataaaatacttgaaatttacaagatgctccatttaatggaacaactcaaatgctaaaaaattaggtcaaataacatgctttaatatttttaaatgttacttaaaacttattgagacaagatacgcagcacattcttggtattataaact

SEQ ID NO: 447181 - DNA, 854 bp, Homo Sapiens
tgcaaaataaaatgtttttttaatggactgaaaaagcaaagtgagtcaccttcgtttttaaaggtgagatttagcaaaggaaggattagaagcagttttttactatttacaaaatgtcatttagagtggaggtggccaccttcagtagctgaggcaatgtctttcacgtgagatggccacagaagtgtggttcctggaactggctcacaaaggccacaggctgtcctgggtgagggagagttcctctgagggagcaccaaaaaggctcagtcttctgtttcttcatacgtcgtctcgtcaaagggcctgtccagtaagaggtaccaaccgatgacgggaatacttcagctgcaataggtccccaacttcatctatctcctttaaagcagtatcaagtatttctttggtatgagctgctgacaggcaaaacctggctctggactcaataattggggtggcaggaaatccaaccacaacgacaccgatgttccgcttcagcgatctcccgtccaaaggcgccaattttggcaggcatgtagagcatcaagggcactactggagagtcttcatttccatagatgatgaagcccatctctttcaggcgtctcctgaaatacctggtgttttcagctaactgttgtacacactctttaccaaggctggtgccatcctgccccatgatgcacttcatggaggtgatgatctgctccactacaggaggtgacaatgacgtggcatacactgcactatgagaatgtgttcgcaggtagtctatcagctccttcttgcctccaatatatcctccagaagcaccaaaactctttgtgaacgttcccatcataacatccacatcc

SEQ ID NO: 447182 - DNA, 539 bp, Homo Sapiens
  misc_feature (94)..(110): n is a, c, g, or t
gggtttttgtttggttttattttaacatgaagggtagtattaagtctaagcaagaacactgggcctgcaccaaaataaacaaacacacagtgannnnnnnnnnnnnnnnncttagcacagaggcagccagtattacacagcccctctctgtgttgtcgaccctagcttgctgcttctggctgtgccaaatgctaagcaggggtttcactcagggcagcccgggaggcacggtctgagagtggaagctcctgggagcctgagctctctctgcctctcgttagctgtggctttggccatcaactggaactatgtcattatttataaaacaggagcaatcacagggctgtggtgagaatcacgtgaggtgacacatgtgaaatggtcctttcccctaagacatatataattgtgacaaggaacaaaatttacatagaaaataattacagaacaacgtaggaccatgtcttcatttctccctggagcggatgtaaaataaggtgattgatttgagcaagcatgttatgaatatttagaaatgt

SEQ ID NO: 447183 - DNA, 613 bp, Homo Sapiens
ggggggagacttaactggtttaattgcttagccctggtgcctcagccacctctcatctgtagggtgagactcaagtccaggcaccaagacacaccagcacccccaacaccatgcggggatcattggcctgaaacttggccagagaaagctccagtcctgggcctgtaagagtgggcgctgggagtgtctgaagccggcacggtgtcccctgcgttgtcggcccttgcaggtgaagtgtgtgtcgttcccccactttcccccgaatggcacccacggcctcctgctggagcccctcccgggcccccctcagggagcagaactctgcgtgtgtgcgaggttcagcctggccagcctggagctccagctcaccctggggtgtggatggatgtagaagtgggtggggatgggggagcatcacaggggccaggaccccccaggtgcacaggggaggccagagaaagaggccccagccccagggagttctgtggcctcaagagaaggtggacaaggggctggcaccaccaagcagcaggtttggctgagattagtcttggtgtgggctgaggccttgggtactgtttggcctaaggatgggcgttgtgcctccagaccc

SEQ ID NO: 447184 - DNA, 1208 bp, Homo Sapiens
  misc_feature (237)..(245): n is a, c, g, or t
  misc_feature (1083)..(1089): n is a, c, g, or t
  misc_feature (1104)..(1104): n is a, c, g, or t
  misc_feature (1110)..(1110): n is a, c, g, or t
  misc_feature (1162)..(1162): n is a, c, g, or t
  misc_feature (1164)..(1164): n is a, c, g, or t
cgggtatcctctccttcttcctaagagtgcaacttagaagtcagagccaaatcctagaatgtatccctaaatgccatttctattttttataaacatgaaaaggttgtgctttggaaattcagtctgtttgagaactggcagtctggctggcactgtttaaaaatgtttatttgccctgcatttaaaaactgaaggtttcctatgtattaaaagccatatttccaccttcttaagggnnnnnnnnntcggacgtcataacactgggtggatgtttttatggtaacagtggtctgaggcccttggcggatgctcaccgagccactgtcactatcctgcctgcctttatctgccttgccctgcgattatttggctttgtaagcataagctacgtaagacataccacacctaagaaactaaacagcaatgaaaacccatacttctgaaaagggtgtcttttaaaaattaagtttgatcttttgggaaataaagcacatagttttcaaaatgatttaccgaagatctatgctctttcaaatggagactgggatattgttgttttgagaccactgttttcctgtttcctcccaaatgttagtcacatatatgattacccttaagttggtcactatctatctatctgtcaataatttaggattaaagtttgaagtgtaattacatttgacttttacaggcatctcagggtggacttcttatgaatacactgaacctatacaaatgatcttagaaaacgtttaatatcagatttctttattttttccaacacaactgaatcagttttcttaaataaaagtttattgtctactgtttacactcatgttgctgctgtgagtacaacaacagacacaaattcctagcatgaatatattcattgttcacccccactgaactacagacattgcttgagaattagatctttgctttagggatttaaacagaaaagaatcggggcccagaatcttgaaagaatattctcaagtgactggttggagttagaaggcatagccaatacaggcaaacagcacgatgatgctgtcactggggaagagaggaggaggagaaggnnnnnnnggaagaggaagatgnggaggngaaggaggaggccttagaagcagttgtggcagaaataactggagacttgatntntcccatgtgggctaagtggctgccttgagaagggacaaataaaa

SEQ ID NO: 447185 - DNA, 729 bp, Homo Sapiens
  misc_feature (640)..(665): n is a, c, g, or t
ttcttttttattgattgtattcaaatttttattttttgaacaaaaatttaagacaatgattttaaataataaaacatggtatatattctagacactggttttttttaaagatttattaaatttagactcctatagttctgttgtgatgctttcttcaacatttatattatttcttaccattttatcatcactccaagcttgctaaacaaagaatctctctgttaagtgaagttttacattaaggaaatactccactagcacactgaacaaacctacagaactgtcctagtttatatttacaaaacacaagaagtctgtccagccattttggttttgttgttacactgtccatactgagatcagcagagagctaagtaatacacaagattacgcttcggcagtgcaaaggatggcatcaaccaaacttcattaaacagaccaacaagtacaaacatggtgagcaaagttcaactcaggtaatagtgattaaaaacaaaacatgtagtgggtcacaaccagactggttttcactgtgcaactttcctcagggaataatacccattcacagaaagaaaggaatatgcatccaagcctttgttcataaagaaaatgcccttcaaacaaattcatcataaggctnnnnnnnnnnnnnnnnnnnnnnnnnnggatgaagcagtttggcccagagaaaagcttaaatataatgtgtatacatacttatagatatcc

SEQ ID NO: 447186 - DNA, 760 bp, Homo Sapiens
  misc_feature (149)..(239): n is a, c, g, or t
  misc_feature (251)..(266): n is a, c, g, or t
  misc_feature (713)..(713): n is a, c, g, or t
ttaaccatggaaaaacatctggatttcatttggtagtttaaaggtttttgaaaatgttgatatacacaagctgtacttggagctggataacagacataggagctggatgacagacatacttttattcttttatttttgagatggagttnnnnnnnnnnnnnnnnnnnnnnnnnnnnnnnnnnnnnnnnnnnnnnnnnnnnnnnnnnnnnnnnnnnnnnnnnnnnnnnnnnnnnnnnnnnttcttttaattnnnnnnnnnnnnnnnngctttagtacttcctgtggagttcataaaaagttcttccctttgttttagtcatccagagtaaagtcatagggctcaaagtctttccggaagcggcgagccagggtctcctcgtcttccttgctgatctgacactgcctccagtcagacttatcaggaacattaaggatggcttcactggccaggacctcccttccaaactgcaaaggaaaattctttttaattctgtggaaaagcttttctcctgtgtcaagttcaacataaaaatatgctgctcctggctgtgcaatctgcttgatgtcagagtgctctgggatttccaacagctctatctgctgctcctgtgcctgggtaatgaaggcatctttaatgtcatcagtagtagagcagctgattgggacaggaatgacctgtagctggaggtgatggctcttataatttctctcanaatacaacacaccatttccccctcgtgccgaattcgccacccaggcc

SEQ ID NO: 447187 - DNA, 501 bp, Homo Sapiens
ttttttttaaagaggatgctacaaatgtttattcattaaagccactcataacagcatagtacaaccctatttaaaaaagaaagacatattttacatgtatgtgtagaaaataatcaggaagaatgtacaccatattaacaggagattattcctaaggtgaagaattatgagtggttcttatttccttatctacttaagttttttctctccaatgggcaggcattgcttgtaccataccttaagcaagggagtgcatgtttgggacagcagtttgggctctcagcctccttaagagagtcaggtctgcctcatccctgtatctgctagttgagcggaggccagggctgtgtgaggggctctccaacaattgtctttacaaagtataaaaagtcatcagtgatcccaggaacatgtttgtatctcaaattcagagattcaagagggccttagtttaacctcactgatgctcaaattctatttgtaaaggggtagcctgtcctc

SEQ ID NO: 447188 - DNA, 1322 bp, Homo Sapiens
tggactaaacggcgggcgagcaacaacgggaccccccgggcgaccccgccaggaggcgccccgaccctcccggccgaccagaaccgagccaggaacaccgcttcccccagctctacaaccagccccagggaccaacggtcaatcccagagaagtcaccagccctagggaataaagacaagaggaaacttggtcttgaactacccggcagccttgcaaaatgtctgcatctgacaattccccgcctctgcgggacttccgggcacagggccgctcccagccccggccctcggcccctcacaagacctgcagctgcgctcatgcccgtccagctggaccttgagcttgtggagctcctcgatctcgcggttgtggcgctccgttttgtggcgcaccagggagcggtagaagtggatggtgaagaccacgaagatgaggcccacgggcaccatgatgatggtggacaccagggcggcctgccagcccgtgtgactcccagggccaggtggggggccaggctggcgccgggcatccacggggaggaacttgatccagcagagcagcaccacctcggccaggaagagtaggatgccaagcacggtggagaagccccaggccagctcgatgtaggggtgcatgcgctcatgcggggactcgctgatggagttcaggttgtggatgttgctcacggcctccacattgggcaggatgcaggtgctgatgaggagggcgaacaggtgcacggccaccagcaccgtggtgcaggcgctgaaggcaatcagcagcggccgcgggtactggtactgcgtctccagctgcacctccaccatggccaccatggcaaagccggagaggagggcggaggtcctgctggaggccttcagcttggccctgctcaggtagagcttccgccacgacagggcctgtaccgagtggtggttagaggtgaccagttccaggtagctgcggcggacccagtcccggtaatccatgcccttatggccgggctcagggcaggcaggagcagaggggtcgataggcacgttaagctcagcactcatggtgggagccaggcaggtcatttatacgaatgccaactcaggctctccatcccatctccttgcgcacatccgcagccagcagcaccgcatccaagcacttccatccctgggacgttccttcccggagctgccctcgccccgcccggctcggctcccgctcggactgcgtggccgcgtggcctgtggcccagtggcccggccggggcgccgagcgcggcctcgtgccgaattcaacaccaggcctcgtacctagccgtaagtcc

SEQ ID NO: 447189 - DNA, 439 bp, Homo Sapiens
gggtgaaatgagttactaaatgtagcatttatttataaggaatgcattgtgaatagtttctcagttttcattatggaaagatgatgatttcagcccacattcagtgtatgtttctaaataacacaatcgacaggactgtctgttcagtacaatggaggacagctttttcagggcaaatgggatttcttgataatgctaaatctgtcttgtcagctgaatttcttgggctttatgtggcagtgtggtaaaaatatatgatcagatttcactgttaagaaaattctttcagcaatacatgtagagtcaagtttcttgcatggataactgaacatgtgggttatgagattttaaaaaatgtctcgtgacaaactttacggaaatgcaacaatctgggacatctagttttgtctgagagtggcgtggatatgaagaactgtgc

SEQ ID NO: 447190 - DNA, 428 bp, Homo Sapiens
  misc_feature (369)..(369): n is a, c, g, or t
  misc_feature (393)..(393): n is a, c, g, or t
  misc_feature (405)..(405): n is a, c, g, or t
  misc_feature (413)..(413): n is a, c, g, or t
gagttactaaatgtagcatttatttataaggaatgcattgtgaatagtttctcagttttcattatggaaagatgatgatttcagcccacattcagtgtatgtttctaaataacacaatcgacaggactgtctgttcagtacaatggaggacagctttttcagggcaaatgggatttcttggataatggctaaatctggtcttgtcaggctggaatttcttggggctttcatgtgggcagtgtgggtaaaaatatatggatccaggatttcactgttaggaaaattctttcagcaatacatgtagagtcaagtttcttggcatgggataactggaacatgtggggttatggagggtttttaaaaaatgtnctcgtggaccaaactttacggggnaatggcaaccantctggggncatctagttttgtcc

SEQ ID NO: 447191 - DNA, 1118 bp, Homo Sapiens
  misc_feature (1079)..(1079): n is a, c, g, or t
  misc_feature (1091)..(1091): n is a, c, g, or t
ttttttttactttattgcaatgtctttattgcattactggagcaagttggccagactgtcccctcttggggaaggtattaaacaaaaagaccaataagtatctcctctcgcctttccccctaccctccccaacaattgcacagcaatgtctgaacacatctggtgacaagaacaatttgtaaagtggtctagcaactacattatgaactgtcccatcacaagacatacagttggctttcttgtgagtcagatatttttacgtaaactacacgaattttcttggacacatcaaagacaacagaatagatttttcacaagtaacggcaccaaagtcacatgctggaatttgtaaggaaacgaggttgtttgccacaagtggctggagctaaagcaggtttgagcagttggcagcagagggcccaagcaggccccctatctggaccctctggtttctgaggccactgaagcctcacagaggcctactctgggttgttaaatagcagcagagaccaccttagaaaacaggaattgcccaggtgcaattctcagtttaagagaacacatggggctgattacttgtagcaaaaaagagacccgtggaagacacattggctctcaaagcttcttcaaagcacatgaggcctaaataagtggaggtcccatcaaggcttggagagggagtgaaagtgttgggagggcctcattcttggccagatcagtggtaaggacgcaggcagtctatccaggcccgaatcatggcgtgccatctaaggccaggtggagacaacactgttctgtgatgaaagcttcacctggaaacaatgggcctagtacctgtgtccagccagccccaagctgcttgcatgtcagtagctgggttctctagccaggggtataatgaacccctctgatcttggtctctctttgccctctgcctcattgaaactgcagttaagatgccaagacagtcccagggtccagatcatgggacagggacatggcactagactctcatgaaggaggccaagacctgctcccaagtcatgggcgtagagaagcaccttgctaccctctccccntctacacaccanggcccagtgggtagtagactggtccct

SEQ ID NO: 447192 - DNA, 741 bp, Homo Sapiens
ctggaggaaggatggcccctgccagatggcctgggcacaaagtcgggagatgcctggttgatgaggcaggcttgcatcccacgagccctggccaagggctatttgaaccaggatcctctagaagtgactctggcttcctcaggggccccaacgggacagtggaagcagcccactgaggaatggtcactgctggccttgagcagctgcagtgacctgggaatatctgactggagctttgcccatgaccttgcccctctaggctgtgtggcagccccaggtggtctcctgggcagctttaactcagacctggtcaccctgcccctcatctctagcctgcagtcaagtgagtgactcgggctgagaggctgcttttgattttagccatgcctgctcctctgcctggaccaggaggagggcccctggggcagaagttaggcacgaggcagtctgggcacttttctgcaagtccactggggctggccccagccaggccctgcagggctggtcagggtgtctggggcaggaggaggccaactcactgaactagtgcagggtatgtgggtggcactgacctgttctgttgactggggccctgcagactctggcagagctgagaagggcagggaccttctccctcctaggaactctttcctgtatcataaaggattatttgctcaggggaaccatggggctttctggagttgtggtgaggccaccaggccgaagtcagctcagacccag

SEQ ID NO: 447193 - DNA, 1141 bp, Homo Sapiens
  misc_feature (741)..(741): n is a, c, g, or t
ccagatccataatgatttttaaatcgaacacaaacacactggcaacttatggaaaaaaaataagaaatgttacaatattacaaccagatggtttgccaaaatgcggaacaaattaaaaaagaaagaaagcatgaaaaagagcactgaggaacgaagagctgagaaccatgggcagcgaacatgttgacaaacagcacactatgagcgggcgttgattccacttggtacctgtcagcagtctgtatgctgggctgaagcacaggtaagaattcctgctgcagtaaccccatgggagggctagaaggcctttaaaaaacagcaaacagcagcattcaaacacccacaccgactcaccctgcactgcaaaaacaacactccagagaaaatacacaagactagaagcagactaaacagaaactcattaacctcaacaagcccctggccgtggctgggtgtttaaggagactggggagaagctagccagccctcactgcacccgctgctgctggtgcgtgtccagaggcgtctcagttcctggtcccagagctcagcccccttttgaggtggtataaaaagcgaccagtgaggaagaggatgatggaatgcagctgaatggcaatagggagtagggccagcctttgagaagacacattttcaaagccagcctctttactttccactcttctcacggtacacaagtcccagcattcagcctggtgatgtctggtacccatccttttnaacaggactgaagcccccaccggagaggcccttccaagaggactaaatggtctggcaatgtttttgattaaaaaaaagggtgagtttcaatttcaaaaacgtattgagaacagatgggggaaaataagagtccgggacccatggctgtgcagaattctgtaacaacaaagatttagtgtattagctggtgatcacctcatagaacattattatccaccctattcagagtataagtaggacattgttttccattttaatccactctaatacaactaagatactgcatttatcagcacagaaacatttctctattttaaaatacttaagagcaaaaggtctgtataacagattaagagcttctccctcctttgagtgaagcaccgggtgccctcagtgttgg

SEQ ID NO: 447194 - DNA, 1663 bp, Homo Sapiens
  misc_feature (944)..(972): n is a, c, g, or t
atttggtggagaaatcccaagccattagttcagggcccggggattttcctggggaaagcaagctatggcccatgtttccctttacctactggggccggcggcggcaaacgaaattggttttagaaagctttttcggggggccagggcgggccgacaaaaggagaggaactgggtgatggttttcggcggaaggttgggtgggtgtttttggcattttgtgatcaaatttattttttgtttaaatttcatttactttgttttactgtaatttacacaagagactggcaagtaaactaggtattttacattcaccacacattccctcaaatctccacagttgttagaaaaacattaaaatccatgcgccgggctctcatttccatgtgcgcctaagctcccaatgatactacagatgccagcgagagttaagttcattaaaaggagagggctagactctttatttcacaaaattagcaataatcttcctcgcaccaaacactttgcagacaatgattatgctctgacaaaacctatcttacaacagtgcccagagagtaaacatcagtctttatcctgagtacacaaaggatgtatgaaatgtgggttttgttgctgaggataacagggtattgcaatgcagtagtgatcctacacatccttccttgtctgattcactgaaatcactccagtgggggagggatgcaggacatgtgggaaaacgaggagcaggcagggcaggactgtcagcaaatcagattactaatgtgatttgactgcaggggttggcgtgttttaggagggacaggaggttacaaaagacagtttgtgacctgaaggcttcaacaatataattctattcaagcttccaggactgacagaggaaaaactggattcagacagagaaagctgataaaaatcttacctagctattgttccttcctttnnnnnnnnnnnnnnnnnnnnnnnnnnnnngtggcagccgtttctgaccagcactctcatgatgcctattcagaatctgtcctgatgacgtcctacttgagagcacatcccacagtcagatgtccaccagtctcttggcggggcctcctcaccgcacgcaggccagactcacactgcatcttaaactgttcctatctcaaagtcactatctcctccttgaagtgtgtgttcccacaagaagagcaaaatgtcatcactaactatatcctatcatgtgagctctgaggaatctagaccatttgcatagtttccaagctgtagttacagaaaactgtcatcttcaaaacaagactccatgaagtgctatatttccaacttttctacacagcctacaatcctattaagactaatttcttcatcaatgtgtttgtctaacaggagcctgaaaactgtctagtatttattataaatcagaaaccgtcatctccatttttgctaggtttgatgtagaaaaatatttgaaatttaaaatacaaaaatccaataaaaaccagaaattttttttaaaaggatttttccctcagggcaaacaagtaaaaactggcctgtaactttgctccttactttatattgtcaaatttggctacaagataatgaccatccagaaataaatagttataaatacattcagagatgcagggaattccggaccggtccagcc

SEQ ID NO: 447195 - DNA, 960 bp, Homo Sapiens
  misc_feature (327)..(335): n is a, c, g, or t
  misc_feature (525)..(582): n is a, c, g, or t
ggcatatgtctgtagctgtatataaagcgcatgtagagctacagatccagatacacacacttgtgtatatatgtacatacagacatactgaagggattagtacaatttctccaaagtactgtacctatcttcagcaagaatgcaaaagaaaatattttcaatatatatacctggaacagattttaataattatcagagtaataccattaatggacaaattgactgcaatgtaatactagctggtatgtttcataaatgtcaagctgtggaccaacatatatagccttttattatttttctcttcttttaagtcagtctgttataaannnnnnnnnagtcccataagcagtagactcccacagaaaatttcttcaaaattttttggtgttccaatgaatctgggatgtaaactctgaatgtatttataactatttatttctggatggtcattatcttgtagccaaatttgacaatataaagtaaggagcaaagttacaggccagtttttacttgtttgccctgagnnnnnnnnnnnnnnnnnnnnnnnnnnnnnnnnnnnnnnnnnnnnnnnnnnnnnnnnnncaaatatttttctacatcaaacctagcaaaaatggagatgacggtttctgatttataataaatactagacagttttcaggctcctgttagacaaacacattgatgaagaaattagtcttaataggattgtaggctgtgtagaaaagttggaaatatagcacttcatggagtcttgttttgaagatgacagttttctgtaactacagcttggaaactatgcaaatggtctagattcctcagagctcacatgataggatatagttagtgatgacattttgctcttcttgtggggaacacacacttcaagggaggagatagtgacttttgagataggaaacagtttaagatgcaagtgttgagtctgggccctgcttgcgg

SEQ ID NO: 447196 - DNA, 495 bp, Homo Sapiens
atcggaaaatgaaaatttttttattaatttacgtggatttcctatacctaacaatccttaaaacaactatcaacagctgcgacacaaaccacaggcaaaatgaaagagagatgccccagacaggagcgcgccagattgcacacacttaataaggaacaaaatcctacagggtgctgacataactcgctttaagcatgcaatgattcctgcagtgctccctggcaatcaacctctctgcaccctggggctggatactttaaagtctttgttctcttaacaggtttgaagtcaacatggcaagttaaggacaagttagatgagatccccctagttcataacgtgagttcctcttgctctccaatgttcatccacaagtacagggtccaatcccctataagagatggcttaagcatcccaatggggaaacagcctgccagccacatgggcagattctatatatttccaagtcccgcagccacaagactgaaagccata

SEQ ID NO: 447197 - DNA, 701 bp, Homo Sapiens
catcttgtaataaatttattgtattttgttacattttccacttttctcttaattccaactgtatactatataatcaacgctgtttcagaaataaaacgtttcaaacgtaaaaatataaattctgcttcttaaaagtgcatacactttgaataataaaacatacaaataaataacagaaatcagtgacacatctcatgcacttgttctaaaataaatttaaaatgtacgatacacttttcttccagcctctagggaaagacatcctgccttccatattactgtacaactgaaaatgaaaacggacacagaaatcactatccacggtgcatggggtaataccaaaggcactttggtgtacagtgatgtgacatgcagctttcaagacaactacagaaattccagtgtaaaaactgaagagttcaatcaagaaacgacttatgtcaatgaggcttaaattcaattttaaccagtggtgagaggcacagttggtgagcagacctctatggaatgcaaacacgtatttgaaaggcctacaaagagaactccaacttcggaaatactgtaactgcttttgcatttggtatgacaccagaccgtttataatagcacctaggcaatttcatattgcatcaggacgactgcaacagatatcattatgctgcatggcctttctaaagaaacatttcaacttgcatgtctcg

SEQ ID NO: 447198 - DNA, 641 bp, Homo Sapiens
tacgttcagtccgactgagtgcagcgctatgcatatgtaaacatattcgttaaagccgatcacctttaaggtcattcggaaaaaagcggtccttgttttcgcggtgtgggtgtgggtcgtaacagcagtctcattcccccgggaggaaggctcttgggcgttggagagtcccactcgggttgtgccacaggacaatgtgggcagggcgtgagcggctcggcgggcgcggcccgggcgttacctcctgccgatctcgctctgccgcaggaactggatgttgttggcgctgtcggccagctcggggtactgctccaccgagagtacgtagtacccgtcgtagccctgcaccttgccggcgctcagcagctgccgcttctcgccctccgtccagaggcgcgcgccctcctcgccgtcgcgcacgcgctgctgctcgcgcgcccaggcccgggcgagcgcgcgctgccgcgcctgctccaggatgcgcgccttctcctcgtccagggtcatgccgtagcgcacgtgcagcgccagcgcgccgaactgcatctccacgtccgcgaacctgcgcgtcctgccgttcaccaccgtggtggactgcgacaccgtcacgttgatgccgttctccagcgccatgcggccgc

SEQ ID NO: 447199 - DNA, 456 bp, Homo Sapiens
tttgagcttgttacatctctgtcattttacacattgagatcaaaatccaaacaccaggaggccctctggtaaaagagtgctggctgcctacccaacattctcccctaatgtcttagtgtcagaacccctttgttattagggatagtcacgtacccagcaaataagccacatttcccagcctccattccaggtaggggtgggtggttagtgagatggaagcaaaagtcattgggtggagcttttgggaaagctttttaaaagcgccctttgctcttcttccctttcctccattttcccttccctaaacacaaaataggcagctagagctccagtaaccatcttgtagcaaacctaacattggaagccatttgtcaaggttggcagggcagagatacagcctctgagtatctgatgacctgtcctgccagtcctggactccgaaacattatttttctt

SEQ ID NO: 447200 - DNA, 1430 bp, Homo Sapiens
  misc_feature (154)..(154): n is a, c, g, or t
agataaccaattgggggttatcccaccaccctttttatatcctgggtacaaaagggtggggaggtcaaaattacccaaaaggcttttccaggagagattttttggcgaatgccactttaagggaggggggggattcttttcaaaataatttgcntgaaaggaacactctcaaacatttgtttccaagttttagcaggaaatcttaattacattccatcacttggaaatatccaaacactttttcaattttgttttcaaaccttttcaggatcagcattcttcagatctatcttatttataactggatttaccgatagctgtgcttcgaaggcaagaaagaagtttgctacagtttgggcttgaattccctcatttgcatcaaccacaagtaaaacaccctggcaagcagaaagtgacctggatacttcataactaaaatcaacatggcccggtgtatcaatgagatttaaaaggtactgctttccttcacaattgtaaaagagagatgctgtctgtgctttaacagtgattcctctttctcgttccacttgcaatttatcaagaacctgcttattattctttgttttatcaattgtccctgtaagttctaggagcctgtcagctaaagtacttttgccatgatccacgtgtgcaacaatactgaaatttctaatattttcaacaggaaacctagacatgtcaggtttttccttgaattctgcggagctgtagagcctgtcggtagcccaggactctggagcagccccaagggtcggcgcggaccggggccccggggccaccagaagcgcggccccagtggctcgtggcgcgagagcgcgtgcgcacccccagccccgacccacgagggtccacatgacccgggcggcggaggcgtcaggagagggtacccacacgcaacagcagcatagcccgttttttttcgaaggtaccccccgtaggatccggtggacaggactcaaacagatcctgtgaagcgaagacaatgaaccccggggagctctgcccaagtaccagatccggaagcaacccgaagcggcggcgcagcttgccgacgtctgcacgccgcacgctgtcgtgacatcagcgcgtcttggcgccgggtagtggagtggtcactttgggaaagtcaggcaggaatgacttgtttctgtgatgtctgtggcctcaactgggatgactcgaccagctggggacttgaaaatcgggcatctctttctctctcatcttgtagtcacagtctctccatgtggtctccccatacagcctcttcagcatcacaatctcaggatgtcaaacttggcacaatttgactctgatttttaccaatctaattttactattgataaccaggagcagagtggtaatgactctaatgcctatggaaatctttatggatctagaaagctgaa

SEQ ID NO: 447201 - DNA, 406 bp, Homo Sapiens
acctactcacaaatgctcacacacatgcacacacccatacacctgttcacacgagtgttcacacacgcctcactcatatgctcacacacatgcacatgatcccacacctgctcacacacatgtacaccctcaggcgtgtgccctccacacctgctcacacacacacattctcacccaccccatgcacgtgggcccacattgattccttccgacacccccgggtgcccctacctgatggtaatcatgtccccacggtcgccctggatgtaccagctgcagttggtgcctggcgggtagttgaggggccaggccgggctgtagatgcccccacgccgctctgtgtgctgctccagcttcccactgcaggccgctaaggcaggaaccgcactgctgagtctcccggtga

SEQ ID NO: 447202 - DNA, 1091 bp, Homo Sapiens
  misc_feature (47)..(47): n is a, c, g, or t
  misc_feature (119)..(120): n is a, c, g, or t
  misc_feature (293)..(293): n is a, c, g, or t
gttttaccaagattcggatttagggggttaagtaagggggttaagcntgaataatttggagtgtaggcttttttaaggcccaaaccatttggggaggccttttcctgggattttggttnnccacaccagttcaaaaagtagagggtagggataaaaccccacattggggccaataatctcccaacaaatgatgggaattttctcttttgggttttgctagttgtttggccaacaaaatactgttcccgtgccaggtttcgcaatcccaggaaatttgttaaggggaattttcnatggatgaggaactagcacgactgtttcttcgctgagcgccgcttgcatcagctgactctgaatccttaaagtaggaagaggatttgggcccatcccagtcttcatcccagtcatcatcatcaccagttgctggtccttggtaggcctgggggtggccgaaggcagtgtcccagttgttgggagtgtttgtgtttctttgggctccagccccctctggctgggccccccagccttctgagctttcccagttcccagatttggaggcactccaggctgaccaggggtcattgccactgccaacctggtgattgttgctggcagccgacgaactggcctgagctgtgctggctgagagagaatcaaggaaggcttggtcagccactgaatttccacaagaaaattgatcttttccatcactgggtaaaatttcaacgtagtctgtgggaaccagccctcgttctcctttgatgtttcttccttccagccatcctccacctacatccggatttgtgattgtgatgatttctccttcattaaccgtcagttcattatttccaggttcagcagcaaaatcatacataacccgagccttggtggccatggcgggcgggtcccccggcccgggacggccggctcgtctcccgcgccgcggatggtgattctgagccgcgcaggcaaaggcaagggcgagggcggcggctccggctgggccccggcgcggcggccgctcctccgcctcggccccgagtctcgacgctcaggcccagccgctcctcgtgccgaattcgccacccagc

SEQ ID NO: 447203 - DNA, 163 bp, Homo Sapiens
agtattataaatgtgtttattacattaaaaatcatgtaaaatagcttaaaacaagtactaggaacagtctcaaatggtttaacaaatggtttaaggaggtcctcctttaccaacttatcaccagcagctctggaggtaaaatagccaggagcacaggggtagc

SEQ ID NO: 447204 - DNA, 642 bp, Homo Sapiens
atcttcttttattgcattttgggggcgaatagggggatattttaacccgggctccttgcctgttttcacagactctaagtcgtaaaactctgttacaaaggaaatgactgagaaaatgaattcgagtctttgaaatacaaccttacacaaaaatcactgtcttaaagcttcaagggcaggtggaaatataactatccccagttcttcttgttcaagggaattccccctcctttattccccatcccccaacttgagaacagggtgacacctgagctcactcgggcttagggagtctaaggggggaccacagtcatctcaagcagccctttcctagccttgggtccaggacagttgaggagaggcccagagattctaactacagttcagctggcaggagatgttttcagaaggctgtgttctcagcttgggcctgggggccaaagagctgctcagcaacggccttgccatcatacttgggcagcgtgcccccgaagtcagagggcaggatgttctcatcgatctcctggtagaaaccagaaaggtcatcctcgtggacaaagaccctctcagcagcttgctcttcaagaatggcttgaccacattgtacgtcgtggtgaagtaccatggctggtggatgaagtg

SEQ ID NO: 447205 - DNA, 1366 bp, Homo Sapiens
  misc_feature (37)..(37): n is a, c, g, or t
  misc_feature (1177)..(1266): n is a, c, g, or t
actggaatacccaaacaaacagaaaatactcccatantaccatcgaggttttaaaaaaaactccccaaaatacaagtcttcaataggaaaatgtcttttattgcgcgacatgaagcatccgttatttgcgtgctcaggaatagaagggcctccctttctcaggagtctgaagtctgttcagcctcgcaacctgagaaggggaggggggcacatcttgccggaaggccccttgggaggggcgtaactggggtcctggactttcttatacgagtcatagttgctgggcccctcggaaggaggctgcgttcttcatctgctgctccttccgcctctgttcctggcgaaggagctcctgagtttcccagcatgaccctggcgttgaagccatgtcctcccaggtagccgttcctggagccttggtagctggagtacctggggttctctttggcactctggaagccttccccaggggagtagttctgctcccaagagtcctgggagaccgagctggcatttttcctgctttgccgaggcagagagctgtactggcgctgggcctgctgggagctctcgcgctcctcctgccgctgccgctgcatctgcacctccacggacaccgagtgccgcccgctctgcgtcgccggccgtgcgttcggccagggttgctcaaaactataggtccgccgacgatcttctacatcttcatcttgctttgcttgctgaaattcttgcctcagacgctgtatccgatcatgattgctaggagttgatctgttactgtctacaggtgagggtttggaattccgcggcttcttgacttgggcatacaaagcatccatcatatgcccttctcgtgggctctgaggtctagcgttgagagccatggaaccttcataagaagaaactcccccatacattaactcatcatcacagccaaaatgtccgatgaagaatcttgaatgttcagcatagtcacgctctcgagcttgtcgttccctaatttctcgagttttggcttgaatcctctcctgctcctgcttcagttcgtatcctctcctcttctgatgtaaaggagttcctgtatttttattttacccgttttctcaatcttgtcatcttttcgatgtttgccaaacctgaacatgtctcccaagcccttcagcattcccttcttggnnnnnnnnnnnnnnnnnnnnnnnnnnnnnnnnnnnnnnnnnnnnnnnnnnnnnnnnnnnnnnnnnnnnnnnnnnnnnnnnnnnnnnnnnnggtttccattcatttgtctctccagagagtgggaaggctgatcactggctgtggatacagactctctccctgcatcttgaactttcttctgtgtcttctc

SEQ ID NO: 447206 - DNA, 795 bp, Homo Sapiens
  misc_feature (160)..(160): n is a, c, g, or t
attgggggaggaaatcccaagcccttagttcatggccaagggattttcctagggaaacaggtttaggccccatttttcccttacctaagtgggccccgggggcccaaacgaaagggtttagaaaagttttttgaggggccgagggcggccgaacaagttnttttcttttacgtgggggggcctggcgccattttaaaatttatttaaagtcttggttgttcaggtcctaggggttccaagtccccagtcaccttgaggactcagacatcaggaattcagtccccagcccagagatcaacgaaagaaagacaacttttcttggagccaggcctcagtgaggtcatcagtggtgcggatttcgaacacctttgtgagctctgctgtctgcaccagcctgtttttactccctgcatacatcatctgttgttccggcttgcagcccacagggctggagaagatgaaacacaaagggtaggacactcggccatcgtcatgcacgtacttgtagctgtaaaccacgaacctgggctgtctctccggcaactccattttgagctcctctggggaaatgttctgaaattcttcctccagcaccaccatctgccggtctttgtccaccttcattatgatggctgcattgtctgtctcttttcggaagcggaatttcctcagcttttctgttagctctgggtctacctcgcacaccaccagggagtcagacatgattgttctgtccacaggcctcttcttttcttagttccgctgtcttctaggcgtggggaccggggctgtccc

SEQ ID NO: 447207 - DNA, 1087 bp, Homo Sapiens
ttttttttgccctttagaccaatttattttatatccatttaaaatatcatccaacaaaggacaatgaagtttacatctgggacaggtatacataacttgaggcatttggagtccatcgtgcccactgaataacaactttgctgctgaaatttcttaaaacttaccaaactaaaacaaaaggctgaatgatacaaaaggaggagtatttaggtgtaatctgtcaattggcttttaaaaaaaggaaacacatcctgtttcccagaccagtaaataagcaagagctacatgcagcagtgtgagtattaagacatttctcaagtcttctcaaatgagtccagggtggggatgggatgggggaaaattgatagaaaaactttgctatagacaccacaacaaacaataaatttagcatcatttaacacattttagtagaaagaaaaacggctaagaagagcatgacaatttgacacctcaggcaaagtgcttcacagaaacatcgtactcatcagtgaaagaacgcggtacattaacaaagaaaacatatgggagtaccgaacaacgggcctgaaaccaaatgggtcactcacagacttgggcagaacgcgccctacaaagcggcaaaattatgggatgtaagatgcggcattacttaggtgcacggcaataaaccaaccgtatccatggaattcttggagaaagcgtagaccccgagaaaataacctatacaggatgacttactcaggtactgttcacacttggtactggaacgaaccattaggattaccgcgaaaccccataaatttatgcaaaaaagtggaattaatccaagctcagataaaaggacaccagtaacccaataacgttggatacaccaaagagtaatttacaacatgaaaccaatcgatattttaatataacgaattcagtgacatactaagagtaggatgcatcgcctgggatgacattcatgttttaaaagattagatgactcatgaaatccagactacgtatgcaagaaaccaattggatctgaaaaagacaacccttgttacctgagggaacactgataagccccggggtagtcccc

SEQ ID NO: 447208 - DNA, 842 bp, Homo Sapiens
ctcgagttccgaaatccgggcatgggatcatgtagtagtaatgagaaaaggtggccccactgcttacagctcgcaagttcaggttcagagtgtccccaacacgaggaggtcgagaatccggccgctcaatagacagaaacccggggcctcctgaaggtggggctgccacagtgagcctggctatcgctggatgtggggagcctgcagatactgagagctgcagctctgagatggtctgagggataattattggaatgctgacttggccgctcccgtctgtgttttgctgaatgtcctggacttcaggaacagacccaggagaagacaccgtggcagaaactttgacaggaatgccagaagctggggagcctgacatctcacggaccaaggcctgcagcaggaagggggccccaggcacaaggtgtcgcttggtcttgctaagatccaaggagatgggagatgacacaaaataccaggatgtgagctctgccttcttcatcttcccacctggatactcaatgatggctgcagcaacgtagaggcgcagcccctggaggtcagtaatgcccatattcagcttctccagggcgtcctggaactctgcctttgagagggaaatgtggctctgtccattcaccagcttggtctgactcgtccagcccccgaaagaaagtcttcttaccatccttatgtaggagcccaaagcgcacatatgccaccccctgtactggctttgcatagatgtacctggcctggatgtcttactgcattcattaagattgtcttgtaccgtcggatgtagggctttcaggggtgatcttcaccttaaatgggaagacata

SEQ ID NO: 447209 - DNA, 560 bp, Homo Sapiens
ctccatgtactctagccttttcatgacactgatattttcgtgacactgacttatagttcactgtttacctgttggtctaacagcaaatcataaacagtagttttcaacatacttctaaggctaaattcatttccagaagtagcaaagcttactagccaaaggctccacatttatcaactcttaagagctagacttgagagcctaacagcctatatgattttgtgtaaattgatctctatacctcagcttcttcatctgcaaagtgagataattgtactattctactttcctcatagtgcggttataacagattatgataatattacaaagtacttaatacttggcatatagtatatatattagctattagtattttgcaatttggggatattgaaaattagaaattgcatgttagttcatgctgcactaccatattgttcttttggggctcttcaatgggtgaaattccattttacagtttatcatgtgcatctgtatcacaggagtattttggcaaaatgattctgtaccaaaaaggagtactataaaatgagggtgcc

SEQ ID NO: 447210 - DNA, 1793 bp, Homo Sapiens
  misc_feature (11)..(11): n is a, c, g, or t
  misc_feature (318)..(343): n is a, c, g, or t
  misc_feature (548)..(548): n is a, c, g, or t
  misc_feature (550)..(550): n is a, c, g, or t
  misc_feature (552)..(552): n is a, c, g, or t
  misc_feature (556)..(560): n is a, c, g, or t
  misc_feature (1294)..(1303): n is a, c, g, or t
ccgccgcgtancacccagaggggaggattggtatttcgtcgagggggcagacttgggggaggtggtcagtaaggggacatcgcgaagcgtatatcgagcccgggtatgggcgggtggttttcctatagccggcttaaggcgcatccacgcacggagagtgcttattgctgggcgaaggcactgacactcccattgcggttttccccgtgtatcctttcggctcccatagcgcggcgccgcggcgtaaaaggccgatgtggaggccctcgcagcggtccgaatggagggttgttcgcacgtcgagcgcggtcgcacttnnnnnnnnnnnnnnnnnnnnnnnnnnttcccccccgcgtcgggcgtttcccagggacttcgtgggaagacccttgcggccctttggggccctgcgctcacgggggcaggggggtatataacgatttggtcaggcgaggtttttgggcggccccgcccaagcacaaccaggatggtgcatgctatgcatgcctcgcgcctcggggttttcgtgtttgtttgttttttctatntntntggnnnnngtgcattaaacagagtcatatatttatttcaaaacattaagttgacttcccattaataaatactttaacactgagtgtagaaaaacttgtgcatattctataaagataatttattaaagaatcagagaaaaagacagttctttacctctaggctattgataaaaccatctgggagtgggaacagcttcaggaatgttacaggggaattgagggagggcaagagaggatttgataaaatgaggaaaaatgttctactctcctttctttcctggagccttaaaattaaaaatctggaattgaaaaatatactttcacacacatatctgtttcaatgggtgctgtctttctcaattttggagaagaatcactagttagtggtcagggtcaaaaattgcaaataagttcccaattttagtctaggttagatcactctggttaatcatagggccatgatgccctcagaactcaagcaggagctgctgctacttgtgcttaaagctgaggcacgaacgcaatatcatttactggagaactgaagatgctgcgcaatgctaacagcccctctcagaagttctgtgtggctctgagtccttacagtgcagttgttgtattaacccatcatccagtgagctggccagtagttcagcccctccacttgctgcagctgccgcaagacacattcaccaggcagttgcccaggcctctcacccatggggggaacacatctggccacnnnnnnnnnnctgtaaacctcaaatgaaacagaatctcacagatgtggggtccccctcctaattgtaataaacgttagagaaatgctccagaaaggaacaaagggagaccctctcagatcagcctaaaaccagagtggaatagggctcctctgggcggtttaagggcacagaaaggaccctcagctactcctggcctccccgggtctctttcccagaagacacaactttccaggctgccaaaagtaatagaagtcaaaaccctcaaaaccaccactgctctcgggaagtttttgagtaggatgaggaagaaagaagagagccctccttcattttgttacacgatctcaaggccaagagcaagtagaagatgtctaaagagaacaaaagaggtttcttcctggtactgtactacagatcagcaacagtttcacagggaggcgttggctcaggttctggtacatttgaagataactgaaggccaagacttagccaaggaagg

SEQ ID NO: 447211 - DNA, 998 bp, Homo Sapiens
  misc_feature (235)..(247): n is a, c, g, or t
ttttttttcgggtgcaggtacagtttattcttcacaacagagaaatacaaagagcagagggtttgtaattcctttgtttcttgccccctttagtgttttccccccacatttgattttcatttgctccccactcccttttttaaatagaatgcaaactaccttcctgaagtgtctgaggggcacctgccctcacctccctgcctccaagatgcagactgagaagccaacagactgnnnnnnnnnnnnnaataaggtaactagttctaaatatggtggcctggaggtcccatagaaaaagcaaaggggtgttaacagtatgtataacagcgtatttacagggagtaacatgcggacaaaaagctacaatactgagtatcagacgacgcaagtcaaacaaagggccgggggtgggggcagagaaccccatgggcaaagaaaccccaggaaacgttaaactggtaaatcaatggcgagttaaggcttaaaaagtgtataaaaataacacagttaatattcaaaacggaactccagatacagaatatatagatgagtttctgtctagttttcttttatttcccggggggatgtagggggcttctctgggctctgtacatggttcctatatacaccgacacgcatggctttcagattggggtgtgtctgtgggggctgggggcagggtctgctcctgggacctgcctccccggggatcccgttccactgctgcagcgggcctagggcctcggctggggattccgactcctatggcagggaagacgaataaccccttgaagctcgaggacgcgttggaccacgcggagcccgggggcctggtttgccagctactccccggtgcacctttctctcgcattgcaccggggaaaccgcggggaatctcaggggaaccgctttggacgctatgtcttcgctggatatcctgggaaatccttggaaggacaagggtaagagcccgagggggatcctctgagagtctgacc

SEQ ID NO: 447212 - DNA, 1254 bp, Homo Sapiens
  misc_feature (954)..(1067): n is a, c, g, or t
cacccacgccccgctccgccatccccccactaaactaggagcgaggcctgggtggcgaattcggcacgaggcgagcgctgcgcagtcgggtggtcgcgggccatggagggtagcttttcggatggcggagcgctgccggaggggctcgcggaagaggccgagccgcagggcgccgcctggagcggggacagtggcactgtttcccagagccacagcagcgcctcggggccgtgggaggacgagggcgcggaggacggcgcgccgggccgcgacctgccgctgcttcgccgcgccgctgcgggctacgccgcctgcctgctgcccggggccggggcgcggcccgaggtcgaggccctggacgcgagcctagaggacctgcttaccagagtggacgagttcgtgggcatgctggacatgcttcgcggcgactcgtcccacgtcgtcagcgagggcgtgccgcgcatccacgcgaaggccgccgagatgcggcgcatctacagcaggatcgaccggctggaggccttcgtgaggatggtggggggccgcgtggccaggatggaggagcaggtcaccaaggccgaggccgagtctgggcaccttccccagggcgttcaagatgctcctgcacacgatgaacgtgccctcgctctttagcaagtctgctccctctgatggcatagcaagccggttatgaagcccctgtcctgtttcggaccgaagactacttcccttgttgcagtgaaaggcctcagctctgacggcctgaccactgcggcaagaggaccccagctggggtgcttacctccagtatgaagtgaattgcaaaatcctgcttatggacatatatgatgttggagtgtgggattttaaagtttactttctacaaactctccgtagtatattcatgattcagtgtagaatgtatagactttatgtcttccaagttttaaaaannnnnnnnnnnnnnnnnnnnnnnnnnnnnnnnnnnnnnnnnnnnnnnnnnnnnnnnnnnnnnnnnnnnnnnnnnnnnnnnnnnnnnnnnnnnnnnnnnnnnnnnnnnnnnnnnnctgtgtcttccagctctaatcagaaagctgcttgtcgagggcatggggaatcaaactgaatgaacttttctctgcactgtggcaaaactgttatttttatggattttactaaatggcgttaccttttcaagatttatatgtttgtataatcataagaaaattgagccattaaagccttgttattcaa

SEQ ID NO: 447213 - DNA, 1226 bp, Homo Sapiens
gaaatttgagggggttttattcttaaaacggcacatttgtagagaatgccctttatatatgttctaaagaaaagtgtacaaatactcaatgattaaagtgtctctgagaaagtggcttcggaccacaccagcatctggtccttttgctgtgacccaccccatcccggagctggtcgggtctggctggatgtgctgcccagtgagtgcctcgctcggtaactgcttggtcctgaacattctctcgtttcaggaactgatgaggttctcttcttttgactgatggagattacaaaactcttggattctctgaattatacttctgtaggctaacgtggctggggaatctggggcgtcaatgaaaaaaagactggcctttgtcacaattcttacctatgagcggatccaggggcactctgccgaggagagggacctccaagtcctggcacatgagctccgcgcccccggttgtgggagggaatatctgagattctttcttgcacttaggacagatgaagccactcatgttctccaccaccccgatgatgggcagcttcaccttgcggcagaagttgatttctttccggacatcctggagtgacacctcctggggagtggtgatgatcactgctccatcgatgtgtgctgtggccaggtaccggacgaccgagaggtgttcatccgacgtcccaggtggggtgtccacaatgaggtagtcgacctctccccagtccacatctcggaggaactgcttgatcatgccgtttttcttgggtcccctccagataacagcatcatcaggactgctgagcaggaagcccactgacatcacccccaggttgtcttccacgtacactggagaccagcctgagccactctggtgaacctgctctccttccaatcccattatcttgggaatcgatggcccacatatatcgatgtctagaagagcaatctgtgtgttttcatcctctgctaggccatgggcaaggtgggcgctgaatgtgcttttcccaacaccgcctttcccagacaataccaagattttgtgttttacagtcttcattttctctttgatttcctctatagccgtgtccggagtggcccccgctccagaagcgcacagccgctggttggggcatccctgacatgaagcccctctgcccgcctgggcgctgtcggcccctggacagtcgtgaggcacctcctccattcatcccgggaattcc

SEQ ID NO: 447214 - DNA, 1681 bp, Homo Sapiens
  misc_feature (805)..(813): n is a, c, g, or t
  misc_feature (1667)..(1667): n is a, c, g, or t
aggagctggcctttaggaaagccaagatcaggaacacgcattccccgatgacatgagacacctgccccgtgggctgcgtgtgagcttggagctcagtgactggtggtggaaaaacccaacctttacctttagggaactggccgtcatctctgctaggcgggaaggcagtggctgctgtcacgtttcacttcaaagatgaccgtgtttcgaagagggcaaaagatatttggagtcaagtggcgggaaagtactggattcttcgaaggggaggaaaaaaaacagtgtcatcatgaccgtctggggactgctgacctaatgatgcgtccccagggctacagcctgagtttctgcgtcatatgcaccggggagaacattccattgagccacgctaacacctccagcaaagtctgaagtggtaaagggagatcagtgaccttccttggaaacgaggaggagctggcctttaggaaagccaagatcagacaccccttggccacctttttccacctgtttttccgagtgagtgccatcgtcacctacgtgagctgcgactggttcagcaagagctttgtgggctgttttgtcatggtgctgctcctcctgtccctggacttctggtctgtgaagaatgtaaccggaagactcctggtgggccttcgatggtggaaccagatagatgaagatgggaagagccactggatctttgaagccaggaaggtctctccgaatagcattgctgccacagaagctgaagcacgaatcttctggctgggcctcataatctgccccatgatatggattgtgnnnnnnnnnagcaccttattttccttgaagctaaagtggctggctctggtggttgctgggatctctctccaagctgcaaacctgtatggctacatcctttgtaagatgggaggcaacagtgacattggcaaggtcacagccagtttcctgtcccagacagtgttccagacggtctgcccaggtgactttcagaagcctggcctcgaggggctggagattcaccagcattaggctttcttatcttcacaggcagaaatggcttaaacgggagtttctacaatcgactaagcttccgacacagcagaatcccacgatcccacaacccatttgttttttacgtgaagcaggcctcgggggagagatttgagggggttttattcttaaaacggcacatttgtagagaatgccctttatatatgttctaaagaaaagtgtacaaatactcaatgattaaagtgtctctgagaaagtggcttcggaccacaccagcatctggtccttttgctgtgacccaccccatcccggagctggtcgggtctggctggatgtgctgcccagtgagtgcctcgctcggtaactgcttggtcctgaacattctctcgtttcaggaactgatgaggttctcttcttttgactgatggagattacaaaactcttggattcctatgagcggatccaggggcactctgccgaggagagggacctccaagtcctggcacatgagctccgcgcccccggttgtgggagggaatatctgagattctttcttgcacttaggacagatgaagccactcatgttctccaccaccccgatgatgggcagcttcaccttgcggcagaagttgatttctttccggacatcnctgagtgacacctc

SEQ ID NO: 447215 - DNA, 249 bp, Homo Sapiens
  misc_feature (162)..(193): n is a, c, g, or t
tatggtagattctctaagtctagtgtaatgactattccacaaaatcatcagagaccccaactttttctttttgtcagtactacctccagttccaagacggctatttgagtttcagttgtcctacccatattccagccaggagaattgctcaaaagctccccnnnnnnnnnnnnnnnnnnnnnnnnnnnnnnnngaaaaggaaagaggaaagacctaatattaaatgacaagccaggtgtggtggctcat

SEQ ID NO: 447216 - DNA, 527 bp, Homo Sapiens
  misc_feature (53)..(63): n is a, c, g, or t
tgcattttacttccctttaatcaaaaaataaataagtacactccacagggacnnnnnnnnnnnaatgaggaaaaaaggtgaaagaacaaaataaaacaaacaaaaccaaaacctacagggactcttcatttctggcctgcaaggaatcaccagccaggctgagggacacggacagccagcccagctggggcctgccaggtgactcacaaggctgaaaagggagccgctccgctctgggtggttcagtcccagccaggggttgggatgtcctgcctgcggaggggccacagcccccatggggggcccctcgcagcggggcacaccgatccctattctgcaaggtgtatcccacaaggcccttcctcttggtggcacctgggcactcaaggagccaggagatcctgccgagatggctagagtctggaatgtgaggtgtgcacaggcggggcaaactctggagacccagagacaagaagcaccaactcccagtgtgatgaggccagttcccaaggggaaggcccagaaga

SEQ ID NO: 447217 - DNA, 603 bp, Homo Sapiens
  misc_feature (249)..(260): n is a, c, g, or t
ttttttctttattgtaaatactctttattgtaaattttctttcctaaattccatatagccaattaattcttacagaatcttttgttaatttttgtgtgtataaattttacagagataaagggtattgtttgttgcccccaacttacaaataataataaactctttattgtaaatattctttattgtaaatattctttatcctaaattccatatagacaattgattcttacagaatattttgttaataannnnnnnnnnnngccaaaccttgtttccaaagtcaactatcactgggatttggccctgatttgccaaaattagactacaaataaaaatccctgataactgtacagctaggccctgaaaaatgggtataggttcggcatgaatgctggttgaaatttttgtttacccttggggggaaaaccaaagtaaaacaatgaaaatgaatggcaaaactccttcttaaatgatttgaccagctgtcacctgaaacggatgacagtgttcaactactggaaaaataatccctccattttttggggctatacaccatgtattggctacaaacaagacatactttaaagtttaatttgcattact

SEQ ID NO: 447218 - DNA, 579 bp, Homo Sapiens
ctcgagaacagtcaggcttgctgttgaagggagcgccatgcagcgcttacaagaccacctctcggcagccgcacaaagtgttttctgctatgggtgaaagtgtaatgagaaccgaggcaagaaaggtcggaggcctgatgctccaacttcaaaacgtgggcctgggcagggcagatgagcgagtcactggctagttgataccaatctccttgttatcctcgataaaccgcgtgaatgggcggctggctgctgtttctgagctcgctttgtccaagctgacgatgggtgggctactgccagtgcgtgctttgtccatcccactggccatgctgcccagaggggggagggcgctgcccccaagactcacggggagctgggggatgccgccgttctggatgacggagatctcgttgttcttcatggcgagcccgttagtgatggctgcagcatactggttccaaaaactggggtcgacgttcattgcccgagctgccaggtccttctggaacatttcagagaacttcagggcatcaccccctaggagagccatggggttctccacagacaggcggcggccgc

SEQ ID NO: 447219 - DNA, 505 bp, Homo Sapiens
actgattgtcattgatattcagggctcgctgtcaaccaggaccttccaggaactggctctgggccaagagcagtagaaatcactgggtggtccgcacagctcgcgggcatctaacctgcttcaaggctcagggctaaaagggagccagggcccttcctggaggcgggaacccaagtgggaggcagagcgcctgggcccgctcctcgatctgctgagtgacgaccctgtacaagtcatttctcttccgagagcttcagtttcctcacgtgccaagcggacgggttggaagttggtctttgccagctctgacaccttgtaagttttgagtcttgctgggaatccagggcggggctcacgaggaaaatcttggaaggggatttcatggctggatctcttccactcaagctcagtgccctaatttgacgccttaatagtagacgcaggcttttccattttccaggagccccctgacgcggccgcttcctcctacgtctccttcctctgc

SEQ ID NO: 447220 - DNA, 1261 bp, Homo Sapiens
attctcctccgactgatcccgtactcctgggaatgaccacatcagccagtgccttagagagactgagcaactcctctgtgccttgaagtcccagactcccattgttctgcacatcatacttgacacagtcatagatgtcagggatcttactgatatcatagcgcccactcttctgtcgaaagtcacgctccagcttgctccaacgctgtagcattagctctagtgtctcactgtggtagagctgcaggtctacagacctggggtcctgcattcgttcccggatctggtggttgaggttttcgatcagggcaaatacctgatcacagaccttcacaggattctggatgatagtcatggagttgagcagggaagtacttctggtgggagccagctgatcgtagtcctcagggccaaagggcgcatcctgctgtagaatatggtgcagccgagccttcacccggtgctggcagctgctcaaggaatccccatcgctgtccagtagcccattcatgttggcactcttcaccatttgcaccaaaatgggtgtcagctccccttctagagccagaaggcccttggcgaaggcagcagcagtcatctgaacacgaccctcatcagaggcatagatcttgagatcgtggcggaaagtgctatggagacgaagcagcccacaaccagggaagccagcatagtcaccctgtcctccagggtacatgcagcgaaaagctcgccccagctcctcagcctgaacacggccagcaggaatcagttctccaccccacttcagtaccagcaacagagatggggccagagtttccctctgtggatcttgcccctcattagaagcttttactccatgagggtagtaagtcaattgtaccttccggtttatacctgagaagtgaccatacatctccagtacagacttcagctgctctagttttccagtcttctcctcgatctcaccacctggttctttctccagttcagccaacaacagccttgtgatatccagcacctcctggagctgctcaggtcgcttgagttttaatttccctgtctagtagccaccatgtttttcaaacagagcaaaaaaccttgggtgtttcacttccatcttcatcttctgcttgggagtacgatccccatgacgaataattgcaatgacacaacgaagttccatcatagtgccagatgtggtgggaacaatgggaatgtcctcagcctccgtggggatggaccatggaatctggaactgtcc

SEQ ID NO: 447221 - DNA, 1201 bp, Homo Sapiens
  misc_feature (1114)..(1150): n is a, c, g, or t
ttgaggactgctggaccacactggattcacgccaccttcctgccctctggcccatcaccccggggagaacaggaatcaccttaaaggcaatgtagtgcaggcccatgcccgccagcatgaggaggaggcagtaccccagcacttgtttgttttgttttgtgttgctgctgcctcaactggggcccctgtggcctcacgctgtgaaactgggaccagtactgtgcgttggggggtgtccaggagctgtgtgtttggtgggcagacttgtcatggactgtggttcgtggagactttgggggactacctgagcggagctggtcatcatagctgcggcggctctgctcacggctgagcacacggtatgcctcgctcagctccacaaagcggctgtgcaggcttgggttcccagggtcccggtctgggtgcagctctttggacttggagaagaaagctcgtttaacttcctcagtgctggcaccaggatgcacccccaacagttcataataagtactgggtctggaccgctgcccggcggccgctccgaggagccgggagggagggttgcggggccacagccggcacaggcgcaggggcagtaagggcggcatggcggcgggcgggcagctgggaaaggaggctaccaagagcgcattggaccaggatggggctagacttcaagcacccgggggcagagggaaggggcctggcccgttgttctgcaaaggaagactgaagcaggcccggagagggggcggttcttgcccaggaccagacccgcgtgtccttggacctgccccttcctctgacccgggcatccgcagcccttcccagcgctggcttcggggtctggccacccagccagggaccccaagaccccgttcccacccagggaacttggggacgggagaaggaggggccacaaccaggccccgcccccgctgctcacagacccgcggccgtcgccatttcctgcgtctattcaggccccgccctcacattctcattggcgtggatgccaagaccacgtccacctggggagcgggcgggacagagcccgctctctgcggcttagtccgctctcgacgaattcgagctcggccgatttggcctgatnnnnnnnnnnnnnnnnnnnnnnnnnnnnnnnnnnnnncgccgccaccgcggtgagctccaagtcgccctatagtgatctatcatttct

SEQ ID NO: 447222 - DNA, 481 bp, Homo Sapiens
  misc_feature (363)..(363): n is a, c, g, or t
  misc_feature (421)..(421): n is a, c, g, or t
  misc_feature (431)..(431): n is a, c, g, or t
  misc_feature (438)..(438): n is a, c, g, or t
  misc_feature (443)..(443): n is a, c, g, or t
  misc_feature (457)..(457): n is a, c, g, or t
  misc_feature (464)..(464): n is a, c, g, or t
tttttctgcgaatcactttattgcgcgcgtttcggggagcgggccgtccagggaaggaagcaaagcgggaacgcactgcaggccccatccaggtgagcccttcagggcgcggcgccccggggcacgatctcggggccttgggttggctcggatggtggcggctgccgctgccctagccgttgtcgctcctgctgaaggatgcctctgttggcccttccctctgcccccgggtgcttgaagtctagccccatcctggtccaatgcgctcttggtagcctcctttcccagcttgcccgcccgccgccatgccgcccttacttgcccctgcgcctgtgccggctgtggccccggaaccctgccctnccggtttcctcggagcgggccgaaagtttatttcctttaagtgagggtaaatttaagntttggcaatnggccttnttttnaaaagttgtgaatnggaaaanctggggttaaccaattt

SEQ ID NO: 447223 - DNA, 380 bp, Homo Sapiens
cctaaaataaaccatttattgaaaaaagaacctttttcttaaatttcagtaatcagccttttgcattacaaacctgcagcttgccaacaacaacaaaaaaggtaaaggtttcacagtcagtgcactcaacaaacaggagattaaaaacaaggtatgggacgcctgataacactacaacttcttttgaacctagaaaggtcaaaacactacgctgatgtcacggttctcagtcgcgcgagacacggaggagacagaggcgatggtccgtgtacagtagtaatggcacttaacatgcagcttctttaacctcgtggccaccagccctccagagggccttttgccacatcagacaaacaggagcagcaggagaagtgacgctt

SEQ ID NO: 447224 - DNA, 496 bp, Homo Sapiens
agtgcctccctgccaggccatgctgctgtagaccctaacagcgtctcttcctggccaagagaagcctgtccccaagaacaggagagccatggccggcctccgagggaacgctgtggctggcctcctctggatgctgctgctgtggagtgggggcggcggctgccaggctcagcgggcaggttgcaaaagtgtccactacgatctggtcttcctcctggacacctcctccagcgtgggcaaggaggactttgagaaggtccggcagtgggtggccaacctggtggacaccttcgaggtgggccccgaccgcacccgtgtgggggtcgtgcgctacagcgaccggcccaccacggccttcgagttgggactctttggctcgcaggaggaggtcaaggcggctgcccggcgtctcgcctaccacgggggcaacaccaacacgggagacgcgctccgctacatcacggcccgcagcttctccccacacgccggcggccgc

SEQ ID NO: 447225 - DNA, 518 bp, Homo Sapiens
gctccatctacttttcccggagtggttaaaatactccagggcctcagctattctctaacatgcaggaaatcccctggcttttcagggttggcagacttgcctcagccaagaccctaggaattatgtgcctcacaggaccccttctgagcttgggcctctgcttgagggaaattccttcacctatgtgctcacaccttgccttgccttcccggtttggatttcagcctagggcggggctgggaatactgaaactcctccaatcattcaggaggctgcatctgtgtgggctacaatctagtctgattctccaagtaaaaaatcatttctgccctagttctttcactgccctttgtctacatggtctattaaagcattagcctggtctgctgagcttagagtaactccagcactctttctatcagtccatcactgagaaacctcacctggaggcagacttcttctggtctttagtgagagtgacaggtggtggagggtggatgaatggatgctattctctg

SEQ ID NO: 447226 - DNA, 553 bp, Homo Sapiens
gaccagcaggcggccctgctggcgcgcccccaccagcaccgtcttctggaagctcacgcccgccgcgtcgccgccgctgctggccggcgtcaccaccagccgcggtcggccgtcctccgggcgcgcggcgggcagagcagtgcccgcggcgtccgcgtaaacgggccgcaggctgacgggcagccagcgcggcgagaagagcacgttccaggtgacccggcggcccgcgtcgtggccactcgggcccagctgcgtctggaagctggtgctgcggtcgtcgcgggccgggttgttgatgacccacggggcgccccaggcgggcgcgaggtagttgcggggcaggaaggcgctgccgttgacgtcgaagaacttggcgtagtgcagcggcgacgcggcgtggaactggtaggcctgcagcaggaggtcggccaccgcggggccgtggcgcgccagggctgccgagcgcgcctgcagctggaacagctgtgccggtgggatcatggggtagcgtatggcgcgcagcgcccgctcggccacggcagggggcggccgc

SEQ ID NO: 447227 - DNA, 499 bp, Homo Sapiens
  misc_feature (45)..(45): n is a, c, g, or t
atacatagctagggagaaggggtagggagaataaaaatcagcganagcagggatattaataaagagttttgatggttaaggacaagcaggcgaattaagactctggaaaccgagaaggtgtatagaaaagaaaaccagagagctggacgacaaggacacagtaacagcacaaggggattcatctaaagggcattccgatggagcaggacaggctgcgccccgaaaggtggggagaggttggaagcagatgggcaggcacaggcgagcgtgcactgcctgaaaaagttttcatgatggctccagcctaatttcccaacgctggtctcgggcgccacaaaacctgggcggcccgaccggagccaggtgccagcctacagggccgccgggcccggcgcagcgtccggaattcctgcgatgtctggggcgcggcggtggctcctccccgcccccaccacggcctccgccggcattttccggctaggaggcccgccagcccttc

SEQ ID NO: 447228 - DNA, 608 bp, Homo Sapiens
  misc_feature (130)..(145): n is a, c, g, or t
  misc_feature (211)..(255): n is a, c, g, or t
gagttagagcaccaatctatgttagatggtcctagtatcaatgcctctttagaggtatggtctccacagggagagatggatgctggatttgtagccatttatatacaccgggtccagacagaataaagtnnnnnnnnnnnnnnnntggccaaaatcagcagatggtgacaaaagtgatccctggctgccctcattgttcattagcataagnnnnnnnnnnnnnnnnnnnnnnnnnnnnnnnnnnnnnnnnnnnnnaccttgaagtcaccactcctttccatggcaatgacctggaagttactgccccttttctagaaagttctaattaacctgcctgtcaattcacatcagcctgccccttaatttgcatataattgaaagtggatatacatgagtataaatacagttgccaacagcccatacttagctgactttgggtgcacagcctatgagttagcctgctctgcaaggagcagtaccgttcaagcaaatgttgctatctaacaccactaacttaaccttaagttctttcctagccaaagccaagaacttctgctaagccccagttttggggctcacttgtcctgcattactaggaggaaagttat

SEQ ID NO: 447229 - DNA, 578 bp, Homo Sapiens
tttattattcacataaacatttttatttatagattttaatgataaacattttgtttggataaagaattatctctgcatccatcctgattcaaagctattttcaatataaaatatatttgccaagtacctactatgtacaaagttggatgatgaagaggacagtctatgtcttgaaatagcttcagtcttatactgtgggtagaagcaggatttaaggcaattatcgcaaaaaggcagactctaatgttatggtggtttaaacttaaagaagagagacagctcatctagatgggaagaaaaagtacagataagcttcacaaaggaagttccgtatcaaatggccctgaaacatacgtaagaacaattaaagtcaaggagactatttaagatagaaaaagccaacatgagcaaagatacagagcacaaacagcaaagcacaaagagcaaatagttccattgacctggaaaatataacagaatggcaagaaatcagtttgcccatattgcccatgccaggctggtctgtgcctaacgcaacagataatggggagccattcaaagtcctggctggagaagtt

SEQ ID NO: 447230 - DNA, 668 bp, Homo Sapiens
  misc_feature (383)..(598): n is a, c, g, or t
ctggaggaaaggtatctcttgacacaggtgatcttgtctaggctcagaaatggaggtaacatgagaaagcagtgattaagtagctactgacgaggttcacattaaatgatgaatgaactggccaggagttaagaagaaagtgtttaagagtgtttggctcagggtaagaatacattttactgctaatcaaccactaacttgagcccttgtgaccttgagcctcaggttgcaaaatgttatctgtaaaacaaattgttatacatgtgtaagttgctgctattgatatgcttttatttaaggccaaattttgtttaggagggtgatgggagaagggttaggacccttgccttaattagctcagctgcattcctctaatgctgaannnnnnnnnnnnnnnnnnnnnnnnnnnnnnnnnnnnnnnnnnnnnnnnnnnnnnnnnnnnnnnnnnnnnnnnnnnnnnnnnnnnnnnnnnnnnnnnnnnnnnnnnnnnnnnnnnnnnnnnnnnnnnnnnnnnnnnnnnnnnnnnnnnnnnnnnnnnnnnnnnnnnnnnnnnnnnnnnnnnnnnnnnnnnnnnnnnnnnnnnnnnnnnnnnnnnnnnctttgataaaagagctgagagataactctatctacgtctagagtttcccatggagttatcataagactta

SEQ ID NO: 447231 - DNA, 685 bp, Homo Sapiens
ttgattcagatgtcactgacagtagttcaggaggggagtctgatattgaagaggaagaactgaccagagctgatcccgagcagcgtcatgtacccctgtgagtagacctcatgcatgatagcattcttgagaaatgttggcacaaggaagaatgaatgaatcgccattatggagagaatgtgattctttgtacataggtgtctaggttctgtttgttttttccctgatgttgggtagatgagtgcatatacatgctagtgaagaaggggaagatacttttgctgtagggttgtattgttgtagtctaaatggtggtaatttccttttgaagtctaagaaaaataactaggagacatcttatgtgtaaaattgtactagtacctctttaagagtgaatttagatttcttttgaaactatatataggacatgataagttaatggcctgattgttgagattttgttgtttccagtaagcagggacaaatgctgagttgacctagttacctttgtaggaaattacagttgcttttgattgaactttcagcagagagcacacccagtcttcaattttaacacttgagattttcttacattttaaggactgacaattagaaaatgcttcagaatatttaatacatcgcctccaagcacagtctagtttcacaacctgactctcttcctatt

SEQ ID NO: 447232 - DNA, 446 bp, Homo Sapiens
  misc_feature (339)..(339): n is a, c, g, or t
  misc_feature (341)..(341): n is a, c, g, or t
  misc_feature (383)..(383): n is a, c, g, or t
  misc_feature (428)..(428): n is a, c, g, or t
agctactatggtggaaattttatttctatttaacacttctgacattagcaaatagtgtaccaaacagacatgctttttacatagttacatgattcttctcaacaaccgctcccaatcacgatgaaactcattccatctatccctttctttctttattcttggctgtatggagatacaggggtacatgacgctgctcgggatcagctctggtcagttcttcctcttcaatatcagactcccctcctgaactactgtcagtgacatctgaatcaaatgcctgttcactgcacctcaagttggctatggcactaggctgtaaatctctccaattcttctgananggaattgcttttcagaaagttgctaagtccctctgaagtggngggtctcactgggcagcttttctcaagggcagcttcagccttttngagtcagcatcaacgggc

SEQ ID NO: 447233 - DNA, 441 bp, Homo Sapiens
ttttttttatggaaacatctagctttatttcattccctgattagtggagcgccaaacatgtgtgtttgattactctggaggccagggagcagacagcactggaatagtctgacccctttggccagggagaaaaattaggcccaaggggtggcctggccaagctgcccctgtgctgtaacgtggtcacagggtttctcgcaccttccatcaggccatggtccaaatgcagggggagctgagggttcagcatggaggtcgttccaccgggtctgcttgtgttacgatcaatttgtcttcagagacagcgcccgtgcttccagagacagactttgttcttaccatcccatcttcccacaatttcagtgttatttaccagcaggaaaagacgattttgactgattgagttgaatgtgctgagttgatggtgagttcaatatggct

SEQ ID NO: 447234 - DNA, 458 bp, Homo Sapiens
agtcaggctgtcctagtagccagctgtgtggtcctaggcaaattacttaacctctctgatcctgtttccttatcagaaactgggaatagtactctgcagggtggttgggcagatgaaatagaatcacctatgtagtgtgaccctcccatagtagggcctccattaatattcagttttttcctctcatttctattgtttagaaggacagaaacatgcaatgtcctgcgaacatttccaagtggcttcctctcctccaaaagcttcagctgcctggcaaccctccccgcagtatcaagcaggcgcattttaaagtctctttagcgggagggcagggttagagccttcggtcacttgttttctaacttgacataaaacaacgtaacgcagtcactcagcgagccgttggccagcctcgctcgcccggggaggagggaggaggtggcgcgggggacggcggg

SEQ ID NO: 447235 - DNA, 484 bp, Homo Sapiens
  misc_feature (127)..(127): n is a, c, g, or t
cagtgggaaaggctttaggagcatttggtcaggtgggggtgctgtcagggtttacggttcaccttccaggaagccctgggtgcgctgactccggggtggggggcacctggcaaggtagcggggaccncccgtaggcccggagaagctggggcagcctttgccacgtggacagcaaccgcgctgctgcaagttcccgggcgtgcccgtcgaaagcggccaggaggtcaactggggcggcttccctcagtgccttgggcaggggacccacctcggcagccgccccaccagggcccaggacgcagtggaagagcgtatggcgtcgcagcaggcagtccctaaggaactgcaccaactcctccaaacaccttcccaggtgctcctcgtcccagccttgcccaggggcccccttgcgcagcagcactgccagcagcactgtcttgagcacatatgaggataggatgcgtccccactgggtggcggccgc

SEQ ID NO: 447236 - DNA, 661 bp, Homo Sapiens
aggataagaccagaagcagtagaataaaagtcgcaagaagaaacccccggtatcccccccattgttgttagtccaggactctgaaaccacaggccgacagatagaggaccgtgtggccctgctcctctctgaggaagtggaattgtctagcacgccaccacttcctgccagcaggattttaaaggaagggtgggaaagagcgggccagtgtcctcctccacctgaacgcaagcagagctttctgtgggagggcagcgcactgactggggcctgggccatggaggacttctacacggccaggctggtccctcctctcgtgccccagcggcctgcccagggccttatgcaggagcccgtgccgcctctggtgccacctgagcactcagagctgagcgagcgaaggtcacccgctctccacggcacccccactgcaggctgtggctccaggggcccgtcgccttcggccagccagagggagcaccaggccctgcaggacctcgtggacctggcgagggagggactgagcgccagcccgtggcccggcagtgggggcctggctggctcggaagggactgcagggttggacgtggtgcccggcggccttcctctgactgggtttgtggtgccatcgcaggacaagcacccggacaggggcggccgc

SEQ ID NO: 447237 - DNA, 1152 bp, Homo Sapiens
aaacttacggctaggtacgaggcctgggtggttaattcggcacgagggcggatctcgcaagctccgagcgtcagctgccggttcggtgccatggcgtcccaggtcgtcggcggaggcccctgcggaggccggagacggtggtgccgggggaggcgaccgagacggattccgagcgctctgcgtcctcgtcggaggaggaggagctgtacctgggtccttcgggcccgacgcgcggccgccccacggggctgcgggtggctggggaagccgcggagaccgactcggagccggagccggagccggaaccgacggccgcgccgagggacctgcctccactcgtggtgcagcgggaatcggcggaggaggcctggggcacggaggaggccccggcgcccgcccccgcgcgctcgctcctgcaacttcggctggcggagagccaggcgcggctggaccacgacgtggcggccgccgtgagcggtgtctaccgccgtgcaggccgcgacgtggccgccctggctagtaggctggcggcagcccaggcggcggggctggcggcggcccacagcgtgcgcctggcgcgcggggacctttgtgcgctggccgagcgtctggacatcgtggctggctgccgcctgctgccggacatccgcggcgtgccagggaccgagcctgagaaagacccggggccgcgggcctagccatgattctacttcccaacctgactgcaatttggggggcccaaaatgatggcccctcttaacccaaggcaggggatcttcctcccaactccctggaccaaggtggcatttcctgcacacccctccaggccaagatgatgctcgctctcaactctgtaggccaaggtggcgtctcctcttgactctccagacctaaagtgacacccttcaggcacttcgggcccaattcagcccagtcctggtgctttcagcgccagatgacagcactttgcagataagaacgatatgatgtgtggatttcactacatttggctcctggatgctataaaaggacttggatttctgacttggctcagggactggggttagcagtctctttctgctccttttcacctgtgttttcttccgatcccagctctggtccctcagccgcattcatatttactctcctctc

SEQ ID NO: 447238 - DNA, 375 bp, Homo Sapiens
cacctcacacaatctaccccagacgggcgtccgtctcccgactctggggagaccaccacgatttcgagagtccgggcaccggttaggattttcctgcagaacaggcaccgcgaagctgccccgctaagccggcgccgcggccctcccgagagtgccccctccgtctcggccgtggcactggggccaggggctccggccccctcgcgtcctcgctgggggaccctgggatcccgagacccgggcgcccggcttcccacgcccgccggcccggctcgctcaccattggagcggctgcccgactcgttcttgcagtagccgcagcggtagaagtcctcgctagggaaatagtccacgacgctgggcgaaccccccgcc

SEQ ID NO: 447239 - DNA, 378 bp, Homo Sapiens
ttttgcttttggatgatttgcaaggttgggggaggagtgctagctttatgatgccttcttcaagtctgaaatctgtcttgttttctgaccaatgcagccaaagaaatgcatattcctccaagcgttgctttgctttaaccatgtctcataaatctcaacatcctcatgtttcccttgtctttcccttgtaggacttataactcaactcattttgctttaacttaaatggaatttttccttaagtttctagatttgtggaattttatttttttgtctgttactgatttctaatatttttacattctggtcagagaattaaattactatgatgttaactcttctgagagggaaatattagttcttaaactacaattatca

SEQ ID NO: 447240 - DNA, 297 bp, Homo Sapiens
atattttttgcatttgcaggggacactttattttttgttaagggtgacagcctgcaaggtagccatccagcagcctgggaagagcagcctctggttaacaccagagacagacatttaggagcaggaggggtttgggcaggagctttatgctgaagaggttggctaaacatacatattcaacaggctacaggaggagctatgaatattcatgtaggtggttgcagtccatgcttattgaacaaacatgtgtggaacatatgatctgtgagaaaataaatgcctgccatgtgggcacct

SEQ ID NO: 447241 - DNA, 432 bp, Homo Sapiens
tttttttggcagtaatgctggtttattccccatggccaccggggccgcactggtgcccactcctgccaccattccagccacacccaggccgtgggcagccaccctccgagacacctgggccgggggcagggtctcagcagaagcgccgtgggcagccaccatccgaggcacttggtggtttcctgaggcccaaggaggctgctcccagcacagtgaccccttccctggtccgctggagggaccacctccccactgagctcctttctcagagaactgggcatagccagagctggggtgagaaagcccttcagccctgctgcaccgaggctctgccagttctcataccccctccccatcccatcttggcaaagcgctggtgcagcttagggcagctgaagcagcgctttgccaagatgggatggggtgagtgga

SEQ ID NO: 447242 - DNA, 1532 bp, Homo Sapiens
  misc_feature (526)..(630): n is a, c, g, or t
  misc_feature (1519)..(1519): n is a, c, g, or t
atgaacagttgctaaaccgtgggaagatgtgtgccagaagaaattggtctctttccctccagtagtccatcggttacagcaccaattgtggaaatcagaatgagaatggtggaaccatttttgattgcctttaatgggcgcatttgaatatgccagccagaatctatgcttctaatggtaaattgaaaaagggaaatgaaacagtctgtggatgtggactctctcaggttgaacgtaggttggatcaagcttgtactcaacatctgttcaggctggaaatgcagaggaagtttaatatgtttactcaatcatactggtttcctgggtgccaaggcagaaaatctaaccatatgacttctgttcacactatgtgggagctatttagaacaaaggtgatgatcctggaagaaaatgtggagacgctatctcgggtaccagcacagttggacttctttgctgccagcaatcaacagcccttaaacatcaacatttcaaggttttgtcgaccagtgtaccaagtaacctnnnnnnnnnnnnnnnnnnnnnnnnnnnnnnnnnnnnnnnnnnnnnnnnnnnnnnnnnnnnnnnnnnnnnnnnnnnnnnnnnnnnnnnnnnnnnnnnnnnnnnnnntgagtgcagaagtcagaaaagcaattctttgttgagaagtgcaggttatgttacatagtcttgtaccaacaaggtctcactattatcaacttcattccgtcgtgtgttagttatgggctgaactgtgctcctctctcccgaaattcatatggtgaaattctaaagcctagtatttctcttttcttcagaggcaaagcacctccgagtaaacccacacacgaccggtcggaggcagaacggcagcccctcggcggccggccggcgcacgcgtcacaccggcccgaacccaccgcgatcgctcacacggcccgcgcgcacccgccagaggggagcacgggacgtgcgctcaccgagagcaggcgggcgcccttccccgcgtgggaggggcgcgtctcgtctcgtctcactcaaaccgcctcgaaccccacaccgacgagctccctcaggacccacgcgcggacaccgcggcggcgaccggaggagggggcgccgggggcgggaacgacacaccaccgttcggcctcgggcacctgagggacaacccggagcgctccaggagcaccgcaagggcccaggcggagccgacgctcgcgcaaaccccccgagagggcagcacgacgggccggcgggacggcacccccaccgccgcggaggggggccgcccgcaagtcgacaaccactggaggcgacagcgagggctgtctgccgcgtcagaggaccccgccggcccgcacccgcgacgcagaaggcggcgggcgggacggcgaggtcggggcggggtccgcaccccacgccttcccacacgcaccgtcggcgggcggggagaggagagacgaggggacccccgcggggcggagcgagaaggacggtcccgttcgccacgaacgtncgcccctcgcccg

SEQ ID NO: 447243 - DNA, 349 bp, Homo Sapiens
ttttagccgcactcggccaccaccgcgggggccggcggaaccctcgcttctcccccccaaccccgtcgagggggaagcggaggagggtcctctgcgagcgggtcgctacggcagcgctaccataacggaggcagagacagaggcggcggcccgggggatccggtacccccaaggcacgcctctcagatcgctagagaaggcttttctcaccgagggtgggtcacactccccccacccgccagccgctccttcttgggcccgcagaggcgccgagggacgcctggggaagggagggggccctgcggtacgaggaaacacctgcgcgcggccacctcgagcgttcgcgttc

SEQ ID NO: 447244 - DNA, 637 bp, Homo Sapiens; identical to SEQ ID NO: 325273

SEQ ID NO: 447245 - DNA, 965 bp, Homo Sapiens
  misc_feature (17)..(17): n is a, c, g, or t
  misc_feature (38)..(38): n is a, c, g, or t
  misc_feature (85)..(117): n is a, c, g, or t
agaaacttttaactagncaacatcaattaatgagggcngcccacacttgggggactttttaaaactggcgtgttggcggcgcatnnnnnnnnnnnnnnnnnnnnnnnnnnnnnnnnnatcaggccaaatcggccgagctcgaattcgtcgagagcggagatgacgcgtgcgccggccggccgccgaggggctaccgttctgcctccgacaggttgtgtgtgggtttacttggaggtgctttgcctgggagaaaggaggctggtggactagggggcccttcggggattgcgcgcacgcgcagcggccaggccccctgcccagaccgcgaaggctcaaggttgccgcacgcagatttttcctggtaccgcaggccccctcccttccccaggcgtccctgagcgcctctgcgggcccgacgaggggcgactggcgtgtggggagtgtgacccaccctcggtgagaaagccttctctagcgatctgagaggtgtgcctttggggtaccggatcccccggcctgccgcctctctttgcgttatggtagcgctgccgtggcgactggcttgcagaggaccctcctcaacttcccccttgatgaggctctgcaatgccagagggaggcttgtgcaaatattctcatagattctggtgctgatccaaatattgtagatgtgtatggcaacacagctgtccattatgctgtttatagtgagaacttgtcagtggtggcaaaattgctgtcctgtggtgcagacatcgaagtgatgaacaaggctggccacacaccacttttactggccataaggaaaagaagtgaggaaattgtggaaatttttactgacaaaaaatgccaaatgcaaatgcagttgataagtttaaatgcgttcatcaacaacttttggaatattaacaaaagatatctaaaaattctcaaaatagtaatccagaaggacatctgaaggaacc

SEQ ID NO: 447246 - DNA, 1252 bp, Homo Sapiens
  misc_feature (140)..(140): n is a, c, g, or t
  misc_feature (658)..(730): n is a, c, g, or t
  misc_feature (820)..(837): n is a, c, g, or t
  misc_feature (975)..(995): n is a, c, g, or t
ggcttctgcggtctcccgcgcgccgcgcattgccgtacctgccacaagacgataggacgcgcgtcgttcgaccgacgaccggctgcctgcggtgcgcgccgccccgcccgttacactccccgtcggcaggaggcgcgcanatagcggctatctgtagcgccacggcgcggcgcgccgacacctacgcggtggcgatgagatactgccacagggtctggtggcggggaggcggcggaggtctgacacacgtcacgggtccggcgctgaggtgtgtagaagggggcgctttccgccgtgtcgggtggggcagtgtagatacagcccctcgtccccgcccatcgtgcggcgcgtcggcgccgtgtgagcgggcgcgcgggcggaaagctgtgcaccatgcagcgcgccggggagagtgcatgaaaattgtgtggggtataattggcgaggagagcgcgctacgcggatggcgagcttgcacgggaagtggagcaaacaaatctcgcgggttcaagaggaggacctgtggggagggggtcccgcgtgaaaaagaaagtttggttggcacccaaccaccgtgcccggtttggcaccgccccggcgcgtggtgttgtgatgtggtggggggaaggcgcaaggcgggctcggcgcatgggccgcnnnnnnnnnnnnnnnnnnnnnnnnnnnnnnnnnnnnnnnnnnnnnnnnnnnnnnnnnnnnnnnnnnnnnnnnngaaaagaaatgtgtttgagaaaactttctccgggggcgggagggggccggacaagcaacgctcgcggtgctggggccgcttatttccccnnnnnnnnnnnnnnnnnntattgtggtgttttcaagtttcaatcatttaattaacatctttaaatgaaacacagttttcttcatgtgtctcactcaggcttcagggcagagggaatggatttttagacatatcaaagactcaaaaatttaaagaannnnnnnnnnnnnnnnnnnnncttctaacattttatggaaattaaaaatcagaggcttttggtctctccatttactctaggtcaagctcatttaccccagaggacaaagaagggctgcctcttctagaccctcccttctcctttgtcctctgtcccacccagcagggaaacaagctcagaaggatcctaacaggatagagttccagtaatgttggaggagggagagggaaagagaagtcaggttctctcccacctccagccattcccaggttgctgcc

SEQ ID NO: 447247 - DNA, 455 bp, Homo Sapiens
  misc_feature (30)..(30): n is a, c, g, or t
  misc_feature (53)..(73): n is a, c, g, or t
  misc_feature (75)..(76): n is a, c, g, or t
  misc_feature (172)..(172): n is a, c, g, or t
  misc_feature (359)..(371): n is a, c, g, or t
aaatggagagaccaaaagcctctgattttnaatttccataaaatgttagaagnnnnnnnnnnnnnnnnnnnnntnntttaaatttttgagtctttgatatgtctaaaaatccattccctctgccctgaagcctgagtgagacacatgaagaaaactgtgtttcatttaaagnctgttaattaaatgattgaaacttggctgtggctactgcttcttaatgttggggggacagggcagtggtctgggcccacatttagaagggaaaatgttttgcctgctgcacacattggacccaagtatgggcctcttctgcctagtactgccaaagggactgttaaggtgtcttgtccatcttctannnnnnnnnnnnnattacagggtaaagggaaccccagactaggtgaggggccagcagctgcctcacacttgtgttctctcctgagatggtccagctt

SEQ ID NO: 447248 - DNA, 424 bp, Homo Sapiens
aaatcgaatacttttttattgtttaagcaaagtacagactcattatattttaacaatgattttaaaaactatattgcatcttttatttttttctccaaattctgcttgtagtcactttaattttgcatttggtattccagaagggcagattttctgttcatgcacttctatccgtatatatgtagttatgaatcctaagttgtatgcagttctgcatggctggggaggcctcaggaaatgtacaatcatggcggaaggtgaagaggaagcaaagcacgccttacataccagcaggaaggagagctcaggggaaactgccacgcttaaaccatcagatcttgtgagaactccctcccccggcttcttcgccgtcacagtccccaacccaagccccagccgcggcgcgggtgtgggtggccggacg

SEQ ID NO: 447249 - DNA, 1176 bp, Homo Sapiens
  misc_feature (1018)..(1018): n is a, c, g, or t
  misc_feature (1020)..(1020): n is a, c, g, or t
gtattcttttctctcggcttctttgtattcagtcctttcctgctcccccttgtttgaccctttgagcatttaacaaaacatcgtgttcatttctcagacacgtttattaagattttgctttaaaaggttacgttatctatttcctctggtacaacacataacccattgttcctggtcgttcttccgatggagcagatgtttattttttcctcttgtcgcaagtggttgacaaccaagtagttggtttataaaccctacccctatttacccagaagacatttcacaccaggctggggtatccttgaacacatttttgtggtttttgctttgaaagcagcaagcagacccaaccccattccataataaagtctaaaccataaggcaacttccccttaaaagcaagacaaacttagctaagctctgtcctaactactgagctgtttttgatctcccccaacccccggggtcaccccttctacactgcgagaagatcggagtattttgcaatgtcacctttcatacctgtggcacataaaatgcagagcaagttaacagtcacataacagttgtttttctttttaaagttttgcattaaacacacgcacacatttcctcatttttggttttcctcatttttgcacgtttttgagattgcccccacccacctctgcatacttaccatttccaaactcggtttaaaaatctactttttccgaaaacagtaacactgacattcctcccctttttcaagggagacagagtagggtccttcaaatcttatttaccaacagatttgacaactgttttaacatcaaatctaaggttttacttcaaatcaacttcagcaggaaggaaagaaggtccagttggacaagctgatgaattttaagtaaccaggggaaggcagacagtggaacaaataggtgggagaccactgtcaaagcatatttttgcccaaaaggtctgcttacttcagtcagctggccccataaaccaagtcacacacaaaatcaatgtngncggtcaaattagtgcaaatcaagctcgtggattcaaatgactatagaaaacgggaagagtagccaattcctggaagctgaagtcaggttaaccattaccaactccctagaggacacatgggaatacacataccaagtattccctactatttcccag

SEQ ID NO: 447250 - DNA, 555 bp, Homo Sapiens
  misc_feature (322)..(366): n is a, c, g, or t
tctggaggaagtgtttcgctacattagaaataccttatgagtaggtctggccctgtcctctaagctaacccctctcctccctgaccaccctctgcagaaaaactcctctctgacctgccgtgtctgcaacctgaggttgaggttgagggataatttcagctcttttctgagataacagagaagtcagagtccttgctgtttccttcttcataaaatgaaagagcattgcgggggcagcggaaggcagaagggactaagtcaacctttcccagccctttctgagatgttcaaaaatgttcacccagagagggtctctatagcnnnnnnnnnnnnnnnnnnnnnnnnnnnnnnnnnnnnnnnnnnnnnccaagttttgaaaactctgggtcaaataaagttaactttctgaactggaggactttctcagaacatttaaagagttaacaggaattgtgtgactctccaagcctggggtgacagcactttccaagctcattctactataattgatgtaacaacccatccaccctggggagtatttaccatcaggctgag

SEQ ID NO: 447251 - DNA, 563 bp, Homo Sapiens
ttttttgtttttcagaccatttttattagttctgttccgacaggatttccagtgactcttaaactgagcggtcaatgatctgcacacttaaagacagagaaggcctgtgaatcagcagcaccctaggaactgcaaacgcagtccacaaaaagcacgatctccagaccccggaatcccaaatctcactgcctcggtggttctcaagagaacacactatttcaagccccacgagtttccactttcggtttccctaagtggctgaagaaagtgactcagcaatccaaagcggctccaaacctcactgcggcgacgccaagccggctacacctgcgctgaaaagcttcaggagtcacggtcacctgagacgcaggcctagcatataggggataaagacgaccggtctccaaacagctgcaaatggcccacccagccgaaggcggtctcagagcaccccgggtccgcgaaccccatgtggtctgtccgagttcccttcaaccccaatccttaggttaaactattacaccgacagacagcgaactcaccccagtgccgattgagctcat

SEQ ID NO: 447252 - DNA, 630 bp, Homo Sapiens
gctagccctgttttctgaaactctgcagcagctgcaggtcggcgagtcttcgtacaggtgttcttcacccagagatgggacggggagaaggcagagctgcaaatgtcagtgcagaggatgcagaagagaagaaaatcaacccaggcgtccaataaaccaagtctctttctcccgagcataaatgaatcccatcccatcaacaggttctccccttggggtcctggcactgactgttccctccttccaagcatcagacagcagcaccctctgaacattcaagaatcaacggagatgtcacctttgtggaaaggcctttcccgcacaccagctggtcactccagcacatggcccttatgcctgtctattctctgatatttgcgaccttgtctgctggctgtctctcttcatgaggatatgccctctgtgagcactgggaccctgtgtgtctaactcactgctagatccccagctcctagaacagcatggggtacacagcagggcctcaataaagagttcttttcactggagggtgactctcaagaggatgtgcagagcctgagtcagaagagttgaagacattgaagggccaggctccccaatgttcttcttgatcaaagctgaaggattagg

SEQ ID NO: 447253 - DNA, 554 bp, Homo Sapiens
ttttttttgttgttgttattagattgatgtttttgtctttgtgtttaaccagccttgcgtttctggggtaatccctgcttggtttggtaggttgtctttggccatattgctagattgcatttgcctaattgattgcctaatgtttgactaatgctgctatttgtggatgtctttgaaaagtagcagagtctctaggtggtatttggtgaaacctgcacttaaaaggtagcaaagttgttatttaatatttttgtgctagcatgtttttctttggtatttttgcttgcgggccagatcttgggtccggagaaaggcaagagctccccgtgtggacctgagtcccgtggagcagcgcccttctcggggcccctgcgtgggtctgccagaagcactggtgtccacaagcagtgtccggggcctttccaggaccctcgttttcttactgccacacaagggcgtcgcactacacgaggcctctgaggaccggtctctaactgtagccttggttggcttgtgtccctctgagcttgagcttgagcctgggctcgtgcccg

SEQ ID NO: 447254 - DNA, 603 bp, Homo Sapiens
  misc_feature (44)..(106): n is a, c, g, or t
  misc_feature (119)..(164): n is a, c, g, or t
tttgagacagactctcactgtattgcccaagctggagtgcagtnnnnnnnnnnnnnnnnnnnnnnnnnnnnnnnnnnnnnnnnnnnnnnnnnnnnnnnnnnnnnnngatttataacacnnnnnnnnnnnnnnnnnnnnnnnnnnnnnnnnnnnnnnnnnnnnnnataaaaaggtatttaggaaagtaaaccaagggtgtgaccaagtgactttctgatcagagtgtggctagaaagaagccaggtgttttcatcatgacaataggagaatgaacccaatggcacttcagagagcttcaaggctgctcctcccatcacaggcccacagtgcgagggccttgaaggcaggatggtttccagggaagggcgtagaacactcatggaactttggggcttgctgcccggggctgcctcaagtctctgctccccacatcccggcacagtgctccttggctgccgtagttgtggctccagtgggcccaggtgcagtttagtccctgctctggagggcaaagtggtgaacctcagcatccacatggtactgattttgcaagtgtgcagagtgcacaagatgtggaagcatggcatccttcaaagagatttc

SEQ ID NO: 447255 - DNA, 388 bp, Homo Sapiens
accagtcactattaatccatactatgctagcagctctaggtggcagggaccattgaagagaagggctggaggagaaagacttgttaaaggttaccaaaaccaaagaaggaatgcgttaaacataatcatctccactccctccaggctttttgaaagcatcttttcctcaccctcttgcctacaatctcgggatttcccttgttgccaggctccctctgcctgaacttctctaggagatttcaggcctcctgctcgcaagagtagtatatatgcccaatgcaaacaagtcagtatagtctggctatttattaaaaagttaataaaaccttaaaacatattcaaactagtttctagaccaaaggacctaacagtctccctgggttggacc

SEQ ID NO: 447256 - DNA, 557 bp, Homo Sapiens
aggggggtttgtggcacgttttgtaatccctggaatacatgctaaggccactttctcttgaaactcattacaagtcatatatccttaaaaggaatttggatgtatttaagggaaagagtgttaaagctatgaataccacttacagagcacttagtatgtaccaggcctctggtaagcaccctgcctacattgaatcctgacaccaagctaagaggttcgagcactggcgtatacattttacccaggagatgcagagactgtgaggtgagagatctgcattggatgcatcaggcttctgggtccctgtgctacactcctctactaagctgctcaaggaactagctgaatggcaggaaggactccattcatgagactatcaagccggtgtccagggagctgtcacaacaagacgtgggtgccgtgtgaactagctggtaccttaactacctaggaatgttagcacacagggtggaaacaaggaaatcactggaccaaaccatctttacagattctgacttagttgcactgctccaaattaagaagaatgaggctatttc

SEQ ID NO: 447257 - DNA, 518 bp, Homo Sapiens
ctgagcaactctcttttattctgtttacttcaagagaaagaaaaagtaacaagccaaaagcccctgggcttctcaggaaacaggctgagggacactttcagcacaggatcggaaggtctgggggtggagacacatcctttgcccgccacagacactggagggcgtgtcgacattgcctgcagatgtccaggaaagagcttggaccctagggggcggaaaaccgtgggtctgtgaccttgacaagctctccagcctcccggatcaccttccttgtcttccttgtcttctttgtcacctgtgtgagttctcaggtgcgccttgaggtgcgaagatttcccgtaaactttctcgcagcccgcgtagtggcacttgtgcttcctctgcggggactcgaggtcggcgcgacttcggccccgccggaccctttgtctgaggccgggctcgccgctccccgcgggccccggctcccgctcgagctccacccccgcctcgggctccggctcgctaacaccgggcta

SEQ ID NO: 447258 - DNA, 370 bp, Homo Sapiens
tgcgcggctgacgactcgcagcaagagcaccgccgccggccccagcccgcagcatggcagccgccgcctatgtggaccactttcgccgccgagtgcctcgtgtccatgtcgagccgcgcggtcgtgcccgggcccgcgggaggggccggagtcccggcccgagggcgcggccgtggccgccacccccacgctgccccgcgtcgaggagcgccgcgacggtaaggacagcgcctcgctcttcgtggtagcgcggatcctagcggacctcaaccagcaagcgccggcgcccgccccggcggagcgcagggagggcgccgcggcccggaaggcgaggaccccctgccgcctgccgccgcccgcccccgagccc

SEQ ID NO: 447259 - DNA, 842 bp, Homo Sapiens
  misc_feature (688)..(740): n is a, c, g, or t
tttttttaacaaatttactttgacacctgaggtgaaaaaaattgttttttcgtggactttgcatcaagttctctctcttctttcttattacaaaaggaaaggccagggactcacgagggggtgggagcggctgctcatggctgtggcgggctcagggcgagctggccgggctgatggtggggctgctggcgtcggagcggctgtagtcgctgagggagccggtccgcgagcccccgccgcgccgctgcagcattcccgggtggaagttggcgtggcggcgcgcgtgcttggtcaggtggtcgctgcgcatgaagcgcttctcgcagatggggcagctgaacttcttctcgcccgtgtgtgtgcggtagtgccgcgccagctcgtcggagcgcgcgaacttcttgttgcagtcctgccagctgcaggcgaagggcctctcacctgtgtgagttctcaggtgcgccttgaggtgcgaagatttcccgtaaactttctcgcagcccgcgtagtggcacttgtgcttcctctgcggggactcgaggtcggcgcgacttcggccccgccggaccctttgtctgaggccgggctcgccgctccccgcgggccccggctcccgctcgggctccagccccgcctcgggctccggctcgctccacgccgggctggggggcgcggccgccgcgccttnnnnnnnnnnnnnnnnnnnnnnnnnnnnnnnnnnnnnnnnnnnnnnnnnnnnnctcgccttccgggccgcggcgccctccctgcgctccgccggggcgggcgccggcgcttgctggttgaggtccgctcctcgtgccgaattcgccacccaggcc

SEQ ID NO: 447260 - DNA, 471 bp, Homo Sapiens
ctgtgacatagtgagcactgttttaatgacagcccgtgtgggaggacagtttagtcatatttttcattttctcgtccccggggagctgcatcccagtgatcaggccctgatagcaaactggcatgttccctagatcagtcacgtaggcagagatgcactcgtagcgcgggtagtgcagcttccccgtgcggtagaagttgagcacgcagcggaacacctcggggtcccggtcgaagaagtactccttggtgtcctcgttgaagaagaactccttctccgtgctgcccagcagggtgtccgggtagcgctccagcgtggtcctccaggtctggaacctccgcccactcacgttgaggacaatcagctcatcctgccgcttgttcttgtcggccggggccaggggcatggggcagttggccaccggcatccacccgatggccgcagcccgggcaaaaggcagccaggccggct

SEQ ID NO: 447261 - DNA, 462 bp, Homo Sapiens
tgtttatgacattttatttgctccttattttttaatgcgcttctggccccatgtcctgtaaacagaccagcttttccattctctggcagtgccaggagagccaaagaccaaacaggcggagctggtgccaggatcctgggccactcaggtcctacaattacaagagccgaggcccaggccagggggtctggaagggggccttgctggcctctgcagtatgcagggaagggtgtgatttgaaatctaggtgtggaaacggggagaaggttctctgcctcctgagctcccccgaggcttggaatcagctctctctctgccccagtagagggagaaacaggaagggcttcatgcacccaatgtatatgtctcatgagtgttttgcagggtctctgcagtcggtaggtgaaactgacagattctggagagaacttggcctttaggaaaacgcctgactgatgttaa

SEQ ID NO: 447262 - DNA, 547 bp, Homo Sapiens
ggatacacaccactctttacaggatccgcgttatatctgctttcagtaactggctctcctgtccgcatccagtaaggtttccactcttctctccgttgactgctgaagttactgaaacagcaaccacaaatggccttactaacctacttattttgcaattaaacttttaaaagatatccccctactcctcccctagggtggaacagaaatggctccgcggcgttggcagctcgtctgcgaggggaccctggctccccgaggctgcagtcctttttcttggacagaacgccccgcaggaccgttccctccactttcccccgcactaaggcagcgcaccgccagcacacacagcgctggcgcccgcatcgcgccgcaccacacgcgtctccggcttgaggagccagtcaccgagacccggagcgggaacgagatgtaaacacggagtggggacatgcagcccgatctgagaaggcggcgtgaagagtagacacagcctgcgccaggcggttcttatttacccagcacttacactccagggcaagcgggc

SEQ ID NO: 447263 - DNA, 636 bp, Homo Sapiens
agaaggagtctctggttctgagttattttgctgtacattgtacagagggctccacaacaaaaatgccttctgtttgttggtttcaagaggatacaggttcagagaatgcacagcatcacacggtccctttccactggttcagggcacatcatgcgctacagtgcacctgcccagcatcgtgctcacattctacattccaatgtccacttgggtggtattttccaaccttttcacaaacaagggaatcccagccttttattatttctccctcctctgcccatatcatgggatgaaagatttttcttccaaattgcattaataagtaattaatggaatttaaaaattaatcagacacagataatggctaatccatgcttctcatcttcaccagagtaccagtgtaattatttttatcataccagcgaaaagcacagaaaattggcctctcagtgagtttattcagtcttatcacagatacagtttgctttctgataagctttttagaaaattgaaggtagctcaaagaacctcgattattccttgaacactacattttgacaggaagctaagcaagaagagtgtagattctattccttcacaaagaaggggtagatgtttgatgcgtggattatcagg

SEQ ID NO: 447264 - DNA, 632 bp, Homo Sapiens
  misc_feature (45)..(45): n is a, c, g, or t
ggacacagactactgtgacgtgtctgcatgcacattctactattnttcatattctttttattatttatttgctctcgccctgccttatggtgctgactcttcattattcttgtgtccctcgatgcttcccttggacttacccttctgctggaggaaatcatattcacttcttcaagccccagctcaagtgccacctcgttggattaactgttaacggggtttcaccaaccccaatcaagatcattcatttgtctgtgctgtccccagtggtgacacttctcctccctccgtggcttggacaaccacccctgctccttgcccccagtccctcagtctgagctccactatccactgctcactaacgagagaagctgactcatctccggcttgggtaccagagcttactagctgctttaagggtagacccttcttcacctcgccaggaggcaaaatccaagtaagattcaccattgtaaccccacagggcctagttatgccctacaataagatctcctttaactgtagagagaagaaaaagacttcaatagaagctcaaaggggtcttaggagggaactccctcatttttgcaaaggatcaagctgaggcctgaataaagtacacactgatatcc

SEQ ID NO: 447265 - DNA, 508 bp, Homo Sapiens
aagaacagcaatcacacatttatttcacatataaaataaaaatctgaatgttacatttttccaatttaagtccgggtgggtcctcaataaacaaatgcatttctctgaatagcaaattatgtaagtagctttaggcagcataccaaagtcttatgtgaaaagtatgctctctaactctcacaattgttaaggtttatttgcaatgaaagtaattcagaattttcatcctctttatgtgaacctcagatcctcttagcagcatttgccagcctctctaaaacacagagacatacacagacatcatcctcttgttaaaatgagacatcagaagaaacacttctgctctaggacatcattagagctggacaacagccaagaacatttttatccagggcaaatgtttattccctctatcattcagcgcctcagtctctgcaagaaatcaatttccactctacctttccctcctatttctaaaaaagagagtgaggcggataattcttaagct

SEQ ID NO: 447266 - DNA, 697 bp, Homo Sapiens
gcatgttaaatgttttattccacatcaaccattacttttcatcctcaagcctttgctgaaggctatggaacccagctttggctgggtctgagtgcagagacctaagaggatctggtttgaaacctctttccctgtgagaagagagtcagtgaccaaatgtagagacagcagtgaattattgatggacctacatgttttacacatacagatgctgctaaagacagttttcccctaaaatcagcagttagcaaatgttttaattagatcaaggcattcctaccttgtaggttgttccagaatcttggggtgagaacatttgtaatttgcaaaagtaatattttatctgtggaaggcaagcacatggaagaaaaatctattgtcttgtactataaactaaagaaaataaacaaaatcatcctggctgtgggatgtacaaatgttcagtgttatatgtgtgtcagtcactgatagagggctggggaaaaaactaaagtctgccacagggactgagtggcagagatatttatgcttatcagaggtggcgggcaggcatcaagaaattttgagaaagtgaattaaagtcttataaatactttagtcataaaggccaatgatgattgtattatactttctgcatttgttaaaatacaacataatcatatttggcatctaatcactccagattttgtggtagcca

SEQ ID NO: 447267 - DNA, 715 bp, Homo Sapiens
gtggaaaaccaggagagcatggagctttttcgctggtccggcgcggtctcttgcgttcctgtggcgggcacctgactccccatgcccgagtactgtcctcaggcggaacggcgtctgcagcgaggagcggggttccagcaggctcggctgacgcggtccctggcatttcccgtgctggccctgggtcgccctcgatgctgcttcccgctgggagcctccttctgacggcggaaaggagcttcacctggggcggccggcggggaacggagaagaatccaccggggaagtggacggggctggctcccgggcctggcgctgcggctctcgggccgtcagacctcccgcgggttgcgtcactttcctcggttttctagacagcagttgtggggttgaatccttgccgtggttttgtaagaattaaatgagataatgaacgcgaacaccaatcattgctctttgttgggtgcttcctgtgggcctggcaatattaacaacacgagctcattcatgcattcatttgctactcagtgactttcctgtcaatactgcaaggtgctggagatgagcccccactctttggtcagtaaaactgccaagatcaccgaccttgtgaagacatttgaggatgagaggttggtttggagcctggacgtggagacagactctaaaatagttactacaagacacatgtaatcacaactttgagagcttatag

SEQ ID NO: 447268 - DNA, 490 bp, Homo Sapiens
accttacacatactcaacaatttttaatatctaacacagtattaaaaaaagttttataattgcctaaaaccactatttctcttccctcattctagtcccttggttggctccagcttacctggtagctgggtgttacagagtactgaattcccgtagctgactgcatggtctcagtcactgcttcatacacaggaggggcaggggcaagcacccggtgctggtgaggaaaagcctctgtgctgccagggatccgacgctgctgggctgcatacaccggtgactcctggtcatccaaacgccgcttcattctgtgctcatgctcagggatgcactacaaaaccgcaaagctgcttcggccgctcgtcactgcgtgtccctctcagcgtgagccgcgagctcagcagggaggccccgagaacggcgcggggcacaggcccgccgaagcggactgccagctacctctccactaacgaagcggtcacaggctccg

SEQ ID NO: 447269 - DNA, 749 bp, Homo Sapiens
gggtaaatgaaatcattttattgcacttgaccttaaactgtctctccgtaacctttctgccaacattaaggccaagtaggtgcaaattaaggtaagaagacagagtggatgggagtgggtgggtgaacaggacagaggaggccgccaggtggatttctcattggcggagaggacgcccaaaccctcagacctggcacccagcctggacagggtcggggatcctgcaggctccacggagcagcccctttgtttgtattctaatgtgttttgcagcacagaacagaagctgcactgttatgctggagcgtttcatgaacctcaagtcttttatctgaaatcgaagcttaaatgacttcttttatctgctggctcgtgggccagccccgtccagtggctgaatgaaaaggaggaaggccagtgctgtcccatttgcaggcttcaatgagctcgacagccctgggatctcagagagcagagagctgatctggttgcagggacttcaaagacaacaggcgcaggagcccacactgcctcagactggccgtggccaagccccggctggatggcacaatgcgaggccttccctgacggccaggcccgtccaccctcggtctggggagggggttggctgggaggtgggcagcgtcttccagtggtgaagatgaagtcacccaaacgaaacccttctgcctacaattaagagtgcagtttctctgcacagaaggtggaaatcgtgttttatgaccaga

SEQ ID NO: 447270 - DNA, 611 bp, Homo Sapiens
attattttttcaatccagggagtttataaaagtaattttataaaagtaatttccccaaagctgctacaattttagaatggcaaaattccacagttttggagtgacaaacatttcccacaatgtcgtggttaaaaaataagaggtagtggggagttaagaatgaaatggtttgtgaatttaatggtctgcaatgtgctcatcaaacacaggctaagctcaaggtgaagactaccaccaccctgaagggtcaaaaggccactgcataaatgtgcagccaacccccgcccgactctaaccaagcactacaggaagagtataggaccagaccaccatgagggaccccggctaaagcaggactgtgctcacctgcctgtggtcagagggaagggggtcacccaatcaccgagccacaaccagctgcctctcctctgactttggatccaagccacccagagagccagtggtctctggcaatcccagctttctcttaccctggttcatttctccctttgctgacctcctaactgaagggatgttcttgcttttgttagtacctccttcattgcagacaggctgcagaggtagggaagggaggagggtgtggccataaa

SEQ ID NO: 447271 - DNA, 828 bp, Homo Sapiens
gctcaggtcagttcctttaatttggggagtgaggttttaatattcagcatcatattttcaacaagacctctgttctctatttgcatgtgcctagttcatactccaggcagttgatcacataattcagagaggcattgacagggtgggagtgtttctgggtaggtgtccagatccccggcccttctcagcctggaagtgtcaccgagggaaatccctgttttacatggggctttccctttttccctctgtaaaatatgagggctggactggcaggtccccttcctcctgtaccttctagagatcgatggttccgggacaaccttgtgcccatggtccagattttgagctggagaaggactatggctgttccttaaagtctctgcccttgcagaatctgtagccttcaggataccccgagtgccttacagggcttgtgaacaccgatactgcgagatcacctggagggcaagctctgcagtcgggtgcctggcagcacctggctccggtcgaccacctgggaggctccctcctgtggctagctctgctggctcgggccccgccagtactcgaggtcatggtgactcagtggccaaactctggctttgaaatgcggactgcggtaacaacgcaaaggcctgaagtctctgggttcgaattcagctgctgcaggctgggtagaatgacagatggagtgacagcatcgcccgtcactcctgtctcgccccaagcctctaactcggctttaagggagatcagcagcagtttgcgtgggcgggtacaccccacccccgcgcgccctccacactcgcccagggtttcggagtcagg

SEQ ID NO: 447272 - DNA, 682 bp, Homo Sapiens
gtcatttgaactttattaattcgacaaacactaaataagtacctattatgtgctcaccatacagaatgggcgagaggactgggaaatactccgttaggtccctcccagtttcagctgctgttctcaaattggtgcaccataccttccagtaaggatctgtagacagcttggggatctcctcttcttaggtccatccaacatccctttgcttccttctgcatccttctgcacagatgctggtatatgggtcttgagatattgatgactcattctcactggctcatactttggggtccatgggagtatgtcaaaccttgacatactagatttgttgcggatgttgcatgtggatatttggtttccctctcttacttgctcttttgtttttttatgagaaagatccaaaaagtacactgctgccactgttgttgccatcttcctaaaaccttgtcagaacagagttggaccaaggttctctaaaacaacagtcatctctaggaaataatgactcatccctctcacttttgggaatctttgtttcctggggccctcagccccaccctgtgccagggtgtgttgtggaggttagcagatgctgatatgcaaaattctaagggataagatctaatgacttagtcctcaagtctggcctctttgtgaaatggagggaaggaaggcatcc

SEQ ID NO: 447273 - DNA, 698 bp, Homo Sapiens
  misc_feature (44)..(44): n is a, c, g, or t
ccactcttcattattgggtgtgaacacacaattcacacgaaaantctacagccaccgtgacgcacacatatggtctttattattggtggatatagtgtgtataaagatactttttatttcaccacgtcttcaggtaaggtacctctttatcttacactattataagaaggctattctacacaagtaattttcatagcacttacacgctaaaagagaacaaagacttatggtaatcaagcagcctggaatgtctcatcttttcccaaaattagtatgttcaaaattgtaaactgatctttcaaatgaggatggttacccttaaaagagaggccaggggttccagagtcgatcctgtgcaaaagcttccctctgggtggtaggaacacaccgggaagacacactggaaactagggaagacgtcgccgccaatgcagctccccgatttgacgagttatgtgcgggtttgtaataatggaaggaaacagaaccagagagtgtctatgaatgggatcttgtttggccctggtaccaaatgttagagaataaagtactttttattcccaaataacagcatttgccgtaactaaaaactttacgtaagtttcccaacacaccgaagctttcaagacttgttttctactcagaatcttaccacatttttataagctcctgggaactgcggtaagtcacctgcatta

SEQ ID NO: 447274 - DNA, 449 bp, Homo Sapiens
ccaagaattcggcacgaggcctgtgaccatcttctattcttccctctcttttgtccggtaatctgtctagcagcagccattgactctggccaaagcatcttgatctcaccttgctctccatctcttctgccgatgttctctctcgcttgggtgtctccctaagggactggctgctcagatctcaccaccctgcattcatcccattttcagccaagagaccaaagttttttaatttattgaaacactttagcagtacttagtataaagtagtatgtgtaacgtatgtatcagtggcaaaagagaaagacagagtggacggtggcgtgcccctgcctgtctcaggtatccacccattctcccaaagccggaacagctgcctctggggcttcagccatttgcccctcccacaggtaaccccctcctgagtgtcagctttcatgcccttattt

SEQ ID NO: 447275 - DNA, 347 bp, Homo Sapiens
atgagccaccacacctggcctccttatctttttaagtcccggcacaaaagtcgcttctgtccttcatgaagcctgcacactctggtgtggctcctgtcgcaatctggacctctctccagttctagagtgttgtctgcttttgtgttaattcctccgtcagcagtgggaggagaaccacgtcactcgtatcttgtctctctggtgcctagcagagtctgggcacaccgtggcactcaaacataccccctgaatgagtaagggccaaccttgaaatacctgggagctgtcatcgaataccacggtgtcatctgtcccatcccgtcacagatgtgaaactgcaggcctgg

SEQ ID NO: 447276 - DNA, 609 bp, Homo Sapiens
aacctcccggaaacattcataagtttaatccacgccagtaataaaatcgcattacatttttcataaaataaatgttcccatttatatacagaagacagactgtacaggcccggcctggccccaggaggggtcacacacagacgggcggtggtggaggaggaagggccatccctcccatcgaggacggagaagttctaatgtggcaggagagcggctggccagcctgcactggtagagtggctggctggccggccaggcaggtgggcaggcgggcagatggacagacgggcctggaggccaggcgccgggcgttactgaacttgggattcgaaggtgccattgagctgcccttcctcatagtccatctgacacaagatcatgttgttcttcaggaagaatttgtctcccacacaaaatctctggttgcagagctggcaggcgaagcagtcgaggtgatacacgttgtcccgggcccgcatcaccatctcgaaggctgggatcagcttgctgcaagcagcacagttccctgtggtgccaaagagcctcaagttgtcgcgtcggcccaggatgaggttggccttggtgaaagggtggagccacctcgcccag

SEQ ID NO: 447277 - DNA, 444 bp, Homo Sapiens
tcaagctcggtgttgtttcacacgcgtgcgccctttcctacggaaccctcgtaggcaaatcagtcaaagcccgtcccggttctggtgtctccccgggttactcgtggctgaggtctcccgctgggtgacaaagttttcttccttttgcaaagctaagaaacattttccaccctctcggctcctcccacagattcccagaggtaatctgaaaggcaggtgcaattaaaaccagcaatttggaaaacaagcctcctatgcctgtgcccaagtggggaatctggaaccagtaagcccgttcgtgcataaatgtaatcctcggccgcagaataaaccagctcggagcctgcagctgggtccgtcctcctttctgggcgagagggagggcggcgggggaagaggaggtgcaaggcgagccctctgcgcaattaggctacgggcggccgc

SEQ ID NO: 447278 - DNA, 357 bp, Homo Sapiens
gagggataaaaatagtgtggcttttatttctgtgctgggatctcaaggaggtggtgcctcagggaggtggccgggaagaaccgggccaaggagccagccacctgggccaggtgacacgaccggaccggggccaccgaggacatctgcaccagagggacggccagggcagctaccctgtgacctccagaggccagcaggtgcttgcaggccacttcccaggaggccgcacggggcccgcccaccatggctgctcagagccgagaccgcccagcaccaggatgctgccccgagatgaccccacgacaccaggtaccagcgagtgcaggatggaaggtgccctggatgctcctgggtccg

SEQ ID NO: 447279 - DNA, 593 bp, Homo Sapiens
aaaatgaaaacatgtttattgcttagtgatagatctttcttccatcacagaagttcaaaatggagattagaaatttctattacagcacaaaccagaatttctctccagatatgatattccagcatacagatttgtgatctggctaatagaaatatcaaaaaacagaagagaaatcaacaacaacaacaaaaataataattttacttttggaatttagaaaatgcgttgcaacagtgtaacaaagagtgttcagtatgtattataaaaagggaaattgagggctaaaaacatttgggatatactaggattaatacaggttaatgatttgtttcctagtagacttctcttgacttttaatatattaatttgcactgcagatcttgctttctttccacaattgtgcatgattgaagcagtcagcatttgtagtttcccctccaatgcaaatcagtttttctcaaaaattcttgaagttcactttttctacccctcttggagagggcttttttcccccctccctggtggaatctggctgctccgtttggaatctcctaatctttcctttccacttagattgctggcagcgaagacca

SEQ ID NO: 447280 - DNA, 706 bp, Homo Sapiens
  misc_feature (144)..(189): n is a, c, g, or t
  misc_feature (390)..(408): n is a, c, g, or t
ttttttaaaaaataaatgtcttttattgaaatattttacagaaaagattgcaaatcctaagtgtacatctcgagagagtatcacaaagagaacacacccagtaactaccacccagatcaagaaacagaatcttaccattctgannnnnnnnnnnnnnnnnnnnnnnnnnnnnnnnnnnnnnnnnnnnnnacagtaagaactatcctgacttttaactccatagactagtttttggagttgaggtttgcatccaggtctgtggccaggatctgtagtaggcacagtaataggtggatggctgtctgcagtctgatagggtctgtgcaggattgccaagattgttttccccagctgcatcccattctgtgctgttctccttcaatttccttnnnnnnnnnnnnnnnnnnncttgtgggagacaggtgctagctctaaagaggacctctggaaacaagtgagggagccacctgtgtccagtgtggaagagagtcccttcctgtgctcaaggagctggctatgcactaggctgcagtcaatgaggtttgctacatcccatctttaggaaaatatgatttaatgacaagaatgtccttttggagagagcaaatcaatagctctgggcagtatctttggacaggtttagccatattctcaaagtaaagggtttcaatctgtgaaatgtgaagaaaactctatagtcattacc

SEQ ID NO: 447281 - DNA, 414 bp, Homo Sapiens
caggtcacaagatatttatttacaatacctgaaacttcgacctcacactctctttccacacatttgacatgagaaaggctatcatgtaactgtcctcagggttacttaaccataattcggctatatcctcttaagaagagaaaggaatgaaacagatgggtccttcatctgtttcttattaacacagcattagttttgtcatgacaaaaatttcatatctattcatgtctcttccaacagttcctaactcacattctctctaaatagtgcagagagcaacacggcagtttccttcagttaatgcacggacggagaaatttccctaagttaatgttctgtttgctcagtcgcaacctcagatgcaaagttttcttcttcttttggtgaggacagatttccatcaagaagatggag

SEQ ID NO: 447282 - DNA, 699 bp, Homo Sapiens
  misc_feature (476)..(567): n is a, c, g, or t
ggcttaaataacatgctatcatagctattattgttaaaatttacactgaagtctgtataagaaccaggtgaatactgcataacagcattttgggagcagaggaccacgatatttggagacagggtccgctgcgtataggaatcccagaaggagatcaggctacagctgtggacggaggccaactgtgctgctgttccagcctcctccacccactgtcttctcagccattcatctgaaatgaagatagacagatgctggatctcacaatgaccttcactagtcttaagaatgtggctcggggagaaagctaagggcacagttccttgctaggttggctcagtggtgctagaaggagaaaggtggcgagaagggcttgtaagtgaggatgcaagaccttgaacctttctagtgagacttggaaaggtgctaagacaggggctctaactttaatcacggagctaggggcctgaaaaggnnnnnnnnnnnnnnnnnnnnnnnnnnnnnnnnnnnnnnnnnnnnnnnnnnnnnnnnnnnnnnnnnnnnnnnnnnnnnnnnnnnnnnnnnnnncaaatttcctgcctctggctagtggtgtttccgtggtatcagtttacctcaagtagctccaataatgttctaatagtgacactttcctttgttctgaaccactgaatttcacttctgaaatattttgactta

SEQ ID NO: 447283 - DNA, 544 bp, Homo Sapiens
  misc_feature (220)..(220): n is a, c, g, or t
ttattttaaacgtatttttattgtaaaaataaaacccggatacagaatccaatggttctgatgtacggcttaactaattactacaaagtgaactgcctccgagaccaagaaaaagaactttgccagccacagcagaagtctctccacgcgccccaccccagtcactccttcctcttccataagtagtcatccttattctgactcacaggacgcattaatntgcgtttttaacagcaagtccgctggaggtgggaggcgctcggggaagcttctagggccgtcagggcccattccctccgctaacacccctctctccccaaccctcaggttgcgcaagacctctccagcccggcgaacccgtggggctcagcagtcctcctccacgctcaagatgcagtttgatgcaatcctagaggacgcagtttcaagtttctcgagatagagaagcgaaagaggatccgaaaccgcgcttcacatctgaatctgatttcagattcctccggaatatagcggaagcgcggggttgagggcgcagaccggggca

SEQ ID NO: 447284 - DNA, 310 bp, Homo Sapiens
  misc_feature (125)..(189): n is a, c, g, or t
gtcttttcaacttttcatagaagttggttgtaacttgtaaacatgtttttaaattaagaattaagataaagtgtagtacccgttccgttacaaagtgccaagacttctaatgtggttggttgccnnnnnnnnnnnnnnnnnnnnnnnnnnnnnnnnnnnnnnnnnnnnnnnnnnnnnnnnnnnnnnnnngtgacattggaatttgtggattttctctctctccccccatccctgccatcaccagaccctggggttcctctgatcgtgactctgtttatcccacactgttgcctgctcctctgaggaaaag

SEQ ID NO: 447285 - DNA, 779 bp, Homo Sapiens
catcctcaaaccaaatatttattgagccaactggtgtatttcagtcctcattttacacaattaaataggacaagagtttgtgaaattcttgtttctaataggcaccattaagtattatttttcctttaaagatctgccataaagggctaaataagtgtctcttctataatttctgattccagatgaagtgggaagccccttgcagacaggtggtggacactgtgagtgcaaggccggtgggaagacaggaaatggctgcagcagaacaggcagcagcagaacgcctccaggaaacagcaaaagtaagtgcagtttccagaacaggcaaatctctagagacagaaagtagatgagtggttgcctagggcttgggtgtgttgaggagaagaggggaatgagaaatgctgatggtatggatttgcttttgggaaggatgaaatattctaaaattgattgcagtgacagttatacaattctgaatatactaaaaaccactgaattaaacaccttaaatgggtgaatcatatggtatgtgaattatatctcaatacagctattattaaccagaaaaaggaagtccagctacatcctgggtggctcttgccttcatgtgagacccagcatgtggctcagactgatctcagcctgtgatttgttgagtgtagctctgtgccatcatggcctctcactgatgagccactgtcttttctaagcagcaaaggcagaggatgtgaagaaagtccgggagacggggctgcacctgatgcggcgagcgctgg

SEQ ID NO: 447286 - DNA, 766 bp, Homo Sapiens
cggcacaaccaccaaagggccaaacaggccaatcccgggagaggcaaacaagccagggccagcagtccctcacagccaccgttagctccttccgcacaagccatagtcagctcatcctttgcctcccaggagagaggtcctggaggttggcagaggtgatgacatggtcatgtggctgctgcctcaaggctagctgcttcactctgtccactgacacctccagcctcttcagcaagggagagtagtctctgtcagcctggaccctctgccacagggttggagggatctggcctgtggcacaaccaaactggctaacagcaaagatctggagcacggccagcgctcgccgcatcaggtgcagccccgtctcccggactttcttcacatcctctgcctttgttttgctgtttcctggaggcgttctgctgctgcctgttctgctgcagccatttcctgtcttcccaccggccttgcactcacagtgtccaccacctgtctgcaaggggcttcccacttcatcttggatgaagttgataaacatctcaaggtctcggatctgagttttcagttgctcaaccaactgttctttgactcgggctgggttgacgatctgagccactgctgcatctacacgctgacgaagctcttcagtggacagggaactgatgtcctcattcagattcatgtccagtttctttattaactcatctatgatcacccgctgtctttccaacaccacgctaccacccagcctcgtacctagccc

SEQ ID NO: 447287 - DNA, 807 bp, Homo Sapiens
ctttccagagtagtgtttgtaggaggaagggactggttattgaagcacgtggtatgtcttgggtaggtagaaagaaaggaagagaaatttcaggaggaggcttggtataaataaaactgggagggtaggaagtggtaagatgtgactaggacccagtaagtaggctaatttgctggaatatggaggtggtttggaaggtgaagctggaagtgtgaaggctggagtcattatggttatagctgctcttgaatgcatggctaaaatcttgggatttatctttcaggcagtgaaagttcagccattgaaggattttgagctaaggaacaacataataagagtctttttaaggaaaataaccttgccatctgtctgaaatagagagaaatgggttaggaagctattacactagttgaggcaagaagtaaaaggtttgtgaaccagaagggtggctatagaaatagaaggaaaacaaggaatggttagacggaaatattttaagagatttcgtagattaaaactgacagattttctgacatattagaatggattgtggtggcaatgggaaagatgagtcaagaggtgactccaggattgtagcattagctgagggtgggagagtgagtccagttaaatatatacgccagtgagagatggggacagatgtattacactaggaccctgaagtttttcttggagggttccaagaggaacctgaatcacttgatggttacttcaccaccaaaaaattgctggaacaaacagtcactatttacacgttagtgatgcatttaaaaattaacttgaacc

SEQ ID NO: 447288 - DNA, 450 bp, Homo Sapiens
cttctttttgactaaatctctacctctcccatagctttcagttctctgagctgtttactttctacaaaaagtgggaaaatgaccccaaagtcctatttctttttctggctggctacactgtgatgctgacaagagacagatcggctcatgactttcacctgagaggactcaacgaggctgggaggatcagagagattttgaagccagacaggtgcacggtgagtgtgagtcttggcatggctggggtgggaggagggaggagagatgtcccgagtcaggagcctgaaccccaggtgcgtctgggctggggccccctctggtgtcagccaacaccgggctctaagacaagagattgctactaaagagttgaagcaaagagaagttgatggaaaatagcccagctctctgaagctgggatccaaagggtaaaaagccctggatttccaaagg

SEQ ID NO: 447289 - DNA, 570 bp, Homo Sapiens
accgagtaaaagtttatttgaaggaaagaaaagcgacacagcagtcttacatcgtccctcggtagtttaaagttgtggctagatacgtatcaattaaggaatcaagctgaggcatctgcaagtaccaattttactgtaatgctctaaaatttggtcacttggggaagtctttacttgtaacagtgtaagtacacaagggacaggagggttttgcgagaaaggcgggcgctctgccctgttctgcccgtgacatgatgacgtaagaacgactcccagaaactgcctgagtcgcctgcgtccccagctccccgatgtgcacctgggcgcgggacgccgcaggacggagcgagagcgctcctcggtcccgctcccctgcgcacgggccggcgaggacccgggcgtcttcacccccacaggaaggagcagagagagccacccgaagtcggcctcgagtcatccgtgtccccgggtgccctgcctctccaggatacctgcgtaactcgcagcagccaagccccactacgttcaaaagtgtgtttgtggttgtcacagtgcacaccgaaaagctcg

SEQ ID NO: 447290 - DNA, 583 bp, Homo Sapiens
atcatcaagtcttaccatttatttctttatggggttaaacaagagcagagaggcctctgccccacaatgcaacaaaacagaaagcagtacatatacagagactctcaccgaaacacagaggcagggtaagagggagggcagagacaactgaatcatagctgggtaagggaggaagggatgggggactactaggaaaccagtttggagactcagtcataggaactagtgcaagaaagtcctactcatgaagcacagtgtagaaaatggcataagaaagctgcccggctctgctgtctgtgatggagggcaggggcagccggagaggtggtggaagattagggtggtggggtggatgggggcagtcaaatgactttgaggtggagtgaggtgcccctttcccctgccactgggcaaggccttgggctggtctgagccaggggtctcctgggcacttggtgagggggaagagaggatgggagtctccaagggtccattccctggggccatatggtttccctttacttcccagtcccttttccccttctgaggatgcaggagttagaaggcagtacctagggtctct

SEQ ID NO: 447291 - DNA, 546 bp, Homo Sapiens
gtgttattaaacctttattgaattcagcactagtaagaagttctgaattggccatcctgtagtataagcattatagttattcccagaactggcccagccaggggatggctgtcatgacggctttaaccacataactcagcttaattcccaagggccgatttccagggatagaaggagcctccatggcccgtaaatcttcggctgcttcccaaatccaaggagcagctggagagagtactgtgtcacgcaccggatacaaccacacacaggagtttctggtacatcacgtgccagttacacatccacaaggcagagactggagtccttgctgggacagcgtttgaggtccgttctgtttcctccctgctactgcagcagtgcttggaaccgtgtctccacacagcaggccctgaaacctttgctgaatgagtgcacgattaattttctcagctaagtccccgctttctgcagtctgcaattcattacataaaatacatcaggcagtattatgacagccttactacgaaaaagtcctgagaagttttc

SEQ ID NO: 447292 - DNA, 550 bp, Homo Sapiens
cttccaaagatgtctttattttagtacatttgcaacagcaacaaaagtgaggacaattccattcaaggtggtggcagcggtggtggaggtggaggtggttggtagcggctgtttctctctgaattttctaagtttacaatcagaaattgcatagaatttgttttccatcagccaatgagaactctgcgtgaaactcccaattagtgaagccaagcaaaggtcaagcagctgtagaaagcctcgcccctcccatcagatgtgtgctctggactctgcaaacttctcacatggagagcagtcactagcagtcacttggtaacctggacagcatcagtaactcctatttggtagatggaagagaagttaaatgctttacctaaagtcatacaaggtgggagggctactgctcaagctgaggttacgactcaagagttcctggttcccaggcccgtgtattgactaggagactccacctctctcccaggaacctagcaaattcttgaatacttaaggtctttctgttgaataaatacacacacgcacacgcgcg

SEQ ID NO: 447293 - DNA, 671 bp, Homo Sapiens
  misc_feature (278)..(333): n is a, c, g, or t
ccctttctcgccccgtggggcccgggcgccgctacgccgcccgcccggttgtatgctatgtagtcttaattgcgatgctatgtgctgtgacttctgagggttgttagcgtgccttggggcaacccccatgcctccacggcccctgtcgccgtcctgctgccagcgcaccgccgccacgcccgcccccgccagcctccaggaaggctgcttcaacttaaataactttttaaaatacaacctgccaaatataaatatctttctttctcaaaaaataggannnnnnnnnnnnnnnnnnnnnnnnnnnnnnnnnnnnnnnnnnnnnnnnnnnnnnnnattctctctgtcttgcctccaaccattctggttgccgggcgggagggggcaccccgaggcccctgcctcagtgtcaccacctgtgaggtgaccgctcctgccacggccccggggtctgaatcgtgcaaagacccctgtcccccaccttccctgcagccgcccacttccaggggaagaccctggaagaggctgggggacccccctcggaaggaagcaaaaagacagtgacaggactgcatggccacaatggtgggggggcagactttggtatcgcccgctcgagcctgcctggctgcaggtccacacccatgccaggccgggcctgctccggcatttta

SEQ ID NO: 447294 - DNA, 763 bp, Homo Sapiens
tctctgtaggtagaggggtgtccccttccccaacccggcggtgagagcttgaccccgggagcctgtgaaattgggagtggcgcttacccggcgggtgtggaagtgttttcaaaagatggcggggccgcaaaacgtttttcgcgagcacgacagtaaaaggccttggagccaaccgggtgtatggatggtgggcgtccgtgcacgatgcccggatccctggaacccgcttcatgaagtcgccccaggctgcatgtggctttttgggcagcttgaacttctttcccgtggtcgtccagtttcgaggcctcggtgcggcttgtccaggatctcgctgatgagcctcatcagctccggcgcctgctcagccccctcgcactcaggggcagacatggattccaccgtcctcttcaccaaatcagtgggaaagatccgtatgtctgttttatacagattctggaagtccaagagggcgttcagcagctgtccctgcatcagataaacgagccctcggaggtacaaatagcgggccaggagcagagagttatcgggggccagaaagcacatggcctcgctcagcatggagacaaagtgggcatggtatgcctgcacgcacttgctctccagcggagagtggatttcgggaatcttgaatgtatacggggacttcggcgtgacattcagaactaatacattcagggggaaaggagaccattagcacagaccttcctaatgaacacgtgtcctaacacatcagctttcagta

SEQ ID NO: 447295 - DNA, 615 bp, Homo Sapiens
  misc_feature (146)..(185): n is a, c, g, or t
aaagaaaaaacttacatttattatttttaaatccagattcaaattatatatttaagcaattccgtaatgatttcacctttcatgatgtgatcaattctttggtgaagagtttccttccacttgcattaatgatgaggattcttttnnnnnnnnnnnnnnnnnnnnnnnnnnnnnnnnnnnnnnnngagacggagtctagctctgtggtccaggctggagtgaaacaataattttttttaaagaaaggtcttatgcttagtgatcaaactgcagtaaatgtcatattcaactgtatgtgagaagagaatggctcattgcattctccatgtgaggctgtctcaaatgaagtattggttcacacatactctgtgaccctctttttcacaaacaggtaacatcttcacggttcagatgtctgcctgctgctcttgagattgtcctgcaaccctccaggttctgatgcaccatctggggaggggcgctggggagtggaagagccgtttccttctctgggcttaagttcttccagtggtgcctgaagttacaggtctcccactgctggggccccagaccacctacaggcaaaggagacagccaacctgtcctctccacggc

SEQ ID NO: 447296 - DNA, 340 bp, Homo Sapiens
ggccgcagggtgggcggagagggggcgagttgggagaggaaatcgcgcccctccctggccccggcgcggctccttcggggaatcccgcagggcagccgggagccccagaggcaatcccctggagggagaattgagacccccggcctatccgtaagttaggtttgcccacaaagcatcacagttgcaacctcgccccccaaaagtaaagggaaagtaaaaccagcctccagtcccctagattttcattaaagaaggcttcgggacacttccaggattcccccttggcacctgggtggtaagggagcccctgctccccggctaccccacctgctgcttttgt

SEQ ID NO: 447297 - DNA, 298 bp, Homo Sapiens
ggtcttcaccatttccaatattgggagaacatgccaggagagatttttctatccaccactggagatattattattcaggatgatggaactgtagattgcagaatgatcaaaaccagtttgtaactgaaaccaggtgagaaaatgagcattcaagggagtggaggacggagaaaaaacagaatggacgcttgattgaggcttgagaaaatggtggcataagtggagccgagcttttcagcctcagcaatgctgacattttgcgatgcctcattcttcattttcaagggctgtctcatgc

SEQ ID NO: 447298 - DNA, 690 bp, Homo Sapiens
  misc_feature (441)..(441): n is a, c, g, or t
agttccagaggagctgagattctattctcatctattctgatgatgggaagctcttggagggatgagagctgggtcatgcccccatctgctttgtttttagcgggatccacttcagcccctgtgtagagagtggactatagagtatacgtcagttaacaaccagtcagcaaaacagaaattaccctaggtatttcagacaagggaaatttgatacagggaaagaattgaatgaccaaatgggggatgatgaggcaatccaaagatgagcaacagccggaagtcactactactcttaagactggagagataaaggaagtgaatggtgctctgatgccaagaggctaggatcaccctgcaggagccagaaccacagagggggccacctgaagggagcccctggctgagcttcagagggaaataaatcctggcttcttccctccntcccatctgccagtcttctgctggtaactttcattggctgaacatacccaaagtcagttgacaaaggagcctgggaaatacagttcccaggaaggcagtatagcactggggaagaagggaatgaatctgagggcaaacaggcagatggccagcacaaggtgcaggagctgaggccgggagaccagttagaaggatgctgaaatggtccaggtgagaggtggtggtagctgggaccagcttgatggtgat

SEQ ID NO: 447299 - DNA, 477 bp, Homo Sapiens
atgaatagaaacatcttttattagaaaacaaaaagccatgaagaagaaaacacgtagaacgtccctagcgtggaaacaggccgagccaagcagcccccacactcaggctggcgctgagaactgaggccccttcctgtcggcttgaaggggacttgctattcctctgtctcattagcatgtctttgctcttccggaccatccgcccagacaaatgggaggactgttcctgccaggaacttccctgaaggcccatccactcttcagtaggaagcagtagaagtttgcccctaggagtctttgaagtcctcgaaacccttgcttgctgtttccaccaactctgcgctgcaatatcgcgattcttacccaaccctcaccaagagcctgctttgaaagaccgccttcaatcacagttgcaactctcaatccagtctgaccttgccttcccacttcgagccctgccagtgctttgccgggtgg

SEQ ID NO: 447300 - DNA, 520 bp, Homo Sapiens
aaactaagtaaatttctttttctcccaatttactcactgcagtaccttatactacaagaaccagcaactggtttcctcttaatgtctaaacataacatcattgttaaaaattagagactttgtcacaatttgcagtttttaaaagtaaggtaaataaagtatctcattatacagaagtacaaggtctcgttcttgtacatttcgctcttcccaaatattctgcaatcagaaccctgattgcaaaactaagcacatggattctcaaaagacaccaggccagagaattctttcatcctagtcccaatctcgcccttgaaagcgtgggaggggcaaggctgcgccacgggaaataaatgagggctgccaaaggccgtcggaggccgcggggctcggcaggcaggcgaagacccagcgtcgcattgcagagtcgagacgacctgggctgccgtgacgccgcagtcgccggccctagtttcccccgccctgcccgagcgcgtccgcgcctctcgcccgaatccgg

SEQ ID NO: 447301 - DNA, 364 bp, Homo Sapiens
aatgaaaaagatgggagggaagatggccactaaattgtatttgaaaccaaaagaagtgacccatctgctctggggcccgtggagagagaagagagtgcagattacgaactgggaatgcagaagacagaaagatgatcagctggaaacaaactgaaggagtgtgttggctagcaacacataatgagagtaggggcaggcttctgaccttgatggtggcggagccgcattctctcgcataatctgtcagttctctctctctcttacaggagaccagcctgtctgggaaaaagtcacttagctaccaatgcctctgagcatacggccaaattcccccaacctcctctctgatcagcttctgcctctt

SEQ ID NO: 447302 - DNA, 371 bp, Homo Sapiens
cccaatgtaagttttaatgccatcttttacattatgatccccatcttacagattggtaaactgaggttcacagagttacttcactgtctcaggaccatgtggcttctgagtaagacagagaggatttgaacccttggctttgactctagaagcctgagagctctacagccaggatgtgttttcccagcacaaggccatgcttctgcattcagatatgacctctgttgcttcattggagggaggggaggagatttctcagcagagaaatctcatagatggatcccgctctctccgcctgtctgaaggatgatgagattgagtggagaaaaattcacgtaggctcagccagctgatgattctgacgctgaaca

SEQ ID NO: 447303 - DNA, 620 bp, Homo Sapiens
ataacgacactcaaacttcagcatgaacaacagtatgtcaatcaaaacccacatatgataaagccgccagctcgaagcaactggcgctacatcacaataggaggctgcgcagcctggatgctcgagaggccagcccggcagcgtggggaggaggtctcttcctcgtgagctacatgaagcttccctccacctgcctcggggacaaaaggaatgtcccctgcccccagtgcaactctgaagactcgctaggccccagctgcgcggcctccccagaggctggtcagaattccatcccaggtccacagtgcacattccagagaaatagtgagacagacatgcgacatgaggagcctctcagtgcttgtccccttgtattgaaaagcccttgcccaatcacctgaggtcaggagttcaaaaccagcctgggtccaacacacaggtgtgatctctgtcacagctgaagcagagccacgctgcagcaagtgaacgtgaaaggatgacaaaaagccacgaggtccgcttgctccaggaccaaagctgtcccatgtgtgaatcagagggccctccccatgcagttcttggccgtgctggctgccgcagaagccaaagctcgcaggagg

SEQ ID NO: 447304 - DNA, 934 bp, Homo Sapiens
  misc_feature (917)..(917): n is a, c, g, or t
taagatcctaggaaagaggggcagagtaggggtcctgattgtcagattgaagctggggtaatacttctgatttgtgaattttcttaaagagaggtgttaaaaaactttgcatgaaagagcgtgggagagtgccctaaacttgagggcggagcaacctgttatcaatacactttcttgagcagagtctgaaggagaaacgaacacagtcacatagtccaaatcatttgagacggtgccctgtatgttcatctcaaggcatctagctcttacccacagagaaccgtgactctgggcttccctcactaaatatgtctgtgacatctgtatccttatgtgcttatggaaatgttcacatacacacctgcagatgtgatgactgaaaaaaacgattatttattcagagctttgtatttagtttatgctataataaattcagttgttataaaaatcagtctctctctctgcggtggagtctttcattctgtctaatggtgtggtttactccagtaatgttgaatcaaacaacatctttacaaagttccaggcattttctaacaccacagatgctattattctctgctttatacacagggcattagagtttacaaaatactttcatccttgttctctcatttaagcctcgttaacaaccttaggaggaaagaaaggcaaggattactgtctctcttcttttgatgaggtacaaggctctccagatgtctcagcaaccaggacacatggcccatggatggaggagctggattcagatgcaggtcctttatcagcgagatccctgctgtgtcactctcctacgttgtttttcctgtaaccaatccagctgtttctgtacctcacttccgagttctgtagtcatttcccttctttgttccataaatttattctgaccatcaggcatnccctggagtgctctctg

SEQ ID NO: 447305 - DNA, 612 bp, Homo Sapiens
tgaacaaagcaatgcatttatttgttgcaagtcattgacacgaatgacaaggggccaggcaggcctgagggatcactaacccatcttttgtccctccctttggaagcagcagggctgagggactcacccagcctgccatgagccagacttaacaccccccagaccctccttccgggaggacagctgctgttgttacacgttctggaagaggaaccaaatgcactctcacgtgctgtggcccagggcctttagagccctggctcggaaaataacctgggctgtgcgaccctggagcctcgcctgccctggctcacctgggtggtgctcccccagcccctgcagcccctccggcgggtgcacgcagacattgttcttggagtagatgatctctccatccaggacagagggggacccgctgccgctgccaccgggggtgagggtcaggaggtccgaggctttggaggaggccctgcgaaggaggcggcccagagacattgccgggcaagtgtttccatcctccgcatgcgtcggcccgggcagggctcgtcaagacctgcccgggtcccgctgcgggggccggattcgcgccggctccgagagccgccaccgtcg

SEQ ID NO: 447306 - DNA, 736 bp, Homo Sapiens
cttacacctaagaacttctgtttcttaaatctaaaatgggtgatcctcagggttggattggcagctcaacagtgcctacaaggattggagctcctttggtctttcctttcttaccttcctatacgtgtcagctttcagcttcaggctgggggtttatctgatctcaagggggctaccaccgctccaggcatcacatcctcacgatagcacccagaggagggtgctatcaagaagggagggaggtgcgaaagggcccttctcatgtgtctctctcctttaaatcagggagaaaattcttttccagaatcttccctgccacaggaacccccgcgtgtctcttagaacaggattgggtcacacagactggttgcaaaatggaatttttagctttttccgctcctctggtaggaggtggacaaggaagaagaagttggaagtggttttcggatgggcattcatcagcattggttaccaggttcacaaaaataaaacacaggctgcaaactgaagagaaccatacagcgagtgttaagttgccatcgcttagtagctagaaatactgcagaatgtcccctcctttgatttccagtgtcatgtggtaattttggttcattctgtttcacataattttaccagctctctaccgaatcttaaattactttttttaatgttatggctagtttctaggaccccactatagttctggattaactcagatgcttgaggggaaaaaaaa

SEQ ID NO: 447307 - DNA, 859 bp, Homo Sapiens
  misc_feature (729)..(737): n is a, c, g, or t
aatatttaaatgttttatctttttaatgcaatgattttccttccatgttaaattacttctataataattccacaaaggatatggttattgttttaaggaggtagccagagtgcagcatgctgttttcaacttaccaagttaggaacctgtattcaggttggaaccacacatcctcttccttgaaggatgggactttatgtacctgggaagtcgctactgcttgtggaaatttaggccttctctctctctctgtctggatgtgtcaaggatccccatgactgagttaaaacaactagagggtagtgagaagggtcggagaagtagcaggagtaacgggaagtagaggcagctttaaggtgactgccttgctacaggggaagatgtttccaacctctggaggtaaaggggagagagggcttaatccttatgaagaagttctggcccaaaccaggtcccagcctcctggccctcaggctgtgattggaaccacgatccggggagagggaccctcatggcccaaggaaaagatactggtcctcatttagcagacggcagactctctgcccacagagtgtgtttttccacactgtggtgtctccagagccaaggtggtacctttcaccaataggtgctcaataaattcttgctaaattaataactgaagagtggttaaactagtaacagtaacaacagaaggattttcaaactgcctggggcccctgctggtgnnnnnnnnngggtttgggcaagagtgacaaccataattcgaccagtggagcctctagccatagaaatgctgttttcttagtgattatgatagtactatagcctgaagctgcagttgcagcttcagcagtgc

SEQ ID NO: 447308 - DNA, 717 bp, Homo Sapiens
  misc_feature (186)..(200): n is a, c, g, or t
  misc_feature (221)..(298): n is a, c, g, or t
ttaaagatgtatgaatcttttgtacaaaaaaatttcaacatatgggttgcatacaagcaggaagatttaacttcataagagaattaacaaaagttgtattaattcaagacaagagcctgcagagactaaaattgcttagtactgaaagttttgcctatataaactgtagtttatgaagaaaaaagnnnnnnnnnnnnnnngaggcagggccttgctctttnnnnnnnnnnnnnnnnnnnnnnnnnnnnnnnnnnnnnnnnnnnnnnnnnnnnnnnnnnnnnnnnnnnnnnnnnnnnnnttataaaggttttgtgggaacataattgggtgtaataaaataaaaatttacaccacaagagacagacacatactcttcagagtgtatggtcataatttgtttgaacgagcccttttaaacttctagatatcattgaaactcctatgttgattaaaaatcatcaaagatctttccagtgagaaggatgaaaaatattactgagaatgaagtatcactatttcatgtatgtgcctgtatgtgcttatataacatgctgtaatacaaggtgacatttaggggctgagactgttaacatctgactgtaccttgctatttgtaacttacaatcttattcacatttctcaagtgccatgcctttaggtgcctatacatcatgctatcataggatttctagggataagccgagtgcggtggcagat

SEQ ID NO: 447309 - DNA, 430 bp, Homo Sapiens
atgaggcaccatgctcagcaaagaattcttgatcaaatccagagctcctgcctctcaagaggtggtccagcctgagccaggtccttccaaggggtccaggtggcacgcgggggttctgctaaacttcctggtgggaatgtggatcagtccttcccatcctctttcttgtcctttcctggttcaaagcacccaccgagtcagccagaaacctctgattccacctccagcttggcgacccagctgttaagcagaacaaatcaatccacggatggagaagaggtcgtgggtcttctgagcccagctgatacacaccaagtaatccacgttaaggggtccgcagccccccacccaattccccactttccatccaaggccaaagagcagccagaccctgtcctctgcgctccagactcgcagaggtcgcgggcgg

SEQ ID NO: 447310 - DNA, 498 bp, Homo Sapiens
caccgagtcagccagaaacctctgattccaccacgttctccaaaaagtgcaccaggaaggcaggaggccgtgctggaaaaggcggccacacgttacaggagaagaccagggtggagagggaaaaatactggtcctgggaagccctgtccagatctcactccggtcttcagctcaaagcaggcttcctctacctgaactggccatctcttcttgcccactacagctcaggccttaacagccggcgagccttcagggcctcctcaaaactcctctctgacaactctccctgtcttccctagacgctctggccacattctcacactgaagtcagggggatcacgaacccagaagacacaagccagacactctcctttatgtgatgtttgtttgccacccgcctgaagataggcaccggatcttacacttctgggcctggaaaaaaacatcttccacagagcagatgctcgtatattacaagtatctattggatgtctaata

SEQ ID NO: 447311 - DNA, 737 bp, Homo Sapiens
ttactggccatttacatttattgcacattaaacctctttgcatacaaaagataatgacagatgcaaaaacaagaatgctgaacagtgcaggcctgacagtagggaatgggagaggtgccagctccccagattaaaccaaacaggcagctccctgcaaggccacagggacttgggagggagaggaggcagggcttctggggctactctgaaattggtgttttcctcagccgggaagttaaatctaccatggtaaatctatgggtgcagtggagagtggggcagagcccaggagtggaatgcaagctacttagtcctcaaataaacctgagatggtccatgtagcttgatttggcattttatggaccatcctctgcaaaaatcttcaagctgggttaggttgtctattagatggaaagttgcttgaaaccccaaaaaaggtagcagcaggtctggtagactgcagtagtagcaggtgagagtacacccctaaggggcatatgtttctaagcagtccaggcttctccacagagaaccggttgttaggtttttcatgtaggtcctttgtaacacctctcagtttccacctagaaagagctgtggactgactgcctgacttactgacagcccagaagcccttctttaggcaaacttcctcgagctctcttactgaagtcccaacaccagctattctgaagaagcattgattttcacaacagaacaaacacattcaagatgcg

SEQ ID NO: 447312 - DNA, 254 bp, Homo Sapiens
  misc_feature (131)..(175): n is a, c, g, or t
aagcaattctcctctatcagattcctatgctgccaataaccatttagtctccatttctttcttctgtgtgaattgtattcccctgaccattaatcaatcctcattattctcttcctagttttctctttgannnnnnnnnnnnnnnnnnnnnnnnnnnnnnnnnnnnnnnnnnnnntcacccacatgactcctgtggtaaagaaagagtaagggtttcagtccactggggactaagaagacaaaagctaattggg

SEQ ID NO: 447313 - DNA, 452 bp, Homo Sapiens
gggcttaatggatgggtcaaaaggcccacaatgaccctttcccctttttgtgcaattctgacatagctgcagctgttatccatgcggggatgcaggatgcatttccagagacgccgccggctccgcaaccggacacctcgccagctccagggacaatgggggctgaggccgggcgctgttaggctggcccagaaggcaggcggatctgaacagcaaagtacaccgaggagatgccgccaggggtggcgtgaggctttttaaaaacattattattggctttcccttaaaattactggtcacaagactgaagtaaaaaaataaataaaagcccagagtcctctctaagcgtagctctcagatgggtattgtgtttctgctgtttccctttcctatcggaatgcaggtgtggaatcatgcataaaggtcccttgcttttgaagggagaggcaccg

SEQ ID NO: 447314 - DNA, 389 bp, Homo Sapiens
agccagagacacaggcatttaatccaacactgtgtaacatagtgtcatgggatgtaatatcacatcgcatcctatgtcacatagcataccacctaaaaatataatataatacaatgtaatgacatgaaatctaatatatcacataatagagtttcatattgtctaacattttaactcattactttaaaagcatatcacatgatgctctcctgaattagaccaaaagcatccctgtgctacgacaccctgaggaaggagctggggttggggtcagggagggctttcaggaggagctgagccttccagaatgagcaggagttagccaggcagacagtggagaagggcattccaggcagaagggatggcatgagcacagaggccaaaaatag

SEQ ID NO: 447315 - DNA, 464 bp, Homo Sapiens
aaactcccccgtagctatcatccagctgtaaccattttattaatatttattaacattaatattgtgtcatctaactcttccacattttttgacagaatattttaacacaacttcaagatatcatgcattttacccataagtacttctgtatgcatctctgacatgaactggtgtcccggcgcgccgcttgcaccatccaaaccgccttccgccaataccagctcagcaagaacttcgagaaaatccgcaactcgcttctggagagccgcctgccacggcggatctccctgcgcaaggtgcggtcacccacggccgagagccgagctggaggactccttcaccgagcaggtgcaatccctggccaagtccatcgacgacgcgctcagcacgtggagcctcaagaccatgtgctccctgcgggagagaggcgcttaccagctccaccaggccctgcaggcggccgc

SEQ ID NO: 447316 - DNA, 699 bp, Homo Sapiens
  misc_feature (85)..(181): n is a, c, g, or t
aaggggaggatgtgttacaccaggaatgggtattcaaggtagacacatcccaaaacagacacttcagtgagaagaggcagaggtnnnnnnnnnnnnnnnnnnnnnnnnnnnnnnnnnnnnnnnnnnnnnnnnnnnnnnnnnnnnnnnnnnnnnnnnnnnnnnnnnnnnnnnnnnnnnnnnnagactctcgggagaaggggcataaaggacagaaaatacaatgagttgatctttgagcacagcgacagggattttttgtacatcgtgccttacagagcgagcgctgggaggaggaatcatcaccctgctgagaagtaatgggtgcagaataaatcgagtaagaaggaatggacttttctggcggatgcttactgatctaacaactggatgactgaggaatgcggtcctaagtgaccccgggctggctgtggggccaacagcgtgcgggatctgactaacagcgtgtggcagccgagcgactgcagcagcggcggggaccccattgactgtccagccccgagagcggcaggagcgcggtggatcctggctcggaccaaggcctctcccctgcgccgactgcagaccaaccctccaccaggagcctcgcgggggggcgccgtgggcaccgcagccaggtgcaggcgcctccgcgccctcactccccacgccgaggaggtggccctggctccctgcggccgc

SEQ ID NO: 447317 - DNA, 639 bp, Homo Sapiens
aaagcactacgtttggaacatctttttctacatgctgccttcacctaagtttagctgaggagtgatagaaacctgtgtgtttttcctggtgtgcttctgggaggccaactgggcaatgaaattcgattcatggccttctgcctggtttgcatctgcagctccacttccgtgttcctaggaaatccaagccacaaaagaatgaggtgaaagaagctattacaagtccctggttactgtgctgcattgaatacaacttctctcactgctgtcctttattctcagtcatataatcactcctgcctacctgcctgccctggaactcaccgtaactaaggcctggcctacaggcagaaacaggagtgtctaggtacagaccttatgttaacctctcaggggcctttgtaaggctgcttagttctttgcaggaatattatgtctcactccaaagacaggacagacctcaattagaaaccaggcttcatcatcaaccagctatgtacacttgaggttgtcatttaactttactgaggcttatttttctcaaatatacaatgaagaaaatagtacaatatcatctatctcatggggacatagagaggactttctgaagtactgaaaatgcttagcacctaatgggtg

SEQ ID NO: 447318 - DNA, 652 bp, Homo Sapiens
tttttactacaacatggatttattgtcttcttgtttctgtgggtcaggaatccaggcacaggttagctgcttctctgctccaggggctctcaaggcagtatgggccaggtgaagtgactcttagtagtttttaaaccaaaattcccaaatctcatttctggcagaaagctcaaaccagagtggcccttgagcaaaagcaggtgaagcagcactacctttacaacactaagatttcacacctaaacaaagagatgatcccagaatacgtacgctttgccagtgtggctgggtccacctgcatctagagaaaaagaaaacactatgagggtcagaccatgctgtctcctgtgtgcacaggtcttcacttgttgacgttaaaaagccagatggtaaacagtggttgagacaatggccccggtatctagaagacattcctggaaaggcacaggatttctgtgcaacattttcaattgtttttctttgacaattccaaattcttctcaagaagaaggcatttctcttaaggaaaatgcctgttgacacacagtttgtaagtgtggatgccatctgaaaccactgtttagttgataatgaactctggcatttgcccaccaagaaattctgtcagtcacctatagtgtatatggtgagg

SEQ ID NO: 447319 - DNA, 1085 bp, Homo Sapiens
  misc_feature (1041)..(1041): n is a, c, g, or t
ggctgtggctcagtgccaataaaactttatttatgaacacaggtggtgggccggatttgacctgtgggccgtaggtggccaacccctggttgtgctaagggcctggcacaggggaggtgctcagtaaatctgctgcctgaataagccaacagttgggtgctctaagccctgccagatcatgcagtcactggggaaggctggcttcctgccgatccctgttccttctcccgcagggtgtgctggctgagtggggggccgaccaatgaacaaacagcatattgaaccacacgtgactaacgcgatgagtcgacagcattcgtcaggctctgctcaccttccccggggctgaagggctcactccaatcgtagccctgggattttaaaacggcggtgactttgtacaaatggcagaagccggtcttgcattcattggcgcggagaaagcagagctcgtcctctccctctgattgggggaagggatagaagatgtcatgaacattgatccagacgttggtgacctcctcgtacaccacatacggctggacattcctggggacagctctggcagaggctagccgctgctcctcattctctgtgctcgggatgaacagggccggggggaggaggacgagctggagccactgctggggccggtccaggaacatggcccaggcgtatttgccatcccgggtccacccggccctggcgatgtactccaccttcgggaacagcgagctgaagggctgcaccagctccttctcctgggtcgagacgatcttgccctggctgtcagtctggaactcagccagtttcaaggcaatcttgggattcttgctgcctgtcctggggtaccgatacgagtccgtcttcctttcttctagcgcaggagaggggacgtgaatgacctccacctcggactcatcgacttcctcatacaggattcgcagcgtcttgaggccctctgaaccttcccaggaggctgtggggcaccaccagtacccagtgaagcggtcgaactcttcctgtatgacgaaggtggcncacacccgcagacttgggcctcgtgccgaattcgccacccaggc

SEQ ID NO: 447320 - DNA, 414 bp, Homo Sapiens
tttgcctctaaaagctctctattctaaattgaatggggtgaggttgccaagttttatctaacgctttcctaaggatggaggtggggtcagaaagccccagagcccgggtaatttctcaatatagctggttggggaaaggagtgcgcgcacgtttgtgtttttgaagagttagtgcaactctaaactgcacaccacgaaacctggaaatctggaaaggcgcacaaaacacgaactgagattccaactttagcaagaacctaaaatgttaaagaaaaattcctttctccccacccacgagtcataacattaaggaaaactggctcaaactttctagtatgaacaacaggcctaaagtaagaagaccagaagcgaaaggtagggctcgccctctccctaacagtccttcacgactca

SEQ ID NO: 447321 - DNA, 914 bp, Homo Sapiens
  misc_feature (728)..(825): n is a, c, g, or t
tacagctgactgcagaccagattgccatgttgcttcctgagcaaaggcagagtatcctgattttaaaggaacaaatacagaaatccactggagcaccttgataggtgagcaaacttaatccccatctgagtaggactagctccttgtctattctgggtatatacttttaaccttaaccaacaagattgttctctcagcggccctcaatccactcagctagactcttctttacccttcagtaggtcagctcctgtagggatagagtaaggctatacaatgtttgttcagttgttgaattgcttataatctttcctaatgacaaaggtaatgtatgatcagtttaacaaaagtaatcatatacagaaatgtagaaggtgaaaggtaaaaagccctgtttcctcaatctcattccccagacaaaacctctaaatatagtttggtgtgtatccttctacaatcaattgtattattttattccaaactgtcctgtcaaaatggaaaaatacaaagcatttcaataaaatgtgtaaatattttgtttcttgtatttattttatagggaatattttgatgttgacctatagtagcacataatttaaggtagtaaatgtccgtcatcaccatcagtttctatatattttggagatcgctgtaccccgctacccttatttttcttgctcatcatttaggcagaaagaatccaggggccaagcacagtggctgagccnnnnnnnnnnnnnnnnnnnnnnnnnnnnnnnnnnnnnnnnnnnnnnnnnnnnnnnnnnnnnnnnnnnnnnnnnnnnnnnnnnnnnnnnnnnnnnnnnnaattttttaaaaaattagccaggcatggtgagatgcgcctatagttccagctacttgtgaggccgaggtgggaggactggttgagtcca

SEQ ID NO: 447322 - DNA, 870 bp, Homo Sapiens
  misc_feature (554)..(554): n is a, c, g, or t
  misc_feature (556)..(556): n is a, c, g, or t
catttgatttctgtttttatttcatcttgagcatgtgaaaaatcagtggctttttaaactttcaaagttgactgcctagactgataagtttaagaacacacaagtaaatgtcaacagtctcttgtgttgctgacacactcaaaccagtgctaaaacaatttttgtcttaactctgaattatacatgttcagacctgctattgaaacaaatgcattttgatatttggatttttctaaactaaacacacagctgtgctaggctctttgctctgttagccttctgaccattttatagctctaagcatgtgatattttctcctagaagactccgaagtgctagaatattttcagagggcaaagccttataataattcttactggaagcaaactaaacaaaaaccaagttccagaaaacattgcttctgagaaattctcaaatatcatcaagaagaataagtggttaacttaaaaacaaaactatggcaatatgttaaagtacaatactgcagtaagggtagaaaacacatctaaggtttcacccttagtgttaagctntntaaaagcaaaaaggtcatgtgtatcaatttgcagtgtactaaaaattgtgttcaaagtttatttcaagtcacagaaaatatacaaactaagacaataaaatgaagtgattttgttctgagagaaggtgatgggagtcctccacctggcactgatttgagtcattcaagggttaggatgcaggtcatcttttttcaatatttcaacaaaattatagaatttccagatttcttgccaggtatttttgaaaacctatcaaaggtgctccagtggatttctgtatttgttcctttaaaatcaggatactctgccttcc

SEQ ID NO: 447323 - DNA, 468 bp, Homo Sapiens
  misc_feature (128)..(145): n is a, c, g, or t
  misc_feature (186)..(244): n is a, c, g, or t
gcttttgtttttaaaaaagaagatagcataccacggaattcaggcaacttacatcaacaaataggccgtgtgattttagcatgaagaaaaaaattacaaacagagctgtgtaagcgggttctcccggnnnnnnnnnnnnnnnnnncaacttttccgtacaacgttttctgtctatctgttcggtannnnnnnnnnnnnnnnnnnnnnnnnnnnnnnnnnnnnnnnnnnnnnnnnnnnnnnnnnnccctcacttgtccctctccccctcattcaacacaaagctgaactctgcacagggcaggctggggctgaggggtggtttccaccacttggtgtcagcatgtcggggagggaggaacagtgggcaggagggcttagagagtagggacatgacaggcagccatgtagggattgctacatgggtgagaggtcttgggaggggacggccacgggagggggcttggaaag

SEQ ID NO: 447324 - DNA, 723 bp, Homo Sapiens
gggaggccgaggtccgggtggccgccgcggccgccccgaagcgctgctgtcaccccggccgcgccccccaactttctgcacagtcgcggagctggaagtttccgggcttcgcggacacgctgggctgggtttcagtcgcggctccgaggtaaacaagcaagttccacgccccatgtcctgctggggccttcgccagccaccgctctgggctcatctcccggcgcctcctcggggcacctgagcgttttaagccccactgccaagtgttttggacacaggtttttttgcggggtggtgaggttgggcacaagatgcttcctaaaaggttgttggcacgcagaccatggccccagtgacggagcggcaggcaggggcttgaggaacacgctgtctttgtctcgtccccaaagcacccggccgtgggtcacccgtgatccctggagtggagggactgttgtgacccctggtgctccaggagaaggggttccatgctgggtcccgggcccaggcccacggtgcccctcagcctgcagttctccaacttgcggaatgatgtgctggcccggcccagctccccggcaccacattttctgccctcttttccctgcctggcttcaaaccctcccaggccagggtcccgaggagacagctgggccgggggaggcaactgagtggcccaggcctgggactctgcaacagtggccaagccacatctctcgagag

SEQ ID NO: 447325 - DNA, 621 bp, Homo Sapiens
  misc_feature (537)..(545): n is a, c, g, or t
ccgaacttgcccttgacaacttccccggaaagcggagggacctcctcgtcccaaggtcctccggtacccggaggtcacgcgcggacgtcggagccggaggctgggtgctggagggctgggtccgggtcccgcggtgaggcgtgggttgtttcctaagtgtgggtgcaaagtaatgggcgctaggcgctggcgtcggtattcagcccagctgcacatctgaggcttggcagcttctcatagcgccttatcctctgccatacagcatccatctggagccctgtcttttaggatgagtggctttagggtcgggcattaaaccttaagcttcagtcgccatctgtgatgtaagtgggaggagagggtattggaaagagctctttctgggtcaaatagagttgggcttttcttgcaattgattttgagccagatgccacatatcttgaaaaagaaaaacggctgactttagtttgaagcgtaaataatagatattcgcacatgtcctttttagtagcagcccaaaaattgaatttcaacttnnnnnnnnntctgcgtcataataatagggatgttacttgctcttgctcatgcaccttttgcttagacctgctgtttctacgtcag

SEQ ID NO: 447326 - DNA, 772 bp, Homo Sapiens
  misc_feature (45)..(59): n is a, c, g, or t
  misc_feature (124)..(170): n is a, c, g, or t
  misc_feature (394)..(468): n is a, c, g, or t
  misc_feature (471)..(488): n is a, c, g, or t
  misc_feature (521)..(553): n is a, c, g, or t
aaacctaggctaggtacgaggctgggtggcgaatcggcacgaggnnnnnnnnnnnnnnnggggaaaccccttctccggtgtgtgcaatgggttgaagcttgtttcctggagccagaagaggggnnnnnnnnnnnnnnnnnnnnnnnnnnnnnnnnnnnnnnnnnnnnnnnaaatttttggtcgtgcacctggcttgtccccgagcgtaatattcttcaatggaaacggatctaataggtgtgagtgtgtgtgtgtcctatgctcgcgtgtgtgatgggaggtataaataaatgagtgccggtgcggcggtgtctatggccgcgctctgtgtctccgagcccctaacactaatgtcgggatcaaagggcagcggcggcggcagcacagctcacannnnnnnnnnnnnnnnnnnnnnnnnnnnnnnnnnnnnnnnnnnnnnnnnnnnnnnnnnnnnnnnnnnnnnnnnnngtnnnnnnnnnnnnnnnnnnagaggcacagactgagggaaagagcgagagctnnnnnnnnnnnnnnnnnnnnnnnnnnnnnnnnngagcaaagagtgtgtgtcccccagggctcccagggaggactcagcctcggtattacacgcgctctgtctgcaaacaatggggggcgcgcgtgacgggggagagaaggacgtcctccaaattaccccgtagtcaccatctactgggggaaagtttttctctcctttaacaggatagtctttttcgtggttaaggaatatctcctctcaaaaaacacaaga

SEQ ID NO: 447327 - DNA, 517 bp, Homo Sapiens
ctaaagcaatgtaagctactgaatttgaggtcagtccagtatgactacatatgctcaattttttatgagtatgaacatttatttctctggattccttcagcaaacctcattccctttcctgtcttgcctagggaaagccatttctttcaaaatgaagtgaggaatccacgtcagcttgcattttctttcctgttttctcagacagaagcaagcagagagccactaaaggtcccagtgaggaggcctgcagagagctatttaccattacagtgccgatcaatgggaaggcagctgcggtgcccaaagggggtcaggctgggttggatctgcgctcggtactctggtggtcgtgggaggaaaatcacagcaggttgggcctcggttcctagaaaacatccctggccatattcatctgtgggatattcttaccacccgggatgcacaggggaaacattacagggtgttttctgcacctctgctttattgagtgctgggtcaagtgttatgctgtcctttc

SEQ ID NO: 447328 - DNA, 619 bp, Homo Sapiens
aatgaaaaaaatatcaaggggtttgctctaaatatgagtgtcttacttgggggaactttaccactttttattattttgttccttttctctgctggaaacgcgtttgctgtcaatattatgccatatatcgctgtgccaacttaagttgccgaagggaaaggctttgttctcaccgctgctgatttgtctctggttaaatagtttgccctctagcatttgtatatgattgctagatggccggatttaggaagtgcgtttatagcttctagtgaatgactttctgagtgaacaaatacagagagaccctaagtgtcatctttaattattaattaggaagtgattaatattgacttaaaaagtgaatcctctgagccaattgtgaaggaaggaaggtgtgtttagctctctctgccaccgttaccccagagcaccaaccattccaagtgaggctggcggataaacagctgctcatgcatctgtggccttcatcctggtcaaagtattttggaaaactaaatgctctttctgtccaaagtcatctggccacggaaatgcttttccttctattttgagacaaaataactagagtagaaaaatagaagatcttgggtagggagag

SEQ ID NO: 447329 - DNA, 646 bp, Homo Sapiens
  misc_feature (68)..(320): n is a, c, g, or t
ttttttgaagtgtgaattcaataaatgcatttttattgttttgtttttcagagacagggtctcactcnnnnnnnnnnnnnnnnnnnnnnnnnnnnnnnnnnnnnnnnnnnnnnnnnnnnnnnnnnnnnnnnnnnnnnnnnnnnnnnnnnnnnnnnnnnnnnnnnnnnnnnnnnnnnnnnnnnnnnnnnnnnnnnnnnnnnnnnnnnnnnnnnnnnnnnnnnnnnnnnnnnnnnnnnnnnnnnnnnnnnnnnnnnnnnnnnnnnnnnnnnnnnnnnnnnnnnnnnnnnnnnnnnnnnnnnnnnnnnnnnnnnnnnnnnnnncgcttaacaaacacatgttgaaaggatacagaaaatcattgaataatgaattcaagttggtcctcagtaaaaagcctgaggtttcgtttctttgattttatctccaattgaaaggcaatgtttgaaacagccactgaaattgctgctttgagttgaaaaggacttctttcttccatttacagagttgtcataacagaaaaggtatgctcagacaggtaaaacattgaacagggtaaatgttaagtgctttttttgtaacctgcttcattgtccttatgtactttaaaccagaaaccatctaaaggcaaacatttaatatgttttct

SEQ ID NO: 447330 - DNA, 533 bp, Homo Sapiens
tttttttgaagggaagatatagacttttattttcatggggtgtttttagtaaggttgcttgaatgaatagaaagcatttcacgtataccataagtagtatggactgttaacacgaacctggaaagaggtccagtcatcctacgtggcagcagagccatgctaggccccaggctattttttgccctggtcaatttgattttttggttttgactccagcaatattgcctcacaaattcatttttttaattcaagtacccacccaaatcctacccatctgcacctttttccctgggctggactcttgcctgtccttcagagtagattcacaccttctggcccaccaatctccagactttgtcttcagacatacagaacattccctcacaaactctactacttttccactcaccagcccctaccttcctcttcctacaaatcatcactaaaaggtaaggcagacagcatgtcattttttggtctagtacctgattattttagatagcccagagaaagggttgatttgtggttgccta

SEQ ID NO: 447331 - DNA, 720 bp, Homo Sapiens
cggtagtcaactcagttacttttaatattaaatgtctttttatcctagtaaactactcccttgcttaatgggagaacttgcaaatgagatttaaaacattgtaatttttataaggtaacagaagctagatccctttcactgttcatctcaagctattgatcttgtcagtgttgtacagatctagaatgggttgtcagggataaggtcactgatctgatggtgattgttgacatctgctgactccacacaacaaccctaggggaccggtgctttgagcatccttattttcagatggtttgcccacttcatgcagttaacagctgttggtgttgggcttcaaatccaggtctttcggacatcaaatcccagcctcttaacaactcaccaagcagtgattactactccccaacataggggcagtatgtacaagtcatgttgaactaatacagtttctttctttgataggaatactaattttgttgaacaagaaaatatgtactggataagagtaaggcatttgacaaggcgtcctgtgaaatctgtgaagataaagtagaggcttgtggggctagtacaattaaatggagtcacaaatggttgaacagctgtgttcgaggtactaattaacagagtcctgccctccaagagagaggctggtccatggctctggtctgttcatttttatcaggtatttaaaacctaaaagaaattttaggttaa

SEQ ID NO: 447332 - DNA, 621 bp, Homo Sapiens
gaagatataggtattagcaatggtaataataaaaacaagaatgccgcttttgttcattaagtctttttaacatgcccagcactcctctaagctcattgcgtgtattaacatgtctaatccatgctagaaatactattaccccattctgcagagaaggaaatggaggcccagagaggcgaatttgcaggaacacaggtgatggccatcatttattgttattgccacacagcaggtcctgattccggctcagatagcgaaagcctggcaccatgctgctgtgtaattccttcagctccttttgaaaagtctccagctgaatcatagaagtgttaaggaaaaggaagctgacatatgttaagcaccattatgtgcactaagcgtttgatatttctgtcgggaggcaagagagcatagagccgtgtgtggactggcggcagcacctagacatttcttagaaatgtacattctcaaggcccaccccacaccgactgaatcagaacttgggggcaggagcctgggttttagcgagcactccaggtggtcctggtgcaggccatggtttgagtaccactggcaccaaggttaaagaggatggacttggccgggcgccatggctcgtac

SEQ ID NO: 447333 - DNA, 551 bp, Homo Sapiens
atcctttgacctcctatatctttattctgtatgcatatgaaaaaaaatgctagatctgtatctagattatacatgggtaaacacaacatatagaattatatgactttgcctatgtagatatttatgtatacaatagatattaatcaacattttaaattccccagcctacactgcggatgcagatataaacttactctcacctatatggatccataccatctcagactggaacacagccatacaaggttatgtttaaacatcaataaagcttcacatataggtgcatggcctgggaagtatgtttttggtaaagccatcttagactctagttccagcttagcatttcagggccctgcttcctttctcactgtatgcctgtgtgattcacatttgccatttgggtcgattgacttatatccatctaagctgatctaagtggtttattaaactcatctgggctgcagaagttgagaaggaaagcaacctctgacctacttattctgaggcttgtctacaggacatatgcaataatgggaattacattgacatac

SEQ ID NO: 447334 - DNA, 836 bp, Homo Sapiens
  misc_feature (744)..(784): n is a, c, g, or t
cctttgcttgttcctcgctctcctgggctcgctttccgggcaacagagttccgggctgcttggcagaaaggtgtccggctgaagggaagggcgaggaccgagggcacgaagaaggggaacatgaggcccgggtggactttggggtagtagggggtagggcgtgggcaggaatggagtgggcgttggctggggccacacggcgctgggcttaatgggttcctgcttgacgggcttgcccccaaagtgttccaggctgcggtagaattggaagcccacgttgcacaggtcgatcatctgagagtcatacttggggcgcgggggctgcgggaacagcaaagggaggttgggaaggccgtggtttttgttctcctctgagtggagggcgagggtgacttcttctgcagggtggttatagggcatctttgtgggcatgctcttccgtttcctagaccctgctccttcgaagaccccggggaacccatctaggtctcctgggggaggttcataccgaaactgggaaaatggccctcggagagcttccgggaaggggtgtctttggggagcctttccccgagaagccactggctgcaggcagtggggaaaggagggggtcttctttacagccaagtcgaaatgcacatcctcgtctttgatcatcttcatttccttctgcatccttggcaattttccagctcctgaggtctgaatggctgcagcagccccactcctttacctgatccctgnnnnnnnnnnnnnnnnnnnnnnnnnnnnnnnnnnnnnnnnngtgtacagattgcagggaacttaaagaactcgaagcggacacagtctcgaat

SEQ ID NO: 447335 - DNA, 540 bp, Homo Sapiens
  misc_feature (93)..(113): n is a, c, g, or t
aattgcaactcggtttatttaagcatctatcatggcagggtaaacgaggcagtttatctggcacctccattttgcttgttgctacctttatgnnnnnnnnnnnnnnnnnnnnnctctcacacaaagggggatgcggccggggggcgccgttgagagaggaggttaattccgcgcgagtggcgcggggggctgcttgtgttccagggggagctgttcacgcggtcgccggccccgctctgaagtctcccaactcacccggcttgtctcccgcccccgccttactggggagagggaggcccttggtgaaaggcatgggagccccgctgccgacggggagagatggggcgccccccctccgccccgtcggagagctgagaaacttgctgggaaggttctgggctgagggtggcctcttttggttgggcgccgttggggaggggccggggccgctctgagcgcggtctcatgcccccgccccctcccctgtcttgtcttcgcgggctccaggctccccatcaacccgggcagccgggatttaaa

SEQ ID NO: 447336 - DNA, 303 bp, Homo Sapiens
  misc_feature (287)..(287): n is a, c, g, or t
tggaatctgattcttttatttcaggttgacaagtccacatacggcgacagcatcactgtaactaatcaagtatttaatcctgtttgcctcctcatgcaacttataaaagccttttcttcaatcacaagccatgaccgggtgtttctcactcggaatcgctgttgctccaacaaactctttaacatttccctgcttcttggtgtcccggcgtcctctttatgactccggagcaggtcacagcgcaggtgacagcgtcacaggagccgtggcggaggcacctggggccnctcggagcagcaagga

SEQ ID NO: 447337 - DNA, 774 bp, Homo Sapiens
atattaaacatttttattatatggaaagcatgttgagatttataattcttgaaataatatatatgtataaataagaaataaaatacatcatttcttgcattttaaatttagagtacaattcattatcctaatttgcacgttcagtttctagtatattttcaaatatgtattaacaatcagtgttttatttaattgaaagtaaatttaaagattatttcttattttcttacatttcagtgattggacaattaagcctcaagcaattaaattatttgtccaggtttctccagctcattggctgaagaatgagaacccagttctccttgctcccaaatgaaatgagcagctaatataagatgttaagtgacctaattgagtggctagtaattctcagtctctcctctttgcagacattcttcttggaatgtttattaatgtcagatagagcaggtagatggagtttaaaaagatgattgaattcagctgagacattgtctagtcatttatactgctcatgtttcttaatctctttcagatttggtttcctcagcagcagaacagttgcaacagctcaacggtgcccgcttctggtgcccccacattgcgcgccaaaaatgttgcaggactttttcttagttcagctgaagataaagttcttgtccgtcccacggccatgaaaatttaggctcgcagatgatttaaagggtgagtaaggcagggttttattgggtaaaaaggggaaaaaaggggggacacaggtattccctcacaagg

SEQ ID NO: 447338 - DNA, 748 bp, Homo Sapiens
  misc_feature (351)..(363): n is a, c, g, or t
tttagaatatttccatcgttacagaaaatttattggaaagggcttatgtaattcttgtaaagaatacctcattttgtttgattgtagctaatataccagttgttacaaagtcaatgagtattggaactagtagtacctgcgaacacttctatctattgacagttactgatgacataacttttgagttttagagctctttctgctggatcagctgaggtatgtcaagttcataccattgtgcagagtgtgaaatgccaatagtaaagcatcctcttcctctaggaaactaattagagaagttagctccagagattaaaagaaagattcatagtctttgattgaggtagaggnnnnnnnnnnnnncccaaacttgcttcttccatttaattagcagatggaagtgtgtccagaaattcttctgtgtcctctgatccttttttccttttcttcttttctctgtttgattatttagaccaggggttggtaacttccttataaatccctcagagatgaatggaattaggaaaggtctcgtctggtctctttcaccttcacttggagtccacacaatctgtgagccttctccactgctcagaagggctcctcaggctctcatcggttgtttcaaagctcagccctcccatgaagagcttccgcagctgttccggctctttaggacaggacggccctgggaagagagactttaacgaggcttcctcagcggtatccacgggcagaaagcagccct

SEQ ID NO: 447339 - DNA, 619 bp, Homo Sapiens
cattagcaaacatttattttatgagttcatatttgtacaaaagagcatctcaatcacaaagaacaatgaagagttttagctgaacccccttttgaaatcaggggtttacagaagccagatgcagccctccaacagctggcacattcaatttacttgtgaatttttgcttgggatttgccctaccagtgatgttttcactcagctaagtagcttcaaatggtgacagttttgcatgacaacttgcattggagtcccaggatacactttggtccagaaaatcttgaaagagaagtggtaggattttgatttcatgggcaacattgaacaaccacgcatgtttgttatcacaaatataaatgttatacccctgaaatccacaataagcacaaaatacagtcttcatgctgcaatatgataagaaatgtcacactatcccttattatacaacgattatgccttgatgggagagcagcatgcaacaaacacgctggaggctttcgtagcatttattcaagctcagactctgggatgcaataacgaacacagtagtacaatattctgcgagtgggtatgcccaggctgggcatttacaaggaatagaaaaatcaggccgggcgtg

SEQ ID NO: 447340 - DNA, 730 bp, Homo Sapiens
  misc_feature (666)..(666): n is a, c, g, or t
agtaacatgatttcttagagcctgtttttgtggtgaagaagaaggagacccaacttaaacctgtccacagctcactaggtggggacacagattaatattgtcttcctctcaaattttacttccaggctggctggaaatgcagccctgatgtcaatggtagcccggggtgagtggcatttcatgaggggaggcttatctgtgggtaagggactctggccacccttgctcctaaactcaggccacgcgagggaaggaggcaaaatttacttggccaaagctgctcggcttaatgaggattttgccgaagagtcccagagttttcattttgctgcatgactttgactttgctccagccgcctcaccacagctgatgagtgtggctgcagtgtgtgagctgctttgccagggtgctgcctccaccaccccgccttgctagataaatactacatgccggaggacctgcagaccctggggtggaggctgggagagggagggtgtaactgtggacaacgcataaacccattgtcccaccccggtccctgggccagctctggaatgaagaggttgctacaacctgacagcctgacagcctgacagatactctctggcacattgactagttaatgggttgatgttgataagttaaccatagtgcctggtccttcnggtggagcagcaaaggtcctagaaggcaaaaaacctgggccattcatgctcaaaatggccctgg

SEQ ID NO: 447341 - DNA, 607 bp, Homo Sapiens
ctgttatccttacttttatttccctttatttaaattccctgtttcctgtatttaaatttaaaaaccaaggttctaggacaggtagcaagagcaaatgactttgatcagaaagaaaagtacatctcattcacctcagcttgtgattcatgaagtgtggagtcacctgtttaaaatcctagaaacttattcaaaacttgtttatgtctgttaggctgttgaactgctttccaagcactggagctcagggatttcacctaagacttctcatctaagagtgaaagcaggggtctagctctgccgagggctcggccatgagagtggcttggccttggttgggtcatgactgtaatcactgccctgggggaaaggactcccttgtgttttgtaaaataccccttgcaaaatcaggtagcaggataagtcggcctctcctagaacagatgcaacaggaatgagactgaccacgtggctgcctgttttctaaatagattgggaggcttgggtatagccagggaatttttgtccttagaaacaatcagacctagattccagtatgaggtagaggatgaggcctgtgagactggcagccccaccaccaggctgtcta

SEQ ID NO: 447342 - DNA, 684 bp, Homo Sapiens
gcagaatttactacactaaacccttcacttttttcatgccactgtacaatttttcctacagctgtgcctggaccaaagagagctcaaagaaaggctaagaattcacttctgggacttggaaagcttcaaaagagtgaaccagaactagggggaacattgatcctggatgcagctggctggcagaggtgctggtgtgctgtttcttcagaggtttcaggaaggcccccccatcccaaaatcacccttccttcacctgggaagtcaatgcctgagactccaccattacagatacaatgcaaaccttcctgggagacaaaactcctcatatacaccttaaagtgagtttttatgatcttttcaagagggtcaatgttgagaagaatccaagtggagaaaggatgaggttggttgagggtagcaccaaaagattctctttttcactcagaataggcgctgcaagtctgtcctgctggtgatgcacatacttgatgcctcccagaagtgagatgcttttgttccaagagggcttcctgtaggcagatgtgggagcaggagtcactggtgacactggagcattctcctgggctgtcactgatgggaagagctcctgtttccttgccttgcgccaagagggcccaaggcagacctgccagcagccacgagatggcgctgcgatccaggcga

SEQ ID NO: 447343 - DNA, 609 bp, Homo Sapiens
gcaacatgtcagagtgggaatttattatctcagccccaataggtcttaataagccttacacaactgtttaggcatttattctattaacggctgttcattctggtggcttcacctgaatattcatgatcttcctatccccagagcttcagcatagcagctgtttaaaacccacagcaaatgttcaagagagttccacaaatataaacaccctcacagctgaatgttccagctctggcctcacagaggctaagccatgaaacatttatgtggagtggtttttggagggcagcatttacaaaacttaaataatctttcccctttagggagccctcaactctgtttgaaacataaccatgaggacaaagggtccaggaggacccaagtccacgaagataactgccccctccttgcttcctcctagaaatggaggttctgaataaattctaacaggaagggagctagagtgagctgggggtgggctgggtggatgtgcaacccacttcaggggagagggccaagccagttccctgtgaaagagtgagatggtttgtacagggaatatttttactgtaaatatatcaaaagagaaggcactggtggtggtttttc

SEQ ID NO: 447344 - DNA, 574 bp, Homo Sapiens
  misc_feature (386)..(496): n is a, c, g, or t
  misc_feature (501)..(501): n is a, c, g, or t
gtgtgagccaccacacctggccaagtctgattctttagtggggcctctgaggcccaccatgacccagcctgggccacctttctaaattaacctcccgtgcctcctccctgggcccactacctccctaatgatccagccctcagggaggactctgctaccaatacaggccgcacacctgcctacttccctgcctctgcctggtctttatgttttcaaaatgtttactgagggcataacttctataaagtaagaagcacaaatctagaatagtcaacttgaatttttatgcaaatatgcccccaggtgaccattaaccagatcaagacagaacgttccagcattcctgaggcctcccgatgcccctccctctcccctgggtaacaggnnnnnnnnnnnnnnnnnnnnnnnnnnnnnnnnnnnnnnnnnnnnnnnnnnnnnnnnnnnnnnnnnnnnnnnnnnnnnnnnnnnnnnnnnnnnnnnnnnnnnnnnnnnnnnntaaantgactgagatttggccaatcactgaagagttttaatcaggaagtgacacaattggaatttaattttgaaaagg

SEQ ID NO: 447345 - DNA, 451 bp, Homo Sapiens
acacaaatgatgtgtcttcatcatttatttgctgtaagaagactatgaactagaagaatcaactgattttcaaagctgtgcattcattttatttagtggctattttatcgagcactttctttctatctgccagctttgtgctcagtgacgaaggtggctctgttgacactttatggggggaggacaaagggggctctcgggttcctcttgccctctccctgggactcctgccacatttccctgagtcctgactgctcccaacccttccacctacccagacgttcatcccgtctgctttgcgcacctgctgggtgcacatcaggaggtgagtggcgcgtgagcgagcattaccacctgagctccgcctcctgtcagattagcggcggcggtggccttaggttctcataggagctcaagccctattgtgaacatatgagggacctaggttgtg

SEQ ID NO: 447346 - DNA, 726 bp, Homo Sapiens
  misc_feature (500)..(509): n is a, c, g, or t
acacatatgtttacagcaactttatttagatacctaataacaggaaacattcctgacgtccttccacaggtgtttactatggtacatctatactgacatcccactcagtactaaaaacagaactattgatgcaacaagctggatcaatgcccagagattatgctgagtgaaaagccaatcccaaaagaaagtataatccaatcaattttggcaaaattagagatggagaacagaccgctggtgccagaggttatgaaggtgggcatagctatacgagcacaagaggaaactgaatatggcttatgacaacagatgggatcattgtgatagaaatgttctgtatcttgattatatcatttctatcctatcttggcttggttgtgatattgcccttgttttgcaagatgttatcattgggaaaaccgggtggaatctctgtattatttcttacaagtgtatatttctcacaatgatctcaaaatttttgagttgaattgagnnnnnnnnnngccaacgacctacatttatgctaatagcttatgaaataagctaacaaaggagtagactgatattaagcacacaatttggttcatttcctagacaatttattcctatggagtggcaattccagtgcccgttcttattctgcctaatcagaagtgattctcctgatggtctcaggtatctagtatctgcctggctaattcaaacctatggatccccaat

SEQ ID NO: 447347 - DNA, 680 bp, Homo Sapiens
caaaatattaattttattttacactagcttcataaactatatgtctttctggtacagcttgactgtggagacattacgctaatccttattttcacttttcaaataggtttccatggatttgactgtgatcttttcctactgctcattttaatatgaaattagttttccccaacttttacataggagttacgagtcaagataggttttctaacttcacagctctagaactctctattttgttgtttctctcaagtgtttaaagacatgacctcagacactgtgagatttcctgaaactttacttacccccattaatctgaaccttctatttcctttggctctattatccctatcctactcaatttggattttattcccagcagttcttccttagtgtggggctttaaatggaaagggaactacagctggttaactgtgtcatagggcccagactgctcgtggccccttcatatcttagtgtagattccttgcactcaacatgcagattgtacaaaaactcttatagttcacttggtgttctcaaatttacctactgcattttcttgtgaggactggttaacattgggcttctcctgttgcatccccttgcacagatgctgatatcagatggtcttgtagctgttaataccttgtttacatcagcttatatttggggttcat

SEQ ID NO: 447348 - DNA, 405 bp, Homo Sapiens
gagatgttcaaacacaagtaaatgtgagattaagagggggatccctcctacccaagcttgggggtgggtccaggaccctggaaggcctccatttgccatggggaggctgtgaatctgagcctgagagccattctgaggggtgggtgatacctacctgcaggcccccccaccacgcctgcccaggcctggtcctgcgctgcagagccaaggacgggagatggggttagacttggggccctcacggaccagcctcagccaccgagcgctcaccccctgcacacaggcctggtgggtgggcaggctccaggctccagggcccctcccaactcttcctgtgggccccaggcccagggctgccatctatgacccaaaacctgcgagcgactctcctggcctgtggggatg

SEQ ID NO: 447349 - DNA, 644 bp, Homo Sapiens
tttgcatcttcagtccggagtttattgagcgtgagaccaggcctgactcctgcaggggccaggtttttgcggggactccatgcctgtggaggcccgaccgagtgcagcctggcggggtgggcgggcaccaggctggacaccattcagtcctcctgatagggaacgtggaagcccagcgtgctccccagggggaagtgggcaaagaaggttcgggccatgtcctcgatctgggggtaggcccccagggcctggaagtgctgcacatagttccagaagtcagaggtggagaaaggccagtagggcatggccggcagctccgcgtaagggtctccttcctcctgcacaggcttggcccctgcaagaggccccagtaggaggcagagggccagccccggcaccatgcaggcctgcatcttcccggtgctttctgatctgcgactcaggcccacctgcagcaggatgaacccaggaagggcgagaccacccatccgtcagggccggcttcctctaccagtcccagtgtgggcagcccttgtctctgctcagccagccgtgctgcctggatgggctctgctgccagctcaagagtcctctttatagaagggccctcggctgccagggaggcttctggcaagtccacgctg

SEQ ID NO: 447350 - DNA, 765 bp, Homo Sapiens
  misc_feature (540)..(668): n is a, c, g, or t
gaagaaaagaaaatcttttttatttccaagggtggaattatctgcccttggtattatctaataccttgtattttaaaatataagttttttgttttccaaaaaactcaacagacatcacacacagattttacagtaggtacaagctctagcctggcacacaacacagccagcgtcttggacaggggtctgccagaggagggtagcaaaagccaaaagcccagaaagtattctgcttcctttgtcctcttccattttagccaggcaaggagcattctgtgtcttatatcttcttttccctgtggcgttcatttccaattgcagaaaggaggtcataaccagattctttccttaaacagctttccagctgagtacaacaaagacaaaacaaagcaaccctgctcctccacaattctgctcttccatcactctacatggcaggagaaactcccacaatagctttttcctactgtcagagaggaagcataaaccaagatttccaaaggcaccactggttggttcccaggtgccctagagtaggannnnnnnnnnnnnnnnnnnnnnnnnnnnnnnnnnnnnnnnnnnnnnnnnnnnnnnnnnnnnnnnnnnnnnnnnnnnnnnnnnnnnnnnnnnnnnnnnnnnnnnnnnnnnnnnnnnnnnnnnnnnnnnnnactcgcctccacacctggctctaggattttattttagcctaaaaccaaattccactttgctagccatgatacaagtttctttctgacacggagtctc

SEQ ID NO: 447351 - DNA, 575 bp, Homo Sapiens
gtagtttgtttctttatttggagcagagacatgatcaattcacaaattcactgtgctcctttgctctttcctgcctaatgcttctgcagctacccgctcctgtccatcggggcatccacacttctacggtctgatcttcgaatggcagtttgggactctggcctgggtaacctaggaagatcacacagaccctgttcagaacccatgaagtgggtttggcttggtgagtttccatctccttagtcgtttgttctcgaagccatagcccaggtgcacagcagcggcagtttgcctttgtctctgtttgctggtttgcatgaaacgggaggaagcagtgagctggccctgtcccctctatgctggagtttattcagaccccttcagcccacagcagctgaactctcagcccgattgccaggccccacatgcaacaagcccacagcttcattctcgtcccacgttttgcgcttttgctgtgtttctggcgtgtggaattctttatcttgtttttgaaccagttcttttgtttttttctcttcttgtagtttgtttctttatttggagcagagacatga

SEQ ID NO: 447352 - DNA, 719 bp, Homo Sapiens
  misc_feature (116)..(129): n is a, c, g, or t
aaacttgtcacagggggtttgctttattatgttgcaatgtcacggatgcttactacatagccaagactggcttacaggcatgtgccaccacgcccagtacataacagcttgtttgnnnnnnnnnnnnnnaagtaaattactgtttaaaacaaaacaatacaatacaaaatatgtaactgggaagaaagtacagaaggtttctttagtggagacgacagcagcggtggtggcgatccgaggccctctcccaggacgagtgagctttccttttcacccagagaaaaccttggtgcatcaggaaccagctgcccacgattttgggttctcaagagagattgcgctagaaaacagtgacacagggcctgtcatcctagcactcataagacagaggcagggggattggaagtttgagcccagtgtaggctacaccataagactggctaagtaaggagagggtgggaactagagctggggagagtggccagtgctgtgtcctatgggagacaaacacacagtcaactgtcccacctccagatccaccgtggccttgccttcggtgtgtagagccttgtccccagcccagtgcacactgaagggctccaatggcatttgctctcaggctccgtgcagagctttgcctatctgtctgtgactcccaaccttctcccctgaagctcccaactgcttagaactcataccctgccctgaggtcaggtctc

SEQ ID NO: 447353 - DNA, 520 bp, Homo Sapiens
ttttttggaaaacaaaagaaccagccattttattccaagacctatgttctggggcagcaggaataaataaggaagggaggggacgggggcagggcaggtaggttctacgtcttgcagcacatcccacactttgatcgatgacagcagccgcagcagaaaatgcagatggggaagtgggtgtctcgcctccttcgcctctggaacatgggcatccagctggccctggctccagctctgtcctggggttgcagctctgcaagttgtcccgtctgttgtgggaaaacagagccactggtcaggctggcgaggaggaggaggagcaggaggcaagcggcccagatctgggagctcagtgccatcgtgccgtctgtctggctgtcccactgctgggtcttgagcttgctctggtgtctgggaccgagtgacagtcgcttttatggggcctgccaggggaggcggtggtctgagccccctcccctttgctctgtctcatttccaagaaggtggtggcgccgaaaag

SEQ ID NO: 447354 - DNA, 458 bp, Homo Sapiens
tttttatcagttcaaaggatttatttgaagaacttacatatagagtgctgcagcatattttcaagatggacagagagaaaaacaggatgtcttacctaggtttgtccacaaggaggggtcagggtatggagtttaaatgggggtttaagaaatttggctcagggctggggccagtttatttcaatattttgggcaacctagatacctttaacagtgcctggaaatgttcaaggccccagtttgggttcaagcttgctgggaaaaacctgtagctggcagggtcacagagtgactcataaagttaagggggtggactgggaatccctatggtgaaagagtgtgtgtggttgttaaatattatatccagcatttttagttgcagtatatcagaagtttccgtaatatttagtccacggtagcaccagaaatggaagcacttaatttgttcctctctccct

SEQ ID NO: 447355 - DNA, 602 bp, Homo Sapiens
  misc_feature (175)..(192): n is a, c, g, or t
gataacaattttttattagaaggtttctcttgatttctggagggggaaactgaagcaccaaagttagtgacatgacctaggacttgggcttcatagccaagtagcggtgtcaggatttgaacctgggcagtcctacttcaaagttagtactcttagcaactgtgttatgttgccnnnnnnnnnnnnnnnnnnaagattaaagcaattgatcagtgctttttaacctctagtcatgaccaactggtaacaaacttcatgggtgacagccaacttttttaatagaagggaaaatatgtagcatgttataagggaaataatactttgtgaaaccaatttcagtttatacatgtatgaaaagtgggttgtgatgtcaaattgatttcaaataagtttgaaagccatttcttatggatggtcttaaagatttctgcaatccatctcctaggactgtaagttggtcataattttactgttgtgaataattccagaagtttttttcatgatggcattgttgagtctcttccacctacagcactgtgacaatttctacttcagaatttgctgagccatgagtatcccttaatgcccttcagaagaaaggg

SEQ ID NO: 447356 - DNA, 1015 bp, Homo Sapiens
  misc_feature (606)..(617): n is a, c, g, or t
tgctttctgtgtatgtttttgactcgcgtgtttttgcttcgctaatcagattgcgaaaggaaacatctcacgtttgcataggacttcacagttcataaagacctttcccacccaccacaaaaaaagtatgacaagtttcccgtcatcttcattttataggtgtggaaagggagtcaaagaaaagttaatcgataccatttatctagttaagcaggctttgagcagttcatctcctcccgtcctcaaaacgaccttctgaggtgtctcctgcaaccctgctctgaagctcagagcgagacggcctcacatcccagggggctcagctctggcggggccgccacgcgcctccccgtgcctttggacgggtgaggagagctgctgccccggcggggaccacgtggaggggcctggtcagcaagtggcaaggacgcggcgcaaagccaggctttctaatgtacaatccgcggctctttcgatactgaacacccacctcttcaacaaattcgagcgccctggcaggccctgcaccaagcctagggtgatggcgacccaggcgggtttttactctcaaggagctccattctagggcagggagaagtaaaattnnnnnnnnnnnntcataacaaactgaaaaacacataaataagccacgtctctcctcacccctatgcacttaatcacaataggtcctgtagagagtcccgtatcgagaacttctgagcaggccccgctgtcagtccctgaggacagcatgcaagggaggttgacgtccctggacgaagaaagtgctggagaaactggcgaccgtcccaccttccctaaggcgaaggctctgaattccgaagaccgttactcggcgcggaacgcgggcagccgccgacgtcaaacaccgggcctggggccgcggcctacgcgtctcccgggcttcgcgcccctcgcccgatttgattggatgtggcggaaaaaaggcggggagacccccggaggaggggcgcgcagccgccgatcccatacc

SEQ ID NO: 447357 - DNA, 522 bp, Homo Sapiens
gagttctttttctttttattggcaaagtaaatatatttttatgaaggaccaaagaaaatatacgtaattgtaacatatgtacaccagcttcatagatttttttaaatttcaaatttacacaaatgttgatatgttattaaaagatattttatgtggatggacctatgtacagtttatttacatacattcataggatgtgaaataaacctgtcaaaacaagctagttcatttattaatttctagacaaaataaggaatgcatttctaaatcagggttgggaggctctatctagttctctcacacccaggacagcctggccctctcctcccaaggccaccctaaaggctggtgtctggatttgtctgggaaaccggaggaggggacgagcccctgggtacaggcccttctggctctgtctgccctgcacatttaactcaagcacatgcactgccagccccctagtgggggacgcttttcacctctctcccacatgagggcccagcagcccggtcctgcccccca

SEQ ID NO: 447358 - DNA, 675 bp, Homo Sapiens
  misc_feature (78)..(108): n is a, c, g, or t
tgggatacgatgaggtttctcttcaaatagcctgatcaatcttttattctttaattcatagtacccacacacacaccnnnnnnnnnnnnnnnnnnnnnnnnnnnnnnntgcctttgttagatgcccaggcacgccacagtaccaggcattatcagtaccagctcacatttcttcccttatttggaaagaggactaactttctagctcaatgcagacaccccttccccttcctctctgcattcttttgcatgcccaccttatctaaaaaaatcaaatgtttagccaaccaggattagttcagattgtacgacccgaccctggccaatggggaaagggtacaggggcaggacttgtgtcaggaataaaggctcttgtgcccctttgttcaggtgtgctctcatggtgactggacaagaacgcacccctctgtgcagaactaaaattgctttgctaggaatcctttgttcgagtgttcaatttccttatgattttgagcgttattcctaacaggaagaaaagggatattcaggcctttcacagacctgacaacagagctgcacttcaatgtgacaggtattgaccatgtgtggctcctgggagcctggaatgtggctggtctgagctgcaatttgcaagaaaggtaaaatgcagagttagtttcaaagatttagttcc

SEQ ID NO: 447359 - DNA, 607 bp, Homo Sapiens
cccctggacttcccgggtcacacagcatctgggggtggcatgaacatggactgaaggcacagggcctgagctgtctaaccaccagggcacctggccttctgagcaaacacatcttaggcagaccctccagtagctcccagccagggcccggctttggacctctggtgtttgcctgtggcctgtgctgtcctgtgactccactttgtgtctgaggcgccaggcactgtgaggacaatggtgatgccccagacgccaccagcgcccagctcagacaacggacaatcacagcttcagaacatagggcgggagtgacgcccaagagaacgcagagctatgggcacaggcaggagaaggtgactttctgggcctggggtatttgtagtgtggaatatgatgaggtttctcttcaaacaggctgatcaatcttttaattcatagtaccccacacacgcatacacactcttttttcctttttcctttctggctattgcttagatgcccagtcacgccacagtaccaggcgttaccagtaccagctcacattccttcccttatttacaaagaagactaacttttgtcactacagacatcccttccccctccggac

SEQ ID NO: 447360 - DNA, 556 bp, Homo Sapiens
cgctaaattgagtttttattattatgaggctgttttcctatagaaaatgtgagtgtgttctgaaaggaagatgaagggtcggaagttcgagtatattttatctttttggggtgactgatcttcttgtgtctgcgatcagactccgacgtctcttcccacaggcacgtggaggcaggtctgacgcagctcccagccctaccgttctagggggatgaagggggacacggtcccgctctctgcagtaaaggagagtggctggggctttggccagggcagccctgggtaagccgagctgcagaacttcccaagggctcaggagctgccaggctgtgctgctggaatcacctaggaagagaattgttgacacgtgcttggtgagacagagctggaggctgggttgctgctgtgcgggttaaactggacgttgctccgtgtggggggttaaatatgtgctggcgttgtgtagaaagaaattgatcaccatgatggctcttataggatcaaaggcaatttgcaagctcacagcttttgcagaatgtgaacctgggccaagttg

SEQ ID NO: 447361 - DNA, 480 bp, Homo Sapiens
gccggaaagctgttgcttttatttttaattgtatttaaaaggcggatacagggtacccaagacaccacaataaaatgacattaactgtaaaattacattattaattctttaatctcacttgaggcttcaagctgttgctatgtccaattacccgtgtaaccacctgtcagagtcctggggctgttttgcattacctccaggacagcggtgggcccggtggtccgtcaggtctgccagagactcgaagtcctgctgacagtgatcgcaggtgtaaattgattcatcctccatgtcttcatcatcctcatttctctcctcttgacttgtcacgctgttcctgtcttccagcgcacggctggttttctgatcgcactctggctctccttctaggcctcctgctgctgtcacggaggaatcccaggccagcgagaagtctgaggcctccccctcttcaactttcaccgagcgcggcttcgccct

SEQ ID NO: 447362 - DNA, 442 bp, Homo Sapiens
ttaggaattaaaattttttatttaaatatttaaatctctcttggcacaccaggatttgtgtgtgctctgaggtgagacctgctggtgttaggccactagcctggcctcactcttcccttcctgtgtgccccagggcaaccggagtgagcccctgtcactcccgtgctcccacctcccacccaccaggtggactcagcctttgtttaacacaccaggctcaggataggtcaaacactaggtaagagggagttgccataatcacccccagtttgtgggcgggcaaacaggcagagcggtggccagcagtgaaagggagacccacggtggggttggtcctctggccgcagctcagctttggcaatgcgcagacccccgccagcccatcccatctcaggctgttttcaggatcccaggcccttgcacaaactacaatctccaccca

SEQ ID NO: 447363 - DNA, 691 bp, Homo Sapiens
  misc_feature (421)..(438): n is a, c, g, or t
  misc_feature (648)..(648): n is a, c, g, or t
atataaataaagagtttatttgggatccttaagtgagcccagggtgttgggtggtagaggagagctggagacctgggcgagttttggagcagtccaggccctgagtgagaccatgttgtaatgggggagaacaggcttggcagcggtctggggtcagggaaaggatagggagtgctgttgggatttttgagttgctaagcagcagaagagaccaccttgagagacagcctgcagatgtagacagaaacagagatgttgacagacccacgcctaggagtagaagcagacattactgggcccaaaaagcacctgttgggcacagggacctgggaacacactgttaggtaaggcagaggttgcaaactcaacccctgggctccaccccggacattccaaattggatgaggcccaggaatctgcnnnnnnnnnnnnnnnnnncttgagcctccgcgcctggcagaatctgcgttttaataggatctcaggtagttctgatggacactcaagttttgagaactcaaatacccacagagaccaaacaaaaatttcaaacaagggaagctagctgggtgtcgggagatgatcaagaaacgtggtgactgcgaagtagagtgcagagcagatcctatctaaagaggacagtggccncccagcccagctgattgccagttattgccagatggaatgttgg

SEQ ID NO: 447364 - DNA, 485 bp, Homo Sapiens
gcagcaaagaaagagtttaataatcacagggcatctgaatgaggagatgggaagaagcctcaaatccacctccctgagaggtttggggggcagggtttttaagtcctctggacaggggctgcagtgtggggatcgatgattggtcaagaagtgaagggcgaagtcatgagacagggagaccaagaaacctcattcttgtgctgagtgggttccttggttggggacgtcagaattcaggatctgaaaaacaacccgttcttgggcaaaacgatcttatgagtctagcgtcagaaattcttactcatggtaagaaccatggagaaacaggtaggaggtggtctagcacgtggagtgatgttcagtgagttagcagctgcagggaagtgggtcaaagtacacttgtgcaccctggataacagctaactatatataatgctgcctaaagcctggcttgtaactctccttaatcctgtgagggcagtttc

SEQ ID NO: 447365 - DNA, 502 bp, Homo Sapiens
  misc_feature (51)..(107): n is a, c, g, or t
  misc_feature (182)..(201): n is a, c, g, or t
ttttgcgcccggcctagatgctttattttttttgaggcaaggtctcgtttnnnnnnnnnnnnnnnnnnnnnnnnnnnnnnnnnnnnnnnnnnnnnnnnnnnnnnnnntgggctcaagccatcctcctgcctcagcctcccgagtaaatgagaccacactgtcaccatgcctggctagtttgnnnnnnnnnnnnnnnnnnnngtagagatcgggggttagtctcactcttgtttaggctggtctcgaactcctgggctcaagtgatcctcccaaagtgctgagattacaggtgtgagccaccgtgcccggcttttatgtattctttcaacaacgctgcacggctgcgattatccccactttgagaggagacaggatgagaggctgagtggcttgctaggcttgtatggacaggatgcgggctctgcaatcacatgactttgtatgagagggcaaatggattaaccgctaaacatagtttcctgttgtgtaaaatggggatgat

SEQ ID NO: 447366 - DNA, 838 bp, Homo Sapiens
  misc_feature (281)..(385): n is a, c, g, or t
cattcactgttattgggaataaacatacttttcaaccctaagggtcagctgcttttcatgggaagtaactagtcacaacctcctcgtttaaagaagaggatatcctgaaggagtgaaactggtaagtgaccagcatctacttcagtgacgtttcctccagtgtgtacatctgtgttatataccacatggcttctcaacctcagcaccctgtcactttgggctggataagtcttggttggagggaccatcctgtttattgtaggatgcttagcattgtcccnnnnnnnnnnnnnnnnnnnnnnnnnnnnnnnnnnnnnnnnnnnnnnnnnnnnnnnnnnnnnnnnnnnnnnnnnnnnnnnnnnnnnnnnnnnnnnnnnnnnnnnnntgtcaggctagataaaccaactggccagagctaaataaatggcctttgtctcagaatgtgttttctgccagtccctgttcttgttcttcctaggtcttttctctacatatccatcccccttgagcctcctaatcccaaatcttactttatatgtattttgcatccactggccattacatctgattgtttcagagataatctgaagtaagcacagatggagtgatagaaactgtggacagggttccatgcaggagaggtcttgtgagtggacagaaactgagcagaagctgtttcctcctaaataagagcaactggaaggggttttgggtagagactcaattggtgattttcattttaacccaatccacttattgtggcactgttattgactaataggaagaagtagtgttagaacctaattataaagaaactctatggctttttatttattta

SEQ ID NO: 447367 - DNA, 378 bp, Homo Sapiens
catgctgagctaaggatgaaaatgactcttgacttcaaagctccatgtgtagagcccactgtttccctttgccatcaaagaggggagggacctcatggcagtgtctgatcaagatgcaggggggccaccccggttctttcagcagatgcaagcctggccacacctcgtcaaccgcccagcgctgtggggttcaaactggaagggaaaaagacaggaggagcatggctggcaggtcctgggtccctttcggccacacgtttgggattctcttccaggaaaaacattttcaaaattcatctacaatattccttgttactgagtgccatgatgacatcgggagaaaatctgcaaactgtattattccctaattatttttaa

SEQ ID NO: 447368 - DNA, 728 bp, Homo Sapiens
  misc_feature (551)..(551): n is a, c, g, or t
ttttttttaacaaaacactagaatttttcagctctgatttggtgcatagacagcatttctcctcacaaaggccaacacagaaaaagatacaaatacattcatccagctaatatttagttttatgacacagagtttttcaaacaagtttaagtgtcacctgaagagcatgttaaaaagtttaagttatcacttggagagcagatttcttggcctcgccccttgtgattctgtttgaggggtgtgcagatgttacttttagaaacacttctgtgtcaggcactgaagatacacaagaacgtaatctctccaccaaagagatgacaatctagttggagatcaatctaactatgtaataattacagcctaataaggttgcagggtgctatgagagcatggaaggggggaacctactccaacatggaaagggagctgggaaaggataaagggagctttagcaagcacaggccagctggatgaaaggtcgggggtatggagtggggacagacaggctaagagaagtgggggtaggtctttgcagcagaagcactgcnggcaaaaaactgcatgtgcttgaaatataggctggagggtattgttgatgcataatgtggcccttcacataattcccataaatcattaacaaaccctgtttcgttccctatgaagaatcctttatttcccagtatttataatttttcccccagcttgcaatttcttggccaattaac

SEQ ID NO: 447369 - DNA, 707 bp, Homo Sapiens
agtttttagaaaaaaagaaggaagtttaatagcgatatagaaaattgagcacctataaaactatatggtgggctctgggttacattgagcttaagtagaccaagtatctatcccacctaaattatcagcaactccaggccatgacccagtgtcccattctccttcacggtttgctggtgtgtagcctcctggatacaggcaatgtatatagatcgcagagaatgtccgttctggcctcttccttggaagggtctaaaaacagaccttaaggagctaagtgacttccccaaagcccacagctccagtgccactgctgacttttgggtgggggtgggatcagttaaagaggaaagctttcagtactgtcagcacatacacctgccaattaaggggctggatagagttcatctctaggagcaggacctccacccccaccctccaccccagaagccatgtcatgctgtttcaccaggatcttgcctgaggttagatgggagagaacagctacaagcttgggtggagtcactcataaacacaccctgaaagctgtggagcagggagagtgcaggctttagagggctctccatgatcccttcccctcctgggggctcaaaggcaagggtcaaagatcttctcggtcaagtttggggtggcttcctgtcttggtcatcttgtctcccccttcctcttccccatctgtgatctcc

SEQ ID NO: 447370 - DNA, 463 bp, Homo Sapiens
cttagctacaaaacgttttatttctataaaacatctcttaaaataattcaaacactgaaatgtccacatctcatacctttcaggagaaaggcaaggagactacttgccttactgtcatattattgagggaatcagcgcaaagcctgaggaaatgaacagtagctgtgggtcaaagccatgtctccaggttcacggctcactcccccaggacaagcctagttaggtagtggctgcatctggtatccctgggacagaaatgcaggtgagaaggggtatcaagaatgcctcgagggggagatgggtgaaccagaaggtcaacagttgcatttcttcatctagaatgttctctagaagggaatgatgatcatgagagtccccttaaggcacaccgcaggtactgactgatttctgtgggcccagaattatcactttaatacagagaggataaattggcgttgttttt

SEQ ID NO: 447371 - DNA, 462 bp, Homo Sapiens
ggaaaaagtctagtttattggactgactcaaagcacaactaaaaattaaaaccagaaagaaaactgtacaaagcacgaagctacaactttaaaagcatcacctagacgcgggtttaattgcactacagtcccatgggtgaggagagctttgccatccgtgaggcgccgggcaaggcacaacagacacagagagatgcagcccggcctggggctgcctctgctgccaccaacttttacaaaaggttctagaaaagggaagtgtgaagtcagatctgggatttcggcatcttgacctcatttggacatggaaaacctccacctatgtggctggctgggtcctgtcagagaacatattttatcaccctccacctgcggcctgggggctccctgacaccaaggactgggcctgggccaggggcaggctaaaaaaagcagccagcctggtgtcctgtcctgaagctg

SEQ ID NO: 447372 - DNA, 2030 bp, Homo Sapiens
  misc_feature (966)..(983): n is a, c, g, or t
ccagaaacacaaagaaagacagtatgtcgacagtggaaataagcggacgaaggtggataaaaatatacggcgcgggcgcgattgcccaaaaatttttgtaaggtgtggggggggtaaaaaagaggggcgcgtcccactatagggggagcagccagggggccgaggtgtatcctcgaggggacgagtgcggggtaattccgtatgcgactaggaatcgcacccacaccaatggggcccggcgagtaagtttatatggccctctcggggaccagcgaacgtgggagttgggtaaaagaaaatgctggggaaagagccttataaggtccgggaattttgggaaggtctaagcgtcgtaggccccctttgggcgagagaggagagggctttggtcaggggtgttgttggccgatttatgaaaggaggtcggaattgaaggaggcaggttccaggaaagtggagcgattgagggggtagggaccgcttgtttttcaaaaggtccaggtaaaaccgccaagaatgattggctgccaactgggagaaacagccatggaaaattagatggattgggtgtgatgcgatattcggagtttcaacaaacctttccttgaacgtttgacgtgcttcttacaagcaaatcccggtaataacttacttctgtcttaatttttctagccacaggaagattgaaacataagtagtctgataaacatcaagggttacgttgatgcttttgaccacagggtatatacagtgttaagaatttaaattctatccatcagatatactttaggactccattttgaagatagcctcttctacagaaaagaaatttttaaaagtcaattctccagtttgtcatcacatcttaatttttttaaaaaggcttttaaacacctagtatcactccaagtctttagcctttgatacttgctctgaaaacaccactatcgtatgtttgtgtatgtnnnnnnnnnnnnnnnnnngtgacttaaaagtggcaaccgcctcttgaaaagtaaaaatatgtcatccctccattctgcccttaaatgagaaataaagacaatagatttgcccactgcagactgggataccagaaaagacgttctaagtctcgcctgagacaatattaacctgctatcttaagtcccaacttggatgacttaaatttcagtgtacgtgcctccgttcccactcttgccccatcagctccatcagcatcgtcatccccggctcggatcccggccgcgacccgccagggccgccggagtccgcgaataccgcccgctcccagcaacgaagctccccggctcccggccgaccgcgagttcctggagcagcagcctccaaggttcccaaagcccacgattcaggcgagcggtgccgaccgggccgtggactgtggcattttaaaactacagaagtctcactgcacgactggcgcggccgaggtggcccaggagaccctccaagagattctggtcagctgccgggagcgtggaagagcaaccaaagccaccaaggcgccgcgccaagtccccggagcagtcacctcagctttccgttctccctctagttacaattactccacaggcttctggcgcttccttcgagaaaatgaaaaactaaaaacgcgtagaggtggtagaagtcgttggcattttccgtttaatgtgatcccccaggctccatcccttaagtggggtttccaaactcggatgcatcctcagcagaggttttccatgttgacagatctctcgcctcccacaaaatggggccggggaggcggccgcggtctcctctatgggcgccgccattttgtgaggcggcggcggcgcggcggcaggagcccggggtgtgtataatggttgaatagaatgaccccctccagggaatccccggcactgacggttacgtaaggggctgtgcgcaagtgcggcgtttagggaatccgcacagcccgggccacgcagctccgaggcccacatctccacttcccctaagaggaccgatgggggaagggacccgct

SEQ ID NO: 447373 - DNA, 1127 bp, Homo Sapiens
  misc_feature (51)..(51): n is a, c, g, or t
  misc_feature (59)..(146): n is a, c, g, or t
  misc_feature (153)..(153): n is a, c, g, or t
  misc_feature (163)..(163): n is a, c, g, or t
acgcagaggtaacgggctaagagtaactctagagggcgtacaggtgatganggaatccnnnnnnnnnnnnnnnnnnnnnnnnnnnnnnnnnnnnnnnnnnnnnnnnnnnnnnnnnnnnnnnnnnnnnnnnnnnnnnnnnnnnnnnnttttttnttggggtttntttttttaagggagaacagttttattagcatcacagggtccatttttccctttccatccaagcatccagagtctggtgtcctttaatcagttggcaggttcaacctggaggccactggagctgccggcccccaagtacatgaatgtgcagatgatacacagattgtgcacccagcttcccatcgttgatcacaagtcggtatccatctcccaggccctcagcctttgctgtctgcttggccacaaggagtaggtgtcctagaagctgctggtcttcttcttcagcctggctaatccgaggaatgggcttcttaggaatgaccaggaagtgcacaggagcctgaggggccacatcacggaacacaagacactgctggtcctcatagagaatgtcagctgggaggctcttgtccaggatccgggagaagatggttggggctgctcccccaggagttgcctgctgggccttggccacttcattcccatcagtcacacctgcagctcctcggacctgccccccgcgcacccccgtggccgccacggctctgcgcgccgcgcgcaacccagcagccagcaccacggctgccgccatcttccctgagccgcgggaacctctcacccgggtcagcactcggctccgcggccggccgtgggtggggactccgggcgcggggaagcggggtagtggcggccgggcgagccctgctaccccattggagcgcgcctctgagcacgattcaccccattgcctctgcagccactttggaggcgggctcttttcatctcattggctgcttctaccaacgcgaggacaattttccattccattggtttcgtcttctagtccgtgtgaacgttcttttcccattggatccccttactagtttctctgtgagagaaacttccactccattggaaggattaatagagcctggaggtgggattttctcctagttgaatctgat

SEQ ID NO: 447374 - DNA, 571 bp, Homo Sapiens
  misc_feature (11)..(11): n is a, c, g, or t
  misc_feature (477)..(525): n is a, c, g, or t
tgatgccttanccctcccagtttccatggtgctgagagggagcagtgggttcaggtggtgtcaacccgatcccttccttataaacttctcccccaaactttcccttaatggttttgtccattgattaggatcatctaaatcacttatttaattccggctagtaagatggtgatttttctaattctatcatttcttccacatttagtggctaaaatttcctgtaaggaactttcctctaccaactaggcttttgtttaccttatccttcatgtctttcctcaagagttaccttggctaggaacagtggctcaggctgaggtgggaggatggcttgaggctggagtttgagactagcctgagcaacatagtgagacccaatctctacaaaaaatttaaaaattacccgggtacagtggcatgtgcctatagttccagctactctagaggctgatgttggaggatcgcttgggtccagcnnnnnnnnnnnnnnnnnnnnnnnnnnnnnnnnnnnnnnnnnnnnnnnnnatgacagagtgaggccctgtcttaaaaaaaccccaaagaattacaa

SEQ ID NO: 447375 - DNA, 618 bp, Homo Sapiens
ccaagatctgcgttacaccggtagtcctggagctcatagcgcaattgtgacctgatgtcggtgtgccaaaagtgacagaaggaagagcaagcgcaagtcaaagcacttaatgtcattgataaatttccggtcctgtgcactttctcaggaggttacagagctttgcagcaagattaagttccaggctgagctgctgtgccatctgactgttgaacactatattacacagacattttaatgactccacaataactgggaactctgatactttctccaaagaatcatctaactcatttagcttggctagtcgcagcagtatctgcatattttccttagttgtcacaggaactaaaacctttttgtctctggagagaatgcggagtacttccaggcaggacacttgacatgttgttgggatgtcctttataaggactttaaatatgccttcacagagtttctttcttttatcttcatctgttgattcaaatttgaaagtagccctatgcttgtcgctgtaatccctcaggacccgctcgatagcccgtgcttcgccggcccggacgatgtagagggcgcgctcctcatccaaggcaacaggtgcgggggagccgcggccgc

SEQ ID NO: 447376 - DNA, 1456 bp, Homo Sapiens
  misc_feature (151)..(151): n is a, c, g, or t
  misc_feature (264)..(264): n is a, c, g, or t
  misc_feature (304)..(304): n is a, c, g, or t
  misc_feature (313)..(314): n is a, c, g, or t
  misc_feature (1346)..(1346): n is a, c, g, or t
  misc_feature (1349)..(1349): n is a, c, g, or t
  misc_feature (1374)..(1374): n is a, c, g, or t
  misc_feature (1377)..(1378): n is a, c, g, or t
  misc_feature (1380)..(1380): n is a, c, g, or t
cagacgccctccacgaaagcccgccggcatgacgcacatgtttcttttctttgaccccctcacattctgcttggcactaaggcgaccacggtccgtttttttatatatacaaacatcgctgatgcgggcgggacccaaatcacgtatttantccacatgcgaggtgctgttttttaacattctatattgagccgcgtatcgctcttactatatcttgttattatgtgtggtgggtcgttgccgccctccgctttttacttgtantttccacccctagcgatgagatatgtatgttctccatcgncggcatcannaccccagccgcgccataacatctctcttctctctcgtacggtgggagcagtcggccccctctttagatatatgaggtggttaatatctaatttagtttctatatagttatggcagagcgtggtgtactctcataccagccgcctgtatttgtcaggctctacacgtcctggagatataatgtggtcgacccactcgtgttgtccacagaacactgatgctcttaaaagtataaaaagatcataagataaatacagttgtggcgtcttctgtttacactgtcaattttgtggccaagaaccgctgtaatctatagctcttgcgcgcttccccaacaaaatacctctcttctcgtgttaatactctattgttgaacctcatttaatgtggaggggaaatcgcttcttccctgccacttttccacttaaactctttagtcggcccatatgtttataaccttgttggagaaatataatatgtcccctagttgttgtcgagaatccaaggcgcgtttcatagaacttatgttctgtagccgatgtgcatgcctagggaggggaaaaactcaggttcccatgtacatttttggaaaaattccataccttacaagattaagatttctcttcccttgctggttactctgaagtctccaatatacaaaggttgctccttacgtggttttcttattgagccaagcttcttgatgggtcaatcccagtttcattttctccagtactgggcaaacttgtgaatctgttccacctctgctgcaaaaagagcatggacactctcatcaatcagactctgcatgtaatgcacagcctcttcatccgacaggtctaagcggaatttatcctgaacctttttcacagttttatctggttcaagtgcaatatctggaatgtttgcatcaaccatcaaggaaaacaagttcaaaatcagattagaataccttcgcaggtggaggaaagccgtgtaacaccgtttacggaacggggagaactgctcactctgtgtgccccccattccttctnccntttccctttcttgcggcaaaagggnggnngngcctctgctccgaaaaattccggtccggtgcctgcttctttttgcaccgttttcctctcttggtttgtcgtttgtc

SEQ ID NO: 447377 - DNA, 466 bp, Homo Sapiens
  misc_feature (35)..(35): n is a, c, g, or t
ggccggcgcggcgctggaaggcgccggcgttaacnccgcgaggcaggcgacggagggggagcggcgctaatacataagagcactgcatcacgctaatcttctcccagaacagtatgcgtcagcagtacattcacgttctgactgaaggacaaaaggatgagagagcagtctgcgtggctgccgcctgcaacaccgcgagcccggcgcgaggaggagacggtgggcgccgcgcgcaggggccccgctgctgctgctgctgccgccgctagccagcggggactatgttcctgggctccggagcgtttcccgcagccgcgacccccgctgctcacgccgctgcagcagtccgctggcggcgcggccactgagggcgccgggagccgaagccgcgaactcgctccctccgcacaaagccggagccggcggcgcgccgggggccgggcagcggagggcggcgacgggcggt

SEQ ID NO: 447378 - DNA, 483 bp, Homo Sapiens
  misc_feature (433)..(433): n is a, c, g, or t
ggtggctaattaattcttttattgtgcaccggataaagaaagacaaaggcctcgccggcaataacgattcattaaaatgcagcgccttcgcccgtgctcctggcccagcaccagcccggctgctccgccccactgtgggcacagccgcctgcgccccttaaccctttgtggagtctcctgggctgggtgcccggcctttgccagggccctgggggagcagggtttatgcagccgccagccgccctgggggagaagccgggcctgggcccatctgggcactgccaaggaagggggtcctgggcatcttacacttgtccatggcagacctcagtgggcctgggcccgggaatcccggacggtcccctggccagagggccaacctaggctggggcaagtcctccagtcctggccgtaggcccatggggaaggcggnggccggggcaggcagggaggaccatctgccacacacaggacccagggtcc

SEQ ID NO: 447379 - DNA, 546 bp, Homo Sapiens
  misc_feature (453)..(453): n is a, c, g, or t
  misc_feature (461)..(461): n is a, c, g, or t
  misc_feature (487)..(487): n is a, c, g, or t
  misc_feature (501)..(501): n is a, c, g, or t
  misc_feature (518)..(518): n is a, c, g, or t
  misc_feature (532)..(532): n is a, c, g, or t
acaccagctgaaacaacagtatttatttaccacgcctgtttcccacttgagaagatccagctccatgcatgagtgggaaccgttcttcatactttgcaaaggggtcacagggtcatttctgtcttcataacctctctgggaaagtggtttgtgctcttctgacacaggacgctgaggctcaagttcacagaaccagccgttagtcagacccattcagtccagggttttacaaaattgttgtttacatcaaaaccagctagtggcatgccagctcagcttctaacataaagcagtctgggacgtgtgcaaatgtccatgccaccccacttagggcatttatctgatcatggggccagggcttggggtcgggcactggggaacgtgggagcttgtcgagattgcccttgtgctcctggggaatttccacgaggggactgaggtttgcagaagatnggaaggtnaagcattggcacttttacccgggggngtcattcggccttntaggtaggaaccaccanttctgattttcctnccgggaagattcat

SEQ ID NO: 447380 - DNA, 658 bp, Homo Sapiens
gagaagggtttttttctcacatcctattactttatatacaaattgccatatagcaatttttaacctatttcctcatctgctgataatcactgggtctccactataagaaaattgcccctagtttgtcaagagtccttaaaaataacgtatcaataatttaaaactggtgaaagagctatgcaagattgttccctttaattttatattactctaaaatatacatatgtacacatactcacacatataacaaatttacatagtttgcagaaataaactacggaaataattccaaatacacatttagaaattcacattttaacagcaaacttacatgcagataaagagaagtatagttttatacttcctaagttacacagcaagctgaaatggagaatgttttaatggtcattttagatttattctttctcctaagtcttagaaaatgagcaaaaaggagacataaaactcaagctatgtctatagcagtatcagtcaatgtggtattatttttactaacaaattattcaattgcttactctatacaaaaagtgatatacacatactataatactatatgccaaacacaaaatagcgttagagataacaaatgagaacttcatacaaaatacttgattccatcagtatttaactgtgtttg

SEQ ID NO: 447381 - DNA, 479 bp, Homo Sapiens
  misc_feature (431)..(431): n is a, c, g, or t
  misc_feature (447)..(447): n is a, c, g, or t
  misc_feature (454)..(454): n is a, c, g, or t
ctgactttggtgatttaattgcttttcccttaaatatgagaaataggtgtaatttctccttttgttcttttactacagccggagtggtaaatactacctactgccaacaaacacgggcatccactctgtcttcaatgcctcttccgtgagacatttgaactgaaataagagttgtatcatctagaatgaataaccaagggggccaagaaaggcctagactgaagaaataagtcaacatgtgcgttctccggcacaggcccctccatggagccggcagtcggctatgcagccaggggacgcagatccacagctctcgggctgattcaggactgtgcaagcaccgcaggaagccaggggagctggtgtcctggggcatcctggcagttcttttcacgttgggcgcaaatggagcaatgcgcacgaagctgctncatctcctctgctgcngatttcnctgccgaagagccgaggaaggttag

SEQ ID NO: 447382 - DNA, 509 bp, Homo Sapiens; identical to SEQ ID NO: 61461

SEQ ID NO: 447383 - DNA, 1017 bp, Homo Sapiens
ttttttttgaggagccacctgaggcctcttttgccagaggaccctacagcctccctggcagcagttccgccagcatttctgtaaatgccctcatgccagggtgcggcccggctgtcagcacgagagggacgttggtctgtcccctggcaccgagtcagtcagaagggtggccagggcccccttgggcccctccagagacaatccactgtggtcacacggctcggtggcaggaagtgctgttcctgcagctgtggggacagggagtgtggatgaagccaggctgggtttgtctgaagacggaggccccgaaaggtggcagcctggcctatagcagcagcaactcttggatttattggaaagattttcttcacggttctgagtcttgggggtgttagaggctcagaaccagtccagccagagctctgtcatgggcacgtagacccggtcccagggcctttgctctttgctgtcctcagaggcctcagatggatacgcagcaacttccttttgaacctttttattttcctggcaggaagaagagggatccagcagtgagatcaggcaggttctgtgttgcacagacagggaaacaggctctgtccacacaaagtcggtggggccaggatgaggcccagtctgttcacacatggctgctgcctctcagctctgcacagacgtcctcgctcccctgggatggcagcttggcctgctggtcttggggttgagccagcctccagcactgcctccctgccctgctgcctgccactctgcagtgctccatggctgctcagttggacccacgctggagacgttcattcgaagccccgggctgtccttacctcccagtctggggtacctgccacctcctgctcagcaggaatggggctaggtgcttcctcccctggggacttcacctgctctccctcctgggataagacggcagcctcctccttgggggcagcagcattcagtcctccaggtctcctgggggtcgtgacctgagtcctgggcagacct

SEQ ID NO: 447384 - DNA, 770 bp, Homo Sapiens
tggtgcggagcagaggggttggagtgaatgccatctctattcaaatatccagctgggattactctaggagtcttcctggcttgcttttgggctcaaacttagctacattgtctctacttggctcccaaagtcgggattgaagagctgaaaagatgcaggcactgaatccttctgcacactcctccccaaccttgtccagcgcttttctacttaggaggccagtggaagggaggagaggccatgcccatagcccacaggggacagggttcattcgttcttccaggcttggttcactctgcttttgattcagaagctctttccctacccagcaagactacactttcattgcctgtcattgtctagtttctatctttgttgtgcgtataaatggtaatgttgtgatatattctgcagtgcttgtgcccaccttggaactctgttcttgctcttcattccgcatgtgatactctggtcacaagatcgttggccaggtgccttctgctcaaatatcgtctcagaggtgcttcccttgaaaactcggtgctgtttgccatagttactctatttgatcactctaagtttggttgtcttcatagcacttgtcaccctctggaactattctattcactttatttacattgtttaatgcttggctcttttcccctcctaacgtaaactgccatgattgccaacacctgtttacttactacagttccccctccccccacattcctgacactagtaagaaccacccaacacttgttgacgga

SEQ ID NO: 447385 - DNA, 462 bp, Homo Sapiens
gtatatgtatgggttttctattgctgctctctcaaattaccagaaatttggtggcattgaacaacacaaatttatcattttatagtttcgcaagttagaactcagacttaggtcttactgcattaaaatcaaagttatcaccagggctgagtacctttctggatgctccaggagagaatatatttccttgtcttttcaaaattctagaagccaaacaaattctttggcttagccttctttctccatattcaaagtcaactatgttacacctctctgcccctgcttccctaatcaccatctctttctctgatcctcttccctctctctcttccacttctaaggacacttataattataatgggcccactcagatcatccagggtaacctccccatctcaaggtccttaacattaatcacgtcagcaaagtctcttttgccatgtaaagtaacacagattccag

SEQ ID NO: 447386 - DNA, 479 bp, Homo Sapiens
  misc_feature (92)..(92): n is a, c, g, or t
caaatagtaaattacagtttatttcatttacagagaccttgaggcaaaaaggtggtgtttggaaaacagcacaccggtgaggagcaccgagnaagcctgttacaaatacgccagtgcacgctgccagtgcagtgagtgtggggtcctgcaggtggccgtctaggaagggcaggcttgagacgcgcgtctctgcttccctctgacttgagaccatctcccttgcaccaacagcagcttctccaagctaggctgccacagccaagcacacactctgcaaacctatcactgcgagtagtacagttccctttaaaatcgcagcagcaggtgctcagggaggagagggagccagggtggctctggtgggcgtgactgccagtgggaggcgacacaggtgggcagaaggctgccctcccttttattctatatgttgggataatttaaaattcacaagtcccattatttgacaattggaaaagtcc

SEQ ID NO: 447387 - DNA, 517 bp, Homo Sapiens
tttttctttggaaaaagagtcatttaataccttaagggagagtaggaactttcagttacctaagactacagccaacccccagcccagaacaaaaacaagacaccttaatgtttgttcaaagacaaacccacagcgaacggctctcgcacccctgctctaactcctctttctgggggaggaaggagggaagggccaggtccgcggggaccctcactccctgctttctatcacacgggtcacaaggcagctctcagagcagaaggcacacacactgcagtggaagttgagaaaggaagtcactccaaggtacacactggcccaaagaccaggaaaccgtgccacggagctggaaggcaaggccgatgggacggtgcaaggaccacgcccacgatagcgcctgccgccccgaagggcctgcgtgacacatcaggtcacatctccagtcaccttatttgtacacagttctctcctggaaaacctttcatttcttaagagtaaatgtgactagttagaggct

SEQ ID NO: 447388 - DNA, 553 bp, Homo Sapiens
ttttttacaaagagtttgattttattgatatttaaatatattaaatatttcactgaaatacatggttcaccatcctcccccacccccacagtggttacattataaaaccaaagcccacggcctcccacctcctgactcctctaccaactgggtgaggaaagggacaatggtagcccaggggaagggcatggctggcactgtggtacggggatccagggtgtggacaggccctcccacctggcaagaagcagagacaagccacccaaggctgaggtcttcccactctgatctacttataccctcacccctaccccatggcaccaagtagtctcttcctatcccttcctatccagggatatggctggggacaggggagtagattttctgtctggaaaacaagtcttttcccctccttctgccatgactaatgaagtacctgatggcccatttggttgatgcatgaagatgcccaagggaggcattacccagaaaccaggcctccacagggagctggtgtcagaaggggcatgaggaggggcaagtgcactgcctg

SEQ ID NO: 447389 - DNA, 523 bp, Homo Sapiens
  misc_feature (472)..(472): n is a, c, g, or t
  misc_feature (480)..(480): n is a, c, g, or t
  misc_feature (490)..(490): n is a, c, g, or t
acaaagagtttgattttattgatatttaaatatattaaatatttcactgaaatacatggttcaccatcctcccccacccccacagtggttacattataaaaccaaagcccacggcctcccacctcctgactcctctaccaactgggtgaggaaagggacaatggtagcccaggggaagggcatggctggcactgtggtacggggatccagggtgtggacaggccctcccacctgggcaagaagcagagacaagccacccaaggctgaggtcttcccactctgatctacttataccctcacccctaccccatgggcaccaagtagtcttcttcctatcccttcctatccaggggatatgggctgggggacagggggagtagatttttctgtctgggaaaaacaagtttttttcccttcctttttgccatggattaattgaagtaacctgatgggcccttttggtttgattgcntgaaggtngcccaagggnagggatttacccagaaaacaggggtttcacatt

SEQ ID NO: 447390 - DNA, 450 bp, Homo Sapiens
  misc_feature (396)..(396): n is a, c, g, or t
atttttaaacattttatttacaaaaaattaatttattttcagaaataaaactcttttaaggtgttgcttgttttgtctccacagatctgctgggaggcagtggaggtgtgcagggacagggcagaggggctgaaggaaaggaggacatcaaagggacagggctgaggcccaaagggatggggtgtggcagactggggatgtaggtggagtgagcctgaggaaggtggctgagatgcggagtagccttccccccataggaccagcaggcacgcccctggccagggaagcacagagagacggccagatggggacaaggagagaaggtgtcacctccttgagataaggctgagatgtacacatgtgctcacacagggccacgagaaggcaggaagtggnggattggaaaaaacagagacaccccaagagctgggtaaagggggaggccaaagg

SEQ ID NO: 447391 - DNA, 364 bp, Homo Sapiens
ttcctccgttctcattgtttcctgctttccttccccacccaccccttcctcagcactctgtgttgtagcctgtactatcctgcttcaagcctccgtgtcccttgtaccttccccctaccttgagttgccagttctttactccctcaaatgttcccatgccacctctggggtttctgttatctgacatccctggctgctttcctggtagatgccattcccagagaggccaacagcgttcccaggcgtggctggctggtccgcatctctcagactcactctgccaggctacagttttgagaataccttttttgttgttgttttgtacctggagaactttttatgaatgagtaaatcttcagaaagg

SEQ ID NO: 447392 - DNA, 127 bp, Homo Sapiens
attgattttattggaaacagaacaagaaatggtcagagccaaaagactgctcttaaaactgtcaaaaacattttaacagaaaaaaataaacatgactgcattatgaatgtttttagaagagttgcac

SEQ ID NO: 447393 - DNA, 1152 bp, Homo Sapiens
acccaaaaaactgggacatgtttaaatacatacagtttgacaaatttgggatttcactctttgttttgatgtagtaactcttttataaaagggaacagattcaagacaaagctcagtggccccaactgaagacattcagcaattaatggcaggacttcagtaatcagtggcaggactacaacatacatctccttcatgcctagggaaacccaggctctctattataaagctgacccagggctattgttttccccttttctctcatcctaaacaccattcatatttttcctaggtcacattttagtgggatcatttacaaagcccccagaacttaatcatcatgttttaccttttttattgaattatatacacctcttacaaaaatgcttgaagtaatttaacacctgtacatcagtacaaaacctggctgagtaaaatgaagagaggatctattcaagatcattaagaccaaatgtaaactgggaagtatgtggaagatagctgtccagcaagtgtctggaaggtgttctagctgggtagagagcctattctaacagacacgcacatcgcagaaagcagcatgaacagaaccacatcctagataagagttctgtgtacagaagatccatggaggcaagtgctgtcaggaaggacactgcctccctccaccctcccaaatgtcaccaccaagttccttcaggtgagacctcacacaatgtcaagtgctttctaggaaatactaagatcaggttgagagattctgcttggtctagtcaatctgaaaaattcaggctggaaagacaccttttctcaagagctgaattgacttttgccttcaagtcttgcctgcaccttgcttacgatggcatcaatttacacctaaggacctttgaagagaaaaattccattatttcttttttttcttgagagcagattttttcccccctcctttggaagatttgcagtactttgcttccatctgagccagaaaattgtccatttccttttgccaatccttttgtctgctctgaatggctgccttcaggctatccacgccttcatcaagccccaactcctttctgctcatttctgcttctttggcctcttcctgagccctccttttctttgcattcatctttggtgttgattctt

SEQ ID NO: 447394 - DNA, 518 bp, Homo Sapiens
agacgtgtaaaagtttagtattttgttcaacaatttaaaaaacagatataataccagcataaaatattgcatagcaaataatagattatgtttgtacaaaatccagtaagaaaaacataattttctcatttaggatgattcataaaatacattttgagcaacagcgataacgagggtcccacatgcgtagatggcagcaccagagccagacccaccaccacggagttcgcgctcacggaacccaggcctgctgggtgtcagcagcagctaagctggatgcaggtactacaaaatgaccagcgctcggtctctgcttcctcagccaagtgcacaggtcagccagggtgggcactgaagtgaaaggctgcagagaggcggggaggacagcctgcagggcaggaggggcacagacaggccccagctgggtgccgcaggaaggacgtcaccctcaagccctcactggtagatgaccttcacgcaaaatgcctcttcgtttttgtcctcatggtcattgatgt

SEQ ID NO: 447395 - DNA, 684 bp, Homo Sapiens
  misc_feature (123)..(139): n is a, c, g, or t
ggtacagggttcctcattcagctgaggacctcatttagctccttaactggaagctttacatttgatctgcagtgaggggacatttgtaattttagtttgacccacatggaaaggtggatagcnnnnnnnnnnnnnnnnnggtatagagagcacgtagaattggacaattaggtaaatccttggaatcccccaaacagccatttgctttataaatccagtatttcttacctctgaacgtcttaaagagctgcctcacaaattaatctaaccattgcttgcactaagaagtttgccaagagcctcttccagccttactggggggaaggaagagattactgaaaaccaacttgtaggaatgaaatgaggctgtcagttgtctaacctaacaaactgccaaattaggtttacattttttgttattagacttttgaatggccgaggcagagttaaatttaaaattttggattgtagccactttccactcgcctaaacactcaataccggtttgtttatttttccagcatcaagaaagaaaaccaaggcactagaaagcaagcacacttaagtattgaagataattacatcttaaattttgcctgaactgtatattgtagcatacttaaacccattcaaggaaaaaattggcaaattgaaaattctcccattaaagattgatatttttgc

SEQ ID NO: 447396 - DNA, 698 bp, Homo Sapiens
atcgttaccactcaaatggacctggataagcaatgttttatcttagcatttatccctgaaaaatgaaacactgcattttctgtcacaaactgtttctgagccttctgtcctcaataatcatcagctctcaggggataagaaatgctacagcaatgggaaacgaaacatacccagaagctcgtattcctgacaggtttctttagatgggacagcggtgcactgtctgagcacggggaagggtctgagcagaagaaaagagctgccaaagatgcatggaatgagcaacagcaaaacaccagtggagtctgtaagtccctcctcagcaaacgaggtcccggaaggcaaggcagcagctagttctcctccgaactggacaggcggcatggggcttctgttgtccagctgcagccaggagtgcagacatctatttcctcttcccactggcccttccagcgctgggatggaggagccatgtcaattgtggggtcacacggagaaaagtcagtgcagcagtatgtttccaggataggaatgtgagtagacggcaatgtcacacgtgctcagcttgtcctcctcccctcggttcatatgcaggaggtactcgcacccagagccccgccgtcccagcactaagaagaggatgagcacaaccaacatactgcaaagaggtggtatgcacaccagtgctgcgatcatcg

SEQ ID NO: 447397 - DNA, 359 bp, Homo Sapiens; identical to SEQ ID NO: 123722

SEQ ID NO: 447398 - DNA, 2246 bp, Homo Sapiens
ataaatttagggagcggggccaccacggggaagggagaagggacgtggctcctggcgctacattcgggagggcgggctggccagttcgtagaagagcaggtaggcgtcgctggtgcgcacttggctggaggacatgggagtgacgctggagtcgttgaaagtgtgccattctcctgtccctggactgcgacagtaggctgtatagtggccacccatggtggttccggagtgattggacacagcgtacaggttgtaaacagcatggttggtgttttctgaggcaaattctcttaagtccaggtctcttagggggaagttcacaaatgttgtgagcttgctggttcggatcctggattctgagaaccgcttcagatggagcaccaagatctttgggaacctctggatggagaacttctttatacaccgttttctgcctcggcagcgacagcatgttggcttttcatctccatcaagcacatcctctttggtgaagagcctcatgcagtccattaatgtcacctcaggataacctcgcttagcaatgggcagtgagaggtcccagaaggggtcgaagaccgtagaacagtaaccacgatcgtgtacacgtcagcgagctctttaggctgccctactaagagatccccgatcctactgtcttcccgttctagatattttctccacatctgtcggcctttctcgtcatcaggaagatgatcgaggttctcagggttggacttaggtctcagtgtcactcggttcacctcgttatggagcccatccagaagaaagcgaaggaactcctgagcatcctgctgactgaacccaaaggaaggagggtgagctacacctcttgtcctaagaacctgctcctactgccacccacctgagaggacatgtctgcaaggcccttacttatagccaacaaagcgcggtgcatatctctggatctgggtcttgaactcagatgggctcaccacatcattgggggatgaagtccatatggtctgaattagttttgcaaactcttccacgagggctgtgtgtgcattgctgccgtggtgcaggtcccgcatgtagagcctctggaggcagtaatctctcaactcccgagtgttgctcaggcactgcagaattgagttcatgaagcacgtgttcgcaaggtttcgaagaccagccagaccctgggcactcttagaattcatgccgtctctttcccggggagctggagcggctgggccccagggggcctgaccctttcccgtttccccacagcgtgtagcggccaatgggtcggtaggttgggctgatgatttcagggactcgtgagggaggggcctgggagggcacctgagatgcactgcccttgcgaccatagttctccaggtagtcgaccaggtattcagggcagctggctgtctggtagagcccctgcagggtgcagagctccttgcgcgtccgggccagcatggggctgcggcccaggttcctggggtctatccggtagctatctgaggtccggaggctggagaaatcccgggccaggtctgattggctgtccagcttctgggttagggtcaccccctggtcataggcattgatgggcaggtagctgaggcagttgttggtcactccataagggaatccgctgcccccgctgaggccactgcctaaaggccgctcagtaccccgggtctggctctctgcccgcttaccacccccagtgatgtcgggtctcagcagggggcggccccggtcatagtccaggagggaggaggggccataggtacggggacgggtgaggaagctgctggtggggaccggcttgaaaccaagtttctccttctccagtaaggaggcagccagattggccccataggaggatggggtgtaggcaccatagcccgacttggcatagtgggcatctgtgtagcgggccgattctgtgtagcgcttcagggtggaggagagctgggacatccttcagggtggcactcagtggggactgggagcctcatgggctgcctcttcttggaggatggacgagtcgaaccgggcacaagcatggagctgcgggtgagtcccggctggcgctggcgcggcgcagtgagcaccagctgacgaagagggctccccggcctcggctcctgcctgactctctcccacctccgccgggggcccagaagggacctccccgggaaatcggcgccacccagcgggcagccgcctcatcgcgcctgggccggcag

SEQ ID NO: 447399 - DNA, 1131 bp, Homo Sapiens
  misc_feature (1056)..(1056): n is a, c, g, or t
  misc_feature (1081)..(1081): n is a, c, g, or t
tgtgaaattaaaaaactgtggttattttaaaacccaaaccagcgttttccatagatgtcccttcgtctgtcccctggagttagcagcgtgtaagagggctcttggctcatggctctggaccggcgagccgtgcgggtggagatgggcgccggctcctccgcggcgcgggcgtccaggcggtgatgctcccagcgagctccagagggcgctgtcccctcggaggcgcgggcgctgcggcgggaagcggcgcagcgagggtcttcccccccaagacacagttgtttctgacacataggaagaccacaagtttacaaatgcaaacgccgagggcacggggcgatgctggctccacgtccaggcgatcttccctgccgggccacagctcaggaaagcccggctccttgctccagaccctgatcaggctgcatccactcctgctcggcagcttcaggtttgtattttctcttgtcaggtttgagtgtagtagttgtagtaatggtatattagtctttttaaaaaatttagggagcggggccaccacggggaagggagaagggacgtggctcctggcgctacattcgggagggcgggctggccagttcgtagaagagcaggtaggcgtcgctggtgcgcacttggctggaggacatgggagtgacgctggagtcgttgaaagtgtgccattctcctgtccctggactgcgacagtaggctgtatagtggccacccatggtggttccggagtgattggacacagcgtacaggttgtaaacagcatggttggtgttttctgaggcaaattctcttaagtccaggtctcttagggggaagttcacaaatgttgtgagcttgctggttcggatcctggattctgagaaccgcttcagatctggcattgacgtgagtcaaggatagtcaaaccaatgcagaagggcagacaacaaaaggaaagcctacaaggtccgtttcttccgactgttcccctcacctatgggccccttgtcatcagtcacccttgaaagtcatgtcccagccctgatggatcttaaggatacngagcaccaagatctttgggaacctntggatggagaacttctttatacaccgttttctgcctcggcagcgacagca

SEQ ID NO: 447400 - DNA, 496 bp, Homo Sapiens
ttttttacaaacaaaagaggtttaattgactcagttctgtgtggctggggaggcctcaagaaacttacaattatggcggaaggcaaaggggaagtaggtaccttcttcacaaggtggcaagagagaacaagcaagcacgcaagtgaagggggaactgttacacttttaaaaccatcagctctcgggagaattcagtatcaggagaacagcataggggaaaaccgtccccatgatgcaagcacttcccaccaggtccctcccttgacacatggggataacaattagagatgagatttgcgtggggacacagagccgaaccgtatcagacctcatgggggcctgcagtaagggaatcagacctactctctcaaacatgagtacaagggaaggagatgtcatcagtccctgaaattcctgccagtgtggtcttcagtgacctcagtcagtgttagatgcttagaaggaaatcttttggatcatctgtcgacagttggca

SEQ ID NO: 447401 - DNA, 484 bp, Homo Sapiens
tgatgctcatgtccacggcttcacctaaggagtccacagcatcgcggtaggtctggatgcaacccacgctcagcgccgtcagctcctgcaccgcgccacccagaccgcgaagcagacggtccacccggcctcccagctcccgactcaaccgctccagatcccgcagcacctcggggtcgattgggggaatggccggtgtgggtgtgggtgcaggcgctgggcagggccgcgcaggggcagaaggcgggggtggaggcgcgccgctcagacggatcttgagttgcaggttgttggcgacaaagtgggtaaggtcgccgtggcggctcactgtgccttcgagctccaggggactggagatggtggcgcggcgtccgccgcccgcgccggactcggcactccctgaggacccggcgccaccgcacgcctcgctcagcccgtccaggctgcggctgtcctgaagacggctggagaacgagcggccggc

SEQ ID NO: 447402 - DNA, 403 bp, Homo Sapiens
ttagagcatggcatggctcagaggtgctggtaaaactgatgggggtttttgctgtccctcccctcagcgccgacaccatgtggatccaggttcggaccatggacgggaggcagacccacacggtggactcgctgtccaggctgaccaaggtggaggagctgaggcggaagatccaggagctgttccacgtggagccaggcctgcagaggctgttctacaggggcaaacagatggaggacggccataccctcttcgactacgaggtccgcctgaatgacaccatccagctcctggtccgccagagcctcgtgctcccccacagcaccaaggagcgggactccgagctctccgacaccgactccggctgctgcctgggccagagtgagtcagacaagtcctccac

SEQ ID NO: 447403 - DNA, 527 bp, Homo Sapiens
gctggggctgttgagcacgcactgcaaagaaggggacagcgccaaatacatcaaactcctgtttgggagtctccactgcaacatcagaggataattgggctgaggtgaggagtattgtattaagatcttgggttggtccactgccagatctgtctctgtagacagagctcatgtcactgtactttgctttagcctgctcataatcagaatcagagctatgtttctcctcttcttcctcatcttcagaatccatgaggagaggcctatgacccagattttctggttcagtatcatcatcattaaaatctccttgttccccctgaagaacttcttcatcatcttgctcttcctcttcactgctcttaggagaagggggatctgattcaaaatcactttcagattcatcattccccttttgcacttgaccctgtactgaggttttctttccagtccgctgatctttagatgctggacttgttttaccgttcttgatagggtttgcagtgccattttcttgatttatagat

SEQ ID NO: 447404 - DNA, 577 bp, Homo Sapiens
  misc_feature (510)..(510): n is a, c, g, or t
ttaaaatcttaaattatcatttaatatttgctacaaataatgtaaacatgtaaaaacaaattctgatacaagaaaaaccataacatttagtttttttggcacatctatctgcaaaggaggtgaagatacatgttaatgtaagaaaatattcctttcaaattgacatactaataagcataacagaattttgaagtgataaggactcaaaaataaagatgtaagatgaaaactttcatgcttaactgtattgaagtatcaacttattctaccataattgccttggagaaattccaaattatattaataattgttcaacttcaaggtacttaatgctacacagaaatggcaaaatgcgtatgtttttaaatctgtataaattattatgcatcaatgaaagtattttttaaaacaaatgatttaatctccaaaaagcacatctaaaaatcccttccacttactagagttaccttgcaaacatcttccttctcagaaagtgcttctggctgactntcagcaggttcacactgctcagccaccttgtctaacacagtctgtccttcatttattggtgtggaag

SEQ ID NO: 447405 - DNA, 527 bp, Homo Sapiens
tttgccgaaggtgaagtgtttatttgcaggtgatgtcactgtaaacctggaaaatccaagaaaaccacaaagaagataattgagaaagaaaactgggtacaaaagtcatacacagcggtcacggccagtgtgaaaataatgaggtagaagctgtaatgagagaaaacacctcacttataatagcaacaaaaaagaggacatacgtagggatgaaggagaaccgagtgggtctgtaggaagagaccatccccacactgtactgagggccacaacaggccctgtgaacaaaaggcaggatggctgtgtttttggatgagaagattcaacatcatgaagacatcatctgttcccgagtatatctataaagcgaatgcagttccagtaaaaacaccaactgaattgtttaggttaaacggataagtcgattctacagttcactgaacaatgaaataagcaaagagagccaggaaaattctgggggaataatacaaaagaggaccagcccatctggcatcgacatcttaaag

SEQ ID NO: 447406 - DNA, 437 bp, Homo Sapiens
ttttttaaccaacaaataaataattataaatagttatcagaactgagcaggaagtaaagagggtgctgaaaaagaacaacaggaaccactctgaggaggcctctaagaggaggtgacttcagcagggatgggaaagatgagccactcagtttaggggcaagctctgggcagacaccaggaagctcctgcagctagagtgcagggagggagggaagatccctagatctggcccagaaggctgcggcaaggggccgatttcaatttaattctggggtaagcactgaggatttaggtagagaagtgtctgttctagtatttgccttaggatcacgatggctgtagtgtgggaaatgaaacctctccaggatcgcctgggaactggtatagggagtcccgggccatgcgggggcgccaaggagtcaggcctcgtgtccctg

SEQ ID NO: 447407 - DNA, 495 bp, Homo Sapiens
  misc_feature (459)..(459): n is a, c, g, or t
ccttcttttcttttttaaaatgggaaagaagagggggagggtagaagaggtgggagcacaaaggcctctgagaaaatgtgtaagcttcctgtggggtcactgagcagggtgggccgggggagcctgaggaagggaagttaggtgactggaaacacaaggggaagaaaagaaaacagaaccagacacccaggccagggtgccaggaaagccactctggggagggccaagagggacgcctttcctcccctccatgcctgcccccgacctggccctcaggaacgcacagccttgggagggcggagctggctgtcctcagctccgccttccctccccgcaaaagtctctccccagggtgggcggcagcggggaggaaaggaagcgcgctcctctctctgctttcccatctgcctctgcttcctcccaacagcaatggtaaaatgtgctttctttagattaatncctcgtgccgaattcgccacccaggcctcgcaccta

SEQ ID NO: 447408 - DNA, 419 bp, Homo Sapiens
ttttgtacattcgtttttattgtcctgagtgggatgaataagtttctaatatacaaatttccccctcctcatacatggaaaagaaactgacagaggcccaaatcgtttcctggcagcccagaattcccaggtaactgaccaaagtctcctgccttctgtcctcatgctgatctgtttgtatgagcaactggggcaacccctcgcttggttgctgggacagccgcccacagcctcagctccaggaagcactagggggtcactgaggctggacagcaacttaggaagtggcccctaagtgactctacccatggggttcaggccatcggtgtggcctgaacatattggtcctggggtggaggaacactgcagagccacagaaatgccacgaaacagccagctactgccccccacaatccccg

SEQ ID NO: 447409 - DNA, 1132 bp, Homo Sapiens
tagaatttatttttactttattaacaatgtggcttacaatttttttgaagtaaaaagggtttttttcatttagaataaaaattaaaatataactctgatatagattttcatttatttacatgaaaacatatatacagaatacaatcttacagcaaaccaaaagcatgcccttcgtcctgcaaatttcaaaagtaatgacaccaatttttcccttttacgcaccaaaaacatacacaagataggaatccaatttcaatacaaactattcaaactagaatgcaaaacagtgaaagagctttcaacaatcacgacgagggatagttgatgcttccagagatcatgctggctcctgtttcaagcaagtgagatgattatctttttctgtcatttaaaaaaatttgcctcaaatttttcatcctaaggtgatttttagccaacgattgtcctagaattttccttttttcgtcagcacatcgcttcagccacacaaaaagcactgctctgcgttggttaggcgacacgaccgtcatacttactgggccaaatcccattacttagtgccaacaattcagaaggattatggcctcttcctcaaacaagtatggaattatttgagttgttacttgtcattggaaactagagaggttttaaacccaaaattcaaggcagtactctgtcagcaattaacaacttttaggtaaattacatgggtccaaaagtagcacaatttggattttatccatagtatgtttggggtatcctgcaaaccattctagtgatagagctatgagaactggtcaacttaagagttcaaccatgtgaaagggagtaatttccagaaaattcttgaacagaaaagggcagtaaacaaaagaattattgaattataatagttgccaatacagatttcctttgctatttaattattgcaccaacgagatatgggcagtatggatatcttgccaacaatttcttccttaacaactacaggtttcttaattgactatgttgcctttcaaataattgcacgcacgatcacagctttctaaagacagaagagagaggaagtgaagccttgattcgccatctcaatccaaaagcagcaaagatgctcaaaccacaacaaagattt

SEQ ID NO: 447410 - DNA, 502 bp, Homo Sapiens
ttttccaaaaacgagccagatgctttaatgggctgcctccagggcccatcggctcatcagaatcccttaaatgaggcccagagcttgccagcctttggttgagctcagcactccacaggcaggtggctcacagcaggcctggctgatgggctctggcttggggagtagcagggtcctcagtccagatcttcagagaccttctaggactgagctgccactcagcctacctgcaccagtccctgagtcccagcagctgcttagcttctagaaaacataagtttcctgggataatgccaggggtgggggaggcagttcagggaagcactgatgtcaattcaggacaggcctggggcctcctggggtggcggcagcagcaggcccagaacaaggacgccagctccaggctgcatccccgcaccagtagcggggattgggagcagggagtgcaggctccctcagggagctccaggctggagtagggccaacccaaccccaaatgctg

SEQ ID NO: 447411 - DNA, 1004 bp, Homo Sapiens
aataaaattatagatatatagatgtagatataaaaacataaaacagacacaacgcaagcagacgctgtcatgtgcttactctcaggtccctgacaccaagggaagcactgacccctccccagtgtgctttcccacggcgcgagcaccgcagccaggccggggctgcggacgtggcatgccttggggtggggttctccagtttggcagggagggcctgagggctggggagggggctctgggtgtcaccagccccctgtggcagcatcacccccgtggcctgctccccgcctgcccccccgtcgccttcccacaagagcataaagcacaaggttaaggctttgatgaaagggacagcggcggccggagcactgacacatcagacacggcgcggcagcacagcacacagacacgggacacatggagccgggcccccggccacagctggctggctggccgtctgtccacctagtccaccaccacccagagcaggccagggcagaagcatcagccttgccaagctacaagctttccagcggggtccgtgaaaggcaacgcgttagttaggagtagcctggcgggggacactcggtccgggagcccacaggctgtgtcagaaggacggtgggggccctgggtgcctctgtccatctctgggacctgtccgtaaggggaccattgggggctgtcctggcggtgatctggggtgctgggtgatggcagtgggccaagcctggctgagagagggtgccccaaagaggctgactgggccccctcactgccccagccatgggacaggcccagacacagaccagcgcagtggcccttgtcccagtgagccgacttccccatgggcagatgagtggacgggcaggcagagcgcttggggcaagctgtggaggcgtggcactctctcccgccgatgggtccacaccaggctggggtggcctcgtgccgaattcgccacccaggcctcgctaccttaggaccggcttatagtactgccg

SEQ ID NO: 447412 - DNA, 1371 bp, Homo Sapiens
  misc_feature (195)..(195): n is a, c, g, or t
tgtaacaagcactgtagagagcctcggtgggagggtgaggtcccaatgatgtgggagtgtgtgcggtcaactaactgttctatataagacacgtgggcacgtgcggtacaaaactgtgaaacagaggcggtgagagggcagcagtagaagacttaccggagtggtgtgggagtacaatatatgacgtccataganagtgtcgtcacatagaaacacgtataaagagaggagtatacacaggcggagacagaaataacggtggagactgtgtgttgcaatatgaaacagagatgtgccaacaatgtcgagatatataggcgtctccccttcgaaaaagtacgtgaaaattggcgttatcataggtcggtgtatacgaattgcgtcggggagagagccctcactatgagtagtgggcgagtgcacaggtgtggggggtgagtgatcaaaagataacgggatgagaggggaatcatttggcaaagaataaaggcgatgagggtagtgagcaaaataagtaacggtaatgacgaacatatgcgcgaattggggaggagaaaagagcagataaaggtgcataagaagacgcggtgggggaagagtaagtgcaaagaaggcgattgcgtggactaatattttgagagcaagtcgggcgacaatgagcgggtactagtggacaaaaaaggtaagggacaagagaaatgggcgtctaggcacaagacgtggaagaggatgaggggaggataagagaggcgagcgggtagatcagggcgaatatgcgagcgggagagtcacgaatgtggcttaggggaacttagtagaacataaagatctggtagaagacatggtcagcagtagtacggataatgcatggttcggccatgcaggggtgagagctaaattaccggcatgaacgaggtagcacaaggcaaggagagaaggtattgggcgacgccttacacgtttcgcaaaagaaaacgagaccaagtcgtaaagcgtatacgcgcagagggtgccatatagacatattgctagaagtcccaccaaagaatcgcaacggggggccggcgcacgatactgcgaaagtgttcaagccgcataagaagaaaccccccaccccgctcgcctcgctccccacgcgggccaatcccgacggcccggccccaacccaggtgactacaggggtcccagccctcgccgggctgcccggaccccggggctgggagctggggagggcgccgctgtttatctggtgcggactccggagggggcgggggcggcccagaaggcgccagcccaactccgcagggccgcacaaaggccgctgtgtcccacgggaggaaagtgcgggcggcatccggaggattccggacc

SEQ ID NO: 447413 - DNA, 472 bp, Homo Sapiens
ataaagaaaagaggtttatttggctcacagttcttcaggctattacagacatggcaccaacatctgcttggcttctggtgaggacctcaggaaccttacaatcatggtggaaagtgaagaggcagccagcataccatgtagcaagacagagagagagtggggaggtgccacaccctttgtaaacaaccagattttgcaagaactcactcattaccacaaggagggcactaagacattcatgagggatctgtccccatgacccagacacttcccactaggccccacttccaacattggggatcatatttcaacatgacatttggaggggacaaacatccaaaccaaactatatcattcttcccctggggccccaaatcttatgttcttctcactttgcaaaatacaaccatcccttctcaatagtttcccaaagacttaacttgtttcagcatcaaatcaaagtccgatgtct

SEQ ID NO: 447414 - DNA, 505 bp, Homo Sapiens
agggtttcaggtggcagccatttgtgtaggagaagcaaacactgccaaagagggggtcctgggccaggtggtgagccaagtgggccaggtagagggcacgcttgcggaagtagcgctggttcagcccgtccttgtcctgtaggatttccctgggcatggtcagtgccacatccacattgatgtctggtcggatgcaggtgcccagaaggtagctgcccacaacagtaacctgggctgggggcaggaagcggaaacagcccttcacggcatagggcacttggtggaggggcactcgaaccccagctgggagccatgcctggtcagtgagctctgtctcagggactgagggcaccctcacaacccgctggttgacctcccgtaggaaggcatcaatccgatccttcttcttctctgacagccttacttcctttagtagctcctctacctgtaaacgaagcaagctggagtggaacaagatctcagtctcccgaaggcgattaagctc

SEQ ID NO: 447415 - DNA, 533 bp, Homo Sapiens
tttttccataggaaggatttgttttattttgtttgtaaggaggaaaaggagccttgagaggcatttcttcactcggtaatgaggaggaatgattggtttctgcagaggggtggattacaggctaagccttgccttattctcgttaggatgggcattggcacagctgtttgctgccgtgggccaagccgaaattgctgtgtgctttggagtcagccaatgcctcccagcacatagcgggtggagtcactgcaaagctgtctccttcctgatgctggtggccctgggtggacctcagccctcttgaagtcagctggatctctgaaggcactgacttggacgcttctattctcctggctcagcagcagcacaatcatggcagagggagaagcaaacacatccttcttcacatggcagcaggaaggagaagaatgagtgcccagcaaagggggaagcccctcattccagcattaactcaaaagtccaagcccaaagtctcatctgggcccttcttcctgtgagcagttctgcagggc

SEQ ID NO: 447416 - DNA, 492 bp, Homo Sapiens
tttttcttttttctttacctttattcattcgggagtggtaatttgcctgtgtataaacagtggcacacactttgaagttgaggggggaattctgaggatgaactgatgatggcctggaagaacttttcagtcatctgaaggaggttccgctggttttcctcaaggctctctgatggttctaacctggtaggatccacttcaaagctaacatgttgccaatcagaggatgtgatcacaattcgtcataaaggatccaggagtttttgtagataggtagcaccatataccttgaaacagaatgtcattattttactggccaagctgtttcctcggaagagagtctgcatggtagtctgccaattctacttctttagaaatcatgttccagagcatttggtatagtatatgccgagaatcaaacagagtaaccagaactcgagctagttcatcccactgagaacaaggaaccacattggccagagccatcgctat

SEQ ID NO: 447417 - DNA, 539 bp, Homo Sapiens
gaaggatatatgttctttgaagtgaggaagaacttcagtctgtccggtcgtcaacttggagcaagtaagttttggccttattgtttgtttcttccagagagctctctctgaggatgtgtgacattggagttattcattcattggtcaccaaatgcttgggaggtcagatggtggctcccagattgaattcagaaatagacctaagtcaacactttagcagcaagttggttcaaggggaagcaagccgctattggtcacttgactccttgccatcccttgtggcttgaatgcaggctggaaaggtaggtgtgtccggagccagaactctggaggctctcagtcttcttcctgaattttagggttccccacagagaccatttccaagctatacgggaagaaagaggaaaccccagggttctttggcaacaagcttgctttttttctggttcttggtatgctccaccagcagcagcatcacctgggagcttgttagaaactgaattctcagctgggcaacatagcaagaccccacctctaca

SEQ ID NO: 447418 - DNA, 573 bp, Homo Sapiens
cacagagggggtctgtgtttattcacacactcctggtacagtgaggatggaggaacatttacgaagggcacccctgggttgagaacatctccggggccacagatgtcatccaaaggttcagagcagtccccatttgggttcccaggggcaagacgcaggggtccaaggtaaaatcggatctgggcccttggaaagtgatgataccttggggagaaggggtctgccagaaagcctcctggggtcaggcctgggcagactggccatgtggttggtaaccgtgtcgggggcttgtctcatcccagcctcaacacccatcctatctgccaggcgcagaagagcgtggccgagactgaggggagggcaggaaccatgagcagagccagtaaacaaagagtcggatataaaaatacaaatgtgctgaggaagtcccttagaaagaggctgaggctggggtcacgccagacaggggtgggggcgaggaacggcccggaggactgggctcaagtgggtggaaagctcatgcaagtacgcagccaaacatccctggccgcgcgcggtccgacaccggcggcc

SEQ ID NO: 447419 - DNA, 483 bp, Homo Sapiens
atgttagatagccagtctttgcacagaattaaccagctgggtccaataaggccattgctagtaacttttgtccatgatggaaaagggcatcctctccccaaaagagaaaaacgtcaagccaaacacaaccagcgggaaacgctttaagtccagctgtaagagacaccttttgtacgtggacttcagtgacgtggggtggaaatgactggattgtggctcccccggggtatcacgctttttactgccacggagaatgcccttttcctctggctgatcatctgaactccactaatcatgccattgttcagacgttggtcaactctgttaactctaagattcctaaggcatgctgtgtcccgacagaactcagtgctatctcgatgctgtaccttgacgagaatgaaaaggttgtattaaagaactatcaggacatggttgtggagggttgtgggtgtcgctagtacagcaaaattaaatacataa

SEQ ID NO: 447420 - DNA, 340 bp, Homo Sapiens
aactatggaggatgacacatcaaaactttttcttaaaaaagcatttaatgctttaagtctatttctgtatttatttaggctcatctaaagggtcttgtgtgttatggggagagggtcagaaatgaaaacaaaattataaaaggtgaaataaagaaaaatcaaagaaaggttgcagaacacagggtggaaggaaaggaggtgggtggggctaaggactggtaaattgaaaaaagttaggcggctttttcctttggcaaagaactagtttgaggaacagtagacaaaagttaatttcataaactaaaaatgaaatgagagatgaagggctgaacttccacct

SEQ ID NO: 447421 - DNA, 515 bp, Homo Sapiens
tggaaggattccattttcatttattgaaaagctgatattggaaggtaggagggtccaaggaaaacaactccaaggtacgatatatgaagggctgcagatgactgtccagtgccgctggcacgcctggctggaaatcaacagagctgtgcacagccctgtggctaaagctggaggaaggagatatccagaacgttctgttcctttagtcagtggtcccacactattctacaaggacaagctcaagaggcttaagtacacaaaacaagagacaagataggagaaacacggaaaactgaagactcgttgcataactccaaaccttccgggtggctgacacggcaggcagagccactgaggacaacatagctctgcctcctcacagaagcaaggcaacatcagaacgtccttggtggcatcaacagtggctgtacttgacatggccagttaagaacctgccctactttatctggatggagggactcttgttcccaaaaagttaaatggggcagaatata

SEQ ID NO: 447422 - DNA, 598 bp, Homo Sapiens
ggcctttaaaaatttatgactgttttgtaatcactacactaattatttcaaataaataaaggaaagaaagatatcccaatattccaatccataaaatcagactctaaaaagaatgtagtgttccacccccagtcaaggtaacagaatcattgtttattattattaaaatagattatagaaagcagcatctattttgtgcagtttttaggggccttggaaataaaaagctatgatttccaaaaatataacattccaaaggattgaataatacatacatttaaagatacattttattaaagtttaggagaactgattaaaaaagatactgtctctttaaattagtgtgtaattgtttttctcctcctatctattcggacatgacaataattataaatgtaggtcacactacaactaggtagtctctagggaccatgacctgctgacacaaggccgataacaaagaggcttttccacaattgaggtgctcccagttatgctcagatatctggggagaggcctaatagacccaggggacagggacccactgtggggctgtgcacacgagctcaacagctttcttcagatgtctggatgcctc

SEQ ID NO: 447423 - DNA, 272 bp, Homo Sapiens
aagacttcgagattctgtatggcattccacagcccacctcagaagcacatcccaatttttcacaactctcgcagtcagacttgtgaggaaagcaattttgagtggaagtcagaggtggacatgggtttccagatagcaaaagagtcttctttaaggtggagaattcccagcgatcaaattgtaatccatatagaaaaggtatcatcaaaaattccaatgatttaacttttaagcaactccagatgaatccaggaatgatttgaccttgtatt

SEQ ID NO: 447424 - DNA, 429 bp, Homo Sapiens
gcggccgccatccctaataaatcgtgaataacgaatgagggaatcgaccatcctcatgaggcacgggcgtccagtaacgcagtatcgattcgcttccccggcgtcggcctcaccgctactcccggcgtttccaagcctccctcctcgttctctccctcctgccggagccactgcggaccggagccccagcgccaggtggagccggggcgccagtgggagtcgggcccagccgtcttggcgctcgcccgactctcccgcccgcgcgcccagggaggcgcacaggcagcgcgcagcgcagggcgcgagcgaaaaatgcgggaatcagtgccaggcaggagaaaaggcgcgggcccaccttacagcccggcgcctcgtttcctagtccagtgtggccgctcgccttcggccggattattgtgtcccagaccc

SEQ ID NO: 447425 - DNA, 458 bp, Homo Sapiens
gcggccgcctgtcggcttgctggagactcggcagaggtgaccacagaggccacactagtgggggtggagttggcctgagcggaggtggctgttgtccccttcagtgatgctggggtgggctgtgggatgttgacgagcaggctggtgttgggaacattggcgacgcggatgaggccctgctggatgatcctctgtccctgaatctgcacactgggcaccgacgcccggggggccaggaggaggggcggtggccctgtgctggaatgttgcctaatgctgtggatttgctgagcccccctgacgagtgggggcatgacgacctgtgagctcgcctgtggccccagctttgaggacgcctgctgcccacctcggaccaggggcgggggtatgacactgccgggcatccgagctgaagaggtctggagtgatggcttgccagcaggaatgttctgagtgcc

SEQ ID NO: 447426 - DNA, 586 bp, Homo Sapiens
tttttagtgttatataacttttaatggaaaatgtcaaatagatacaaaagtataaatcgggttggcaagtgaaatacaggccaaaattgggcccaccagctgtttttgcacagcccaaatgttaagaatgatttttacatttttaaatagtgaaaagatgtaaaagggtaatatctaatgacataagaaaagtatgtgaaattcagattttattgtccaaaaagtttggaacacagccacatgcactggtgcgtggccccctggtggcggcttcatgccactactgccaagtggcaagagagccccatggctggaaaagccaacaatctttaccatctgctccaagccctgcttcactcccctgtgtgtacctatccttgcagcctcaaattcccggccaatcttgtttcatttatagttactcccagccccacggattcaaaggaaatcccagacatcctataatttcatcttcatgttgaaatttaaaaagtttgaaaattcaccaagatgtaatatatatgcaccaaacatcagagcccaaaatatatgaaacaaacattgacagaatcaaaggaagaaatcc

SEQ ID NO: 447427 - DNA, 901 bp, Homo Sapiens
acaacataggctaggtacgaggcctgggtgttaatcggcacgagggcgcagtagcagcgagacatcagagtccgcacgctccggcgaggggcagaagagcgcgagggagcgcggggcagcagaagcgagagccggagcgcggacccagccaggacccacagccctccccagctgcccaggaagagccccagccatggaacaccagctcctgtgctgcgaagtggaaaccatccgccgcgcgtaccccgatgccaacctcctcaacgaccgggtgctgcgggccatgctgaaggcggaggagacctgcgcgccctcggtgtcctacttcaaatgtgtgcagaaggaggtcctgccgtccatgcggaagatcgtcgccacctggatgctggaggtctgcgaggaacagaagtgcgaggaggaggtcttcccgctggccatgaactacctggaccgcttcctgtcgctggagcccgtgaaaaagagccgcctgcagctgctgggggccacttgcatgttcgtggcctctaagatgaaggagaccatccccctgacggccgagaagctgtgcatctacaccgacaactccatccggcccgaggagctgctgcaaatggagctgctcctggtgaacaagctcaagtggaacctggccgcaattgaccccgcacgatttcattgaacacttcctctccaaaatgccagaggcgggggagaacaaacagatcatccggaacacgggcagaccttcgttgcctctgtgcccagattgtaagtccttccaatccgccccaaggtgccggggacgggggcgcgtgaggcttacctggggccccattcggcttaggtcagtccccaaggaaggacgaagccgcgccggaaacgggacgccgccagcaccggg

SEQ ID NO: 447428 - DNA, 1755 bp, Homo Sapiens
gatgagttattagcactacgaagtgacgttgttaagtgtgacctacactgcaccatgagccaagctccaagctacagaggatgccgtagtgaccccactactagctggtgcgctttattcaggaagaaggcacagagaatactggtcttcttgctgaccgttagaacccgtctttcgtacccgtgtgacaacatggctgttcgctgaatgttctcctacctgttcttcaaatgctctgtcttatcgctgtgtgttatttaaagcacgtataaggatcggaacctaactcctctcccgagagcgcctcctctgtgttcacatgcctattcttaccacagagaagcaaggaccttaatatccaagcgagttgattatttgggcgtatcaatcccgtctaagtcactccgtagcccggaccctcctcccccacccgctcaggggttatgccaatactattttgtttgtttctctgctctctcttttaaagacagtttttgggtaatctttttcttttgcttaagtcagagatggaagggggaaagagcaaaggaaaaaacaaccaacaacaaggagaatgaagctttcccttctggtatcaaaatgctccggagaggagggactgtcagtggagcacctggggccggctccgccctcgctgcgggtggcggtggcgcccgcctgcctggcgccctcagatgtccacgtcccgcacgtcggtgggtgtgcaagccaggtccacctccttctcctctttttcttcttcctcggcggccttggggtccatgttctgctgggcctggcgcaggcttgactccagcagggcttcgatctgctcctggcaggcccggaggcagtccgggtcacacttgatcactctggagaggaagcgtgtgaggcggtagtaggacaggaagttgttggggctcctcaggttcaggccttgcactgcggccaccacgcttccccgctgccaccatggagggcggattggaaatgaacttcacatctgtggcacagagggcaacgaaggtctgcgcgtgtttgcggatgatctgtttgttctcctccgcctctggcattttggagaggaagtgttcaatgaaatcgtgcggggtcattgcggccaggttccacttgagcttgttcaccaggagcagctccatttgcagcagctcctcgggccggatggagttgtcggtgtagatgcacagcttctcggccgtcagggggatggtctccttcatcttagaggccacgaacatgcaagtggcccccagcagctgcaggcggctctttttcacgggctccagcgacaggaagcggtccaggtagttcatggccagcgggaagacctcctcctcgcacttctgttcctcgcagacctccagcatccaggtggcgacgatcttccgcatggacggcaggacctccttctgcacacatttgaagtaggacaccgagggcgcgcaggtctcctccgccttcagcatggcccgcagcacccggtcgttgaggaggttggcatcggggtacgcgcggcggatggtttccacttcgcagcacaggagctggtgttccatggctggggctcttcctgggcagctggggagggctgtgggtcctggctgggtccgcgctcggctctcgcttctgctgccccgcgctccctcgcgctcttctgcccctcgccggagcgtgcggactctgctgctcgctgctactgcgccgcctcgtgccgaattcgccacccaggcc

SEQ ID NO: 447429 - DNA, 389 bp, Homo Sapiens
  misc_feature (328)..(328): n is a, c, g, or t
gaatattcaagaaaggtgaagtttaatttgcatataggcataacctacacctcacttggcaagtgttaggccacagcacaaacccctctgtccaatcacaaatgtccacaaatttgcaaagtaactggacacgaacgatatgcttctcaaactcacacacatattcgtccatcacacacacactcaaatgataaagaaatacattgaaatcctctacaaaagagatctgaggacagtaatcagatgacctcatgtgcggacagccttttgcagtttacagtctaatccatttgggtcctcacaataggccctgtgaggataaggcagncacaggggattactatttcacaccgttttggcaggatgagggaaactgagggcttcagggg

SEQ ID NO: 447430 - DNA, 304 bp, Homo Sapiens
tagtttggtttaaattctgcacgggaggaccttctgagtttacctgttgggctcctggctgcgcaggcacagcagctacacagaagagatgggagaagaggctaatgatgacaagaagccaaccactaaatttgaactagagcgagaaacagaacttcgctttgaggtggaggcatctcagtcagttcagttggagttgttgactggcatggcagagatctttggcacagagctgacccgaaacaagaaattcacctttgatgctggtgccaaggtggctgttttcacttggcatggctgttct

SEQ ID NO: 447431 - DNA, 279 bp, Homo Sapiens
tttcaatgagcaagtgagtgtcgttttaatccccattttatagataggtgacagcttcagaggccacattacccagtcagtaaacacagtaagctgaggttccacccaggccctttggctgtgaaagccaagatgagtagcctgggggccacgcccctcccccaggtgcccagttcatacaggcaggcaattggcagacgtgggggcctgtggatttgtcagcaaggttgctggtggggtttttgtttgtttgttttgagatagggtctcaccctgtca

SEQ ID NO: 447432 - DNA, 509 bp, Homo Sapiens
ccggttgcttgctggtctttattggggcgatgcttggggtccgaataaatatgggaaggggcgcgagctggggcgcgtccggaccctcggggcaggagtccgcgcggcgcaggggtcaccggcagccacactcggtggccaccatgttgggcacgtggtgcgcgctgatgcgctcctccgacaggctgatgagcagcttgcccgcgtaggcggtgggcacgcagcagggtgggcgcgccagggcggccccacgggcctgcatcttcagcagcagcaccacgtggttgccgtagcgcgggttgcggtcggactgaggccagccgcacacgccctggcaattgttggcctggtaggtctcggggatgagtacggagcgctcggcgcggaggtctacgctgagctcgcgcagcgcgcacggcccgtcggcggcggtggcccccgcgctgcgctgtgcccgacccggcccgcgcggatcccgcccgcgccactccacgcgcaggccctgcagc

SEQ ID NO: 447433 - DNA, 498 bp, Homo Sapiens
  misc_feature (28)..(28): n is a, c, g, or t
caagtgggggcaggtgccaaatttgccnccgccaccagagggcctaggcccacaggaagcctgaagccaaattcaggcgtggaaggaggggagccaccagtggggcgggacagtcacttgtactgaggagagagcggggggacaagtggagcagtgcagacactcagcatcttgtcgatgtccacctgggttgacttatccacctcggccttgtggtcactcacccccaagctgggcaagcccccaggctcctctccagcctcctctccgaggggagccagggcatgggtgggggtcactagtggactgggacagggcaaagcgaggcctgggcccagctcacctgccaagggcagcaaggcctgcagttgctccacacctccctcctcgggaaccggggccagctctgcctctgcctccacctcagcctccccgtcccccttccctgcctggttcagctcagggttgcaatagttgacgtactggtacagcggccgc

SEQ ID NO: 447434 - DNA, 742 bp, Homo Sapiens
  misc_feature (53)..(78): n is a, c, g, or t
ccaaaaatgcttttccttttatttcaaaaaaaaggacataaaggcagacactnnnnnnnnnnnnnnnnnnnnnnnnnnagctcctgcctcacccagaactggagtgaaaggccagggccaggaccagggtcccataaagcttgcccttcccccaacccttccttccctcaaagtggcaaggttagaaaaaaattaactatgttgttcctccctggcactggataaaggccccactgcagccaaggagaaagagggggaaggacatctgaggtgacatcagttctgcaaaggcagggaataaaagccaaatagcacccccatctgggtcacattttcctgcctcctagcttctaaaaccttcagtgggaaaaggggaaagtggaggtagggggtggagggagggaatgtttgaagggcctgagcccacagctcactccgaaaggtgaggcagcagaggaggggcagccgagtcccaccaagaacagggccctgggcagaggagaagcagccgttcccgccacgctgccaggaccccatcgtcacaccccggcccacagggctatgccaaacccatctcctcagcacactccgtggcgctcatcctcctctgcagtagtcagcctgctcgatggcttgagcacactctttcttgaggtggcctggcatccccccccatcaaaaactcattcaggatgaagtaggccttctcaaagtgaagatgaagttcagctgcacacactgg

SEQ ID NO: 447435 - DNA, 1311 bp, Homo Sapiens
  misc_feature (56)..(56): n is a, c, g, or t
  misc_feature (67)..(68): n is a, c, g, or t
  misc_feature (71)..(71): n is a, c, g, or t
tttccagaaatgcttttccttttatttcagaagaaaggacataaaggcagacactnccccctccccnnttntcacccctcccagctcctgcctcacccagaactggagtgaaaggccagggccaggaccagggtcccataaagcttgcccttcccccaacccttccttccctcaaagtggcaaggttagaaaaaaattaactatgttgttcctccctggcactggataaaggccccactgcagccaaggagaaagaggggggtccaggctcccctcccaggcagagaagctgcctggctggctagggggagggtggaggtggaggtaggttatgggacagagaggacaagaagtgccctgaacaccttttccctttaacctgacatatttatatatttacagttattagggagggaaggacatctgaggtgacatcagttctgcaaaggcagggaataaaagccaaatagcacccccatctgggtcacattttcctgcctcctagcttctaaaaccttcagtgggaaaaggggaaagtggaggtagggggtggagggagggaatgtttgaagggcctgagcccacagctcactccgaaaggtgaggcagcagaggaggggcagccgagtcccaccaagaacagggccctgggcagaggagaagcagccgttcccgccacgctgccaggaccccatcgccacaccccggcccagcaggggctatgccaaacccatctcctccagcacactccgtggcgactcatcctcctcttgcagtaggtcagcctgctcgatggctttcagcacactcttcttggaggtgtcctggacatccccccccatcaaaaactcatccaggatgaagtaggccttctcaaagttgaagatgatgtccagctcgcacacactgccaaagtatttgtctaagagctccacgtatcggtggatcagctccagtgtgatgagctcattgtcttggccctcgatggcgcagcagaagtagaggctggcatatctcttatagacaactttgaggtccctccactccaggaagctgcacatcttgggctttcgagccaggacaacctgcatgagctcgcgcaccatcttcttccgttccttgtccgaagtggccaggtaccatttttgcagccgcagttttccctgccggctgaataatagcatgaaccgcatcatcctgcagcctccggctcggcgcgtcccacttcggccaccgtaggcgccagtcccactccctttcttatcctttctcctgctgccctccctctcgcccgaagccccgccccccgct

SEQ ID NO: 447436 - DNA, 506 bp, Homo Sapiens
ttttttttgctgttcattcaacaagtctttattgagcacctactctgtgcccagcactgcactaggtgccatgagaatacaagagtagtataagatgttatccgccctccaggagcttacaaaactagaggcagaaataagatgtacatgtgactcaggcagcatgtgacacacacaaagtgggcagctctgagacaatggtggtcaagtgaccactgaggcccagagccgttggaacagtctcttagaacagggtggaggacttaaaacttggatgaacaggggctggcagagcacttggaatgggtaaggacaagactgggagatcaatttggctggagcaggggagcttgtgttaaactgtgatgatgaggggcacctggacagaggttgggtccgtgggcaatgagaagacatgttactccctctcttgacatgaagacctggtgggcttgtggcctcctgctgccttcctttccctgtcttcccatctccactctctccta

SEQ ID NO: 447437 - DNA, 984 bp, Homo Sapiens
  misc_feature (70)..(254): n is a, c, g, or t
  misc_feature (906)..(942): n is a, c, g, or t
gggtgggggcgccgcccccaaaaagagttttttgaaaattttttgggggggggcgggggggccggaaaannnnnnnnnnnnnnnnnnnnnnnnnnnnnnnnnnnnnnnnnnnnnnnnnnnnnnnnnnnnnnnnnnnnnnnnnnnnnnnnnnnnnnnnnnnnnnnnnnnnnnnnnnnnnnnnnnnnnnnnnnnnnnnnnnnnnnnnnnnnnnnnnnnnnnnnnnnnnnnnnnnnnnnnnnnnnnnnnnnnnnnnnccaggaggccaggaaatattttattgacaaccagggacacagtcataagagagggaagcacacaggactgcaaactaacacccagtagccagcaagggccctctgggccaggaatactgaatcctgggatcctcacagtctcccaccagtagacatacattactgggcatccaggggagggggcagtggctatggtgtcccagagagtgagaggatatatgatgcctcattatgagcgacagggtaaagaggtaaaatggagggtccatcactgcctaagaccacctcctcctctcagagccaacaccaggtgaaggactgaaccacctaaaatcttgtaatcagctgctgtcttctcatcattcatctgcttgccactgtagatgagcctctgctgttgtggggggattccctctttctcctccacacgctccttgattcgctccaccttgtctgtaggttcaatgtcaatctcaatctcctttccggtcagcgtcttcactttaattagcatcttctttccagtttggggctgcacacggataaattgctgctcctaccgctccggtcgccgctgccgccctccagcactcttgcctgcaagggccactccgctctcgacgaattcgagctcggccgatttggcctgatnnnnnnnnnnnnnnnnnnnnnnnnnnnnnnnnnnnnncggccgccaccgcgatgagcccgggtcccctatatgagtctt

SEQ ID NO: 447438 - DNA, 458 bp, Homo Sapiens
gttttagtattttaataactatttcaatataattagttttcctttaattctatatattttgttttatgcctgaaaaaatcttattctgagaaggggcttagaggcttcaccagattgccaaagagtcttaggcaccaaaaacaagaggcacccctgatccacctcagtacgtgccccctctcctcttctcatcttcacataagatcgccatgctgtcattctcactccaaactcacatctgcttgccactgtagatgagcctctgctgttgtggggggattccctctttctcctccacacgctccttgattcgctccaccttgtctgtaggttcaatgtcaatctcaatctcctttccggtcagcgtcttcactttaattagcatcttcttcccagtttggggctgcacacggataaattgctgctcctaccgctccggtcgccgctgccgccctccc

SEQ ID NO: 447439 - DNA, 751 bp, Homo Sapiens
  misc_feature (663)..(699): n is a, c, g, or t
cagcgcttggagagttttatggtgtgtgtgtttggccaggaaatattttattgacaaccagggacacagtcataagagacggaagcacacaggactgcaaactaacacccagtagccagcaagggccctctgggccaggaatactgaatcctgggatcctcacagtctcccaccagtagacatacattactgggcatccaggggagggggcagtggctatggtgtcccagagagtgagaggatatatgatgcctcattatgagcgacagggtaaagaggtaaaatggagggtccatcactgcctaagaccacctcctcctctcagagccaacaccaggtgaaggactgaaccacctaaaatcttgtaatcagctgctgtcttctcatcattcatctgcttgccactgtagatgagcctctgctgttgtggggggattccctctttctcctccacacgctccttgattcgctccaccttgtctgtaggttcaatgtcaatctcaatctcctttccggtcagcgtcttcactttaattagcatcttctttccagtttggggctgcacacggataaattgctgctcctaccgctccggtcgccgctgccgccctccagcactcttccgctctcgacgaattcgagctcggccgatttggcctgatnnnnnnnnnnnnnnnnnnnnnnnnnnnnnnnnnnnnncgccgccaccgcggtgagatccgattcgccctatagtgagtctatacattct

SEQ ID NO: 447440 - DNA, 392 bp, Homo Sapiens
tttttgttttttggttagaagctttggaattgcagttagtctatttttgaaattggtttgttattaatttttgtatttaaattcatttgtttgtattgttcatcttcaaagcttacaatctgaaggtgtccgttcctacactggtcagaccactgtccttggggcagctggggtctttgggaccctccaccgggctcgccggtccgtcggacttttggctgagatccgtgtcagactcctccgaatagtcgtctgttggcatcgagggctgaacccctgaggtgctgcatgaacttgaggtaaccgttgaagatgaggagagaggaggaaaagaagggggcttcgctgccgaagcccgggagaccacttgcggccaagacttcctggaggcg

SEQ ID NO: 447441 - DNA, 473 bp, Homo Sapiens
  misc_feature (152)..(161): n is a, c, g, or t
actctcaacgtcattttttgagactaaaaatttttaattttaatgaggtccaacttaccaagttttacattaatagattgtgtttttggtattgtatttaaaaacttgtcaccaaacccaatatcacctagattttctcctatgttaaaagnnnnnnnnnncagttttgcatttacatttagatctatgatccatttggagttaatttttctgaaaggggtaaggtgtgtaccaggattcattgtttcacatctggatgtccagttgaagagactgtcctctctccattaaattgcctttgcacctttgtcagagatcagttgactgtattttgtggttttattcctgggctctttattctgttctgttaacctgtttatctgttctttgccagcactgtactgttttgattattatagctttacagtaagttgcatagtgtcaagtcctgtgactttgtttgtccttagtgt

SEQ ID NO: 447442 - DNA, 748 bp, Homo Sapiens
tgtttcttggaggctgtcaagcatagatctggacctagaacatgttaatgctggtttcggagaggagacttagatgagttcttaaagcttcgagtaatacatgctggacaaggggagttaaagtcatctcctatggagattgactatgccgatcttccagaatagtttcaagcgactgacatgtgagatctccacaaggggtacatcagcaggatggtgagagaaggtctagctaaatggctcatctgcagcacacagtgaaataagatggctgtagtacatgagcgagcctagagaaatcaccaccgtttagaccaagctgtaaggccctagctacagacagtgtttaacaagtaaacttacaagaacccaacgcaattcccagaaagtaacaatagccagacggttgaagggcggggtagaagaggggggaatgttgcagcgtaatccttcataccacctggttcttgatattctgccgcctgttcaagcttcaagaataaaagcgatcagcaggatcccaaatgcagctcccaacccactccccaggctagacatagcttgtgtgccacacagcacaccaatgtgatacttccactgagccggctgcagctctgcatgaaggactcggggtctggaggtccatggaatcactgcggctcttgttgcagtgtttgccctctatacttggttattcaattaagcccaatggctttagtaaaagcacgacgttgaagctctagttgta

SEQ ID NO: 447443 - DNA, 1189 bp, Homo Sapiens
aaggtcttggagttcttttatacaggattcaaaactaaaattccacaacacacttaactgtagttctaggacatatgtatggtcaggacaacagagcagaagttgataatgctccgaggaatcaggtaagtaaacggttgtcctgagaatgagatcactccaccccaaggagaaagatcggaacctttaaactttgggttattaaaattaagcttattagtaccttgatgcaagttagagtttcttacaatgactctaaaagtagagccagggtcctggcaagtaaatgaacaagcttttaatacagcttagttatgtaaaatactgtacactgtaaaagatctagaaaactagagcttcaagtcatgttttaaaaaagccattaagcttaattgaaaaaccaagtatagagtacaaaactgcaacaagagccacagtgattccatggcatccagaccccgagtccttcatgcagagctgcagccggtcagtggaagtatcacattggtgtgctgtgtggacacaagcatgtctagcctggggagtgggttgggagctgcatttgggtcctgctgtcgcttttattcttgaacttgaacaggcggcagaatatcaagaaccaggtggtatgaaggattacgctgcaacattcccccctcttctaccccgcccttcaacctctggctattgttactttctgggaattgtgttgggttctatgtaagtttacattgttaaacactgtcatgtagtacaggccttacaggcttgagatcataaacgggtggtgagtttcgtcgtagcatcgctcatgatactacagcctcttgatttcacatgtgatgactgccagatgagccagtttagctgacacattctcatcgaccagtccctgatggtacaccacttgtggagaactctcaaccatgtacaggtctgcgttgacagactagtatcttgggaagggattcgagcaatgaatcaatactcccataggaagatggaccgtgttgaagtcgcacgtatgattccaggcactaggtggattcatgggaaaagcatataagagagaagcgtcagtcatatcggttcatcagttcatcgcagaaggccagacagtgagacagtggtgccttagggtcccagagtgttaatgcctatggagcagcgctccgaagaaaaaggggac

SEQ ID NO: 447444 - DNA, 953 bp, Homo Sapiens
  misc_feature (180)..(180): n is a, c, g, or t
  misc_feature (867)..(903): n is a, c, g, or t
atcagacttggggcaaggtaggagcaacacattcgttgagcagactgttgacacaatagcccagctgtcttcagaagcaggaataaaaaagataacgacgatcacgacgggacagacctcagctgcataatgaagcttggggtcttggcctgatagcttttaatgtcctttaaaacgggngctgggcatcaagcatcttttccggaataggccaaggaagacaagtccagtttggtttttaaggctttagtgagctctgcggccagcagctcatggagggacacgccgtcgtgggagtacacccagtttttcccagtccagtcataacgcttaggtccactggatggagaagatagccagatttgcttgtttggcgtctgcttgttgatcacataggttcctagatctccacccagtttgacagttaagacaccactcccaaaggagacatcatagtcctcaaacgtgtatggcttgtctgcaaggtcttcaaaaaactctgctaaagagtccagcgtttcctctgctagtctttcataggtggtctcatctagagagcctgggtggcccaaagttccagatttcctcaaattcatcaaatagacactctgctttttgacattccaaatctggttgaggccacgttggttcgaacttgcgcggcggggcgtgcaggtcgcatcgatgtcggtgcgcaggccacggcggccgcagagtggggccaactctgccggccgcgggacccgggtgagggtctgggcctgggccgggctgggtgacgccaggaggctggctactgcgcggcgcccgagagtccacatgccgcccgctctcgacgaattcgagctcggccgatttggcctgatnnnnnnnnnnnnnnnnnnnnnnnnnnnnnnnnnnnnncgccgccaccgcgatacagctccggttcccctatagtgatcgtatcatcc

SEQ ID NO: 447445 - DNA, 493 bp, Homo Sapiens
cagcatccggagagtggagaggaggcagtggccctggtggaagacttgcagaaagaacctggaagacagaggctggagcctcgggcgaggccgtccggccgcacccctcctgctcagctgcggtcgccatggccaatgacagctgcgggcccggcgggccgagctcgagcgagcgagaccggcagtactgcgagctgtgcgggaagatggagaacctgctgcgctgcagccgctgccgcagctccttctactgctgcaaggagcgccagcgtcaggactggaagaagcacaagctcgtgtgccagggcagcgagggcgccctcggccacggagtgggccctcaccaggattccggccccgcgccgccggctgcagtgccgccgtccagggccggggccctggaggccaggaaggcagcggggcgccgggacagcgcctccggggacgcggccaaggcaaaggccaagtccgcggccgaccccgcggcggccgc

SEQ ID NO: 447446 - DNA, 355 bp, Homo Sapiens
agaggtatgtatttattgggtacatgagatgtgatacaggcatacaatgtgaaataagcacataatgaagaatgaaatatccatcccctcaagcatttatcctttgagttacaaacaatccaattacactctttaagttgttttaaaatgtacaattaagttattattgactatagtcaccctgttgtgctatcaagtagtagttcttattcattctttctgattattacttgtacccataggaacatccccactgcccccacatggcccccactacccttcccaggcctctggataaccattcctcttacttctttatctccatggggtttcaattgttttggatttttaggga

SEQ ID NO: 447447 - DNA, 448 bp, Homo Sapiens
  misc_feature (17)..(17): n is a, c, g, or t
  misc_feature (401)..(401): n is a, c, g, or t
  misc_feature (412)..(412): n is a, c, g, or t
acgtatttttaattttnaattatgttaaaaaatttgtataggtacatagtaggtgtatatatttatggggtacattagatgttttgatacaggcatgcaaggagtaataatcacattatgtaaagtggggtatccatcccctcaagcatttatcctttgtgttacaaacaatccagttatattctttcagttatttaaaaatgtacaatgaaattattattgactatagggcacactattgtgccatcaaatactagggccctatttaggtctttttattttttgtacccattaaggcacccccaactcccccacaatcccctactcttttcccgggctctgggtaactatccttctactctatgtccatgagtttgttttgatttttagggtcccacaantggttgagganttgtggtgtttgctttctgtggccgggggttatttt

SEQ ID NO: 447448 - DNA, 232 bp, Homo Sapiens
aacacgagtctttaaaatgacagaggcctccttggccccaaatctgagccagaggcccccaccgaaggagcagatctccgcccacactgccctcccttccaacccgggcggcccagcaggcaggggccggatcacctctgctctgctccggcccaggcctcccaaacagacccacgcgctggggcgggctggtggagcgggggctgaggatccgcggtccgagagattcctg

SEQ ID NO: 447449 - DNA, 371 bp, Homo Sapiens
  misc_feature (341)..(341): n is a, c, g, or t
ttttgccgagtcaatattttattaaaaaacacacaaacacatgcacactggtaacaaaggcagagatggagaggagacacaagatctccttggggacaggctgaccacatagtgtttctacaggcacgcctcacttcaggaaagagggtatctctaagaccggactgacaagctagataaattaggacagggctttgtttcttaaggcacttcactcccctgaggagtgaagtagaagggatttaggcgggagtattcacaaaccccttcagctgtgctaagtggggttcatcagtacctgaggtggttctagaagcaggaaggcagaaaacatttccctnggaggctgctttcctttcccagaatgggag

SEQ ID NO: 447450 - DNA, 432 bp, Homo Sapiens
ctctgaaaaatcttatcgatcggtttaaaattacccccgtaatgcatccttgctttgctctgagcgcttgttgtctcgatcgacacccagcattaaaaacaaatactcgaagacaggacagggaccgccaggctgcgtctggcgcgagccgcgcgggtggcaccgggcggacagtcggcgaagtccgggcgccgccagcgtgcgcccagttctgggtgacccacgaacgaaccccaacattcgctcccctaccctgctcccctccccggaacagtcctgggttggccctgcccggtcggtccgcggcgaggggaactggccgggtcgtggtacccacggccgctgccctgaggggccttccgggccgaagctaggggccggggaggggaatggtcatggcgagtttttcgggtcttcgttcccaattcagaa

SEQ ID NO: 447451 - DNA, 500 bp, Homo Sapiens
gaacgcggggcgcgaggctgctgcagggcccccaggaagtctggcagttgggagggcagtgtgaagacgggcacggtgcggaaaagggcgggtacggcgtccgggtggagcagcctgtcgaagcaggcccccacgtagctgccgggcgcccggccctgcaagaagtcgggcagcacgcagctgagcgaggcgcggaaggcgtcgtgcgggccgtgcgccccgggcccggacaccccatcctgtagccactcgctgcacagcgccaccgcaccgggagagaagagcaagaccaccacgccgccctcctgcagggtctggcgccgctgcgcgtgaaaccaagccacgggcccctgcgcgctcagttcacgacggctccacaggtctacggccacgcgcagcggcagctggcacagggccgacgccagggcgcccaccaggcgctcgaaacccgagtcatcggctgagtagaggagcagagccgcgcggcccctggcggccgc

SEQ ID NO: 447452 - DNA, 1621 bp, Homo Sapiens
accttctaagcgttgggacggtatggacaatccggcacggcccccgcgcttcgtttctcttcggcactgttttttcgccccggttctacaacccccaatttgtccccgacagtgctgcccgcactgccaggcccctcaggatcgcgcagtcccaccgctgcctcgtccttccgtaaaacgcctagccgccccgttctcccaccagcgggaaacaatggttccctgcgttgggccatcggaggcctcatcgttgcatgacgcacggcccccacatgttcactgtatagtcatgggtatttcttctccgccacgagtggcgactctctgcagtgcccaccctcttcgccgtcaaacctcccctccagtctgtccctccgtcactgtagttatctcataagtgctcatgcggcggtcgccttattgctcctctgtttaggggaaaaccaggttcctttaaataccccctaaggacgatagtccaagttttaaattaaaataattactcgatagataatcccccgattttccccccccagtttgtattaccttccccagtgaagctttatgcattccattctgagctcctaattccaggtaaacccgaatcataggtggaaatatgccatgtttagccctagaagtaacatcccagtttattagcaaaataaagcccgaaaatgatcaaaatgatcaggtaaataaatattacaacatataatgtactggtgatgaagctgcaataaagtaatataagtgatgtttacaattttgcttttccttcctttattctttactgggaaggctagttgtaaacataaacattctcactgaactactggccccccaaaacctaacctatctgacaatcaataatcatcttttgactataaaatcataaaaacttgtactctgtggctcttttgtctcgatgatttttcagagaaaaaaattagctgtgttaagtagtttcactgatttatccatcttgaatagctgccagttctggaacttcatacatcctcagaacgtcttcatagagcaaataattatgtaggcttctgggaagtggcagctgactaatataactgtcagaccgtagacgttctgattttagactggaccgaatttccaaacgacaaagatgggtcagggatggaacagtgggcaatatgttgctgtagaatcccaagcgtttgaggcacgagcagagagcatcctttcaacagctggtgcaagtgtcttccaattagtaaactccaaagtgaagataagggtgtcaatgctgactgagtcaatccaagaattgcacagtagaatcagtgggtcaaatccagcaaccagaagatgtggcaaccactccttatattttgcttgtgctttaattgcatgatttacaaattcatatatatggttccatggtcccaatgagcaacctttcctcaaaaagtagcgaaatatcgaaaacttctcgtacttcaggcagtatgccaaatgaagttcatttatctgggctccatatttcaaaagaatgttcacaattccaaagaacttacagtccttttggaaagccatgcacacaggagaactgaatccaaaaacaaggcacgcctgggcgtctggg

SEQ ID NO: 447453 - DNA, 523 bp, Homo Sapiens
cttgacgtttattttctgagcccatgaatttgctagcgaggcagtttctctggtttgctgtttctgaaaggagttccctcaacagagtacaacagttaatgggggaagtggaaacaaaagcgggaagcaggaggaccgttccccatcactagccagtcttcaacaggtgaagttgtttagctcttcctggtacctgcaggcaccgttccagaagtattaaaaatccagggtgtggctgagggtgggatggaacatgtatctccatctaacagctttaatagactgttagttctaacttgcatataaaaacacacaaataagtacaaagagctggagaagctggggaaacagtttctgagtaaaacctgtggcactaggttgtgtctttcctttcccctcaggcaagagcatcatctgtttgactggcatctggctggagcgtccgaaggggttaagaacgcttgcaaactcctgggagtccagtaggagttgctgatggtgccggacattgcttgcaaagcaa

SEQ ID NO: 447454 - DNA, 490 bp, Homo Sapiens
gatagtaagtgagcttttattttattcaccataaaatatttgcatctcttactcctcaggttcttacataagacaacatttaattaattaagttaccattatagccatcgagggcctgagaaaccacatcctttgcaactgtctcataaaccaagtcctgggaggcatcgtgaagaactccatccaacttaaacgaccagtctgtctgttggttattgacaactcctctccgaatgtctttttttaagtgaatatcaatgcttcttttgtcatctccgtatctgatcatttcatgagcaaagtcatcggtgggtttgacacggacaaatgcatgaacttttttcctagtacccattctagcgttcaccaggcagcgacgctcccgggacgcgactgccgcaaccgaaaccacctgcactccccacgcggggctgcctggaggaagacaatgttcccgttcctacgggtccctcggcacggagaccccgct

SEQ ID NO: 447455 - DNA, 1134 bp, Homo Sapiens
tccaggcattcatacttttccatggatgggcaggcttcagtgggtgactagctttcatccctgctggcaaatctcaagtgaaagatagcgtttcttctaaacggggcagcttctccatagatgtttgtcacgaggaccatattgcagtttcccccctaacgagtccttcagagcgtgggtgagcttgcactgccgaaaggggatgtggtcccgcttctggtccccaagggcaatgatggcctgctccaggaatgagagcgatttgttgatgtaggtggcttccttcaggacttggccctcagacccagacttccccagcctctctgagcctgccagatccaccaagttaattttggaagtgatgtacttttcctctgataaggtccgggaatgggcctctaagtagattggtgaaaatgcagtgtgatctggaagagtttttgttcatagttgtgggaggctataatcctgttggtctcaccctgctgcagggcacgagggaggatcccccggtgcttgtaattctcagttgcccccatcatggtgtatgtcttgccagctcccgtctgcccataacacatgatggtgccattatagccatcgagggcctgagaaaccacatcctttgcaactgtctcataaaccaagtcctgggaggcatcgtgaagaactccatccaacttaaacgaccagtctgtctgttggttattgacaactcctctccgaatgtctttttttaagtgaatatcaatgcttcttttgtcatctccgtatctgatcatttcatgagcaaagtcatcggtgggtttgacacggacaaatgcatgaacttttttcctagtacccattctagcgttcaccaggcagcgacgctcccgggacgcgactgccgcaaccgaaaccacctgcactccccacgcggggctgcctggctgtgtacatagtcgccatggcaacgggtcgcttccggggattccggaagtgtcggggtggcggaaatgaagtccgaggtcctacgtcgaggatacgggtgaggtcatggccgaatcgggaagacgagagatggggccgattgatctagaaagacttcggcggatgcacatgcgaagtcaaggtcgagatagcatcccggga

SEQ ID NO: 447456 - DNA, 771 bp, Homo Sapiens
attttttggaacccacccctttccaattgataaccggggttggttaatttgcgctttcctttcataattcgaatccaattcccatggctttggatctttgtcttccccatcccaaaaattttgaaccattcaggagaagggatccaattctctggaggctgaacccttaactcttgaggacttcctagatccttcacgaaatgcctttttacattttgaaatgtgttgttctttctcccccgctttttttccttcttttatcattaactttggacactcttgaagcagttaaagtaattgatgttggagtatgctgaaatgcagtatataattccacaggaacctcatcaccactctcagttgcactggtatcaccatctgacatattttcccttttccggcgttgtagtagcactgccctctctttatccaaattcctaggctgacaacgttcacatagatatgtatcaggaatatgctgcctatcaatccccatgcagtcaatatgttgccaaacgctgcatttgtcacaacagatcatgtatccatcatcatgtgtaaaaccacatatgcacctggttacatcagtaccataacttccatcctcagatgtgctgattgtagtagcactggaagtttcatcaaaattaggagtggtaaatatgcctacttcatttttgctaataaggactgatggaggaggggaagccggaggtgtcggaggaggacgagcaccataattatggtccgcatagggcaaaccaatgtacc

SEQ ID NO: 447457 - DNA, 1857 bp, Homo Sapiens
  misc_feature (180)..(188): n is a, c, g, or t
  misc_feature (227)..(235): n is a, c, g, or t
  misc_feature (280)..(280): n is a, c, g, or t
  misc_feature (353)..(361): n is a, c, g, or t
  misc_feature (514)..(522): n is a, c, g, or t
tgagatggggacaagagtaacacccgtgtgtggagggagagcctcacttttggagggggggcgctcccacctcgaagggtttacgggcgtgagtctgtccatagggttagcctcacagagaatttgtctcaaagaataccgtccctattccacgcgcgtgtgtgtattagggtttaccannnnnnnnntggagcctgctcaaaatgtggggggcgcaacatacagcnnnnnnnnnatttgcgggaggttccccaccacaatttgggaaagggggtttgtnccccccctatatgcccggagggtgcccccaatgaatcaggccgggggggtgttttatagcgcggggtgggggnnnnnnnnntcctgtatatggggaggatcgcccccaagggggtggtggagcccccatcgagggaggggattttgaaataggccctatcgctttttataccgttttttttcccttagggaggggggaaaatatatgtgaagagggattttcccccacatattnnnnnnnnnttaaaaaaaaggcgccactttccggaaaatttcgggggcccaagtcttgggttgaaaagtggccaagctggttgaaaaccccaggcttgggggggctttgcaagccctttggggggaggctgttggctgttatgcagaaatcccgcggatgggtgtagtcgacccaaaaccatgcaagtcctcgcacgcccaccggggatgtttccataggtccagcagccttggtcggggccagtactgatggcacttttcctctttcctttctttcaagtttgttaacatgacgatggtcgcagacttttgctcccagaccattctccagaagtcgttatccgtttcctgtttgggaccttgagctgctatgaatttattcttctctttgtaaccatctatgtaggaagcattgatgtagtctgaacagggaattccatccagttggctcagaatcaccctagaatggtcattgggaaggatgttgggatatctgtttttttctctgttttcttctttatttgccagttcaaaagttccttgtatgtgtccagatggcaatgagttgaactcctcccgaaactgcttgcagtcgtcggcggatctgatacggatctcctcctccaggtgctccacggggatgggaaaatacttcttgggccctgagggtgacctgctgagcagcatcaccctttgctgctcttgctcctccaagattccgttgggcatcttcttgtcgctggtgctgaccacagctttcctctgcttcctgaagaagtaggcggcgagaaggagcacgaggaggaggagcagcagcggcagtagcagccaggccagcagcggctgggaggcgcccgggtccggaggggcctgaggtctgtggttgtctcgttgctgtcggcagtggtctcgttgcccctgagagccctggcgagcggcaagctaaaacccaccagcaggagtggacacaagggctccatggtggaccgagggaaagtgaaggctatagtcatgtcagtgggagaataaaaggttcacggcacggtccctgtccttcatggagacagcttcttccgtggggtccagggaactccctgaccttccagcagcagaacgccgacaccaggagcccgctgatgagctcggcttctgacaactagacaactggctgcaagcgcttactacgggggggctggtctggtcgcgcagatcgcgctgcagcggaggctccgcatctcccgggcgcctgcccgccgccctccggggcgcccggctgtcttcgccgggcgcgaagaagggtcgcggggacgcgcagaggccgtgggttcctgaagccgctccgct

SEQ ID NO: 447458 - DNA, 642 bp, Homo Sapiens
tttcttttcaaaatatctaatagacttagcaatcaatttagaacaaatatttggcccttaatatatctttagtgagggaagtagcttttatttcctgcttgtttaggttttctgttggtacataaaaacaaaattgctgtctcagactgaatctacttgaatctaggaaggcacatctcatccctattgtggtttttagggacacttttctctttcccagagatgagaggaccaattcaggacagaagagccctcgtgaataccaacgtgctagctcaggttcccttctttcctccatcagagctattggtagggttttaaggtcgtgtgtgcatcatgcttccaatgtcaagagatttcctcaaacagcctgtttactagatgaattttccagctggtgaaatacatgagctttgttgttttcctggtcttccaatagcctgtcattattgttagatattatggcacctgttgttgaatgtaggttcccttacagccctggtctagatgatcctagatggggtgagacatatgcaagccattggtatgtgcataagcagttgcaatgaaccttaggctgacttggtagtaggcatttgtctttctgttcatgcattgaataaacatttttaagaaccaaaa

SEQ ID NO: 447459 - DNA, 422 bp, Homo Sapiens
catttgcacttacaggccacgccatgctccatcctccccatcctgcctgggaacctgaccaatgtggctaaaccagcaggctccctggctgccagcttctggctggttgagccaatgggaagcatgagaggagagccgagggtggggagacagtcagatcagggtttctgtcctcagggctccctccctggcaggtggtggcaggagtggctgcattcccctctgaaggctccttcaagcctctcagcaaacagctcccatctccaagtccagccacctgttccatcctctcctctgtaggcccagcagtgggaatgacccaccactattgccagcctcagcatactgaagcgccccttactggattccctaaattctatgcacatgtttattaaatgctcctcacttacccagtttcaatg

SEQ ID NO: 447460 - DNA, 455 bp, Homo Sapiens
cagtgcacgtagtttatttgggacttgatcccaaggagactggaagcattggtcaaggagggacagaatgggacagggaacagggagaagacaaaataaggatgtgttgccaagtgagttacactgcagatgactggtgcttactcccatgacagaactctggggagccacgtcgaacatggacctcagagttacacagccaggggataacggaactgaggcatgcattctccagtccagtcagtagtagaaggcttttctgcggtggggaatggaacccaggccaagtgggttctagctgcagagaaggggatacacaaccttaggtaagagggtgcacatcccagccattggatgtggggctggaggaagtcattcggctgggctcctaccgtttatacttattataccgttacggtcagtaagagacaggtggtgatgacgttgtcagttaa

SEQ ID NO: 447461 - DNA, 686 bp, Homo Sapiens
  misc_feature (467)..(467): n is a, c, g, or t
caggttcaagcattttattttgctttataaaatgaaggtgggggtgttttgggggagcctttccacagctctgctcacttttcgcagcctcattagctttttccacccttgaagatggaagactacaagcctctaaagcagtttcaactcgcttccgatctgctgaaaacaagcgatatatgtttttgagaggaatacgcccttctggagtgacttgcagcttaagtttagtataggctttttccagaaatgcatccctggacatgttttgggccagcaggtttgttgccaaactgaaaacctcatttgtccattccttggccacttcttcttggaaagccacgagattcaaatgggagatgttcacgaggtcagggccatacaccactgtgatcatgcgctgctccaggcgcccgatgttccccacatccaaaagttcacgtattttggggtccttgggagctttnggcgtgtctcccacatctggcatctttgacaaggctgagattcagtagctctgtctccttgttttgatctgtccagtaaaagaaaaatccctgagggtcagtcctcacaataattggagtaacaatagttgagtcatcatcccacttgacgaatttggtgcccttcttgaggctgtcggacacgcacacgggcttgagacaaggagagccgaggggtac

SEQ ID NO: 447462 - DNA, 683 bp, Homo Sapiens
tgatatcaacaaggttgtcctttgtggagggtcttctcgaatcccaaagctacagcaactgattaaagatcttttcccagctgttgagcttctcaattctatccctcctgatgaagtgatccctattggtgcagctatagaagcaggaattcttattgggaaagaaaacctgttggtggaagactctcttatgatagagtgttcagccagagatattttagttaagggtgtggacgaatcaggagccagtagattcacagtgctgtttccatcagggactcctttgccagctcgaagacaacacacattgcaagcccctggaagcatatcttcagtgtgccttgaactctatgagtctgatgggaagaactctgccaaagaggaaaccaagtttgcacaggttgtactccaggatttagataaaaaagaaaatggattacgtgatatattagctgttcttactatgaaaagggatggatctttacatgtgacatgcacagatcaagaaactggaaaatgtgaagcaatctctattgagatagcatcttagtgttttagagaaatcaagaatttttaaaaacaagaatatcaacatttggttttgtgtataagtggtgtttgtattaaaatactttttcaatgaactgtataaactatgttttattaaactacaatatatcagt

SEQ ID NO: 447463 - DNA, 1097 bp, Homo Sapiens
  misc_feature (225)..(225): n is a, c, g, or t
  misc_feature (241)..(242): n is a, c, g, or t
  misc_feature (1017)..(1053): n is a, c, g, or t
taaaacagaaaaagttccggccttgtaaattttcccctttggggaatccacaaaatttgttccaaacccacaaattatatgcctgtacccataaatgatttttaattaccaggctggataggtaaggggtaaattgattattggtaatgaaacagcggaaccagaggtaaaatatgaaggttttttcattaaaaaatgaaggatgtaccaaaaaaaatatgttanccatgtaagattgtcnntttccctccccaggtttcttcttcttccctgttttcctttttttctgcctcgtttgctgtgatttcatccaattctttttgctcttcttctgaaggtttggctacatctttttcatccacatattttgcccatggtccccaaaaccatcaatattggatgcatcattttctgttaaactttttcctcttttctgttttcttctgaccagtttcaaatacagttaaaccttgatttttttcagcttcttctacagaaccaatatatttagcagacacttgatgattatctaatgaagggtctaatgcataaccatatgttgcaaaagttctcctttgctgctcaaacatgaaatcattgatatgagctggttcggcatatccagaaagcatatttctaggggcagccatttgctgtgtcctaaagggattttctggtccaaactcaggagcaaacatggtctcataggtaggattatactgaacttctttgacggcagggtcaaggtgaactccagtctccaaatcttccttaactgccacctccggagccgagtccactgccactgctagagacggctttgatgaaggcgatttagtcaagtgcatgagggagtcggcggctggcagcggacaccgactgctctcactgtccgagtccgattcggaccctgaacccgaaccataggaagcggccagagctgcaatcgcagccgacatgacggcaacaatcctctccgctctcgacgaattcgagctcggccgatttggcctgatnnnnnnnnnnnnnnnnnnnnnnnnnnnnnnnnnnnnncgccgccccgcgatacgtccgttccctatagtgatctatcattc

SEQ ID NO: 447464 - DNA, 245 bp, Homo Sapiens
gtagttttggtagaatcaggactaaaatgggttttcaggtatttctttcctaccctttatctaagactacctacaagtgttatttacgtgtaattcccaccaactcacatctccttccttcataaagcatttctatttcataacttttctatgaaaggcagtatagcacatacagtgaaatgtgatagaaagaaacggttctggcacaagattagcatgatttttgtattagtgccactacttag

SEQ ID NO: 447465 - DNA, 674 bp, Homo Sapiens
tttgcattctgaagtcgtttttattcgataactaacaccataataaccagagttccatctgagaggagaggagagtgagaaggggccagaaccctttggtggctgagaagcctcctcaaggctatgttggggcagtagggaggcagagaggtgaagatcttagggaagcccctgacccagcctaggctgctgcccacagggcaggaggaaagcccaggaggggagacaagacctccctgttgcaaccaggaggctgagcaaggcactggtgtttacagcccacagcttcacccgggaggggcgagggctcctgccctgcgagagcctttaggtgtacagttggggaaagggcagttcagctgttggctggagccagttctccgggctccaggtggtgccagaggcctccatgaggtggaaagtgtaggcctggcgcgagcggtcagagaggttctgcttgctcttgtgtaccactttctccatggatgaaggaccagggcccctctctgcactggggtgggcacaaagaggctgttatcccggctggctctgacccaaggaagctggtaccaggcgctgagccaacaggggcccggaccatccttcttgacacaccactggtgtggagccaggatgacgagagacagccgttctcagcgtgaaggatcctctag

SEQ ID NO: 447466 - DNA, 251 bp, Homo Sapiens
aaaagggcaaatttctttattaaaatgtgcacattatagtttacttaaatacaaaatgttcactttccttgcaggtaagaaatttcactgacatttccatgtcaattagcttctttttaataaaaatccttccactgaaaataaataagcttttaaattactgaactattatattcattagtctcaatacctcttaaaatacttaaaactttaaaaaatagactttaaacattgcctaaagggggcatcca

SEQ ID NO: 447467 - DNA, 485 bp, Homo Sapiens
gccttttcctcctcctctgtccatctgcaggccaagtgtgcatcagtcacaggcaaactctgaattgagctttgtgcaagtctctggaaagagacccaagatcgtgtgatgagcaaaagtgacagtgctggaggcagcgacatctgcagagccagccccatccctatctgcagcagaatatgtatggggatcctttatgtgaacaatccacccagggtagaatggggcttttgacatcagctgagacccaggcggccttacaatgagagggctgttggtcaaaggaaggactgtttaatgaactgagaatctgaggccagctctggccatctgcacttggaatcattagagcaactctactgtaactggcaaccttgaataatgcagcaaattcatattccaaaattgtgaactttaaaattttgtgtttgtgtctatgatgaaaagcattatataaacatttgatactacaattttattagtaa

SEQ ID NO: 447468 - DNA, 542 bp, Homo Sapiens
gaaactaaaatgatttatgttaggggtgggagagaacaggtccagaggtcagagctgggaatcgtgaggtaaagcagaaattgcaaatgttttccatcaaccccatcccccaccttgacacccccacaccccagaaacactgaactgttcccagttccccaaatggcttgtggttttctgtcctctctgcctccgtgctggcaaatattcgtccaggaggcagtgactgggagagaaagactaacttcttattcaccagatcggatttcttaaacaataaggagttctaagaggccatgccaagcaaacggccagactgtacaaaggtgccccttgagcaataaatagcaaatgctctgggctttactgataagcctccccagactccaagccccaccaggcatgcagacaagtgcctgcagtgattgcagcgcctgcgcagcggcccttgttggaagtccaggagtccgcgctaccccgcaaagtccctggccgctgcccgcacaccgaacctctcggggctgagtcgggctgctttctcc

SEQ ID NO: 447469 - DNA, 424 bp, Homo Sapiens
agaccttggctttccaactagaagatggtgagtgctctctcaccaagacaaaagccttatgaaatgagccagaataatcacccagacagtaaatactcttaaacaacagaccatactcacgctcagtgctatctagaagaattcagagagtgcctacactggtcctaaagttctcactgagctccatgaaagtttctgtgtcagagggggcaggttgagttttggtgtcagacttttgggttctaactttggctttgccacttgccagctgtatgcctcggtttcctcatccattgaatgggttgataataatgatatattcctcataaaattgtgaggatgaaatgagataatccaacatagagcactccatatggtgcctagcacacattaagtaaatgtttgcagttgttatcattggatt

SEQ ID NO: 447470 - DNA, 299 bp, Homo Sapiens
gcatttttaactgttagtaaagggtaaatctgtatttaacaagtagagagtaagtacaattttgatgtattaaggtccatccttgaccttgacagtggcaaatattaaagggaaaggtttctgtttctgtcagttaattagtagctgggaacaagtatgcctaagagcagagatgttgctttgccatgtgtcactttgctgtcagttacatctggattcttttcttgccaaattcctttctctaaaaacttgcaaccccaaaccctagatgggagtagaaagaaatgcatgctatggtg

SEQ ID NO: 447471 - DNA, 528 bp, Homo Sapiens
  misc_feature (423)..(423): n is a, c, g, or t
gaatcacctgaagcccagagtgttacatatttaagctataatgaggtgaactacttctgagtatgtgtttcaatcaagttcctgccatatcccacttagtaaaacagtccaccactcctttgaagcatagcaaccaagttccttgggctctatcaccagcaccttacacatggcaggtactcagtaaatacgtgtcttcaactgactcacaagctctcaggtgcttactgggtgggacttgactgttgttgctaattaaatccccattccaccagtgattattgtgactcagcagtccttccctattagtgatcataaaatttcagggaaatcgaagtttctcatcaggaaatgttttgggaattactagtattaaagttagggaaagtgggggaaattagggttactggccgaggacctttnaggccttctaaacagctttatattttattgtgcctactttaatcagactcccttcactcgctttaagtttttaaaagtattccccagccggatgtgatggctcat

SEQ ID NO: 447472 - DNA, 555 bp, Homo Sapiens
  misc_feature (59)..(59): n is a, c, g, or t
  misc_feature (72)..(72): n is a, c, g, or t
  misc_feature (121)..(121): n is a, c, g, or t
  misc_feature (136)..(136): n is a, c, g, or t
  misc_feature (146)..(146): n is a, c, g, or t
tgaggttcagaaattaaaacatttattacatgaagaagaacggaatggggatggccagnttgccggcctggntggggaggctgggggcgggcagggcagggggaatggggtccattcgacntccccgagggcaacntccacagctntagccgagaaaagggcaaatgcacgaggggccaggcccttgcccagctcggggtgaaggcggggcactcaggctggtggggcagggggcgccctctctctgccccttcccaacttaaataggcataaataaaaagcgtccagaccctcaggccaacagaggctgccctgcccagccccgttccgcaggctaacactagtgccggtcatcagtcggtgggccagccggccaggaagaggccaccccaggaagggggccggtcccaggccacggaggtagttggagtcagtgtccggggcggcctggccctcacagcacgatccacgtatatcgctcgctgtccgccagaaccttcagggagcaccctttgtgcagcgcctcattggtcatcctgttgacgtagcggccgc

SEQ ID NO: 447473 - DNA, 490 bp, Homo Sapiens
gaggaggtcatctccaagacagtgcctccagtggacattgtgttcgagcgggatatgctcacacaggacctacgacctcattgagcgcagaggcacgaaaaggaatttcccaagctgaaatccgagtggctatgaatgtgggaaaactagaagcaagaatgctgtgccgactttcttcaaagattcaaagttgtcaagggattcatggaagacgaaggtcggcagcgaaccaccaagtacatttcctgcgtgtttgcagaggagagcgacctaagccggcagtaccaaagagagaaggcccgcagcgagctcttgaccaccgtgagcctggcgtctatgcaggaggagtcgcttctgcctgaaggcgaggacaccttcctctctgagtcggacagtgaggaggagaggagcagcagcaagcggagaggcagagggtcccagaaagacacaagagcctctgcaaacctccggcccaagaccctgtctctta

SEQ ID NO: 447474 - DNA, 279 bp, Homo Sapiens
ggggcatgagtttatacaacatgctacactacgcacttggtagcagtattcaaataaaaatatgattgctgcctcaggtcattccaaaagtatagtcatccaaaagtatttaaggcctatgctgaggactgaagcacaagtgttaagactgctattccttactctgacctaatagctttcccccattcattctcatcaaatattgatttaacaatggaaagtggcaggaagcttgtgttcccattaaacacaacacttcccctcctccccagaaaacag

SEQ ID NO: 447475 - DNA, 578 bp, Homo Sapiens
ttgaggaatacaaagacttttaatagaagtttcaggtatttcagttctcagagggaaatgggaatagctagcatttatccagcagtcctatatagtagtatagaacttgtcatttacagatgtcctagctagggctgctccacaacaataccatagactgggtgacataagcaatagggatttatttctcacagttctggaagctggaaagtccaagatcaaggtgctgatagatttggttccttgtgagggctggcttcctggcttgtagatagactccttctctcttcattctcacatggcggagaaggaggactctggtatcttttcttcttataatggcaccaatcccaccatgaagtcctgcccgcccttatgacatcatgtaaatctaattatctcccaaaggccccacctccaaataccatcacattgggggttagtgcttcaatatatgaattttgagggaacatattcagtccataacaacaggtgttaccatatttaatatttacaacgatccaatgaaaggtactattcttcccatttatacataaggaaaccgcgatagagatagc

SEQ ID NO: 447476 - DNA, 671 bp, Homo Sapiens
  misc_feature (56)..(64): n is a, c, g, or t
  misc_feature (638)..(638): n is a, c, g, or t
gaatctttcttgctcgaatactaggctttacttctacttgcaaatctggatttacnnnnnnnnnatattgaagtctgtgtcttcgcccttttaagtgcatctccttagcattgggatcattaaagctgcactcgcataatttacaatggaaccgaattacttttccttcatcatttcgtacctcttccacataatcatggcccactggctgcacatcactctgtaaagcagcaagagatgcaggtgtgactggttctgacactgtgtcttgctttacttcaggaatctgcacagcagaagtgacaggagtacttttaacacattcggttccttttgtgtcttctgctttatttcctgttgactgcagcttattaccaccaacaaaatttattttgggggtagatgttttcttggcagccatatttgtaggcactgctgatactttagtgttagatgtgctattaagagacgagtttcctgtagtcgtaagacccttcattgaagacgttgcaattgatgacgtattcacagtacaattgtttgctgcaatgcttgaaggagaggcagtcggctttgaagcagatacagctgttgaagaagtagcttggctaacaacatttggttctgttgatggaacnggtcttacactgttttgtgtgtaacttaaccac

SEQ ID NO: 447477 - DNA, 708 bp, Homo Sapiens
ttttagaaaaacaagcataacttaagtaaactttattttcaaaatgcttcaggtacaaaagaaaacaatggcaaagtctaacaataattaacaaaccagctcttgagcggcagagtgctccagggatgagaggggctggggatggaaaggtggttgggagacacaacatttttctagcttcagaaagtcagggagcccagatcacagcctgaacttcatggtattggttacagattctttacaaaggtgtttacctctctcatgaggtcttcttgtttggttacttcctcagaaaaatcatcattgacatccaacaccagcactggaatgttcatcagagcctcaaagtggagcctgtcactgtacacagacctctcaaagatctgtactggcttcctggcctgtaagagtttctcagggaagggctccagctgtactttcaggcggctcaaaaaggaaaatgtctggaatgtgtaggaccatcgtgctggctcccggtacatcatatccagcaagtttccaagactttgggcagtgcaggccaatgttgccttcgatggagagccttcggggcccgcgccccgcgtgcaggcctctggaggaggaaacgccctcgagtgggctcttggccatggaactgaagggtgctcgaagccgacttagaaagaggcggcccgcggccatcccacccacgattcacacagcccc

SEQ ID NO: 447478 - DNA, 1001 bp, Homo Sapiens
gctgacgccgaggctccaggatgaaggggcggggattggaaaggtgttgggagacaccacatttgtcagcttcagaaagtcaggggccccggatccaggctgaacttcagggtatgggtaacagatgctgttacaaaggtgtttacctctctcatgaggtctttcttgtttggttacttccgtcagaaaatcatcatgacatccaacaccagcactggaatgttcatcagagcttcaaagtggagcttcgttgtcttgtgaataagccaggcttcgtgttggccatgcagctgctctagataggccagctcaattcctttctcctcctcccctggccctctggtacagtctcttcaaaacaaacctggggagaagcctggaggtagatgaagccatgtaatgtgatccggctggcaaactcccacaggagaaaagaatgccagtcctgatagatatgccactcgatgtcactgagggaaccattttcaaaaagattctttgcaaagatatacctgtcactgtacacagacctctcaaagatctgtactggcttcctggcctgtaagagtttctcagggaagggctccagctgtactttcaggcggctcaaaaaggaaaatgtctggaatgtgtaggaccatcgtgctggctcccggtacatcatatccagcaagtttccaagactttgggcagtgcaggctttttgggtgccagcagcctggatattctgccatgttgctacaggttctgtagctacgtgccattctgggtaagttttcgtgagtaacttcacaaacgtggactttcccacagcaatgttgccttcgatggagagccttcggggcccgcgccccgcgtgcaggcctctggaggaggaaacgccctcgagtgggctcttggccatggaactgaagggtgctcgaagccgacttagaaagaggcggcccgcggccatcccacccacgattcacacagcgatcacttccgccgagagcactccc

SEQ ID NO: 447479 - DNA, 828 bp, Homo Sapiens
gtgttgttttttagaaaaacagaagcaataaacttaagtaaactgtaggttcaaaatgcttcaggtacaaaagaaaacaatggcaaagtctaacataattaacaaaccagctcttgagcggcagagttctccagggatgagaggggctggggatggaaaggtggttgggagaccacaacatttttctagtttcagaaagtcagggagcccagatcccagcctgaacatcatggtattggttacagattctttacaaaggtgtttacctctctcatgaggtcttcttgtttggttacttcctcagaaaaatcatcattgacatccaacaccagcactggaatgttcatcagagcctcaaagtggagcctgtcactgtacacagacctctcaaagatctgtactggcttcctggcctgtaagagtttctcagggaagggctccagctgtactttcaggcggctcaaaaaggaaaatgtctggaatgtgtaggaccatcgtgctggctcccggtacatcatatccagcaagtttccaagactttgggcagtgcaggctttttgggtgccagcagcctggatattctgccatgttgctacaggttctgtagctacgtgccattctgggtaagttttcgtgagtaacttcacaaacgtggactttcccacagcaatgttgccttcgatggagagccttcggggcccgcgccccgcgtgcaggcctctggaggaggaaacgccctcgagtgggctcttggccatggaactgaagggtgctcgaagccgacttagaaagaggcggcccgcggccatcccacccacgattcacccc

SEQ ID NO: 447480 - DNA, 1133 bp, Homo Sapiens
  misc_feature (1052)..(1088): n is a, c, g, or t
ttttatttttttaacttaagtaaactttattttcaaaatgcttcaggtacaaaagaaaacaatggcaaagtctaacaataattaacaaaccagctcttgagcggcagagtgctccagggatgagaggggctggggatggaaaggtggttgggagacacaacatttttctagcttcagaaagtcagggagcccagatcacagcctgaacatcatggtattggttacagattctttacaaaggtgtttacctctctcatgaggtcttcttgtttggttacttcctcagaaaaatcatcattgacatccaacaccagcactggaatgttcatcagagcctcaaagtggagcttcgttgtcttgtgaataagccaggcttcgtgttggccatgcagctgctctagataggccagctcaattcctttctcctcctccctggccctctggtacagtctcttcaaacaaacctggggagaagcctggaggtagatgaagccatgtaatgtgatccggctggcaaactcccacaggagaaaagaatgccagtcctgatagatatgccactcgatgtcactgagggaaccattttcaaaaagattctttgcaaagatatacctgtcactgtacacagacctctcaaagatctgtactggcttcctggcctgtaagagtttctcagggaagggctccagctgtactttcaggcggctcaaaaaggaaaatgtctggaatgtgtaggaccatcgtgctggctcccggtacatcatatccagcaagtttccaagactttgggcagtgcaggccaatgttgccttcgatggagagccttcggggcccgcgccccgcgtgcaggcctctggaggaggaaacgccctcgagtgggctcttggccatggaactgaagggtgctcgaagccgacttagaaagaggcggcccgcggccatcccacccacgattcacacagcgatcacttccgccgagagcacttccgccctaggtatcgctgctcacccccgctctcgacgaattcgagctcggccgatttggcctgatnnnnnnnnnnnnnnnnnnnnnnnnnnnnnnnnnnnnncgccgccaccgcggtgagctccagttcgccctatagtgatgatca

SEQ ID NO: 447481 - DNA, 585 bp, Homo Sapiens
ggcttttagtccagaaggacctcatctctgcacctcttacttgaggagcaagaggagggaagggagaaagggatgtaggaataagaggatgtggggcactgccaagggcaaggtcaaaaatcagggttgtatctgacttgagtctggacccagggcagcatcagcaggtgaaaatggcaggtttttgtttggaaggtggggggagatgccacaaggtgactccccacctcccttgcctcacagattggcctgttttccctgataaaactcctcccagcggctctcgaagaagcggcgcatgatgtgcccagccttgcctacttcagagtcatcctcgttgaaagtctggcagttgtcaaataccaggagggcatcagccgcaaactcctgtgagctggtgtaccctcccctgagcagccgctcccgcatggtggaaaaatccataggatttttgatgatgcgccggtacccactcaccaaacgtgggttcacaggctctatgaaaggccaggctgcatcatgggacttcatctccatcaggataatctcgcaaaatgtgagatcactgtggtggttccgcatacc

SEQ ID NO: 447482 - DNA, 410 bp, Homo Sapiens
  misc_feature (56)..(56): n is a, c, g, or t
  misc_feature (107)..(107): n is a, c, g, or t
  misc_feature (110)..(110): n is a, c, g, or t
ggcttttagtccagaaggcctcatctctgcacctcttacttgaggagcaagaggangggaagggagaaagggatgtaggaataagaggatgtggggcactgcaaggnaanggtcaaaaatcagggttgtatctgacttgagtctggacccagggcagcatcagcaggtgaaaatggcaggtttttgtttggaaggtggggggagatgccacaaggtgactccccacctcccttgcctcacagattggcctgttttccctgataaaactcctcccagcggctcttcgaagaagcggccgattgatgttcccagcctttgcctactttcagagtcatcctcgtttgaaagtcttggcagtttgttcaaattaccaggggagggcattcagccgcaaacttcctcttgagctt

SEQ ID NO: 447483 - DNA, 432 bp, Homo Sapiens
  misc_feature (356)..(356): n is a, c, g, or t
ctttttggtcttttagtataaacaatatcctttgcatttcattaacttttacttggtgcaactgtattatattttgcataaagatgtggcattcttcaaacacagagacaatttttctcacatttcaaaagggattatagagtaaatgctagcatattgaataataaaacattacttagttccttatctgcacagttcaaaaggaagtttcaaaattatctagttcctataaataggtaaggtatctcaagggtgacctttctgacgaggaaatgagggccggggctgttagtctggaaccagttatctgacatgtgccaaattctggactttcattttcatggatatgtgggggnttatagtttctggggtgctttaaggccccaaacccaaccaaatacgggtgggaaacttttaccccgtgggtttcca

SEQ ID NO: 447484 - DNA, 545 bp, Homo Sapiens
  misc_feature (327)..(327): n is a, c, g, or t
  misc_feature (473)..(473): n is a, c, g, or t
gactgtaactgacaaatttattgaagtcttggaaagagctgatcacccgagaataaataaaagacacagaacattcacagaaccaataggtagctcgagattcaggtttgcgggagtgactttgacttacacacaggccagcctttgtgtctggggcacgcacagctgcgggcatctcccagaaacttcttcccaaaggatctgatggaggaggcagggcagggctcagaggagccccacccttctccagcggggagacttcccaatctggggctggcagagccggctccggcagggagggcaggctgtttggcaacagacatctgntgggtgcagcctggacaccaagggcctggggtggggtgaggaggagaccctgaggggcttagagaattgagcttggagagaaggggcgccaggcatttttgcctcctccacaggatactcgagaacagaatgatctagagacctgnggattggggaaagcttctcccggggaaggtggggctggaggcagagaggccccctgtggtctggggagagga

SEQ ID NO: 447485 - DNA, 747 bp, Homo Sapiens
cccttcttggtatcttctgttttaattttcttaggtttataatcagcatcatcctcatctcgaggtctctttaatggctttatatcctctttaggaggaacaaaatagccatcatcttcaggttcatctttaatttgtggtggactagagaagccattttccttctccttctttatttttgcatccccagaggctcgaaccttttcctcttttcgtttttccttgtctctgtctttatgtttgtctttatgcttttctgagcttccatctttgtgtttggtcttctccttctctttgtgtttcttttcagaatctttatgttcactgttgctatgcttggacttttcccggtccttctccttcttgtgttctttgtgccggtgttctcgatctttgtgtttatctttgtgtttatgagaatcattcaatcggaaatccgcttcgatctgggaatcgttgtggaggtggtccccactcatgtcggcccggagggacgagcgcggcggcaggcgaggcggcgtgggggagacgcagacggcgaaccggcctgtgcgggcggacggggactccggaggctcgaggaggcgcaggtaagcggcggtgactgtgggcccgagactccagaaacggctgaggctgctaccacggcggcgacgctgcctgactgccgggcgggcggcgagaacagaccccagcagttgtgtaacagcctaagttcgcattttttgggggggagagattaattta

SEQ ID NO: 447486 - DNA, 616 bp, Homo Sapiens
  misc_feature (45)..(54): n is a, c, g, or t
  misc_feature (299)..(355): n is a, c, g, or t
  misc_feature (520)..(520): n is a, c, g, or t
tttaatttttttggcagtaatgaatgccatgttggcttttattannnnnnnnnnctaattttaagttccaggatacaagtgcagaacatgtaggtgctatatagataaacatgtgtcatggtggtttgctgcacccatcaacctgttgtctaggttttaagccctgcgtgcattagctatttgtcctactgctctgcctcccctcgacccccacccctcttaaaattctttttatttttcacactgagtcttcaaagtccggtgtgtatcatacagcacatctcaatagccacatgcannnnnnnnnnnnnnnnnnnnnnnnnnnnnnnnnnnnnnnnnnnnnnnnnnnnnnnnnattggacgatgcaggtctggacaagtgcctggtatattgtgggcacaattcttgaatggacccttatcaactcagttttctcccgggtcgtggtgcttgaggcactggatatcccctggttaaacacccacgtgcagtggagcagggaggggacgcgccccttcnggggtgggcgcccaaggcaaggggaggaatgcggcttccacggcctcccctctcgccctcctttgtgcttattctaattcatgaattctaacatct

SEQ ID NO: 447487 - DNA, 1208 bp, Homo Sapiens
  misc_feature (76)..(76): n is a, c, g, or t
  misc_feature (473)..(481): n is a, c, g, or t
  misc_feature (1023)..(1059): n is a, c, g, or t
agagtattccactcccaccgtttgttgtgtttttataaaagaggatgccgccccattattatgtgcggaccacttntttcttcggcacgcgccccccccttttgtgcacccccggcggggccaaaatatatttatatccccacacgggcggtgcaacaagggggggctgaaataatcgcgccactcggaggttatcaccaaaatgttctctcacacacccggtgtatctgtagaagagggtttttccacaatgtgtgggcgcagaaaacatcctttacgagggagtgtttcaagccactgtttttgtggcaaatatatattgccgcgagaggccggggtcgccaagtatattaatagtggagagaggtcacctatcgggcctcccgcgcgtgtatatgagtcccccgggaaaggcccgcccccggagcttcccctctgggagtattgtttctaaagaagccatccggcggttnnnnnnnnnggcgtgttttttgttttgggggcagagctcccgaccccctattttatgacccgcggttttccttggggaacacacctatgagccccgttcccgtcttccgtatggggccccggggccccaaaggaaaagtgttcgaaaaacttttttgagagggcccaaggggcccccaaaaataaaattttaccagggcgagtgagtggggttacagttgtagagtgtgaagttatttcatttatttttgttttctgtgggttctaggctcatcaaggggtggtgtgttcatttttgtaattattttaggccactgggcatttattcacacggagcagcgtggtcctcagtgccccgctggccagcaggcacacagggcacggcgctctgcctgcagcagtagggtctccgtccgcgcgtccaggctgcaggctgtcttccgcaggtcctgcagggcgcgctgcatgaactcgaaggcgtggcagtccacgcatgggcggctctgcgcggggacggcactcccggcgggctcggcgcgggcccgggcgccnnnnnnnnnnnnnnnnnnnnnnnnnnnnnnnnnnnnnggcggcggcggtgacatcggggaccggcacgcgggcgggggggccatggccagcagagggagcggggccgcccgcggttcagggaccccgggaccagcagcgcggggacaccggcagacgttccgcgtccggcgcgcaacgcgcatgcc

SEQ ID NO: 447488 - DNA, 508 bp, Homo Sapiens
  misc_feature (366)..(366): n is a, c, g, or t
  misc_feature (373)..(373): n is a, c, g, or t
tgataaggaactattttttaatgtggatggatggaaccatccataaattattcttacaactacatttggcttctgtgcagcaagaatgtctctgcaatctgtatgacaacagctaagctgatgaagggcagaagtaaagccactgggaggtggccagagagagaacagggttcagcttgcagaggcttaaaaggcacatttctggaaaggaatgcaagtcctacagtacccagaagatgcaggtgcacctctgacactgcaggcttctattgataacccgttctttttatctatcaatttatgtaactcgtacttgtttatattttcaatcagggtttggaagagggaggagggaggtgggagtgnggtggtnatcatggtagaagaaatgtgttctggaaataagccctgaggtgagtaaaggcacacttgcctcgaacaattgaaggtctatgacatgcctggctctgtgcttggttctttggagagtaagtttgaactaggatgt

SEQ ID NO: 447489 - DNA, 540 bp, Homo Sapiens
  misc_feature (383)..(383): n is a, c, g, or t
  misc_feature (395)..(395): n is a, c, g, or t
  misc_feature (397)..(397): n is a, c, g, or t
  misc_feature (530)..(530): n is a, c, g, or t
tttttactgtagattattttttgcgtagagattcataaatatgaattgagggtcacagcttggtagaggggtaaaaaggagaatcctgaaatacgcgaaggggagccccggggtttgggtgcctggatgcttcacggggtatacagtgctctggttgctgcactgccaccactatctactgtttgcggatcatgcccttgatagctgactcccggttgacatatgtggcccaatagaccagattgaatatggcaaagagcacaggaaagatgatgcgggaaattttgtcaaccttgctgacactgttgtaggtcttggtctcagtcgggctgtcctgcacgtaggtggctttgggtgaagcatgatttgttggggttgatgangcactgggagcncncccttggagatggtggacattcagtgtccttggcagggtgatggatagggtggtccaccgatgtgaagggtaggctgctttcttttgtggctgcttggtgtttttcttctcatctcaaggcctctggcacctncttgctttcc

SEQ ID NO: 447490 - DNA, 1183 bp, Homo Sapiens
  misc_feature (160)..(183): n is a, c, g, or t
  misc_feature (231)..(315): n is a, c, g, or t
  misc_feature (339)..(348): n is a, c, g, or t
  misc_feature (544)..(549): n is a, c, g, or t
  misc_feature (551)..(605): n is a, c, g, or t
  misc_feature (608)..(611): n is a, c, g, or t
  misc_feature (615)..(617): n is a, c, g, or t
gtgtgggggggcggtttttgtaggttccaaacacccacattttttggaagggcttctaggggggcccctctaaaaaagaacccctttggggggctgttggattttttaaaatattcccgccacaccccatgttgggaatcccccttgggctccccggggnnnnnnnnnnnnnnnnnnnnnnnntcatttccccaggtagagaaaaaattttttcaggcgcgcccgagggcnnnnnnnnnnnnnnnnnnnnnnnnnnnnnnnnnnnnnnnnnnnnnnnnnnnnnnnnnnnnnnnnnnnnnnnnnnnnnnnnnnnnngggaggtttttcccaatttttgtnnnnnnnnnngaaagtaagggttcctttcacaaaaaattcccaaggtagccagtttttcccagtccgggggtgtgtaaaaagggggggccaaggccctagccttttaatacggcttccctttaaggggcccctttttttcaaaaaaaactggggtacgcgtaaacttgggccccttcgggggattttttagagcgggccccccctnnnnnntnnnnnnnnnnnnnnnnnnnnnnnnnnnnnnnnnnnnnnnnnnnnnnnnnnnnnnnttnnnntttnnngctcatcgtttccatacagttttatttgcaatttgttggaaccatggagaacaatcggcagatacacatgttgcttctgggaacagcattcaactccagatgctttttctgctaaggagcagggccacaggtggccctcacacccagtgctgtgctgcgcggagggctgtactgaaggttctgaaggcctggtgagtccccctcacggccagaaggagagacccggcttcggcttcatggccggcctcccgcaggtgtctgcccagctcctctgcatcccagcgcccttgctggaggctagccaagaggtggtcaacaatacgtggatagaagggagtggagacacacttcaccagcagcttggcatccaggagcagggaaagaagttcttggtcacaattggaatcattcaccgtagtgactgccgtgatttgctccagtgccatctcgtgcagatgctcatctcggctctcgaggagaagtttcagagatggaagcaggagggactggttaagcagcagcagacacagctccttcacaccctctgatcccgagaattccggacc

SEQ ID NO: 447491 - DNA, 454 bp, Homo Sapiens
  misc_feature (305)..(305): n is a, c, g, or t
  misc_feature (365)..(365): n is a, c, g, or t
gctcatcgtttccatacagttttatttgcaatttgttggaaccatggagaacaatcggcagatacacatgttgcttctgggaacagcattcaactccagatgctttttctgctaaggagcagggccacaggtggctccaacacccagtgctgtgctgcgcggagggctgtactgaaggttctgaaggcctgggtgagtccccctcacggccagaaggagagacccggcttcggcttcatgggccggcctcccgcaggtgttcttgcccagctcctctggcatcccaggcgcccttgctgggaggnttaggccaagagggtgggtcaacaattacgtgggataggaaggggagtgggaagacacantttcaccagcagctttggcattccagggagccaggggaaaagaagttttttgggtcacattttgggattcatttcaccttagttgattt

SEQ ID NO: 447492 - DNA, 439 bp, Homo Sapiens
  misc_feature (348)..(348): n is a, c, g, or t
ctttgttatcttgtcttctacaaacttttattgagcacttacttcctgttgggtctaccaaaatgaatgagacaaatttctgttctctgttctcataaatctccaagtgtggtgaaagggacagataggcaagcatacaataataaaatcatggttatcacagattattgtacagagcacaggatggatatctaaccgagcctatggatcaggcttcctgggagaagctactgccttaggtaatttagaaataataagtagaatttagccacatagagaaggcagagaggacagcaatcccggggtctagaggaagcctgacttgttaagtccaattaggagagagtntaagggggacacagaaggaaagcctccattcacagaaagctttgttaggagccttttgtccggtttccccgttaaaggtccttttgaacct

SEQ ID NO: 447493 - DNA, 509 bp, Homo Sapiens
  misc_feature (302)..(302): n is a, c, g, or t
agtgtttattctctttatttataacacttatatttagatttatgtttttaaaatacagactaaagttaatcagtatttctagccttcttcaactgtagttcccaataaccactatctctgtgtcgtcacctcacctctaccccaactcagtttctctatctgcaaaacaggtaatcgtatctacttgtgatttattatgatgacctaataagataacatatataacaggcttgccaaaaaacctggcttcataaatgttaattactgtgtcactgtcacttatcagtttagcttcacacttncttaacatccttattctcataactattacctattttctattttgatgttatctataatttggaatctgtcatcaaccattactgtaacagtactgaaatctagatcccagaaatgttctccatctgtctccaatcttctattattacacctttcctactgtctctaaacctgttacctaatgtcatttcaacacttaatccctgggc

SEQ ID NO: 447494 - DNA, 736 bp, Homo Sapiens
gctttctagaaacgtttttttaatcagtttctccatccaaacaggtagtggaaaagttcttgattatattcaaattaggagtattgcctgtatgttgatacggcagtgtcacagatacctggcggtgggagagacagtaaaaagctggaggtgaagctttggaactcttttatcactgtggtgggtctttctttctgggggtcagaatgtctcagttcttttgaaagtcccatgaaattcagggacttccctccaaggaaaagcacagaatcttgcaggaaattactgggtttttttcacatcattggttgtccatgaatcccaggttgacaatttttgctctaccaggacaaacagtatgtttatgaagatacacacgattcactaatttcaatattatgtgccagggactatgactggactaatttataattctgaacaagaaacatgcgtcccttgtcctcacagaggttaaacgtagtatgggatacagcaacttaggaccaaccaccaaatacactcgtttacaaaatttgtgttaatgttatgaaaggaatattggcaacttgaaagtttgtacacagaactaatttataatgaggattagcagagaagcttcaggtagcattaatgctgaggcctgcaagtgcttagttaagtgaaaagtttggaaactgagtacttgtaggcccaaggaacaacctgttactaagacccagaggacagagctctggcc

SEQ ID NO: 447495 - DNA, 919 bp, Homo Sapiens
  misc_feature (867)..(867): n is a, c, g, or t
ttttggcaaggacacactaattttattttgaaatagggactgcaagggcgggctgtattgagaaggatggccccctggtgtgatgagcttggggcctcatctgctcaccgtgcacgccctggagtcctgctacccagcatgtccaaactaagggcacccccctgggaagggatgcagagacggggagcttctctgtatccccttacaggcaggacagggggctggggtgcagaagcactctggggagacctgccctagctttccagctgggaggaggggacgatctggggtccagcaggctcccgggctggggtccacttcccgttctccctgggagtggagaccgaccaagcctctctgtgggcaggactgaggggtgggcctgtgtctccagatgttgagcagggcctggccagcccctgagggggcatcctagagggaggtggtgggctcctggtgactggtattaatatgtagggggagacctgaggttgcagtcccatcctggtgtccaggtgccatctgggctagggaggcatctcctcaacaggaatcctgagcagggtttagagcacagtgggcaggagggggagggtctggacttcagcagggcctcgtgctagatgatgccatattgggccagctcgtgcagctccaggtggttgaaggcctcccaagggcagatgactgtgatgtctgttcccaggccttccattccagggatgtcgtccccaaacccttgaacgcctttctttgggggcttgctcttgaactgcctggtctgtcgctgcttaaatttagggggccctttcctgggggtgacaggtcccccggccaccctggtggctgaccggaactcagccttgngcggttccaggttcatggtgaggctgacggagacaccgcggcaaccttggct

SEQ ID NO: 447496 - DNA, 518 bp, Homo Sapiens
cggtgtcgacgatgagcatgccgcggctttggaggcgagttacctggtcattgatggacaaccaaggcttgaccggctggggcacccgataacggtatccacaaaagaaatccggcccacttccgagatgactctcggtgcgggccgaacgattgatctgagtgtagcagcggtggtcgcggtgtgccacgcgtctggacagcggcgccgctgcgcgatgtaggttgtggccgcgcaattcgccccgaaaacctacaccggtggtgcgatttgagacgcggcgcagaggggcgccgggtcggcgtcgggggggaacaccttgaacagttccagcctgccgtcactacgtttcaacagtgcttccccggtcctggtgagtgatgtgtccgccgcggcgtcgccacccagcagcgcccttaggtccgtccggtgattgaggcgctggatcaccagttgagggcatttggcggcggcagcttcggcccaaaagcccggttggctgaagatccaaaggtgca

SEQ ID NO: 447497 - DNA, 626 bp, Homo Sapiens
cactgagagctgtatttgaagaacagcctatattctgctaaatttcaatcttcaaattttgatctttttatttattctgaaagtctaagatattaagaatcagtacgtattttaaaataagactgcatatagttagaaaaatatgcttcgagagcttatattttatttcgttaagaaaataaaaccatgtacaaaaatcatttctgttcactcacaccaatcctgttgtttgatctttgtgactaagcaccaccataaagcacgaagctctgaaggaaggtggcggcagagctctctccttaaccccaggctgccttggggtctcatttctcagcttcactggaaagttcgatcactccctggttggagaccgtatttaaaatagcccacagtttggaagggtcctcacagttatgctggtgcttccagtggtggaggaggtcctctttccgtcccagcatctctgcacaaagcaggcagttaaagcctgaatgggaccacaagagaaacgtgtggaggccaggacactcagggccctggcaggtttcccttggcttgttggttcctgactggggtccttcattttccatgagcatttccacgccattctgatgaaggtggagctg

SEQ ID NO: 447498 - DNA, 503 bp, Homo Sapiens
atgataaaaacaaaattttaattgtattcaaaattatctatgagacatttccattattggcaaagtagacttaacttcacatttctgttgcatttttaaaattaattatacaactctcaagataaatgcataaaattataacgtgtgtgtatgaagcctgcatgcagaatttttgtgttgcagttatactgaatttattgaaaacatgcttggagcaatctcttttcacttgctatcatcaaaaggcaaaatataatttctaatttttataacttcacttctagaaatctgtggctaatatgtgaaatatttttaaataccttctttaaaataaaacgtttgcaaatatggtttcttgcaacttccgtgaccaaagtatgacttcacagatttttgaagctgtgagtcaattataggaataaaaaggaattccactcttgatgagtagaagcgttttcccagatgtaaattcttgttcaagctttctgtttgtttgctttgtt

SEQ ID NO: 447499 - DNA, 847 bp, Homo Sapiens
  misc_feature (736)..(761): n is a, c, g, or t
aacaatttacaacgtctttgtttctgctatgcagtgccctcctgctagagatggcaaaaatgtggggagggcttcagagcattctaagcctggtatttctggctggaatttttaaatctcactacaatcctgacaagagaccacgaccttaatctcccacggcatgactggttagtcttgatcgtaagccatataatcaacacccaaatgtgcataacacatctaaataatgtcaaaactacactatataccacgcaggggaccagaaatcaatctttacctcaaaaggataagcttccaggatgcaataacatccccttccacccttttctacaccctaaaacagtaatattcacggtaacagcaaagcggaaatcagcttttcctgaacatgtactgaattctagtcacattcacacacgttaattcatttaattccagccacaaggtaggcagcctctgttaacattttacaattgtgagaacgcaaagatctgggactggctcaaggtgacacactgcagcagggagtcaaaatttgaatccgaagcagtgtccttccccctcgcaacagctgcggggttacaaacacaggtcagccacggagaaattaatgacccacagccatccttgcagctctgcgccataactggggagacaagctggttcccgtgacttttcagtctgttttcacccaagtgcatgactgcgggagcaaagcgaccacgtgagcatnnnnnnnnnnnnnnnnnnnnnnnnnnaggcgagggacagtgccaggccaaggacaagtcacaggtgcaacaacgtgccaaaactggatccggagccccagggcgcaagatct

SEQ ID NO: 447500 - DNA, 530 bp, Homo Sapiens
atgtttaaataattgatttattaggaatctaaggatactgaaataaaatgcatcatgggggggagaacaagaatatacaatgtggcagggtcaaccaaagaagaatttctggatggaaagtttggggaagggaatgcaatggaaaacagaagggatgggtgtggtctctctccagccttggtaagtgccatgaagcagagtggagtatacccgtgctgggatcgtccaaattatcccagagtctacagcttcttgcccacgtaggcagggagcaaaagactaccatggaagcactgcagcaattcacatccttcctatgatgcatgtcctgagcttacaggttctggatgagagttgaggatttcctgtagtcattgggattgtctctactgctgcaaggactgtgcttagaatgactctggttacaaccttggaaatgtctccttcatctgtgagtaacagccaaacccaaaaggatcattcaagcaatgtacacactatgatttttctgaggtaaaggtgtgtggatt

SEQ ID NO: 447501 - DNA, 504 bp, Homo Sapiens
ttttcacagttaaataccatgtttaatcatcccacaatggacagtagtgcagtagtagaaattataagtgtctctttaaaaagtcactcccccaaagtttccattccccaatacccagataaccatggtggaacagggccagggtgagggggactcaggaagtcttggttccaaggagatgaaagtctttccaagtcaaatttgccttgtgagcagccaagagcccaatgagttgatgcatacgcgctcactctaacacgcacacatgcaagggacacagaacacatacagatggagggacagagaggggaccacagcggggccatcgcacacatgcgctctcatgccacaacattccagtccatctggggctatctcctctggggacagggagcggtggcctaagccccgaagcagcaggtgccggtcagatggagaggagggaggccgtctgtccagcctggctgctctgacaagggccctggcagcgagagaggccacccg
